United States Patent Application Publication US 2007/0054278 A1 - sequence listing, part 140

SEQ ID NO: 454327 - DNA, 201 bp, Homo sapiens
gattcctgattgtcctgcttctgtagaaaggtttcaaatgtggccattctatgtagtctattgtttagaatttttaatctgttttataataaagaaaatascttgctttttaggcttatttctctatacataaatcttcaccttatgattttgttgattttttctctatgggattctctccccatttcagctcatttgttc

SEQ ID NO: 454328 - DNA, 201 bp, Homo sapiens
atgcaaatgtcagggtcatttgaaaacttgccaagatctctcttaatctgccttaagttccgtagagaaaagcaaatttggaccttaatgagactatattygccagcctgttgtaggggcaaaagtgcctaaaactaagatttctaggatggaacaaacttagagagaacctggataagggaagtggaaggagatgattcc

SEQ ID NO: 454329 - DNA, 201 bp, Homo sapiens
acacacacacacataaatgcactttgcataaaattcctgtctgaatcattgtcattgattttcactgaaaatgtccacaatataagtaaattccacttagrttcttatgtaaattcttatgattctttactaacaattttccttcatttaccctccatcacttcgtgccttcaaattcttccatttaaaaaattcaatact

SEQ ID NO: 454330 - DNA, 201 bp, Homo sapiens
aacctgggagatggagtttgcagtgagctgagattgtgccactgcactccagcctgggcaacagaatgaaaacccatctgaaaaaacgtataaaaaaaaaagctagattagggttatacttttggggttttgaaatgccatgtcaatagcctgggaatcaatctctcattttattataagtgattatgatttttttcagaa

SEQ ID NO: 454331 - DNA, 201 bp, Homo sapiens
tgtgaggaaatttaaaatgagtgtctggactacatgattgtttaagtcctctctatttttattttattttattttatttatttattttgagacggagtctygctctgttgcccaggctggagtacagtggcgtgatctcagcacactgcaagctccgcctcggcctccatggttcacaccattctcctgcttcagcctccc

SEQ ID NO: 454332 - DNA, 201 bp, Homo sapiens
cagcaaagccctctttgcttatgaacaatggccattctagagctttcagcacttaactgctatgaagttatggtaattccttaggaaacagataagattayggctgttaggattttcagtagcctaaaaaatagatgagtgtattaataaacataatttgacttggcaagggtttttgtttaacatattaccaagagacct

SEQ ID NO: 454333 - DNA, 201 bp, Homo sapiens
gagactgccctctaaattctactgaggattatgtaattaataatggcttactacattatttttcctagagagcaaaattaatattttaacccagaataatwaatgggcacacaaatatcttgatacctgcaagagatatttttccttatttagaggattttttcagctaaaaaaaaatttctaaaaaactttttagaaaat

SEQ ID NO: 454334 - DNA, 201 bp, Homo sapiens
tggattttcactttcaactactgaagccttaagaagaggttatattgtaatcttgaatttaaaataaatggattcacatgtttcatatgcttttggtcatstacatttctccattttaatagtaaaattaaacattattcataatttaccttgttttgtatgtcttctttgggagacttgcttataaaaatcacatcacaa

SEQ ID NO: 454335 - DNA, 201 bp, Homo sapiens
attcttatgtctgtaagatggataatgaggatagaaatgacatgaacctatgttaattttagcaataattcaaatgtgaatcagaaaaataactgaaaatrtgtttgtatcttacactgtgatatattccaataaaatgatacctttgtacttgataattactaatccaatcacatttagaataattactgatctaatcat

SEQ ID NO: 454336 - DNA, 201 bp, Homo sapiens
ttattttaatatatagtcagttttatatatattatatatgaattcctcctttgcacttcttttatttttagactagctggttcttatttatggttttttttgaaaaaagcatttttgatctgatctttagaatgaagcaatttcccaacctgtagtgaaagatattatttaccataaattttccagtattgccaatatatc

SEQ ID NO: 454337 - DNA, 201 bp, Homo sapiens
tctattgctcaagcaatagtatatgaagcattagagtttttgaaataactgtaacattttacagaaatgacagtgaaatatgagctaatataactattagkgataggaaaagcaagtgtttttgctactctcccgaacagatggaaaccagatgcatctgtgggttttttccatacatcaagccatcagttttcctttgga

SEQ ID NO: 454338 - DNA, 201 bp, Homo sapiens
tacagttattttaatatatagtcagttttatatatattatatatgaattcctcctttgcacttcttttatttttagactagctggttcttatttatggttytttttgaaaaaagcatttttgatctgatctttagaatgaagcaatttcccaacctgtagtgaaagatattatttaccataaattttccagtattgccaat

SEQ ID NO: 454339 - DNA, 201 bp, Homo sapiens
aaagagataattctctcttcccagaaactacgtttggcattttagtctaaggcaatgaggatgtgggctggcagcaatatttatttcaacacagtggatargagcaaactgttggaaacaatcaaaatgtccagcaatatgggcagtgtttcagtaagttatatccatgtgaaagtattcgaagtaattttctagagttct

SEQ ID NO: 454340 - DNA, 201 bp, Homo sapiens
ataaattacgtatttatagggagatatctgggctattaaatgaattctacagttattttaatatatagtcagttttatatatattatatatgaattcctcytttgcacttcttttatttttagactagctggttcttatttatggttttttttgaaaaaagcatttttgatctgatctttagaatgaagcaatttcccaac

SEQ ID NO: 454341 - DNA, 201 bp, Homo sapiens
cctctgaagaaaatacaaaaatattttctttgaagtgtattaagttctgtgagtttcagaaatatagaaaatgttctcatgtaagatataaaaaaggttgmaaatgaaggaattagtttgcattgcctgtgtaatcaccttaaagtaataaattaatgaattatctcaaatcaagaatttatggacattcctgtcatattt

SEQ ID NO: 454342 - DNA, 201 bp, Homo sapiens
cctaaaaccataaaaaccctagaagaaaacctaggcagtaccattcaggacataggcatgggcaaggacttcatgtctaaaacaccaaaagcaatggcaasaaaagccaaaattgacaaatgggatctaattaaactaaagagcttctgcacagcaaaagaaactaccatcagagtgaacaggcaacctacaaaatgggag

SEQ ID NO: 454343 - DNA, 201 bp, Homo sapiens
aaaacacttaaatagcataagaggaagtaatgagtatactcttactgtagtccttgtaactcctctgaagaaaatacaaaaatattttctttgaagtgtaytaagttctgtgagtttcagaaatatagaaaatgttctcatgtaagatataaaaaaggttgaaaatgaaggaattagtttgcattgcctgtgtaatcacct

SEQ ID NO: 454344 - DNA, 201 bp, Homo sapiens
atgggtaggaagaatcaatatcttgaaaatggccattctgcccaaggtaatttatagattcaatgccatccccatcaagctaccactgactttcttcacakaattggaaaaaactactttaaagttcctatgaaaccaaaaaagagcccacatcgccaagtcaatcctaatccaaaagaacaaagctggaggcatcacact

SEQ ID NO: 454345 - DNA, 201 bp, Homo sapiens
aattgaaaaaaacatgctagctttatgagctgactagctaaaccaagaagaaattaaaaagaaaaacacttaaatagcataagaggaagtaatgagtatastcttactgtagtccttgtaactcctctgaagaaaatacaaaaatattttctttgaagtgtattaagttctgtgagtttcagaaatatagaaaatgttctc

SEQ ID NO: 454346 - DNA, 201 bp, Homo sapiens; identical to SEQ ID NO: 27567

SEQ ID NO: 454347 - DNA, 201 bp, Homo sapiens
tgcgtgaagaataggaagaaagctaaatgtattaatgtttttgtcagaaaattttctgcagactttttaaagcttctgtttattgaataatagcttaaataaagatgttaaaaatatttgtaaatatttcatattgatattgggccattcaattcaaaattaatttacttcttagtaaaataaaaataaaagaaacagaag

SEQ ID NO: 454348 - DNA, 201 bp, Homo sapiens
aagacaactgtgtattcttaacatgtacctcatttgataaaaaagaaaaaacatgttaaaacatagatgaagaaaatatctattgatgcttttaataaatyctgctagtctagtgcctagaacaaggaagctaaaggtaaaaatatgcactagaaattttgaaatcggggactttgatttcattctctatttaacatattt

SEQ ID NO: 454349 - DNA, 201 bp, Homo sapiens; identical to SEQ ID NO: 27568

SEQ ID NO: 454350 - DNA, 201 bp, Homo sapiens; identical to SEQ ID NO: 27570

SEQ ID NO: 454351 - DNA, 201 bp, Homo sapiens; identical to SEQ ID NO: 27571

SEQ ID NO: 454352 - DNA, 201 bp, Homo sapiens; identical to SEQ ID NO: 27572

SEQ ID NO: 454353 - DNA, 201 bp, Homo sapiens
cctgtttctcctagagagggatctcatctcttaaaatatagatcctatgattatcatgtactgaggaagaaactaaatgaattaactccaatattgtgctccttctattgataaattctgtggaatgtttatctcttgagtaaaagaataatagagtaatagcattataatattctcgtaacttaccactaggctagtaaa

SEQ ID NO: 454354 - DNA, 201 bp, Homo sapiens
ttttaaaatgtattatttgtagttgaattctattgacttgttgtttttgttttaacctttctcaggctgcaaagttggctttcacagtgcaagcctttgaktcccaatgggggactcaggatcaagacgatctaccctggtctcccggttgccaatattcagaagaagtattaacagaagacatgattctcttccttcttc

SEQ ID NO: 454355 - DNA, 201 bp, Homo sapiens
atataaaaatgaaaaataattttttcctcaattataagttcttagttggaccaaaaggcagattaacaagagaaacatagtgtattaacatgtgcactgcwcatgatgtgagagaaacctcaacaaagcagtggcttagaacttctggcttatatagcatcttcaacaaagaacagtaaatttatagagaaattacagaac

SEQ ID NO: 454356 - DNA, 201 bp, Homo sapiens
tgcgctagacacattttaatttgttttacatatgcttttctgaggaaaactttacagcgactccatgagttaagctaggcattttcaacctcatttcctaygaggagaaacagactcaaatactttaatacctctgatatgcctccaataaatggcagaaccaaaatgatttcaaaactcatgcctgtaagtactatgcta

SEQ ID NO: 454357 - DNA, 201 bp, Homo sapiens
tcaccccctaacaaccactgatgctttttcttttccatagtttcgctttttccagaatatcatataattggcattctacagtttgtagccttttcagtttrcctctttcgcttcataatatgtatttaagtctcctccatgtatttacattctttggtagctcatttctacttagcactgaatacaattttattgtctaga

SEQ ID NO: 454358 - DNA, 201 bp, Homo sapiens
gttgtttgtttttttcttgtaaatttggttgagttcgttgtagattctggatattagccctttgtcagatgagtaggttgcgaaaattttctcccattttktgggttgcctgttcgctctgatggtagtttcttttgctgtgcagaagctctttagtttaattagatcccatttgtctttctgtagagaataaactcctag

SEQ ID NO: 454359 - DNA, 201 bp, Homo sapiens
ttagcttactgctccccagagccatttttgatgtttaactgataccacctgtgattgtttacccagtattgatagcctgcaatatgcagagctattttagkaactgaggaaatattagcaatcatcaggcattctaataagtgatacaagtggaagatgttatgaaaaaacagaagaggaacatcacgaatgtaggagtca

SEQ ID NO: 454360 - DNA, 201 bp, Homo sapiens
ttctgccctttcatctcctaatgaggctgatcatctattgcctaaacacaaagggaaagggtatgagagcccactgattaacccattcagttcagtctccygggacggagtgtagagcgcaaggtcaaagaggttttggatatccattagaatttttggccgctgaacgatcatgctatgcctttagttcatgttatagaa

SEQ ID NO: 454361 - DNA, 201 bp, Homo sapiens
taatatcacacaagtaagatcaggattttatttcttaccaagtaacttttgttctgtccataaatattgagctgcttgtgtaagtatttgcaatgcacatyacttttccccctcagtggttgattgttatattaatacagagaaaggaatttccattgtgctgaattacacaagctatttcttttatcttttttttttttt

SEQ ID NO: 454362 - DNA, 201 bp, Homo sapiens
agtttgagtatctcatgtaatttattgaatactgaactgaaattgaaaaacagaatgttgtataggtacttgaagtacgacttctactgagtgtgtattgkttttgctttatattatatagaaaaatcttaagtcaaaccatcgtaagtcggggaccatctgtagtgtggttgcaaatctgtttaaaaggtataaataaca

SEQ ID NO: 454363 - DNA, 201 bp, Homo sapiens
gatcatcatatatgaaattgaaacttgtctacctcgccttccttatctctgttttatttttatccatagcatcatataaatacgcacacacacacacacamtactaaaaaaatttaaatgacaaccaaaaagtcttttccatatagatcaaataaaaataaaatgaaaaattttaatttgtatcaatcattattagaagca

SEQ ID NO: 454364 - DNA, 201 bp, Homo sapiens
gtgctcctggaactgtcatggcgcttgtaggtatgttattgactatgttaatgagcatataggaagatcctaggtgaaacccaggacagatacagtgctawgttgagtccaccagatcttagccagcttggtccatgccctggttttcagggtcttatctgctcctggcttctgcagctatttcggcagtttccttttgct

SEQ ID NO: 454365 - DNA, 201 bp, Homo sapiens
aatttttttaaagaactatattgtttacacttagcacagacagccactaaataaggttgtgcagtgctcaaggaggggactatgggcagctttgtcacatytatacctacactggctcatagctagaatgtaagcactataagtacagggatctcttttctccatatacattaatgatagaatactgccaggcaaatagta

SEQ ID NO: 454366 - DNA, 201 bp, Homo sapiens
atgtttcttctatactcagttttttagggtttttatcatgaaagagtgtggaattttatcaaatgctttttcagcatctattaaaataattatatgtttaktgcccttcattctgttgacatggcatgtcatattaattgatttttgtatgttaaaccaggcttgtatctgtagaatgaattctacctggtcatgacgaat

SEQ ID NO: 454367 - DNA, 201 bp, Homo sapiens
tcactgatgcagcctaagtgcctgaaacattctctggaatataggaggctctcagtgcatatattctagattaaactcagactttcctagcaaaatctttmgtgacttttttatgtgataaaataccctgttgtaagctctcataagaccaaatactgctcatttttagctcttgtggcaattacacgtttacattcattg

SEQ ID NO: 454368 - DNA, 201 bp, Homo sapiens
atagtatggacattttaacaatattgattcttccaatttatgaatctagaatatcttttcatttttgtatcctcttcaatttattttatcagtgttttatrgttttcattgtagagagctttcatttatttggttaactcctaggtatttatttttgtttatagctattgtaaattggattactttcttgatattgcaatt

SEQ ID NO: 454369 - DNA, 201 bp, Homo sapiens
aaataatccttttaaatctctttataccagacagactatagccagaacaaatagctgaaacttctggcttttaagccatttttttttctttcctcaaaggkgttttctcaagtgaaaccaataagcatcactaaggttttctgacttaaccacagatgcacaagatgacttcggagagatgccaagcatctagaatcaccg

SEQ ID NO: 454370 - DNA, 201 bp, Homo sapiens
tttttatgtgataaaataccctgttgtaagctctcataagaccaaatactgctcatttttagctcttgtggcaattacacgtttacattcattgttattakaatttgattgtgagccactggaatacagactctaattgggtagggatcttaccacttttgcatgcattttctgagccccacacagagtctggcaaataaa

SEQ ID NO: 454371 - DNA, 201 bp, Homo sapiens
attttgttctttttgctcaggatagctttggctattctgggtcttttgtgattccaaatttataaattttaggattgtttttaatatttttgtgaaaaacrtcaatttaatctatagattgctatttttatttttatttttattaatttaatttaattaattaatttatttattttgagatggaatctcgctttgtcgccc

SEQ ID NO: 454372 - DNA, 201 bp, Homo sapiens
tcgacattgggaaggttttttacttccctcatgcatacatatatgtgacttgaccaaatttagaaggtttttgaagggaacagaaatcacagattacctgsaagcaagcaatttcatgagatggcaccactgaaatttatttcaattttttccctcctaaaaacaaggcgattttcttcaatgactataaggttaacaaaa

SEQ ID NO: 454373 - DNA, 201 bp, Homo sapiens
gaatatctttccttgatatctcatagtaaacttcggaacatttaaaaagatttttgtaaaagctaggataactttttcaaactattttccctaaaacatartttcctttaaaacaagaatttcactgtcaaatacatttggaaagtgttgtaaacaatattttcctctagggaaattcaaaatacacattatgcctaaaag

SEQ ID NO: 454374 - DNA, 201 bp, Homo sapiens
ttttttattcattatcaaatctgcttttaactttttatcagaagcagaacactagatttaaaggctttccaaagcctaatgagtaagtccagtgttctctmtgtgaatattgcatacttaaggctgtcatgttttgattaagcataagctttaatagatttgctggaataattattaaaatatttgaagacctacatttca

SEQ ID NO: 454375 - DNA, 201 bp, Homo sapiens
ttgaatttttctgattgcctaaaagactgcctagtgactagttcttcgggactggccattgtctccatgtctaataaggatctattagacaaaagtttttytaagtctagcaagagctcagttattttcctctcaaattctcacctcatatagcaaagtgtaaaataaagtgacaataagaaaaatggtaaaaatgtgtaa

SEQ ID NO: 454376 - DNA, 201 bp, Homo sapiens
atttaagggatggtgtagaaacttggggtgagcgttagaagagctagtatgtactaccccagggcctgaaggagaagcaagttgttggagctgagaaggaragggttatagagggcagacttccttatgagagccttatgaatctcttcagttgagggtcacactcagctagagcaaatccaaataaagggaaacaggaaa

SEQ ID NO: 454377 - DNA, 201 bp, Homo sapiens
ctcctaatgaggctgatcatctattgcctaaacacaaagggaaagggtatgagagcccactgattaacccattcagttcagtctcccgggacggagtgtaragcgcaaggtcaaagaggttttggatatccattagaatttttggccgctgaacgatcatgctatgcctttagttcatgttatagaatcttttattttagg

SEQ ID NO: 454378 - DNA, 201 bp, Homo sapiens
aaagggaaagggtatgagagcccactgattaacccattcagttcagtctcccgggacggagtgtagagcgcaaggtcaaagaggttttggatatccattaraatttttggccgctgaacgatcatgctatgcctttagttcatgttatagaatcttttattttaggcaaaatggggaatctttgaagtggtgtgcttttgg

SEQ ID NO: 454379 - DNA, 201 bp, Homo sapiens
tgcaatcaaactagaactcaggattaagaaaatcactcaaaaccgctcaactacatggaaactgaacaacctgctcctgaatgactgctcggtacataackaaatgaaggcagaaataaagatgttttttgaaaccaatgagaacaaagacacaacaaactagaatctctgggacacatttaaagcagtgcgttgagggaa

SEQ ID NO: 454380 - DNA, 201 bp, Homo sapiens
acctacatttcatactggaaaggtcagaaagataaaacatacattagcggataaattcatatgagataagttttagaaaaattaatttcatggtatttatgactttttggagtgatagtttgttgatgcctattgttaatgccaatacaatgtgacacaattaaataaaataaaataaaaaaaagaaaaaaaaaggtgaag

SEQ ID NO: 454381 - DNA, 201 bp, Homo sapiens
cctacatttcatactggaaaggtcagaaagataaaacatacattagcggataaattcatatgagataagttttagaaaaattaatttcatggtatttatgactttttggagtgatagtttgttgatgcctattgttaatgccaatacaatgtgacacaattaaataaaataaaataaaaaaaagaaaaaaaaaggtgaaga

SEQ ID NO: 454382 - DNA, 201 bp, Homo sapiens
ctacatttcatactggaaaggtcagaaagataaaacatacattagcggataaattcatatgagataagttttagaaaaattaatttcatggtatttatgactttttggagtgatagtttgttgatgcctattgttaatgccaatacaatgtgacacaattaaataaaataaaataaaaaaaagaaaaaaaaaggtgaagaa

SEQ ID NO: 454383 - DNA, 201 bp, Homo sapiens
tccgagggtggctagagaacagatacaccaaacatcgtgaaggtgcctagaaactctaagactctaggtccttggattgtagggcttcagcctagtatgaygtgtctcctagtgagtggtaggacctgggaaactcctattggtatttgtgtcatgctaagcagaattgacttagaaaagttagttacaataacatcttat

SEQ ID NO: 454384 - DNA, 201 bp, Homo sapiens
ttgttacatgtctcatagttttcaataaggctgtaggttaggactttcagaagatttaaataaatggtattggaaactggaggaaagataatccttgttawatagtatcagaaagtttaacaacaacattgattaaagtaaggcagaaaatagaaaatgtgcctaaaagactggacgatttgcctaaggagatgtcttagc

SEQ ID NO: 454385 - DNA, 201 bp, Homo sapiens
ttaaaaaaatacattttacctgagcaaaatcttatagaatttgatggtttctctctttgcctcagcactgatatattttaaaacaaattggttagtttttyttatgaaatagtatttcttgtttttttttaaatgaaccttgcagttatttagcttgtttacattggcattataaatattatttaatgtagtgccatatag

SEQ ID NO: 454386 - DNA, 201 bp, Homo sapiens
tgctgacattctgtgtacgacacagtatgttatactatggagtgaatgaaggatattgttttttttttaattaaaaaaatacattttacctgagcaaaatyttatagaatttgatggtttctctctttgcctcagcactgatatattttaaaacaaattggttagtttttcttatgaaatagtatttcttgttttttttta

SEQ ID NO: 454387 - DNA, 201 bp, Homo sapiens
gcacctgcttctatgtgagcaccaaaaatattttagatccatcaattcatagtttataaaacactaaatttcatgtcatttttgcttgtttcccaaatttyttagaaattacctaattaaaaatctttctttataagtatcttcttttttgctgacattctgtgtacgacacagtatgttatactatggagtgaatgaagg

SEQ ID NO: 454388 - DNA, 201 bp, Homo sapiens
gtgaaatcccgtctctactaaaaatacaaaaaaattagcctggcgtggttgtgggctcctgtagtcccagctactggggaggctgaggcaggagaatggcrtgaacccaggaggtggagcttgcagtgagcggagatagcaccactgcactccagcctgggctacagaccgagactccatctcaaaaaataaataaaaata

SEQ ID NO: 454389 - DNA, 201 bp, Homo sapiens
gtggattgcttagccattaagttttttatagttttctgaggactaaacctgaacaaaattgatgttgttaattttaatgtgctcattctatccttttctaycttttccctctggcattctccctgatttcttgcaaacatctaatcacttcctatctcatctgcctgacatctccctttgttagccttggtaaaatgctcc

SEQ ID NO: 454390 - DNA, 201 bp, Homo sapiens
taaatggattaaaatatgaaatatggataagacttatcttcaaaaggtttacgatactatttgatctaaaagaataagcaaattggaatgatacctaaatkacagatcactgaaaagcaaatgggaaaacaataggataaacatgaaaatatgtatttctcaacttgataactaagtacagtttatcagctgttgtcatac

SEQ ID NO: 454391 - DNA, 201 bp, Homo sapiens
agctccacctgcctttcagatcagctgcggcattagagacccttaggagcgctaaccctagtgtgaactgcgcatgcgaggtttgaatgctccttatgagrttctaatgcctgatgctgtgtcacattctcccatccctcccaagatgggacatctagttgcaggaaaacaggatcagggctcctactgattccacattat

SEQ ID NO: 454392 - DNA, 201 bp, Homo sapiens
gtgaagcaaaaacaaatgtagacaaggtctgctgtaagcaattttataggctacttggtgtcacacaggtactaagtgataaagcaggatcccagcccagrtctgccagggtccattgcactccttttcctctaatccacactgctttgtgagctacaggcctgtataaatgccactatctgatttgtatattctatttct

SEQ ID NO: 454393 - DNA, 201 bp, Homo sapiens
tatttgtagtagagacaggatttcaccatgttggtcaggctgatctccaactcctgacctcaggtgatcccaaagtgctgggattacaggcatgagccacyatgcctggcctcttgctttcttttttgtggctgattttatgtagttgtatgttttacttttttgctttttattttttgtgtatctactataggattttgc

SEQ ID NO: 454394 - DNA, 201 bp, Homo sapiens
gaggggtgattcagttatgaggttggagccctaataaattagattagtgcccttataaataaaccctacagagctgcttatttccttccaccatgtgagcrcatagctagcaggcaccgtctatgagccagaaaatgggcccttaccagatattgaatctgccagtgcaatctgcttatgtctcaatctttttttttttta

SEQ ID NO: 454395 - DNA, 201 bp, Homo sapiens
gtccatctctcaaggctctccatcttgtgctgagtggctacagctcctgctgtctgctggtccaggagagagcagggccaccactgctgcaggactgaggygcatctgatccatccacccccttgcctgttgacctcttccaagaccacctgcctggctgctcccacaggagagtgcctacagcacagattccaccgcccc

SEQ ID NO: 454396 - DNA, 201 bp, Homo sapiens
tctactaaaaatataaaacattactccagcgtggtggtacacgcctgtaatcccagctactcagaaggtcggggcatgagaatctcttgaacctgggaggygaaggttacagtgagtcaggatcaagcaatgttaatgggcagttgaatcaattgaatttatacttccctgtgctagggttagacttcccccaaacagaaa

SEQ ID NO: 454397 - DNA, 201 bp, Homo sapiens
gtgcataaaaggcactcagtaaatatcttcaaattataaataataataataatttaaataaaatagaatatcataatgacattttggtgttttttttgtgktatattaaccaaatcatttccagcaaacgacagctacataaataaaactttaatataataatttctccctccaaacatcacaaacttttaatgtctgatg

SEQ ID NO: 454398 - DNA, 201 bp, Homo sapiens
tcatttcagttcactatttttgctatccgcataaacctttagtgagtctttcaaaagatatgaccaagtccaaccctcattcatttaacataatgattctsaatcctattggcaaatagtgacctgagatactttttaataaaaggcgtatgaaaggagaacaattgatttgcaggtatttttccctgtatctactatgca

SEQ ID NO: 454399 - DNA, 201 bp, Homo sapiens
aaaaacaaattaaaatgttaaattcaaggacacagtgctttgaataaaagcctcagataatgtgaacttgataagctcatcagatataaatgaaagatctkgcataaatgatagatttcgtgacttgggggactaaagaagttttaaaatgcatctaatactaagcactcttttggagaattaatgtaaaaactaaatcat

SEQ ID NO: 454400 - DNA, 201 bp, Homo sapiens
aacctgtattagtaagagcttcgccatcctgttctgtggatgtaacagaacgggcaggaagctctttacaatctcctttgctttctgctgatcttaccacmgctcagacaccttcagaatttttagccttgactgaagattctgtgtctgaaatggatgcattttctaaaagtggaagcatggcatcccactgtgacaact

SEQ ID NO: 454401 - DNA, 201 bp, Homo sapiens
ccgaaagtatttaatagagacttgtgagaaatttgctcatttagaatttcaagttcttgttttttactattttctctcaaattgttatctactgcctttamgtttttgtctctttatacaccactccctggttcatcactttctccttattccttttgcttttgttcactcgctttttaaatttcatccacgattcaattt

SEQ ID NO: 454402 - DNA, 201 bp, Homo sapiens
gattaaatttccaacacaggaacttgagagtacacatttaaaccatagcaccagtcatgctgttagcatgtggaattacatcactgtaataaatacctgawccaaactttaaatgtaccgtcaatgttacacaagcctctatgtatcatcatttttctctcttttgctttatagaataaaacaaatatttactttcctcaa

SEQ ID NO: 454403 - DNA, 201 bp, Homo sapiens
gggattcttgatctcattaatggcctggaattgcatgacaagcttttccatttagacaattaacatattaatccacttcatgtagtatccatctgcttatrtataatttttcagaaatattttccatacctccttgcactcatggactgtagctattttcaaaagcaatataatcactagatggtgtaaaacactaatata

SEQ ID NO: 454404 - DNA, 201 bp, Homo sapiens
gaactggatgaagatgatctaatgcttgatcttgaatttttagaggaacagagtcttcacccttctggtaagtgttaaagagatgaataatatcatacaaytcctaccctggtcagtagctttcactgatagcctaaacactgttaaggctgccttctatcttttcaggcctcagtttttatagtctatatgcaaagaaca

SEQ ID NO: 454405 - DNA, 201 bp, Homo sapiens
gtgaattagttttatatgaattgcaatcttttcagaaaagaaataatgtaggctttttctggtttggccttttgttttttttttaaccccccaaggagccmcagtagaaaatgaaaaacatagatctgtaaaggaaatggcattttctaaatactcttttctccctgtataaacacattgattgttagtttttaaattgct

SEQ ID NO: 454406 - DNA, 201 bp, Homo sapiens
gaaacttacctcactcttagtgttcagggtttttatggggagtcatgtacttaagtatgcagcgtctgtgtgactgacctcagctactctgctgctttgarctcccctaccctcaagagcaaaaataagcattcactgtaaatcatattgttagtgtaaactatctgatcaaaccagtattgtggcttaaggcctcagacc

SEQ ID NO: 454407 - DNA, 201 bp, Homo sapiens
atcgacttgtactttgagtagcttcctcctctacttctcccaagtatctatcttggcttttttgtattctgttcttactgtttctgttcaggtcactttarattgtactccctcccaggagttactttctagtgtgggactttggctaaaaagagagctaggttttttagttttgagattttacagggttgagggtctcct

SEQ ID NO: 454408 - DNA, 201 bp, Homo sapiens
tcctgacctagtaacccgcccgccttggcctcccaaagtgctgggattacaggcgtgagccactgctcctggcctctctctgttttatctgctattctcarattgtctcactgtgcttcccataattctctgatcagatggactctaagggccatcagaagcctgaatgccttctgctctctttgcataattgcagatacc

SEQ ID NO: 454409 - DNA, 201 bp, Homo sapiens
acccgcccgccttggcctcccaaagtgctgggattacaggcgtgagccactgctcctggcctctctctgttttatctgctattctcagattgtctcactgkgcttcccataattctctgatcagatggactctaagggccatcagaagcctgaatgccttctgctctctttgcataattgcagataccttccagattttgt

SEQ ID NO: 454410 - DNA, 201 bp, Homo sapiens
ggaaacaatatttttcaacattgtgttctttcttcgagagcttagcatcccctaaatatgagaatcatctacttaaggaacttgaaattcctgagaagacmcaaaacatgtatatataaatatactacaatacatcagcaaatagtcattctttttcaggtttaccttattttttattcattatcaaatctgcttttaact

SEQ ID NO: 454411 - DNA, 201 bp, Homo sapiens
cctgggaaactcctattggtatttgtgtcatgctaagcagaattgacttagaaaagttagttacaataacatcttataagcaaggtttatcatttaaagawatatatatatatatatatatacacacacacacagacatatatacacacacatacacacacatactagcatattctttatcaataagtgattactctgtac

SEQ ID NO: 454412 - DNA, 201 bp, Homo sapiens
atttgtgtcatgctaagcagaattgacttagaaaagttagttacaataacatcttataagcaaggtttatcatttaaagatatatatatatatatatatayacacacacacacagacatatatacacacacatacacacacatactagcatattctttatcaataagtgattactctgtactattttcaaacttcagaata

SEQ ID NO: 454413 - DNA, 201 bp, Homo sapiens
tgccctccagttttactaaattttagtttgttccctgaaaatgactctggttcttgcttgcaggcctcagagcgcacttttctatcagccacagtactttyttctatgcccagccttccccttcccatcttttgcttggcacctaagcatttttcatgtctcaattggtcccctgtgcatcctttaggtttcactttctct

SEQ ID NO: 454414 - DNA, 201 bp, Homo sapiens
atatacacacacacacagacatatatacacacacatacacacacatactagcatattctttatcaataagtgattactctgtactattttcaaacttcagwatatcaaagttcaaaagaatcgtttgaaagagtgagggtaagaggttttaatatgtagttttctgagccttgttcttagactctgaatcaagattgagtt

SEQ ID NO: 454415 - DNA, 201 bp, Homo sapiens
gaaattgaaataagacacagatacattttattttttatttatttatttatttgtgacagagtctcactctgtcacccaggctggagtgcagtggggcagtytcagctcacggcagccttgacttcccagaatcaaacgattcttctgccccagcctcccaagtagctgggactacaggtgtgtgccaccacacccagctaa

SEQ ID NO: 454416 - DNA, 201 bp, Homo sapiens
ttacatatgttgaactatcctttcatcactaggatgaatccctcttgattttttttttttttttgagacagtcttgctctatcacccagggtggagtgcaraagcgcaatcttggctcactgcagcctctgcctcccgggttcaagtgattctcctgcctcatccctagtagctgggactacaggcacatgccaccacggc

SEQ ID NO: 454417 - DNA, 201 bp, Homo sapiens
gctcactgcagcctctgcctcccgggttcaagtgattctcctgcctcatccctagtagctgggactacaggcacatgccaccacggccagctaatttttgwatttttttttttttttttagtggaccatgttagtcaagttggtctcaaactcctgacctcaaatgatccacctgcctcgacctcccaaagtgctgggatt

SEQ ID NO: 454418 - DNA, 201 bp, Homo sapiens
ccgggttcaagtgattctcctgcctcatccctagtagctgggactacaggcacatgccaccacggccagctaatttttgtatttttttttttttttttagkggaccatgttagtcaagttggtctcaaactcctgacctcaaatgatccacctgcctcgacctcccaaagtgctgggattacaggcatcagccaccacacc

SEQ ID NO: 454419 - DNA, 201 bp, Homo sapiens
tcctgacctcgtgatccgcccatctcggcctcccaaagtgctgggattacaggcatgagccacagcgcccggccaccttttattctttgtattttacttgkatcaattgtaacgtctcctttcatttatttgagtcttctgtcttttctgttagcttagctaaaggtttattggttttgcttacttaaaaaaaaaaacaaa

SEQ ID NO: 454420 - DNA, 201 bp, Homo sapiens
catgatccacccgcctcggcctcccaaagtgctgggattacaggcgtgagccaccgcgcctggcccgaaacacattaatttttaaactaaatttgtagggkgttatcagcattgtgaggaccggaataacatctgctttcttccctactgtgtaccagaactcagcacaattctcggtgcataaaaggcactcagtaaata

SEQ ID NO: 454421 - DNA, 201 bp, Homo sapiens
tcagttattgaaaaatcagatatcaactcaattacttatatatgatctataaagtgtagccattgaaaattatgggtgtgtctatgtattagtttcctaargctgtcaaaaaaagtactacaaacaaactgagtggcttagacaatggaaatctattgtcacagttctagaggctagaattctgagatgaaggtgttggta

SEQ ID NO: 454422 - DNA, 201 bp, Homo sapiens
tttaaagcattggtactaatgatacaagaatgcaaatcataatctacatatttttagtgcttataaagtatataaatattatgttgtctattaaaaaaagmttgactttttttaatcaataaaataaataatatcctagctacttaaaatgatttatatttttaaattataaaactaagaaaaaagggtaatacttgtttt

SEQ ID NO: 454423 - DNA, 201 bp, Homo sapiens
atttcttcttgtgctatggactttttaatgagtcctcatattcagaaagccgtagaagtcaagtgggtagttacttaatgttggctaggcagttgatttaytgagtctgcaatagatgctaactttccctggttgattgggagaaaaagtcaatggaaagtaacaaagaaagcttcattacatttctttgctattcataca

SEQ ID NO: 454424 - DNA, 201 bp, Homo sapiens
gggctatgaactataacatttgagattgttgcctctagcagctagaaataaatcatatctatactggacaacatttctttagattactttaaataaaaatmattttcattgcttttataaaagaatcaattgcattattataagtgcaagttaatttcacaagttgtttatgagtaaattttatagaataaggaagttttc

SEQ ID NO: 454425 - DNA, 201 bp, Homo sapiens
aattattaagcatctgtcatgaattaggtaccttgctaactaactactttatatattttaataatccacaattgtagtgtgccagagttggagccttcaasttttagtgattaattgaaaagcacaacttatttcttcttgtgctatggactttttaatgagtcctcatattcagaaagccgtagaagtcaagtgggtagt

SEQ ID NO: 454426 - DNA, 201 bp, Homo sapiens
gggtagctgtaccagtttcttaacacaagcatcaagtttccaccctgattcactcacaagagatttttctgtattatgttatcatttgatagcatttaacygacacttgaacttctttcaaaattggagtcagtcctcttaaaccctgctcctgctttatcaattgtttaggtaatattctaaattctttgttgtcatttc

SEQ ID NO: 454427 - DNA, 201 bp, Homo sapiens
tgttctcatagtagtgaataagtctcaagagctgatggttttataagaggtttccccttttgcttggctctcatttctgtcttgcctgccgctatgtaagmcatgccttttagcttccaccatgatggtgagctctcccaagccacatggaactgtgagtccattcaacctctttttctttataaattacccagtctcagg

SEQ ID NO: 454428 - DNA, 201 bp, Homo sapiens
cctccagttttactaaattttagtttgttccctgaaaatgactctggttcttgcttgcaggcctcagagcgcacttttctatcagccacagtactttcttytatgcccagccttccccttcccatcttttgcttggcacctaagcatttttcatgtctcaattggtcccctgtgcatcctttaggtttcactttctctgga

SEQ ID NO: 454429 - DNA, 201 bp, Homo sapiens
tgttccctgaaaatgactctggttcttgcttgcaggcctcagagcgcacttttctatcagccacagtactttcttctatgcccagccttccccttcccatyttttgcttggcacctaagcatttttcatgtctcaattggtcccctgtgcatcctttaggtttcactttctctggagaggcttatgaatagcccccaaata

SEQ ID NO: 454430 - DNA, 201 bp, Homo sapiens
aaactttaaaattattatttccattaacagatgtgaaattattatttccattaacagatgtgaaaattgtttatagtaatggtttaaaacaattcttaccmcaaattcacattttcttttactcttcccagctacaagttagagttggattatctacattacgaagagaggaaagtgattgtaaaactagactttatttca

SEQ ID NO: 454431 - DNA, 201 bp, Homo sapiens
tttcttcattgatccattggttgttcatgagcatgttgtttaatttccatgtatttgtgaattttttgaagtttcttccgttatttctaattttataccgkgtcatcagaaaatatatttgatacaatttcaatcttattaaagttgttaaaatttgttttgtggcctaacatgatctgtcctggagaatgttccaggtgc

SEQ ID NO: 454432 - DNA, 201 bp, Homo sapiens
ttaacattcgctttatatgtttaattgctatgctgttgggtgcatatatataattcttatattctcttgctgaattgacccctttatcatgatataatgaygttcttgtctctttttacactttttgacacattgtgtattttatctgatttaagtttggttatttctactctcttttggtttccactgcaggaatatatt

SEQ ID NO: 454433 - DNA, 201 bp, Homo sapiens
tgttggtcaggctgatctccaactcctgacctcaggtgatcccaaagtgctgggattacaggcatgagccaccatgcctggcctcttgctttcttttttgkggctgattttatgtagttgtatgttttacttttttgctttttattttttgtgtatctactataggattttgctttgtagttaacatgaggcttacaaaaa

SEQ ID NO: 454434 - DNA, 201 bp, Homo sapiens
gggattacaggcatgagccaccatgcctggcctcttgctttcttttttgtggctgattttatgtagttgtatgttttacttttttgctttttattttttgkgtatctactataggattttgctttgtagttaacatgaggcttacaaaaacatataactggttatgtaaagctgataacaatataactttatttcaaaaac

SEQ ID NO: 454435 - DNA, 201 bp, Homo sapiens
taatgatacaagaatgcaaatcataatctacatatttttagtgcttataaagtatataaatattatgttgtctattaaaaaaagcttgactttttttaatyaataaaataaataatatcctagctacttaaaatgatttatatttttaaattataaaactaagaaaaaagggtaatacttgtttttaatatcaggtcacac

SEQ ID NO: 454436 - DNA, 201 bp, Homo sapiens
tctctcaaggctctccatcttgtgctgagtggctacagctcctgctgtctgctggtccaggagagagcagggccaccactgctgcaggactgaggtgcatytgatccatccacccccttgcctgttgacctcttccaagaccacctgcctggctgctcccacaggagagtgcctacagcacagattccaccgcccccatct

SEQ ID NO: 454437 - DNA, 201 bp, Homo sapiens
tttttaatcaataaaataaataatatcctagctacttaaaatgatttatatttttaaattataaaactaagaaaaaagggtaatacttgtttttaatatcrggtcacacagaagaatatttttttcgcatgctatattacaggtgtgtcattgttcaaatcatctttttttgtacagaatctgaaatactccaactaatat

SEQ ID NO: 454438 - DNA, 201 bp, Homo sapiens
ttttcctacaaccacatactttgatctctaagttggtttctgttgctcttgtgaatgtagttttcttgggtgtatagttactcaaattggtatttctgcaragagaaagttgctggagggtcctacttcacccctccccctcatatttttaattttaaaagatattccttcatatgtattttgctattgtattttttaaag

SEQ ID NO: 454439 - DNA, 201 bp, Homo sapiens
ctcttaccaggcagaatattccaagggctcagagctcatttcctaggagctggcccagggccagtgctgcagacagccttttcctgggaatatgcagggtytgagcaactttggtctgttgagttaacctttatgttgcaaattatatctcaaaatagtcaagaacaaaagcataaatatttgttacaaactctttacatt

SEQ ID NO: 454440 - DNA, 201 bp, Homo sapiens
tgttctttgaaagagaacttgttgtaaatgaagatggatttagacaaaaaaatagcttcatatcagtacagagccttgatttttagaggaaaggaatgactttttttttttgtgattttttcacaagagtggtagcaacgtaccatgtgtagattactttgataggaccaagcaggatagatattatcaaaggaggaccaa

SEQ ID NO: 454441 - DNA, 201 bp, Homo sapiens
tatgaaacaattgatatagacccaggagtactggattatatcttcctagtaatgttttgttattttatttttttttttagacagaatcttgctttgtcacytaggctggatggagtacagtggcgtgatcatagctcactgcagccttgagctcctgggctcaagtaatcatcccacctcaacctcctgagtagctggggc

SEQ ID NO: 454442 - DNA, 201 bp, Homo sapiens
ctgttttggtaccagtaccatgctgttttggttactgtagccttgtagtatagtttgaagtcgcgtagcatgatgcctccagctttgttccttttgcttaraattgtcttggttatatgggctccattttggttccaaatgaaatttaaagtagttttttctagttctttgaataaagtcaatggtagcttgctgggaata

SEQ ID NO: 454443 - DNA, 201 bp, Homo sapiens
ggaagatggtgtagcgattcctcaaggatctagaatcagaaataccatttgactccgcaatcccattactgggtatacacccaaagggttataaatcattytactataaagacacatgaacgtgtatgtttattggaacactattaacaatatcaaagacttggaaccaacccaaatccccatcagtgatagaccggataa

SEQ ID NO: 454444 - DNA, 201 bp, Homo sapiens
tctaggaagtccttaggtttccagcctccaggttctattctcctgcctcgatagaggctctttaaattcacgaaaatcattagcccttttgcactgtatatattattgttgtatattttccctgggtgttatattcatattgccttcctttacacccgaattctgcttggatgcgtctcctctgtgttcttaaaacaagac

SEQ ID NO: 454445 - DNA, 201 bp, Homo sapiens
ctaggaagtccttaggtttccagcctccaggttctattctcctgcctcgatagaggctctttaaattcacgaaaatcattagcccttttgcactgtatatattattgttgtatattttccctgggtgttatattcatattgccttcctttacacccgaattctgcttggatgcgtctcctctgtgttcttaaaacaagaca

SEQ ID NO: 454446 - DNA, 201 bp, Homo sapiens
aacatatttataaaaaatttattctaaacatatggaaggaattctggattaaccttcataatatatttgaaatacgatatgttggaaattaactgggcttrgcttgtattcctagtttgggctctgagacacgattgaaataattaatttcaacaaagaatatagaaagtatgaacatgtgttggctttcaaaatgtgaac

SEQ ID NO: 454447 - DNA, 201 bp, Homo sapiens
ctgattttcatagcaatggtattcataatagctcaatgtggaaataatgcaaatgttcatcaattgattaatggatttaaaaatatggtatattcatacgrtaaaacattattcatccatgaaaaataaaacactagaacatgaagtaaacttgaaaatacgcaaagtcaaagaaggcagagagaaaaggccatatatggt

SEQ ID NO: 454448 - DNA, 201 bp, Homo sapiens
tttaatacaacagggtgtacattcgtaagtgtgaataacattttgaaatatcttattttttaacataatttttatatttccagtaaattcagccaccaccrtacctatttcctattttatataacttgaggcaccttgatgcttcatttttcacaaattgtttccttattgagtgatatgcttttatatttatttaaaact

SEQ ID NO: 454449 - DNA, 201 bp, Homo sapiens
agttcactcaagatttggctctctgtttgtctgttattggtgtataggaatgcttgtgattttcacacgttgattttgtatcctgagactgctgaagttgsttatcagcttaaggaaattttgggctgagatgatggagttttctaaatatccaatcatgtcatctgcaaacagagataatttgatgttctgtcttcgttt

SEQ ID NO: 454450 - DNA, 201 bp, Homo sapiens
tcgacagattaaatgcaatttctatcaaaataccaccatcatttgttcacagaattagaaaaaacaatcctaaaattcatatggaaccaaaaagagcctgwatagccaaagcaattgtaagcaaaaagaacaaatctggaggcatcgcattaccttccttcaatttacaaggctatagtagcccaaagagtatggtactgg

SEQ ID NO: 454451 - DNA, 201 bp, Homo sapiens
atatctgcacgccgtgttcattgcagcattcttcacaatagctaatatatggaaacattctatatgtgcaccaatggataaacagataaagaatatgtggyatatattaatgtaatgaaatactatttagtaataaaaaagaaggaattctgccatttgcaatcaattgagtgaaacttgagaacattatactaactgaaa

SEQ ID NO: 454452 - DNA, 201 bp, Homo sapiens
ctattcagagtggctgagtcttcaaattctctcttcaggtaactaaattttattgcatgcttgttaagtggcagttattgttctaatagaaggccttttaygtatatgtacttaatcttcactaaaatctcatgagatagaaactctaaaactttaaaattattatttccattaacagatgtgaaattattatttccatta

SEQ ID NO: 454453 - DNA, 201 bp, Homo sapiens
atacacacatgtattatatatcacatgtatataaacgtgtgtatatattacatgtgtacatatcacacgtataatacatgtgtacatatcacatgtgtgtrtatcacatgtataatgcatgtgaatatatcacatgtgtatatatcacatgtatatatgtgtatgtatatatatcacatgtatatatacacacatgcatat

SEQ ID NO: 454454 - DNA, 201 bp, Homo sapiens
agaattaattattgtcctgtaaaacctattaaaattctgtcttaggaaaacctattgtcctgcatgtcaaatatttctacagttttataagttccttttgrcttctgcttctcctagcctaatttcctcatcttttcttccaaagtgtatttctcttacccggtcaatgagaccatattctttcctcatgcataagtggta

SEQ ID NO: 454455 - DNA, 201 bp, Homo sapiens
ctcagatgtccctcaattctgctgctgttacaaagacaacaacagaacttacgggaactgttccctgtgcaattatgtctcctgggaaatataggttagarggtcaatgtagcactgaatctaattcattaccggaaacctctgctgctaatcagaaggaagtgttattacaaattgctgaactacctgctacaagtgtga

SEQ ID NO: 454456 - DNA, 201 bp, Homo sapiens
atgagtgtgatacgtgcaataatatattgatattgaaggcacaatactcagaaagggggttggataactccctggatggtaagcatgggaggtcaaagaayacttgagtagaaaaatgaagagacattttaaatgctaatctgcttgctaccataaactaagtattaaaagtgtatgtctggtttgattatcattttttct

SEQ ID NO: 454457 - DNA, 201 bp, Homo sapiens
cagttcttcttaatttgttcttaattctgttttcagagtattgtgatattttaatctttggaatgctgatgatttatgagttcaaacttgaagacattttytctgtcagtcttttagtattcaaatcaatgcagggaacacagaattagatctggagaggggaagcaggattcatcctctctggggataactaagcaaatt

SEQ ID NO: 454458 - DNA, 201 bp, Homo sapiens
aggtttggttgcatggctatttacaggaaaaaaaaatagacacttgttctttaggatttcaaccattttttttttcacccaatgaaaattgctgggtcatytgtgacagcctcttttggaaacctgcagttgtcctcagctggggtgagaagttcatattctcccaggcctgccttgagataaagtaaagcactacacttt

SEQ ID NO: 454459 - DNA, 201 bp, Homo sapiens
aatgaaagatgaatgctcgatgctcaagctgcagctgaaagagaaggatgaactcatttcccaacttcaggaagagctggtaagtgataacaatgcttggyccacgagtgtactttactttcaaggttatttgttccacgcccttatttattaacaccaatggcattagttatttgtaaatccttccagtggttcaatcca

SEQ ID NO: 454460 - DNA, 201 bp, Homo sapiens
ctttatctcctctcctctgccaatttagtgttttaaagtctgttacttgtggcagcatatttccggtgacatattcggcatcaggatgcttctgtcaacargtaacagaagacattaactaaaccaccttacaaaacaatggaaattataccatttaactaatgtagtgggggtccccaagtgccatgcatgaaggttcag

SEQ ID NO: 454461 - DNA, 201 bp, Homo sapiens
agggaggctaaactcatgcttcatgaggatgcttctcttgagatgacaaacccagtcccttcctcaaaatggggacagaaccctcctgacctcatcacttyttaaaggtcccacttctcacactgttgcattggggattaaatttccaacacaggaacttgagagtacacatttaaaccatagcaccagtcatgctgttag

SEQ ID NO: 454462 - DNA, 201 bp, Homo sapiens
taattgaatcatgggggcagatatttcccacactgttctcgtgatagtgagtaagtttcacaagatcgatggttattataagcggtggggcgggggtggaytcttgcacaagctgtctctttgccaggtgccatccatgttaggcgtgacttgctcctccttgccttccgccatgattgtgaggcctttccagccacatgg

SEQ ID NO: 454463 - DNA, 201 bp, Homo sapiens
aaagatgaatgctcgatgctcaagctgcagctgaaagagaaggatgaactcatttcccaacttcaggaagagctggtaagtgataacaatgcttggcccaygagtgtactttactttcaaggttatttgttccacgcccttatttattaacaccaatggcattagttatttgtaaatccttccagtggttcaatccaatga

SEQ ID NO: 454464 - DNA, 201 bp, Homo sapiens
ctaggaaaatcctgatatagactatcaataaatggatacttgctattcattcaataaaatatttattaagtaattaattttatagattgtatctacttcaraggaaccttgaggtagacatgacaggtactactctagctttccatctatttcatctattttaaagcattggtactaatgatacaagaatgcaaatcataa

SEQ ID NO: 454465 - DNA, 201 bp, Homo sapiens
aaaacactctttttaaaaaattttaagttttattttgggttcgggggtatttgtgaaagtttgttatatgcatatattatgtgacactgaagtttagggtrcaattgagcctatcacccaggtagtgagcacagtacccaataggtagtttttcagcccttgccctcctttgcctctcgtctagcagtccccagtgcccat

SEQ ID NO: 454466 - DNA, 201 bp, Homo sapiens
acattttgaatatcgcttaggtagaactactttggaaacaaaactatttcctcctttaaaaattaaactacaagaattaaaagaacgcacactaaaaacaygtgttaaactaaaaacaaattgtaaaaaatttaaatgaaaatattaaaatcaagtcaaattatttatgatcatttatgttaattatataatagaaaaatt

SEQ ID NO: 454467 - DNA, 201 bp, Homo sapiens
attttctattacactacaattttgataacactttagtgaggatgaaattgtgatctcagttgtcactttgtgtgtttcatcagcagatcctattactctgyatttctacttcaaaagggatacaatacctgttatctgcttggttgccattagatggcaatcttgttcttctaacgatgatagtaatcctgtcatacattt

SEQ ID NO: 454468 - DNA, 201 bp, Homo sapiens
aatacatgtaattatagatgaatttgagaaaaatttttatcttggcaatatttagtcttagtgtccatgaacataatatatctgtttaggtctttatatamgcaatattttttagttttctttcatatttctgtcagatttctatgtattttgtatttttgattttattgttagtgatattattttatttcaaatctattt

SEQ ID NO: 454469 - DNA, 201 bp, Homo sapiens
gataacactttagtgaggatgaaattgtgatctcagttgtcactttgtgtgtttcatcagcagatcctattactctgtatttctacttcaaaagggatacratacctgttatctgcttggttgccattagatggcaatcttgttcttctaacgatgatagtaatcctgtcatacatttgtattcagctttatagtttacaa

SEQ ID NO: 454470 - DNA, 201 bp, Homo sapiens
tttttttttctttttttaagaagcatgagtgcataataaagtaacagtagaaatgctcaggataaaacagcaacccaaattaaagagagtgttaaaaagaygattttattagatggacttaatgtccacctaatggacaaataaagtaaattctgtttgacccagtgctaactatgtgcccgttatgcattaggtactatt

SEQ ID NO: 454471 - DNA, 201 bp, Homo sapiens
atagatgttaatatacatcaagtacagtggagggagcaaatactctggttaaagaacttattcagccagtattaacctagatcttaacattaaatggcagkttcttttaactgtttttctagaccttgatgcttctaattttatgtacagttctaatatacttggttatatgttttccaaggcactgaaaatcataataac

SEQ ID NO: 454472 - DNA, 201 bp, Homo sapiens
caatcagcaccctgtcaaaatgggccaatcagctctctgtaaagtgggccaatcagctctctgtaaaatggaccaatcagcaggatgtggatggggtcagmtaagggaataaaagcaggctgccccagccagcagcggcaactgagtgagctccgcttccacgctgtgggaggtttgttctttggctgttggcagtaaatg

SEQ ID NO: 454473 - DNA, 201 bp, Homo sapiens
tatttatttgcaacagttctcagatcattgtttttctttataagacaattttgtggtgcaagtattacttaatacaaaatacattaataaataaagttaartgtaccaaagcagatgctgctactaaacacatgtttctttgctagaatcaagatatatttaaggactgttatgagattaggaatcaaagtgaataatttt

SEQ ID NO: 454474 - DNA, 201 bp, Homo sapiens
tgtacagttctaatatacttggttatatgttttccaaggcactgaaaatcataataacatcttagaagaggagagagaagaggagagagaagcagcagggratgaagtattgctgtattacaatgtggcacaccattactttttaaaaactattattgtagttcttaatcatcaagaaaaaatacattctgcattattctg

SEQ ID NO: 454475 - DNA, 201 bp, Homo sapiens
taacttcagatgtggtggaaacaccaagagaactagaattagaagtggaccctgaatatgtaactgaattgctgtaatcccataacggttgcttcttgtasatgagcacagaaagtgttgttttttttttttctttttttgagatagattctactcttagtgaatatgctgtgaatattgttgaaattacaacaaaaaatt

SEQ ID NO: 454476 - DNA, 201 bp, Homo sapiens
tcaaacacatcatttgttgtgattaatgcctacaagagggagtaacaatgacatcccttgaaatgtctgtgttttatttaagttccaaagataactgttcyttatttaaagtttttatttgtttgtttgttcttgttttggttagtatattggttaataaagttgtttggaattttatttatcattatttgaattttctaa

SEQ ID NO: 454477 - DNA, 201 bp, Homo sapiens
aatatacttggttatatgttttccaaggcactgaaaatcataataacatcttagaagaggagagagaagaggagagagaagcagcagggaatgaagtattrctgtattacaatgtggcacaccattactttttaaaaactattattgtagttcttaatcatcaagaaaaaatacattctgcattattctgagatggagagc

SEQ ID NO: 454478 - DNA, 201 bp, Homo sapiens
atagtattccatggtgtatatgtgccacattttcttaatccagtctatcgttgatggacatttgggttggttccaagtctttgctattgtgaatagtgccrcaataaacatacgtgtgcatgtgtctttatagcagcatgatttataatcctttgggtatatacccagtaatgggatggctgggtcaaatggtatttctag

SEQ ID NO: 454479 - DNA, 201 bp, Homo sapiens
tgctattgtagcatttcctactgacataaactctcttctgctgcacaaaagggcagtcaatggcccaagttcattagaggatacagtcaaaagaaaagatktatttcattcggcatggtttttctggtgcaattagaaaagaaaatatgtgtctcaatataaaatttcatggcctcttacaattatgtggtgacatctcca

SEQ ID NO: 454480 - DNA, 201 bp, Homo sapiens
tattttcaaaatgcatttctgtacatggctcatcttagctatttgaaaatggcaaagatattcaaatttgtgaatgttaaattataatctccagagcctcwgtaaattccctgaaatacagtgttagaacttcacacgaatatgattcctgaaagttgtgtcagtcctcatgggtgtttagatccatgactgaccaaataa

SEQ ID NO: 454481 - DNA, 201 bp, Homo sapiens
atataaaatttcatggcctcttacaattatgtggtgacatctccatacaattgcttgaataatgccaggaacatcagctgtcactatcaaaatgaacaagwaattaagaaagcaaacgctggtctttcttctaaaggaatagaatatttatgtatttaaagttgttcaccaacaagaaaaataaccactgacatgaaacat

SEQ ID NO: 454482 - DNA, 201 bp, Homo sapiens
atcttctgatatttatatgatgtcaaaatgcaagtggagcaggatcaaggtgaacaaatgtatacccatatgccagagatttcttttctggtatgtgtacytatattatctgctagtcatgcataatatttgattgcttataagaaaacgaactgcaacccacagttttaacaataatgccaccttcattgtacctaactg

SEQ ID NO: 454483 - DNA, 201 bp, Homo sapiens
tatgttttgtttttgtttgaaaatcagaatcaaaggcatatttaactacagttaaaatagctgtttttaatgagtgattctatcaaatatgatgttacaastttagataacataatgcaatttcttaaaagtagtatgaatctaataatattcacatgtttacagatgagcaaaagtgtttcagaatctagtgactcgttt

SEQ ID NO: 454484 - DNA, 201 bp, Homo sapiens
aggatggcttgagcccaggagtttgaggctgcaataaggtgtgattgtgccattgcaccccagcctgggcaacaaagcaagaccctgtctcaaaaataaahacatacatacatacatgcattattttctgctttttttttttaaagtaaaagtgctcaagatatatagaggactagctattgataaaatagaaatgagtca

SEQ ID NO: 454485 - DNA, 201 bp, Homo sapiens
cctttataatttttgagagtaagacatggacagagtaaattgtgtttaaggaggggtttttgttgttgttggtgtttctcaggtagacacatatgagcacrttaaccgcttttacagggctttctagatttcaaaaagctattggtcaatttagcaaatgttagtattttcaaacttcttagaaatgttctttatactctg

SEQ ID NO: 454486 - DNA, 201 bp, Homo sapiens
taattgctctctttatgggaaaaaggctctttctctagcgaagctttatgattcataaacactgacaaaagattcaaggaattctggcttatgtaattacygggcatgtatttaattgttttccttggaatacttgtttataggatgatagaattaaaaaataattgaatcctaaaatctgaacttcaaatttctatttct

SEQ ID NO: 454487 - DNA, 201 bp, Homo sapiens
cttcaaagttcaaattctttacgttaaggaatctaaatacatttgatttggagatagtattgcctgtggtatttcaattattaatatggagaataaatatygttattcatgtgctgaagtgacttttccacttcaaagtggtgtctgtaaaggaaaataatgaataaaatctgcatttcttacctttaccacgtctatggt

SEQ ID NO: 454488 - DNA, 201 bp, Homo sapiens
cccctttctcttctagtcattgtaaatatcctgtcttaaagagctcaagctattttgctactaacagcaatcatattactcttaagttaatccatcttatrtaccctctataaatcataatctagttaaatacatagcaaaaatggtgaattggctctccttaacctgagtcattttaagttgtacttttaaaaaatctta

SEQ ID NO: 454489 - DNA, 201 bp, Homo sapiens
attctacctctcagatgtccctcaattctgctgctgttacaaagacaacaacagaacttacgggaactgttccctgtgcaattatgtctcctgggaaatayaggttagagggtcaatgtagcactgaatctaattcattaccggaaacctctgctgctaatcagaaggaagtgttattacaaattgctgaactacctgcta

SEQ ID NO: 454490 - DNA, 201 bp, Homo sapiens
tgttgcccaggctggagtgcagtggcgcgatctcagctcactgcaacctccacctcctgggttcaagccattctcctgcctcagcctcctgagtatctgasattatggtcgtgcatcaacactgctggctaattttgtatttttatttttagtagggagggggtttcaccatgttgtccaggctggtcttgaacgtctgac

SEQ ID NO: 454491 - DNA, 201 bp, Homo sapiens
cgccattgattaaagagctggaatctatttttctttttcttttctctactacctaatagttcaaacattaatttcattttacctaaaaggaataataattkaagactttcaaggataatattcaatgcaaaatttttggttttttttcagcgtaatttgcaattacattataaaatttacagtgttttctacttcatcatt

SEQ ID NO: 454492 - DNA, 201 bp, Homo sapiens
ctgcaacctctgcctctcaggttcaagcgattttcctgcttcagcctcctgagtagctgggactacaggcatgtgccatcatgcccggctgatttttgtattttttgtagagatggggtttcaccatgttggtcaggctggtctcgaactcctgaccttgtgatctgcctgccttggcctcccaaagtgctgggattacag

SEQ ID NO: 454493 - DNA, 201 bp, Homo sapiens
cgcattagttaatttaaatcttgaaaggttgtaggatcatgtatttgtccattttcacactgctataaagaactacctgagactgggtaatttatgaagaraagatatttaattgactcagttccacagacttaacaggaagcatgactgggaggcctcaggaaacttacaatcatggtagaaggcaaagaggaagcaaga

SEQ ID NO: 454494 - DNA, 201 bp, Homo sapiens
cttttttagaatgaagggtttagtgttctccagagaaacccagcaagatatctatctatctatctatctatctatctatctatctatctatctatctattrtctgtctacctattgaaagactaattttaagtaattggcttacatgactgaaatctgtagaaccgactggaaggctggaaactcaggcaggatttttata

SEQ ID NO: 454495 - DNA, 201 bp, Homo sapiens
ctctttgctaaagcatagcaatagtgacctttactccagttcccaataagttccttatcttcatttgagactacctcagcctggactttgttgaccaaatsaccataacattttaatcaaaaccattttagtttctaggaagctccaaactttctcacatcttcctgtcttctgagccctccaaactgttccaacctctgc

SEQ ID NO: 454496 - DNA, 201 bp, Homo sapiens
acttcaaccagctctgacttcatactcccaccttaatgcactatattctagaacagtatttgttaaagaacaattgtctagaaaggaaaaaaaaaatgtgmttttttgcataactctgcatattgttttaataatatacttccattagttctcttgcctttatattacttacatgttatacatttcttcaaataattttac

SEQ ID NO: 454497 - DNA, 201 bp, Homo sapiens
accaggaggtggaggttgcagtgagccgacatgtcaccactgcactccagcctgggcaacagagcaagactccatctcaaaaaaaataaaaataaataaaataaataaatcagtcttatctatggttttatggtagataacttgtaaaaactttatatatagatatgtgtatatatatgtgtatatatatgtgtgtatata

SEQ ID NO: 454498 - DNA, 201 bp, Homo sapiens
attagccgggcgtgatggtgggcacctgtaatcccagctacttgggaggctaaggcagagaattgcttaaaaccaggaggtggaggttgcagtgagccgasatgtcaccactgcactccagcctgggcaacagagcaagactccatctcaaaaaaaataaaaataaataaaataaataaatcagtcttatctatggtttta

SEQ ID NO: 454499 - DNA, 201 bp, Homo sapiens
tttcatttatttatttgccaaaactagtagtttacatactgagcatataacctctggagcatggcttttagagtacataaaatcagtcctctgggcagggygcggtgcctcatgcctgtaatcccagcagtttgggaggctgaggtgggtggatcatgaggtcaggagttcaagaccagcctggcaaggatggtgaagccc

SEQ ID NO: 454500 - DNA, 201 bp, Homo sapiens
aaatcataattttcattaaatcttattctaatataacatcatacaacacagggactacaagttaaattagaatccacttacttcaagcccccaaatttttwaataagttaactgaatttcagaaaaatgaagtcacttttttactactacatgacgtttgttgggagtctagtcttttatttaaggtaatgtgcttggaaa

SEQ ID NO: 454501 - DNA, 201 bp, Homo sapiens
tgtgtacttttggaaaccatttttaaattcagtagagtatacctctttcatttatttatttgccaaaactagtagtttacatactgagcatataacctctrgagcatggcttttagagtacataaaatcagtcctctgggcagggcgcggtgcctcatgcctgtaatcccagcagtttgggaggctgaggtgggtggatca

SEQ ID NO: 454502 - DNA, 201 bp, Homo sapiens
acattttaggttaatagccctaatcctttatgcttttatttgtttttccagttactaatcatattttcctttcagtacccttctaaattgtatcatggacrtaacactcaccacatagttatttgaatgtgtctcattttacctgaaaggtttcaatcgtttaaatggaaggagctgtgtatatactggcatttcttgcgg

SEQ ID NO: 454503 - DNA, 201 bp, Homo sapiens
tgcctatccatgcctcataattttctaatttctatgatatttcttatatcaatgtcatttagttctctaagcatgaaaataaaaatgtaaaatgaagccawggtaattgttaatcctcattaaatcttcaatgttcctagcttgtttcgtatgttacagtgatagtttaatgcatcttactgtattgaattaaggttaaag

SEQ ID NO: 454504 - DNA, 201 bp, Homo sapiens
aagaaagggtcaagaaagtgaaaacgaggaagaatctttttgagcaaaaaggaagaaggttgccatgttttctgtaaaataagaataatgaaaaaaaagaragcttgtgggattcaattgcaaaggaagttcttaattaaggaaaggaacatgttaagatagtaacaggatagtttggacaccagacttgtaaagactttg

SEQ ID NO: 454505 - DNA, 201 bp, Homo sapiens
gcaataataatcatttattcttcaatttatagtattttgttctgtttcaccctcaggaaatatagtttcaccttattttaactttcaaaaatattttatamacacatgtatctatttataacttgcaaattgtgtttattcaaaaacaagaaacatctcgtggaaatcttgtacattatggatgtttcttatactcttttg

SEQ ID NO: 454506 - DNA, 201 bp, Homo sapiens
agttgaacaatgagaacacatggacacagggatgggaacatcacacaccggggtctgtcaggtggtgggggataggggagggatagcattaggagaaatasctaatgtaggtgacaggtcgatgggtgcaacaaaccaccatggcacgtgtatacctacgtaacaaaactgcacgttctctgcatgcatcccagaacttaa

SEQ ID NO: 454507 - DNA, 201 bp, Homo sapiens
cctgtggattaagccctgttctaagaattgaataactatcaattaggctttctcatcatgctgctaatatactgtagtttattaaagtttctgttttgctyttatttattacttctatcttcttaaattcagtacttctcctgatcatgtatgaatgtgctctggcatttattagaaaaaagtgactcccccgcacatgct

SEQ ID NO: 454508 - DNA, 201 bp, Homo sapiens
ctgcgttatgccttttagaatgaagtattaaactcaaatcagcatagacaactagtaatgtctaaacataagtgccaacatgcagttgtttttatagtgtkgcactgaatgattctttttaaaatcttgaatctttgcttaggagccagatccccctggactgccaccaggtctttaattctgcagtgactacatagaatt

SEQ ID NO: 454509 - DNA, 201 bp, Homo sapiens
ggatagcattaggagaaatagctaatgtaggtgacaggtcgatgggtgcaacaaaccaccatggcacgtgtatacctacgtaacaaaactgcacgttctcygcatgcatcccagaacttaaagtataattaaaaaaaaaaaagtttgtaaagcaaataacttggaagacagagatagcgttccccctctaggacagagagc

SEQ ID NO: 454510 - DNA, 201 bp, Homo sapiens
taatttcaaatttttctaatatttttcctagactgccttaggagtctcttagagtatctagtgtactaagtgagattatataataagaagtcctggctggrcagggtggctcacgcctgtaatcccagcactttgggaggctgaggcaggcggatcacgaggtcaggagatcgaggccatcctggctaacacggtgaaacc

SEQ ID NO: 454511 - DNA, 201 bp, Homo sapiens
tataacttgaggcaccttgatgcttcatttttcacaaattgtttccttattgagtgatatgcttttatatttatttaaaactatgcacgtctacaaaaacrcattagttaatttaaatcttgaaaggttgtaggatcatgtatttgtccattttcacactgctataaagaactacctgagactgggtaatttatgaagaaa

SEQ ID NO: 454512 - DNA, 201 bp, Homo sapiens
gggtggctcacgcctgtaatcccagcactttgggaggctgaggcaggcggatcacgaggtcaggagatcgaggccatcctggctaacacggtgaaaccccrtctctactaaaaatttaaaaaaaaaattagccaggcgtaggtggtgcacgcctgtagtcccagctacttgctactcagagactgaggcaggagaatggtg

SEQ ID NO: 454513 - DNA, 201 bp, Homo sapiens
tttcttgcctctctaggtagttttagaaataacaaaaagtggtgtgtgcagttcatccttgtaaatttgattttcacaacaaccaatgatatgagagggcttttttttttttttttgagaactgcccttaataatgaagatctactcctaaattaatgttacaatgggactcgttgactcacatcagttttctaaattgat

SEQ ID NO: 454514 - DNA, 201 bp, Homo sapiens
taatcccagcactttgggaggctgaggcaggcggatcacgaggtcaggagatcgaggccatcctggctaacacggtgaaaccccatctctactaaaaattwaaaaaaaaaattagccaggcgtaggtggtgcacgcctgtagtcccagctacttgctactcagagactgaggcaggagaatggtgtaaaaccagggaggcg

SEQ ID NO: 454515 - DNA, 201 bp, Homo sapiens
agctgtgtaagccataaaatcatatatgccaattttgttggttctgttaaacaggaaaataagggcaacattattatgttttgatttaaatttgcaggatttatgataagaaaaattattgtttgttattgctaacctttttctaaaatagatattaaatacattttaaaatagagtcacaaagctttgaaccaaagtaga

SEQ ID NO: 454516 - DNA, 201 bp, Homo sapiens
caattttttccgtaacatagaagatggtattttgtttttcacagtacactagctcatggcttttctgttttgtcatggtagagcttttgtttcactaggcwatcagatttcattaagttacctaatttttccctcagttttctcatgagatctgctattccctttgacaactctacttgtacttgatttagatgcacaaaa

SEQ ID NO: 454517 - DNA, 201 bp, Homo sapiens
ttatggaataactccaaaatttcctaaaatatcagagtgtcctacttaaatcgtatgctattggtcttactgaaaactataaaaatgcagagattttatayactgtttttgttctttaaaaaaacccagtgtttagtaacatgaaattaaagaaataatggaacacaattccacaagtatcagaaaatgtgctaccttgtt

SEQ ID NO: 454518 - DNA, 201 bp, Homo sapiens
ctgcttaagaaaaaaaaaaaatttattttaggtctgctgtgtgatagttgacaagcagtaaggactggcttgtttgtcctataccactctttgtttctttstttcttttttttttttttttgagacttagtctcactctttcacccaggctggagtgcagcagcacagtcttggctcattgcaacctccgcctcccaggtt

SEQ ID NO: 454519 - DNA, 201 bp, Homo sapiens
tatatttatagcactcatatttctactttcaaattaaattacataacctatgcaaaatattaatttaatacacattcaactcaatttggttattccccccrtcttcctttcttccttctccaatgctaattataaatgacagcttcttgctgattgggctcaacacatgagtcatataccaatggagcagatggagtagct

SEQ ID NO: 454520 - DNA, 201 bp, Homo sapiens
gttgtatgtcatgtattttctgcgctttgtgacatatggctgtaatttcgaggtagggagaggttctaaggactgaaacatatgctgagatttttttttcttttttttttttgagacggagtcttgctgtcgcccaggctggagtgcagtggcgtgatctcggctcactgcaggctccgcccccagagttcacgccattct

SEQ ID NO: 454521 - DNA, 201 bp, Homo sapiens
gtaacatattttgcatttttatgtagtgcaatcattattcatagagttcttcaataatatttacttaaaattattttttcaccagccttttaactctaaartgtgttaggaaaatactttttttcttggagataagtgatatttattaattgattaatatctttatgttctggcttcactattagatgactatttactaac

SEQ ID NO: 454522 - DNA, 201 bp, Homo sapiens
cccgccacctcgcccggctaattttttgtatttttagtagagatgaggtttcactgtgttagccaggatggtctcgatctcctgacctcgtgatccacccscctcggcctcccaaagtgctgggattacaggtataagccagcgcctccggccatatgctgagatttgaggggtaaaggaagtatatttccagctgaggga

SEQ ID NO: 454523 - DNA, 201 bp, Homo sapiens
catgatgggtaaataggggaattgtgttagtaaaatgtggaagttctttcatgtgtgtttttccccaagcataatcatatttagctttgccaaataactayagctgaatgcaaaatatactaatacaggcaaatgcacaatacagcagagggatatcgttttatttatttaccactttttttttttttggtatgagtaagc

SEQ ID NO: 454524 - DNA, 201 bp, Homo sapiens
tctttcatgtgtgtttttccccaagcataatcatatttagctttgccaaataactacagctgaatgcaaaatatactaatacaggcaaatgcacaatacarcagagggatatcgttttatttatttaccactttttttttttttggtatgagtaagccacaattttagctttgaaagtgcttattgtgcggtttttcttga

SEQ ID NO: 454525 - DNA, 201 bp, Homo sapiens
catacattagcggataaattcatatgagataagttttagaaaaattaatttcatggtatttatgactttttggagtgatagtttgttgatgcctattgttdatgccaatacaatgtgacacaattaaataaaataaaataaaaaaaagaaaaaaaaaggtgaagaatagttgtgtattttataaagatttttttaatcttt

SEQ ID NO: 454526 - DNA, 201 bp, Homo sapiens
attagcggataaattcatatgagataagttttagaaaaattaatttcatggtatttatgactttttggagtgatagtttgttgatgcctattgttaatgcsaatacaatgtgacacaattaaataaaataaaataaaaaaaagaaaaaaaaaggtgaagaatagttgtgtattttataaagatttttttaatctttatact

SEQ ID NO: 454527 - DNA, 201 bp, Homo sapiens
aagtcttggtaactactggacatgggggaaaggaaagagtcaaaaaacaatgcccagaatttgaaagctgggcaactaagattattgtggtgacaagaacaaaaaaaaattcttttattattatcaaaaccttgcattagatcctttgtaaatatttaaattaatcttcctcccatcttagaatttggaaagcagggaagg

SEQ ID NO: 454528 - DNA, 201 bp, Homo sapiens
aggacatagtggctcacacctgtagtcccagcactttgggaggccaaggtgggaggattgcttgagcccaggagtttgaggccagcctgggcaatatggcraaaccctgtttctacataaaatacaaaagaaatagccggccattgtagtcccagctactcgggagactgaggcaggagaatggcgtgaacctgggaggcg

SEQ ID NO: 454529 - DNA, 201 bp, Homo sapiens
attcacttcaatatggtgatttttttgtttatctatttaaacttttgtctagtacacatttatattacctctacttgagtgttaatgattcagatttaaaatgaagttacacattccatgtagtcaaagtgcttctgtctctagtctagtcagctaactccactgacttttacatcctccaccaccaactagctctgtatg

SEQ ID NO: 454530 - DNA, 201 bp, Homo sapiens
accatgcccagctaatttttgtatttttaatagagacagggtttcaccatgttagccaggatggtctcgatctcttgaccttgtgatttgcccgcctcagsctcccaaagtgctgggattacagttgtgcaccattgcgccctgccccaaattttatatcttttgaccaacgtcttctcccccatccctccaaccactcct

SEQ ID NO: 454531 - DNA, 201 bp, Homo sapiens
ctttgtaatttaacttttagatcaatcatttaaaatcaaatgtggatattcaagctacaaaagagattaacaggcatttaatatttaatatacaccctttytcttaatgcttttaaatcttaaaaatctagaataaattgatagactgtcagaatactttgtgtgattaagaaaactaatgatacaaagagtacacctgga

SEQ ID NO: 454532 - DNA, 201 bp, Homo sapiens
ggctgagatggaagcattgcttgaacccaggagttcgaggctgtagtgcattatcatcacatgaataaccactgcactccagcctaagcaacatgtagagdaaaccccatctctacaaaaaaaggaagaaaaaagaaaatgcattcaatatacctaagctaccaaacatcatagcttaatctagcctaactacaaatgtgc

SEQ ID NO: 454533 - DNA, 201 bp, Homo sapiens
ggcagtgtgattattttgtattctaattgattagctgagggagaattatgtaactttcatcagttggactaaaactttaaatcattctaccaatagaattmcttttaatcatttaccaaatttctcaccaccaaaatttcacaccaactttcacctcctttaccattcccaaacctagaaaacattattttgttctccatt

SEQ ID NO: 454534 - DNA, 201 bp, Homo sapiens
cctcagcctcccaagtagctgggattacaggcatgcgtcaccacgtccagctaattttgtatttttagtagagacggggtttctccatgttgatcaagctsgtctcaaactccggacctcaggtgatccaccctcctcggcctcccaaagagccgggattacaggcgtgagccactgcgcccaccctaatttttaaaataa

SEQ ID NO: 454535 - DNA, 201 bp, Homo sapiens
cacattgttaagatggtaattagaattttaaatttataaagttgatctattatagagaaaatttataccaaaaagaatgtaatttgcatttcagagtactkaaagcatcaaagttctatacataccagaattatttcaggtttgccattattttatgagttctctgtttataaatggctttatagatttgaatttaaacta

SEQ ID NO: 454536 - DNA, 201 bp, Homo sapiens
cttaatatttataagcaatgtgatttgggcattatattttaaaagcttaagtcaacttgtcataaatttgcatccataaatctaatttagcattacacagttttttttttttacttttacattagattatgagagtacatatgcaagtttggtacctgggttatattgcatgatgctgaggtttggggtatgaatgatccc

SEQ ID NO: 454537 - DNA, 201 bp, Homo sapiens
gcatcaaagttctatacataccagaattatttcaggtttgccattattttatgagttctctgtttataaatggctttatagatttgaatttaaactatcayattagaggacatttatttaaagtgtggtctaatatagagtaactttctgagagaaaagtacttaaacaggtttagcattttgttgtattggaaaagtata

SEQ ID NO: 454538 - DNA, 201 bp, Homo sapiens
ttaatatttataagcaatgtgatttgggcattatattttaaaagcttaagtcaacttgtcataaatttgcatccataaatctaatttagcattacacagttttttttttttacttttacattagattatgagagtacatatgcaagtttggtacctgggttatattgcatgatgctgaggtttggggtatgaatgatccca

SEQ ID NO: 454539 - DNA, 201 bp, Homo sapiens
tgcactacagtctgggcaacagagcaagactctgtctcaaaaaaaagcaaagatgataattagaagatctgattttgaaaatttcttaatcttgaaatccktaatgagactttccagtatgtaaaaatgttaatggctttggggagttaaaataacgattgcagtttttagtgtaactgactgttaatagaattaaagcaa

SEQ ID NO: 454540 - DNA, 201 bp, Homo sapiens
ccgtgccaggatgaagtgttttttttttttaatttatgaaaaagatgctacagaccctaattgagtctgaaaagattaacttttctttgcaggagtatcastaatatgacacaattatatgtcataaaagtacaaaactaaaaagaatttatgtaattcataaaaatgtaaaaaaatacttggtgtgagtgtattattttc

SEQ ID NO: 454541 - DNA, 201 bp, Homo sapiens
tgttagcctccaagagagtcagcctgtccttggaagctttgaagccagcccttgacttctcctccagaaaatctgttatttagcatagccacctttatcarttatcttagctagatcttctggataacttgctgcagcatcttcatcaacacttactgcttcacctttcacttttatgttatcgcttctttccttaaacat

SEQ ID NO: 454542 - DNA, 201 bp, Homo sapiens
tgtggttctctcataagtttaacttgtttataaccctatgttatatccttgtgatttagtttcttcttctaatggcctgcttatctctcagcttcccaaaycaaacttgtcctggggtggggggaggggggagggatggcataagagaattacctattgtaaatgacgagttaatgggtgcagcacaccaacatggcacat

SEQ ID NO: 454543 - DNA, 201 bp, Homo sapiens
accgttaacttttcccactcttgcctccctccctccctccatgccctagtagtccccagtgtctattgttgctgtctttatgtccatgagtacccagtgtytagctcccacttataagtgaggacatgcagtatttagttttatgttcctgtattaatttatttagaataatgttttccagctgaatccatgttgctgcaa

SEQ ID NO: 454544 - DNA, 201 bp, Homo sapiens
tttaaacattttttacattttgttttaaattttctcctactaaataataacaatggcacatatcctttagaagagaattttgaaaactctaatataattawagtcttatcctacacctagcaatggtatctctagaagtttaacctgaacatacactttcatatgtaccaaataatattttcataaggttttctttatgat

SEQ ID NO: 454545 - DNA, 201 bp, Homo sapiens
ccctccatgccctagtagtccccagtgtctattgttgctgtctttatgtccatgagtacccagtgtctagctcccacttataagtgaggacatgcagtatktagttttatgttcctgtattaatttatttagaataatgttttccagctgaatccatgttgctgcaaaggacatgatttcatttttcatggctccatagta

SEQ ID NO: 454546 - DNA, 201 bp, Homo sapiens
ttccagcaaatatttattgaagatttactgtaggccctaggattctagtaacaaataaagctgtgcagcatacagtctaatggaagattctattttttttwaaaaaaaaacgttaatgaagaaaagagcagtatgcaggacatagcagttttggtggtaagaaaagacatcctagagaagtgacgtttttccatgaaggat

SEQ ID NO: 454547 - DNA, 201 bp, Homo sapiens
acaataccatgaatcaaaaatcagacaaaatccaaatgggcagtattctacaagacacctcatggtatccctaaaaaagaagatgctattaaaaattgggrgactatctgctgggcatggtggctcatgcctgtaatcccagcactttgggaggccaaggcgggtggatcaggtgaggttgggagttcgagaccagcctga

SEQ ID NO: 454548 - DNA, 201 bp, Homo sapiens
tgatagtttcttttgctgtgcagaagctctgtagtttaattaggtcccacttgtcaatttttgctttcattgcaattgtttttttcttatttgtttttgtttttgttttgttttgttttgttttttgagaacctaatcataaatttttttctcaaggcccatgtccagaatggtgtttctgaggtttttttttttttttcc

SEQ ID NO: 454549 - DNA, 201 bp, Homo sapiens
tccagcaaatatttattgaagatttactgtaggccctaggattctagtaacaaataaagctgtgcagcatacagtctaatggaagattctattttttttawaaaaaaaacgttaatgaagaaaagagcagtatgcaggacatagcagttttggtggtaagaaaagacatcctagagaagtgacgtttttccatgaaggata

SEQ ID NO: 454550 - DNA, 201 bp, Homo sapiens
atggtatccctaaaaaagaagatgctattaaaaattgggggactatctgctgggcatggtggctcatgcctgtaatcccagcactttgggaggccaaggcrggtggatcaggtgaggttgggagttcgagaccagcctgaccaacgtggagaaaccctgtctctactaataatacaaaattagctggacatggtggcacat

SEQ ID NO: 454551 - DNA, 201 bp, Homo sapiens
gatagtttcttttgctgtgcagaagctctgtagtttaattaggtcccacttgtcaatttttgctttcattgcaattgtttttttcttatttgtttttgtttttgttttgttttgttttgttttttgagaacctaatcataaatttttttctcaaggcccatgtccagaatggtgtttctgaggtttttttttttttttccc

SEQ ID NO: 454552 - DNA, 201 bp, Homo sapiens
ccagcaaatatttattgaagatttactgtaggccctaggattctagtaacaaataaagctgtgcagcatacagtctaatggaagattctattttttttaawaaaaaaacgttaatgaagaaaagagcagtatgcaggacatagcagttttggtggtaagaaaagacatcctagagaagtgacgtttttccatgaaggataa

SEQ ID NO: 454553 - DNA, 201 bp, Homo sapiens
atagtttcttttgctgtgcagaagctctgtagtttaattaggtcccacttgtcaatttttgctttcattgcaattgtttttttcttatttgtttttgtttttgttttgttttgttttgttttttgagaacctaatcataaatttttttctcaaggcccatgtccagaatggtgtttctgaggtttttttttttttttccct

SEQ ID NO: 454554 - DNA, 201 bp, Homo sapiens
caaggatagctccagggatctttctaagtttgaaatgagaaacataactgggagagtcagcatatttatcagactgctttttttttctctaggtgaattgaatatatatatatatatatatatatatatatatatatatatatagcacttttcttctattgttttctacttctgtagtattaagctgtagacaactgctga

SEQ ID NO: 454555 - DNA, 201 bp, Homo sapiens
gatgacattaagagaaaccacgtgaagggaaggagctactgtgtagaaaagagccatcagggaagatggttctgccaatgttgcatttgagctggaactcsagtgatgggtcactgttcacagaaccagaacaagcatggtgacagggaaaatcatactaccaagaacattcaactctcaatcctgctgagtgcttcagga

SEQ ID NO: 454556 - DNA, 201 bp, Homo sapiens
tacatagcaaaaatggtgaattggctctccttaacctgagtcattttaagttgtacttttaaaaaatcttaccaattgctaaaaagcttaattatgaaaakaacttgcaaaagaaattaatgactttgtaaaacgaaaatggctttaaaatagacaagctctaattaaattgatttggacccaacatctttttattcaaca

SEQ ID NO: 454557 - DNA, 201 bp, Homo sapiens
ctctcttttgtcttctttctcatgtttacaacaaggtgagcggagggacgtgtttcaaccctgtttgtgttacagctcttttggtccctccattaggcagrtcccgagttcttgtcctgcatccaggaagaatgaggtatgcagacaactggagggtggacaaggcaaagaggtgctttattgagctacattacacctctc

SEQ ID NO: 454558 - DNA, 201 bp, Homo sapiens
ttttttaatgtctactacaaattgtttcggctaagacacttccctgagttctctgttgctgaaatttggcctgaatactccacttttccatcctccaagayctctatcatttgagatatttcctttttcttacttaatggtataggtggatacagcctccttaccttacctctttttttcctagcctgaagaagagtactc

SEQ ID NO: 454559 - DNA, 201 bp, Homo sapiens
attacatgtgtacatatcacacgtataatacatgtgtacatatcacatgtgtgtatatcacatgtataatgcatgtgaatatatcacatgtgtatatatcrcatgtatatatgtgtatgtatatatatcacatgtatatatacacacatgcatatgtacgtgtgtatctatgtgtatatatatacacacatatatgttatt

SEQ ID NO: 454560 - DNA, 201 bp, Homo sapiens
tgaactgaaatattccaaccattcttcaagaagctagagatacaaaaatgaacatgatatggtccaaatttctgcagaaatagtagtgaattttcaaataygatggtaatgcaatatttcatggatattgttgagttctaatttagatcttgaggaaagggtagtctttagttacaaggtaaaccagtttggctggaatgc

SEQ ID NO: 454561 - DNA, 201 bp, Homo sapiens
aatgcatgtgaatatatcacatgtgtatatatcacatgtatatatgtgtatgtatatatatcacatgtatatatacacacatgcatatgtacgtgtgtatstatgtgtatatatatacacacatatatgttattttattttacattcaggagtacatatgcaggtttgttatataggtaaattgcatgtcacaggggtttg

SEQ ID NO: 454562 - DNA, 201 bp, Homo sapiens
cgagattgcaccactgcactccaacctggtgatagagcaagactccatctcaaaaaaagaaagaagataaaaatccttggtaacttcaacacagctttacrttggtgaagattcaagtgctattcgaatgagttcagagacaatagactaaaaggagttagagttggtgcatataggaaaccctcaaccagttttgttgta

SEQ ID NO: 454563 - DNA, 201 bp, Homo sapiens
ttcatcacccaggtaataaacatagtactcgatcagtagttttcaatcctcacccccattctaccttccaccctcacataggttcccgtgtctgttgttcycttctttgtgtccatatgtactcaatagaaacacttatattaagtgacatgttaatgtatgttctggaagaacacaccaaaaaataactaaattaaattt

SEQ ID NO: 454564 - DNA, 201 bp, Homo sapiens
acaaaatgtaccactaaaatattgtagctttatattgattgattcattgccttctgcaatatttactgtatttttgaacttgatatttcttatctattaawcattaattaaaaataataaaaacaagtcataaagggtataataattgttattatggtacaatcattattactgctacctgttttttcacataaaatgtaa

SEQ ID NO: 454565 - DNA, 201 bp, Homo sapiens
tcttagcaaacttaacacaggaacagaaaaccaaacaccacatgttctcacttataagtgggagctgaacaatgagaacacgtggacacacgcaggggaayatcacacaccagggcctgtcagtgggttgggggcaagaggagggagagaattaggacaaatacctaatgcattcagggcttaaaacctagatgacgggtt

SEQ ID NO: 454566 - DNA, 201 bp, Homo sapiens
tggcacacattcttcctatttatcaaatagatacatttcccagaaggaagtgggtaatgatatattatagtaaaagaaagaaagaaaagaagagaaaagaragaaaaagaaagaaagaaacagtatttaattttatcagcattcctattacacagctggcatagatttttaacttactttgtgttaggtctcctgctttat

SEQ ID NO: 454567 - DNA, 201 bp, Homo sapiens
gggcctcaagtgatcctccgccttgccctcctaaagtgctagggttgcaggcatgagccaccacacccagtccattgtttaaaattgagttatttgtcttmttattgagttgtttgagttttgcatatattctggatattaaccatttatcagatatatagtttacaactattttcttccattctgtatcctgtctctttg

SEQ ID NO: 454568 - DNA, 201 bp, Homo sapiens
ttttgcatatattctggatattaaccatttatcagatatatagtttacaactattttcttccattctgtatcctgtctctttgctcttttgattgtttccwttactgggcagaagttttgtcatttgattaattccatttgtctatttttgctttaattgcctgtgctttttgaggtcatatccaaagagccattgcccac

SEQ ID NO: 454569 - DNA, 201 bp, Homo sapiens
agagccattgcccactctaatgtcttggagctttccctctattttttcttccagtagttttatggcttcaggtcttatatttaaatatttaattcattttrtttttttttttaatacggtgtgagataagagtctaattcattcttcttcatgtggatacccaattttcccaaaactattcattgaagacactgttctttc

SEQ ID NO: 454570 - DNA, 201 bp, Homo sapiens
gagccattgcccactctaatgtcttggagctttccctctattttttcttccagtagttttatggcttcaggtcttatatttaaatatttaattcattttgtttttttttttaatacggtgtgagataagagtctaattcattcttcttcatgtggatacccaattttcccaaaactattcattgaagacactgttctttcc

SEQ ID NO: 454571 - DNA, 201 bp, Homo sapiens
ctaatgtcttggagctttccctctattttttcttccagtagttttatggcttcaggtcttatatttaaatatttaattcattttgtttttttttttaatayggtgtgagataagagtctaattcattcttcttcatgtggatacccaattttcccaaaactattcattgaagacactgttctttccctcttgagtattctg

SEQ ID NO: 454572 - DNA, 201 bp, Homo sapiens
cacgttatacctcataagtatatacaattgtcatctgtcaattaaaaataaaatcaatttttaaaattaaattcattgactgtagtgaaaaatcatccatyaaaaatcttataatacaaatatgttagattttatgttgtttggagaaaaatattaaatacttatgaatgcatatctgaaagcaaatatttgtcatttttg

SEQ ID NO: 454573 - DNA, 201 bp, Homo sapiens
tagtttcttttgctgtgcagaagctctgtagtttaattaggtcccacttgtcaatttttgctttcattgcaattgtttttttcttatttgtttttgtttttgttttgttttgttttgttttttgagaacctaatcataaatttttttctcaaggcccatgtccagaatggtgtttctgaggtttttttttttttttcccta

SEQ ID NO: 454574 - DNA, 201 bp, Homo sapiens
agtttcttttgctgtgcagaagctctgtagtttaattaggtcccacttgtcaatttttgctttcattgcaattgtttttttcttatttgtttttgtttttgttttgttttgttttgttttttgagaacctaatcataaatttttttctcaaggcccatgtccagaatggtgtttctgaggtttttttttttttttccctag

SEQ ID NO: 454575 - DNA, 201 bp, Homo sapiens
tatctattctgttccattggtctatgtgtctgtttttgtaccagtaccttatagtataggttatataggctaatgcatagtatagtatagtatagtataggtataggtatagtatagtatagtatagtatagtatagtatagtatagtatagtatagtatagtatgtatagtttaggttacatactacattataatataag

SEQ ID NO: 454576 - DNA, 201 bp, Homo sapiens
ttttgacaatatagattcttgaatttcatgagtatgggatgtttttccatttgcctgtgtcatctatgattttttttagcagtgttttgtagttctccttktagagagctttcacttccttgattagatgtattcctagacactttattttattttttgtagcatttgtaaatgggattgtgttcttgatttggccctcag

SEQ ID NO: 454577 - DNA, 201 bp, Homo sapiens
tcttccattctttcaagtggttacgtcttgtcaactatgttgtgataagagcagagaagataattattcaagatatttgcaattattcaagataattttgyatatttgagtaatgcaaatttaaaaactttttaaaaatttaaaaacactaatgcaaatttaaaaacaaattttgcatatttgagtaatgcaaatttaaaa

SEQ ID NO: 454578 - DNA, 201 bp, Homo sapiens
attttgtggatgttaatgaagttttgtggtgaactcactaaaaccaagttgtatagttaatataacatgcaaaatcacttactgtatggcagtatgtctcraacatataaaactttgcctctttattgaaaaacacattctgaggtcaatctcaaaacctgtgaagaattctccctgcttcacaagccaaactagtaggga

SEQ ID NO: 454579 - DNA, 201 bp, Homo sapiens
cactgaaggtttatttaaaccagtacttatttcaacttaggttaaatcattatctgacaataagaaatgcatcactaatctgtgacatgtaaaatattgartaaaatcaattttttcatcatttcatattttaagtatgtaatatagaaaaattttcagttcaattacttcacaatttttgcatttgcaaaaatcatataa

SEQ ID NO: 454580 - DNA, 201 bp, Homo sapiens
taggttttcctttgtaggttacctggtgcttttgcctcagctctcaatattctttccttcaccttgactttagataacctgaagacaatgtgctgaggcartgatctttttgtgatgaatttcccaggtgttctttgtgcttcttgtatttggatgtctaggtctctggcaaggccagggaagttttcctttattattccc

SEQ ID NO: 454581 - DNA, 201 bp, Homo sapiens
ttatctattgagatgatcatatggtttttgttttcaattctagctatgtgatatatcacatttattgacttgtgtatgttaaaccatccctgcatctctgwgactaaactcattttgtcatgatgtattatcattttgatcatccaccagctgttggatttggtgagctagtattttgttgatgatttttgcatctatgtt

SEQ ID NO: 454582 - DNA, 201 bp, Homo sapiens
tttaagtatgtaatatagaaaaattttcagttcaattacttcacaatttttgcatttgcaaaaatcatataaaatattgatgaattaagattcaactaacrtatttctgctttattctcattgtatttttaaaacaaaaatagattttgtttaaaaaattctttctatatgtaaatattctaaaatgtaatattccacttg

SEQ ID NO: 454583 - DNA, 201 bp, Homo sapiens
tttcattcttatgaatgtggatatccaattttcccagcaacacttattgaaatgatagttcttttccaatgtgtgttcttagcccccttgttgaaaatcarttggctgtagatgtatggatttacttctgagctctctattctgttccactggtctatatgtctgtttttatgccagtatcatgttgttttggttactata

SEQ ID NO: 454584 - DNA, 201 bp, Homo sapiens
agctagtgttataattgaagttgtagtgatatctccagagagatcatagagcaaaggataggcccagcagtagaaaaagactctgggccttcgtggtgctsagtaagagttgatgatgagtcacagtagcagggtcctggcccagacctccgatgaccacatggacaaggaagttgatgcaggggaaggagtctgtgagcc

SEQ ID NO: 454585 - DNA, 201 bp, Homo sapiens
gtgacatgttaatgtatgttctggaagaacacaccaaaaaataactaaattaaattttttaaaattttgcaattaaatattcttttacaattcaatgtgtrtatatatatatatatatatatatatatatatgataaataccagacacatttatagagctcttatgatcataaaatctcttatttatgaaggtatttctca

SEQ ID NO: 454586 - DNA, 201 bp, Homo sapiens
ataaaatattgatgaattaagattcaactaacatatttctgctttattctcattgtatttttaaaacaaaaatagattttgtttaaaaaattctttctatwtgtaaatattctaaaatgtaatattccacttggcactaagtatttttgttcactcttctcatccatgtcattggtctcccttgttatagtcttaatttaa

SEQ ID NO: 454587 - DNA, 201 bp, Homo sapiens
tgtgtccaggaatttatccatttcttgtctcttatgatcctttgtatttctattgcatcaatggtaatgtctcctttttaatctctggttctatttatttstcttctcttttttcctagttactctggctaaacatttgtcaattttatcttctcaaaaaaaaaaaaaaaactcttttgttgatcttttgtattgtttttg

SEQ ID NO: 454588 - DNA, 201 bp, Homo sapiens
tttatagagctcttatgatcataaaatctcttatttatgaaggtatttctcattcacaaatctcattataaagttaaagataaattacttgaaatattaarcaagtatatttaacttcttttatttatagacagtttgtcccgttcaatagctggtctgtgttatgtgacttaatttataattttatatggctttgtcatg

SEQ ID NO: 454589 - DNA, 201 bp, Homo sapiens
aataaataatgaagagtcttactctaactacagaaaatataacacctgtttagattcctaaatagttgaagatggtttattggaaattaacctcatattamagggagtctcctgaatgtatcctaaaaggatatctgtggcctggacttgaattgcttcctgatttctgtgtgtctctgtctgttgcctttgcataacagg

SEQ ID NO: 454590 - DNA, 201 bp, Homo sapiens
catcaatggtaatgtctcctttttaatctctggttctatttatttgtcttctcttttttcctagttactctggctaaacatttgtcaattttatcttctcaaaaaaaaaaaaaaaactcttttgttgatcttttgtattgtttttgtcatctttatttcttttactcttgctttgatatttactatttctttccttttagt

SEQ ID NO: 454591 - DNA, 201 bp, Homo sapiens
aatcactttcttaagtgtctaatgcatattttgcacaatgctatgaggaggaaaagaagaaagagagaaagaaagaagaaagagaaagaaagaagaaagasgaggagagagagaggggaaagaagaagtggggaggaaaaatcatattcttcagtttataatttagttgtcagaacaagagcaaacacatgtttaaaattt

SEQ ID NO: 454592 - DNA, 201 bp, Homo sapiens
tattaaaataaaaactataaatatatttatttacacaaaatggtgtatttgcccttgttgattttgcctcttaaaacaccctccgtgatctaaaatacaaraacattttttgtttttctaacagttttctagagttccttctttatcctattcttatctctttctttttattgtcttattttatacttaaaacctttaaat

SEQ ID NO: 454593 - DNA, 201 bp, Homo sapiens
atcaatggtaatgtctcctttttaatctctggttctatttatttgtcttctcttttttcctagttactctggctaaacatttgtcaattttatcttctcaaaaaaaaaaaaaaaactcttttgttgatcttttgtattgtttttgtcatctttatttcttttactcttgctttgatatttactatttctttccttttagta

SEQ ID NO: 454594 - DNA, 201 bp, Homo sapiens
agttggaagatttggaacaaatcccaattttgttgtatcatccttatttagtgaaaatgttaataattattaagcatctgtcatgaattaggtaccttgctaactaactactttatatattttaataatccacaattgtagtgtgccagagttggagccttcaagttttagtgattaattgaaaagcacaacttatttctt

SEQ ID NO: 454595 - DNA, 201 bp, Homo sapiens
tctaacaaaagacaaagacatagattgttctcatatgccccagaccaaaagtcagggttttgttttgttttcctgattccaaaatgctggtgggttgtagratagcagaattaaatgtgatgtatgcattgattacatatgcacatatataattgtgtattatgtatacataatattactaagcttgaattttgaagtact

SEQ ID NO: 454596 - DNA, 201 bp, Homo sapiens
tttgctgtatcccataggttttgatatgttgtattttcattttaatttgtctctaaaattttaaaattttgcttttaatttcttagttgacccattggccrccaagagtgtgatgtttaatttccatgtgtttgtatagtttcctgcttttactgattctagtttcatacactgtgattggaaacaatacttaatatactt

SEQ ID NO: 454597 - DNA, 201 bp, Homo sapiens
aaatctcaccttgaattgtcatattccccacatttcaagggtagaaccaggtggagataattgaatcatggacgcagtttccccctgtgctcttctcaggytggtgagttctcatgagatgtgatggttttaaaaggggcttcccccttcactccacattcattctttcttctactgccctgtgaagaggtgccttccacc

SEQ ID NO: 454598 - DNA, 201 bp, Homo sapiens
gttggaagatttggaacaaatcccaattttgttgtatcatccttatttagtgaaaatgttaataattattaagcatctgtcatgaattaggtaccttgctaactaactactttatatattttaataatccacaattgtagtgtgccagagttggagccttcaagttttagtgattaattgaaaagcacaacttatttcttc

SEQ ID NO: 454599 - DNA, 201 bp, Homo sapiens
gacatagattgttctcatatgccccagaccaaaagtcagggttttgttttgttttcctgattccaaaatgctggtgggttgtagaatagcagaattaaatrtgatgtatgcattgattacatatgcacatatataattgtgtattatgtatacataatattactaagcttgaattttgaagtactctttatgaactaggga

SEQ ID NO: 454600 - DNA, 201 bp, Homo sapiens
gatagtgatatggataacgaagtctgggccgaggtggtctcagatggagatgaggaacttgttgggaagtgaagtaaagatcactcttgctgtacaaaggkactggtggcattttgcccctgccctagagatctgtggaacttttaacttgagagagatgacttagggtatctggtggcagaaatttctaagcagtaaagc

SEQ ID NO: 454601 - DNA, 201 bp, Homo sapiens
ttggaagatttggaacaaatcccaattttgttgtatcatccttatttagtgaaaatgttaataattattaagcatctgtcatgaattaggtaccttgctaactaactactttatatattttaataatccacaattgtagtgtgccagagttggagccttcaagttttagtgattaattgaaaagcacaacttatttcttct

SEQ ID NO: 454602 - DNA, 201 bp, Homo sapiens
taggtacttcaatgactatgaacatattttatttatgttttaaatcattctgacaatttaatttgaatcaccaagttttagaatgtaggcacttatcattrtctgttaagtttattacatatagctatgttttaaatgattttttaatgaagaccctaaagtaatatgttattatatgtagatgttactatatgatataca

SEQ ID NO: 454603 - DNA, 201 bp, Homo sapiens
aagaatgagaacacttgttaaatgtgccaacctccctttagcagaaacagctccattaagccagtatatttggcactttctcaatgcacgatgtgtgtgtggggtgtgtgtgtgtgtgtgtgtgtgtgtgtgttttagtttatgaaaccaatttaaatgctgcattcctaaaaagctggctatgatcctcaattttacaga

SEQ ID NO: 454604 - DNA, 201 bp, Homo sapiens
atgagaacacttgttaaatgtgccaacctccctttagcagaaacagctccattaagccagtatatttggcactttctcaatgcacgatgtgtgtgtggggtgtgtgtgtgtgtgtgtgtgtgtgtgtgttttagtttatgaaaccaatttaaatgctgcattcctaaaaagctggctatgatcctcaattttacagagaag

SEQ ID NO: 454605 - DNA, 201 bp, Homo sapiens
caatgagctacaatttaccagtaacatacattctttattaatattaccttcttttgctttcagaaggcatgtagggagaaggccataattagaatatatgkatatatatttatttatatttatatatatatgtatatatatttgccaatctagaatttctaatctccatacactttggcaactattggggaactaaaagat

SEQ ID NO: 454606 - DNA, 201 bp, Homo sapiens
attttctcccattctgtaggttgcctgttcactctgatggtagtttcttttgctgtgcagaagctctttagtttagttagatcccatttgtcaattttggsttttgttgccattgcttttggtgttttagacatgaagtccttgcccatgcctatgtcctgaatggtattgcctaggttttcttctagggtttttatggtt

SEQ ID NO: 454607 - DNA, 201 bp, Homo sapiens
cacttgaacccaggaggcaaagggtgcagtgagccgagatcgtgccattgcactacagcctgggcgacagagcaagactgtctcaaaaaacaaaaaaaaaacatatatgtatatatacacacacacacacacgcagatagtaacaggtagcatgatttagtaaacataacattgaataactgtttttcctgtaaaatgggg

SEQ ID NO: 454608 - DNA, 201 bp, Homo sapiens
tatgtcttcaattttttttcattaatattttaaattttaagtgtacagatattttacctctttggttaattttactcctgagtatttttttgtaggtattrtaaatgagattgttttcttattttcagatattttgctgttagtgcataaaaatagtactgatttttgtatgttgattttgtatcctgaaacttaatgaac

SEQ ID NO: 454609 - DNA, 201 bp, Homo sapiens
agggaggagccgaaagtatttaatagagacttgtgagaaatttgctcatttagaatttcaagttcttgttttttactattttctctcaaattgttatctaytgcctttaagtttttgtctctttatacaccactccctggttcatcactttctccttattccttttgcttttgttcactcgctttttaaatttcatccacg

SEQ ID NO: 454610 - DNA, 201 bp, Homo sapiens
aacctgccagatctggagggatggaagtcaggggcgggtctgagatgtcagcaaacagcagtggtggacagcaagacaaaagctcagctccagccttaacraacacagagcagaagagagtgcatttgcaagatttaatagagtgaaaacagagctcccatacaaagggaggggacccaaagagggtagccgttgctggct

SEQ ID NO: 454611 - DNA, 201 bp, Homo sapiens
cacactgattagattactttaacattgtaatatgatttgaaaccaggaattgtaaagcctccagcttttttgttctttctcaagacatatatatatatatwtttttttgctagtctgtctgtttccattgtggttcctgatgagttttaagattttcttttttttttttttttgagatggagtcttgctctgtcaaccagg

SEQ ID NO: 454612 - DNA, 201 bp, Homo sapiens
catactcttgggctcaggaaatcttccgccttgtcttcccaaaatgttgtgattacacacataagctctgtgactagctttttattttttatttttttcawgtgtagtttacattgtgggaggagacatgtaaacaatttcttaccttgcttaagaaatacaggtagaatatggcatttcctagctatctcctctgggaaa

SEQ ID NO: 454613 - DNA, 201 bp, Homo sapiens
agaagatatatacagtttctttcttgagcaaaaagcaggttgttcactctccactataataatgtgtccttctagtgcaaaagtcaggcaggcttactttmtacgttaaaagattctgagtctcaagctcaggattcttctcttgtgttaccttaatgaaaattagggctcagagaacccaagcaaatactgacactctgg

SEQ ID NO: 454614 - DNA, 201 bp, Homo sapiens
acttagaaatttgtctaagtttgtcacatattctggaatctgacatttgctgtgtcttaaggccagtactgtcttcgtattaacattatggtttttaaattgtgtgtgtgtgtgtgtgtgtgtgtgtgtataaatttttttaagagtctcactctgtcaccctaggctgaataacaatcatagctcactgtagtcttggat

SEQ ID NO: 454615 - DNA, 201 bp, Homo sapiens
attctaaaaagactacttatccaaatgcaacttggctgcctaccatgatttggcaaataaagactttcaagggcagaaagaaaaaaaaaatcttaagattrtttaataacagcatgtaccttccaaagaagctaaagaaaattgtcaagtgaaacagaaaactgtgacattattttattaaaatatgacctacagttttaa

SEQ ID NO: 454616 - DNA, 201 bp, Homo sapiens
gaactttgaaggcctaaactcaggacaaaatatatgagatgttgacagcctatggcagatttttaattgatattgcaatcagtgaaattagtagtattgcrtatatttttgaggggaaaaagataaaaggaaattatttttgagtttgaagtttagtgtgtgctttagcctacagctagtattcacagaagattttcacag

SEQ ID NO: 454617 - DNA, 201 bp, Homo sapiens
tttttttttcgtttgtttgttttgttttgttttttttgagacaagttctggctctctctcccaggctgcagtgcaagtggtgcgatcttgaccctgcaacstctgcctctcgggctcaagccatcctctgacctcagccttccaagtagctgggactagaggcacacaccatcatactcagctcatttttttgtatttttt

SEQ ID NO: 454618 - DNA, 201 bp, Homo sapiens
cttagaaatttgtctaagtttgtcacatattctggaatctgacatttgctgtgtcttaaggccagtactgtcttcgtattaacattatggtttttaaattgtgtgtgtgtgtgtgtgtgtgtgtgtgtataaatttttttaagagtctcactctgtcaccctaggctgaataacaatcatagctcactgtagtcttggatt

SEQ ID NO: 454619 - DNA, 201 bp, Homo sapiens
aacctaagtggtaccctgaagctaaaggagtgtaaccaaagaatgacaaacttggaagaggatcagatcttaaagagaaggtgtaattcatctcactggasagcagagaagttttcgagtttggctgagcatccagagatggcccatagtcatggggcaagctggcggccagtagaatagtcggcatggataaccaaacca

SEQ ID NO: 454620 - DNA, 201 bp, Homo sapiens
cgggctcaagccatcctctgacctcagccttccaagtagctgggactagaggcacacaccatcatactcagctcatttttttgtattttttgtagagatgkggtttcaccatgttgcccaggctggtcttaaacttgtgagctcaagcgatccacccaccacctcggtctcccaaagtgctgggattacaggtgtgagcca

SEQ ID NO: 454621 - DNA, 201 bp, Homo sapiens
tattatggtgatttgattctgaatgtggatggaaaggagatgaaataattcatcttatttagaaagtctccagtatattaaacatatagaactatcaaatrattgtgtttttttctctgggaaatctcactcatgagcatgttttttgtttcaaattaatacttcgcacaattctttcatctatttatttagctcagtact

SEQ ID NO: 454622 - DNA, 201 bp, Homo sapiens
gtatgttttatcttctctagcatctgggacaactggccttgaaccaaacatgtgcacctcgtttttcttttcccttcttcctctgagatttcttttcccakaggctcttatttcatgcaatgatccactagccctggaaacaggaacataaacactcgaaccctagaatgaacataatttagtcttaactacattagatat

SEQ ID NO: 454623 - DNA, 201 bp, Homo sapiens
agaggcacacaccatcatactcagctcatttttttgtattttttgtagagatggggtttcaccatgttgcccaggctggtcttaaacttgtgagctcaagsgatccacccaccacctcggtctcccaaagtgctgggattacaggtgtgagccactacgcccagctgggaaatatcctgtcttttaaatgacatcttttgg

SEQ ID NO: 454624 - DNA, 201 bp, Homo sapiens
catatgatgatttataagacaaataaggtaaaacctgtgcttccagttatgtttaataatgcacactcccagcttttcttccctttcataagcagatttgyatctgttgcttactgctggagacaggaatcaataatgatgaataacaatgtatgtaattcactcagaagaggcatattacatggactttagaagcgaatt

SEQ ID NO: 454625 - DNA, 201 bp, Homo sapiens
cttaccatgttgcccaggctggtctcatactcttgggctcaggaaatcttccgccttgtcttcccaaaatgttgtgattacacacataagctctgtgactrgctttttattttttatttttttcatgtgtagtttacattgtgggaggagacatgtaaacaatttcttaccttgcttaagaaatacaggtagaatatggca

SEQ ID NO: 454626 - DNA, 201 bp, Homo sapiens
cttttgctgtgcagaagctctttagtttagttagatcccatttgtcaattttggcttttgttgccattgcttttggtgttttagacatgaagtccttgccyatgcctatgtcctgaatggtattgcctaggttttcttctagggtttttatggttttaggtttaacattgaagtctttaatccatcttgaattaatttttg

SEQ ID NO: 454627 - DNA, 201 bp, Homo sapiens
ccccctccccccaccccacaccaggccctggtgtgtgatgttccccttcctgtgtccatgttttctcattgttcaattcccacctatgagtgagaacatgyggtgtttggtttttttgtccttgtgatagtttgctgagaatgatggtttccagcttcatccatgtccctacaaaagacatgaactcatcattttttatgg

SEQ ID NO: 454628 - DNA, 201 bp, Homo sapiens
aagtgtaataatccccacgtatcaaggacaggaccaggtggagataattgaatcttggaggtggtttcccccatgctgttctcgtgttagtgagttctcaygagatctgatggttttatttattttatatatatgttaggatatgtatacttacatatatcatttatcacctttgctcaacactcattttctctcctgcca

SEQ ID NO: 454629 - DNA, 201 bp, Homo sapiens
gttaggagcatgccagtcatcttggtcccttggtggtgctgtttcccataatttcttaatttaggaggtttaggtagataaatagataaaatttcctttaytcctatgtaaaacacaaaaagccagtaagcatgcttcataacagaaaggaacttttaatataatgttttaaaccattttttcttttcttcttcttatcat

SEQ ID NO: 454630 - DNA, 201 bp, Homo sapiens
agggttttttatgcctctatcgccttcagttctgctctgatcttagttatttcttgccttctgctagcttttgaatgtgtttgctcttgcttctctagttsttttaattgtgatgttagggtgtcaattttagatctttcctgctttctcttatgggcatttagtgctataaatttccctctacacacagcttttagtgtg

SEQ ID NO: 454631 - DNA, 201 bp, Homo sapiens
atttttccaactctgtaataaaacaaattattgtataattaaaaatgtacataaacccaactgtacataacttactcttccagttctctcctttgcctctyaaggaaagtaaaattgactgaagaaaaaaaatatgtatggagagagactttagctaatcagtgcttaattaatctggtataatccttcttcagaaccatg

SEQ ID NO: 454632 - DNA, 201 bp, Homo sapiens
tttgtaaacttgtggtcacgttatatatgggcacacacacacttttatgggaaatgagggtttcctcatttaaaagctatctttgttaaaaaaaagaaagraacttgatacagaggagaaaatatgtaggtagcataagtattctttgggaagaaataaaaatggcaggtgaatgctaattttatcctgatggagaaaagc

SEQ ID NO: 454633 - DNA, 201 bp, Homo sapiens
ccaggccctggtgtgtgatgttccccttcctgtgtccatgttttctcattgttcaattcccacctatgagtgagaacatgcggtgtttggtttttttgtcyttgtgatagtttgctgagaatgatggtttccagcttcatccatgtccctacaaaagacatgaactcatcattttttatggctgcagagtattccatggtg

SEQ ID NO: 454634 - DNA, 201 bp, Homo sapiens
gttgcacgctggacccgtgcagagttccgagctttctcctgcttcagcccagcttctgtgtcttccttctgtccactcttggtgccttccctctgaaggcytgttaggagcatgccagtcatcttggtcccttggtggtgctgtttcccataatttcttaatttaggaggtttaggtagataaatagataaaatttccttt

SEQ ID NO: 454635 - DNA, 201 bp, Homo sapiens
actatgtggtcaattttggaataagtgcagtgtgtggctgagaataatgtatattctgttgatttggggtggagagttctgtagatgtctattaggtccgmttgatgtagagctgagttcaattcctggatatccttgttaactttctgtctcgttgatctgtctaatgttgacagtggggtgttaaagtctcccattatt

SEQ ID NO: 454636 - DNA, 201 bp, Homo sapiens
ggtaaatcatgtcttggatttttcatgtctctattattgtgaagaaaatgctttatagaaaatgtttatctgatcgagaccacagttattttggtttctcytccgtgttttgaatgttttaaaacaagttgaagtgagagataggagagattgcttttcttgatgattatctttatgtttcccttcattttttcactttca

SEQ ID NO: 454637 - DNA, 201 bp, Homo sapiens
ttttcttgtaaatttgtttgagttcattgtagattctggatgttagccctttgtcagatgagtagattgcaaaaattttctcccattctgtaggttgcctrttcactctgatggtagtttcttttgctgtgcagaagctctttagtttaattagatcccatttgtcaattttggcttttgttgccattgcttttggttcaa

SEQ ID NO: 454638 - DNA, 201 bp, Homo sapiens
aaaaaaaaaaaaaaaaaaaaagaatatttgttgagtgaatgaaatagatttattgaaacctggcatatttaggatgtgagcataaattactaataaatttrccctttctcccaatccaaaattgacaatcatttttttcatttaaaatattgacactggccttactgcccatcataatcaaaagagttccctgtcctgtta

SEQ ID NO: 454639 - DNA, 201 bp, Homo sapiens
agtattgatatacagtcataacaaatagtaggggaacccattatacataaatatatggtaaaacagcaagtttaataataatatatatattaccctatatrtataaaaataaataactgtatataaatatttgtgtatatttttctatttttaaccatataacatctgtagaaggttatataatacattgctaaaattggt

SEQ ID NO: 454640 - DNA, 201 bp, Homo sapiens
ctgaggtgggtgtatcactcgagattaggagttcgagaccggcctggccaacgtggtgaaaacttgtctctactaaaaatacgaaaattagccaggcgtgkttccaggcgcctctaatcccaactattctggaggcggaggtaggagactctgttgaacctgggagactgaggttacagtgagcctagatcatgccactgc

SEQ ID NO: 454641 - DNA, 201 bp, Homo sapiens
ggagtctaagtcactttgtaggtcactaagtacttgctttatgaatctgagtgctcctgtattgggtgcatatatatttaggatagttagttcttcttgtkgaattgatccctttaccattatgtaatggccttctttgtctctcttgatctttgttggtttaaagtctgttttatccgagactaggattgcaacccctgc

SEQ ID NO: 454642 - DNA, 201 bp, Homo sapiens
gaatcatcttgtgcctcttgtaaatttcttgtcccattctggacttggaattagccatttctcctaggagccctggtttgttttttagaaaaaaaaaattaaaaaaaaacacaagacctaggcactgggtgttagtaaggatattttatttaataaaattaccacattttccacagaatcagaagaaaaacataagactta

SEQ ID NO: 454643 - DNA, 201 bp, Homo sapiens
acccaatttacatttgtacttaattagaaaattgtctactgtaattttagttcataaacaaagtaaactgcatctttctgcccttttttcagtgttgagtktaaagtgaaatccttggtactatttttttttccagtctgtaattaatttgcgaattcctactatagtaattgattcaaatggttttcattgtacaacaat

SEQ ID NO: 454644 - DNA, 201 bp, Homo sapiens
tcccttggctgccccagcttgtgtctcattgggtcatgtgcatcttagcttcatgggctccaagtttagcaccaggacttgcccaggaattgcagtccttrtgggctagactgcatttcaagtttatttagtacccccaagctctttagcctgtggtagtggggcttactggaattcaggttccaattgctgggatgagta

SEQ ID NO: 454645 - DNA, 201 bp, Homo sapiens
ttcatgattcacatgaattcacatgattttttgtttaattatttattcaagaaatgtttactaaaaacttacagtgtgttgggtccttaggctatgaaccrtataataccacgtactgaccaaccacagatgaatagagtctagcaggatatgtaggcataatcacaatactttttaatgttattataattagcgtaacaa

SEQ ID NO: 454646 - DNA, 201 bp, Homo sapiens
tacccccaagctctttagcctgtggtagtggggcttactggaattcaggttccaattgctgggatgagtaattcacctctggctagggctaatctgaatgytccctccatgtcaccaactgagctctgccctgagtcactttccactgtgaccaggcagcactgtgttccaatgctaagttccacaattagtgcactgtac

SEQ ID NO: 454647 - DNA, 201 bp, Homo sapiens
atgtgttttagcagaaacttacttgtgtccctttggttagtggctgatacatagcacagaaattagaaggtaaacaattgccagatgaaaggattaaattataactaatagcaaaaattttgaagatagatataatttgaatattctgagaaactgttgatgtcagattctcagctaaggaaattatctgctttgaagctc

SEQ ID NO: 454648 - DNA, 201 bp, Homo sapiens
tggaacttccacactccctaccatccacgattatctgttgtttttgagctttggaatgggctcctaaataatcaactcaaaaataattctcactctactcycttcacttcctcctggtcaataaacctagaaagaagattggccatgaagtgcagctgtcaacagaaaaggatcttagtttggcagcctcactttggcctg

SEQ ID NO: 454649 - DNA, 201 bp, Homo sapiens
tgtgttttagcagaaacttacttgtgtccctttggttagtggctgatacatagcacagaaattagaaggtaaacaattgccagatgaaaggattaaattataactaatagcaaaaattttgaagatagatataatttgaatattctgagaaactgttgatgtcagattctcagctaaggaaattatctgctttgaagctct

SEQ ID NO: 454650 - DNA, 201 bp, Homo sapiens
gtgttttagcagaaacttacttgtgtccctttggttagtggctgatacatagcacagaaattagaaggtaaacaattgccagatgaaaggattaaattataactaatagcaaaaattttgaagatagatataatttgaatattctgagaaactgttgatgtcagattctcagctaaggaaattatctgctttgaagctctt

SEQ ID NO: 454651 - DNA, 201 bp, Homo sapiens
tgtggcctgaaagctggtatagacaatatgtaaatgaattggtgtggagctatttcaataaaacattatttatgaaaactaactataagctggatttgacytgtggacttttgagacaatatctggcacatagaagctcttaaagaatatttgttaggccgggtgtggtggctcactcctgtaaccccaacactctggggg

SEQ ID NO: 454652 - DNA, 201 bp, Homo sapiens
ttgcaatgagctgagattgcgccactgcactccagcctgggcgacagaccgagactctgtctcaaaaaaatcaaaaaccaaaaaaacaaaacaaaacaaawaaacaaaaaatacagagattggccaggcgcggtgactgacacctgtaatactagcactatgggcagtccaggtgggcggatcacctgaggtcaggagttc

SEQ ID NO: 454653 - DNA, 201 bp, Homo sapiens
atatctttatatcctcaactttataatttatgagcagtgtatcatatttctaaatctatgttctcattaaaaaatacggagattaggccgggcgcagcggytcacgcctgtaatcccagcactttgggaggccgagccgagcggatcacaaggtcaggagatcgaaaccatcctggctaacacggtgaaaccccgtctgta

SEQ ID NO: 454654 - DNA, 201 bp, Homo sapiens
ctgcatctattgaaataattatgtgggttttgtctttagttctgtttatgtgatgaatcacatttatttatttgtgtatgttgaaccaaccttacatctcmtggataaagcctacttgattatggtggataagcattttgatgtgctgctggatttgttttgccagtatttttttgagaatttgtgcatcaatgttcataa

SEQ ID NO: 454655 - DNA, 201 bp, Homo sapiens
tcataaaaaatattggcctgaagttttttgttgttgtgtctctgccaggttttggtgtcaggatgatgctggcttcatagaatgagttagggaggagtctytccttctcagttatgtgggatagtttcaggaagaaacatactggctcttcctgtacatctagtggaattcagctgtgaatccatctggtcctgggctttt

SEQ ID NO: 454656 - DNA, 201 bp, Homo sapiens
tttggtgtcaggatgatgctggcttcatagaatgagttagggaggagtctctccttctcagttatgtgggatagtttcaggaagaaacatactggctcttsctgtacatctagtggaattcagctgtgaatccatctggtcctgggcttttattgttttgaaggctatttgttattgattcaatttcagagcttattattc

SEQ ID NO: 454657 - DNA, 201 bp, Homo sapiens
gtcaatcttcccacatagaggagtatgttttaaaattaaggttataggaaaaagaaggtagctttctagaacttctaagtatgctatggagtccataaaargtatgctgattttcacttatttctagaaaattaagtataaatggtaggttggattttcactttcaactactgaagccttaagaagaggttatattgtaat

SEQ ID NO: 454658 - DNA, 201 bp, Homo sapiens
cttgttttgtgctgactttcaaggagaatatgaacagacacttctcaaaagaagacattgatgcggccagcaaacatatgaaaaaaagctcaccatcactrgtcattagagaaatgcatatcaaaacaacaatgagataccatctcatgccagttagaatggcaatcattaaaagttaagaaacaacagatgctggcgagg

SEQ ID NO: 454659 - DNA, 201 bp, Homo sapiens
ttttaacccagttatggctggctgtaagttccatcccgtcatgaccattatgtttcctcaacttttctattttcctacttcctttgctctgctctcagtcrctgggagacgaaagtgctgctggttagcacagaagaaactgctgctgctgcggcttctactgttgtctgccatctctgttaccatcgagaccggggctgt

SEQ ID NO: 454660 - DNA, 201 bp, Homo sapiens
ggtgcctgccaccacatttggctaatttttgtatttttggtagagactgggtttcaccattttggtcaggctggtcttgaactcctgacctcaggagatcygcccgccttggcctcccaaagtgctgggagtacaggcgtgaaccacctcacctggccctatgataaatattaacttataaattagtaagatgtttatctc

SEQ ID NO: 454661 - DNA, 201 bp, Homo sapiens
atttaaaaatattaataaagagattcatgaaactactgggttgtttgggaaccgactttatacaatagttatatcttcctttttttttttttttttttttkgggacaggaccttgctccatcgcccatgctggagtgcagtgtggcacagtcatgactcactgcagcctccaagtcctgggctcaagcagacttcttgcct

SEQ ID NO: 454662 - DNA, 201 bp, Homo sapiens
actaaacaaaaacacaaccaaggaccatcacagagtccacttcactcccctgctacctccaccagagcaggtgctagtatccaggtctgaaagacctgaasatggatctcatcacaggactctgcaggctcagcccagaaccagcccagagcccagtagctctgctggttggctagacctggatgggcaaaaacaatcact

SEQ ID NO: 454663 - DNA, 201 bp, Homo sapiens
aatgtatatagaaacctcaatttctagtttctctgattaaaaaaaaagaaccaaatggagcaaattaattcatctcttttttttcatctgtaaatccaaawgctgtgtgaaaagctgtataaattaaatttaaattaatattccattctgaaagtctactttagggtttatgatcacacattactctgttagacctctttt

SEQ ID NO: 454664 - DNA, 201 bp, Homo sapiens
tatagaaacctcaatttctagtttctctgattaaaaaaaaagaaccaaatggagcaaattaattcatctcttttttttcatctgtaaatccaaaagctgtrtgaaaagctgtataaattaaatttaaattaatattccattctgaaagtctactttagggtttatgatcacacattactctgttagacctcttttggtatc

SEQ ID NO: 454665 - DNA, 201 bp, Homo sapiens
attcacatgaattcacatgattttttgtttaattatttattcaagaaatgtttactaaaaacttacagtgtgttgggtccttaggctatgaaccatataayaccacgtactgaccaaccacagatgaatagagtctagcaggatatgtaggcataatcacaatactttttaatgttattataattagcgtaacaagaatat

SEQ ID NO: 454666 - DNA, 201 bp, Homo sapiens
agaaacctcaatttctagtttctctgattaaaaaaaaagaaccaaatggagcaaattaattcatctcttttttttcatctgtaaatccaaaagctgtgtgaaaagctgtataaattaaatttaaattaatattccattctgaaagtctactttagggtttatgatcacacattactctgttagacctcttttggtatctgg

SEQ ID NO: 454667 - DNA, 201 bp, Homo sapiens
atatcttgcaaaattatagtacagtattataccctaggtatttactcaatccaccaaacagttagatttcattagttttccatgtatttatttgtatgtawatatgtgtgtgtgtgtttagttctatacagtttttcacatatataggttcacgcatccatcaccacagtcaagatgctgaacagttccagcaccacaagg

SEQ ID NO: 454668 - DNA, 201 bp, Homo sapiens
gatgctaacatatttagtacctcatgagtatcagacacagacctacttggtgctttttgatatgttctgtttactcttctgcttccttttattaatttttrtatgaaaaagacacatttgatgtctgtttatgtgagcaatctgctgcatagcaacccaatttaatcttttcggttccatcaaatatttaagaatttcttt

SEQ ID NO: 454669 - DNA, 201 bp, Homo sapiens
caaccacttggctcaagcgatcctcccacctaagcctcctgagtatctgggactaaggcatgtgccaccatgtccaactttttctttctttctttctttctttttttttttatggagacagggtctcactatgttgcccaggctggtctcaaactcttgtgctcaagtgatcctcccacctctgcctcccaaagtgctgag

SEQ ID NO: 454670 - DNA, 201 bp, Homo sapiens
atttaataagcaaggaatcattattttgacaataaaaaagttgtatcaatttttcacttaaatacttctaacctgaggtgggaaacaggcaatagaatacrtaaaatcctaaactattataagtttccgtggaaatatgcttaatggtagtctaagaaaaaataatcttgggaacattgtggagagagtagataattacat

SEQ ID NO: 454671 - DNA, 201 bp, Homo sapiens
gcaatctgctgcatagcaacccaatttaatcttttcggttccatcaaatatttaagaatttctttacccttaagaagaataaaaccataatagagtagatkatataaaaacacataacaaaataaatacctaacttgcaagaatattataatatcagactggtaaaacatattaaactgctaaaaaaaatcagaacataat

SEQ ID NO: 454672 - DNA, 201 bp, Homo sapiens
tgagtatatgtatgtatagatctaaaatgtgtatatatatgagtatctttctgtaaaaaattttttaatgtagaattatatatgtatatataatatccacrtatgtgatatatatacacacacacacatacacgtaacatatttgagcaattgtatctataaggacagttattaaaggtggaactactatgctgaagagta

SEQ ID NO: 454673 - DNA, 201 bp, Homo sapiens
aagctatgggctcccaagtaacccgagactgccctgcaagcagtcatggccagtctggggccccaggagaagccagaagactaaggggtgctcaggtcgcrcaggccccatatgatgggcaaaactgcctgacagagttcaggtccagcagttccccatgactaacgtctcctatgggagcaagtcaaaccaagggggtgg

SEQ ID NO: 454674 - DNA, 201 bp, Homo sapiens
agtccagcattagtgctttcaagggaaggagaatgattgcataactggttacatttaaaatgagtaagaatgaagattcttgagtgttgctcacaggtatwtaggaaaaggagctactgttatgactgtggaatctccattgcattttattagatacaagaaaagcacgaatgccagaccagactcaagaagagaacaatt

SEQ ID NO: 454675 - DNA, 201 bp, Homo sapiens
aattatccctactgtactgatgaacatatagagcatttatatctcatttaatacccatgatgactctaagtagcagactctagaattatccctactgtacrgatgaacatatagaggcctaaaaaggataaaaaacttgcctgctgtcacaataagtgctatgtgtcccttacgttagtctgacaataaagactaagccct

SEQ ID NO: 454676 - DNA, 201 bp, Homo sapiens
cataatcattaaatgtgttttggagtatcatccactatttgagatcagaaagcaacatgaaaacaaaagcccaaagaaataactttaaaaacaccaaaacraacaaagagaaaaaaacaaagaaaataaaaataataacttaaaaacaacttttagttagtatttatctaattacagtcctgatgataaggcattcactaa

SEQ ID NO: 454677 - DNA, 201 bp, Homo sapiens
atctgggcagacacacaccagccaagtgatgtgggaccctggggaagctacagtatggggagagagtgtgcaggctggtgtgtggccgtaggcgtcgtgcyactggagctctctgcagctcaggcacaatccaccagtgcagaagctatgggctcccaagtaacccgagactgccctgcaagcagtcatggccagtctggg

SEQ ID NO: 454678 - DNA, 201 bp, Homo sapiens
gttttagcagaaacttacttgtgtccctttggttagtggctgatacatagcacagaaattagaaggtaaacaattgccagatgaaaggattaaattataactaatagcaaaaattttgaagatagatataatttgaatattctgagaaactgttgatgtcagattctcagctaaggaaattatctgctttgaagctcttca

SEQ ID NO: 454679 - DNA, 201 bp, Homo sapiens
agctaacatgctattcccgtgctctcttttgtcccatacttttagagacctatatgttacatttctaagtttcataaatatctttagcatagctaatcacmaactagtgtgatatcttttatcattgattttcactgaaaaattgtttattgggcactaggtgcctggtatatgcacttttataagcaaagttaaagggag

SEQ ID NO: 454680 - DNA, 201 bp, Homo sapiens
ttagcaagatagatggcagtgactatactattttatgtatgaaatagacatcatataagatttatatatagttatatatacacacatatatttacacatawataaaatatcaataacaactaaacaaatttccttcccttcatttttttcctctgacatttaaaaatatatttttcttctttactttttgttcctcaattt

SEQ ID NO: 454681 - DNA, 201 bp, Homo sapiens
gtggggtgctggtaggcacaggtctgggtgtcttctctgtgtcccggaaggtggagtggtcactcagtacgagggaggatctgctgttcactgtgcagtaktagcacaagggcagggtgctggcaggggagaggttggctggttctgtgcctgccaaggctctgtctgctctgcaatggcagttggcggagggtgggggac

SEQ ID NO: 454682 - DNA, 201 bp, Homo sapiens
ttccctgcaaggcaaagaaagtctgcacatgtgggacttcaaaccatttgctctcatgtctacagaaaagttccagcttcagaatggtattaaaattaatrcttcatttctgaggccatgcttctgcctgcagaacataattcagccacaccttagtgcaaaggaatataaggcagattttctccagagtctgagtattaa

SEQ ID NO: 454683 - DNA, 201 bp, Homo sapiens
atccctcaaggctctggatttgtttacttatttagcaaggtatagcagaaaatgacagcatgcccttaacacaaagcttttcctctagtactcttgtccargaagaggtaataaaatttactttaaaaaactactcagtaactgaatagtttatcaaggcattccattgagaagagaaatctttggggtataaaaaggaag

SEQ ID NO: 454684 - DNA, 201 bp, Homo sapiens
aaaatacagtatgtggttttctgatcctctgttagtttgctaaggataattatctccagctccatgcacattcctgcaaaagacatgatgtttttattttktgttttgttttgtttttttaatggctacgtatatactggctaacttctattcatcttttgttttgaaaagtcacttcttcaactcagaggactctgtcat

SEQ ID NO: 454685 - DNA, 201 bp, Homo sapiens
gttgtttcctgactttttaatgattgccattctaactggtgtgagatgatatctcattgtggtgttgatttgtatttctctgatggccagtgatggtgagyattttttcatgtgttttttggctgcataaatgtcttcttttgagaagtgtctgttcatgtccttcgcccactttttgatggggttgtttgtttttttctt

SEQ ID NO: 454686 - DNA, 201 bp, Homo sapiens
ttacttttcttcctttcataaatgtctcatgaggcggaaagaatactgcaaggggagatattcttctttatacatttccataaattctactatttgcagtrtattctgtagaaggttcacaaggttttgtcagaagtccaacatgataaaaaatgtacgaagtacatttgtaaatattaatgaagagatgttatcaaaaac

SEQ ID NO: 454687 - DNA, 201 bp, Homo sapiens
taagctgaaatgtgtgtatatatatacgtgtatatatatatacatatagtgtatatatatgtgtatatatacacgtgtgtatgtgtgtgtgtgcgcatgcrcacctgtgttggttattttgtggtttgtttttgttgtattaataaaagattttatttgtatgctttattaaggttatatatatatatatatataagtctc

SEQ ID NO: 454688 - DNA, 201 bp, Homo sapiens
tgtgttttttggctgcataaatgtcttcttttgagaagtgtctgttcatgtccttcgcccactttttgatggggttgtttgtttttttcttgtaaatttgkttgagttcgttgtagattctggatattagccctttgtcagatgagtaggttgcgaaaattttctcccattttgtgggttgcctgttcgctctgatggtag

SEQ ID NO: 454689 - DNA, 201 bp, Homo sapiens
tgaggtgattaggtaattgtcacacatgaacactcatattttaggttaacagatatagtaggctaattctctagggattttctgaatgttaattttacacrcacacacacacagacacaccttgcttttctcccttttactatcatgaatagggataaaacactaactgtcaatttggggtggaatattaagaaaaactaa

SEQ ID NO: 454690 - DNA, 201 bp, Homo sapiens
gtgtatgtgtgtgtgtgcgcatgcacacctgtgttggttattttgtggtttgtttttgttgtattaataaaagattttatttgtatgctttattaaggttwtatatatatatatatataagtctccaaaataccagtcccgattttgaatactaaatttctttctatcatggtattctttgtttttaaatcaaaccagtat

SEQ ID NO: 454691 - DNA, 201 bp, Homo sapiens
cttgtaaatttggttgagttcgttgtagattctggatattagccctttgtcagatgagtaggttgcgaaaattttctcccattttgtgggttgcctgttcrctctgatggtagtttcttttgctgtgcagaagctctttagtttaattagatcccatttgtctttctgtagagaataaactcctagtctgctagggacgga

SEQ ID NO: 454692 - DNA, 201 bp, Homo sapiens
taggtaattgtcacacatgaacactcatattttaggttaacagatatagtaggctaattctctagggattttctgaatgttaattttacacacacacacayacagacacaccttgcttttctcccttttactatcatgaatagggataaaacactaactgtcaatttggggtggaatattaagaaaaactaaaacttaaat

SEQ ID NO: 454693 - DNA, 201 bp, Homo sapiens
gtaaggatcctttgtagattcccctgttgcctctctaagctgataagcatcagaattgtctctggtgaaggagaatgcatatcctgcctttaggcagaaamaaacagaaggtatggagagctttcccctcatttgcttctcctttaatgtccttcaggtaaaaataaattttatgtcaaagaggcaattttggggtgacat

SEQ ID NO: 454694 - DNA, 201 bp, Homo sapiens
tatgagaggaaaggtaaaaaaataatatttgggtaacacatgttaattctttttgttaccatctttagagcagcaatactcaatcagaggcatttttgccycccagtgaacactgagcaatacctagagatagttttggatgctacacttcagagatgccactaaaaagtaatgggaagaggccaggtatgctacttaata

SEQ ID NO: 454695 - DNA, 201 bp, Homo sapiens
gtagaatccaggaacaaacaagagactagctgctggtgcttcaaactcagttttaacagtagggaagtaagccaaggagcacatcaaagagactgtggagtttttttcttttaaatctcaatatttacttttacatttaaatgtgatttaatggatgatgtaaaaatgtaaagtaggcaaagctcaaagtggggactgaag

SEQ ID NO: 454696 - DNA, 201 bp, Homo sapiens
ctcagccaatctttcaagattttgtgtatttgtcaagcactctatgacctcgtatattattacacactatacattctccaatatattattataaattgtaycaccattcaaatctccttcctctgtttgtgtgtgtgtgtgtatgtatatatatatatcttccagtgtgtgtgtgtgttgtgtatatatagatagatagat

SEQ ID NO: 454697 - DNA, 201 bp, Homo sapiens
accaaatcaagagcaaaattattaatttcaaaaaatttacaaaatgttagaatttgacttacagaaaattgtatacatatagttaaaacagctgtataaaactacttaatatgaatattttctttaaaattattacattttaatattgtaaaatattataaatgaagtataaatatttcactaagaagctttatggatttc

SEQ ID NO: 454698 - DNA, 201 bp, Homo sapiens
tttacagtttttatcatgtttgtagtcaatactcaaaaaacatgtgtgaggaggcttttgcttgttagaactatgaaattgcttttaggttggcagagcayatgaaagccatttctagacttagtttgaaggggatgacatctcttgaaaagagtcagcacaggttaataaataacccttaagagctgcactggatggttt

SEQ ID NO: 454699 - DNA, 201 bp, Homo sapiens
ccaaatcaagagcaaaattattaatttcaaaaaatttacaaaatgttagaatttgacttacagaaaattgtatacatatagttaaaacagctgtataaaactacttaatatgaatattttctttaaaattattacattttaatattgtaaaatattataaatgaagtataaatatttcactaagaagctttatggatttct

SEQ ID NO: 454700 - DNA, 201 bp, Homo sapiens
attcttgcattattaatggttccctttctcccaaaaatttacagtttttatcatgtttgtagtcaatactcaaaaaacatgtgtgaggaggcttttgcttrttagaactatgaaattgcttttaggttggcagagcacatgaaagccatttctagacttagtttgaaggggatgacatctcttgaaaagagtcagcacagg

SEQ ID NO: 454701 - DNA, 201 bp, Homo sapiens
caaatcaagagcaaaattattaatttcaaaaaatttacaaaatgttagaatttgacttacagaaaattgtatacatatagttaaaacagctgtataaaactacttaatatgaatattttctttaaaattattacattttaatattgtaaaatattataaatgaagtataaatatttcactaagaagctttatggatttctt

SEQ ID NO: 454702 - DNA, 201 bp, Homo sapiens
ttgttttgaaggctatttgttattgattcaatttcagagcttattattcgtctgttcagggataccatttcttcccgtgctcagtattgggagggtgtatktgtccaggatttattcattttttctagattttctagtttatgttcatagaggtattaataatattttgatttttttttgtatttctgtggggtcagtggt

SEQ ID NO: 454703 - DNA, 201 bp, Homo sapiens
gcttaaccaaatatttcttgcataaatataaataggcaaaatgtgatcaaaacaatatttaaaattatacatttaatacagatttcttattattcagttaagtggtatatttcttaagcacttataaccgtgtagatctctcttctttattgcagtaaaattatggtaatttatatttattttgttttgtggcactttata

SEQ ID NO: 454704 - DNA, 201 bp, Homo sapiens
aatcacttgagcctgggagacggaggttgcagtgagctgagattgcaccaccacaccccagcctggcgacagagtgagaccctgtcccaaaaaacaaaacraaacaaaacaaaactagactatattttttagacttgatggactttggtgtattctcacaccagactttttggtaacacaaagtgtttcatgttacttttc

SEQ ID NO: 454705 - DNA, 201 bp, Homo sapiens
aggaaagtagcacaaacagataggccttctggaatcatcattcatttaattttaaatatattaaatgaattcattatgtggctataggttagagtaaaaartactttacataaaaaaagacagtgttctttattattgtgactacagaacagcacattgcttttttgttgacatttgagataaactttatattgcaatttg

SEQ ID NO: 454706 - DNA, 201 bp, Homo sapiens
agaatagccaaaactctgaaggcaattatctttggagtggatatagagaaatatgcagtgattttgccctaatagttaatggattctctccttttttttttgatgtatattgctattgtaatttttgtttttatacaactatatttcagcctgcttttaaaatagtcaagtaattcttaatatccccttctgtgtctaaag

SEQ ID NO: 454707 - DNA, 201 bp, Homo sapiens
ttcactgtgttagccaaggtggtctccatctcctgacctcgtgatcctcctgcctcggcctcccagagtgctgggattacaggcgtgagccaccgtgcccrgccgataactttttgttttaaactagccgtttctaaattagagtagctgccatttttatcacttttataatctcattcattgattattttactcgtgcta

SEQ ID NO: 454708 - DNA, 201 bp, Homo sapiens
tctgctgttgaagctctatattgtattttttcatttcacttgttgaattcttcacctcttaatatttctgcttgtttcttttttatatccatctctttgcyaaatttatcattcagataatgaattgttttctggatttcattaaattgtttatctgtactctcttgtatctcactgagtttccttaagatcatgattttg

SEQ ID NO: 454709 - DNA, 201 bp, Homo sapiens
caatcattaaaagttaagaaacaacagatgctggcgaggctgtggagaaatagaagcacttttactctattgatgggagtctaaattagttcaaccattgyggaagatggtgtagcgattcctcaaggatctagaatcagaaataccatttgactccgcaatcccattactgggtatacacccaaagggttataaatcatt

SEQ ID NO: 454710 - DNA, 201 bp, Homo sapiens
tctaaattagttcaaccattgtggaagatggtgtagcgattcctcaaggatctagaatcagaaataccatttgactccgcaatcccattactgggtatacrcccaaagggttataaatcattctactataaagacacatgaacgtgtatgtttattggaacactattaacaatatcaaagacttggaaccaacccaaatcc

SEQ ID NO: 454711 - DNA, 201 bp, Homo sapiens
aaacgcattcaagtggaaaatgaatatgaaaaaatatcagatttactagttgtcagaatgtaagttatatttacaattaattattttatagccattaaatttaacagaataattttaaaatcagtaacatcaattgctattggggatgcttgaaaaattcatatattgctgttagaaatgtgagttttcacaaaattttaa

SEQ ID NO: 454712 - DNA, 201 bp, Homo sapiens
aaagcatttcttcactatattatgtctctttaggttttgcctttatgtggcaaagaaatagaaaagtctccactaaacgtttcatttagaccatccttgtraacaacatgtagagttctaccagcagaatagtaaattgtgaactctttcatttaagaaatatatcaaagaattgaggtgctttttagccccaaacattga

SEQ ID NO: 454713 - DNA, 201 bp, Homo sapiens
tgaaaatacatgagacaagtgaccatgtcagagttaaaacttggttttagataggtactagctaacaaccacaacacctagtattagatgcttggaaagcmacaaaaactctttcctcagggaagcattgaggatttagatgaattcagtgttatttataaagtgcttattatatgttctttttattttaatatcataagt

SEQ ID NO: 454714 - DNA, 201 bp, Homo sapiens
aagtaacagccctgcaagcaggcccttctaaagagtagtttaagacctcctgtggtaactgctctattttccagggacaatacgtaggggacagaggaacacagcagaattttgaaacaggatatacaatcacaataagagaaggagcaccaagtatcttctgttatcagtagaataatcctgatattctaaacctaggtt

SEQ ID NO: 454715 - DNA, 201 bp, Homo sapiens
agagaattcatcataaaacacatacattaaacatctattttactactataaattcttaaacttgatttcatccagtagttcttatcatgtaatttcgaatrcaatgtaatgtagtcagaaacgtgtagaatatcttcatttaaatttgtcaggcatcacatgaagttaaaactcatagtggtctataagaaaaagcaaaga

SEQ ID NO: 454716 - DNA, 201 bp, Homo sapiens
gtgtgctgcacccattaacttgtcatttaacattaggtatatctcctcatgctgcaccaatttaaattcccaccaacagcatgctatagtttccttttctccacaccttcaacaatatttgttatctcttacctttttgataatagccatcctaacatgtgtgaggtaatgcttcacagtggttatttgtatttgcctgat

SEQ ID NO: 454717 - DNA, 201 bp, Homo sapiens
caaaatgcagctgcttattcattagtttggttcctgattgttggagagtgataagtgttaggcacacctctagtcagccatcttgctgatttctgtctcagaattttcttgtgccctttgtaaatcttctttcatccctcctgctgtggctccacacagccactgcttagttttctgtcactaaacactaattagcatttc

SEQ ID NO: 454718 - DNA, 201 bp, Homo sapiens
ttgcgtctctgtcttcttcagtttcggcttatcgaatttctcgatctcagccatatcgggtttgtcagacatggttgcggaggaaaagcggagcgaggcgygcgagtacgagcgaagtctggtctgcgcagtggccaccaccgagttgtcgccataatatttttaataatgtttgcatttcttctatattgctaacttctt

SEQ ID NO: 454719 - DNA, 201 bp, Homo sapiens
taacttttatttttagttcagaggtacaagtgcaggcttgttacataggtaaacttgtgtcatgggggttttacagattatttcatcacccaggtgttaarcctagtgcctgttagttatttttcctgatcctctcccttctcccacccttcaccctctgagaagctccagtgtgtgttttttgcctctatgtgtccatgt

SEQ ID NO: 454720 - DNA, 201 bp, Homo sapiens
ctatgtgtccatgtgttctcatcatttggctccctaaagagaatgtggtacatattctctttacatggtgtattacatacaccatggaatactatgcagcyttaaaaaacaacaagataatgttctttacaaggacatgggtagagctaaaggccattatccttagcaaactaaaacccatgttcttaaaatttaccttct

SEQ ID NO: 454721 - DNA, 201 bp, Homo sapiens
ctcattagtatcgataataagcttctaatatccttagggatcatatagtaaatgaaaaaaatatattgtgatgttaaatgacttatgtaatactgtatccrttcagatactttcaaatgcaaattaaaaaaaaaaagaactgaaacttacataaataataaagcaatgtattagttaacatgaaagaggaggaaagcttca

SEQ ID NO: 454722 - DNA, 201 bp, Homo sapiens
gttagtttgccttcctattaattattccagctacttcagagtttatagccctaaaagggatcagtttgattccctcacccatgcagagggaacactcaaaytcccccttgcatccctgctaatgattccttctatcctgcagcgtgtatcattcatgcttagttatgcgagtccaacagatccttgatgttaccttgctga

SEQ ID NO: 454723 - DNA, 201 bp, Homo sapiens
agagtctgctgttgactgagttcaagattttccctggggactggtcatgcaggcactctctgcctatgtgatcagccacaatcatagaaattccagactcscagaaggaaagcagctgtttactataaatcaggctgatacagctaattcagtgcctcaggcaaacaaaacagctttatcagtgtagggaacttcaaaagc

SEQ ID NO: 454724 - DNA, 201 bp, Homo sapiens
gtttcgtgttcccaaccaaagacgagaagaagaaaatgctgtagtattagtcaagaattttgcttaaacagtgcccctctacttactttgcttaatccttscttagatagagaccagttgcaactttgcaaggtttcattgcctcatctataaatatgggataataataatatctaatctctaacttgacacataggatta

SEQ ID NO: 454725 - DNA, 201 bp, Homo sapiens
tggagtgtagtggtacaatcatagctccctgcagcctcaaactcctgagctcaagtggtcctcctacctcagcctctttagtaactaggactgtaggcctrtgccaccgtgactggttaattttattattattattattattacttgagaaatggagcctcactgtgttacccaggctgctctcaaactcccagcctcaag

SEQ ID NO: 454726 - DNA, 201 bp, Homo sapiens
caatagtaactgtgtgatcaacttgattatggtactcatttcacagtgtgtatgtatatcaaatcatcatattgtacaccttaaattaatacaattactayttttcaattataccccaatacatctgaaataaaaagaaaaataactaaataaaggtattaatgacttccatttgatggttctcgtgctaggtatttttta

SEQ ID NO: 454727 - DNA, 201 bp, Homo sapiens
aaagagctctagaaatccgcatagggcctccccagaatatttgtttgaatagcaatctacacatacataatgtgaaattccacatgaccaggcaaagaacaactgtgagaaaagaataattagagtgaactgtcagtagaattcccaggggtctcacaggtctggtaatcttttgatttcccatcagccagaatagggaac

SEQ ID NO: 454728 - DNA, 201 bp, Homo sapiens
acttcagagatgccactaaaaagtaatgggaagaggccaggtatgctacttaatatcccacagtgcacaaggcagctcacctcagccaagaattatcctgyccaccaggttaatattgccaaggagaaaccctgctctaggtggtcattgttaacaatgttgaaatcttgattgataacataaaaatattttgtagcactt

SEQ ID NO: 454729 - DNA, 201 bp, Homo sapiens
aggatatacaatcacaataagagaaggagcaccaagtatcttctgttatcagtagaataatcctgatattctaaacctaggttttcaattttttttttcargattttgcttatattgtaagtacagtaaaaaatcaagatggtgaaatacaactcaggaacacacatgtattaaggcaggtttgacagttccatcagtata

SEQ ID NO: 454730 - DNA, 201 bp, Homo sapiens
atctacatctgattgatgtacctgaaagtgatggggagaatggaaccaagttggaaaacactcttcaggatatcatccaggagaacttccccaacatagcraggcaggccaacattcaaattcaggaaatacagagaacgccacaaagatactcctcgagaagagcaaatccaagacacataattttcagattcaccaaag

SEQ ID NO: 454731 - DNA, 201 bp, Homo sapiens
tacaacattattgacagaaaaatcaccttgcttcttggcatttgttcagatgctgatttaatgccacttatgatggaatatacagacttctgcacttgctraacaaattggaaagtaaaggtttccaaggactttatggctgccaaagggatattgtaaattattgtaaatataaattatccccttgccagactacagaga

SEQ ID NO: 454732 - DNA, 201 bp, Homo sapiens
tcagttccttcatatgtgactacatgaaacaaaatttgtatgctatatttgcagaataaagtagaaaatacattttgcatacctcaaagtaaaaagattcygtaatacaatttctatatgtattccttctctccaaaacatattttattataacatgaacattttagtagttaacatttttatttgtattgaattttgcca

SEQ ID NO: 454733 - DNA, 201 bp, Homo sapiens
caattactttatcaaacattcatccatttaattaaaattttctttgcgttttatacctaacttgtaatattttgtatattcccatcaagtttttctaattsctttcaattggaatgagatgtgcttgagatggtattagaaataattaagaagtcagacacagggagattgctttttccaggacattatttaggtaaacta

SEQ ID NO: 454734 - DNA, 201 bp, Homo sapiens
tcaggattaagaaactcactcaaaaccactcaactacatggaaactgaacaacctgctcctgaatgactactgggtacataaagaaatgaaggtagaaatraacatgctctttgaaaccaatgagaacaaagacacaacacaccagaatctctgggacacattcaaagcagtgtgtagaggtaaattaatagcactaaatg

SEQ ID NO: 454735 - DNA, 201 bp, Homo sapiens
agtgcagtaacagtaggatcagtcctcgttctcacgtgctagcagcaacagtagtggcagctgcagcagagtgccagcaggtgccatggttcctgcctccyttcaggcattcaccacagtggtgaaggcaacacagcttggcggtgaggggggtctctgttggcaactgtgtgtatggtcacactggaggtgatgttggct

SEQ ID NO: 454736 - DNA, 201 bp, Homo sapiens
ttgacagaaaaatcaccttgcttcttggcatttgttcagatgctgatttaatgccacttatgatggaatatacagacttctgcacttgctgaacaaattgraaagtaaaggtttccaaggactttatggctgccaaagggatattgtaaattattgtaaatataaattatccccttgccagactacagagattacttttat

SEQ ID NO: 454737 - DNA, 201 bp, Homo sapiens
tgtttatatttaaattacagtttacttaatatttcactaggtatttgtttcataaaagatgattatattagtgaatcacaaggatctgaaggaattcttarcatagttctcatcccaagtagctgataaaatagatgaatttcgtttaatattattccatggtagttcacacatgaactaacacattaaatagtgctttca

SEQ ID NO: 454738 - DNA, 201 bp, Homo sapiens
taaggctgtgagtcaactgttgccaaatggtcgcacagttagcgacagaggagaaatgaagcacagagcagtaaaccttggggattcacctggcctccttygcagccaagatttttcctatggtgttagacaacaattaaaaaatttgaaatggaaggtgactcagtaaagggcaaactgaaaagtgtaactctcaatcag

SEQ ID NO: 454739 - DNA, 201 bp, Homo sapiens
gaaactgaacaacctgctcctgaatgactactgggtacataaagaaatgaaggtagaaatgaacatgctctttgaaaccaatgagaacaaagacacaacayaccagaatctctgggacacattcaaagcagtgtgtagaggtaaattaatagcactaaatgcccataagagaaagcaggagagatttaaaattgacaccct

SEQ ID NO: 454740 - DNA, 201 bp, Homo sapiens
tgactttgttctcttggctccttgatgttaggaacccactgcactgaggtggggggaggcagtgggtggtggcggaaggtgctttcagaccacaggtcacwacactctgatgggtggtgccagccaaagcattttttagtgcagtaacagtaggatcagtcctcgttctcacgtgctagcagcaacagtagtggcagctgc

SEQ ID NO: 454741 - DNA, 201 bp, Homo sapiens; identical to SEQ ID NO: 27573

SEQ ID NO: 454742 - DNA, 201 bp, Homo sapiens
taattaataaaactttagtgagataacttttagtttttatctgaagtgtaactataaggaaaatgatattataaaatgatattttgacaaaagatgttttwaaaataggagtaaataatacatcaaatattcacttcaatatggtgatttttttgtttatctatttaaacttttgtctagtacacatttatattacctcta

SEQ ID NO: 454743 - DNA, 201 bp, Homo sapiens
caaaatcaatgtgcaaaaatcacaagcattcttatacaccaataacagacaaacagagtgccaaattatgagtgaactcccattcacaattgcttccaagrgaataaaatacctaggaatccaacttacaagggacgtgaaggacctcttcaaggagaactacaaaccactgctcaatgaaacaaaagagaatacaaacaa

SEQ ID NO: 454744 - DNA, 201 bp, Homo sapiens
ctgtagcctgtatcatagtttgaagttgggtagcttgatgcctccagctttgttctttttgcttacaattgcctttgatattcaggcgttcttttttttcsttgttccatttgaattttaaaatagcattttctggttctgtgaagaatgtcagtggtagattaataggaatagcattgaatcagtaaattgctttgggca

SEQ ID NO: 454745 - DNA, 201 bp, Homo sapiens
taatacaaaatatgagttatattattaaatatggtatatttgatgttttgtgaagattacatttgggggagaaacaaatattaaacctttgtaacaaaatragcttagtaaaatgtcagtataatttgagttaataaattgcaaacaggcatcagggaattgtcatttttgactctattggttgggatgccagttatgaat

SEQ ID NO: 454746 - DNA, 201 bp, Homo sapiens
aattctatattttcatgatttaactacctatcctctaattcagtgtttcttaaactttagtgtgatcagatcgcaaggagctgatagaatccaagcttacmctttcaaagactaatttttaggcaggtgttggggcccaggaattgcctttttaacacgcagtcaggtagtattgtgaggaaatgatccacaggttgaagt

SEQ ID NO: 454747 - DNA, 201 bp, Homo sapiens
acccaaatgtccatcaatgatagactggattaagaaaatgtggcacatatataccatggaatactatgcagccataaaaaatgatgagttcatgtcctttrtagggacatggatgaagctggaaaccatccttctgagcaaactatggcaaggacagaaaaccaaacacctcatgttctcactcataggtgggaattgaac

SEQ ID NO: 454748 - DNA, 201 bp, Homo sapiens
cttcctaaatctttcgtggactctctccagatgtttgtattactagaaatacctgagagtcctgttttaacagtgtttattaataatatagagccttaaasaacctcataaagcaagattttggtgttttcaagcaagactaacaatccaaattaaggaaaaaaataacttacaaatatcaaaaaacaaaacaaaaagcac

SEQ ID NO: 454749 - DNA, 201 bp, Homo sapiens
aatgatagcatctaaacaaaaaaaaattcctgcaaaatgtcataaattaccacacactaatatcaaagtgcctaaaataaacaaactcctatcatgaaggraagtaaaattcaactaacaggtgttcccacaaaggagaaaataaggtcattcctttgaacctaggtggctgaaaagagtgagaaaagatattctctaata

SEQ ID NO: 454750 - DNA, 201 bp, Homo sapiens
tgtttaatctacattctgctgtctgtcttttcatatttcccttttcctgcatattgatgtatttactgatttctctgtttttttttcccattaaaaaacamagcttggcattagtttatgctcagtaaatgttaattactccacctcattagccttgactggactaatttgttagtcaacatagcttattctcactagttt

SEQ ID NO: 454751 - DNA, 201 bp, Homo sapiens
atgaatgagaatttgggcatgactcacaaataggaacttattgtgtttaatctacattctgctgtctgtcttttcatatttcccttttcctgcatattgaygtatttactgatttctctgtttttttttcccattaaaaaacacagcttggcattagtttatgctcagtaaatgttaattactccacctcattagccttga

SEQ ID NO: 454752 - DNA, 201 bp, Homo sapiens
aaatcaaggtgaagctgtattattcctcttctgagtgttgtcttggtactctggaagtgtgtctgactctcattcattgtttctaacaataagccaaactycaaagtaaaaaactgtggtttctcttctcagttaattcttataagttgcccaatgaatgagaatttgggcatgactcacaaataggaacttattgtgttt

SEQ ID NO: 454753 - DNA, 201 bp, Homo sapiens
gatggctaccttcttgctgtaacatcacatgacagaaagagtgagctctgacatcttcctcttctttgaatggcagtaatttcatcacggaggctccaccytcatgacttcacgtaaacctcattacttcccaaaggccccacctctaaatattgttacattggggtgtagggtttccacatatgaatttgaatggaggga

SEQ ID NO: 454754 - DNA, 201 bp, Homo sapiens
ggtagaaacaaacatagaagacaatgcttaataaagaagaaaatatttggccaggcacagtggctcacgcctgtcatcccagcactttgggaggccgaggygggtagatcacgaggtgaggagatcgagaccctcctggctaacacaatgaaaccccgtctctactaaaaatacaaaaaattagccgggcgtggtggcaga

SEQ ID NO: 454755 - DNA, 201 bp, Homo sapiens
tgaagtgctgtgtgctcaaatccttgaagaactttcctacattatgattagcctaagatgtctagcctggagtgtttcacatttttctagctttgtgattrcatcctcccactaggtatctaatgaactgaagtagaccgccctgcatttcagcaaattcaggagtaaggttttatgagtattaaaaaataattgaaaatg

SEQ ID NO: 454756 - DNA, 201 bp, Homo sapiens
gtaagttatcgctttatcacttgttgactgtttctgttaagaagctcattgttgataagtttgtaaagcgacttatgtcttaaatatagttccaaatcgatttttaatgaaacccatgggttttaggagatcagaaaactaatttatgttgtgtagtaactcattctatgaccctgggaaatttggttctcattcttctac

SEQ ID NO: 454757 - DNA, 201 bp, Homo sapiens
taagcaatattttttagttttctttcatatttctgtcagatttctatgtattttgtatttttgattttattgttagtgatattattttatttcaaatctatttttttcattgctaatgtattgaatacaatggagttttgaatattgatcttgtacaaactcgttaaataacttattagttctagtaatttcagattttct

SEQ ID NO: 454758 - DNA, 201 bp, Homo sapiens
actattgtgagtggtacaaatcctactgctctccatgttgcttctgctccacctctccctctctatttccatttgttttacaatatctaactaaaataaawttacaacttactttcttctatttgtcctttttgactatttctctgggaattttagattatgtccaaattggacaagaaggcctatgcctcaaaattgact

SEQ ID NO: 454759 - DNA, 201 bp, Homo sapiens
aaggcctatgcctcaaaattgacttagaaaacactctttttaaaaaattttaagttttattttgggttcgggggtatttgtgaaagtttgttatatgcatrtattatgtgacactgaagtttagggtgcaattgagcctatcacccaggtagtgagcacagtacccaataggtagtttttcagcccttgccctcctttgcc

SEQ ID NO: 454760 - DNA, 201 bp, Homo sapiens
attaataaaaccaaagagagatataaaatgaagaattgtgataactaacactactaaagcaaaaagacaagagacggtaacaaagagtggaacaaacaaayatttaaaaatgcattctggaagcaatgacaaatattctgttctggaaaaaaacaactacaaacagaagaaaattccctacaaaaagtgctatgcatttta

SEQ ID NO: 454761 - DNA, 201 bp, Homo sapiens
ttttaaaagctttataattatatctaatttagttatagatcaaatgacatattttgctgttataaagtaagtagcaataattttaggtcaagcagtttggyggtaagaattaagattaaaaaaaatagtcacagccttcaacccagtaatcctatttctggaaatccaccttaaaatataaaccaagattgtgtaaatatt

SEQ ID NO: 454762 - DNA, 201 bp, Homo sapiens
tttaggcattaaactcaaatgcccctcagaaaaaattatgaagtttctcagacttctacaaaagaacactccaatgctataaattaataaattaacagatrggaagttctgatgaacagaaagtgtgatctgagagtttataaatacctggttgtcattcaaataaagacaagctgttaaacaggcagaaactcaggcaag

SEQ ID NO: 454763 - DNA, 201 bp, Homo sapiens
gaaatacttcataaccataggatagttaaaataataataataaaaaaagataggcaagtacaacttttggcaggtatgtggagaaatccctcctacttcaytgatatgattatataatagtatagtcactttagaaaacagtaagatgctttcttaatctattaaacatagaattaccaaatgacctaccagttccacact

SEQ ID NO: 454764 - DNA, 201 bp, Homo sapiens
gttaaacaggcagaaactcaggcaaggtgactccctcccatggacccatgagcacttatgagaaaaaccaaaaacaaatgaaattttgtcaaccatgatawgaatgaataagtttttgcttaaaaaaagggaatgcggcttggcatggtggctcatgcctgtaatcccaatacttttggagaccagggcaggaggatcact

SEQ ID NO: 454765 - DNA, 201 bp, Homo sapiens
acaggcagaaactcaggcaaggtgactccctcccatggacccatgagcacttatgagaaaaaccaaaaacaaatgaaattttgtcaaccatgatatgaatraataagtttttgcttaaaaaaagggaatgcggcttggcatggtggctcatgcctgtaatcccaatacttttggagaccagggcaggaggatcacttgagg

SEQ ID NO: 454766 - DNA, 201 bp, Homo sapiens
ttccaaactccagcacataattaagagcattctattagatgtgtgtggaatcctcttggagatattttgaaaatttatttatgggatgcatcaagttttayttaatgtttaagacctctgaattttctctgaattagaaataatccttctttttttcagaaaactatgatcttatacaatccaaatggtcaagggcaatgt

SEQ ID NO: 454767 - DNA, 201 bp, Homo sapiens
gtatttgccacttcatatttaaggcctcttttactgtgtacggtatttattaccgtggagccatgagaccaaactgcaaggctctaatctcagttcagctrtatgtttagaatcactgtgtgctgttcatacatgggatttgccccctgagcatattttatttaaatctggttgcaagacattttttttttctttcttcat

SEQ ID NO: 454768 - DNA, 201 bp, Homo sapiens
gtctttataatagatttatatttgtttgaatatatacccaggaatgggattgctgtgacaaatggtatttctgtttttaggtctttgaagaatcaccacastgtcttccacaatggttgaactaatttacactcccaccaacagcgtataagcatttcgtgtcctctgcaactttgccagaagctgttattttttgacttc

SEQ ID NO: 454769 - DNA, 201 bp, Homo sapiens
ttgtcaaccatgatatgaatgaataagtttttgcttaaaaaaagggaatgcggcttggcatggtggctcatgcctgtaatcccaatacttttggagaccarggcaggaggatcacttgaggccagggattcaagaccagcctggtcaagggaacaagaccttgtctccacaaaagaaaaaaatacctgggcattgtggtgt

SEQ ID NO: 454770 - DNA, 201 bp, Homo sapiens
ctcattaaaaggaagtcagtgcatcctgctgtagcacagtgctccactggaagaacatgcagtattctttgcctatttccaatatctatattatatttctrtaatacgtgtcaataatacgggttaatcattgtgattattctatttcttggccacctactctatgccaggcacttggtcagatgttggaatccatttcat

SEQ ID NO: 454771 - DNA, 201 bp, Homo sapiens
atggtatttcatgatgtttatataccacattttttctatccagtctgccattgatggacatttaggttgattccacgtctttgccattgtgaatagtgctkcaatgaacatatgtgtgcatgtgtctttataatagatttatatttgtttgaatatatacccaggaatgggattgctgtgacaaatggtatttctgttttt

SEQ ID NO: 454772 - DNA, 201 bp, Homo sapiens
ttggacatttaatgccatgagttagaatggaaagatacctgaaatcgtctttcacagagatagcctgttcacattgttttcattaatcattcatttttttwaaaaaaaggattttacgtaatgcttttatatgcaaaacatcatgaagcatagttcaagaatacagagattaaaaattagacattattctgaaatggattc

SEQ ID NO: 454773 - DNA, 201 bp, Homo sapiens
ggcaaatatccctgatgaacatagatgtaaaagtcctttccaaaataacagaatacagtacatgaaaggattacactccatggtaaagtgggatttaaccrtgggatgtaaggatgattcaatatatcaaaaataatgtcatacaacacatgaacagaatgaagaataaaaacatataatctcaataaatgcagaaaaaga

SEQ ID NO: 454774 - DNA, 201 bp, Homo sapiens
acacttaataggctaaagtataggctaaatgtaagttttatatgcactgggaaacccaaaaattcatcaaaataaaacagtttattgtgatatttactttrttgcagttgccttgaaccagtcccacagtatctcagaggtatgcccatatatagtattggtttatgttgtgtaactataatctgtagcttcagctaatgt

SEQ ID NO: 454775 - DNA, 201 bp, Homo sapiens
ttactcaaagaagcacagcaaatgtttgtcttcttgttttgtttttgtttacttttccaaaaaagccaaatgaaactgtatacaaggaaacatgttggttrttaggtgtcatgccatctggcactgacatctgccaccacattgaccccaggttattttggctgctttgcctggcaaggagggcacctgcctcttacttca

SEQ ID NO: 454776 - DNA, 201 bp, Homo sapiens
ctgaaacctcaactgcacctcaattcctaagccaagttagacagaagtgagaagcagatttatctgatctccaccactctcagcctatccccagctcagayagatttagttgtatcttcttccagtgtcacttctctgtgaactaaatgcctcactgctgaccaatgggctttcattttcggtatgaaagctacacttgcc

SEQ ID NO: 454777 - DNA, 201 bp, Homo sapiens
gagggaatttattaacattagacatgccttaaaaaatggtaaagggagttcttcaagatgaagcaaaatatgctgtttggtaagaggaacatatgaaagcrtaaaactcactggcaaaggtaaatatatagttaatgtcataattatctgatgcagcagtggtagtgtgtaaactacttgtaattctaatctaaaggtaaa

SEQ ID NO: 454778 - DNA, 201 bp, Homo sapiens
ggaaataatatggcagaataagatgtgtaagcacgatcttattttcttttctcgtacagaatacttacagttattgagccttccagaaattggaagttacstgaagccactcaagtttccttaaaaaacaaaacaaaactgtctatagttaacttgatatgccacttttcaaatgtttctaatatttattttattttattt

SEQ ID NO: 454779 - DNA, 201 bp, Homo sapiens
acttctctgtgaactaaatgcctcactgctgaccaatgggctttcattttcggtatgaaagctacacttgccttcacctcagagctcttattctgtttatrgaaccgctgtacctggaatcctgattctcgactccttgctgcattagctggaattatgttcttattcttagctacaagactagattgggtctagaagttt

SEQ ID NO: 454780 - DNA, 201 bp, Homo sapiens
tttactttatcagcatcaccccttttcccaaggcagtaaagctcagtgccaagagagaccctcttaatccatgatttctctaacggagaaaactgaaagcrtagtgaattcctaccttccttaatcatgtggaatgctgtctaagaggcatgccccttccaaacctcacagataacatgagaacagtaggtgtaagtatcc

SEQ ID NO: 454781 - DNA, 201 bp, Homo sapiens
actaaatgtaagttgtcagcagtttatatttctgaacttttggggtttctaccattcagaattttcctgttggacacttttatttgttttctagccgatcrgggtaaaatgtatcagatacagctttctatgtctatttctgtaaaaacatatgtgttttggctgggcctggtgactcacgcctgtaatcccagcacgttg

SEQ ID NO: 454782 - DNA, 201 bp, Homo sapiens
tatatacatgaaacttagacaaaatagaataatatgttgaaagcaaaagaaaatgtttcatatgaatatttgaatgttaatataaagtttcattcgtaaartactgacaccttaagaatggattagagatcagtgatagattttacaaatttggcttacaaatataatgtttataatgatattattttaattttaagtaag

SEQ ID NO: 454783 - DNA, 201 bp, Homo sapiens
gtgctgttctaacaaaatatcacagactggataatttatggtaatttataaaaacagaaatatatttctcatagttctagaggctgctaagttcaagatcmaggagctagcaggttagggcccatctctctgcttccaagatggtgccttgaaagctgagggaaggaatgcttgtcctcacatgatagaaaggcagaagag

SEQ ID NO: 454784 - DNA, 201 bp, Homo sapiens
attgggatatgagtttcttgtcctacctctaatcttaattgcctatgtgaccagatttaggtatttttctctatttgggcattggtttcttcaactgtcamataataccactgtatgttttggtctgttttgtgctgttctaacaaaatatcacagactggataatttatggtaatttataaaaacagaaatatatttctc

SEQ ID NO: 454785 - DNA, 201 bp, Homo sapiens
atatcatcacgccgggagtcagggcttcaatacatgaattgtggagcagggggaacaattcagtacatagcacatactctttgtgctcatgactgtttaayattagcaagttcagttgtggaaaattagagagttctactatatatttttttccagcattaaatgcacgtttcaaaaattattcttttctaccatatgatt

SEQ ID NO: 454786 - DNA, 201 bp, Homo sapiens
ggcttgcagatggccatcttttcggtatgtgctcccatggtctttccttggtgcatgcacatagggagagagagagaagagggagaaagagagatcatgtragccctctgatgtctcttcttctaaagacactaatcctgtcataaggaccctacctcatggcctcatcaaaactcccatcatctcccaaaggtcctatct

SEQ ID NO: 454787 - DNA, 201 bp, Homo sapiens
ttgcctttcattccatattccaaccatgcagttttttttttttccactaaatgcttattcccagctccttttaatcactgtgttgctttgaagaatcatgrtgattcatacatgagtttcatgttacaataaatttgtattgaaaagtatgtaatacattaaacattttgactgatggaagtttaaagcaatttgactaag

SEQ ID NO: 454788 - DNA, 201 bp, Homo sapiens
agagaaggatgaactcatttcccaacttcaggaagagctggtaagtgataacaatgcttggcccacgagtgtactttactttcaaggttatttgttccacrcccttatttattaacaccaatggcattagttatttgtaaatccttccagtggttcaatccaatgatcagtttttataattctgtcatgaaaactatagat

SEQ ID NO: 454789 - DNA, 201 bp, Homo sapiens
tggtattgcccaagttttcttctagaatttttatggtcctaggttttacgtttaagtctttgatacatcttgagttgatttttgtataaggtgtaaggaagggggtccagtttcagttttctgcatacgtctagccagttttcccaacaacatttattaaatagggaatattttccctattgcttgtttgtgtcagatttg

SEQ ID NO: 454790 - DNA, 201 bp, Homo sapiens
gttgttctagtcttctacattcttatagaatttatgtctacttgttcaaccagcattgtgaggtagttttggaagctctgactataatggggcattttcaktctatcagttttgcttcatgtattttgaagctctgttattagctgcaaagcacatttaagatttttctgttcctttgaactaacaaccccctttttcaat

SEQ ID NO: 454791 - DNA, 201 bp, Homo sapiens
cattcttatagaatttatgtctacttgttcaaccagcattgtgaggtagttttggaagctctgactataatggggcattttcagtctatcagttttgcttmatgtattttgaagctctgttattagctgcaaagcacatttaagatttttctgttcctttgaactaacaaccccctttttcaatatggaataaatttcttt

SEQ ID NO: 454792 - DNA, 201 bp, Homo sapiens
ccacattgaccccaggttattttggctgctttgcctggcaaggagggcacctgcctcttacttcacagctccatgctgggcattccacgtctgcagtttcygtgaagatgtcaatcttcccacatagaggagtatgttttaaaattaaggttataggaaaaagaaggtagctttctagaacttctaagtatgctatggagt

SEQ ID NO: 454793 - DNA, 201 bp, Homo sapiens
aatcttgaatttaaaataaatggattcacatgtttcatatgcttttggtcatctacatttctccattttaatagtaaaattaaacattattcataatttascttgttttgtatgtcttctttgggagacttgcttataaaaatcacatcacaaggtttgcaaggtttgtgtttccttttccagcctattacacatattctt

SEQ ID NO: 454794 - DNA, 201 bp, Homo sapiens
taaacattattcataatttaccttgttttgtatgtcttctttgggagacttgcttataaaaatcacatcacaaggtttgcaaggtttgtgtttccttttcyagcctattacacatattcttttaagaaagctcattttaaatgagccctttcaagaataaaagctttttagattattttttgtatgaaatatattcaaaag

SEQ ID NO: 454795 - DNA, 201 bp, Homo sapiens
aacccgtctctactaaaaatacaaaaaacttagctgggtgtggtggcaggcgcctgttgtctcagctactcgggaggctgatccaggagaatggcatgaayccgggaggcagagcttgcagtgatccgagattgtgccactgcattccagcctgggcgacagagccagagcaagactctgtctccaaaaaaaaaaaaaaaa

SEQ ID NO: 454796 - DNA, 201 bp, Homo sapiens
atttaccttgttttgtatgtcttctttgggagacttgcttataaaaatcacatcacaaggtttgcaaggtttgtgtttccttttccagcctattacacatwttcttttaagaaagctcattttaaatgagccctttcaagaataaaagctttttagattattttttgtatgaaatatattcaaaagttacacctcatgcac

SEQ ID NO: 454797 - DNA, 201 bp, Homo sapiens
ataaaatttcctgttaatacatgccaaatcttgttgtagatgtgtgtcgtagaaaggtaggcattagatataaatctctataatgaatggtattttaatarggcaatctttaactttctgtttcacaagcttctattgagaatttgttgggaccattttatggtatcttaataaatttgctgggctatacattttataaat

SEQ ID NO: 454798 - DNA, 201 bp, Homo sapiens
ttttctttagttagtgattcttagattttctaatgcagctcataaggctacatttctcagctgggtacaaaacttgatgaattagcagctacaagctatcrcaggaaacaaacccagaccttgcctataaataactgtctagttttaatctgattttcttgcatcatataaggtacagctgcatataggtttatatgttgt

SEQ ID NO: 454799 - DNA, 201 bp, Homo sapiens
tagattgggtctagaagtttctatgaagttgtgaaatacttatttagcaccttaatatatgttaagacactgctacaagtgtttcacaaatactataaggraggtactatttttatccccatttaatatgtgaggtaaataaaggatagaaaagtgaagtaacacaggcagtttggctcagagttcatgctcataatgact

SEQ ID NO: 454800 - DNA, 201 bp, Homo sapiens
tcctgaataaagaaatcagcaaagagataggaaatatttttaagtaccaaatagaaattctggagttgaaaagtatagtaactgaaatgaaagtaccttcrtggactcaacagtatatttgagcaggcaaataaataatcagttaaatttaagatagattcatagagattatccaatctgataaagagaaaaataaaagaa

SEQ ID NO: 454801 - DNA, 201 bp, Homo sapiens
gaatgaaggatatcagatgcttgtaatgcacaaggcccatgtcacttttcgggagtgctacacttgtgttggttttaatccttctgtaagagctggaaaaytagtcctaagaggctgcagcaggcaagcattagctcacaaaaataaggcaaatcaactgaaggaaattggaccaatgagtataaatatcctacaacttca

SEQ ID NO: 454802 - DNA, 201 bp, Homo sapiens
gcaagagaagagccactcatcacacaaaagtctcctcaaaaagatggctgacttcttatcaaaagcagggaggccagaagaaagtgggatgatatattcartactgaaacaaaggataaaagctgccaatatttcttatccaaccaaactgtctttcaaaaatgaaagagaaattgagatgttcccagataaacaaaaact

SEQ ID NO: 454803 - DNA, 201 bp, Homo sapiens
ttgggggaacattctaggtctttcatgggagacaattcttcatgggtctccagcattttttcatgtgttgtgagtaaacttgctgtttttgttatggaccrtcttttcaaggatatttttacaaggaaagctatagaagatatagtgcctccccttggaacaaaggacaagtatgtttactacccatggtaaaatatttga

SEQ ID NO: 454804 - DNA, 201 bp, Homo sapiens
ctttttagcaataagagaaaaattacaaagctcaatagagttgtcataacaaaagaggttcataaatttttctttaattacactccgtgttgcctctcatraaagtagcatacagcttctactatcggattgaatgcttaccaatttggaaaatgtttgttgatttttacataaatactttcatttaagaaactaatgatt

SEQ ID NO: 454805 - DNA, 201 bp, Homo sapiens
taaaacacacgatcaaacagtgtgcttcctacaagagacttgctttagctttaacaacagacatagacaggaaatgaaggaatacaaaaaatatgccatgmaaatggtaaccaaaagacagtaagggtgagtataattatattagacaaaacgaacatcaagtgagaaattgtcacaaaaaaccaagaatgtcattatata

SEQ ID NO: 454806 - DNA, 201 bp, Homo sapiens
ataatgacaggatcaaattcacacataacaataaattaaccttaaatgtaaatgggctaaatgctccaattaaaagacagactggcaattggataaagagtcaagacccatcagtgtgctgtattcaggagacccatctcatgtgcagagacacacataggctcaaaataaagggatggaggaagatctgccaagcaaacg

SEQ ID NO: 454807 - DNA, 201 bp, Homo sapiens
atagtgcctccccttggaacaaaggacaagtatgtttactacccatggtaaaatatttgagtttataaactcatggttcttctcctgtaatgcaaaccackgcatgtacagatgtccccctttgcattcccctgggggagctagggcactgaattggcaaagaaaatgccgatactctagatactgctatagttgtgacta

SEQ ID NO: 454808 - DNA, 201 bp, Homo sapiens
agggtgagtataattatattagacaaaacgaacatcaagtgagaaattgtcacaaaaaaccaagaatgtcattatataatgagaaaaggtcatttcattargtggatatagcaagtgaaaaaaatatatgcatctaacatacagcacccaaatatataaagcaaacattaacaaaactgaaagaagaaatagacagaaata

SEQ ID NO: 454809 - DNA, 201 bp, Homo sapiens
ttgggtcatttttactacttataaattcaaaaaatctttattaggtatcagatttttgttatttatcgtcttagtataaactaaattctattttgtgtctygaaaagcaatattttgttttaaaatgtattatttgtagttgaattctattgacttgttgtttttgttttaacctttctcaggctgcaaagttggctttca

SEQ ID NO: 454810 - DNA, 201 bp, Homo sapiens
taggctgcctgtggttactcaggggatcttcttggaagagtgtttcattattattgcacaccctatgtgaagttatctctaaaatgggattcactaatctraaaaggcagtacaacatttctccttgtcttcagctaaagtaatcagtgacatagctttggctcttgaaggcattcagtctcagcctcaattaactggaca

SEQ ID NO: 454811 - DNA, 201 bp, Homo sapiens
caaccaaattaggaagaagaaaaattgtctctgtttgcagatcacatgatattatatgaagaaaaccctaaagatgccacccaaaactattagaactaatwaataaattcaataaagtaacaggatataaaatcaacattaaaaatcaatattatacatatatcaaattactttgttgtacaccttaagtttatacaattt

SEQ ID NO: 454812 - DNA, 201 bp, Homo sapiens
gttgttaccattttaaaatttcatctctaattctcctagtcatttagtttttatttcttccctgtccacaaattatattaagcatttgttcattcattaaytcattgccttattcatttggcaagtatttatggaacatgtattatttattgaacaatgcttttcagctctttatggcattgtttagaatttaataatttc

SEQ ID NO: 454813 - DNA, 201 bp, Homo sapiens
aagacagcaacaccatttaaaatatcataagaaataaaaaaaacttaagaataaatttaaccaacaaagtgaaagatctgtgcacttgaaactataaaacrctgatgaaagaaattgaagatgacataaataaatgaagatatcccatgttaatggattggaaaaaataatattcttaaaatacctgtagtacacaaggtg

SEQ ID NO: 454814 - DNA, 201 bp, Homo sapiens
aaaacatacacatacacacacacgtgcacgcgtgcacacacacacatacacacacgttgaattcccacagctctagctgtctgattcagaaagagagaaakgaagtcatctctgttttcggtacaggcttttgtgtaactgtagagccaagaggcatacagtgataacctttttaacaagcatatatggccattaaaaaca

SEQ ID NO: 454815 - DNA, 201 bp, Homo sapiens
ctcaccagttaggagctccagcaaataatctggagaaattatggggaaatatgatagctctgaggcaagagagtgtgccctgtgaacagcacagagcccartgtgtctgcagtggactgagcaagggggagacctgtaggagataagtcatctaaggtcgtgtgagtacacagaacaagtgatgcctcatagaccttcatg

SEQ ID NO: 454816 - DNA, 201 bp, Homo sapiens
atatatatatgatgaataactagagagagggagagaggaccaaaagcagctatggcaactcttaattactgaatctaggtgctatgatttcaatgttcatygcctccaactctcatgctgaaatttgattcccaattggagatggggtttaatgggagaatggggggtgtttggatcatgagagagatctttcattaatag

SEQ ID NO: 454817 - DNA, 201 bp, Homo sapiens
tttgtaatggtgagatgaagggagtgtggcaggggccagaggagaggagagagagggaaagtagggatagattagagagaaggcatggaaagacgtactckaaggaaggaatgccacgatgaaggcctggaccacatagaatgagaagtcagatcccattttgaattccagagcagattttgcccccaggctatattaaga

SEQ ID NO: 454818 - DNA, 201 bp, Homo sapiens
aatgttattgctcctttacctattactacctctccctgttcttttcttcatcccaatcaatatgtctagataaatacatttttttctcatttgaaatttartttggaaaatgcagccacatttttacttatctttttcaaataattaaaaacttctacctcactcatgtaacatcttcctgcatgatctaatctgcatcta

SEQ ID NO: 454819 - DNA, 201 bp, Homo sapiens
gatgcaattatctcccactgtgtgaagctgactttccttatcaagagcaaagtaaaagggctaagcctattatgctgtctctttgatgtttttataggatrtaatgaaagatgaatgctcgatgctcaagctgcagctgaaagagaaggatgaactcatttcccaacttcaggaagagctggtaagtgataacaatgcttg

SEQ ID NO: 454820 - DNA, 201 bp, Homo sapiens
gcctcagctctccagatgaagttcaagctcatcactgggtgatctgaagcaaaggctgagatctagctattcatgaggcactccccaaccaatgagtgaayaagggagtagtacaagagccaacccacttttgctcaacagggggatttctgtaacaggaaatcttagctatgagcccctcatttggctcatagagaattt

SEQ ID NO: 454821 - DNA, 201 bp, Homo sapiens
aacaggaaatcttagctatgagcccctcatttggctcatagagaatttgttagtaggaatcaaggtttgactgtcccctactcaatcctgaatcctcttcttttttttttttcttcacatttcctttcctttcccttccttaataaactttatgtatccttaactccatttgattcctggagaaccaacttgtgacatttt

SEQ ID NO: 454822 - DNA, 201 bp, Homo sapiens
gtgctgctttctattactgagaaacatggtgtatttataccatggtttgtttaaccattcaccccttaaaggacatttggattacttctggttgttaagtrttatgagtaaagccactgtgaaatttgtgtacaagtttttgtgtgagcaggtttcatttctctgaagtaaatacccaagaatacaattgctggactctat

SEQ ID NO: 454823 - DNA, 201 bp, Homo sapiens
ttagaaatgacagactttgtaaaaaatacagacactgactttagatgatttatttaaaccataaatatttcaaactgatctttagatatcaactttgattkaaaaatagtttttttaatttgcaatgacaaagtgtaaatttgcaatctaatcttcagtgcatatatttttataaaacaagatgagtcaaagtataattat

SEQ ID NO: 454824 - DNA, 201 bp, Homo sapiens
tctaatcttcagtgcatatatttttataaaacaagatgagtcaaagtataattatttttcaatttttattcaaaaacattgttttgtgtctttttcaataraaatattttatgattttccattaacttaggctgaaccattcagttactcaacacttatgtattgaccatctactatgtcccagaaactgtaaaagacata

SEQ ID NO: 454825 - DNA, 201 bp, Homo sapiens
cattcagttactcaacacttatgtattgaccatctactatgtcccagaaactgtaaaagacataggaacaaatgatgtacagtaaatttcctgtaaaccaktaaccacgaattaatcatacagcatcacaactggcaggaacagtgacaacattctaaaagggaaacttgaaagcaaagcacactttttttaaaaaagaat

SEQ ID NO: 454826 - DNA, 201 bp, Homo sapiens
taataaaagcactagtagttgtgataagcattgtgaacgtctcagaaaagtggttaacaaaaataagtgatactttagaggacagatgtatgatgtggctraagtgagaaagcaataaaatgaattcctctctctttataaaaatacatataaattaaataaatcttcaggttctaattttgataaatcctaaaaagtaat

SEQ ID NO: 454827 - DNA, 201 bp, Homo sapiens
aggtactgtgtttcttctccctgctcccaaagagcttatagtccaatcagggaaacaaacaggaagtgattgcaattcagggctgtgtgctaagtgagaartaagcaggaaacgatgcgggagcacaaagatgggcactagcctggaccagagttgggcactgatggcacccaggagtgctggcccagccagtgtcaaaat

SEQ ID NO: 454828 - DNA, 201 bp, Homo sapiens
gccacacatcaattccaggagggtaataggtcctgggtacaacagaagcttacatttgaatccttccagtttctaccctatgtgtcttttcccttggctgrtattttatctgtaccctacctccataataaaccataaccaaaaacatagctttcagccagttctgtgagtcctttcagtgaatgattgcattagagggtg

SEQ ID NO: 454829 - DNA, 201 bp, Homo sapiens
atgtttgattctttgaagcaggttgaatttattagagacaaagcaataagggagtaatacagatttacagtgagaaaatcaaggcttaaatagctacatamtactttctcatggtcatgagtctccagataccttttaaggtaacataaatgctgtgtctgagaatatcttaagcacaaatgacatatttttaaaaataat

SEQ ID NO: 454830 - DNA, 201 bp, Homo sapiens
taagtatcacttgagtacaagtgatgtttgtttgtttgtttgtttgtttgtttattgagacagagtctctgtcacccaggctggagtgcagtggcatgatstcagctcactgcaacctttgcccgctgggttcaagcgattctcctgcctcagcctcctgagtagctggtattacaggtgcctgacactgtgcccggctaa

SEQ ID NO: 454831 - DNA, 201 bp, Homo sapiens
aattatctgcaattctaccctctagtaatagctacttttgtggtacattttctgtttaattatctataaaactctttttgtacatattaaatttatcaatytataaatttccatctaccatttagaaatacaagagctccatcaagaatcatctcctgaaagctatgtattctttctttaatcttctaagtgtatgtgata

SEQ ID NO: 454832 - DNA, 201 bp, Homo sapiens
aaaacaaagaaaaaaaagatagagtccttagaagcagaccagtgaacccatactcacttgcaccttcaggccaagaacacgattgatagttatagtagtayatctaagtgcatttcctcaggtttccatgacctcaatccatctccctctccttagaccttctcatttaccagtcagcagcatgacttacgctatgcatat

SEQ ID NO: 454833 - DNA, 201 bp, Homo sapiens
ccctctatacctctctccctccctccctccctccctttctttttggaactcctcagtgcatatgttggtctgcatgatagtatccacaggtcccttgtgcwctgatcacttttcttcaatctttttccttctgttcctcatactcaataatttcaatggtcctgtcttcacattcatgcatcctttcttttagctgctcat

SEQ ID NO: 454834 - DNA, 201 bp, Homo sapiens
aatcaactccctataccctaacacctatggtcctaagtccaacatatacacttttacaacagttcacgccatagacaggaaatggatatcctggggtagattttttttttccttcaaaatactagtctttttcagctcctcgtacagctttgttgatgcctatatcccttgttttggttactgaccctgggtctccttgcc

SEQ ID NO: 454835 - DNA, 201 bp, Homo sapiens
agatactcattaaatatttgttggaatcaattaagtccagctttaaatgtctttgctaccatttctatttgaaagatgaataaacagacatctaaagcaaytgagtaattcctctagtcacgtgtaatctctttaggttttctgtcttcttatattttgctattcagataatacatatacggatttgactttatttttaat

SEQ ID NO: 454836 - DNA, 201 bp, Homo sapiens
acataagtatactaaaatacttgttccccaaactcttgcctccaggaattttaatgttcctacctttgcttagaaaatacttggctttcttttatcttttrctaattccttctgaccattgggattctggatacattttttttccccccagaatgctttctctgactctactaccttggtctatgtgtttgttttcttttg

SEQ ID NO: 454837 - DNA, 201 bp, Homo sapiens
atcttctacttaagtggacacagcacatggtgtgtctgttctgtgagtccagcacatgctgaacataaaaacaagtattttttaatttctagttttttttwaattaaaagtattatagagatgcagtcttgctatgttgcccaggctggtctccaactcttggccttaagcaatgctctcataaaggtaattcttttgaga

SEQ ID NO: 454838 - DNA, 201 bp, Homo sapiens
acctcataaagcaagattttggtgttttcaagcaagactaacaatccaaattaaggaaaaaaataacttacaaatatcaaaaaacaaaacaaaaagcaccraagggaagggagtagaaattatgcatttgggctattagacatccttttctcacacacttagtctgtaatatgttacctaataaaatttaacactcaggca

SEQ ID NO: 454839 - DNA, 201 bp, Homo sapiens
gggtgaggaggaaggactcaggaagcttattttatggactagcagtgagcccttctggcagcaggtttttaatttggttgtacagttcaggatccagtccrgtagatggtgattaagagtaacatctgtcttgccctcaagtaggttgatgatgagtggaagcacctgccctgaccaagtgggatatggcaggcagagatc

SEQ ID NO: 454840 - DNA, 201 bp, Homo sapiens
aatatatattcaatcataacactacaactttgtgactatttttttgaatgcataattttcagtgaaaacatttactatcattgaataacaattttttaatkgttgtttacttaggttgctttcaacatttagacattacaatgctggttatctgtcatgtggcctctagttttcagtcttcaaagatgttttcttttaatt

SEQ ID NO: 454841 - DNA, 201 bp, Homo sapiens
agacacataccatttacatctttttgtgtgttgggcagtgaatatatacaaatgagaactgtatttttcatttcttaatttcaacttttattgaatattcrggggtacatgcacaggtttgttacatgggtatcatgatgctgaggtctgaggtacaatagatcccatcacccaggtaggtagcattgtacccagtggtta

SEQ ID NO: 454842 - DNA, 201 bp, Homo sapiens
tctcacacacttagtctgtaatatgttacctaataaaatttaacactcaggcatttttctagtgagaatatttcatctttctgtgcactattcttttcctktagtggaatatctattatactcatttgcctgtatgccatgcagtttggcacataatcacacactgtttatacgattctctaaatgcttgtctccttgaga

SEQ ID NO: 454843 - DNA, 201 bp, Homo sapiens
ttgctgtattaatactgtgattacagagggcatttattttgttcagttagttgtatatcttttggactaaacttctgagtactactattctcaggcacctrcttcgtttggcctgtgagctcatattatctgtgcaatattggctttttggtgttggagaaagaccaaaggccagaccatagtcactgtcagtctagagta

SEQ ID NO: 454844 - DNA, 201 bp, Homo sapiens
catctttttgaccagtattacccaatgtttatctcccacttataagttaggatatgctatatttggttttctgttcctgatttaagttgataatggcctcygcctccatccatgttgctgcaaaagacatgcttttgtccttttttatggctgtgtggtattccatagtgtatatgcaccacattttctttatccagtcca

SEQ ID NO: 454845 - DNA, 201 bp, Homo sapiens
aaaaaaaaaaaaaaaaaagaaagaaaagaacaagcttaaatatcctggtcttgacattttttttggttcatataacataatgttgatttttttgttcttaycctaccaatttaacttgctcaatagtcatatctttgtaaaatgtcagcaggaaattttgattccattaaatcaagccaattattgctggtgctaatcatc

SEQ ID NO: 454846 - DNA, 201 bp, Homo sapiens
gttggttaatttatttagacttttgcctacttactttagaaatggatgtctagccatctgctaggcaattacagcttagctgcattgacatctgctttccttcattcttatagacgactgggtgcttgaaaaggcaaatatataaataacttctccaaaataaacagtactctaaaatataatacaattaattacatttgt

SEQ ID NO: 454847 - DNA, 201 bp, Homo sapiens
aatccttctttgtgttttgcagcttctggtacttccacgtatccacttctggtacttccacgtatcccttggcttgcagcaccatgattccaatttctgcytcagtcttcacaaggctgtcttctctctatgtcagtatgtctatgtcttcacatggcattctcctccctgtgtttacattttcctcttctaaggatctca

SEQ ID NO: 454848 - DNA, 201 bp, Homo sapiens
tgagatactttgatataggcatgcagtgtataataatcacatcatgctaaatagtatatccatcttctcatgtgtttatcttttgtgttgcaaatagtccrgttatactctttaagttatttttaaatgtgtagccaaattattaataactatagtcaccctgttatgtcatcaaacacttggccttattctttctaacta

SEQ ID NO: 454849 - DNA, 201 bp, Homo sapiens
taaacatggttgattaacatgtattttgtttatgtattatatactgtattcttaaagtaagctagagaaaagaaaatgtttttaaggaaatcataagaaaragaaaatatatactattcattaagtggaagtagattatcataagcatctttatcttcatcctcgtcacattgagtgggctgaggaggaacaggaagatga

SEQ ID NO: 454850 - DNA, 201 bp, Homo sapiens
ccaaacataaggggctgatttataaatcatatttgatttacttatgaaaggcattgctatttttttactagaatatagttatctataagatatatgaggaragacaccatgccctttacattcattgtcatatccctagagcttagaaaattaattcttgaattacttcactaataattactcagtttagtcttaatgcct

SEQ ID NO: 454851 - DNA, 201 bp, Homo sapiens
atgacctcattttaaattaattacatctgcaaaccctgtttccaaataaagtcacgtccatagctatgattaggacttaggacttcaacatatctttttargaaacacaattcaatccacaacaaaactgtatgttccagtctaactacttccccatctctctccttttttcagcgaagattctgaaacaaatagtttata

SEQ ID NO: 454852 - DNA, 201 bp, Homo sapiens
gcaggaggaagagggaagccagattttgcagtaactcactcttgggccaggacaacacccagaggaatggtttaaaccatgagaaaccaccctcatgattygattacctcccaagagtccccacctctgaaattgggtattacaattcaacatgagatttgagtggcaacagagatgcaaaccatatcactcccccatgct

SEQ ID NO: 454853 - DNA, 201 bp, Homo sapiens
gataacataaacatggttgattaacatgtattttgtttatgtattatatactgtattcttaaagtaagctagagaaaagaaaatgtttttaaggaaatcayaagaaaaagaaaatatatactattcattaagtggaagtagattatcataagcatctttatcttcatcctcgtcacattgagtgggctgaggaggaacagg

SEQ ID NO: 454854 - DNA, 201 bp, Homo sapiens
ttcttttgatattttgatgtaaatgtagtcatttttatgtggacatcaatctcaacacaattcctttctcttcagattgctcctctctctttttaccattstgaataatgatgcatcctatatccagtgtgcatgggacacaaacctgagattgtgatttaattattctcgggtggaactgagtcatcacagtttttaaaa

SEQ ID NO: 454855 - DNA, 201 bp, Homo sapiens
atgcttgcactgctatatagaaatacctgagactggataatttgtaaagaaaagaggtttaattggctcatggttccacaggctgtacaggaagcatgatsggttatggggaggcctcaggatactttcaatcatgctgaaaggtgaaggggaagcaggcatgtcttacatggtcagagcaggaggaagagggaagccaga

SEQ ID NO: 454856 - DNA, 201 bp, Homo sapiens
gtgattataataacaaatagcataccagttatcataaatgcatatgctgattttatatattttggtaatcattcctttattcaactgattttcaataacartgtgttccaaaagtgaggttacaaggatgaaaatgatgtgttctaattcacatctctagttggttttgataagcctggagctgtggaatgagaaggagtg

SEQ ID NO: 454857 - DNA, 201 bp, Homo sapiens
ctgctggtaggtgttctcgagaggttttgactattaaatattaaatatcaagagataacttttccatatgtctgaaaatttcaatgtcataagacccttargtttttgttttctttattcatctaggcagcactttttcattttggtgaatccaatatattcttttccttgtcagttgactattttagctttaagaaattg

SEQ ID NO: 454858 - DNA, 201 bp, Homo sapiens
aaagagtgctaatagccaaagtaatcctaagcaaaaagaataaatctggaggcatcatattacttcaaattttactacaaggctatagtaaccaaaacaayatggtacctgtataaaagtagatacatagaccattggaacagaatagagaacccagaaataaaaccaaatgcaacagccagctgatctttgacaaagcca

SEQ ID NO: 454859 - DNA, 201 bp, Homo sapiens
caaagaacaccctattcaataaatgatgctggaaaaattggatagccagatgtagaagaatgaaactggatccctattctcaccatgtacaaaaattaacsgaagatggattaaagacttaaatctaagccctaaaaccataaaaattatattagaaaacctaagagaaacgattctggacattggcttaggcaaagaatt

SEQ ID NO: 454860 - DNA, 201 bp, Homo sapiens
ccctattctcaccatgtacaaaaattaacggaagatggattaaagacttaaatctaagccctaaaaccataaaaattatattagaaaacctaagagaaacrattctggacattggcttaggcaaagaatttttgactatgaccccaaaaacaaatgtaacaaaaaggaaaataaataaatgagacctaattaaacttaaaa

SEQ ID NO: 454861 - DNA, 201 bp, Homo sapiens
gattaaagacttaaatctaagccctaaaaccataaaaattatattagaaaacctaagagaaacgattctggacattggcttaggcaaagaatttttgactrtgaccccaaaaacaaatgtaacaaaaaggaaaataaataaatgagacctaattaaacttaaaagcttctatacaacaaaagaaataatcaacagagtaaa

SEQ ID NO: 454862 - DNA, 201 bp, Homo sapiens
cctcaaattatctgcccacctcggtttcccaaagtgctgggattacagatgtgagccaccactctgggccataacaagttttttagtcatttaaatgcaaktgttttagtcatttgtttttagggcatggtttctgaacaatagtgctggtggcactttgttgtgtctgtgctatgaattgtaggacgtttagcagcatcc

SEQ ID NO: 454863 - DNA, 201 bp, Homo sapiens
ttttagttgtttcatagatcttttgcttttttacttcctctcttgcttttttttttttttttcctttttgagacagtctcactctgtcgcccaggctgcartgcagtggcaccgtgccgtgtcggctcactgcaacctctgtctcctgggatcaagcaattctcctgcctcagcctccaaagtagctgggattacaggcgc

SEQ ID NO: 454864 - DNA, 201 bp, Homo sapiens
gtatatctttttgttgacgtatctgtttaggtctttttcccagttttacattaggttaaaaatggggttacttttcttctcttctgctagaagtaggaggygatttttttccaatatttactctgagaacttggtagagttcctaaggtaaaactcataaaaatgtgaagaacctcttatgagtgagtgtccctggatttt

SEQ ID NO: 454865 - DNA, 201 bp, Homo sapiens
ctcttagcagtaaagcaatgcatagattacttttaatgacccaccctttcctttcatttgcattagccctatgatattctatatcttcttactttcctagrgtagtagaagtcttggcttgttttgccagacagagcaaaagtgtcctgggatccacctaaatctcgtaaaatatttccttacacagaacgcaaaattgct

SEQ ID NO: 454866 - DNA, 201 bp, Homo sapiens
ttgcccatactgttcctcgtttcatatgcacgtgactagctgaataattcttgaaaaacctgtcttttccccatcatcctggataatggaaagtgttctcyatatgaagacaatttatagcacactgtgattataataacaaatagcataccagttatcataaatgcatatgctgattttatatattttggtaatcattcc

SEQ ID NO: 454867 - DNA, 201 bp, Homo sapiens
atattggactttttgaatattagaaatacatcactcttatccaacagaaagatttagggattttactaatttaatttattaagatatttaaagcagagctrtagatttagaccaaaagtctaaacataatagctaaacgtatgcatacttaatcataattaattataataaaaggtattttaaatatttgcatcataagtt

SEQ ID NO: 454868 - DNA, 201 bp, Homo sapiens
gtctgttttgtgctgttctaacaaaatatcacagactggataatttatggtaatttataaaaacagaaatatatttctcatagttctagaggctgctaagytcaagatcaaggagctagcaggttagggcccatctctctgcttccaagatggtgccttgaaagctgagggaaggaatgcttgtcctcacatgatagaaag

SEQ ID NO: 454869 - DNA, 201 bp, Homo sapiens
gagcttggaatacagataattctggattagctagttgtatcttgtagttactagctgtattagtcagggttctttagagtgacagaactgatggaatatayatatacacacacacacacacacacatatatacacttaataaactcacatatatatacacatatatatatatatatatataaacacatatatatatatgag

SEQ ID NO: 454870 - DNA, 201 bp, Homo sapiens
taaaagtttctgggtaaaataatgaccatggtgaaaatcgaatcaagaactcagtctcatttacatttgcaaaaaaaaaaaaacttatgaatatacttaaycaaggagatgaaagagctctgtaaggactataaaacactgatgaaaaaaatcatatatgacataaaaaatggaaatacatcctatgcttaagctcatgga

SEQ ID NO: 454871 - DNA, 201 bp, Homo sapiens
caacaaaatattttaaaagtttctgggtaaaataatgaccatggtgaaaatcgaatcaagaactcagtctcatttacatttgcaaaaaaaaaaaaacttaygaatatacttaaccaaggagatgaaagagctctgtaaggactataaaacactgatgaaaaaaatcatatatgacataaaaaatggaaatacatcctatgc

SEQ ID NO: 454872 - DNA, 201 bp, Homo sapiens
agattaatatagtcagtcagagaacattaagaataatttactaatagatgcataattgcttaatatcctacagggctatgaactataacatttgagattgytgcctctagcagctagaaataaatcatatctatactggacaacatttctttagattactttaaataaaaatcattttcattgcttttataaaagaatcaa

SEQ ID NO: 454873 - DNA, 201 bp, Homo sapiens
ttctagaaatgtaatatgttttcaataacaaattaagaaagattgtgatagtaaaacatagttttgtacaaaggagtgttttttaaatgataaagcctctrtacaaatgtaaggtggtattattattttttgaaagatttatatcggtaagaatttttaagatattctaagagtaccattcattgtcgaaaagattatgct

SEQ ID NO: 454874 - DNA, 201 bp, Homo sapiens
ctcaaggtttgtaaatgcgccaatcagtgctgtgtgtctagctcatctagtggggacttggagaacttttatgtctagctggaggattgtaaatgcaccartcagcactgtgtgtccagctcaaggtttgtaaacacaccaatcagcaccctgtcaaaatgggccaatcagctctctgtaaagtgggccaatcagctctct

SEQ ID NO: 454875 - DNA, 201 bp, Homo sapiens
ttactttttatgtctgaaaccctacttattctagaaatgtaatatgttttcaataacaaattaagaaagattgtgatagtaaaacatagttttgtacaaargagtgttttttaaatgataaagcctctgtacaaatgtaaggtggtattattattttttgaaagatttatatcggtaagaatttttaagatattctaagag

SEQ ID NO: 454876 - DNA, 201 bp, Homo sapiens
tgtcttttatttttatatttgttggtttaaagtctgttttggctgaaactaggattgcaaccctacttttatctgttttccatttgcttggtagatttttytgcatccctttattttgaacctacgtcattgcatgtgagattagtctcttgaagacagcataccaatgggtcttctgattccttatccagcttgccactc

SEQ ID NO: 454877 - DNA, 201 bp, Homo sapiens
ttctctgcttactttttatgtctgaaaccctacttattctagaaatgtaatatgttttcaataacaaattaagaaagattgtgatagtaaaacatagtttwgtacaaaggagtgttttttaaatgataaagcctctgtacaaatgtaaggtggtattattattttttgaaagatttatatcggtaagaatttttaagatat

SEQ ID NO: 454878 - DNA, 201 bp, Homo sapiens
atagacacttatcttccttgatctggatattatagttcttaacgctgacagctcttaatgctgccaaagtttcatcagcactctggctgctttatcagacyctgcttatcagactctgcaattgctttgagcttgcagtgaatatttgtcagggagtgcttctggaaagcagttctaggttgccattctctcagaatcaga

SEQ ID NO: 454879 - DNA, 201 bp, Homo sapiens
aaagcttccagatgatttaatttgcagctataatggataactaatgatctataacattactctattttgtctgcttgatattattatgcttatttccttattttttttttctatctctcttctagaatgtaagcttcttgaaagcttcttcatcaatatattactgtcttagatggttaggtctgctataagaaatacata

SEQ ID NO: 454880 - DNA, 201 bp, Homo sapiens
gtagctctcacaaataggtgggaacatgcaaagtttgtctttacatgcctggctaatttcatttaacatgatgacctccagttccatccatgttgttgcamattacaggacctcattctttcttcatggttgattagtactcattgtgtgtgtgtaccaccttttctttatctgttcctctgtcgatagacacttcagttg

SEQ ID NO: 454881 - DNA, 201 bp, Homo sapiens
aatcagtaagatgggctacattacattagaaaagttgtacaacctcattattttttattgttagttcaaaaaaatgaaacaaagaggacactaacaaattrgaaatgacaagaacatagtctcatggaacttttttgacatcttaacaaatttatcattgtaagctcatgtttttaacttttccaaaaaatgtaggacttc

SEQ ID NO: 454882 - DNA, 201 bp, Homo sapiens
ataaacgtactttttatcttttcaaaattaatattaacaaaataaatttaatctcagtgaaatgatttataaagttttatactattttatttatttaaagsctcctgaaattcattctgaatgtatcggcagaataaatacaattatatatgattattttcattgactttagaaagcaacagaataattattccttgcaca

SEQ ID NO: 454883 - DNA, 201 bp, Homo sapiens
cttcggctggattttataaggaacatttcaattgaactcattatatattttaccttaaaattccacctgaaattttatttgctctcaacaggagtgagcartacttccattccactagtatacatgccaaaacataaagttattcttgactctcccttctcatttgcctctctctactccacccatatctgtagagtccat

SEQ ID NO: 454884 - DNA, 201 bp, Homo sapiens
gacttcatactcccaccttaatgcactatattctagaacagtatttgttaaagaacaattgtctagaaaggaaaaaaaaaatgtgattttttgcataactytgcatattgttttaataatatacttccattagttctcttgcctttatattacttacatgttatacatttcttcaaataattttactgtgggggcgaatat

SEQ ID NO: 454885 - DNA, 201 bp, Homo sapiens
aatatatcctgacttaccaggagttgggacttcaacataggaattggacagggggccggggagaaacaattcaatcattaacaatcaattacatagttaargttcattagaaaggcgatcctttatcattgactgactcactgtcaataaaagattagtttatttccttggtttacagatagttctctgcctagttatgta

SEQ ID NO: 454886 - DNA, 201 bp, Homo sapiens
cttcatactcccaccttaatgcactatattctagaacagtatttgttaaagaacaattgtctagaaaggaaaaaaaaaatgtgattttttgcataactctrcatattgttttaataatatacttccattagttctcttgcctttatattacttacatgttatacatttcttcaaataattttactgtgggggcgaatatgt

SEQ ID NO: 454887 - DNA, 201 bp, Homo sapiens
tgacgcttcctaaatgtggttggtggctgctcaactctctacaagaagtagggtccaccacagtaagttttgcagtttatctgaatgattagatgagtatmgtgtgaaggttaaactactgctacatacactgacttaagtaggcagctgcttatgaatcaagttgtgactaaaatatgcacagataagggtactttattt

SEQ ID NO: 454888 - DNA, 201 bp, Homo sapiens
gtcaaagtgaccttgaccttgatgagattgtctagacattttgaccggcattttgactggcattgtctagatattttgactagaaagtggtgacgcttccyaaatgtggttggtggctgctcaactctctacaagaagtagggtccaccacagtaagttttgcagtttatctgaatgattagatgagtatagtgtgaaggt

SEQ ID NO: 454889 - DNA, 201 bp, Homo sapiens
tccaagtacagaatatctgtttgcatgggattgcttttgctatcataaatatagctatggaatttaatgcattgttggctattcacccttttatatagctrtgattttaaagtgcctacactctgcgaatatttacataaattatcataattaaccttctgtggcttttatctttataatgaaatatcccttcattcgaaa

SEQ ID NO: 454890 - DNA, 201 bp, Homo sapiens
aagattaaagctggtgactcagaaagcccttaaagagattaagagcataccctctgtgtcctctgaaacattattatagcttctagaaagtttaaagacaytattgctcatccatagaagtaggagctcaagatagagaagggcttatctcaagagatttttgaatgtggcttttgtcaaatgatataaaccccaagaaac

SEQ ID NO: 454891 - DNA, 201 bp, Homo sapiens
attccaggttgcacatactgaactaaacgaggtaattgctctggccttgtgaacttaaaaggcaacttctttgtgaatgtatttgttggtatcattaactrgatctaagaaaatataatttttataaagttagatcattcatatctaagttgccttttattcatgtggcttagtaaaagttaattgtactttcaaagtacc

SEQ ID NO: 454892 - DNA, 201 bp, Homo sapiens
tcacagtgtttgccaacaaagccttccggcttgattccatagaaggacatttaaaaaaagatatggcataacagattcattgtcctgcttgtatgtgtttytaagtttgttcttttttttaggtaaaataaagaatttagcagtagtgcaaccattcacagttctaaaagaagcaagtgcaaatgtagagcaatttttttt

SEQ ID NO: 454893 - DNA, 201 bp, Homo sapiens
ctgtgctattgaacaccagaatttattccttctaactaactgtatttttgtacccattaaccaacccgtcttcatctctcctgccattcttcccagcctcttgataatcatcattctcctgcctcagcctcccgagtagctgggattacaggcacgccagcacacccagctaatttttgtatttttagtagagatgggatt

SEQ ID NO: 454894 - DNA, 201 bp, Homo sapiens
ggggtgggaagagatgaggggcgaactgcagccttgggtccatgtggcctcaggtttcacaagtattagagtgtgattgccttttggagatcactttgctmaccttctcacaaatgtgtcctttttcagcagtgtatttaacatctattatctaaaaatgttccttaaaataatctttctacctacctatccatgcatata

SEQ ID NO: 454895 - DNA, 201 bp, Homo sapiens
aaagataaatttcttttctgcctccttggggagcatcctaatatggattttctttaaacatttcttgacctattgaacatttgataaacaggtattttacycaaagctccctccagatctttgacaattaagaaataacataaaaacctatttaggattgcatcgtactcttctctgttagtatttgggatagagatttga

SEQ ID NO: 454896 - DNA, 201 bp, Homo sapiens
attttaaagactaatgaagaaaattgtatttaatttattctaagttttaaaaactttatttttctcaactagagaattagttgaaagctcccaacccatgrtttcctaaaaaagtcacatctaacttagatattggtagcagttcatgctctttttaccgctggcttgtgtcccttccaaacactttaatggtattttact

SEQ ID NO: 454897 - DNA, 201 bp, Homo sapiens
cttgtcattttagatcttttacagcacttaatatcataattgtaaaaatattgttccttattaatatttgaacaaataacaaaaagtaaatccaataatamtatttataatttattaggacatagaacaatcattttgaataagctgttattaattagtttatgataataatactagtaaaaaatttcagactttcaatgt

SEQ ID NO: 454898 - DNA, 201 bp, Homo sapiens
tttcaagctaccaagtcgtgtctctgaacttggagttgggaaaagatgagcccaatcagctcttgtaagctagtgcaaggcaactccagtgaagaactcaygaagaactagaaaattgtttgtcccttgtagtatcccactgtggttttcacgatctgatactgaaatatgtatacacaaaattgatttaattctttctga

SEQ ID NO: 454899 - DNA, 201 bp, Homo sapiens
cttccagtctgttttctctaaacctcccttttgtcttcttactggaacatcttgcacctccttctaagccatccatatgacctttagtcatcctaaattcraagatccattattaaattctcttagccgtatttctagacaccaacgcttcctcccaagtagtagatatctttcttttatgttaatcctctgtaaccctcc

SEQ ID NO: 454900 - DNA, 201 bp, Homo sapiens
acatttttaggaatgtttcttgaggaatcattcctaaaaatcaaaatagcctatttaagtttttaaattgaagttagccagtaagaaagtctttcttcggkgtcttagtttctaagctcactatagatttgtgttttatgacaatatataatatgtctgattattactgacagccttgtgtcatatgccaaatagcctcta

SEQ ID NO: 454901 - DNA, 201 bp, Homo sapiens
aaaatcataagttgaaccatcataaattggagaccatctgtatacattattttattaatcctcacaaaaacgtatgagtctattttcaattccattttttaaaaaactgattaggtaaatgtagtaaagcaatttatctgaggtcacatataaagtaaagctgtgattgaaactaagtctgcctaacatcaaaactcatgg

SEQ ID NO: 454902 - DNA, 201 bp, Homo sapiens
atttgctaaatgtaaacactatgtaagggggtaggaatttattgttcagaagatgagtgcatagtagcaatgaagcacatatatcatatttgatttgtacmctggttttgtggatcacaactatgagacagtggaaaaaccatcaattccatgtaaaattggtgcccaaatgttaagtgatatttatagaaattataactg

SEQ ID NO: 454903 - DNA, 201 bp, Homo sapiens
gcgctgtccagtttttaaatggttgagattttacccttgttccaatgcagcccttggagactatgcacttgaaccacattttattggctacttatagagcttttttttttttttttttcctgatccgacctttaccatcatgtgttttacccactcaaacaagtattctaaagaagaggtgtacagaatgtgctatttggc

SEQ ID NO: 454904 - DNA, 201 bp, Homo sapiens
attagtggagactagggatctagaaaacagaggtagggagcctcagtactatttgctcaatctatttctttatttttagttttggaataagtctagctttggaaactattaaacatagaactactgtagaattattaaataaatattttgtttattatatcatttcctcttgcaagaattaaagctaaagaaaaaatgaaa

SEQ ID NO: 454905 - DNA, 201 bp, Homo sapiens
aaatttaggcaatgtttgttaaaatagatatgtgaaacctggagcagtggcatgtcccagggactcaggaggctggggcaggatggcaggaggatggcttsagcacaggaatttgaggtcagcctggacaacggagtgagaccccatcttgtagtaaataaataatagataagtgagtaaaatgtgtgtttaaatttttat

SEQ ID NO: 454906 - DNA, 201 bp, Homo sapiens
tttttcttgctgatttgtttgagttccttgtagattctctatattagtcctttttcagatgtatcatttgtaaatatttttcccagatacctgagagtatrtttaaccaaagaggtgaaagatctctacaagaagaactccaaaacactgatgaaacaaattgtagataacacaaacaagtggaaaaacatctcattctca

SEQ ID NO: 454907 - DNA, 201 bp, Homo sapiens
cttgcagtgggaagaggaatatgaaacatccaagctagatgtagcataattacttgtaatccttgacactttcattttaaaaaatctaatacgcattctargagttgattctttttttattaaattgaggttgaaaaataaacactcaatttgctttctgattctctttgctttaagcagaatataattcttgtgcttctc

SEQ ID NO: 454908 - DNA, 201 bp, Homo sapiens
agtcccagcactttgggaggccaaggtgggaggattgcttgagcccaggagtttgaggccagcctgggcaatatggcaaaaccctgtttctacataaaatmcaaaagaaatagccggccattgtagtcccagctactcgggagactgaggcaggagaatggcgtgaacctgggaggcggagcttgcagtgcgccgagatcg

SEQ ID NO: 454909 - DNA, 201 bp, Homo sapiens
ctaccactacaattgcaatcattttttttataactatgtgaaatgcaatttccttaagccaagtaccatctttaacctgaaagtgtaaacccttgacttaraacaattttagagattaaccttttcattctgccttcttcctgtcagctgatttctggatcattgtgcttgaacgttattatcacaattatttcctgattt

SEQ ID NO: 454910 - DNA, 201 bp, Homo sapiens
acattgggaaatgattaccacaaccaagctaactaacacacccatcacctcacatggttactttttttttttttttggtaagaacacttaagatctactcrctgagcaaatttctagtatacagtatgttgttattaatcatagtcaccatgctgtacatcacatttccagaacttattcatcttttaaatgaaagtaaaa

SEQ ID NO: 454911 - DNA, 201 bp, Homo sapiens
cagcaccacttggtaacctaagagaaatgtaaagtcttagagcccacggcagaactacctaatcagagactcttggggagagactagaacattgtagattrataagctcttcaagtgattccaatgcatctaacatttgagatccagtggcctaggctcaattttagtccaagcaagccactcactttattatgttgcctt

SEQ ID NO: 454912 - DNA, 201 bp, Homo sapiens
gccataagatttataaagtaacatccccatataaatattataggagtgtttatcctgtgaaaaagatgagatcaaggaactggatttattaagccacatarcgattttttcttttgttcaaattcgccatgtgaaacaagatttaacgtaatgcagtgtaggatcagcatagtgccttgagatggactccaaatatttcta

SEQ ID NO: 454913 - DNA, 201 bp, Homo sapiens
gggtgggtagggacgtgaaaattgggagatcaattctggacgtgggacgtttgaagctgtggagtatacataatttcagctggacctgcctttgctttgcmgtttattagctgtgagatcttgggcattaactcagcacttctgagactcaactttcttatctgtattatgaggatgatagaacctaatgtgtaagttaga

SEQ ID NO: 454914 - DNA, 201 bp, Homo sapiens
taataacaaacagatctaggcctcaggttgaagctcgtgtccttatgcagcaccgttcaccagctttgtggggctctgagaagagaaatatctgtacagasgaggatttgaggagtctgaggtgttaggttagcttttaattgaagaaggccatttgcaagtattctagctgggaagcagtaagaatactacaaaagaatt

SEQ ID NO: 454915 - DNA, 201 bp, Homo sapiens
gaaactgagcctcagacttaaatatcttgccaaattcacacaactaataacaaacagatctaggcctcaggttgaagctcgtgtccttatgcagcaccgtycaccagctttgtggggctctgagaagagaaatatctgtacagaggaggatttgaggagtctgaggtgttaggttagcttttaattgaagaaggccatttg

SEQ ID NO: 454916 - DNA, 201 bp, Homo sapiens
ggctaaagatcagcccatttacttacagccagataaacctctgtgcattttgcttgcttgataatttctaaagtcttccttcttatcataattattttttmtttcttggtttctataatttttcatccaaccaataaaaaagctaagaaaaaaaatctaagaagaaaaagaaaacaaacacagcacctgcctacccttctt

SEQ ID NO: 454917 - DNA, 201 bp, Homo sapiens
ataattatttcatacatgaataaaagatctacttaactttttggctaaagatcagcccatttacttacagccagataaacctctgtgcattttgcttgctkgataatttctaaagtcttccttcttatcataattattttttctttcttggtttctataatttttcatccaaccaataaaaaagctaagaaaaaaaatcta

SEQ ID NO: 454918 - DNA, 201 bp, Homo sapiens
ataattttacttaaagagtccatttttttaatcacaaaatggaattctatgaagtatcaatgcttaaagaccttcaaactacagaatttctcaaaactaaytggaaaacaaaattaactatctcagtaaggctagaacatcattttaatccagttagtagctacattttatcccaaccaataaagtgacagttaattctta

SEQ ID NO: 454919 - DNA, 201 bp, Homo sapiens
tatctagcagtctaatttaacttgtctttgatggaattgctagctttttctcccatgaagcttcacaaagaaagcattgcattaccactagacgttttcayttttccttcaataataattttgtgttctcataatttgtataaatgccatataccctaacagaagtttttcttacacattatatcctaatatcagaaaaca

SEQ ID NO: 454920 - DNA, 201 bp, Homo sapiens
tttagtagagacggggtttcaccatgttagccaggatggactattgttttctttttaaaaatgtgatgttattggaaaaaattaaaacattcactgcttaraaactaatcatttcattctgtaatctaatcaagataggtatgtacatatgtatatatttttctttgttctttcaattctcagaaaggtgtttaaaacctc

SEQ ID NO: 454921 - DNA, 201 bp, Homo sapiens
aaatatttgcatttgttccatttttttatagccataaggaaaaagagatcttccctttctgttaactgattttaaaaattataaagatcatcaaatttaascattttagtacactgtggtcagtatgttttatacatcagcatccggggccattgatattacatattactattgtgattattttcactgaaaatatagtat

SEQ ID NO: 454922 - DNA, 201 bp, Homo sapiens
aaaagtattattaagcattaagcattatttttcctttgtttgatatgcagtacagatgttggcagtttaaattgtttctttctgtggagtttcttggtaaygacaccctgcatcctgattccctggacatatggagaaaaggagagccaggaaagaagcaggacctggcgatcatcagtgtgccagctcctctctttatac

SEQ ID NO: 454923 - DNA, 201 bp, Homo sapiens
ttatcccgagcccttcattctcatgttttgcactttcctgtggtgattttacataaacccatgggtttgttaatatctgttaaattgatgacagccaaacytatggctccagcagagattctactcctgagtgtctgacctctatatccaagcacattttatgcttgactacttaaactacttgagtgatcctagagatct

SEQ ID NO: 454924 - DNA, 201 bp, Homo sapiens
aggtcactgctactcccaatcactgtaaatttagacctagggagctataagcaggtctgcaagttggttgcaaagatcagagaaaagaaggaaactatggrataactctgtgggtgagaaatcaatgcagacgaaacctaaccaagtgtttttccttctctcacactaacactccaagcatctcctagttttataattata

SEQ ID NO: 454925 - DNA, 201 bp, Homo sapiens
ttgttcactgtttcttgaaaataatcataaactgcatttgctcatgttattttttgagatcagagtgttcttccctcttttttctgctttaaggttttctytttttttgcacagctattaaaacttggccaactattatattttctctatagttttccctgatccttacacatcttcatagctccttacatgtaactctat

SEQ ID NO: 454926 - DNA, 201 bp, Homo sapiens
ttccaaagattgatctacactacagaaggcttattagggtatattgatactagtatgtgttgtcttaagtggtacattgtagtttccatgccaattcttgktttaaaacgcagcatgcatctgttatatgccactttccacttaaatgcctaagacaggtagattgcactgtcaagttaggtcattataactccaacagat

SEQ ID NO: 454927 - DNA, 201 bp, Homo sapiens
actgtttcaaaaaatttataccttcaacaaaactttaatcctatttttatatgcctgtctgctctgaaaataatttaatatgtttaaattcctagaataawtcttactttaaccaaattaataattcttaaacttaaatttagatttcaatgaatccccaaaatggtttccacataaagtaatgcagctaatatcagcact

SEQ ID NO: 454928 - DNA, 201 bp, Homo sapiens
tcttgcctcagcctgggtatgtatttttagtagagacgaggtttaccatgttggccaggctggtctcgaactcctggcctcaagtaattcacccacctcascctcccaaagtgctggggtttcagacatgagccagcacgcccagccccaatttaaaacatgcaatcaaacacgtcacttccagacttaaactgcttttca

SEQ ID NO: 454929 - DNA, 201 bp, Homo sapiens
agcccgtggcaactgctattctttctgtttctatgattttgaccatttcaagaaacttatgttaagtggaatcataaggtatttgttattttgtgactgaytcatttcacttagcataatgtcctcaaggttcatccatgttgtagtatttctatcctttgtaaggctgactgataaggagagacttacttctgtcattta

SEQ ID NO: 454930 - DNA, 201 bp, Homo sapiens
tccaaacacttagtgtgctttgtggttttagtttgtttacttgtttattgtctgttttaatgtttgaatgggtattcattgatgtgctcctagctcctagyattgtgtctaatattcaacaaatgtttttggagaacaagttttttctcaaagtgaaaatgtaaactagtactggtattttatttttgtaatcagaagatt

SEQ ID NO: 454931 - DNA, 201 bp, Homo sapiens
aaatatctcctttgtaaaacactcagcacttattatttatatcagtcatttgggaattagtcatatgctgcctagtggaatttgttgtcattaaaaatttwttcctgttttgtcatttcaaaaacaatcacaaactcttggaggttaaagatgatgttctatatttccttgtaccccgtaaaaccagcatagtaggtattt

SEQ ID NO: 454932 - DNA, 201 bp, Homo sapiens
taatgcacggtggttgtattattatccactagattgtttcttgctgcatatcatgcactgcattatttcttgctgcatatcaatcacttagtactgacctyctttttaaaatacgcctgactttctcatgcttatcttacatatatggttatagctaagagttgtgaatggacacagatatgggaagcatatttaggagga

SEQ ID NO: 454933 - DNA, 201 bp, Homo sapiens
aaaggtatattggttctggggtgaggcccaagcttgtgtatttttgataagtttctcagatgattctgattcacatcaaagtttaagaacatctgcttagyatgtacatagtcttgttattgtacctctaccagtgtcaaccaaagtccatcaaatttaaccctttgcttaattcatggttcagagtcttacacctttatg

SEQ ID NO: 454934 - DNA, 201 bp, Homo sapiens
aaaattctcttcaaagttgataaaaatactcagaggcatacttcctcatctgatgattcatagttaccaatgaaacccaagaactccatgcacattttcakcaagagcaaggcatctgatagcaagagagctggaaaggaagaatcatacagtgacctagacaagtgtcatgtcggtcttagcatcagataaactgattgc

SEQ ID NO: 454935 - DNA, 201 bp, Homo sapiens
tattggttctggggtgaggcccaagcttgtgtatttttgataagtttctcagatgattctgattcacatcaaagtttaagaacatctgcttagtatgtacrtagtcttgttattgtacctctaccagtgtcaaccaaagtccatcaaatttaaccctttgcttaattcatggttcagagtcttacacctttatgtacattc

SEQ ID NO: 454936 - DNA, 201 bp, Homo sapiens
caataattatgtatttaataaatgggaagaggaaacaaaacagtaatttttcttgaacacgtggaaatttatagataattgctgcaataaatattatcatwcaaaatatatatttaaaaaacttaactacaatattactgtaaaagagaggaacatgattctatattacagtgatatgaggtagcctggggtgggggcagg

SEQ ID NO: 454937 - DNA, 201 bp, Homo sapiens
tgtgaagtaggaaattagaagcatataacacatgaattccaattatatactcaatgtaggaagcaacaacagtatattaagttggtataaaggaacccagmtacatgtcacgtgcctttccctctcccactgaaacccccaccaaatagttgaatctgagcattttcccctcttcccccagggctggataggtgctatatc

SEQ ID NO: 454938 - DNA, 201 bp, Homo sapiens
gggaattaactacacaattcttgttaacactaatggaggtagcatagtgaatgcctcacttatctcatttaccccttactgtccagttagttgctgagagyatttgtgtttatatatatttaggcacatagacagaacaattttaagaagtcttatagaagtttaaaagtgctgttgacctgaatgaatctggcaagatca

SEQ ID NO: 454939 - DNA, 201 bp, Homo sapiens
gtgctttggcagcttagacatacttaccacgaacaagattatatcttaaaagctattcgttaagcttaaaattaagttatatggttgtaatatgtggagawagcacattggaatagctcttcacttaatgttatagatcactttttccaccaatattatttggtctaggaaagtaaaatcctcttgaggaagtaattagaa

SEQ ID NO: 454940 - DNA, 201 bp, Homo sapiens
tgacctgaatgaatctggcaagatcaagaataaattcacaagtgcacagctctctaactaatccttagtaatttttgtaagttaaaattttacttctgaaraaataattacttgaatcaggacattattgcctaaacatgattactgttacaaaacatatacagatttatatcttctctgtgaactttgtaccaacacaaa

SEQ ID NO: 454941 - DNA, 201 bp, Homo sapiens
gggagtaaaataaaatgagttctgttttagatgtcataagttagagatgcatattgaattgcaagtgagaatcatgtaggcttttatctatagctctctakaaagagtcaaggtagggggctagaaatgtaaattctagtgttatcaaagtatactgtagatcatagtcaaagtcaggggactcgttgatattgtccatgg

SEQ ID NO: 454942 - DNA, 201 bp, Homo sapiens
ctatcttcaaatgcattgtgaggtactgggggttagggcgtcaacacctaaatttggggaaacacaattcagctcattaaatgaatggaagtcatacctgaaatcaatgacggatcgtatgactacaaaaaaaggagacaaacattatacacctgctgtttaaagtatacaacacaaaattattgacaaatattaagctga

SEQ ID NO: 454943 - DNA, 201 bp, Homo sapiens
ttgctgatatttttgactactcaatacaccaaaatggtacagtcaagttggtgctaatagatgtcatttatttacacaaactgacaataggttcaccaaasttaagagacgaatttaagggggacagaaaagaaattcctgtgtgtgctttggcagcttagacatacttaccacgaacaagattatatcttaaaagctatt

SEQ ID NO: 454944 - DNA, 201 bp, Homo sapiens
cctctcatatgctttaaagcattttagattactcttaatacctaatacagtgtaaatgctatgtaagtagtggctctaccgaattatatatttatttttgktatttttattgggtttttttcctaatatttttgagcctcagtttgttgaatctatggagttgagtctagatgcagaacctgtggatatggagtgttaact

SEQ ID NO: 454945 - DNA, 201 bp, Homo sapiens
attttgtcctcacaatattctcaagaaataggtaatattctgatctcaagaggaaactgagacatccagaagttgaaatacatacatgtatgtgtgtgtgwatatatatatatatatatcttatcattaagggaaggggttaaggtctagaatcagacttcctgaatttgaatcctaactctgctacttactatctgtata

SEQ ID NO: 454946 - DNA, 201 bp, Homo sapiens
aatattcattttttccaatgatcttgagaagtaagcaacctttttcttaaaagcccaatttttttttaccttaataccgtgatcatatagaactgaggaarctgcatgctttctgtggcccttgccgtaaactacatagcattatatttctttacgtaactgttgtttctcaaactccataggctataccttacaggcaaa

SEQ ID NO: 454947 - DNA, 201 bp, Homo sapiens
caggttcaccttcatgactcttaataatctctatttcctgcaagcttagccctgcacagatattgaatatggttttgtgactggagacatggaagcagtgtttttttttttttttttcaagtcttctatgatggacttatcagttgggtgccagttgagtaacaggttgttatacttattacattactacaatatacaatc

SEQ ID NO: 454948 - DNA, 201 bp, Homo sapiens
cttgtactttaatccgaaatttttatttctcttggatagattcctgggaatggaattgctggaccaaaagacatctatgtattttttaatttgaatagatrttgcttttgaaaaaggctataacattttcctgtttccactagcaatatgtgagagtacacttctccatacatctccaccagcaatagatattaagtattg

SEQ ID NO: 454949 - DNA, 201 bp, Homo sapiens
ataaacatacattcactcatgaattcacacaaaacagtcaaagatcctgactttagagagtttttttgttgtttgtttttattgagacaggctctcactcyttcacccaggctggagtacagtggcatgatcatggctcactggagcttcaaactcctgggctcaagaaatcctcccacctcagcctcctgagtagctggg

SEQ ID NO: 454950 - DNA, 201 bp, Homo sapiens
ggcacactataaatattatgtttacctgtgtccttcccataatatgcagaaatattatgcaaatattatgcaaacaatagtctgttttattcactgtggtwtgcccagtacctaaaacagtgcctaaaagtttttgaaattttcagtgacttttttttgcaatagagtaagctctatcttgatctgcttctaaagacagca

SEQ ID NO: 454951 - DNA, 201 bp, Homo sapiens
tttcctggcaggaacacatcatcattctatgactgatgaacattaccactatttccaatttgatgtcacaataaacaatgatgcactgagtattcttgtaytttaatccgaaatttttatttctcttggatagattcctgggaatggaattgctggaccaaaagacatctatgtattttttaatttgaatagatgttgctt

SEQ ID NO: 454952 - DNA, 201 bp, Homo sapiens
atccaacacatatttggaaggtagtctgataggatttgctgtggggaagtgagagaaagaccaaagccgagaataatggtttccagcttcatccatgtccytaaggagatatacctaatgtaaatgtcgagttaatggttgcagcacaccaacatggcacatgtatacatatgtaacaaacctgcacattgtgcacatgta

SEQ ID NO: 454953 - DNA, 201 bp, Homo sapiens
tggaaggtagtctgataggatttgctgtggggaagtgagagaaagaccaaagccgagaataatggtttccagcttcatccatgtccctaaggagatatacytaatgtaaatgtcgagttaatggttgcagcacaccaacatggcacatgtatacatatgtaacaaacctgcacattgtgcacatgtaccctagaacttaaa

SEQ ID NO: 454954 - DNA, 201 bp, Homo sapiens
attgagagactataaatatgctactcctagcatcatttaaagttcccaaaacccaaatgaaaaagaatatgacagcccgacagaatttgtttacctaactsgaggaaatgtcgttgagagacactatggagaaaacagcctaactcagtgaaattgaagtatattagattttaaaaggcagaaggaagacaatgaaatcta

SEQ ID NO: 454955 - DNA, 201 bp, Homo sapiens
ttaaattggacagtggctaagactttcattcttacatgagattaaacaagtaataatagacagattgagtttcccagagtatgtcagctgtacacaggcargaagttaaaaaaaatacatgtggtcataagaatacatgtttgcacgtctgaatggtaagtgttcaaaatccactggatatgcatataggatgaaactaaa

SEQ ID NO: 454956 - DNA, 201 bp, Homo sapiens
gtgaatatctaaatatctatatagatataaagtaggatactcccacacaccttgctatttctgtgttttacatatttccctgacctcccaaaatgtccagytttttgttaggaagctgcacgctcatcttccccttctgagctccaagagcatgttgatgttcttgctgtttcatagctgatataaattagcattgggtaa

SEQ ID NO: 454957 - DNA, 201 bp, Homo sapiens
ataattacttgaatcaggacattattgcctaaacatgattactgttacaaaacatatacagatttatatcttctctgtgaactttgtaccaacacaaatarttaagtgtctgaaactctgtaaagtgatgactagtgtacattttatgatgctgcatcctcaaatttttaattgtatctgttcatttagttagaagctctg

SEQ ID NO: 454958 - DNA, 201 bp, Homo sapiens
atacattatactgtctccagtcctactgtgataagtgtgagaactgaggtgtctatagaattttgtttgacttgagagttgaaaatgcttacgtctgaatraggtgaaagtgagttttattgggaaggattgtaggtacaatcatgttaaattcatttccaggctgaataaaacaattgctattttgttcatgaaatagta

SEQ ID NO: 454959 - DNA, 201 bp, Homo sapiens
agtggatcatgggggcggtttcccccatgctgttctcatgatagtgagggagttctcatgagatctgattgtttaaatgtggcagtttctgctgcgctctsactctctcctgcctccttgtgaagaaggtgcttgcttctccttccaccatgactgtaagtttcctgaagcctcctcagccatgtggaactgtgagaaaat

SEQ ID NO: 454960 - DNA, 201 bp, Homo sapiens
aaaactgaggtgtacagggtttaagttgtcaagatgacacaactaggaagaggcagatctgggattaattccaataagtttgtctctagagtttgtgcacktaaccttggttcccagacaggttggttataaatgcatgactggagaccaggaaaaagatcagtgctcgagatgtagtttatttgtttttcatcagtttaa

SEQ ID NO: 454961 - DNA, 201 bp, Homo sapiens
ctaaatttctgcctccatatagctagcaggagccagacataaatttcaagatcagagatcctggttccacaaaccatgtccttagccactctgataatctkccttctgaatcagaatggactcatgttaggtataaatgaaatttgatataattattgagatgtgaggattgcatatgttggattgataacttaggagaat

SEQ ID NO: 454962 - DNA, 201 bp, Homo sapiens
tggttataaatgcatgactggagaccaggaaaaagatcagtgctcgagatgtagtttatttgtttttcatcagtttaatatgcattgatttactagttcaytggttttccagttcatcgtagaaactatgctaggcactagcgatacaatgacaacaaagatcccattccttttctcaagtttatagcctggtgttggaga

SEQ ID NO: 454963 - DNA, 201 bp, Homo sapiens
tgattacaaatgttcaattttatatttttgtctcacatttcaaactgactttaaaaatggatttttagaaaaaaaaattggattactttttgcatcatatkagtgtttttggtcacctatttagatgtcaatgctggtgatactccacacattaagtgagaaagaaagttcattactcacatagagactcccaagaagagc

SEQ ID NO: 454964 - DNA, 201 bp, Homo sapiens
gcaagaaggcaaagggctagggaaggaatgggtagaggtgggtgtgttgaccaccctgttgagacgtttggtgacgaaagtaagggtaaattatggtttamaatttttaaaaatcccatgagactgatatcagaaccagggatatctgtttcatttttaggataaaacaagctgagccttttcacacaggtgttgggaaag

SEQ ID NO: 454965 - DNA, 201 bp, Homo sapiens
tcaaagtacttcacacaattttgttgcctttatttcaccaagtctcctctatttaatacacctatgctaagaagctttggcacacactgcaaaaagcactsaacttgcagtcaaaaggtatgacttttagtatcgtactagtttttctgcttaattgatctttgaatttatggaaaccaagacgctgttctgaacttcaat

SEQ ID NO: 454966 - DNA, 201 bp, Homo sapiens
gaagagaatcctatgcttcttactttttttttcaagggataaatatcagctttcaggaacattttgcatgtgacagcatgtgagaatcaacatacatttasgtacaatcagtctgctttattaactgattttgttttttgcaaattcacctattcattaagctttatttgtaattccaaaatcaatactcagtgcactttc

SEQ ID NO: 454967 - DNA, 201 bp, Homo sapiens
ggctccttcggaggagttaataaataataaagtttggttcaggactccaggcaagaatgacaactctggctgaggaaatttccaggggctgatatctaaartaaacttaaagtcacaataaaatatgataagtgccatgtaataatcctacaatggaaatacacaggatagcattgtggttaagaacacagttcccacagt

SEQ ID NO: 454968 - DNA, 201 bp, Homo sapiens
ctagaaacttgttttatcatttacatttaaatctgaagttcatctgaaattaattgttttgcataatgtaaagtggaggtaaagatacattttattttccrtatggtgaacacttcattttaacacaagatcagtgtgtctaaatggaaagaataatagaagcttccaatacccattaataaagtgggagttgattagtgt

SEQ ID NO: 454969 - DNA, 201 bp, Homo sapiens
ctaaaataaacttaaagtcacaataaaatatgataagtgccatgtaataatcctacaatggaaatacacaggatagcattgtggttaagaacacagttccyacagtttcacttctggggtggcaaatgaggagttccatggacccactccccagcaaaataagcagagatgtcaaaaatgaaaaagaaatgaacaaaaaac

SEQ ID NO: 454970 - DNA, 201 bp, Homo sapiens
ctgctccatataaatatagtttttacaattgcatggaattgtaagaaaaaaaataactggcttaaaaaaaaacaaatctctaacaggcactgattcatccytgatttagtttatatttccttgtatcgtatttatcaattattattaaactgctctcaaatctgagttttaactttagctttataagcttgtattgaaagg

SEQ ID NO: 454971 - DNA, 201 bp, Homo sapiens
catactggagacatgaaagtatggatccaaaacagaacttgtcagcctcactgagtttacgaagtagagatcagagggtgagaaagctgatgtggttggcrcatattatctcatttttgagatatgttgtaaattagagggagctgagcaggaaaatatttacagaaatgtgaatcttgcctgagtactagaccatcaatg

SEQ ID NO: 454972 - DNA, 201 bp, Homo sapiens
aacaagctaggatggtgttctgagccaaatgtaatctccaagaccatggtcagtaaagtactcaagaaaaaagtattgaggccgagtagtctgaagtctaytggggaataaagaagcagctgattagcatttgaaagcaaggtctttcactgttttaaaagtgaaggagaattttttaacagaacactcatcaaaaacaaa

SEQ ID NO: 454973 - DNA, 201 bp, Homo sapiens
gcagacagccacctactgagttatcattttgagtaatttctttttcctaaaaaatatccatcattagtctcactttttggaatttctttttttttttttakggagattgtgactgatatatgggcaccagagtcttaatttgtacaaaaacaaaaaaaaagtatttaggttagatttagttatttatatacatcagcatga

SEQ ID NO: 454974 - DNA, 201 bp, Homo sapiens
gatcgtattgtatcaagaattcaaaagaaaatgtagaaagtatgtatttatctttgagttgtgtagtgatcgatagaaatttaggtgaatatctaaatatctatatagatataaagtaggatactcccacacaccttgctatttctgtgttttacatatttccctgacctcccaaaatgtccagttttttgttaggaagct

SEQ ID NO: 454975 - DNA, 201 bp, Homo sapiens
gaattaagatgcatttcgatacatgtaatattacatttggtgacactgctggaacatatgctgagaaatgcaagaataaataggactaatgctcattttcttttttttttaatcacttgcaagtgacatttgtttcatctaggcaggaaagcaggatcttataggcagggtaggtgtaagggctgattttaggtcaagctt

SEQ ID NO: 454976 - DNA, 201 bp, Homo sapiens
tatacttttacattatttatctaccctcaagtttcagttctctcctttgcaaatgacaataacaataccaaaaaataaaaaaactaaatgaggtaatgaaygtaaagtgataaggatgatgacaggcataaagtaagctttttattgtttttatttgctttttcctgtagcctgaaaatatgttcaaggtaaaaaaaagca

SEQ ID NO: 454977 - DNA, 201 bp, Homo sapiens
gttctgtggctcatgcctataactccagcatttggggatcacttgaggtcaagactttgagacaagcctgggcagcatagtaagacccatccccccccccmaaaaaaaaataccaggcataacagtgtgtgcctgtattcccagctactcaagagtttgaagcaggattgcttgagcccaggaggttgaggatgtaatgag

SEQ ID NO: 454978 - DNA, 201 bp, Homo sapiens
caattattagatgagataatataaaaaatttacagcctttcacttttatttttctttttcttttattttactttaagttccaggatacatgtgtagaatgygcaggtttgttacataggtatacatgtgccatgttagtttgctgcacctaccaacccgtcatctagggtttaagcaccacatgcattaggtatttgtctt

SEQ ID NO: 454979 - DNA, 201 bp, Homo sapiens
ggctttcacttttttattgtgaatttgttttctggaaaacttttaccaattttaattcacataagtagtgcatgagaaagtctactttctcacatgcttgstgataaatgttaacattcatttttatccttgccagtcagataagcaataaattaaatagttcttgttattttaatttgtattccccaaaggtatgttaag

SEQ ID NO: 454980 - DNA, 201 bp, Homo sapiens
gtgctttctaattgaaggtacaatcatttctcacatatgccttcttctcattatttgtttaatttctcttcacagcacctatcatcaccatctgacattttatatatatatatatatatatttccttttttgtttgttgtctgtcactcccactaaaatgtaggtctagaagaatagaaatgttcgtttgttgtttgtttt

SEQ ID NO: 454981 - DNA, 201 bp, Homo sapiens
tgctttctaattgaaggtacaatcatttctcacatatgccttcttctcattatttgtttaatttctcttcacagcacctatcatcaccatctgacattttatatatatatatatatatatttccttttttgtttgttgtctgtcactcccactaaaatgtaggtctagaagaatagaaatgttcgtttgttgtttgttttg

SEQ ID NO: 454982 - DNA, 201 bp, Homo sapiens
tgctgtacatcacatttccagaacttattcatcttttaaatgaaagtaaaatatgttgatcctttgaccaacatcttcccattcctcacctccaccccagsctctggtaacgaccattctactctctgcttctatgagtttaattttttttagattccacatgtaaatgagatcatgcagtatgtctttttatgtctggct

SEQ ID NO: 454983 - DNA, 201 bp, Homo sapiens
ccaaatgagatgtcgcaaattctgccaattgtgtaaagttttattatgtactttaaatatatgaatatttggaatatcaagatgtgttgtattttaccaayaatattaaaggtttgcttgttcacttttcacttgtattatgatgtcatttaaacaagtcagtattattagaaatctgattcattctgaaaacctctcatc

SEQ ID NO: 454984 - DNA, 201 bp, Homo sapiens
tttatttgtatacaatatgtatataccatagacagatgtacattactacaatatatatacatattacagattgcatattttatttctgcatattacaatayattatgttcattgtattaactcaggaaggttgattctgaattatttttatttttcatatttatgtttatttttccctattagaattagttacaattttac

SEQ ID NO: 454985 - DNA, 201 bp, Homo sapiens
tttcccattcttcactttacttggcaagaaatgcaaatattcaagaaaataacattgaatatttacagttcttcacctgacaaatggaaaatttcaaaaarttttaggctagaggaatgtgcataaacgagaaatggtctccaaagcatatctatgttttcaattggttaggtactattgataaggaatttaaatatttgg

SEQ ID NO: 454986 - DNA, 201 bp, Homo sapiens
ttggtttttcattcagcttgaactggagaaccaaaaagaaagaagaataaagaggacagcaggagttttaaatcatggatttgtttattcaaatctgccaygtaccaatacaacaatactatgataagagctaggagtacaactgtggacaaggtagtcatcattctggcacatagtttataggttcatatcatatttatt

SEQ ID NO: 454987 - DNA, 201 bp, Homo sapiens
aattgggtcttcaaggaacataacaatttgaaaagacagagaggactttccaggaaaatgtaactacatatgcacaaatgacagtagggattatagtaagwacacttttattattattctacctcttcactctattcaatttccctgactactacaatgtccccatgttggtttctcctttcttgtattccaagatattgt

SEQ ID NO: 454988 - DNA, 201 bp, Homo sapiens
ttaaaagtgaaggagaattttttaacagaacactcatcaaaaacaaagcgtttgaaaattacccctcctttgttttatcagtctcagggaagatgcacttygatacacgtctcaggaattaagatgcatttcgatacatgtaatattacatttggtgacactgctggaacatatgctgagaaatgcaagaataaataggac

SEQ ID NO: 454989 - DNA, 201 bp, Homo sapiens
aaagtgaaggagaattttttaacagaacactcatcaaaaacaaagcgtttgaaaattacccctcctttgttttatcagtctcagggaagatgcacttcgayacacgtctcaggaattaagatgcatttcgatacatgtaatattacatttggtgacactgctggaacatatgctgagaaatgcaagaataaataggactaa

SEQ ID NO: 454990 - DNA, 201 bp, Homo sapiens
tcttcatatatcattctgtttttagtcttcttagtgaataaaaataatgtcaattttaaatgtttaatacctaataaatatttgcattttaaatttcactyactattatttaattagcattagtatattatagttagactacatgttctctaatttggaaatgtttccagtgataatttttaattttttttcaaattgcca

SEQ ID NO: 454991 - DNA, 201 bp, Homo sapiens
gctgggcttgctcatcatctgtggtcaactggcaagtcacctaagatagctgatctgggataccttcagctgagataattcatccctctttcaaatgtgtytctgacatccttctttccaacaggctagatcaggcacacatcctcacatgtcgtcaggggtccaataaagttaaaccatgcatgtgtcttttgaaacttg

SEQ ID NO: 454992 - DNA, 201 bp, Homo sapiens
tgccatctccactttacgcctgagttgctttaagattagcctttggaattctcaagcaaacacgtagttagatatatgtatagcaagaaaaaaaatgaggsagggattactttttaaagcaagctagcaaattggctgtactggttactgggagagagcatcaatgagaaaagaaatagattagcactgagtattgagaaa

SEQ ID NO: 454993 - DNA, 201 bp, Homo sapiens
aggacttcaaatggagttgacaggataccgtttaatcctactttgtgagtagattacatagaatttaaaagtgacctgctctttgacagacaaagtttttsgtggccagtgaaatgacacagactaaaggaaaaagacggcattttaaactgagaaaaaccatttttatggaacattaaggattgattaaatgcccagaaa

SEQ ID NO: 454994 - DNA, 201 bp, Homo sapiens
ccccccccccaaaaaaaaataccaggcataacagtgtgtgcctgtattcccagctactcaagagtttgaagcaggattgcttgagcccaggaggttgaggatgtaatgagccgtgattgtgccattgcacttcaacctgggcaagataacaagaccccatatcttaaagcaaaacaaaacccatctctgattgtagcgtat

SEQ ID NO: 454995 - DNA, 201 bp, Homo sapiens
attatactattttttaacatgttcatcatgaaatgcattttttttggagttacttggtttccaagtgacatttaactccctaaaatagcatttaatcagtmagtttgtgttgtggtctttgaacatgccatctgagggacaagagtgtgctagattgccttttgacttacgatttttagaacaaaataaatgaaaaagaaa

SEQ ID NO: 454996 - DNA, 201 bp, Homo sapiens
gccatgttagtttgctgcacctaccaacccgtcatctagggtttaagcaccacatgcattaggtatttgtcttaatgctctccctccccttgcctaccccmctaacaggccccagtgtgtgatgttcccctccctgtgtccatgtgttcccattgttcaactcccacttatgagtgagaacatgaagtgtttggttgtctg

SEQ ID NO: 454997 - DNA, 201 bp, Homo sapiens
tatgtgcttatactagagagagaaaaagagagaggaagaaagaaatctaggttgaataaatactttctgacataaagaaattttgaaatatggaaattatyattggaactccagtggctcacaagatagtatttaattattgatatgataagatcactcaatatgctgaatgtgaattttcagaacaaaagagaaatgtta

SEQ ID NO: 454998 - DNA, 201 bp, Homo sapiens
gaactccagtggctcacaagatagtatttaattattgatatgataagatcactcaatatgctgaatgtgaattttcagaacaaaagagaaatgttaatggyggtttaatctaagagatccaatttgtcaatcaatctcccattggacttgtagagaaaacagatggcaacgatgattccctcattgctaaactgtcctaat

SEQ ID NO: 454999 - DNA, 201 bp, Homo sapiens
tcatgtggttcataaaatcttagtctccaaaatgtattttcaaatgaatgtcaggcagaaccaacaaatgagaactagggtacttaggattattgtaattscctaatgtgtttggtgaccttgtattcccacttacagcaacttatgcttctttcaaattcttttgtacaaaaaaaattgtcttgtccactctccacttag

SEQ ID NO: 455000 - DNA, 201 bp, Homo sapiens
tctcccattggacttgtagagaaaacagatggcaacgatgattccctcattgctaaactgtcctaatcagggctaagaagaggagcaggaatggaaacttrggaaacctgaggtacagaaagcggcatgagcctgactatttcttagcaaacacaagtttgccttttctgggagacctgaaataaatgttcatcctggttc

SEQ ID NO: 455001 - DNA, 201 bp, Homo sapiens
atcttcaatattcattaacatgaaatattactataataggaaaaaaatcggtaccttaacaaaaaatatggaaatttatttgtttatttattatttttacttatttatttatttatttatttatttatttatttatttatgtttttgagacagtctcactctgttgcccaggctggagtgcaatggtgtgatcttggctca

SEQ ID NO: 455002 - DNA, 201 bp, Homo sapiens
tcttcaatattcattaacatgaaatattactataataggaaaaaaatcggtaccttaacaaaaaatatggaaatttatttgtttatttattatttttacttatttatttatttatttatttatttatttatttatttatgtttttgagacagtctcactctgttgcccaggctggagtgcaatggtgtgatcttggctcac

SEQ ID NO: 455003 - DNA, 201 bp, Homo sapiens
cttcaatattcattaacatgaaatattactataataggaaaaaaatcggtaccttaacaaaaaatatggaaatttatttgtttatttattatttttacttatttatttatttatttatttatttatttatttatttatgtttttgagacagtctcactctgttgcccaggctggagtgcaatggtgtgatcttggctcact

SEQ ID NO: 455004 - DNA, 201 bp, Homo sapiens
ttcaatattcattaacatgaaatattactataataggaaaaaaatcggtaccttaacaaaaaatatggaaatttatttgtttatttattatttttacttatttatttatttatttatttatttatttatttatttatgtttttgagacagtctcactctgttgcccaggctggagtgcaatggtgtgatcttggctcactg

SEQ ID NO: 455005 - DNA, 201 bp, Homo sapiens
agggctctaccccgtgcagttattattttcaagggtaccctgcagtttctgcctgctttgggttgctctccagtcttttctatatatttttttcaatttgrtcctgaatttttaatttttattctgatagggctagtccaataaaagctagtacatcattgctagaattggaataatttctcaaatgctttaaagtactca

SEQ ID NO: 455006 - DNA, 201 bp, Homo sapiens
ttaaaatttctctcttttgtactctgtccctttatttctcaagctggccgacgcttaaggaaaatagaaaagaacctacatgaatatcggggcaattcccygataaaatatattatatagggagactcaaagcatatttctaccttccctgtactaatttgaaaaagaatatatatggttgataaatatatatatatattt

SEQ ID NO: 455007 - DNA, 201 bp, Homo sapiens
tactaatgttgtgaagagaatgaaagacaggaaatcagagataaaaaggaggtaggataaacagaatttattggctaaagtgaggagaagggagaagtctggaataattcatcagttcatagtacaaatacataaaagggtggttgtgtaactaattgggacagagattgctgaaaaagatttagaggaggaggacagttt

SEQ ID NO: 455008 - DNA, 201 bp, Homo sapiens
ctacatgaatatcggggcaattccccgataaaatatattatatagggagactcaaagcatatttctaccttccctgtactaatttgaaaaagaatatatayggttgataaatatatatatatatttagaataagtattaagccccaatgttatgcatactcaaaggaattatacaacataaagagaatcaaagtatatttc

SEQ ID NO: 455009 - DNA, 201 bp, Homo sapiens
aatatatatggttgataaatatatatatatatttagaataagtattaagccccaatgttatgcatactcaaaggaattatacaacataaagagaatcaaartatatttctactttccttggactaattcgtcctgttctggttgtaagtatgggatatgaaatacatagatgaaatgtatgcttttgaatctatccccaat

SEQ ID NO: 455010 - DNA, 201 bp, Homo sapiens
gataaatatatatatatatttagaataagtattaagccccaatgttatgcatactcaaaggaattatacaacataaagagaatcaaagtatatttctactytccttggactaattcgtcctgttctggttgtaagtatgggatatgaaatacatagatgaaatgtatgcttttgaatctatccccaatctcaatttagttg

SEQ ID NO: 455011 - DNA, 201 bp, Homo sapiens
tattgctgacaagtagcaagattagagagcacttaattcctgactttgaagcttgcagtcattctcttgctgtatgctataattccaagccaggcattctyatcagagggacaggtggagatcattgaatcataatcaaggttcattgttgtgaactttaaaatagttaataactatattcaaatattaactattttaaag

SEQ ID NO: 455012 - DNA, 201 bp, Homo sapiens
tcgagatctgcaactaaaatagcacaatattaagtataaacattacaggaaggctagtttctaaactaagcaatgttcacaaactgccactgatggcagtstgaaaccatatgggctttttccagctaaaatgatgatgatgatgctgaaatttcattttttattttgatattctcatagtattgatgcagggcaggcaag

SEQ ID NO: 455013 - DNA, 201 bp, Homo sapiens
ctgacctgagcttagagttgctacaaaaaaattcacaaattttcagcagaaatgaaataagaatttcaaaagagactccgaatttgatgagtagaacttaygctttgcatttctgtaactgttttgggaattgcaaacctcatggtattactaaattatccattccctattctaccagtgttggtttgtattctcaagata

SEQ ID NO: 455014 - DNA, 201 bp, Homo sapiens
agatcacttccaaatactatgttttgaaaatataagtttatcgtatagcaatcatacacaagaaatagaatgttcttcataaacaatcaatttcaatgtaytatttgcatgtaagagcatgtcattattgtatgataatttatagtttagagggagtccttttgcaaataaaaaattgaggcttaaagaagcagacatatg

SEQ ID NO: 455015 - DNA, 201 bp, Homo sapiens
gcaatgtcctccaactagcttaatgttgaaatactgttttttttgtttgtttgtttgtttgtttttgttgttgttttctaaactaatagtgcaggatcccycaggtctttcagaatctagcatttcttttcccctttccgcaaggattctggcatcgagatttttatgttgatgatccacctgctccaaatgtggcctgga

SEQ ID NO: 455016 - DNA, 201 bp, Homo sapiens
aacaaatgtacctcaccaatgcaacatagtaataatagggtaaattattcacactttctgctcaatttttctgaaaacctaaaactgctttagaaaataawatctatctgaatcatgacccaaaatgattgttgtaaggaatatctacattgattctgaaatatattaggaggttggtcagtttttgtgtgaagagaaaca

SEQ ID NO: 455017 - DNA, 201 bp, Homo sapiens
ctaattctgatagatgaactgttacttcaaagctagcagtaataaagtctaatcagatgtttaggaaatgttttagatatttcagagaaagggaagatatmatttatggccaggaattaaatggtgcaaaggtgttcggcagttataaatattaccttggaagcatagtttaaaaaaatcctgatgaagataaaaagaata

SEQ ID NO: 455018 - DNA, 201 bp, Homo sapiens
gagaactaaacgatatattccagaacgactgaaacagttctctcttatccaattgcatcctttctgcctttcatctttctatgagagtgtctcacattgcrtttaatctttacattggctaaattctaactaaacaaaaatttcttaaaacataaatgaaagtaaagatttttttcttagcaatgaccaaccctctcccta

SEQ ID NO: 455019 - DNA, 201 bp, Homo sapiens
caatttttctgaaaacctaaaactgctttagaaaataatatctatctgaatcatgacccaaaatgattgttgtaaggaatatctacattgattctgaaatmtattaggaggttggtcagtttttgtgtgaagagaaacatttagccaggtctcaaagttttcagagaaggagaagaagatgctattgtgaggtttgtctgg

SEQ ID NO: 455020 - DNA, 201 bp, Homo sapiens
tttatttaaatttttttatttttatttttaatttttatagatgcatactagttgcatatatttatggggtacatatggtattttgttataaggatacaatstgtaatgattaaatctgggtaactgggatattcattacctcaaacattaatcatttcttcatgttggaaacattcctggttcttacaagatataaaattt

SEQ ID NO: 455021 - DNA, 201 bp, Homo sapiens
caaaacaaaacaagaatggagatagcatgaatagagtctcattaataaataacaaaaaacaggttccttgagtatctaagaaaggcaaaattccatggccyctaataaatagtgaaaatgatggaagagaattcccacgccatgtcagctcaaaacaagtatattttttgcccaagccatgctcaagctcttgctcttttt

SEQ ID NO: 455022 - DNA, 201 bp, Homo sapiens
attcttgatcttctataatgatgtggcaagctgttgttcaaagtaaaggttaaggaatatttaggcaaatagaaaagtagaattccatttgcttcacatarcaactgaaaaagaagaatgcatagtctcacttttagggtgaataaaatgtaattttaattagcatctaatgcaggattaatgcattagcctcctaactca

SEQ ID NO: 455023 - DNA, 201 bp, Homo sapiens
aattgtttgattccattctcttaacaactatggatatacctctttggagctatccaaatggaaaatgaaataagtaatctgatatatgagtctggagttckggtaaggatatggaatggacacatgcatttgaggccagtctgcatatagatgaagtttaaattgcccctctacctttctttatccctacttctcttttat

SEQ ID NO: 455024 - DNA, 201 bp, Homo sapiens
gtttcctctttaatatttctacaaattctaagcacaaaacagtgtaatggggaaattaaatattgaaaaagaaaaaaggtgagagagtcatcaacatataraaaggggaggcttccttatttatttataagggagttttaagcaagtaaaaaaaattgtggttgagatatacccacttgactatgtcattagcattagaga

SEQ ID NO: 455025 - DNA, 201 bp, Homo sapiens
tgatcttctataatgatgtggcaagctgttgttcaaagtaaaggttaaggaatatttaggcaaatagaaaagtagaattccatttgcttcacatagcaacwgaaaaagaagaatgcatagtctcacttttagggtgaataaaatgtaattttaattagcatctaatgcaggattaatgcattagcctcctaactcatctcc

SEQ ID NO: 455026 - DNA, 201 bp, Homo sapiens
taaatcgacagtaatacaaaatcataatgaactaaattaaactacaaacaaaatgctagaaaatatttgtaaaagtgtaatggtgacttgtttgtgtcacygcttcactgctacatgaagtaaaaatcaacaagaaaatactaagaccccactggatagatataaaagatatgaacttagagtttcaaaaggagaaactag

SEQ ID NO: 455027 - DNA, 201 bp, Homo sapiens
agctgtttttttttaaacctgcatatttgaagaaggttcagataggagttcagacagagtatgagtagaagacaaaacataagattacatagagaaagatwtggggtgagatgtaaaagatttgcatttctaaacttctcgaaattcacacttctttctcaaacacctgtgtcttctttccataaaaaattaaaactttta

SEQ ID NO: 455028 - DNA, 201 bp, Homo sapiens
gcacaccaacatggcacatgtatacatatgtaacaaacctgcacattgtgcacatgtaccctagaacttaaagtataataaaaatatataaaaaaaatttwaaaaagaccaaagccaacaatctcttctaaactcatccctttttaattttgtcttttcagccacagcagcagaaaacaaaaacaaaaacaaaaaaaaaca

SEQ ID NO: 455029 - DNA, 201 bp, Homo sapiens
gcatatagatgaagtttaaattgcccctctacctttctttatccctacttctcttttattttcagtctctttcaaattctttgctccttccccatttcttaaaaaaggtattctctatcttgaaaataacctgctcatgtattctaagctaaattaattaggtgtctttggttgcaaatgacaatccaattgaagtgaaaa

SEQ ID NO: 455030 - DNA, 201 bp, Homo sapiens
tttcattcatgtccctacaaaggacatgaattcatcattttttatggctgcatagtattccatggtgtatatgtgccacattttcttaatccagtctatcrttgttggacatttgggttggttccaagtctttgctattgtgaagagtgcagctataaacatatgtgtgcatgtgtctttatagcagcatgatttacaatc

SEQ ID NO: 455031 - DNA, 201 bp, Homo sapiens
gtatatagccaagaatctattccttgaatgctggaattgaaggttatataaaagcacttattactaccaaattgcaaagaacaagcagagcaagtaagttgagagagagagagagacatctttcttggagaacatttttggaaaatgactgtgggcaaagcaatgtgaaaatatttagggagacagaagactacgaagata

SEQ ID NO: 455032 - DNA, 201 bp, Homo sapiens
tatatagccaagaatctattccttgaatgctggaattgaaggttatataaaagcacttattactaccaaattgcaaagaacaagcagagcaagtaagttgagagagagagagagacatctttcttggagaacatttttggaaaatgactgtgggcaaagcaatgtgaaaatatttagggagacagaagactacgaagataa

SEQ ID NO: 455033 - DNA, 201 bp, Homo sapiens
tctattccttgaatgctggaattgaaggttatataaaagcacttattactaccaaattgcaaagaacaagcagagcaagtaagttgagagagagagagagacatctttcttggagaacatttttggaaaatgactgtgggcaaagcaatgtgaaaatatttagggagacagaagactacgaagataaaatacctatatcaa

SEQ ID NO: 455034 - DNA, 201 bp, Homo sapiens
gaaaactatggaaggggaagtaattatgttcttaactatgttacattcttaagttacattcttaactatggggatatagtaagactctaaataactaaagtttttttttattatactttaagttttagggtacatgtgcacaacatgcaggtttgttacatatgtatacatgtgctatgttggtgtactgcacccattaac

SEQ ID NO: 455035 - DNA, 201 bp, Homo sapiens
atgttttagttttgcgctaactcctctttctctcagagtatctgctttttcatatcagagctgagtcttatcaacaatagtagcaacttaacataaatgarcattccataattaaaaggactccctttaattaaaaatactgtgcagacaggaggtgcttcttaaagcttggaagattgatggacggcgcaaaaccaccta

SEQ ID NO: 455036 - DNA, 201 bp, Homo sapiens
aacttaacataaatgaacattccataattaaaaggactccctttaattaaaaatactgtgcagacaggaggtgcttcttaaagcttggaagattgatggayggcgcaaaaccacctattagaaccacaaatagggagcagaaatttaaacactgaaaattagaggaatgtcatttgtatttattaatactcaaccaatatt

SEQ ID NO: 455037 - DNA, 201 bp, Homo sapiens
ctaagcagatgctctgtaatgagccttcaatttgtagtccattaagtcaggagagaggcagtgcattgacaattattttactaatccacttaccactacarttaatgggagcaagttgtgtgcatggtggcggtgagagagtaaaaatcttgtatgtttcataagagaggtagtgaaagtgacagcaagaagagtaaataa

SEQ ID NO: 455038 - DNA, 201 bp, Homo sapiens
atatatcggcatggctctatagaggaaatttcaagaaagccattgagagaatggtaagaaataaagtcagacaattgacctaagatcagtatacatagagycttgtaaaccttggtagagatttttattttattttttaaagagtcctgggaagccactggaagctttgataggggaatcccattgatctgattttcgttt

SEQ ID NO: 455039 - DNA, 201 bp, Homo sapiens
caaggactggcctaatttcctgccacaaaaggctataaaactgagccaagtatggaaaaaccttttcagacattagtcaattggtagaaatggactttgayacctaaaaggttggaaacaactaaatgatcccaacaattatcccagctttcttgctgctggcagtttccatactggagacatgaaagtatggatccaaaa

SEQ ID NO: 455040 - DNA, 201 bp, Homo sapiens
tttaacttgacatacaaatattcagaatgaatatttggaagcagagccacgagccataccttgaaagataactgcggacttactcttgcctgccatttggrtacttcagatttcagttgttctaagtctcaatgatcctgagttttctttttgtaatttggtaattttgtaatggcaggctttaaaataagtaaaggtttt

SEQ ID NO: 455041 - DNA, 201 bp, Homo sapiens
ttaaaggaaggatttttattcttattcttatcttcctcctttcttctggctggaatgttaataggatgacttgtgttcaagcagccctctaaagacatgarttggaagctatgtactgaggagcacagagcaacaagagaaaataagtaaaataagtttggttcttagctctggaagcgtgataaacctgggatagtcagc

SEQ ID NO: 455042 - DNA, 201 bp, Homo sapiens
ctgggatagtcagccagggaacttctttcatgttgatttttaagccagtgatattttgggcatttcttttacctgcaggaagaaaataggctgattttatrtaatttgaccctttaaaaactagaatatattcatacatagtttttacagttcagtgtttaaacttatttatttttcatcttagttttgcttccctatgtt

SEQ ID NO: 455043 - DNA, 201 bp, Homo sapiens
atttcattgccaagttgctgttgtgactcagtagcagcacttctgttatcttctgcatggctcctcactcttcagcgagcaaattaggactcattcacatrgtgatccagggttcctggcacagcaagatagatggcaagccattgtgccagccctccaatgctctgtttgtatcacattgcttttctcccattgatcaaa

SEQ ID NO: 455044 - DNA, 201 bp, Homo sapiens
gtgatgactcctgaagaaggccattcttttctgataaatcttccctggtgcttttggtagagaaggtacagagagaaagcaaaagtacaggcattcttagyttatttttttcttctcaatcaacctagtttctttctgggaagaataaatgctatttcacaaaatcagtttaccagtttacttgaaatgtatttggaaaga

SEQ ID NO: 455045 - DNA, 201 bp, Homo sapiens
cttgaacctgccctaaatttttagtgtaggaagcccatgatctaaacctatttattctagtcattgaggagaatagagggagaaaacgaaatggaaataawaaatcagaacccttggtggaagaaatggcgcatgtacttggaggcggagacaccaggaggcttcctaaattctctgacatatgtcactccctgcctggtt

SEQ ID NO: 455046 - DNA, 201 bp, Homo sapiens
agaacaaaatagtgttttctgtgaaacaggagattttggggctatgtacaagtaaggactcccttgtgttaagttttccaagtcactgaagtatcttattwaaaaaaacatgaagtcagttttagggactggtttatgtgccttaaggtacctaatcatattatgtaatgcctctggtaactctttcaactctctggtatt

SEQ ID NO: 455047 - DNA, 201 bp, Homo sapiens
attataataaaaggtaattaattatagggttgaacaggaagggggaagaactatcatttaaacatgttatactaaatatttatcatgcttcttttggctgsgtctttcataatctcataaaagagaattaaatatggagtgatgaaaatatagagatctatgttgatgttaagcagaaaaaattctcactacttgcaagtt

SEQ ID NO: 455048 - DNA, 201 bp, Homo sapiens
ctgaaagtgatctacctgcctcagcctaccaaagtgctaggattacaggcatgagccaccacgcccggccaataagttgttaatattatactaagtactakttatttatttactatatactttataccttatcacatttaaccccaccccaaggttatatgctagttattactcatgaattacagatgagagaatcaagga

SEQ ID NO: 455049 - DNA, 201 bp, Homo sapiens
ggttattttcaaatttcatgcatttttggttcattctttaattagccaatctaatgaattactaccaccccctgcccaagtatcaagtcagcacattaaaycccaaatctgaaatcttaccacccatgacaatatatttgccctaatagatacttaatgtcatactatttggtgtaaacttttataagtgggctttatact

SEQ ID NO: 455050 - DNA, 201 bp, Homo sapiens
ttttataagtgggctttatacttctttgactcaattattttgggacctaatttgtagcatggagtcaataaggagtaacgtggtgagtccagaagagatcygtgaaatttcctatgtcaagttattgaaaagcatttgtgcagaagaaggctgattccctcagaagtggtgagaggttgcttccaataacaagaaggttca

SEQ ID NO: 455051 - DNA, 201 bp, Homo sapiens
ttagctggaaccataatcttcaaaatcactattattgccatggccttgcattccacctgcacttcattccatgccaactctggtggttatttaaacaattrtaatgtaaccacaggctgtaaattgtcacagttccatttcccatcaatatgtgctacagagatatgggagcaatccaatctcagaatctcatttttatgg

SEQ ID NO: 455052 - DNA, 201 bp, Homo sapiens
ttggatagggtaagcttcaacacattattcaaagaccaagccatcctccacttagcccctaccagaatgaatcatgtgtttttccatagtgttttataccygttgctgatagaacttcattcatcctatgctattacggtcagtcattaccatgtgagtaactcttgagcaggggccatcatttaagaatattagtattac

SEQ ID NO: 455053 - DNA, 201 bp, Homo sapiens
aataatgaaaattttctatttactatgagtttttagccattttgttagtaacctgtttccaataaagatccaactcttgaaaaaggaatgtttattttttwaaaaaaggtattagttttctcccatttttttctaattataatttataaaataatcccaccattccagattacaaattaaaaatgttgtgagtgtttaaac

SEQ ID NO: 455054 - DNA, 201 bp, Homo sapiens
acatttctgtctcttggtatgtacattcatctagtgggtatgtacctaatgggggaaatttctgtattctaagatatgcatacgttagttttcagagatcrtttatcagaatgattgactgaaccaatttgcaatcccaacaacagggtacaagcattctgatagtcccatgtccttgccaacacttgctattgtaaatct

SEQ ID NO: 455055 - DNA, 201 bp, Homo sapiens
aaaactaataatttttaaatatatcagtttcttgaattaaaccattgttacaataatagtagcttttataattgtccatatacttacctttactgtgatayttatttcttcatatatgacttcaaattattgtatagtgtatttttatttccatcttcagaactcacattaacgtttcttccagacaagtctagtgttaac

SEQ ID NO: 455056 - DNA, 201 bp, Homo sapiens
tgccattggcaaacacatgccaaccatagcttcatttccaaaattcagcgttgcttctgcagactacaatgggcagaggtggttagaggaatgtcagtgarggggagagagagagagagggagagaaatcagcttctttgaattgatggttgacagaaactcttccactttgctgggagcaatctaatagatttattttgg

SEQ ID NO: 455057 - DNA, 201 bp, Homo sapiens
tttttaaatatatcagtttcttgaattaaaccattgttacaataatagtagcttttataattgtccatatacttacctttactgtgatatttatttcttcrtatatgacttcaaattattgtatagtgtatttttatttccatcttcagaactcacattaacgtttcttccagacaagtctagtgttaacaaactcctctc

SEQ ID NO: 455058 - DNA, 201 bp, Homo sapiens
cagaaaagttgcatctcaaggtctactattcgtgggccccatctgcctctcacttttagctttgagccatcaacaaagaagttagacttatttttattccrtttgaatgcatttttttcctgattgtaaaaaaaaaaaaaaacaggctgttttgagaaaataggaaagtacaaaaagatgtcgaaggacaaagcattaata

SEQ ID NO: 455059 - DNA, 201 bp, Homo sapiens
agagggtaaggagaaaagccagtcaagcatgtgttaacaagaaagggttacaactgtgggcaaataggtctcaatcctgtggagaaccatctgagaaagcrtgtgtggaatatatctcagaatcacccagtggagagtggagagactgaaacatttatgtacttacttccagctccactgtttgagagttgatctccagtg

SEQ ID NO: 455060 - DNA, 201 bp, Homo sapiens
tttgcccctaaacatgtatagcctcccttattattaacatcccccatcaaaatggtatatttgtcgtaattaatgcatctacaatggcacatcattatcgyccaaagtccacagttcatgttagggttcactcttggtgttgtacattctgactttggacaaatatatgacatgtatccactgttatactaccatacagaa

SEQ ID NO: 455061 - DNA, 201 bp, Homo sapiens
cattagctagccctaccttcagatgatattttattcatatttttatttcttttcacacagtatttctttataaatctctgcttctacttcttaagtatttrtatattggtagaaactcactttatcttaataattataatactttaatgtatttagaatattgtatatcatatgtaatacttaggatactgtacatatttt

SEQ ID NO: 455062 - DNA, 201 bp, Homo sapiens
aagtgactgagtaaagaccaaatcttaaatctggttcctgagcctacattctaactgcatcatgttagttcccacaccacacttgaacttgaatttctgtrtgaatcttaggttttagagaacacaagaagaaactcgtcatagcattttccattgttaagggatgtaaaggatgaaattctccaaatcctcaactggtct

SEQ ID NO: 455063 - DNA, 201 bp, Homo sapiens
aaaacaagtaagcctcattgattgctgactgttttccagaccctgggctagatctggatttcaaagatgaagttttttaaaaatcatgggaaccagcaatmtatattctagtgaggtaaataaacaaatacaattcctaaacacaatgctgaaatgtgaacatattccaagtgttagaagagcactgaagagacagtgaag

SEQ ID NO: 455064 - DNA, 201 bp, Homo sapiens
atgtatttattattaaatattaatatataccaaatatttgtttatttaactaatagccatttaaaatagagaaaaggatcataaatgatatttctgtcaayactgtcagagttttgaggtttgtggtagaaaaatacagtgtctgccacatttcagggttcatgatgtgacacaattagtttctagcttgtaatgtgggtc

SEQ ID NO: 455065 - DNA, 201 bp, Homo sapiens
ttccttcattagagattgctgtctctgggttcctcctgaattaccccacaccgtgaggaatacttttaggctatacaatctaatcttctctgagagaaccmtatgtcttccattaacatgactttgacattaatcttttttaaaataggaaacttagtgctattaagctaaaaactctttcctgagcctactttcattaaa

SEQ ID NO: 455066 - DNA, 201 bp, Homo sapiens
gaggaagagactctggcaccataacaggaaggaagacacagcactttggtgctggtacattccttcattagagattgctgtctctgggttcctcctgaatyaccccacaccgtgaggaatacttttaggctatacaatctaatcttctctgagagaaccctatgtcttccattaacatgactttgacattaatctttttta

SEQ ID NO: 455067 - DNA, 201 bp, Homo sapiens
atggaaaaagattgtaatttcacatcatgtttccctcaagtgtagttctactgcccaaagtaactttgcattcatttttttaaaaaatcattcctttccartgccaactggcattattaaaagtcatcagtgggtataataaatctctacttccttgtaatattatcactggactaattttggaatgagagaatcagagcc

SEQ ID NO: 455068 - DNA, 201 bp, Homo sapiens
aaaaaacaacaggatcaaatatgctatttttaaaaaattacccaaagatagtttaaggtctgtgctcttagtataattcccttttgtctcactttacattkggatactttcaaatctcctgctaagtggattgacattacaaatgactctaatacagagcaggtttttcctgaactttcctagacagtcaagtggagagat

SEQ ID NO: 455069 - DNA, 201 bp, Homo sapiens
tttagttggtgactttgctttttaaaatgacactgaacggtgctgaagtgctgtctgatactcctaagtgcaagaaggctgtggtgtgtcttatggagaamatatgtgtgttcaataagctcattcgcacttgaattatagtgctgttgccatgagcttaatgtttgtgcatccacaatatatattaaataagccttctat

SEQ ID NO: 455070 - DNA, 201 bp, Homo sapiens
gtttccacctgcattgtatgagagatcaagggtgtctgcatctgtgtcagcatttggtggtatcatttttttttttttagccttgctgataggtatgtggkgatgtctcattgtggttttaatttctattttattattgtgtagtggtattgaacatctgttcatgggctcatttgtaatccttatcctcttccatgaaag

SEQ ID NO: 455071 - DNA, 201 bp, Homo sapiens
ctgtgaaaaggaagaaaaaaaagagtcatacttaaaaggaaatctttgccttgagtctgtcccattatgtactgtcagaataaatagttgaatagatacasatgtttgagagatagacggatgattggggattggggagaaaagaaaagggaggggaatagcaatcaacagaaaattatagtatttcagtaaccacattct

SEQ ID NO: 455072 - DNA, 201 bp, Homo sapiens
ctaacactgtgaaaaggaagaaaaaaaagagtcatacttaaaaggaaatctttgccttgagtctgtcccattatgtactgtcagaataaatagttgaatakatacagatgtttgagagatagacggatgattggggattggggagaaaagaaaagggaggggaatagcaatcaacagaaaattatagtatttcagtaacca

SEQ ID NO: 455073 - DNA, 201 bp, Homo sapiens
tattacgtagtgggaactcgtggttgtaattaaaatatgcctgatattatagtaaatcgaatcctgttaagtcattcacgtattgatagaactacatgaawgtagtattgtatctctttatttccaccgtgagtataaaactaacttcttttagaaggcctattaatagttcacatatagcatgtattagtctaataatat

SEQ ID NO: 455074 - DNA, 201 bp, Homo sapiens
actatcatacttgggttagaaaatttttcttccattatttctttgagtattgaatctattttcattgacctattatttttttctgaaaaatcttattttgkttttaaattatatttagagacaagagtcttgctctgtcactcagagtagagtgcagtggtgtaatcatagctcaccgtaacgttcaactcctgggctcaa

SEQ ID NO: 455075 - DNA, 201 bp, Homo sapiens
gtagcccaaaggtgataaatttgtgtggactaagtgcaagaggagattggggaaaatttgtttcattgttgtgtcattaaactcagttttcccaccaaagmctgttctaataatttaatggccatgaaaattggttcttttttagagtaaaatatctttcctggctcatttgaaagttgccacattcaatgttgcattttt

SEQ ID NO: 455076 - DNA, 201 bp, Homo sapiens
acatggcctttcttccatgcatgtgcatccctggtgtctcttccttttctgataaggacaccagtcatatcggattagaatccatgcttacaatctcactwtaccttgattacttagttaaaggtcctatctccaaataacaatcacattgtgggttagaatttcaggacatgaatttgagagagaaataatttagtccat

SEQ ID NO: 455077 - DNA, 201 bp, Homo sapiens
gacaaatattaagctgaattaggtcaatcttctagatttaccaatttgcaaataatgcaatccacagagcaagatgtggatatgggggattcagacagcayaatctagctcgggaaactacagaaaaaaaaaatgacccattttgtgacatataattgaaggaacaaatgaagatagatgaatggagaacccataaataaa

SEQ ID NO: 455078 - DNA, 201 bp, Homo sapiens
agacagcacaatctagctcgggaaactacagaaaaaaaaaatgacccattttgtgacatataattgaaggaacaaatgaagatagatgaatggagaacccrtaaataaagcaattcaagatacacatgaactcataaaacataggtcctaatttgagtaaagaaagaaaattttaatactgactggttatttgatgacact

SEQ ID NO: 455079 - DNA, 201 bp, Homo sapiens
ttttatttcacatcctactttggacaggatatagactacacagatttcctgatgcaaaaccagcgagagtcattttacctattcatgtcaatcaaccttamtagaaaaataaagtgacttcttacctctttagagaaatggattaatctggacaaattaatgcttacaatcactaaattgaaatggccattctcctgtatt

SEQ ID NO: 455080 - DNA, 201 bp, Homo sapiens
atgatgtttgaagtttttcaagagtcttttccctctggattagagaacatctctgccagaatcaaaatgagtctcaaaattgacagtttttactttacttsctacagtaacctggcattttaaaaagcattctggaaaaaaaaaatgaatcttctgattgtgtaataaaagaataagaatagaaactaagataaaatgatt

SEQ ID NO: 455081 - DNA, 201 bp, Homo sapiens
acaatgactgtttcaaaaaatttataccttcaacaaaactttaatcctatttttatatgcctgtctgctctgaaaataatttaatatgtttaaattcctasaataaatcttactttaaccaaattaataattcttaaacttaaatttagatttcaatgaatccccaaaatggtttccacataaagtaatgcagctaatatc

SEQ ID NO: 455082 - DNA, 201 bp, Homo sapiens
acacaaatcacacagttttaaatggaatcaccgttattgacagtttctccatgactttcctaaatccaatcaacaaagcaatatatcaagcccttatatgyggtgcaggatgatctctgtggtgtaaatgttctcgattacaagtcgccaatttgccatagcgaagcatgcagttgggaggggacgtgcagtagcattcca

SEQ ID NO: 455083 - DNA, 201 bp, Homo sapiens
ctctgtatgtttgcatttaacacactagtatgtttaaactgtgtttatagtcttctagaagctgtataaacaatttgggtcccgccacaaactaggtacartttcttcaactatagcctagtggtacaagaagccatttccatgtaaaaatcattgtttttgcaccccctcatcatgccacatagattcaggtgctttcac

SEQ ID NO: 455084 - DNA, 201 bp, Homo sapiens
atatattttgtttatataagatacaaattaaatgatgaagtatatgtctaaatttgaccattcatcagtgatgtgaatttttttttgctacaatacataayagtttttgaacaggaagcatattttctcatttttttggtgctatttatattttagtggccacacaaatcacacagttttaaatggaatcaccgttattga

SEQ ID NO: 455085 - DNA, 201 bp, Homo sapiens
ctaagagctatcacatagttctccataaagactatacagaggtgatgggactgttcttcaggcagaaaaatgaccaaagttgtcttatctttcagcttggktgctggaatcctgtcacaggtctgaatgggtcactgactgacaagaaattggagaataacatgcgtggagtggttctacgtgtagtaactgttctggtaa

SEQ ID NO: 455086 - DNA, 201 bp, Homo sapiens
aattttcaaggtaggagggttatgccttactcaagaaaccgtaggaagactcatatgatttgaattcaaagaatgagagggaaggcattatgacatgaatygatgaatataaataataacaaatcatgcaaattctggtaggccacatccaaagtttggcctttatcttgagaatactggaaaactatggaaagactttaa

SEQ ID NO: 455087 - DNA, 201 bp, Homo sapiens
catttttcacctgaactataggagtctcataagtctttcttcttccagtgttgtctcctgcaaatatacgattcacatacttgcatatatacccaagttayccatgccatggaaagataaacacataattcccattcttcagttattttcttggcttcccaatgcccacagtttagaagtctgagttcttcagagcataaa

SEQ ID NO: 455088 - DNA, 201 bp, Homo sapiens
acatcaattttaatagtgtagatatcaaatatatgaaacttaccaatgtcctatttacaaactctcaaaggattcaagccttggaatgcagtagctaaagycatttctttatattgttacctaatatttcacattcaatttgaatataataaaaatgacattgactagctctgttgtttactgaccctagtgaacagagga

SEQ ID NO: 455089 - DNA, 201 bp, Homo sapiens
tatattttgtgagagcattggagagcttaaatcagcaatttctaatttttgcaatatattaaatatatattttatattgtatatatttaatatatttacartatatttttataatatattattattaactatagtcatattatacagtagatctcttgaacttattcatcctgcctaagtaaaactgtatcttttaaccag

SEQ ID NO: 455090 - DNA, 201 bp, Homo sapiens
attttattattattttttcaattagctattttgaccagaaaatcctcatatggatgtaaaaataaatattttattttgcttttacctttcaaaagctgggyaaataattattttgcttttaagaagaaggtatctaaaatgcattgtaacttattttgaaaaatgggttccagatatcagaggttagcctgttctgaatat

SEQ ID NO: 455091 - DNA, 201 bp, Homo sapiens
agctactcctcgagaagagcaactccaagacacataattatcagattcaccaaagttgaactgaaggaaaaaatgttaagggcagccagagagaaaggtcsggttacccacaaagggaagcccatcagactaacagcagatctctcagcagaaactctacaagccaaaagagagtgggggccaatattcaacattcttaaa

SEQ ID NO: 455092 - DNA, 201 bp, Homo sapiens
ttcatttatgctcatttggggattttcttgttgtctcagtcccaccctcatttggcaagccctggaccccagttttattaccacctaaccattgaatactyttaaagtgttcctcagtttgttagtttcttagctttctttttttaaattggtatatgcccctcagggaaaaccatttccaaatatgaagctatctttctg

SEQ ID NO: 455093 - DNA, 201 bp, Homo sapiens
agcagacctaatagacatctacagaactctccaccccaaatcaacagaatatacatttttttcagcaccacaccacacctattccaaaactgaccacatasttggaagtaaagcactcctcagcaaatgtaaaagaacagaaattataacaaactgtctctcagaccacagtgcaatcaaactagaactcaggattaagaa

SEQ ID NO: 455094 - DNA, 201 bp, Homo sapiens
aggcaggagaactgcttgaacccgggaggcggaagtcgcagtgagccgagatcgagccactgcactccagcctgggcaacagactgagactccgtctcggaaaaaaaaaaaaaaaaatggttactgagcgccatggaagggcactggaggctggaaagactttgtcgtatttttcatagataagacttttagcctcaacct

SEQ ID NO: 455095 - DNA, 201 bp, Homo sapiens
gtgtcttttggctgcataaatgtcttcttttaagaagtgtctgttcatatccttcacccactttttgatggggttgtttgtttttttcttgtaaatttgtytgagttcattgtagagtcttgatattagccgtttgtcagatgagtaggttgcaaaaattttctcccattctgtaggttgcctgttcactctgatggtagt

SEQ ID NO: 455096 - DNA, 201 bp, Homo sapiens
atatgtgcaggatgtgcaggtttgttacgtaggtaaacatgtgccatggtggtttgctacacagatcatcccatcacctaggtattaagcctagcatccaktagctattcttcctgatgctctccttcctcccccacccccaacaggccccagtgtgtgttgttcccctccctgtgtccgtgcgttctcattgttcggttc

SEQ ID NO: 455097 - DNA, 201 bp, Homo sapiens
ctgactggtgtgagttggtatctcattgtggttttgatttgcatttctctaatgaacagtgatgttgagctttttttcatatgattgttggccacatgtaygtcttcttttgaaaagtgtctgtcatgtcctttgcccactttttaatggagttgttggtatttctcttataaatgtgtttaagttccttgtagactctgg

SEQ ID NO: 455098 - DNA, 201 bp, Homo sapiens
ataacaggattaagtgagaagagtaaattctctaatttctaattctatagttgaagaaacttgaaatcaagaaaaagaggagaaaataatttcttttttctttttttttttttttttgagacggaatcttgctctgccgcccaggctggagtgcaatggcatgatctcagctcactgcaacctccacttcccaggttcaag

SEQ ID NO: 455099 - DNA, 201 bp, Homo sapiens
ctccctcatatatttggtagattttgttagtaagaccactggccttacattttgtggtgcgtaggttttaattccggatttgaaatctttgatagttacamaaccattcaaattttctatttctttggggaggaacttttttaggaacttgtccatatcatcttaattttcaaatttattggcataaatttgtacataagt

SEQ ID NO: 455100 - DNA, 201 bp, Homo sapiens
acgctacatgagtgcccatatgaaggtgattaaagggagaaaataagagaccgagagaggaatgagtggggagagaagaggagggacagttgatggtgtcscctactagttgtccagtaggggagagagaggtcctcactgcaccatgttccagagcttatttttgttgttgttgttttgagacaaagtctcactctgtcg

SEQ ID NO: 455101 - DNA, 201 bp, Homo sapiens
ttatgcagttctccgtttgctaatttatttaccttttgaatctacaatcatgtgaaagattggcctataattgccttttattggaataactttgtcaggtkttgttatcaaagttgtgctttctttataaaatggattgaatagtgtcttgcttttttctaacttcatgaagaatttgtgtacaattaaaattaattactc

SEQ ID NO: 455102 - DNA, 201 bp, Homo sapiens
ttgatggtgtcccctactagttgtccagtaggggagagagaggtcctcactgcaccatgttccagagcttatttttgttgttgttgttttgagacaaagtstcactctgtcgcccaagctggagtgcagcggcatgatctcagctcactgcaacctccacctcctgggttcaagggattctcctgcctcagcctcccgagt

SEQ ID NO: 455103 - DNA, 201 bp, Homo sapiens
taataaaattcaatttagttctaatatgagttatagcaattggcacttaaaagttaagttaaaatcagcatgtaaggtttatgtgtggtaaccagcacccrtttaatttgattttaatttttaatttagcatttttcatatctgctcatcagaaatattttatggtattgggtctggtaaaataaacttaactgctggtat

SEQ ID NO: 455104 - DNA, 201 bp, Homo sapiens
ttagccctttgtcagatgattaggttgcaaaaattttctcccattctgtaggttgcctgttcactctgatggtagtttcttttgctgtgcagaagctcttyagtttaattagatcccatttgtcaatctttggctttggttgccattgcttttggtgttttagatatgaagtccttgcccatgcctatgtcctgaatggta

SEQ ID NO: 455105 - DNA, 201 bp, Homo sapiens
atgcataagaagcaacagatataaaagccctgcattgggaaccagctgggagtgtttaaggaatgactaggaggccaatgttgactcaaagagagggaacmaacaaggcagtcatataaaaggagattaaagagttagttgggcccagatatacaatagaaccttgaaaaacatagtaaagacttaagagttttttctaat

SEQ ID NO: 455106 - DNA, 201 bp, Homo sapiens
taataatatctaatggttatataatattcccttggtaaatgtattagtccattctcatgctgctgataaggccatacctgagactgggtaatttataaagmaaaagaggtttaatggactcacagttccacaggactggggaggcctcagaatcatggtggaaggtgaaaggtatgtcttacatggtggcaggcaagagag

SEQ ID NO: 455107 - DNA, 201 bp, Homo sapiens
agctgtttaacttgcagaaggtttctctgaacatggaaactaagcaaagaacgggtttccaatgagtctaaacttccaaataaaacagacccaaattaccsctcttgtgaccactgacttgggacactgatattggtggacagtttgctactaacttctcctaacagcctatagtctatttaataatttttgactgcaaca

SEQ ID NO: 455108 - DNA, 201 bp, Homo sapiens
cagtttagactattatgacaatgcttctacaaacatttctgtctcttggtatgtacattcatctagtgggtatgtacctaatgggggaaatttctgtattytaagatatgcatacgttagttttcagagatcatttatcagaatgattgactgaaccaatttgcaatcccaacaacagggtacaagcattctgatagtccc

SEQ ID NO: 455109 - DNA, 201 bp, Homo sapiens
agctgtttcctaagagacactaaaaaattgaagggtgattttgagaaaatatttttaaatctaaatttaaatgatagaacaagcaggtgctggctgggcgyggtggctcacgcctgtaatcccagcattttgggaggccaaggtgggtggatcaggaggtcaggagatcgagaccatcctggctaacatggtgaaaccctg

SEQ ID NO: 455110 - DNA, 201 bp, Homo sapiens
ctcagttcaccagataataattactgacttcatcaggtgtttgagaaaattaaaagaactcatggatataaaactattagaactgtattcatgacacaaartcggcacagaacattatagttattttttcctcactgtttccaaaggccacggcaagagatagaatcagccatattgtttaatccttcaatattcatcatt

SEQ ID NO: 455111 - DNA, 201 bp, Homo sapiens
agctcataatgcgttttgagtaaacagttgaaaggatgaaggcataaattaggggccactattctccctttctctaccttgctctccctaataattaaacytaaatgacttagaaatagagacatctaaccctgataaattatccccacacatcaatatttcctaaaatttatttttaagatttgtgtttctgccaataaa

SEQ ID NO: 455112 - DNA, 201 bp, Homo sapiens
ggcacatgtatacatatgtaacaaacctgcacgttgtgcacatgtaccctaaaacttaaagtataatataataaaataaaaaagttttagattttttattktgtttttgatttttttttttttttgacggagtcttggtctgtagcccaggctggggtgcagtggtgtgatatcggctcactgcaacctctgcctccgggt

SEQ ID NO: 455113 - DNA, 201 bp, Homo sapiens
tctaattttcaaagatatgagtaattattcaaatataataatattgcaatttaaactggtttctctttattgtggtttattggtctgaggataataaagtrctgtattcagtagtcaacaaatatttgactcctactacatccaaaactctgttctaggcacagaacacagaatgtacagaatacacaaaaataaacaaaa

SEQ ID NO: 455114 - DNA, 201 bp, Homo sapiens
aaatgatccctaaactgccattccctgcaaaagtgtcctctatagcagctattcctcctattaattaaaattctattccttcattgttaccaactgattarggtacaagttttaggaaaataataattgaacaaattcaccctcaggagtaatgataccagctctacagactgatcaatattcagttgctatgcaccagca

SEQ ID NO: 455115 - DNA, 201 bp, Homo sapiens
caaactatgaatagaagaaaatattagaataatagtgatataaacatttaatttcataatctgagtcatatgaaatataccactgttaaaaatataaaggracatctcacttttcctaatacatgtgaaaaccacttttttattttgaagccaacagtgccaggtcacaatattgtttctggagaaaaaatgattttcatc

SEQ ID NO: 455116 - DNA, 201 bp, Homo sapiens
tttgtctgtttttaatggctatttgtctagtgcctagggcatatcctaattgtggtagatatgtaataaatatttcatgactaaagcaagtaatatagaarcattatatatatttagattcttggaaaagaatttcagcattgctagtacaaatcgatttcatgtaatctcatgacaaaggaaagtttggttcccatatct

SEQ ID NO: 455117 - DNA, 201 bp, Homo sapiens
ctgctctgatcttagttatttcttgccttctgctagcttttgaatgtgttttctcttgcttttctagttcttttaattgtgatgttagggtgtcaattttrgatctttcctgctttctcttgtgggcatttagtgctataaatttccctctacacactgctttaaatgtgtcccagagattctggtatgtggtgtctttgt

SEQ ID NO: 455118 - DNA, 201 bp, Homo sapiens
tggtgtggtgctgaaaaaaatgtatattctgttgatttggggtggagagttctgtagatgtctattaggtctgcttggtgcagagctgagttcaattcctkggtatccttgttaactttctgtcttgtttttctgtctaatgttgacagtggggtgttaaagtctcccattattattgtgttggagtctaagtctctttgt

SEQ ID NO: 455119 - DNA, 201 bp, Homo sapiens
tgtcctttccttaccttctctccataataattctaagaaaacaacacatcccaagcaaacatttgctttgttgtgcatatgtggggtcactttaaaaaataaaaaaaaaaaagaagagaaactacaaataataaaagagaaagattatttgaaagcatggcactaaagtaggaaatgatactgatggcttagcagcattaa

SEQ ID NO: 455120 - DNA, 201 bp, Homo sapiens
tacacaacacagattggaaacttcacaatgtgttgacttacattaagtaaggacaaggttccagaacaccacttccttattttgaacacacttccttgttytgataacattggcaaagcaccctaagtgccccatgataatgaattcatctgacctttaatcacaaagcgattaatgaactcatgagatactcatgtggct

SEQ ID NO: 455121 - DNA, 201 bp, Homo sapiens
aatagaaatgtccttatattttaagacccactatagcacttactctgctgctaggcactcctctaagcatcctacaaattttaattcatatcatacttgtaacaaccccaggagatgcattctattattatccaatcttacaagacaagaaattggaccaaatagaagttgtttgtccaaagctacatagctaacaataat

SEQ ID NO: 455122 - DNA, 201 bp, Homo sapiens
aacttatatcaatgttctgaagatatagtcttatttttatcattaacatttacaaaggtagttttgacagatactggaaatgagaacagaaaaagaaatamacaaatacatttttgttgcatataaaaataatgggaaatttaaggaagacatgtggcagactggctgtcttaatccattttgtttcactataagaaaata

SEQ ID NO: 455123 - DNA, 201 bp, Homo sapiens
ggaaattaaaagtgctactccagtgaacatatgaatgataagaaagtgaaacagccttattactgaaaatggagaaagtttaattggtctggatagaagaycataccagccataatattcccttaggccaaagcctaacccagagcaagatcctaatgctcttcaactctgtggaggctgagagaaaagaggaagctgcag

SEQ ID NO: 455124 - DNA, 201 bp, Homo sapiens
tgtgatgggaagtattctgggagtcaataagtgtttgggacatattcctccattgtttttgaaacttatatcaatgttctgaagatatagtcttatttttrtcattaacatttacaaaggtagttttgacagatactggaaatgagaacagaaaaagaaataaacaaatacatttttgttgcatataaaaataatgggaaa

SEQ ID NO: 455125 - DNA, 201 bp, Homo sapiens
ggaagtaactgcagatgtggtggaaatagaaagagaaatagaatggaagcggagcctgaagatgtgactgaattgctgaaatctcatgataaaacttgaayggatgagcaaagaaagtggtttcttgagatagaagctactcctggtgaagatgctgtgaacactgttgaaataacaaaggattttgaatatttcataaat

SEQ ID NO: 455126 - DNA, 201 bp, Homo sapiens
aactgaatcgctatcgagacactcttaggcgagcgatccttgttatgaatcctgctacagccaaatccttcattactgaggtaagtgaaaattgtcttggsgtgagagttgtacaaaacaattaaaagctttggaatagaccctacagaggagatgaaaattaagagcagtgcgagggaattaactacacaattcttgtta

SEQ ID NO: 455127 - DNA, 201 bp, Homo sapiens
ctgaagctcagagggatcatgttatcttgccagtacatagtcaggaagtaatgataacagaatttcacccacgttttcctaactaatactcatactgttcttttatttatttatttatttatttatttatttattttgagacacagtcttgctctgtcatccaggctggagtgccctggtgcaatcttggctcactgcaag

SEQ ID NO: 455128 - DNA, 201 bp, Homo sapiens
atctagcatatctaaagccaaaccaggaaagaaagaatgaggctacttggtttctcctttttattttttaacaaaacttctaaaatatcaaaatggaacasatataagagcgtgaatacaaaagctgaagatatttctaaatatatgtgtgtggttttgacaaaatgctacgtagtagaaacaatacatgtgatgggaagt

SEQ ID NO: 455129 - DNA, 201 bp, Homo sapiens
agctcagagggatcatgttatcttgccagtacatagtcaggaagtaatgataacagaatttcacccacgttttcctaactaatactcatactgttcttttatttatttatttatttatttatttatttattttgagacacagtcttgctctgtcatccaggctggagtgccctggtgcaatcttggctcactgcaagctcc

SEQ ID NO: 455130 - DNA, 201 bp, Homo sapiens
cattatcattctttgacttctctttggtcataaattatttattatgtgtatccttccatctatctgtgtacttgcacattgttttgcaggtaaaatccatrttgtccatttattttgtgctcactcaacacctggtatatcagtgttatgcttttggagtctttggaaccgttagttttctatatggatcataccctgact

SEQ ID NO: 455131 - DNA, 201 bp, Homo sapiens
taggattagtaacattaggttgtaatgtccactcttctctttcttccatactctgagatgttctccccagtaccagcttatcttgttatgcatcttagaamaattctttttattattattattatactttaagttctagggcacatgtgcccaacgtgcaggtttgttacttatttatacatgtgccatgttggtgtgctg

SEQ ID NO: 455132 - DNA, 201 bp, Homo sapiens
aaagccaaattggatgctatacttgcccccacagtgtcacatgcaacccgtcaaaaaagttcaatatttttctttcaccaaatacaggcatattttggagwcatcacacgatgtctccaaaccagaacaaattttctggtttctcagcacatgtaaatgttatgtttgcactatactgtagcatagtaagtgcaatagtat

SEQ ID NO: 455133 - DNA, 201 bp, Homo sapiens
taagcagaccggaatcatcatttacccagttactcaggttacatacaaccctaaagccaaattggatgctatacttgcccccacagtgtcacatgcaaccmgtcaaaaaagttcaatatttttctttcaccaaatacaggcatattttggagacatcacacgatgtctccaaaccagaacaaattttctggtttctcagca

SEQ ID NO: 455134 - DNA, 201 bp, Homo sapiens
cctggtcatcaccagtctgctctctatcttcatgaatttcacttttatatgttgagaaatatctgcttagatgctgaccactggtatggaatgagcaatascgtgtcatatttctgattaaaagccttttttggggtcagtttagaaatatacattaaattctaatatttcctaggattttttcctaccctaatctacttt

SEQ ID NO: 455135 - DNA, 201 bp, Homo sapiens
ctgcttttaggtctctgaggaaatcaccaaactcttttccacaatgattgaacaaatttacactcccaccaccaacaatgtataaacattcctttttcttyacaaccatgccagcatctgttattttttgactttttaataatagccattatgactggtgtgagatggtatctcatagtggttttgatttggatttctcta

SEQ ID NO: 455136 - DNA, 201 bp, Homo sapiens
gtttgccacttgtatcttagggcaacatttataataatgggatttttaatcaatcttagagcataaaataaaccctatcattttagactgacctgttggaytaatttcaatgactttagctggtaggtaattgaaataggatgacagtacactggggtgaataagaggtttcaaaaatagacaaagataacaattagacat

SEQ ID NO: 455137 - DNA, 201 bp, Homo sapiens
caaaatatacccagccatcgtacattttaaaaaactttaactccaagatctagccataatgttttctactctgcagatcagacacatatggttatccattwtggaacacatgttaacaagtaaatcaagagatacgtctcattcccagctgtatttgtggtgatgactcctgaagaaggccattcttttctgataaatctt

SEQ ID NO: 455138 - DNA, 201 bp, Homo sapiens
atgtagatttgtatctaaaggagtcatgattatattttataggtatacaaatgtatacatgtttaggtagatacatgctggttgcaaaatatacccagccrtcgtacattttaaaaaactttaactccaagatctagccataatgttttctactctgcagatcagacacatatggttatccattttggaacacatgttaac

SEQ ID NO: 455139 - DNA, 201 bp, Homo sapiens
tggaaatccatgaagctgctgttaggcagagcatttaatggggatcttgcatcacctcaatattcccacttgtatgcctattttgatgcagtcacactackagtctaatatgaaaaataacttttaaaaggcaatgaaaatgtaagtcaacctaaaaggaacatatatactgagactggtagattcagccatgcattatgc

SEQ ID NO: 455140 - DNA, 201 bp, Homo sapiens
gaacattaagagcttgtgaattaggttgtaaaatgcacgaatgagagaccaattttatacaacttttgttgtcattttatgtcctccgttatctccatgtstacatacatctcctttcaattaatattcttaagtgaaactggatttgatttttagaagtctcttatgtttagtttattggcagtgactctatcatctggt

SEQ ID NO: 455141 - DNA, 201 bp, Homo sapiens
gagacttttttttttcaggcagtatatagccaagaatctattccttgaatgctggaattgaaggttatataaaagcacttattactaccaaattgcaaagmacaagcagagcaagtaagttgagagagagagagagacatctttcttggagaacatttttggaaaatgactgtgggcaaagcaatgtgaaaatatttaggg

SEQ ID NO: 455142 - DNA, 201 bp, Homo sapiens
aatcctgcagtggcattgatagtaggcaataaaatcaagatttaaattttaaaaatgttctagacacagttaaatcttaattatgccatttgcttaacaargcactttgtaacaccttcggttacaccaaaggcacttcggggttttattgttgtattattgttattactttacactttctgtcctacaattataactgaa

SEQ ID NO: 455143 - DNA, 201 bp, Homo sapiens
ttcttccacttgctaacaatgaaaaggtgaattcattaaaagacactgagagcatctttatgctctgattaaaaataaatgaagaaaaggcttataaaccytatgaaaaagagaataaatcaatgacagtgtccatgtataggcaattgacttggaactggtgatatttccaataaaaatacagtcttttaagaggaagta

SEQ ID NO: 455144 - DNA, 201 bp, Homo sapiens
cctaggagcagtgattcaatattcacaaatgcagtgttcataggaattttatagaacctaactactgtgaatgacaagcatccacaatcattgttattatwttcacttatgaaaatgtattcattctaacttcatccttgatgaataatgtggctaattgtaaatttctaagttaaaaaattatttacctcagaacatcaa

SEQ ID NO: 455145 - DNA, 201 bp, Homo sapiens
tcctggttcctgtgtcttaacaatttcttagtttccggccttgctgggaaatatcttgaagtaacttctgaaggaagagggttttttttttttcttacagrgaaaacatctgtgttagataagctgtgtagaggcaagagttatagtgctgttggccacaagttcaatgataatgaatcaacaatgaatattaaataaagt

SEQ ID NO: 455146 - DNA, 201 bp, Homo sapiens
ctgaattaacccctttatcattgtataatgaccttctttatctcttttcttagggtttgtcttgaaatttattttgtctgataaaaatatagctacttctkatcttttccgattcccatctgcatggagtatatttttcgatctttttatttgcagtctatgtatctctataggcgaagtgtgtttcttgtacatgagaga

SEQ ID NO: 455147 - DNA, 201 bp, Homo sapiens
acagacataaccatgattctagaagacaggaacagtaatttacctagagaggaactgaatccataaccttactaacactttgcttttttaacaaaatgggrcaaccagcaactgaaatcattccatttaaaataatttcacacctcaccgaaagaacttgaaaaatgaagccttacaataggccaatattctatttttagg

SEQ ID NO: 455148 - DNA, 201 bp, Homo sapiens
aggaactgaatccataaccttactaacactttgcttttttaacaaaatggggcaaccagcaactgaaatcattccatttaaaataatttcacacctcacckaaagaacttgaaaaatgaagccttacaataggccaatattctatttttaggaaaatagatagccttctctaacaaatacatttttctcttaaatccttac

SEQ ID NO: 455149 - DNA, 201 bp, Homo sapiens
atccttacattagaaacttgaatgataaacacttcagtgaatagtttacaacttatagtgtaagatacaagattttattcctaaaagcaaaggatgggtakgtcttaagaaaggagatttcagaccaggcactgtggctcacgcctgtaatcccagcactttggaaggccaaggtgggcagattacctaaggtcaggagtt

SEQ ID NO: 455150 - DNA, 201 bp, Homo sapiens
gctacgtagtagaaacaatacatgtgatgggaagtattctgggagtcaataagtgtttgggacatattcctccattgtttttgaaacttatatcaatgttstgaagatatagtcttatttttatcattaacatttacaaaggtagttttgacagatactggaaatgagaacagaaaaagaaataaacaaatacatttttgt

SEQ ID NO: 455151 - DNA, 201 bp, Homo sapiens
atagctacattaagtgaattctacaatgattgaaaattttactataatgaagataaaaattcactcaattctagttcttttatccttgatttgcatttgaytgaaatgtgtatttgcagtttgggcatttcagtcagcgattgctcctgtattctttgcccataagcagccttcagatggcctcttagaaaattgaagaag

SEQ ID NO: 455152 - DNA, 201 bp, Homo sapiens
gtgagaaatttagcagaggaaaatgagcagatggacactccacaacaaaaataggggatgcagaaggaaaagcagattggaaaagggcaacagggacacasaatttggctataggcattttgattttgtggtacctgaggaacattctcatggaattgtctaggaacaattagtcagtgagcatctggaacccaagtgaat

SEQ ID NO: 455153 - DNA, 201 bp, Homo sapiens
tattatgtactgacttgttcatttgtcttcctctggtaaaatgtaagctgaagttggtctgagatttcatatatttggtttactactgaagcctcaatatytagaaaatatttgtacataaaagaatgaatggtggccacatggcatacattaggtaataacactcccctaattaataaccattcaatgggatctcattgc

SEQ ID NO: 455154 - DNA, 201 bp, Homo sapiens
cctctttagcacgtttagccttctagccattactctttgctaattttcctaggatctctcccatatatgtgcagtttaggggtcagctaaggattttagaragtttatacacagattttggggctcactcctctgtggcatcctccttcttgtgtttcccttttcaatttctggcaaccctagctgattcaaactccatcc

SEQ ID NO: 455155 - DNA, 201 bp, Homo sapiens
tttaatatggcttcgttgccctccattatctgtttgcagtttacatatttttatccttatttgatatcgcaatataacatgtatacagaaaaaagcatgamacattaattaataagtagtaaagtaacatccagaaaacactactcagagcaaaaagcagacgattgtcattaccacagaaaccacctccccagtgcatct

SEQ ID NO: 455156 - DNA, 201 bp, Homo sapiens
taccataaaagtaggcaagtggggagagatactgatgtgttgatgcaatagcacccactgacgcacaaaaattgtttctttctgaatatttcgagaaagarctcctgtgttttcaggcttgtagttcagccacatgtatccataattgactgcagtatggaataaaacttacaagatagctatgaaagttgactgttttgt

SEQ ID NO: 455157 - DNA, 201 bp, Homo sapiens
tttaatgtacaataaattcttcttaggctatcgctaataatatttctaataccccaatatggctttcttagaaaataaaggctacttgagggctgggtgckgtggctcacgcctgcagtcccagcactttgggaggccgaggagggcgatcacgaggtcagaagatcaaaaccatcctggctaacacggtgaaaccctgtc

SEQ ID NO: 455158 - DNA, 201 bp, Homo sapiens
atcatttcattctgtaatctaatcaagataggtatgtacatatgtatatatttttctttgttctttcaattctcagaaaggtgtttaaaacctctatgtcyttctttagtcctgtcagaatctgcttcagttttttgaggctctgttattaggcacatagacatttataattattacattttcctgataaattattgaata

SEQ ID NO: 455159 - DNA, 201 bp, Homo sapiens
ctcttcaggtaccacattaataacaatttctacctaccatgtattgatcgcctattatgtggcaggcactgtgctagatatttatttttcttgccttgtcrctagtgttcaaaactccacaaggaaagtattttgacacgaattttatggctgagaaaactgaggtcccgagtagttaagtaaattatttgtttattctac

SEQ ID NO: 455160 - DNA, 201 bp, Homo sapiens
actattgttttctttttaaaaatgtgatgttattggaaaaaattaaaacattcactgcttagaaactaatcatttcattctgtaatctaatcaagataggkatgtacatatgtatatatttttctttgttctttcaattctcagaaaggtgtttaaaacctctatgtccttctttagtcctgtcagaatctgcttcagttt

SEQ ID NO: 455161 - DNA, 201 bp, Homo sapiens
tccgcccacttcggtctcccaaagtgctgggatatttctttctttctttcttacattctagagccttggcgagttggcccaagtgttgtacagcattttcrgtgtcagggacatagacttctctcctttctctgctgtgtgtagtctcagatagttaccagagcaccagccattgtatgttctttctagttttcaggtagc

SEQ ID NO: 455162 - DNA, 201 bp, Homo sapiens
tactgtctttggttccatattgaacattcaccttgaggactttagtctattgattgaaagctttagttcatctaatagaattattatgacacatactccarctaaaaatcagtcaaggacagtcccagaagttaatactcttccaaagactgatgcctccactgagcacctctaggaagtatgagatggtgttgcatcact

SEQ ID NO: 455163 - DNA, 201 bp, Homo sapiens
catttttatccttgccagtcagataagcaataaattaaatagttcttgttattttaatttgtattccccaaaggtatgttaagagagcaaaacaataaatrattcaccctcaatggttgctgttaaactttgtctttttaaaatttaagctttaaagattatgactttaattattttttcttctcataaataatatttctc

SEQ ID NO: 455164 - DNA, 201 bp, Homo sapiens
gtaccttttcttcatctgccaagatcatataatttttctcttttggtcctaaagtagcgaattacaatgattgatttttgaatgccaaaccaatcttgctktcctataataaaccctatctgtttatttatgcagttctccgtttgctaatttatttaccttttgaatctacaatcatgtgaaagattggcctataattgc

SEQ ID NO: 455165 - DNA, 201 bp, Homo sapiens
aaaaatacaaaagaaccaaagaatgaaattaaagagacaaatataaaatctaacatttgcttcaattgcataagactttgtgggctactagtttgatagtrtttattttaaaaatatttttaaaattttatttgaccttaaatttagcataaggcagtattaaaaatcacctaataaaaatgatacagcctccaattttat

SEQ ID NO: 455166 - DNA, 201 bp, Homo sapiens
ctcccccctcccccaccccacaacaggccccagtgtgtgatgttccccttcctgtgtccatgtgttctctttattcaattcccacctatgagtgagaacakgcggtgtttggttttttgtccttgtgatagtttgctgagaatgatggtttccagcttcatccatgtccctacaaaggacatgaactcatcattttttatg

SEQ ID NO: 455167 - DNA, 201 bp, Homo sapiens
attttgttaatttttgctcttaattattttcttccttgtacttgttcacatttaacttgctgatttttttcaacttctttaaattgatgagtaactcagamtacttttcttatacattgcaggctatcagtttccttcaatacaatttagctgcatcccatctactttcaaaacttgtgaaattttgatatggagtatttt

SEQ ID NO: 455168 - DNA, 201 bp, Homo sapiens
tcaaaatgaaaatctggtcaagaggattttccttaaaacagaggggtcctttggaaaataaaaatttttcatgctttagcagagcactttaaacttatcargggctataggaatccaaatacccaacttcagagtcagacctttgcacactctgaagtgtcatgaagtatcagcctaatttttgcaatacttttttagcaa

SEQ ID NO: 455169 - DNA, 201 bp, Homo sapiens
gtttgactggtgtacctcaatgtgacagggagaatggaaccaagttgaaaaacactctttaggatattatccagaacttccccaacctagcaagagaggcyaacattcaaattcaggaaatatagagaacaccacaatgatacgcctcgagaaaaacaaccccaagacacatactcatgagatccaccaaggtagaaggac

SEQ ID NO: 455170 - DNA, 201 bp, Homo sapiens
taacaaggatatttaggacttgaagtcagttctggaccaagcagacctaatagtcatctacagaactttccaccccaaatcaacagaacatacattcttcycagcaccacatcacacttattctaaaattgaccacataattggaagtaaaacactcctcagcaaatgcaaaagaatggaaatcataacaaacagtctctc

SEQ ID NO: 455171 - DNA, 201 bp, Homo sapiens
accaagcagacctaatagtcatctacagaactttccaccccaaatcaacagaacatacattcttcccagcaccacatcacacttattctaaaattgaccayataattggaagtaaaacactcctcagcaaatgcaaaagaatggaaatcataacaaacagtctctcagacaacagtgcaatcaaattagaactcaggatta

SEQ ID NO: 455172 - DNA, 201 bp, Homo sapiens
gagcaaacaaattcaaaagctagcagagggcaagaaataactaagatcagagcacaactgaaggagaaagagacacgaaaaacccttcaaaaatcaatgartccaggagatggttttttgaaaagatgaacaaaatagatagactactagccagactaataaagaaaaaaagagagaagaatcaaatagacacaataaaaa

SEQ ID NO: 455173 - DNA, 201 bp, Homo sapiens
gatggatagcattaggagaactatctaatgcagatgatgggttgatgggtgcagcaaaccgccatggcaagtgtgtacctacgtaacaaacctgcatgttytacgcatgtattccagaacttaaagtaaaaaaaaaaaaaaaaaaaaaaaaaaaaaaacagaaagaaatacctaagactgagtgatttataaaggaaagag

SEQ ID NO: 455174 - DNA, 201 bp, Homo sapiens
atttttcttaaattgtgtttatcataattttaaaagcttttaattctcagggtagttttaggtttacggcaaaattgaaaggaaggtatagagattttccrtataccatttgcccctaaacatgtatagcctcccttattattaacatcccccatcaaaatggtatatttgtcgtaattaatgcatctacaatggcacatc

SEQ ID NO: 455175 - DNA, 201 bp, Homo sapiens
gttaatttgggagtaaaataaaatgagttctgttttagatgtcataagttagagatgcatattgaattgcaagtgagaatcatgtaggcttttatctatakctctctagaaagagtcaaggtagggggctagaaatgtaaattctagtgttatcaaagtatactgtagatcatagtcaaagtcaggggactcgttgatatt

SEQ ID NO: 455176 - DNA, 201 bp, Homo sapiens
actgcttacttattgacatgctctcaatgttattagaatatgttaataaattcttgagaccagggaccttgtgaaatgtatcatcaatgtctatagtaccytgatcataacagaagcttcattaatattttttaaataaatgaaatataagtgattctcatttaagagatgacaaaaataaggctttatatattacttgtc

SEQ ID NO: 455177 - DNA, 201 bp, Homo sapiens
aaacagtccctttttgatgtgctgcgatcaccaccagtcataactaaatgtaatagcaatttctccaaccatactggctttgataaaacatgctttattcytagaagattaggccattcattcatcatgtatttgatgataataataatgataatgatctgttgactgttagcttctgggtgctctaagccttttttagct

SEQ ID NO: 455178 - DNA, 201 bp, Homo sapiens
ggagaacaatgttctggagtcccaggcaggcattcaaaaggtactgtccatggttctcctttaatagtccttaccattttgtgtcccatgctggaattgcrcagttgagatttgttttttttgttttgttttttgttttttatctttaatgctgacggcaaatttcctgttacattgcatcttatattgatttaaagaaga

SEQ ID NO: 455179 - DNA, 201 bp, Homo sapiens
gtagaatgggcatcctcttcatcatagttccctgggactgagggttagatgtgcatgatatagtatacctataatgaatcaacaaacatagatctttctcmaactttagttcaactaaaagtcacttttgacacatgttaaaaaaaaacatcaatactcaagctcggttcccagagattataattgagggcttttcgaaag

SEQ ID NO: 455180 - DNA, 201 bp, Homo sapiens
cacatgtaccctaaaacttaaagtataataaaaaaaaaagaaaaaaaaaaaagataaatttgaaaatgggaatttggcagtgtttgtctattgctgcttaragaagacaccagtcatggaaggcaaggacaggctaacatatgaaggtattctctgtggtatgtcaggcacaattcatcagatttaattaaaatgattttc

SEQ ID NO: 455181 - DNA, 201 bp, Homo sapiens
aaaaaagacatatacattcctaataaacatacattcactcatgaattcacacaaaacagtcaaagatcctgactttagagagtttttttgttgtttgtttwtattgagacaggctctcactccttcacccaggctggagtacagtggcatgatcatggctcactggagcttcaaactcctgggctcaagaaatcctcccac

SEQ ID NO: 455182 - DNA, 201 bp, Homo sapiens
ctctaccgaattatatatttatttttgttatttttattgggtttttttcctaatatttttgagcctcagtttgttgaatctatggagttgagtctagatgmagaacctgtggatatggagtgttaactgtacttactatgtgcaagctactctactaagtcttttgcatgtattgtcttattttgtcctcacaatattctc

SEQ ID NO: 455183 - DNA, 201 bp, Homo sapiens
gtttgtacatttgaaggaagaactaagtaaatggaacttaccaatcctaaaatccagactgctgttattaagaagaagaacaactgtacaaatgctgttaycaaaggatgtatgagtcaggcggaaaaaaaaggagaacacagaaaggtgaaaagtctttgtcaagcagaggagagaaattattgtcttgtaatatatatg

SEQ ID NO: 455184 - DNA, 201 bp, Homo sapiens
gcatatcccgatgatctgcttttcttctctccatgaaactcagatactagttttctttacaacacctggattgtttcttcctctactgctgttccttattktgtttttctattctggtgtcttgatatctccttttaacaaattccataccattggccttcctaacttgtgaacatttctaatactcacatatgctctata

SEQ ID NO: 455185 - DNA, 201 bp, Homo sapiens
aagccttattgactctgtctctgaaagaggccttaaatgatcccccttccttctaatcctcactgaaattcccttaggttaagcccaatttatccaagggmtatggtcttctacttgatgttctgtttttaatccttgatgctatccttctccttccatacaaacagtagatacacatattttcaaaacacagactttctt

SEQ ID NO: 455186 - DNA, 201 bp, Homo sapiens
cttcttctcattatttgtttaatttctcttcacagcacctatcatcaccatctgacattttatatatatatatatatatatttccttttttgtttgttgtstgtcactcccactaaaatgtaggtctagaagaatagaaatgttcgtttgttgtttgttttgttcactgctgtattcttagtgtgtgcctggcattaacac

SEQ ID NO: 455187 - DNA, 201 bp, Homo sapiens
catatgaccaaatgtaaaacagcatgtcttccattttgcttatttctaaaacttttttttcccctttaaacaattgtaatttgtagcctcttagtccttckactatttttttttttctttgagacagagtctcactctgtcacccaggctggagcgcagtggtgcaattttggctccctgcaacctccacctcctgggtac

SEQ ID NO: 455188 - DNA, 201 bp, Homo sapiens
catatgccttcttctcattatttgtttaatttctcttcacagcacctatcatcaccatctgacattttatatatatatatatatatatttccttttttgtktgttgtctgtcactcccactaaaatgtaggtctagaagaatagaaatgttcgtttgttgtttgttttgttcactgctgtattcttagtgtgtgcctggca

SEQ ID NO: 455189 - DNA, 201 bp, Homo sapiens
agaaaattaatacagtcatgtaccacataatgacgttttggtcgatgacagactgcataaaaaacaatggttccataagattataatactgcatttttctygtaacttttctatgtttagacacacaaatacctatcattgtgttacaattgcccacagtattctgtatagtaacatgcagtacaggtttgaacccaggag

SEQ ID NO: 455190 - DNA, 201 bp, Homo sapiens
attcgtgggccccatctgcctctcacttttagctttgagccatcaacaaagaagttagacttatttttattccgtttgaatgcatttttttcctgattgtaaaaaaaaaaaaaaacaggctgttttgagaaaataggaaagtacaaaaagatgtcgaaggacaaagcattaataatccataaactgtcatggggcagtaag

SEQ ID NO: 455191 - DNA, 201 bp, Homo sapiens
aacaaaaatctacagatatattcttatcaatttatttttaaattttaagtattagctaaacagtcttattaagagccattttcatataaaatagtacattkttatattttcttttctgttatgatattgtaaaatgtggctcattcttagtgatattaaaacaaacaagtaacacaatgtttgttagacgtgcatttttgt

SEQ ID NO: 455192 - DNA, 201 bp, Homo sapiens
ctattttagttcctttgtctttttattataaattatagaataatcttgtctatatctacaaaaatattgctgaaatattgacagtaattgcattaaataarttggagtgagaattcacatttttaatatgatgagtcttctgatctgtaaacatatgtctccccacttatttagatctttgatttattttatcagcacttt

SEQ ID NO: 455193 - DNA, 201 bp, Homo sapiens
tgcaaaaattttctcccattttgtaggttgcctgttcactctgatggtagtttcttttgctgtgcagaagctctttagtttaatgagatcccatttgtcarttttggcttttgttgccattgcttttggtgttttagatatgaagtccttgcccaggcctacgtcctgaatggtattgcctaggttttcttctagggtttt

SEQ ID NO: 455194 - DNA, 201 bp, Homo sapiens
tgttagtgttgaaatggcttacttgtcctagcacttaagtactacagtgatggatgtttcccaaacgtacagctatctcgatgtcatagacagaattttgtctctgttttggaaaaaaattaaaacttcctagaagtatattggtctttcaaagccacctttcagtgagcatttaattaaaagttgtctcacagtttgtgg

SEQ ID NO: 455195 - DNA, 201 bp, Homo sapiens
tgttattagaatatgttaataaattcttgagaccagggaccttgtgaaatgtatcatcaatgtctatagtaccttgatcataacagaagcttcattaatattttttaaataaatgaaatataagtgattctcatttaagagatgacaaaaataaggctttatatattacttgtccacagtcacacaaggtcactcagtagc

SEQ ID NO: 455196 - DNA, 201 bp, Homo sapiens
gttagtgttgaaatggcttacttgtcctagcacttaagtactacagtgatggatgtttcccaaacgtacagctatctcgatgtcatagacagaattttgtctctgttttggaaaaaaattaaaacttcctagaagtatattggtctttcaaagccacctttcagtgagcatttaattaaaagttgtctcacagtttgtggc

SEQ ID NO: 455197 - DNA, 201 bp, Homo sapiens
acatatcccattatctttcatcactaggcccctattgtacaactcttttaaagtatcttgagtaagattagaattttgaggtaccttttcttatttccctrctatttaaaacaagagacagaaaactagcactaatggagtgtccatcatgtgtctggcacagtgctatacatgttaatgtatatcatctttttaaacaaa

SEQ ID NO: 455198 - DNA, 201 bp, Homo sapiens
ttgaccccatcaattctctgatgctcttagttcctccatagttcctgtcacctaaagatatttaatttattttaatggctctctcctccactccccccccmcacacacacacgcacaccacacacacacacacacacacacgtactacagcctccatttctcaagcccagatgctaaagagggatgatgctaaataagagc

SEQ ID NO: 455199 - DNA, 201 bp, Homo sapiens
cagaaggcaaggagaagcaactcatgtcttacctggttggcagcaggcagagagagagagcttgtgcaggggaactcctctttttaaaaccttcagatctygtgagacttattcactatcacaagaacaacacaggaaagacttgcctccatgattcaattacctcccaccaggtccctcccacaacatgtgggaattcga

SEQ ID NO: 455200 - DNA, 201 bp, Homo sapiens
agttagagatgcatattgaattgcaagtgagaatcatgtaggcttttatctatagctctctagaaagagtcaaggtagggggctagaaatgtaaattctaktgttatcaaagtatactgtagatcatagtcaaagtcaggggactcgttgatattgtccatggtgagactatggacagagaacagaagcagtctaaggact

SEQ ID NO: 455201 - DNA, 201 bp, Homo sapiens
atcatacacatatattaaatataatatatctaaaatggcctttcatggtatatacatgtatatttattttataatgtatttattattaaatattaatatayaccaaatatttgtttatttaactaatagccatttaaaatagagaaaaggatcataaatgatatttctgtcaacactgtcagagttttgaggtttgtggta

SEQ ID NO: 455202 - DNA, 201 bp, Homo sapiens
ttgaaacactctgcaaagcattacatggttaattgtcagaaaactgtcactgaggaaagtggaaagtgagatcctcttccccagtccctggcaaagagcattttttttttcttttttttggtattggtaagcgtttaatatccagttctcaaaacaaccccccccagtaacccccataccacaaaataacaataacctgat

SEQ ID NO: 455203 - DNA, 201 bp, Homo sapiens
ctagaaatgtaaattctagtgttatcaaagtatactgtagatcatagtcaaagtcaggggactcgttgatattgtccatggtgagactatggacagagaamagaagcagtctaaggactgagcccaagaacactccaacatttaaaagatggagaagaggattctgcaacaagattgtaagagtaggaagtcaattaaaag

SEQ ID NO: 455204 - DNA, 201 bp, Homo sapiens
tcccaagggcatctactttacataaacttacaattttacctgtgaccatctgactgtaccacatggtgggtagggctgacccagaatactttcgtcgggasagagtgcagaaaatattcccaagtctgtcagggtagacttcagggtcatctgctggtctgtaatccccacactttgtaatctaatctaccacaggaggac

SEQ ID NO: 455205 - DNA, 201 bp, Homo sapiens
agatggacatgaatttcgaggggggcactatttaactcgctacaggtataattatgtatgaaggaattattctttataattaactttctagtttgtgttayacttctctttgcttaaaaaataaataacagcaaatcattagctgctttcttcttcggtgctgtggacgtttttttctgttattattaatattgatccagt

SEQ ID NO: 455206 - DNA, 201 bp, Homo sapiens
tacatatgtaacaaacctgcacgttgtgcacatgtaccctaaaacttaaagtataatataataaaataaaaaagttttagattttttattttgtttttgatttttttttttttttgacggagtcttggtctgtagcccaggctggggtgcagtggtgtgatatcggctcactgcaacctctgcctccgggttcaagcgatt

SEQ ID NO: 455207 - DNA, 201 bp, Homo sapiens
atacctaggaagtggcaggggtcagaatcagatataacaaaatttctctctcttccaattttccagtattctcatcttagggtccattctgtccaaggcckttcctcagacacatccattctccttcagttctcacttttgaattcacctccaagcttatacactagcaattgacaactaatacatagccttcaagctttt

SEQ ID NO: 455208 - DNA, 201 bp, Homo sapiens
agttcctctgctcaatagagaaagaaattgcattttggagaagtttaaataattttcccaaagattgaaacacaaatatttatgttttcacaattcatgcttttagaaactaagtgtttgctcagtgctggtcagttggcagtacctcttggggatggcctgccttacccaagcaccccagtccattttgtaacactttga

SEQ ID NO: 455209 - DNA, 201 bp, Homo sapiens
tataacaagttaatacaagttattttggtacaaaaaaaatgaaatctatgcatagttttttcataacacacattttctatgaactttttgaagactctctygtacatggcatatccacctttagttactgaataaataaataaaagatgctcttgcttaaattgttcatgtgtgctagaactttatcccgagcccttcatt

SEQ ID NO: 455210 - DNA, 201 bp, Homo sapiens
tacctcttggggatggcctgccttacccaagcaccccagtccattttgtaacactttgacttgcttcttgggtctaaacaacattaattctcaccctcacrgcatattagttgttcctttaaatgctacattttggatcactttttatgctggaaaacttgtcaccgcacttcataggacagctctcagctgctacaacca

SEQ ID NO: 455211 - DNA, 201 bp, Homo sapiens
gatgctcttgcttaaattgttcatgtgtgctagaactttatcccgagcccttcattctcatgttttgcactttcctgtggtgattttacataaacccatgrgtttgttaatatctgttaaattgatgacagccaaacctatggctccagcagagattctactcctgagtgtctgacctctatatccaagcacattttatgc

SEQ ID NO: 455212 - DNA, 201 bp, Homo sapiens
tccagcaggttcatcatatacattatacccagaatgaagtcctagcttttcagcgtagaattcaacaacgttcatgattctgcactcccctgctttttttkttattatttatttattttattattattatactttaagttttagggtacatgggcacattgtgcaggttagttacatacgtatacgtgtgccatgctggtg

SEQ ID NO: 455213 - DNA, 201 bp, Homo sapiens
aatagggtattattttctatttgctcattatacaaattgaaactcccatattcaactagtaatgctaataagtagtcaattattttatccattcataaaawtgatgtttctagtttctctcatgaaatcatgctgctcaagttgttttccaattattcctttgatacagaaccttcatattcccccaatttattgtccatg

SEQ ID NO: 455214 - DNA, 201 bp, Homo sapiens
gtgcaggttagttacatacgtatacgtgtgccatgctggtgtgctgcacgcactaactcgtcatctagcattaggtatatctcccaatgctatccctcccycctccccccaccccacaacagtccccagtgtgtgatgttccctttcctgtgtccatgtgatctcactgttcaattcccacctatgagtgagaatatgtgg

SEQ ID NO: 455215 - DNA, 201 bp, Homo sapiens
caattttgcagaaaagttgcatctcaaggtctactattcgtgggccccatctgcctctcacttttagctttgagccatcaacaaagaagttagacttattyttattccgtttgaatgcatttttttcctgattgtaaaaaaaaaaaaaaacaggctgttttgagaaaataggaaagtacaaaaagatgtcgaaggacaaag

SEQ ID NO: 455216 - DNA, 201 bp, Homo sapiens
gagcagaagggccagaggtgggtgcactttcaaaaagcaaagaggctattgcagctggagcagtgagcaaagaaatgtgctaggtaggagatgatgctctrgcgcaagggagtgcatggtctgagaaggaggtcatatagggccttctaagatcttccaaagacttgcaactatgaactattcaccatgaatgctatgtga

SEQ ID NO: 455217 - DNA, 201 bp, Homo sapiens
aagtatatgattttaatcagcacagccctagagcctagaagagtggctagcaatagcagccattcaacaaacatttgtagaataaatgaatgaatacatayacatatataggagttaatatagcaaaatgcattagtgtgcaggaactagagtcagactggtagactctatcaattatcagctgtaaatataaataataat

SEQ ID NO: 455218 - DNA, 201 bp, Homo sapiens
gaaaactggccttcattttaaaaagtataaagtctattaaaacatggttgtgagtggatagtctgtttcttgttatagtcctggtttttgaggggaggttrttcaaatgtgcagtatttttactaggaccttaaacacataccccctgttaatgtaaagatgtccttatttacctgatggcaaatatttctgaaaattgag

SEQ ID NO: 455219 - DNA, 201 bp, Homo sapiens
ttattacattcttggtaacgtggacccagacctctactcctcattcaaaacagcaatcatggcctcaacactcctgataccacaacctgattctttctttytgtaacattgatcacatacaagataggtagtatatattgtacctttgtacatatttgttatgtgtattatctggcattctccaccagaatataatctcca

SEQ ID NO: 455220 - DNA, 201 bp, Homo sapiens
gtgcctgctgctatctaaccccccccccatttcactcattatctctccagtattatatcctctgcttcccccttttccacttcattctggagactccagaracactatgttccttgaatatttctctctgagaaaatagacacaatcacaaaaacaattgttttattctctctgcttgggagttattctctctgcttggga

SEQ ID NO: 455221 - DNA, 201 bp, Homo sapiens
gtttgagggaagagctaattgtgaggaatttagctactattggcatccatactctcagagaacattcacagacatgaatatgctcataaagagaccgagakagtctgtggtgtcatctgtagtccacatgcttaggattagttgggttaggagttcaagactgtgtctgatacagaggaggcaaagtttagtttccttccc

SEQ ID NO: 455222 - DNA, 201 bp, Homo sapiens
ttttttttgcagttggaataataggttttttatacacattcattatgttgtaaatgttttcctctccattaatttacattaatgtcatacaggactacaamaaattagggttcagagttatagataacctataagccaatgcaaacagtcgatcaccagtgtttctgtaagaatgaggatggtttattatttacatccttt

SEQ ID NO: 455223 - DNA, 201 bp, Homo sapiens
aacactattatattacacctttattttctcattgctgggccaagaagttagtgagatactgaattgtgacaactgatcaccatatagtttctttttaatgmccttgtgtaatgtgtaatagactgtgaactatcatcaccttaaaatgtcatcatgttttcataacatgacaaagttataatgtaaaaatgctgaatttag

SEQ ID NO: 455224 - DNA, 201 bp, Homo sapiens
tcaccatatagtttctttttaatgaccttgtgtaatgtgtaatagactgtgaactatcatcaccttaaaatgtcatcatgttttcataacatgacaaagtwataatgtaaaaatgctgaatttagtaattgaaaactgccatgctcagcgagtgatattgccaacaccaagtcctaatttaagagttagtttactcatttt

SEQ ID NO: 455225 - DNA, 201 bp, Homo sapiens
ttaaaatgtcatcatgttttcataacatgacaaagttataatgtaaaaatgctgaatttagtaattgaaaactgccatgctcagcgagtgatattgccaayaccaagtcctaatttaagagttagtttactcattttccacttcattttataagaaaatcttcccattttgcttttcagagaggattgtgttattatacgg

SEQ ID NO: 455226 - DNA, 201 bp, Homo sapiens
tatacttactctttcttctgtctgaatgctgtttctacagaggtgctttctaattgaaggtacaatcatttctcacatatgccttcttctcattatttgtktaatttctcttcacagcacctatcatcaccatctgacattttatatatatatatatatatatttccttttttgtttgttgtctgtcactcccactaaaat

SEQ ID NO: 455227 - DNA, 201 bp, Homo sapiens
tttgccccatcaagttcaatggggcatgaactctccagcaggttcatcatatacattatacccagaatgaagtcctagcttttcagcgtagaattcaacamcgttcatgattctgcactcccctgcttttttttttattatttatttattttattattattatactttaagttttagggtacatgggcacattgtgcaggt

SEQ ID NO: 455228 - DNA, 201 bp, Homo sapiens
gcacagcctgcaggttgattgtacatttatacaaatttataatgacagataatgctgaatcgcatatgattagctacttcatctttgaaaagctgctattmttccacttgctaacaatgaaaaggtgaattcattaaaagacactgagagcatctttatgctctgattaaaaataaatgaagaaaaggcttataaacccta

SEQ ID NO: 455229 - DNA, 201 bp, Homo sapiens
tgccccatcaagttcaatggggcatgaactctccagcaggttcatcatatacattatacccagaatgaagtcctagcttttcagcgtagaattcaacaacrttcatgattctgcactcccctgcttttttttttattatttatttattttattattattatactttaagttttagggtacatgggcacattgtgcaggtta

SEQ ID NO: 455230 - DNA, 201 bp, Homo sapiens
atgacagataatgctgaatcgcatatgattagctacttcatctttgaaaagctgctattcttccacttgctaacaatgaaaaggtgaattcattaaaagayactgagagcatctttatgctctgattaaaaataaatgaagaaaaggcttataaaccctatgaaaaagagaataaatcaatgacagtgtccatgtataggc

SEQ ID NO: 455231 - DNA, 201 bp, Homo sapiens
tgaactctccagcaggttcatcatatacattatacccagaatgaagtcctagcttttcagcgtagaattcaacaacgttcatgattctgcactcccctgcttttttttttattatttatttattttattattattatactttaagttttagggtacatgggcacattgtgcaggttagttacatacgtatacgtgtgccat

SEQ ID NO: 455232 - DNA, 201 bp, Homo sapiens
aatgtcaaaaaaaaaactcatcaagttgtgtgattacaaagaatgaatttttttatatatgcattatatattaacacacctgactctttaaaagtttaatrcatgctttatactttttatctcaactttcaaggttagaccaggagaaacatattttttaaatgtctgcaaaagtatcctcccttctgtgccactgtaagg

SEQ ID NO: 455233 - DNA, 201 bp, Homo sapiens
tatgtggttaggtagagaaacagagtatactatgagttatacatactaatactatgttcacagataacacttctctggagtactctagatttttccattccttcttctttttttttttttttcttttctgagaatgagttttgctcttgtcgcccaggctagagtgcaatggtgcaatctcagctcactgcaacctccatc

SEQ ID NO: 455234 - DNA, 201 bp, Homo sapiens
gtagggaacactgttggtattgtggccaaaccccctgagacacctgttaccatttttgtgctttctgcgcccacctcaaccctgcgcaagatttacttccracacctgtacctgtgattcccctgggcaggcactgtggctactggagctgctttgccaaaatccgatataaagttgtaaatgcctggaagtttagatctc

SEQ ID NO: 455235 - DNA, 201 bp, Homo sapiens
tttgaaaatgatgtacagttcttctattagggctgcacttaatctctaagctatcggaaaacaaggtcagatcttctgttgacacaggaaatagtgcaacyggtcccctgtagttattgcaaatagttgtatagattagtgacgtttctgaaaaactaaatatttttaaatgggtctttaatattcagtcctccaaataca

SEQ ID NO: 455236 - DNA, 201 bp, Homo sapiens
atgtggttaggtagagaaacagagtatactatgagttatacatactaatactatgttcacagataacacttctctggagtactctagatttttccattccttcttctttttttttttttttcttttctgagaatgagttttgctcttgtcgcccaggctagagtgcaatggtgcaatctcagctcactgcaacctccatct

SEQ ID NO: 455237 - DNA, 201 bp, Homo sapiens
cttctattagggctgcacttaatctctaagctatcggaaaacaaggtcagatcttctgttgacacaggaaatagtgcaaccggtcccctgtagttattgcraatagttgtatagattagtgacgtttctgaaaaactaaatatttttaaatgggtctttaatattcagtcctccaaatacagaaaaaggattaggttaaaa

SEQ ID NO: 455238 - DNA, 201 bp, Homo sapiens
tgtggttaggtagagaaacagagtatactatgagttatacatactaatactatgttcacagataacacttctctggagtactctagatttttccattccttcttctttttttttttttttcttttctgagaatgagttttgctcttgtcgcccaggctagagtgcaatggtgcaatctcagctcactgcaacctccatctc

SEQ ID NO: 455239 - DNA, 201 bp, Homo sapiens
atagattttttattatatgtatttaaggtttacaacatggtgttttgatatacatatactcagtgaaatggttgctacagtcaagaaattaacatgtctaycaccttgtatagccatctttttttatagtaagaacacctaaaatctattctcttagcaaattttcagtataccattttcttaattaactgttctagtata

SEQ ID NO: 455240 - DNA, 201 bp, Homo sapiens
taagaatgttgaatattggcccccactctcttctggcttgtagggtttctgccgagagatccgctgttagtctgatgggcttccctttgagggtaacccgwcctttctctctggctgcccttaacattttttccttcatttcaactttggtgaatctgacaattatgtgtcttggagttgctcttctcgaggagtatcttt

SEQ ID NO: 455241 - DNA, 201 bp, Homo sapiens
gagtatgtgtacgtctgagtaaagtgtttttagaaagagggtcagccagtacaaaggccctgaggtagaagcatgcctagatgttccaagaatatgaaggrggccagtatggattcagaaataagggataatatcagaagtgcaacaaggtcaagaggtaaaagatctggaggtagagagcagatgaatcatgtagggtct

SEQ ID NO: 455242 - DNA, 201 bp, Homo sapiens
tccaggtgtcagcaaccatgcctggcccctgtaggttttttatttaaaaacatacaaattttcaccacctccaccattattaccctggtccaagccatcaytgtctctttcctggattattgcaatagctttctaccaagtcttcctgattttactctactttgccatagtctgctttcaatattgcaatataagcgaaca

SEQ ID NO: 455243 - DNA, 201 bp, Homo sapiens
tctccaggataatatcctgcagagtgttttccaacttggttccattctccccatcactttcaggtacaccaatcagacgtagatttggtcttttcacatastcccatatttcctggaggctttgctcgtttctttttattgttttttctctaaactttccttctcgcttcatttcatttatttcatcttccattgctgata

SEQ ID NO: 455244 - DNA, 201 bp, Homo sapiens
gtgtcatgggttttagaagactgaggaaggaagacaaatcccagaccctaagaactagtgagtaagcttaccccagttttattcagctctggctgaaaaaytcagtggacttgaacctgctattttacatactcattcaacacatattcagtgaatacctattgtttccaagtctctgttctaggcattagaaggtgtaat

SEQ ID NO: 455245 - DNA, 201 bp, Homo sapiens
ccttctagatcatatactattttgggccagaacacatacctgattcatcagtgtatccctctatctctacagcattgagcttgattcttaatctttctttmcaacttgagtgactaaaatatttaacagaaatcaatatcagattattcatgaatttagatcccaaaatgtctaagcctgattcctcatagtgttcctctt

SEQ ID NO: 455246 - DNA, 201 bp, Homo sapiens
acctgtagtcccagctactcgggaggctgaggcaggagaatggcgtgaacctgggaggtggagcttgcagtgagccgagattgtgccactgcactccagcstgggcgacacagcaagactccatctcaaaaacaaaaacaaaaacaagcaggtgctatagattctttaaaatagtattgtctgaaatctgagtagaactca

SEQ ID NO: 455247 - DNA, 201 bp, Homo sapiens
atacctattgtttccaagtctctgttctaggcattagaaggtgtaatagaacaggtaaagttcctgcctaaatggagattatattgtagtgaagagaagakaacagacaagcataaatgtgtgctctaaagaaaaactggaagggtaagaatggaaaaaaaaaagcagatcatgaagaggatgttgccatcccacattggg

SEQ ID NO: 455248 - DNA, 201 bp, Homo sapiens
tatgtatagttcaacagaacaaaaactcatgttattcggacacatccaattgagaataatttgttttcctaaactctgggaatgtttatctctgccattgmgattcctagaactcatcacagttatggagctgaaagagactgcagggaccttctagattaatcattttgttttatggatgagaaaattatacctaaaaag

SEQ ID NO: 455249 - DNA, 201 bp, Homo sapiens
ccaattttgaaagttctactctgggtaaaatactgtctaaaagcatcacatgccacagagaaatcttttgtgaaagaaaaatttgatgaatgtggcaaatktaattgtcttatttttaaaaactgccacagacactccaagcttcagcagttaccaccctgatcagtcagtagccatcaacatggaagcaagaccctccac

SEQ ID NO: 455250 - DNA, 201 bp, Homo sapiens
aggtgtggtggcgcatgcctgtaatcccagctactcgggaagctgaggcagaagaatcacttgaacctgggaggcggaggttgcagtgagctgagattgcrccattgcactccagcctgggcaacaagagtgaaactccatctcaaaaataaaaaataaatataaaaataaaataaacaggagacatctgcaaaaatcaca

SEQ ID NO: 455251 - DNA, 201 bp, Homo sapiens
accattttaggtgtacagtttagtagcattaaatacatttacattattgtgcaaccatcgccaccatccatctccacagccctttttcttgcaaaactaaractctgtacccactaaaaattccctcctcccattccctcttccccccaaggccttagcaatcaattatgtctctacgaatttgaacattctaggtatctc

SEQ ID NO: 455252 - DNA, 201 bp, Homo sapiens
ccatatttttctctaagcatttttaataacgtactaacatgtttacacatatactcatgtatttatataagtcctggtcattgttggtttaaaaaataggwttacattataaatactttctgtgtcttgctttttaatattctgcaaacacatcgtagaaatccttccatagcaccttgtatagctctagtagattcattt

SEQ ID NO: 455253 - DNA, 201 bp, Homo sapiens
gatcagtgaagacttcctaaaggaagtgatattaaacttagaatgagtagtatttaattaggtaacagaaataacaaaaaaatgggatagggaggagaggrcctgagcaaaggcatgaaggtgagcagagcatagtatgtgcaagaaacaaaaagcaattccagttagaagagaaggtgctgcaataaagtggtgggggag

SEQ ID NO: 455254 - DNA, 201 bp, Homo sapiens
ttctcctattatacctaacattaaatactggagtccaaaagtgcacaatacattttaaaaaactccataactaaagataaagcttctctttttatgtgataaaaattggcttgtaatataatctaagcacatcacattcatagctttcatatttaaagttcattttttcaatgcaaatttttattgaaattttaaatttta

SEQ ID NO: 455255 - DNA, 201 bp, Homo sapiens
ttccttctgtacaataattcacaggtattttgatgggcttttgatgtttccagatatccgtggaatacaggagttcttggacaaagtctctcagcagggartggatgttgcacttcagaaggtagaaaacaacatcaataaaatgattaccactctctttgacaccatgagaatagaagaactgaatcgctatcgagacac

SEQ ID NO: 455256 - DNA, 201 bp, Homo sapiens
cctcattttattttgtactcaccactaatgagtttgggtatttttcatatgctgttggacatatatatttgtactattttgcattgcctcttcagatgccrtctatttttattttgcacacgctattcttttctagttaaatcattagagaagcatctgtataattttaaacattaactgtttgtcccccatgttccaatt

SEQ ID NO: 455257 - DNA, 201 bp, Homo sapiens
ttctgcttgttccattccccttcctcctagagctataagcatcatttgtcattgagtaaaaatgccaaagtagatgacaattaatgagccatcagcagaargagggtgagggctaattggagctttagtgagcaacttgctaatatattaactaggtatatgacctcaaaatctgggttaggcccttattacagaaataaa

SEQ ID NO: 455258 - DNA, 201 bp, Homo sapiens
atatgtgtatgtgtatatatgtgtatatatgtgtatatatgtgtgtgtatatatatcctgcattttatatatatgctatatatatatgtatatacatatayacacacacacatatatatcctgcattttgtttatctgttcattatcaacagacatgggttgcttctaccttttggctgttatgaataatggctctcaatt

SEQ ID NO: 455259 - DNA, 201 bp, Homo sapiens
tccattgatctatatctctgttttggtaccagtaccatgctgttttggttactgtagccttgtagtatagtttgaagccaggtagtgtgatgcctccagcyttgttcttttggcttaggattgacttggcaatgcgggctcttttttggttccatatgaactttaaagtagttttttccaattctgtgaagaaagtcattg

SEQ ID NO: 455260 - DNA, 201 bp, Homo sapiens
ctattagattattttagatgggcctaggacataaacagatacagcttctgagagcagttgtagaaacttccaggtggcaggtaaggatctgaccagaaatyaaggatcatgtgcagcactaaaatagggaagtccctgattattatgagggccatattcacttcccattaatctattataactcttggggaaaaacaaatc

SEQ ID NO: 455261 - DNA, 201 bp, Homo sapiens
atgatggtgagcaagaaggtctttgccatcattgcgccacaacagaagtctaatgagacacaaacatgtaaacacaggattacaattgtgggtagaaagtyctgtggtaggataagcatagactgttaggagatcataggtgtagaagcacttaatatatgttaatgtcgcagagaaggctttttaaagtaacactttata

SEQ ID NO: 455262 - DNA, 201 bp, Homo sapiens
agcataggaagatagccttgatctcacattccaaatctaccgcaaatcattggtatgacttagagcaagttacaattacctcacctgtgaattagatatcstatcagctgtctcacagtgttgtaaagaacaaataaatgtgtatgtaaatggcatttttagcagttgaaacatgtttggtaaatgttatctattatcata

SEQ ID NO: 455263 - DNA, 201 bp, Homo sapiens
gagagatatgttattatcatctctattttatagatgatgaaactgaagctagggtagtaaacccaggcaatctagcactataactttttaccaggggaacrtattgtatgctaattacaaatacgctaaacctttattgtatgaaataaataaatgaataaatggcatccataagggttactataaatttcttaggaaata

SEQ ID NO: 455264 - DNA, 201 bp, Homo sapiens
ttcattaattcattcagtaaaaattattgaccttctaccatgcctcaggcattgataggaattcattagggaagaaatcagagaatcccacttcttgcatmgaactttcattctaatacagaaaggcaggcaataaacaaacagaacaaataaaaggatatgtcaggtggcaaactttgtgaaaatataaatatggcatgt

SEQ ID NO: 455265 - DNA, 201 bp, Homo sapiens
ccatagattttggagtgagcttttaagaaatttactaaattaaagattcatgtgagaaagagtattgtcctcccgattcaaatcaaaattggtgagataamaggtagcgataagtctgtttgtggcatggacttctgtagttagtacaggaggctgctacctaatgaattaaaaagcaaagtgctttcagcatcagctcat

SEQ ID NO: 455266 - DNA, 201 bp, Homo sapiens
tgggaggctgaggcgggagaatggacgtgggatgcggaggttacagtaagccaagattgagccactgcactctagcctaggtgacagagtaagactcctcaaaaaaaaaaaaaaaagaaagaaaaaagaaaagaaatacagtcagacagaagcactgcctccagctcatatctattcctgccttctgtgtcaccatccctt

SEQ ID NO: 455267 - DNA, 201 bp, Homo sapiens
aagcaatatgtcgcctactggggaggtcccttgaggtttgtaaagaagctgccaggggatccaggaggccagactaacagtttaaaacagaagataatcayaaaaatcaaagtaggttgttagaggaagcttcaaggtcactgctactcccaatcactgtaaatttagacctagggagctataagcaggtctgcaagttgg

SEQ ID NO: 455268 - DNA, 201 bp, Homo sapiens
tggtttcaataatttttcttttggattctactgaaagagaaaatgtggaaagaattactgaagctagccataactccaacaaatagccaacaattctgatygccagtattaaaccacaaatttgtaacataaccacatcatagaataagaaagtacagtttcattgtttctgccttttttcactggaagtaaaaagagcag

SEQ ID NO: 455269 - DNA, 201 bp, Homo sapiens
agccatgatttcttttagcttcactttcccccaaggaagatgctgaaaaagtgtgaggagggctggaaacatcacctacctgagaagaggtgggtctggtygcaatgctcagaaggcaggaggagaccagggcacccagcctctgccttcttattcataacttagggatgcagaaagaccttatcttattcccctactgtc

SEQ ID NO: 455270 - DNA, 201 bp, Homo sapiens
cattttgtaatattcttgaacatttaatctgtttagaatataatggtctattagtatctcagattaataacatcttgcttcattatctttctttttgaaaygtttagaccacatttttctttcagagcagtagccataacattgtctgaaatttcaaatgaagacctttccaaagtaatagttataagtaaattacacagt

SEQ ID NO: 455271 - DNA, 201 bp, Homo sapiens
aacagacacacatacatattttccaaattagagataggagtctcactctgacacccaggctggagtgcagtgatgcaatcctagcttactctaacctcaawctcctgagcccaagcaatcctcctgcctcagcctcagttatgactgcaggtatatgaccccatggctggtgagttaggccattcttacattaccagaaag

SEQ ID NO: 455272 - DNA, 201 bp, Homo sapiens
tgcttgaaattggaagcatttttagaataatttatgcatcaagaaaagggtataatgctttagtgatgcaaggcccccgagggcagagtatcaagtaaaayattcatgaagcttaagtgcaagagacatcagattttctgtagtattttaacactgcatttctgtacaagggaattgtaaagtgcaagaatatgagagaag

SEQ ID NO: 455273 - DNA, 201 bp, Homo sapiens
gtggctggcaagatggctgaataggaacagctctggtcttcagctcccagcaaaatcaatgcagaaggcgggtgacttctgcatttccaactgaggtactyggctcatatcattgggactggttagacagtgggtctagcgtacagagtgcaagctgaagcagggttgggcatcacctcacccaggaaacacaagagatcg

SEQ ID NO: 455274 - DNA, 201 bp, Homo sapiens
ataaagaaaaacaaattgcaaattattatgtttccttcttaacttgtgtatttttttattcaaactgcattaaattaggcctgcttattttcagatttttycaggctgaccttgcttgaaattggaagcatttttagaataatttatgcatcaagaaaagggtataatgctttagtgatgcaaggcccccgagggcagagt

SEQ ID NO: 455275 - DNA, 201 bp, Homo sapiens
tcccatggagcccagcaagctgagatccactggcttgaaattcttgctgccagcacagaagtctcaagtcgacctgggatgctcgagcttggtgcggggargggagtctgccattactgaggcttgagtagggggttttcccctcacagtgtaaacaaagcttcctggaagttcgaactgggcggagcccaccacagctcc

SEQ ID NO: 455276 - DNA, 201 bp, Homo sapiens
ctagccacgctagtgtctcttctgtctcttaaacaagtcagagactcttaactgctgtatttatacttactctttcttctgtctgaatgctgtttctacasaggtgctttctaattgaaggtacaatcatttctcacatatgccttcttctcattatttgtttaatttctcttcacagcacctatcatcaccatctgacat

SEQ ID NO: 455277 - DNA, 201 bp, Homo sapiens
ccaactccttaccaacacctgtaagtccatgtaagtccaacacctataagtccatgatctagaccctgcctaattttccatccttagccctttgcactagytaaatttgctaaaaccaccatggtcatttttttcttccctcatatatgccaacttttcctgtccctgctgtctttctgccaagactgctctctcttctgc

SEQ ID NO: 455278 - DNA, 201 bp, Homo sapiens
agagtaggcgcataaataaataactcattgataatgagttgataattgtttcagtaggatgatgaatatttgagtttataattttattctatttatatatwtgaaaatttttatactgaaaagttgaaaaagctttatattggtattttaaactttgtaaatgttcactaaaagaagatatgtctttttagttgttttgcc

SEQ ID NO: 455279 - DNA, 201 bp, Homo sapiens
tcttagtcaaagtaacagctgacatcatcatagtggcctaaagactctagtgaagctctgccccatccaaatacattgcctctcagatatttcctaatatstggctctagcttccttggtcctagccacgctagtgtctcttctgtctcttaaacaagtcagagactcttaactgctgtatttatacttactctttcttct

SEQ ID NO: 455280 - DNA, 201 bp, Homo sapiens
gattcaagatctgagtcatgttatcaatacattaggtcatgctatcatgaaagaaaactaataatagtttctcaagatcctaattaaacatttggaaagakagtatgaaataactatttggaaactaataaagagatgactctgttattactgaatatcaaaggatggcaaatttgtgaataagtccccagatttgtctgc

SEQ ID NO: 455281 - DNA, 201 bp, Homo sapiens
gcaaatcaaatgatatcactctactactaaaaactcttcggtgatagcagtaataaagtccaactccttaccaacacctgtaagtccatgtaagtccaacmcctataagtccatgatctagaccctgcctaattttccatccttagccctttgcactagctaaatttgctaaaaccaccatggtcatttttttcttccctc

SEQ ID NO: 455282 - DNA, 201 bp, Homo sapiens
catcttgacaggtagtggctatgtgccattcttgggagaactgggaaaatggtcactgaaatcatttttgttgtttctagttccaatgagaaatgccagcygggaaaggctgctacagtatgtagcaaggtgcttttgctgaaataataaaagtatttgcaaggaaatacttgaaataagtgctaaatttccaaagattga

SEQ ID NO: 455283 - DNA, 201 bp, Homo sapiens
agtcaaataagataatgtctcaatacaattcattacacatatcaagaaaactggaggcattgacattatgactattagaagacatttgtcgctatactaartattaatacattgaatttatatcagtaaacacccttagtctatagtatttaaatgctcccttcattgcatgctggcatttcctagttttgaagaatgtct

SEQ ID NO: 455284 - DNA, 201 bp, Homo sapiens
ttaaaatcttgaaccagatatacagaaatctttcttttttcaaagcacattttaattcagtttatttaaatgataaaaacatatccataaaggcataacayatataatttaaaatttctatagtaaacaagataaaaggtccaaaatttcggtagatactacatatgaccaaatgtaaaacagcatgtcttccattttgct

SEQ ID NO: 455285 - DNA, 201 bp, Homo sapiens
agtatgaattcatttgtaactgaatctttgctgtaatagttatccccagcatccttgctaatacagagaatgaagccttaatacctaaagcagccactgtrtgtgattaattaacttctctcctatgcatcttgacaggtagtggctatgtgccattcttgggagaactgggaaaatggtcactgaaatcatttttgttgt

SEQ ID NO: 455286 - DNA, 201 bp, Homo sapiens
tctctaagctatcggaaaacaaggtcagatcttctgttgacacaggaaatagtgcaaccggtcccctgtagttattgcaaatagttgtatagattagtgaygtttctgaaaaactaaatatttttaaatgggtctttaatattcagtcctccaaatacagaaaaaggattaggttaaaaagtgaaaattaaaatgttcact

SEQ ID NO: 455287 - DNA, 201 bp, Homo sapiens
taattaacaaaacaagattatgccaacgatttctaagagaactaaaaatccttcaaaaataaagaattaagtaacagtggaagtaatgatgataatagtawttaagctcttaccacatgtcaagaacttttcaatattctgtacatgtattataagaatcagaataatcttctggggtaggcactattattttcccattta

SEQ ID NO: 455288 - DNA, 201 bp, Homo sapiens
tcccctgcttttttttttattatttatttattttattattattatactttaagttttagggtacatgggcacattgtgcaggttagttacatacgtatacrtgtgccatgctggtgtgctgcacgcactaactcgtcatctagcattaggtatatctcccaatgctatccctcccccctccccccaccccacaacagtccc

SEQ ID NO: 455289 - DNA, 201 bp, Homo sapiens
ttccaaattaatatattcaagttagacctttcccttttgctccagatcatttatacaaagactgcatgatattccttcctagaagtttataaaacatttcmaacagacattaaaggtccaaaatataaattttactttctccaacctacccacaatggattttccctcagtctttttcacctcagtcaacaatacagtaat

SEQ ID NO: 455290 - DNA, 201 bp, Homo sapiens
ttattgatgattttttgttaggtatatgtattataaatatcttctactgtggcttgtcttttcactctctttatggtatctttttaactatgaagtattaytgcagtcaaattatcaatcttttcttttgtgttaatgcattttatgctgtgtttaataaatccttttctacccaaacttgtggatatattctcctatata

SEQ ID NO: 455291 - DNA, 201 bp, Homo sapiens
ttactgatggatactttacttcaattatctatttttagtttctttctggagttcctagtatttatatttaaagccttctgattgattctttcttatttatrtaattattcaatatttgtgtgattttttccttggaaattttctattcttatctttcaaaactcctgtttttcatgtctactagcattttttaacttcaac

SEQ ID NO: 455292 - DNA, 201 bp, Homo sapiens
ccatgggaagttcatttctcttaaaacgcaaatacatcttaaaagactatgactttgagtagttactggcattagcaccttagtggaatttagtctattasattattttagatgggcctaggacataaacagatacagcttctgagagcagttgtagaaacttccaggtggcaggtaaggatctgaccagaaatcaaggat

SEQ ID NO: 455293 - DNA, 201 bp, Homo sapiens
tttacttgtgcacacacacatacacacaacctgggatttttaattgggaattcactgactgaatctatagatcaatttgaggagaacttatatctttacastattaagtctctcaatcaatgaacatgctatatcttcatttattgaatcttcctttattttactcaaaaatagttttatagtttttcatgtagaggtctc

SEQ ID NO: 455294 - DNA, 201 bp, Homo sapiens
aattggcagctctgaaaaacaactaggcataaaaagagagagaaaagcataccccaagtaaaaagaaaagcaggttgtgaaagacctaaggcagggttgarcttgtttcattggcaaaatagggttacaaatgggacagaagagctggactatggtgaggaagggtagaaatgtaagagatcttaattttgcattccagag

SEQ ID NO: 455295 - DNA, 201 bp, Homo sapiens
tcaattaaaagtagaacaaagcaagtatgtgatgctgaagccaacactaatatgtgtgatcccatgatcattaacaagctatgtttctagagaatataacaaaaaataatcctttcaatattatttatttaactggaaatctgaaaatttgtattaaatataggcatagcaatattaatgtcacctaactaatgaataatc

SEQ ID NO: 455296 - DNA, 201 bp, Homo sapiens
gaagcccacaagaagatgggacatggaatggcttggtaggagaacttgtctttaaggtaagaattactttatttatttgtctcatacttaaaggttcaatwatttgtctcatacctaaaggttcaacagtaacaccttgaagctgatttcatataaaataagtgtgatgtatttaggttggttaagcattaggtggtggaa

SEQ ID NO: 455297 - DNA, 201 bp, Homo sapiens
ccactggtaacagaatatttttgttttcctcattagtaaaataaaactaatgacacttgttctcaaatgtgtggaatagataatatggaactcctttgagmtctctgggaaataatttgtaaaaatttaaatgggttagcatttaaaataagcaagtataaaaacaaatatgagaattattctgtatttatgatatgtcct

SEQ ID NO: 455298 - DNA, 201 bp, Homo sapiens
gaaacctgatcaaatactgatttgacagatatgcttgactttaaaatctaacctactcaatgttaaagctattgctgtcagatatatctaatagactatcraatatttaaaaaatttaattgtattatttttattttttattttcctttgagagggagtctcgctctgttgccaaaactggagtgcggtggcacagtctca

SEQ ID NO: 455299 - DNA, 201 bp, Homo sapiens
atgacacttgttctcaaatgtgtggaatagataatatggaactcctttgagatctctgggaaataatttgtaaaaatttaaatgggttagcatttaaaataagcaagtataaaaacaaatatgagaattattctgtatttatgatatgtcctgatccaccacaaattatacatcatgataattatagtgataataataatt

SEQ ID NO: 455300 - DNA, 201 bp, Homo sapiens
gataacttaagttgacttgttccaccccatagaaaatgggattagacttaaaattccccaaagccagctgtcaggccactcttgtcagttattgatgagcrttctacacaaccaggctaaatgtagtttttaatcttagaagacaaagaagatggagatgggacagagaggtttatgagagttatttaagttttatgtgga

SEQ ID NO: 455301 - DNA, 201 bp, Homo sapiens
acaactctaaagtataagtgatttagaaaagttacttctcattcatgaaacaaggctgtaatttggttgtgttatgcttcaagctgtgggtcaactgcagkcctactctgtgcaagcttctcattccaaggcccaggctgaagaagccgacctaacagggacatgctgttctcattgcaaagagcatttgtaaaagaggct

SEQ ID NO: 455302 - DNA, 201 bp, Homo sapiens
tttgttgtgggcagatgtcctgtgcattataacatgtttagcagcatctgcctgtacctagtagatgtcaataatacctaccccagctgtggtagaagatwaaattatccctggttgacagtcattgataactatttaattctttttttttttttttttttttttttttttttgagacggagtctcgctctgtcacccagg

SEQ ID NO: 455303 - DNA, 201 bp, Homo sapiens
tgacacttgttctcaaatgtgtggaatagataatatggaactcctttgagatctctgggaaataatttgtaaaaatttaaatgggttagcatttaaaataagcaagtataaaaacaaatatgagaattattctgtatttatgatatgtcctgatccaccacaaattatacatcatgataattatagtgataataataatta

SEQ ID NO: 455304 - DNA, 201 bp, Homo sapiens
ccttaatccagtctatcattgttggacatttggcttggttccaagtctttgctattgtgaatagtgccacaataaatatacgtgtgcatgtgtctttatarcagcatgatttacaatcctttgggtatatacccagtaatgggattgctgggtcaaatggtatttctagttctagatccctgaggaatcgccacactgtct

SEQ ID NO: 455305 - DNA, 201 bp, Homo sapiens
gacacttgttctcaaatgtgtggaatagataatatggaactcctttgagatctctgggaaataatttgtaaaaatttaaatgggttagcatttaaaataagcaagtataaaaacaaatatgagaattattctgtatttatgatatgtcctgatccaccacaaattatacatcatgataattatagtgataataataattac

SEQ ID NO: 455306 - DNA, 201 bp, Homo sapiens
gagcgtacatactctccttcctcctcattatctaaatattcaaccaagaaaaacaatcctgaaatttaattttctgtagtaatcctcaacattgccaaagrtgactgtcctcgacttgttctgctgcttatctcaagattctttagctactaaaatcatgaattcttttacatatttataagcatttcaattaagcaattt

SEQ ID NO: 455307 - DNA, 201 bp, Homo sapiens
ttttaatgatggccattctaactgctgtgagatggtatctcgttgtagttttgatttgcatttctctgatggccagtgatgatgagcattttttcatgtcycttttggctgcataaaagtcttcttttgagaagtgtctgttcatatccttcacccactttttgatgaggttgtttgttttttccttgtaagtttgtttga

SEQ ID NO: 455308 - DNA, 201 bp, Homo sapiens
acacttgttctcaaatgtgtggaatagataatatggaactcctttgagatctctgggaaataatttgtaaaaatttaaatgggttagcatttaaaataagcaagtataaaaacaaatatgagaattattctgtatttatgatatgtcctgatccaccacaaattatacatcatgataattatagtgataataataattacc

SEQ ID NO: 455309 - DNA, 201 bp, Homo sapiens
agtaactaatgaaaatgatcaaaatcaacatgtttttattttgtatgttgctgcctaagaaaacatatttaaaacttgcatcttttttttttttttttttwattatactctaagttttagggtacatgtgcacattgtgcaggttagttacatatgtatacatgtgccatgctggtgcgctgcacccactaatgtgtcatc

SEQ ID NO: 455310 - DNA, 201 bp, Homo sapiens
aaattttacatcagtatctgttctctcctttagggtggagttagtgggttgactggagagctagaatttggagaaaatggaggcaatcccaatgtccactytgaaatccttggaaccaactatggagaagagcttggcagaggtgttcgaaaagtaagacaagacacactgattaatacgctttttcctatactatggttt

SEQ ID NO: 455311 - DNA, 201 bp, Homo sapiens
gtggaatagataatatggaactcctttgagatctctgggaaataatttgtaaaaatttaaatgggttagcatttaaaataagcaagtataaaaacaaatatgagaattattctgtatttatgatatgtcctgatccaccacaaattatacatcatgataattatagtgataataataattaccaattattgaacagatatg

SEQ ID NO: 455312 - DNA, 201 bp, Homo sapiens
cattgcctcactcgggaagcgcaaggggtcagggaattccctttcctggtcaaggaaaggggtgacagatggcagctggaaaatcgggtcactcccacccraatactgcgctttccctacgggcttaggaaatggcccaccaggagattatatcccgcacctggctcggagggtcctatgcccacggaggctcgctgattg

SEQ ID NO: 455313 - DNA, 201 bp, Homo sapiens
tggaatagataatatggaactcctttgagatctctgggaaataatttgtaaaaatttaaatgggttagcatttaaaataagcaagtataaaaacaaatatgagaattattctgtatttatgatatgtcctgatccaccacaaattatacatcatgataattatagtgataataataattaccaattattgaacagatatgc

SEQ ID NO: 455314 - DNA, 201 bp, Homo sapiens
gataacaactaaaataatttagtatttaatttgacaaagagaaggctaaaggaggaaaatgaaaaagaagtgttttattacatagagaaatattgtaccasaggtggtatgcaggtattgtccattttcattgagaacaaaatagtgttttctgtgaaacaggagattttggggctatgtacaagtaaggactcccttgtg

SEQ ID NO: 455315 - DNA, 201 bp, Homo sapiens
cccacccaaatactgcgctttccctacgggcttaggaaatggcccaccaggagattatatcccgcacctggctcggagggtcctatgcccacggaggctcrctgattgctaacacagcagtctgagatcaaactgcaaggtggcagtgaggctgggggaggggcgcccgccattgcccaggctcccttaggtaaacaaagc

SEQ ID NO: 455316 - DNA, 201 bp, Homo sapiens
gaataagaggtttcaaaaatagacaaagataacaattagacatatttggagcatcaacagaagttagtataaaattacaggaattttagaaattaataaaraggtcttatttatttaatattgaaataataccatttaaataattttaatagcaaaggtcaatataaggcatgctatcaccaagcactattctaagagctt

SEQ ID NO: 455317 - DNA, 201 bp, Homo sapiens
tgttatttgtttacaaacaaattaataatgttatctcctgcctgttttcttaatttcaggaaagagtaggccaaatgattaagacatttcataaaagttayccaattaattctgaagagctagagtaattcccaaaagaatggctgaaaatgaaatcacatacaaaaaaagaaaaaacattcaatatcactttagtagtgg

SEQ ID NO: 455318 - DNA, 201 bp, Homo sapiens
ctcagcacatgcattaagcaccttctccttgtcagaccctgagccaggccttgtgatacagtggtgaataagacagtcaaggtctctgccttcatgcagcytaaattcaggtgcagaggcagataacaaagaactagaaaaaatgaaaacggcagattccaatttgtgctatggaagaaggaaatagaaattttaagataa

SEQ ID NO: 455319 - DNA, 201 bp, Homo sapiens
actgcgctttccctacgggcttaggaaatggcccaccaggagattatatcccgcacctggctcggagggtcctatgcccacggaggctcgctgattgctarcacagcagtctgagatcaaactgcaaggtggcagtgaggctgggggaggggcgcccgccattgcccaggctcccttaggtaaacaaagcagctgggaagc

SEQ ID NO: 455320 - DNA, 201 bp, Homo sapiens
agcatcaacagaagttagtataaaattacaggaattttagaaattaataaagaggtcttatttatttaatattgaaataataccatttaaataattttaayagcaaaggtcaatataaggcatgctatcaccaagcactattctaagagctttatatacctcttgttacttgcaactaccgtgttttacaaataaaaaaaa

SEQ ID NO: 455321 - DNA, 201 bp, Homo sapiens
tcatacaacctgtttgtatataagtacaagaggaaaacatggccaaaaatatttgttgttgataaggaaggattttaacactaatgaaggaaaaggataaygagagatctgtgaaaggaaataaattatgtagatgcaaatgacttagtgaatggctgtaggagcaattttctaaatttgcaggtgatatttaattggcag

SEQ ID NO: 455322 - DNA, 201 bp, Homo sapiens
gggaaaaaacaaagcagaaaaactagaaactgtaaaaagcagagcgcctctcctcctccaaaggaatgcagttcctcaccagcaacggaacaaagctggayggagaatgactttgacgagttgagagaaggcttcagacgatcaaactactccgagctacaggaggaaattcaaaccaaaggcaaagaagttgaaaacttg

SEQ ID NO: 455323 - DNA, 201 bp, Homo sapiens
attttagaaattaataaagaggtcttatttatttaatattgaaataataccatttaaataattttaatagcaaaggtcaatataaggcatgctatcaccargcactattctaagagctttatatacctcttgttacttgcaactaccgtgttttacaaataaaaaaaactggagattacagaggttaagtgacttaagtag

SEQ ID NO: 455324 - DNA, 201 bp, Homo sapiens
ctagaaactgtaaaaagcagagcgcctctcctcctccaaaggaatgcagttcctcaccagcaacggaacaaagctggatggagaatgactttgacgagttragagaaggcttcagacgatcaaactactccgagctacaggaggaaattcaaaccaaaggcaaagaagttgaaaacttggaaaaaatttagacgaatggat

SEQ ID NO: 455325 - DNA, 201 bp, Homo sapiens
acactccaaacagacagtggctctggccagaaattattttttttctcatcaacattataataaaacaacattgaacaaaacaattttattcgaggacctaytgtatactaaactatatttcatagaaggctaattaaaatgtagtctgtaacactgtttgctaaaggagagaaaaacagcactataatccctagacctact

SEQ ID NO: 455326 - DNA, 201 bp, Homo sapiens
gaaactgtaaaaagcagagcgcctctcctcctccaaaggaatgcagttcctcaccagcaacggaacaaagctggatggagaatgactttgacgagttgagagaaggcttcagacgatcaaactactccgagctacaggaggaaattcaaaccaaaggcaaagaagttgaaaacttggaaaaaatttagacgaatggataac

SEQ ID NO: 455327 - DNA, 201 bp, Homo sapiens
gtcccaagtttgatttccctagaagcagactctgagatatatattaatatataagatatttattagaatgttctcttgatatccacatggaaggaaggaargatgattttgcagaaagagctgtggagcactccaaagatagatgtcacccttcatagttgccccaaattgggcaagctgatgtggccttatattcctact

SEQ ID NO: 455328 - DNA, 201 bp, Homo sapiens
aaaaacccttataaaacactcagatcttgtgagatctcactcactatcacaagaagagcattggggaaaccgcccccatgattcagttacctccacctggyctttcccttgacaagtggggattatgggtattatggggattataattctgatgagatttgggtgggaacacaaagcctaaccacatcacctatttatctt

SEQ ID NO: 455329 - DNA, 201 bp, Homo sapiens
agaagtctaaagctcattaccttaatttccttttttataggttaagcattgcaggatcatttttgagattctaatttttgatgtaatattttttaattacygaatgtgggctttttatatctgaggtgatttttttcttttaaatcaatgtgtccattaaagaatgtattattgcacaccagatggaattaaatgaaccat

SEQ ID NO: 455330 - DNA, 201 bp, Homo sapiens
atccaatcaacaaagcaatatatcaagcccttatatgcggtgcaggatgatctctgtggtgtaaatgttctcgattacaagtcgccaatttgccatagcgragcatgcagttgggaggggacgtgcagtagcattccattgcatagcatgctgccatatggatgcaataggtgtgaatcattctcaagaatgtagataaca

SEQ ID NO: 455331 - DNA, 201 bp, Homo sapiens
atacatatatgtatttgcaccatttctatcctgatgacaggtggcaccattccaagagccaatgtttcctttcaaactatttctgagtacatttaatgatktaaatatgttcttaatcaatttattttttcctcccaaggtatcagaagtcctgactcaattcttcatattaacatatgcattccttactaagaaaccaga

SEQ ID NO: 455332 - DNA, 201 bp, Homo sapiens
aatagctgggactacaggcacactatcatattcggctagtttttttgtagagacagggtttcaccaagttttctaggctggtcttaaactgggctcaagcratctgctcacattggcctcccaaagtgctgggattataggcgtgagccaccacacctgtccttcctttcttatcaaagtaattttttctctaaaacattt

SEQ ID NO: 455333 - DNA, 201 bp, Homo sapiens
gaattgggtcttcaaggaacataacaatttgaaaagacagagaggactttccaggaaaatgtaactacatatgcacaaatgacagtagggattatagtaakaacacttttattattattctacctcttcactctattcaatttccctgactactacaatgtccccatgttggtttctcctttcttgtattccaagatattg

SEQ ID NO: 455334 - DNA, 201 bp, Homo sapiens
atcagaagatttgaaataaggattaccattactggtataaagtgttttttttttatttttttttagctaaaactgaaaactgccataggttatgttttaawtattaagtttcacctataagtggagtatacatatatttcaaaaatgataataatagtccctggagtgtgatggtccccttcccgtgtccatgtgttctca

SEQ ID NO: 455335 - DNA, 201 bp, Homo sapiens
tattttcaaaacacagactttcttgtgttctctacttaaaaatctgtctagctttcagatacataaaggaaaagcaacctggttttaagagcatgcaatgyttcttcttaaatttccgatccctgtccttgtctgcagatttatcacttaacattcctctccttgcttcataatactacacacacagacatacacacacac

SEQ ID NO: 455336 - DNA, 201 bp, Homo sapiens
aattttttatataataattcttctaggtaaagaaatatcttaaaagtatctgattgaagaaacaagggggtgtggttaataggcatttaatgagtatttgwgaactttctgagaaacctcattatcttctctctgtattcgtggcaaaaaaacaaaaacaaaaacaaacaaacaaaaaaaacaccaccaccaccaccacca

SEQ ID NO: 455337 - DNA, 201 bp, Homo sapiens
ttttaaattcatttagtaacctaaattggagactaagtttgaggactaatgattttagaatagttggtccaatagaactcgtaggagacctgttaacttgrggacccaaaagagattcagatagactctttcttaaaaatgcacattaagacatacaggactcatactgaaggttcacagatacttagtacttgcctatgg

SEQ ID NO: 455338 - DNA, 201 bp, Homo sapiens
tagaggacaggtgcatgccaccacacacagctaatatttcatttttttgtagagacagggtctctctgtgttgaccaggctggtctaaaactcctgagatmtagcaatcctcctgccttggcctcccaaactgctgggattacaggtataagccactgtgccaggctcaaaattaggtttctattgctgcattaatatata

SEQ ID NO: 455339 - DNA, 201 bp, Homo sapiens
tgccaagtcacttctgatttattgcaaaaggctcctaattgatctcccagcttcttcacttgcctcttccagtctattgtcaatagtaactgtcaactgtstagtaaactgtgaaaatatatctgatcatgtctctcctctgctcagagcccatctggcttcctatcttagtcaaagtaacagctgacatcatcatagtgg

SEQ ID NO: 455340 - DNA, 201 bp, Homo sapiens
ttaacctactacaaaagcattttctaacaagcagcttaaaataggtttcttttttctttgagacagggtcttgctctgttgtcaaggctggagtgcagtgsacagtcatggctcactgcagcatcacactcccagtttcaagcgatctttccacctcagcctcccaagtagtttagaggacaggtgcatgccaccacacac

SEQ ID NO: 455341 - DNA, 201 bp, Homo sapiens
tgaatttggggcctcgagtgatcctcccacctcaacctcccaaagccatgggattccaggtgtgagccactgtacctaaccctcttctggaaaatcttaargccttagattgcattcctgtctttataggtcatatttctcattattctcttctttttgaccttttctttgcaacttgagagttttaaaagttcacttatt

SEQ ID NO: 455342 - DNA, 201 bp, Homo sapiens
cacatactccaactaaaaatcagtcaaggacagtcccagaagttaatactcttccaaagactgatgcctccactgagcacctctaggaagtatgagatggkgttgcatcacttctcactaagttcttataaccccacatccaatatatcaacaaatttcatcagctctaccttcaaaaattacctagaatccaattatgtc

SEQ ID NO: 455343 - DNA, 201 bp, Homo sapiens
tcgtttcctgaatacccagaggtaaagattggtatagcaacttaaaaaagggaagggaagtgtggctagggcatcaatgtgtagttgatctccttcctggrattagcagaaagctcttggaggagagttaatagcagctgtattgggggtagtgtcagctttagttaggtaagggaaagtcagatcagatttcaaatattt

SEQ ID NO: 455344 - DNA, 201 bp, Homo sapiens
tagagatagggttttgatatgttgcccaaactagtcttgaatttggggcctcgagtgatcctcccacctcaacctcccaaagccatgggattccaggtgtragccactgtacctaaccctcttctggaaaatcttaaggccttagattgcattcctgtctttataggtcatatttctcattattctcttctttttgacctt

SEQ ID NO: 455345 - DNA, 201 bp, Homo sapiens
taaaattcattttaagcagagcttattttaagcaaaactgtatcatgttgaattaatttgtaaccatatttgtaaatattccaattttttaaactttaaakttcaggagtacatgtgcagggtgtgcagatttgttacataggtaaacatgtcatgagggtttgttgtacagattattttatcactcaggtattgagacta

SEQ ID NO: 455346 - DNA, 201 bp, Homo sapiens
tttctttgtgcatgaaaattaaggcacccctttacttcctcttcatatattctcttccaaaactatcataagagaaaatattagttaatagaaaatatatrtatatatagtcatccaaaatattatttttaggcctagcttcatatatgtaattgcttccaacttctcttccaatcattttatacttttatattctctatt

SEQ ID NO: 455347 - DNA, 201 bp, Homo sapiens
atttttgtctaatctattttacaaatcttttagcaatataattaaaaatatttgaaatcagggaattcaaaggaagtaaaggaatgagaaaagcctagtgraataaagatattataaataagatattaaaatatagatttaatttttaaatgggagcatctggcatgagtgaaataaaatgaaacaaacctcacggataaa

SEQ ID NO: 455348 - DNA, 201 bp, Homo sapiens
tgcttgttacactcagtgcaccacaggtttccaatcttctagtgaaatcttatgcttaggttaggtgttgggtcactaaagagaatttgtaacttttctcratactagattttcctgtgagcctgtgcctcagtgagtatattttttataccgttgcttctctctcaatggtagaatgccattacttgttattcacaccac

SEQ ID NO: 455349 - DNA, 201 bp, Homo sapiens
acccagtaatgggatggctgggtcaaatggtatttctagttctagacccctaaggaatcgccacactgacttccacaatggttgaactagttgacagtccyaccaacagtgtaaaagtgttcctatttctccacatcctctccagcacctgttgtttcctgactttttaatgatcgccattctaactgctgtgagatggta

SEQ ID NO: 455350 - DNA, 201 bp, Homo sapiens
ctgcaagccttatctgaatttaggcataaataaggtcttggaagaatgattcactctgttatctcaccttagctagtgactaactagcactgagatcaggktgctactaatagagactggcaagacccctgggtcaggatatatatttgccaggtaagttttctctcctaactcacctttatttagccctctcataataca

SEQ ID NO: 455351 - DNA, 201 bp, Homo sapiens
ggttacataactgtatgcatatgtaaaaattagttggactataaagcaaatatcagtacactttaccctatgctattataccacaaaaaaatatttttcaraaaaaagagagaggagcttacagtgaaaaattacataaagaagcaattcactattagtgagtcagtagtgacaaaaaccaggattagcaacacaaggact

SEQ ID NO: 455352 - DNA, 201 bp, Homo sapiens
attatatacatttttctctgtttactattttagagtttctcaacagtaaataaaactcctataatagactagggatttctaatctgggtgaatattattasaaaaatatttttttcctagtgatggggaatgggggatggaaggatcatctccctgctttcatctaagatcctgaggactgaagtttctaaaaagtcttaa

SEQ ID NO: 455353 - DNA, 201 bp, Homo sapiens
gaaaattctagtatctaaattcttgaggatcaatttctgttccttgtttcttctgcaggttctattattgaagaattattatgttggtgcaaaagtaactkaggtttctaccattacttttaatggcaaacaccacaattacttttacactaatctaatatttcttttcaccacatttctttgatttttgtttggacatca

SEQ ID NO: 455354 - DNA, 201 bp, Homo sapiens
tacagaaaaaagcatgaaacattaattaataagtagtaaagtaacatccagaaaacactactcagagcaaaaagcagacgattgtcattaccacagaaacyacctccccagtgcatctttctgatcagacccttcccagcatcccagagtctaaccacccagagataatcacttcctctattttctttagattgtctccag

SEQ ID NO: 455355 - DNA, 201 bp, Homo sapiens
gctttcacttttttattgtgaatttgttttctggaaaacttttaccaattttaattcacataagtagtgcatgagaaagtctactttctcacatgcttgckgataaatgttaacattcatttttatccttgccagtcagataagcaataaattaaatagttcttgttattttaatttgtattccccaaaggtatgttaaga

SEQ ID NO: 455356 - DNA, 201 bp, Homo sapiens
taccatttaaataattttaatagcaaaggtcaatataaggcatgctatcaccaagcactattctaagagctttatatacctcttgttacttgcaactaccrtgttttacaaataaaaaaaactggagattacagaggttaagtgacttaagtagcttacccaagatcacaagagcagtatataatggagttggtattcaaa

SEQ ID NO: 455357 - DNA, 201 bp, Homo sapiens
tatcctttgcccacttttttatggggttgaggctttcacttttttattgtgaatttgttttctggaaaacttttaccaattttaattcacataagtagtgyatgagaaagtctactttctcacatgcttgctgataaatgttaacattcatttttatccttgccagtcagataagcaataaattaaatagttcttgttatt

SEQ ID NO: 455358 - DNA, 201 bp, Homo sapiens
accacctggcacactataaatattatgtttacctgtgtccttcccataatatgcagaaatattatgcaaatattatgcaaacaatagtctgttttattcaytgtggtatgcccagtacctaaaacagtgcctaaaagtttttgaaattttcagtgacttttttttgcaatagagtaagctctatcttgatctgcttctaaa

SEQ ID NO: 455359 - DNA, 201 bp, Homo sapiens
gtattttgagatacttgcagcaataatactatcatgaaaatacctgtaatttttgctgatagcaaagtgacatgtactgctaatactactgtgatttttgsctacatccatatttgggggagttattaaattttagttagagtatattttaaaacatgtaatttcttttttctatccaaaggctccttgaaatctatccat

SEQ ID NO: 455360 - DNA, 201 bp, Homo sapiens
tgtttccataatttgcccactgatctttacttcttaccaagtggtccaagtgtattactacaaaggaattatgaagattttcccgtttttaacttcctgarttatgcaatgtagatagcaataaatgaccaattaagtcattcaattgttttcatggtaattcatgaaaacactattggaaacattactgagttataaaca

SEQ ID NO: 455361 - DNA, 201 bp, Homo sapiens
agccttttccaaattattttaataaggaaaaagctggctctgctgtttatactgtgacattcccttctcttaagatatattatgtacattttcattttctwaattaaacaccttttggggagcttaaagggaaacttgggttttaataggaagcacctaaattgtttatttgtgggggagacttgccagccagtatgtaga

SEQ ID NO: 455362 - DNA, 201 bp, Homo sapiens
aaactgtagtaatagaatcttaggagcatataatcatcctctagggaacacattttacaaattgaacctatcttgcaggtggaaataccataaagaaaatkatcattggagagattactggcacactgcattcattcacatgtcaaagtggaaaacattccaatttacttctataaaacatgtatctgagtcaacctgcca

SEQ ID NO: 455363 - DNA, 201 bp, Homo sapiens
acacacaatactggtaatactataatcaattgcagaccatacattaaaaaattttattctcatggaagcatgtaattcttgattaaaaagatatagttttkttgtgtttgaataattaagttttcagcattaataaaagagcagtgaatgtgccttaactaacaaaaataaattggatggaaataaaagacaaacttttca

SEQ ID NO: 455364 - DNA, 201 bp, Homo sapiens
atctcaacctacatttggaatggtcctagagaagtgttatttcctggaactaaatggagattggagacattcagtgtggctttctgtttgtaaaatccatygaggggataattcttactaattagctccctttggaaaagtaattgggagatttagtcataagcagcaaacacaggaaattcactgcaacttagaacctga

SEQ ID NO: 455365 - DNA, 201 bp, Homo sapiens
aaatctcaacctacatttggaatggtcctagagaagtgttatttcctggaactaaatggagattggagacattcagtgtggctttctgtttgtaaaatccwttgaggggataattcttactaattagctccctttggaaaagtaattgggagatttagtcataagcagcaaacacaggaaattcactgcaacttagaacct

SEQ ID NO: 455366 - DNA, 201 bp, Homo sapiens
tttttgtgcagcatctgctctctaaataatatgattagacctctaggacaatttatatggatcactaaactagccataaaatattatgaaattatgatgtrttattagttctgtccctttacccatataaacatttattacaagaaaaggatctggtggttatattggaccctgataatgctaacatgtaatagcattggg

SEQ ID NO: 455367 - DNA, 201 bp, Homo sapiens
aattaataaaatcagagtctagaaataggatcaggcatttttaaaaaaagtttttggttaattttattttacagaaaatcactgtcctaatgtggagaagmaattaagtcattgtctaaggcagcaaatagtttaattccttggtctaaaattagaaggtccagcctgtgtagaccaacatattcttgtcagccaacttca

SEQ ID NO: 455368 - DNA, 201 bp, Homo sapiens
aaagaatggctaggagatcagataacaataaaatgaaaatgccacaaaagaaaagagaaactgtcaaaatggacttcagaccacacaatcacagatggtgytgataaagaagaaaatgggcatccaaagagatcagcacagcagcccaaggagctagcaataaatgtgagaacatggaaaatgatgaaagtagaggtatat

SEQ ID NO: 455369 - DNA, 201 bp, Homo sapiens
tttgatcagtttgaaaaaaaaatatgcaatgaaatgaaaggaattgactagacgagagagtaccacataggaggccatgctgtatctataatgtctccaasaaggcagagatttgtgtctgttttattcagagacgtattccaaagtgcctggaagaaagcctaatacataatagctgtttgataaatattagctgagtga

SEQ ID NO: 455370 - DNA, 201 bp, Homo sapiens
ccctgtaaaacagaccaggcagtctggctccaaagtcctacactctattgaatgatcttaataagaaatgacaactagttttatggcctgatgcattcaawttcattctagaaatatttatccatgggcaacagaatgtctccccaatacagagataagaaaaatgatgcaaagtaaatgtattcctaaagagcaagacta

SEQ ID NO: 455371 - DNA, 201 bp, Homo sapiens
catctcactagaaatagaaaacctgtcaccttattcttaaaaccttagatcagccaggccagtggctgaaatagtgagggtagtgtctacaaagggtatakagtaggggtagcaaaataattatgtaccttgttctctccacatcttttagggaagagactctttgctctggaaaatgacttaataccattgggaggaaaa

SEQ ID NO: 455372 - DNA, 201 bp, Homo sapiens
ttgtattcattcatttattttccaaccagcttattctagttcagggttttgggtggctggagcctatccctgcagctcagggagcaaggtgggaactgacyctaataggacactattccatcacagggcacacacactcctacacactcactcagacggggatcattcagacatgtcaattcatgtaatgtgcacatcttt

SEQ ID NO: 455373 - DNA, 201 bp, Homo sapiens
ttcccaccaaagcctgttctaataatttaatggccatgaaaattggttcttttttagagtaaaatatctttcctggctcatttgaaagttgccacattcartgttgcatttttatctgaaattcggaaataactgaactttcctaagcgaatctcatctcaacagatttttagtataatatcaatgtcagagagatttgaa

SEQ ID NO: 455374 - DNA, 201 bp, Homo sapiens
gccctctatgcaggagatcttttcttttaagtttcccaccgtgcttcataataaaatcaaaagaaaaaggtacatccctcagaaagcattcatctcactakaaatagaaaacctgtcaccttattcttaaaaccttagatcagccaggccagtggctgaaatagtgagggtagtgtctacaaagggtatagagtaggggta

SEQ ID NO: 455375 - DNA, 201 bp, Homo sapiens
aaagaaaatttcaagtggaatgacctgtatatacagaatagagagatgcgtgggcctggcatatttaagaggataactcttggatagatgcttgaataaaytgatataatagattgaacaatatattataaagagaggagtatatattgtattaacagaggaatttgtataggagtatgtattcctgtagtggaggatttt

SEQ ID NO: 455376 - DNA, 201 bp, Homo sapiens
tgatgcactacacactgttctctgatatttctatgggtttactgactggtggagaggtaagaggtccactattaagctggagtcacctaatgtcccgaagrtgaaagagtttgtcttaggagcagtaacatttatacctagagctctcagagggctttctctttggagggaaaattgaatggtaaatacctggcagcaaca

SEQ ID NO: 455377 - DNA, 201 bp, Homo sapiens
ccttttgataagagctggcacagaggtcatttttatgtgccttattattaatcttaataatatgtagtaatattcctttatatgcttattgtgacacacasaaacttaaagcctttgtagctttaagttcagatgtctccacattcttttgtaaatccctgcagatttgtttcttgcttttaaatatcagcacctttctgc

SEQ ID NO: 455378 - DNA, 201 bp, Homo sapiens
tatttatttatttgttagaagttggacacttaaaagggtgacagcctttgcatacgactacattaaaacaatttaagttaatttaagtaaaggaaagaggyattcaagcatcaactgttatttatactcaaattatctgacagctttatgttgtgacatttggtctttgcaaaacactcaaaatataagtcattgctctgt

SEQ ID NO: 455379 - DNA, 201 bp, Homo sapiens
aataatgataatgatctgttgactgttagcttctgggtgctctaagccttttttagcttttaacacaaattacaggtaggcctcccagccacctgtccctytaggaaagtaaacagctctctagaaagccttctgatatgtttttttaactcattctagagtagcactttttaaactttaatgtgcagttgaattgctcca

SEQ ID NO: 455380 - DNA, 201 bp, Homo sapiens
gctattacttttttaaaattttgttaatcatttaaaatttctttgggttcctgctgttttatttctttttaattttcagatgttcattttaatcttacctwtagggagccatatatacttgaatctctctgaagtgctaattagaaggggaggagtttttttggttgttttgtgtaagtgtattctggtttctagattatt

SEQ ID NO: 455381 - DNA, 201 bp, Homo sapiens
aacactcagatcttgtgagatctcactcactatcacaagaagagcattggggaaaccgcccccatgattcagttacctccacctggcctttcccttgacamgtggggattatgggtattatggggattataattctgatgagatttgggtgggaacacaaagcctaaccacatcacctatttatcttttgttgtttgcagt

SEQ ID NO: 455382 - DNA, 201 bp, Homo sapiens
atgggataattttatattggaaaatttgccttaaagaaaatataactgggacagagaataaaggtagatcagcatgggggtgggacacagaagactatccaaaggagggaacattttattacaacctcaaatggaaattttggaggaagaatatccaatgcataagaagcaacagatataaaagccctgcattgggaacca

SEQ ID NO: 455383 - DNA, 201 bp, Homo sapiens
ttcacaaggtggcaggaagaagtgctgagccaagggggaaaaaacccttataaaacactcagatcttgtgagatctcactcactatcacaagaagagcatkggggaaaccgcccccatgattcagttacctccacctggcctttcccttgacaagtggggattatgggtattatggggattataattctgatgagatttgg

SEQ ID NO: 455384 - DNA, 201 bp, Homo sapiens
tacagatatattcttatcaatttatttttaaattttaagtattagctaaacagtcttattaagagccattttcatataaaatagtacattgttatattttmttttctgttatgatattgtaaaatgtggctcattcttagtgatattaaaacaaacaagtaacacaatgtttgttagacgtgcatttttgtctaatctatt

SEQ ID NO: 455385 - DNA, 201 bp, Homo sapiens
tttgagaaccactcttgtaatacatggtctttgacttctttgctcttattctctcccttgtatctttttcttgcttctttattctcttttttttaccatgttttttggatttcatatgcaaacacatacagttgctactactctacattattttatttaattcttgcaaaacatcactgagagaatgattattgtgcctgt

SEQ ID NO: 455386 - DNA, 201 bp, Homo sapiens
aacacaatgtttgttagacgtgcatttttgtctaatctattttacaaatcttttagcaatataattaaaaatatttgaaatcagggaattcaaaggaagtraaggaatgagaaaagcctagtggaataaagatattataaataagatattaaaatatagatttaatttttaaatgggagcatctggcatgagtgaaataaa

SEQ ID NO: 455387 - DNA, 201 bp, Homo sapiens
ttcccaggtgaggcaatgcctcgccctgcttcagctcgcgcacggtgcgtgcacccactggcctgcgcccactgtctggcactccctagtgggatgaaccyggtacctcagatggaaatgcagaaatcacccgtcttctgcgtcgctcacgctgggagctgtagaccggagctgttcctattcggccatcttggctcctcc

SEQ ID NO: 455388 - DNA, 201 bp, Homo sapiens
aatccaggaccaacacagactctaggcaaattatgttgataagatgagtgtaggttggcaggaggggtgagcatattgccaggtgcttactgaggtgtggrgcccctcttcatccctgacagtggcagtggaagcttggctaacagcaatctcaccagcagctgaaagtcttgagggcattgcttcccacagctgagtgag

SEQ ID NO: 455389 - DNA, 201 bp, Homo sapiens
tgaatggagaacccataaataaagcaattcaagatacacatgaactcataaaacataggtcctaatttgagtaaagaaagaaaattttaatactgactggwtatttgatgacactgagaaactattctaactgtgcagctatgaaaaggaatgagatcatgtccttttcagggacgtggatgaagctggaagccattatcc

SEQ ID NO: 455390 - DNA, 201 bp, Homo sapiens
aatgtgaaatacagaatggtttcagtctagttcactgtagacaagttcccacagcatgcaaattattaatgcccttgtagacagtgttaggactctaaatsgttttgaaactgaatgccagacctccctagagatgaaccctatgacaataagtcagcttcactggagacttactgtgaaaaaaaaaccgtcgcacttttt

SEQ ID NO: 455391 - DNA, 201 bp, Homo sapiens
cagctgctctagtactaatgtgaaatacagaatggtttcagtctagttcactgtagacaagttcccacagcatgcaaattattaatgcccttgtagacagygttaggactctaaatcgttttgaaactgaatgccagacctccctagagatgaaccctatgacaataagtcagcttcactggagacttactgtgaaaaaaa

SEQ ID NO: 455392 - DNA, 201 bp, Homo sapiens
agtcagaggtgtgcatggatttttgagaacagaaaagaggatctaaactagactgggaaacaaaagggaaggctttttgaaagaaatggtgtgcttaaatkgggtgattttaaaggacaaagacagactagcatggcataattactaggtagaagaatcctctaaccaagtacatccaggtatccaatatatctgttagat

SEQ ID NO: 455393 - DNA, 201 bp, Homo sapiens
acagcaactgtgggaaacataatctatgccatatccatctgctacaaaaacagtgttgctttcagctattttttgagccgtggtatgggtttgatactacsccccctaaccttctgtacccattgccaaaaacctggatttgttgcctccctgaaagtttactcatgacatggggcttttgtgctatgactgggcattgga

SEQ ID NO: 455394 - DNA, 201 bp, Homo sapiens
ggcaggcattcaaaaggtactgtccatggttctcctttaatagtccttaccattttgtgtcccatgctggaattgcgcagttgagatttgttttttttgtkttgttttttgttttttatctttaatgctgacggcaaatttcctgttacattgcatcttatattgatttaaagaagattttttagggaattcaaagtcctc

SEQ ID NO: 455395 - DNA, 201 bp, Homo sapiens
aaatacatatatgagtttgaaagcaatatttttctgcaagttcattttcatatagcgttattaagtttaataccattcagttaataattgtagatccatgrtacgtatactaatatggtcttgttataatgtaaatagtacagtttaaacagcaaaatttcacactgttttaatataaaaaatttcctagaaccaattacc

SEQ ID NO: 455396 - DNA, 201 bp, Homo sapiens
tactaaataaataaaacaatgaattagactcagcggcagataattgacatatgtaaaaaaagggataacaagacaaatgattgtagatcattttgatgtasatattgattgaaatagtagatcatggggtatatggagaactagaaagagaaggaccaagaatgcgaatgtaaagaagagtaagggtagaaattgatagag

SEQ ID NO: 455397 - DNA, 201 bp, Homo sapiens
agatagtgtactatttaatctgtgtagtctctttgcttatagttaagtgccttgtacatgttaggcatttaataaattcatattgataaatttaatgaatrgatgctaaatacttaactaaataaagcatggaggttagctgcaatattttgtttattagattatagtctcaaataaaacactaaaattatccacaaatga

SEQ ID NO: 455398 - DNA, 201 bp, Homo sapiens
tatatttagtattcctgataatctccaaaagaacaggcaagaaataagatttagaggtgggcataacacttcttttctaggttaaaaaattgatttttttwaaaaagttgatgtttattttaaatacattcatatattctttttgaaagtttgtgccctatgataactatgtcagagcacaaattaaaattttgacaaaat

SEQ ID NO: 455399 - DNA, 201 bp, Homo sapiens
tggttaggtttgtcaaagatcagatcgttgtaggtatatggtcttatttctaggttctctattctgttgcattggtctatgtatctgttcttgtacaagtrccatgctgtttttattactgtagtcctgttgtatagttcaaagtcaggtaacatgatgcccccagctttgttcttttagcttaggattgtcttgaccatt

SEQ ID NO: 455400 - DNA, 201 bp, Homo sapiens
gttaggcatttaataaattcatattgataaatttaatgaatggatgctaaatacttaactaaataaagcatggaggttagctgcaatattttgtttattarattatagtctcaaataaaacactaaaattatccacaaatgacttaaaactcactaaaccaaaaagaaatttatctgtaatgtccccactgagttgttgta

SEQ ID NO: 455401 - DNA, 201 bp, Homo sapiens
aagccaaaatatttgttagatgctaagaggtataagaatgggaaaaaggaaactattcctctgaaattgttatttttagtctaaattggcatctgatccartggattttgagagtcttttcttcccacaatcttattcatttcaacctaaagctgatatactacaaggattcagaaatgattcaattctcctaagagattt

SEQ ID NO: 455402 - DNA, 201 bp, Homo sapiens
gactcacagttcagcatggctggggaggcctcaggaaacacaatcatggtggaaggcgaaggggaagcaaggcaccttcttcacaaggtggcaggaagaartgctgagccaagggggaaaaaacccttataaaacactcagatcttgtgagatctcactcactatcacaagaagagcattggggaaaccgcccccatgatt

SEQ ID NO: 455403 - DNA, 201 bp, Homo sapiens
tttaaaactaaagctttccattcaaactagtatttgtacatttttcaaaaataatttaaaaagggcttgaaatacaccctttgccttccctagtccctgcyccaccctttgccttccctagtccctctcctcagaagtaaacactttgaactcttaggttttagttttctgatttgttatctctaacaatgtgctggtaaa

SEQ ID NO: 455404 - DNA, 201 bp, Homo sapiens
agaaatgcaagaataaataggactaatgctcattttcttttttttttaatcacttgcaagtgacatttgtttcatctaggcaggaaagcaggatcttatakgcagggtaggtgtaagggctgattttaggtcaagcttttcaatttattatgcaataaaatatagcaataaaaatatgcatctttatattttccagtaaat

SEQ ID NO: 455405 - DNA, 201 bp, Homo sapiens
tttccatctgtaaaacaggaataataaaaccaatcacaaagggttactactatattaactggatgaaactatgtgaaagcaggtagcaaaatgaacagtgyttctacatacattatctctgcagtaaaactatgatgtgtaaactcagtaaagaaaaaaaagcatgagtgatcataaaagtctaattattcattgtcatca

SEQ ID NO: 455406 - DNA, 201 bp, Homo sapiens
actcaattacctcaattaaaagaactgtctttttttctgagattatatcctttttatatttggggaattatatgttattttatttatgaaaaagcatagatttttttttaaaatacctcaatgaaataaaagttgagcaacctctgtcaatccctccaactttttttcctgaaatttgaaagtcttggaatgcatattcct

SEQ ID NO: 455407 - DNA, 201 bp, Homo sapiens
gggaggcattatctctatcttccaagatcttctctatataagcatccttgaaaagctggtcataaacaaaaaagtagttatggcctctgctcacaagatayacagaaatatgagagaccaatgaagactaatctctcaaaacttgtggccggacaaataaaaatgtttatatgagtaaatttaaacgtttgctttacattg

SEQ ID NO: 455408 - DNA, 201 bp, Homo sapiens
tgagtgagaacagagatagggaaaggcttaaaaataatagtccaggtagaaataacaaggctattagacgtggaaaggcaaagatggtgacagatttacaraatttaggaggtaaaatatacagaacttgatgagagtagatgaggtggggaagttaaagatccacaggtaaggaaggggattagctgagaatgaatctaa

SEQ ID NO: 455409 - DNA, 201 bp, Homo sapiens
tatataaatttttattttactgtattcttttctgcattgtcactcaatgtatttccaaattagagaaggacatttcttcttgtctcacactttgaaaatgrttttatgatagtccaacattttagccattcatagtcatcttgtagtcatatgtctaaaggagctagttatctccttccatctctattaagtaaaaatcct

SEQ ID NO: 455410 - DNA, 201 bp, Homo sapiens
aagaatctttcacaccttctctttcttttcaagtatatttcttctcaaatcttctaatctattccccttctctgaggtgttgattggaagaggatccagayaaggtagtgatagattacagaacacagcagctggggccattggtgattttgctccctgaagtcagattactgaaaggcacattctcatagctgtctccct

SEQ ID NO: 455411 - DNA, 201 bp, Homo sapiens
agggagtgaggtggaagacccttatttctccagaaataagagaagaatcaggagttaggagactccatctctgcttcagatctgtccatcccatcacatgkgtgattaccaggcaaggttcttcagtgtccttagattggagagagaatatctgcactgattatatatttagttaattgctacatacatgtattgaaagaa

SEQ ID NO: 455412 - DNA, 201 bp, Homo sapiens
tttgtatactacatactcccttttgttggagagaacattgtggttttattttgtctattttgtttttaaatagggataaaaataattaaaaggaaagaagmacaagtatcaccatttggtcaaaaacattacataggccgggtgcggtggctcacgcctgtaatcccagcactttgggaggccgaggcgggcggatcacga

SEQ ID NO: 455413 - DNA, 201 bp, Homo sapiens
gtgttttcaaaggaaggaatgaatgaatgaacagagggaacacgtattgaattttcaaggaagtataaatcactatgaaactgagtattgagagaagtttytaaagacactataagacacaaaaagatttataggatttccataattagagaagaaaagacaagggatttgaggtatgaacaagggtatggaggtgaaaat

SEQ ID NO: 455414 - DNA, 201 bp, Homo sapiens
gacagtaacacagtggtttctgacactggcaatgatttttaaatctttattctcatgaggtaaagtactgaaatcatgaatttgcttttaatcactgttcmatctttgttcaataatatagaacacaggaaagttggtctatgccacatgatgaatgcagtctatctcttgcattacacattaagaagcagagcaggtagc

SEQ ID NO: 455415 - DNA, 201 bp, Homo sapiens
tcaacaaacaccgcttttcctaatgttttggcataatgcaccttaaatcaccacagcaaacgcccaggaaaaccccaatgccagcagaaactcacagagarttaaagacagtaacacagtggtttctgacactggcaatgatttttaaatctttattctcatgaggtaaagtactgaaatcatgaatttgcttttaatcac

SEQ ID NO: 455416 - DNA, 201 bp, Homo sapiens
aacagttgtcccaccttttatttttttctttttcacttgatagcaaattcattcttcttagattgactcttgtctttctcttacacctcatgtctaattcwtcagtaaatcttgtagggccctttctttctctcttccttccttccttccttccttccttccttccttccttccttccttccttccttccttccttccttc

SEQ ID NO: 455417 - DNA, 201 bp, Homo sapiens
ggccttaaaaaagacatatacattcctaataaacatacattcactcatgaattcacacaaaacagtcaaagatcctgactttagagagtttttttgttgtktgtttttattgagacaggctctcactccttcacccaggctggagtacagtggcatgatcatggctcactggagcttcaaactcctgggctcaagaaatcc

SEQ ID NO: 455418 - DNA, 201 bp, Homo sapiens
attcttaagttttagagtttgatgatttgatgtatgtatacattgggaaatgattaccacaaccaagctaactaacacacccatcacctcacatggttactttttttttttttttggtaagaacacttaagatctactcgctgagcaaatttctagtatacagtatgttgttattaatcatagtcaccatgctgtacatca

SEQ ID NO: 455419 - DNA, 201 bp, Homo sapiens
gcactcacacacacatgacagtattgtgaatttataattacccggaaatgctcaccccgaagatcttaaactccatatatttgtatcaaagaaatgttcaraatggtggccggggcggtggctcacgcttgtaatcctagcactttgggaggccgagacgggcggattgcctgagctcaggagttcgagaccagcctgggc

SEQ ID NO: 455420 - DNA, 201 bp, Homo sapiens
tgtgatttgaattggatttggattaaatatagcatgattatggtttggattggatggacagttggactggattaaatacagcataaccagatgataagaaytgaaaatagagtatatgcctactcaaggaagttcctgactcacccctctcctatacatcatatcctacccaacataaatacatgggtgtcctggaacatg

SEQ ID NO: 455421 - DNA, 201 bp, Homo sapiens
tttaagaatcaaagtttaaaattataaatatgtcaaaaattgtgacagtctgagatcttatatgacttgcaatctaccaagttagcctgccacagtttcayagatgctaacagaagactcaagactcctgggtcagaaacaagagtttattatgcatagcacaggcagcatgagccttatgttttcaccagttccccttgt

SEQ ID NO: 455422 - DNA, 201 bp, Homo sapiens
ctattccttgaatgctggaattgaaggttatataaaagcacttattactaccaaattgcaaagaacaagcagagcaagtaagttgagagagagagagagasatctttcttggagaacatttttggaaaatgactgtgggcaaagcaatgtgaaaatatttagggagacagaagactacgaagataaaatacctatatcaag

SEQ ID NO: 455423 - DNA, 201 bp, Homo sapiens
agctcaggagttcaagtctatcctaagcaaaatagtaaaaccccatctctaaaaatacatatatattttttaacatacagatatgctacaaatttaagacrgtttattaatttatatgtacaaaagcaacctacatatttaagataatataatcagtaattataatataatataatcagtctgatatgaagttttgtctta

SEQ ID NO: 455424 - DNA, 201 bp, Homo sapiens
taaaaatgttttcattgcatatcccgatgatctgcttttcttctctccatgaaactcagatactagttttctttacaacacctggattgtttcttcctctmctgctgttccttattttgtttttctattctggtgtcttgatatctccttttaacaaattccataccattggccttcctaacttgtgaacatttctaatac

SEQ ID NO: 455425 - DNA, 201 bp, Homo sapiens
tatattcatttgggtatatacccagtaatgggattgctgggtgaaatggtagttctgcttttaggtctctgaggaaatcaccaaactcttttccacaatgrttgaacaaatttacactcccaccaccaacaatgtataaacattcctttttcttcacaaccatgccagcatctgttattttttgactttttaataatagcc

SEQ ID NO: 455426 - DNA, 201 bp, Homo sapiens
caaaggtcttaagaggttctaaaataaccttcaggcattttatttagaattacattttgtattggagaatctgaggaaaatttaaatgtcttttgtaattwtgcatctgcattcttaggaatatgttatgtctatacagaaacttgttcaagttgtcttcagtcaggtgttaaggtattcttcatatagctcctactaatt

SEQ ID NO: 455427 - DNA, 201 bp, Homo sapiens
ctgttatcttgaatttcattgaacttccttaaaacagccattttgaattctctgtctgaaaagtcacaaagctctgtcactccaggattggtcactggtgmcttttagtctgtttggtgaggtcatgttttcctggatggtcttaatacttgtggatgtttgtcaatgtttaggcattgaacagttaggtacttattgtag

SEQ ID NO: 455428 - DNA, 201 bp, Homo sapiens
tctgagtaatttataaagaatagaaatttatttcctcacagttctggatgctgggaagtccaatatcaaggtgccagcaggttgagagtctggtgagggcyaggtttctgcttccaagatggtactttgactgctgttctatgtcctcacatgacagaaaagatggaaggtcaaaaggggccaaactcattccatcaagct

SEQ ID NO: 455429 - DNA, 201 bp, Homo sapiens
gttagcacattgtatatacccttgaagataaattcaggtaaaactcaaagtcaaattttgaaatcgctaaggttttctatacccttaaattttgcccaagratgtggttatttctgtttctgttagtcactatatagaatttctaaaaaaaaaattaatttgagcaaaagttattataagaagacataaaaagtaaagatt

SEQ ID NO: 455430 - DNA, 201 bp, Homo sapiens
tagggatgatgttgaatggaaataacagtagtaggcatttttggatcgttatcaatctcggagagaaaacattcaacactataccactatactactatatatttataattaacttagatcagattaaggaaactccatacgttcctgggatatgcataattttatataaaattgcttatacatatgtaaaattataattat

SEQ ID NO: 455431 - DNA, 201 bp, Homo sapiens
tgctgcattctcatgttgctaattggaattttgatgaatataatataaaagcaaaacaagagcaaagtgtttccattagttcactacccatgtttctgcaycttaatcagagcgttgttaatatttaaatatgcgtttgaagccccaagtgtatagggaggcatggaagtttcattaataactataatttatataaaagaa

SEQ ID NO: 455432 - DNA, 201 bp, Homo sapiens
ttaaacatttggaaagatagtatgaaataactatttggaaactaataaagagatgactctgttattactgaatatcaaaggatggcaaatttgtgaataartccccagatttgtctgcaacagtcacagtaaaaatttagaattaacaacagttaaatctcaagaggataccacattaagtgcaactgttaaatattttct

SEQ ID NO: 455433 - DNA, 201 bp, Homo sapiens
gattgcatatgttggattgataacttaggagaattttcctaaatttcttcatatatagatttctttgtattcaaccatcaccaaagccacagaaatatgtyttagaaatggaggaaaagaaagaatgataataaaagcagtctctactacttggtgtctcttctaatctctttgtttccataatttgcccactgatcttta

SEQ ID NO: 455434 - DNA, 201 bp, Homo sapiens
aatgtattagaacagataaatgtattttgtctaagtgggaactatttaaatattaaataaatattttcaaccttaattgtattccacagtctatgggggcrttgagaataataagtaccataaagtgtaaagattgggggacaagaaaagctctaaaatatattaggtaatttgtttgtattaattaacctatttgctatt

SEQ ID NO: 455435 - DNA, 201 bp, Homo sapiens
taattcaagtcaaatcatctctttctttctccatatttttgattgagagtcatcaatttttatcccattcagatatatagacagtaatttaaaaactggtrgccctcagatttgtacattccaagagataagacctatataacagcataaaattaaactactatttgggtgagtaaagagcagtgagtcattgcaagactt

SEQ ID NO: 455436 - DNA, 201 bp, Homo sapiens
cctcttcttcccagctgctaagtgttggaatttcctaggaaccagtcttcaggcctcttctcttatgtatttatattcttttcctaaatggtcttattcartatggttttttaaatgtcatctttatatgctggtgacttccaaattaatatattcaagttagacctttcccttttgctccagatcatttatacaaagact

SEQ ID NO: 455437 - DNA, 201 bp, Homo sapiens
atccatttaaagtatgtttcaaccattccttctatccttgtgtttctcattcaagagtccacatcttagagaagcatctgttgtccaggcttatgccatayctcctccttctgctggtgtcagagctggtgaggggcaaggcatggctggagtcacagcatgagatgagatatccacaggcagccacctggatttactatt

SEQ ID NO: 455438 - DNA, 201 bp, Homo sapiens
tgttataagaacaaaccacaaaaatgcaaccaatgtaagaactataaacttgctttttatattattcggcaattattatcaatgcttttatctattgactsctgaatatttggctctggattaatttttgcacactctctatattacatcaaatactactgtgatgttttcatgctagacacatttcagaggaaagtgcag

SEQ ID NO: 455439 - DNA, 201 bp, Homo sapiens
ttttgtaatttcaagcatgttatgtaaatgaaattacacagtatgtaaccttttgagactggctttttttcactcagtggaattctctggagattcatctmagttgtttcatggctgagtaataatccatgtagtccaaagtagtccatagtgcagtggactgaattttgtccctcccaaaattcatatgttgaagcttta

SEQ ID NO: 455440 - DNA, 201 bp, Homo sapiens
aatgtgaaggctcatggatctgctttcaggatgaataataggaaatttcttctcaagatgtgcattacaacattctctctctctgtagccttgttctgtamacagttatctgctaattcaagtcaaatcatctctttctttctccatatttttgattgagagtcatcaatttttatcccattcagatatatagacagtaat

SEQ ID NO: 455441 - DNA, 201 bp, Homo sapiens
gaaacagtcattattttcagggccccattctgttgactaacaattctacacagtcctgaggaaattatgccactagtttgtgacccctcagcagcagatcycgtgtgacgctgctaagcatacattgaaatacaaacactgcttatataatacttctggatcaacaatgcatataaaattcaaaatctccattttcctctc

SEQ ID NO: 455442 - DNA, 201 bp, Homo sapiens
tattattatctagccctttaaggattgtttaccaatccttgttttatgccatcagtttagtggctttattaccacccgatgtaatgagtgagaatagtggyagagaaggtatttagaggtattgacaagcattctgcataggagtggcagatgcatcctgtgctattttcagtagacttatttctaagaataaaagaatgg

SEQ ID NO: 455443 - DNA, 201 bp, Homo sapiens
tgatgaaagatctgttacatttttaagtgtgcacatgcggaatatgttcccaaatgtgaaggctcatggatctgctttcaggatgaataataggaaatttyttctcaagatgtgcattacaacattctctctctctgtagccttgttctgtaaacagttatctgctaattcaagtcaaatcatctctttctttctccatat

SEQ ID NO: 455444 - DNA, 201 bp, Homo sapiens
aaaaatactagtgaagcataaactctttgaagaaaacaatgtcttatccaaagaatgaactgacccacaagaagtacatactagaaaatgttttaaaactrgaggcacttgaacggaaatagcaccggacagggaaccatctcatgggaagttgagtcccaattctgacggtaaatttttttcttgactttgaacaaggct

SEQ ID NO: 455445 - DNA, 201 bp, Homo sapiens
catatcagtgatatattttgaatttacccctttgcatgccccattctagctgcactgacattattttcattgtatgaaaaagaaagtccatttcatctggratactctttccccagttctttgattttcccactccagtactttattctgatcctaaacaaatgtcatcttttaggggcatttccttataacactatctaa

SEQ ID NO: 455446 - DNA, 201 bp, Homo sapiens
tggctttattaccacccgatgtaatgagtgagaatagtggtagagaaggtatttagaggtattgacaagcattctgcataggagtggcagatgcatcctgwgctattttcagtagacttatttctaagaataaaagaatggcgatcaagtcgtgaatagagccatctggtaagaaaaggcaagtccaacagtcagtgaagt

SEQ ID NO: 455447 - DNA, 201 bp, Homo sapiens
gtggtagactgagaacaggtttttaactacactaacttgtagtcaaactactactctgcttcttgcttaccctgcaactcacctgaataaattactcactktccctgaaccttaggcatgaaatcagaatagcacttacctcagagactgctgtaagaatataatgaggaaatgactaacctggtagttttctctcttcac

SEQ ID NO: 455448 - DNA, 201 bp, Homo sapiens
atagctggtaaaacattatttctggatctgtctataaggtattcccagaagagattagcattttaattggcgtactgggtaaagattacctcacccatacrgataggcatcatccaatctgttggggaactgaatagaacaaaaaggcagagaaagggtaagtttgctccctgtttaagatgggaaattcatgttctcttg

SEQ ID NO: 455449 - DNA, 201 bp, Homo sapiens
gctatgagaacaggcttcagttctgcccacttagcagagtaagcatgtccattttcagtactgcatagcaggtgctgagcttgaatgacctaagcaaactmcaacgaacactttcagatttcaggtcagcaaagtcatcaccatttgtttatggaacttctgcatctcacggccctttagagtcagcacttagcttcagga

SEQ ID NO: 455450 - DNA, 201 bp, Homo sapiens
gttaaagttgaataatagaacaaaatatattcttgtattttcattctattgctcattagtggagaaaacagaagaaaaatgagttgtatttatttctttcyttttacttttttgaacgtcacattattctttaatatgagctctggaaattgattctactgtatagagtaggccacaaagtttaaaccaatctataaggga

SEQ ID NO: 455451 - DNA, 201 bp, Homo sapiens
atggaacttctgcatctcacggccctttagagtcagcacttagcttcaggaggtaaagtcttctaaaggaagaatttgattttgatgtgcatgcttgttgrcccctgcacatattactagttgctgaattcgaagtgaccctcctcaagataggaatgtcaggtcattcatagatcaggctttcggtttcagttaagagtc

SEQ ID NO: 455452 - DNA, 201 bp, Homo sapiens
aaaatgaatttagaactctaaatgtgtgatttttatgtgtgaaaagattcttacttaggcaaactatattctattatctttaaaatagactgcattatcarttcaaatgtataactgatcaaattagaagagagtgatcaaaaatagtcatataggcaactcctaattaatattagatttaactttctctctacttcagtt

SEQ ID NO: 455453 - DNA, 201 bp, Homo sapiens
gtactaacagagccctaataatgcacaccaccaatttttcttaaattgtgtttatcataattttaaaagcttttaattctcagggtagttttaggtttacrgcaaaattgaaaggaaggtatagagattttccgtataccatttgcccctaaacatgtatagcctcccttattattaacatcccccatcaaaatggtatat

SEQ ID NO: 455454 - DNA, 201 bp, Homo sapiens
actctaaatcgttttgaaactgaatgccagacctccctagagatgaaccctatgacaataagtcagcttcactggagacttactgtgaaaaaaaaaccgtygcactttttgtgcagcatctgctctctaaataatatgattagacctctaggacaatttatatggatcactaaactagccataaaatattatgaaattatg

SEQ ID NO: 455455 - DNA, 201 bp, Homo sapiens
caaactgtcttccaacataattgtactattttgcatttccaccagccatgaatgagtgtctagtgctttaaattctcatcagcatttggttttgtcagagtttttttttttattttggccattctaatagtgtgtagtgatagctcattattgttttaatttgcatttccctgatgatatacgatgtggagcatcatataa

SEQ ID NO: 455456 - DNA, 201 bp, Homo sapiens
gtagagatggagtttataggcatgagccaccatgcccggcacagagaatcattttctgaaacaccaaagctaagttaggagcttcttttgtacttactgcrtaacactctgcactttgatttatggcacccaatgcatgtataattaaatggttcagcttcagcatctatctctgaaattgtggacatgcaatttccagga

SEQ ID NO: 455457 - DNA, 201 bp, Homo sapiens
cccaaaccccttaaacggaaggagttataagtgaactagaatacacataggaagtcatgctgcattctcatgttgctaattggaattttgatgaatataayataaaagcaaaacaagagcaaagtgtttccattagttcactacccatgtttctgcaccttaatcagagcgttgttaatatttaaatatgcgtttgaagcc

SEQ ID NO: 455458 - DNA, 201 bp, Homo sapiens
tgtactaaatttcctccagacatagctggcatatacagggacaaaaacttttgacctggagctcattagtgcaatgaagcattcaagtgaactagcaggtrcaagcctgaaacaaacaaacaaaagaaaaacatcaattgtttgattaattgtaaatgcggaagttgagggtagggaagtaaaatttcaacccatcaagga

SEQ ID NO: 455459 - DNA, 201 bp, Homo sapiens
catcctctgtgatttcttccttccttccttgtgtctattgattctttcatttactataatcagcaaacagcaggcacagaccatggccctaaggaacttayagaagttaactcatagaaggccaatatgttgggaaaaatgtgaataagtatataaatatcctatcattgcataattagtatgaatgcagattaagtttga

SEQ ID NO: 455460 - DNA, 201 bp, Homo sapiens
tattgaatgtttctgtcactcagaaagtgccattattcctgtttttattattagaagcacagacagtttgcttggcctgaaagtttatataaatggataakgtagtatttacacatttgtgtctttcttctctcaacatttaaggtacattcttattttcatgtgtcaataattttgcttgtttgtcttttaatttatatt

SEQ ID NO: 455461 - DNA, 201 bp, Homo sapiens
acattttagggatatagtagttttatgtagcaattatattgatatatgatatctttttcgtataaataagctactaaaacataaatttaagattctgatawaattagaagatattaatcaggtagatgtgtgattatgaacaagaaaaacttgtataaaaatattctgaacacaagtttttgaacttacttgtagtaatat

SEQ ID NO: 455462 - DNA, 201 bp, Homo sapiens
atactgacctctgaatcatccctgacatcttcatgagggaaggtttcactgattttacatgccaacggctcattaggaatatagcataaggaagataaatyacaaagtcataaagttgagcaaggtaagtaaatgctgcagcaaactaaatgcaagtcccccaatttattgttttctgtaccttcttcaagtaaactaagt

SEQ ID NO: 455463 - DNA, 201 bp, Homo sapiens
aagaagccattgttttcattgttattaatgtagacttgaaattgatattatatagttagtttctaacttgcaagccacaagataaagatttaggctacttwaagcaaaaagtaatttgctgaatgtatgctggactcattaagaggagtctcaagaattaaacctcgaaagccaaagggagcataactgctctggaagact

SEQ ID NO: 455464 - DNA, 201 bp, Homo sapiens
ccatcttaacttatttttattgtttcacctaagctgtgttttgtggtttcgaaagtgtctagcatgacctgtgaatctattacagttcaaaatcaattctrttcctgtttccatagttcacattcatttccgtgagtattagggtcttcataaaacagcagttttttctgagtgttgatcctagctgattgaacgtcttca

SEQ ID NO: 455465 - DNA, 201 bp, Homo sapiens
tgctgcatttaatttcctgttgttattttaaaatcacatcagttgaagaatatgaatgtctacacattttgaatcacattccaatttattttctttgcgartgagcagaattatatttcctgtgagtcatctcttcatatagggagtataccctctgggtggcatttattgctggtgtgtcaatcaccttcttattttatc

SEQ ID NO: 455466 - DNA, 201 bp, Homo sapiens
tcccttttgggcgttcttgttctttcttgcattcttttgtgattgtttccaaaccaatgacttcttggtaactataataaaggtttatattttacttgatmaaatgtaaatttaaatagtgttttttagaaataacctactgtggggccaggcgcggtggctcacgcctgtaatcccaacactttgggaagccgaggtggg

SEQ ID NO: 455467 - DNA, 201 bp, Homo sapiens
ttttagatgatccttacatttatatttttttgctcaaaactctcagttcagtattttaacattgtattggtcatctttgcctgggttcctacaatttaatrttttcagattacctacatagaggctccttggtggtctagtggttaggattcggctctctcaaataacctgtgtattcccagtctcagtgattggcctgat

SEQ ID NO: 455468 - DNA, 201 bp, Homo sapiens
accacctccaccatgtaatctctcttcgtaggaatctttgtcttctttgttcactgttgaatcccaagtggtgaaaactctgcctgacacattgtaggcayttaataaatatttatggaatgaatgaattaatgaaaactatgaactatctttttatctcattaccctgaaatgcactagttacatactctcctatactaa

SEQ ID NO: 455469 - DNA, 201 bp, Homo sapiens
ttattgagttgatagaaccaatattatggaaacaaactggcaaaacttttcttcccttttgggcgttcttgttctttcttgcattcttttgtgattgtttycaaaccaatgacttcttggtaactataataaaggtttatattttacttgataaaatgtaaatttaaatagtgttttttagaaataacctactgtggggcc

SEQ ID NO: 455470 - DNA, 201 bp, Homo sapiens
gtatatgatagcacaacagggtgaatatggccagcaataattcattgtatatttaaaaatctaaaagagtagaattggaatattcctaacacgaagaaacrataaatgctcgaggtgatggatacccaattaccacaatgtgattgttacatattgtatgccggtatcagaatatcatatgtatcccatgaatatattcac

SEQ ID NO: 455471 - DNA, 201 bp, Homo sapiens
attactttttaaagcaagctagcaaattggctgtactggttactgggagagagcatcaatgagaaaagaaatagattagcactgagtattgagaaacctamacatttaacaggttattgttggcagacgagcattcagtggagattgtaaagtggttagaaatgtatgaggatgaacaggagagggtaaggagggtacttc

SEQ ID NO: 455472 - DNA, 201 bp, Homo sapiens
tcatgctctctcgctacaccagaattctgcttatgtggcatcataaaggctgtatgataatgaggcaacaaggaaagactgataggcatacatattatacrtatcttctttgcttaaattcatgtttcattgtcccatcagatttcacttacaaaacccaagctcaaacataaaattattaaaattttaagacagaaataa

SEQ ID NO: 455473 - DNA, 201 bp, Homo sapiens
gcagccttttccaaattattttaataaggaaaaagctggctctgctgtttatactgtgacattcccttctcttaagatatattatgtacattttcattttyttaattaaacaccttttggggagcttaaagggaaacttgggttttaataggaagcacctaaattgtttatttgtgggggagacttgccagccagtatgta

SEQ ID NO: 455474 - DNA, 201 bp, Homo sapiens
gattactttttaaagcaagctagcaaattggctgtactggttactgggagagagcatcaatgagaaaagaaatagattagcactgagtattgagaaacctmcacatttaacaggttattgttggcagacgagcattcagtggagattgtaaagtggttagaaatgtatgaggatgaacaggagagggtaaggagggtactt

SEQ ID NO: 455475 - DNA, 201 bp, Homo sapiens
aaaagtatgtccatgaactaatccctggaacatgtaaatgtgatcaaatagggaaaagatatctttgcagatataattgtaaagaatttcaagatgagatygttatggaatatctgagtgggctccaaatctaatggcaagtatctttattagagaaagacatacggggatttaaaacagaaaaggaagaggagacagcca

SEQ ID NO: 455476 - DNA, 201 bp, Homo sapiens
aaaaaaaatgaggcagggattactttttaaagcaagctagcaaattggctgtactggttactgggagagagcatcaatgagaaaagaaatagattagcacwgagtattgagaaacctacacatttaacaggttattgttggcagacgagcattcagtggagattgtaaagtggttagaaatgtatgaggatgaacaggaga

SEQ ID NO: 455477 - DNA, 201 bp, Homo sapiens
atagagagctgaagcagcgaatactcttcatgagaagttttatcattttacatttatccttgatatgtgccttttaaaacatgaaattcttttgaagtagrtgaagcctccaatagtaccattatctaaatctgtttttgcttctcattgtcacatgatagcttttcatttagtgtgatgctggggaaagagaaaggagaa

SEQ ID NO: 455478 - DNA, 201 bp, Homo sapiens
tattatctgaatcttctctccttctattccactattatcttggtccaagctatgcaatattgtatcctacccctctataatccatctctgtatagcactgwgagatagcatcttatactgcaaatcaaatgatatcactctactactaaaaactcttcggtgatagcagtaataaagtccaactccttaccaacacctgta

SEQ ID NO: 455479 - DNA, 201 bp, Homo sapiens
ggttagtataaaatttaggagtaatcactatatagattatcataaagatctggagatggttctgttcaagattgccaagggatggaactgaattcctgtayggctgctccccacttgaaaagccagacacaagaatcaagagttggtgggaagaaagaggtttattgaagtgctagcagctgaagagacagctggagtcag

SEQ ID NO: 455480 - DNA, 201 bp, Homo sapiens
tcaaggcttttttgatattggcataaggattgacaaatagattcatgggacataattaggagtccagaaatcaacccacaggcatagagtggggttgattrttaaccaacatgccaatcaattcagtggtgaaatgtttaagcaacattgctgaaccaattgggtccctgtatggaatcaaaacaaaaataaattttactc

SEQ ID NO: 455481 - DNA, 201 bp, Homo sapiens
tctggccggaagtgatggttcagtgtcgagtcctttgacaaagaccatcttaacttatttttattgtttcacctaagctgtgttttgtggtttcgaaagtrtctagcatgacctgtgaatctattacagttcaaaatcaattctattcctgtttccatagttcacattcatttccgtgagtattagggtcttcataaaaca

SEQ ID NO: 455482 - DNA, 201 bp, Homo sapiens
aaaagaaatattgggaagattaaaaataaaagacatcaactacttagccaccagtataaccctgttaacttagaactatgattctaagttaacagggttayactggtggctaagtaagaatccaaacctagttttcttacaccaaatgcagtgtgttttcccctagataaagttgttttctaaatgaaagatggaaatgtt

SEQ ID NO: 455483 - DNA, 201 bp, Homo sapiens
tgttctgataaaaggaggttcattttgatcgtcaaccagaaaacaaaacatgataaaataaaaataaaactcaggaaattcgacaaatttcttgagagccrcctacataaggcattttgtaagaagctatgaagtatacaaagatgtcgctaagtaacctgtaatctagtaaagataattacactgtagtgtataagagga

SEQ ID NO: 455484 - DNA, 201 bp, Homo sapiens
tttcttcaggtttgatagtacaacttgtctttttaactttttatacataaatattattctctttcacttgaccaattttctgtacaaaatttatttaagarccccttaaaattcacttaggaaatcagatggagcatacataggaagtatataacacaatattatcagattctgttcactttcttttgctttttttctata

SEQ ID NO: 455485 - DNA, 201 bp, Homo sapiens
tcattgttcaattcccacctatgagtgagaacatgcggtgtttggttttttgtccttgcaatagtttactgagaatgatgatttccaatttcatccatgtscctacagaggacatgaactcttcattttttatggctgcatagtattccgtggtgtatatgtgtcacattttcttaatccagtctatcattgttggacatt

SEQ ID NO: 455486 - DNA, 201 bp, Homo sapiens
aatctctgcttctacttcttaagtatttgtatattggtagaaactcactttatcttaataattataatactttaatgtatttagaatattgtatatcatakgtaatacttaggatactgtacatattttaacaaataaggagtgaatactgaaattaaactgtagattgactaaatgaaccactgttatagagcttcggag

SEQ ID NO: 455487 - DNA, 201 bp, Homo sapiens
gagatcagagaaaacctcactgagcaggtatatttgaactggacttcgtgtcatgggttaggaatttataaaacagaagtggtaatgatatggtttcgctytgtgcctccacccaaatctcatcttgaatggtaattcccacgtgttgagggagggacctggtgggaggtgagtggatcatgggggcggtttcccccatgc

SEQ ID NO: 455488 - DNA, 201 bp, Homo sapiens
agtcatatgctgcctagtggaatttgttgtcattaaaaattttttcctgttttgtcatttcaaaaacaatcacaaactcttggaggttaaagatgatgttmtatatttccttgtaccccgtaaaaccagcatagtaggtatttaataaataactgtcttcttaattataaattttaagtggtgggagaatgatgtatttac

SEQ ID NO: 455489 - DNA, 201 bp, Homo sapiens
agagcattaggacaaatacctaatgcatgcagagcttaaaacatagatgatggggactgggcgcggtggctcaggcctgtaatcccagcactttgggaggmtgaggcgggtggatcatgaggtcagtagatcgagaccatcctggctaacatggtgaaaccccatctctactaaaaacacaaaaaattagccgggcatggt

SEQ ID NO: 455490 - DNA, 201 bp, Homo sapiens
aatatttgagtttataattttattctatttatatatttgaaaatttttatactgaaaagttgaaaaagctttatattggtattttaaactttgtaaatgtkcactaaaagaagatatgtctttttagttgttttgcctgagttatgatgagctttgatgagtcaatcaggctgcctcttgagttttccttgtaaggttaat

SEQ ID NO: 455491 - DNA, 201 bp, Homo sapiens
gatgacacgttagtgggtgcagcgcaccagcatggcacatgtatacatatgtaactaacctgcacaatgtgcacatgtaccctaaaacttaaagtataataaaaaaaaaagaaaaaaaaaaaagataaatttgaaaatgggaatttggcagtgtttgtctattgctgcttagagaagacaccagtcatggaaggcaaggac

SEQ ID NO: 455492 - DNA, 201 bp, Homo sapiens
tgagttgataattgtttcagtaggatgatgaatatttgagtttataattttattctatttatatatttgaaaatttttatactgaaaagttgaaaaagctytatattggtattttaaactttgtaaatgttcactaaaagaagatatgtctttttagttgttttgcctgagttatgatgagctttgatgagtcaatcaggc

SEQ ID NO: 455493 - DNA, 201 bp, Homo sapiens
agtgggtgcagcgcaccagcatggcacatgtatacatatgtaactaacctgcacaatgtgcacatgtaccctaaaacttaaagtataataaaaaaaaaagaaaaaaaaaaaagataaatttgaaaatgggaatttggcagtgtttgtctattgctgcttagagaagacaccagtcatggaaggcaaggacaggctaacata

SEQ ID NO: 455494 - DNA, 201 bp, Homo sapiens
attttctcaaaagagtctgtaacacaaagaaggttaagaaattggagcactggttcccaaatagtctcttaagaagcatcaagtgagagaaaatcccttgttttttttttttgtttgtttttttcctgagcgtttctgatcccatagaaatgggattgagcaaaaatcttcatttttttttttttttaagtttcagctttt

SEQ ID NO: 455495 - DNA, 201 bp, Homo sapiens
gcaacgatgattccctcattgctaaactgtcctaatcagggctaagaagaggagcaggaatggaaacttgggaaacctgaggtacagaaagcggcatgagcctgactatttcttagcaaacacaagtttgccttttctgggagacctgaaataaatgttcatcctggttcaaactcccatggtgatcctgacctgagctta

SEQ ID NO: 455496 - DNA, 201 bp, Homo sapiens
agcttgccctagctttcagcctaagatcaataataatggtgattgccatttttgtgcctattatatgtgaaacactattctagacacttgacatacatatmtttgcattagctctcatctgatatcagtctggtaagatagatattaccctaattttataaatgaagaaactgaatgtcagaaagcttagatgatttactc

SEQ ID NO: 455497 - DNA, 201 bp, Homo sapiens
cagaaaatgtactctagtgaactgctaaaaagtattattaagcattaagcattatttttcctttgtttgatatgcagtacagatgttggcagtttaaattktttctttctgtggagtttcttggtaacgacaccctgcatcctgattccctggacatatggagaaaaggagagccaggaaagaagcaggacctggcgatca

SEQ ID NO: 455498 - DNA, 201 bp, Homo sapiens
agactgagaacaggtttttaactacactaacttgtagtcaaactactactctgcttcttgcttaccctgcaactcacctgaataaattactcactgtcccygaaccttaggcatgaaatcagaatagcacttacctcagagactgctgtaagaatataatgaggaaatgactaacctggtagttttctctcttcacttatc

SEQ ID NO: 455499 - DNA, 201 bp, Homo sapiens
ggtgtacatgtgccacgttttctttatccagtctattattgatggacatttgggttggttccaagtctttgctattgtgaatagtgccgcaataaacatgygtgtgcatgtgtctttacggtagaatgatttataatccttagggtatatacccagtaatgggattcctgagtcaagtggtacttctagttctagatcctt

SEQ ID NO: 455500 - DNA, 201 bp, Homo sapiens
gctttctttagggaaaaaacttttgtctgtttcaatacctcatggtttggttggggttcacctcaacaaaagacagtaagtatccactgagcacagttaamtggactgaaggttttaggccattcattgtttcatacaaaactttttattgggtatccaatattggtgggatctaagcaaatttattaaaaggcaacaatt

SEQ ID NO: 455501 - DNA, 201 bp, Homo sapiens
catactaattaatacaaattcctgaaatattactgacagtgattctgtgactttatctctaaacaaaatgtgtttggacctaagatatcaactctgttacrgtagtgagattcagtctcactatctctctagtaccttgaaaccattttggtctactattagtatgttgaagaaaattaccactatgaatggataatatat

SEQ ID NO: 455502 - DNA, 201 bp, Homo sapiens
ctcctcgcaagctgtgctaaatttcctagcagttgcctggcctccacctacacagtggaaaagaatgaaatggcttgaggaaatagatgattgtacttgtrctggtcaaattactaaagaatcaataaggccgactctgtaaggttattgactggcaggctaatctgagcccataactttacttccaaccaatgtttcaag

SEQ ID NO: 455503 - DNA, 201 bp, Homo sapiens
ttccacatgggaaaactgtatggataattcgtgagttgtaaaacacaggccatgagcattcctttttggattgacaaggaaacaagaattgtgaaacacargtcatgattattaattccataaagcctaaaatttgtacagtaatcaatatagataaggtaatatcattgaatgcttaagaaaaaattatttgaaaaacca

SEQ ID NO: 455504 - DNA, 201 bp, Homo sapiens
ataggttttagttaaagggtttatttgctcgaaatactgacctctgaatcatccctgacatcttcatgagggaaggtttcactgattttacatgccaacgrctcattaggaatatagcataaggaagataaatcacaaagtcataaagttgagcaaggtaagtaaatgctgcagcaaactaaatgcaagtcccccaattta

SEQ ID NO: 455505 - DNA, 201 bp, Homo sapiens
ttacatcataatgcaaatttaaaaaggatttaaggaacagtacatatatttgcaatgacagagaaagggaaagagagagattctgagaaacttttatttamgccctagcagaattttgacctcttagaaatcaagcaatagaagtatggctttgcctttaacttctgaggtttgagcagaaatgtaattttccagcctctc

SEQ ID NO: 455506 - DNA, 201 bp, Homo sapiens
agcctctcatcatttctgtgacctttctgaatttcttcacattcttcattattactggagtttagaactgagtatatctcactactttcttaggaaaggcyttaattaatatttgaaggaatttgagcttctaattcccacatcctttttaatgccttattttctattacagctgtgccctaaatagtttttaaataatta

SEQ ID NO: 455507 - DNA, 201 bp, Homo sapiens
gatcatgatcacaggcaaatatcttttcttcaggtttgatagtacaacttgtctttttaactttttatacataaatattattctctttcacttgaccaatyttctgtacaaaatttatttaagaaccccttaaaattcacttaggaaatcagatggagcatacataggaagtatataacacaatattatcagattctgttc

SEQ ID NO: 455508 - DNA, 201 bp, Homo sapiens
taatatcatgatcatgatcacaggcaaatatcttttcttcaggtttgatagtacaacttgtctttttaactttttatacataaatattattctctttcacytgaccaattttctgtacaaaatttatttaagaaccccttaaaattcacttaggaaatcagatggagcatacataggaagtatataacacaatattatcag

SEQ ID NO: 455509 - DNA, 201 bp, Homo sapiens
tatgtatttatattcttttcctaaatggtcttattcagtatggttttttaaatgtcatctttatatgctggtgacttccaaattaatatattcaagttagrcctttcccttttgctccagatcatttatacaaagactgcatgatattccttcctagaagtttataaaacatttcaaacagacattaaaggtccaaaatat

SEQ ID NO: 455510 - DNA, 201 bp, Homo sapiens
tatagtgtagcagcttaaaagagaatatttcttttgaggaaagcatatggtcaaagatcttgtctgacagcatttggctgcacagtgaaattcgggctctrcaatgagacatgctcaatgtagtgatccctaatctgggcttttttagatttataatcttgaagtaattattttatctatctactcatctggaaaactggg

SEQ ID NO: 455511 - DNA, 201 bp, Homo sapiens
atatggaattatagttatctatacacacctattcatacacactccagaataaaataaattcaaatgttattagttatctttggataatagcatattagatkattgtttttgtctttctgacttttctgtattttccaaatttgtagtagtaaatgtaatgtttagttagatttttggaggatgttttctttatccagaatc

SEQ ID NO: 455512 - DNA, 201 bp, Homo sapiens
tattccaaatttcatgagaacaaagttttggttttattttatttacctttatggcctatatatatgttgattaagtgcatggatggatggatggatggttdgatggatggatggatggatggatggatggatggatggatagacaaatgatactcaggtggagctgctcaggatcagtaggttatgtgggaataatgtata

SEQ ID NO: 455513 - DNA, 201 bp, Homo sapiens
ttgtggctgccatgcatttgttggtggccactcaaattcaatctgtacctttattttcacattgctcctcttttcttgtgtatatcaaatctcatctacckccctctaataaggaaatgtgattggatttacggatccccccctcccaccccacagataatccaaaataatctcccatgtcaagatccttaatttaatccc

SEQ ID NO: 455514 - DNA, 201 bp, Homo sapiens
ttgcgaaaaaaaaaaaaattgtactttttgtgcagcttctgctctctgaataatctgattacatctccagggcaatttatatggatcactaaactggccayaaaatattataaaattataacctattattagttctgttcctttactcatataaacatttattacaggtaaaatacctggtggttgtgttagacccagata

SEQ ID NO: 455515 - DNA, 201 bp, Homo sapiens
atttgactacagcagatttttattttggaatagagctgtatttgtttcctatggctgtcctaataaattaccacaaaaataggtagcttgaaatagcagawatgtatgctttcacagttctggaggccagaagtttaatactggggtttcactaggttgagataatggtgttggcaggccatagtccgtccagggcctcta

SEQ ID NO: 455516 - DNA, 201 bp, Homo sapiens
ttttgtttgccttgtattcagatgtacaatttaagtaactcaaataaagaacaacttacaatttgaaatcaataatctgctctgtctgctctgacatgtattttttttttctttttttttttttgagatggagtctcactctgtcacccaggctggagtgcagtggcatgatctcggttcactgcaacctccacctcccgg

SEQ ID NO: 455517 - DNA, 201 bp, Homo sapiens
aattataacctattattagttctgttcctttactcatataaacatttattacaggtaaaatacctggtggttgtgttagacccagataatactaatatttratcgcattaggtttaagaagaacaaacaaaagtgctttctcctgctcctttatattcaggcttgaaatatcatttaaaataacatagtagtgcatgtgat

SEQ ID NO: 455518 - DNA, 201 bp, Homo sapiens
aacgatgattccctcattgctaaactgtcctaatcagggctaagaagaggagcaggaatggaaacttgggaaacctgaggtacagaaagcggcatgagcctgactatttcttagcaaacacaagtttgccttttctgggagacctgaaataaatgttcatcctggttcaaactcccatggtgatcctgacctgagcttaga

SEQ ID NO: 455519 - DNA, 201 bp, Homo sapiens
ttctgaacacatggacaaaatttgacttacagaagaaagacaattaggcccactcaaagataagagaagttaaaagccagaaaaagagtgtgtgtgtgtgygcgtgtgtgtgtgtgtgtgtgtgtgtgtgtgtgtgagagagagagagagagagagagagaactgggaatgtttgcattcctacttccagttggttctaag

SEQ ID NO: 455520 - DNA, 201 bp, Homo sapiens
tctcctgcctctgtgtatccatcactgcccttagatggccactatcttgcaggagaaatggagtctaactgcctcaggtgctccatctgcccaaagagaaktggcttgctaataactctgagtttcctgggcttcctcacctatatactttttattgcatacattgaaaatgagactctatccttttatataagtttgcat

SEQ ID NO: 455521 - DNA, 201 bp, Homo sapiens
acgatgattccctcattgctaaactgtcctaatcagggctaagaagaggagcaggaatggaaacttgggaaacctgaggtacagaaagcggcatgagcctgactatttcttagcaaacacaagtttgccttttctgggagacctgaaataaatgttcatcctggttcaaactcccatggtgatcctgacctgagcttagag

SEQ ID NO: 455522 - DNA, 201 bp, Homo sapiens
ctgaacacatggacaaaatttgacttacagaagaaagacaattaggcccactcaaagataagagaagttaaaagccagaaaaagagtgtgtgtgtgtgtgygtgtgtgtgtgtgtgtgtgtgtgtgtgtgtgtgagagagagagagagagagagagagaactgggaatgtttgcattcctacttccagttggttctaagtc

SEQ ID NO: 455523 - DNA, 201 bp, Homo sapiens
tggacaggtggtctcctgcctctgtgtatccatcactgcccttagatggccactatcttgcaggagaaatggagtctaactgcctcaggtgctccatctgyccaaagagaagtggcttgctaataactctgagtttcctgggcttcctcacctatatactttttattgcatacattgaaaatgagactctatccttttata

SEQ ID NO: 455524 - DNA, 201 bp, Homo sapiens
cgatgattccctcattgctaaactgtcctaatcagggctaagaagaggagcaggaatggaaacttgggaaacctgaggtacagaaagcggcatgagcctgactatttcttagcaaacacaagtttgccttttctgggagacctgaaataaatgttcatcctggttcaaactcccatggtgatcctgacctgagcttagagt

SEQ ID NO: 455525 - DNA, 201 bp, Homo sapiens
gtgggtcagatccacaaattcctggttcctgtgtcttaacaatttcttagtttccggccttgctgggaaatatcttgaagtaacttctgaaggaagagggttttttttttttcttacagagaaaacatctgtgttagataagctgtgtagaggcaagagttatagtgctgttggccacaagttcaatgataatgaatcaac

SEQ ID NO: 455526 - DNA, 201 bp, Homo sapiens
aagacaattaggcccactcaaagataagagaagttaaaagccagaaaaagagtgtgtgtgtgtgtgcgtgtgtgtgtgtgtgtgtgtgtgtgtgtgtgtgwgagagagagagagagagagagagaactgggaatgtttgcattcctacttccagttggttctaagtcctagctgcatcctgtcatacatatgtgtaagtca

SEQ ID NO: 455527 - DNA, 201 bp, Homo sapiens
ctatgtaacaaacctgcacatgtacccctgaacttaaaatagaagttaaaaataataattaaaatatataataaattaataaataaaagcacatttttcarttatgtgactacaacagaaggattatatcttcaatttccccactccaccttgtttgaagatagcatgaaatcttggagtctataaatgtacattattttg

SEQ ID NO: 455528 - DNA, 201 bp, Homo sapiens
ctttctgagacatgtttgttgttgaaaataataataagaatagggttatttatttcctggcaatgtcctccaactagcttaatgttgaaatactgttttttttgtttgtttgtttgtttgtttttgttgttgttttctaaactaatagtgcaggatcccccaggtctttcagaatctagcatttcttttcccctttccgca

SEQ ID NO: 455529 - DNA, 201 bp, Homo sapiens
tgtggtgattcctcaaggatctagaaccagaaataccatttgacccagcaatcccattattgagtgtatacccaaaggattataaatcatcctactataaygacacatgcacacggatgtttcttgcagcactattcacaatagcaaagacttagaaccaacccacatgcccatcaatgatagactggataaagaaagtgt

SEQ ID NO: 455530 - DNA, 201 bp, Homo sapiens
gacaattaggcccactcaaagataagagaagttaaaagccagaaaaagagtgtgtgtgtgtgtgcgtgtgtgtgtgtgtgtgtgtgtgtgtgtgtgtgagwgagagagagagagagagagagaactgggaatgtttgcattcctacttccagttggttctaagtcctagctgcatcctgtcatacatatgtgtaagtcatt

SEQ ID NO: 455531 - DNA, 201 bp, Homo sapiens
tttctgagacatgtttgttgttgaaaataataataagaatagggttatttatttcctggcaatgtcctccaactagcttaatgttgaaatactgttttttttgtttgtttgtttgtttgtttttgttgttgttttctaaactaatagtgcaggatcccccaggtctttcagaatctagcatttcttttcccctttccgcaa

SEQ ID NO: 455532 - DNA, 201 bp, Homo sapiens
cttccaaataaaacagacccaaattacccctcttgtgaccactgacttgggacactgatattggtggacagtttgctactaacttctcctaacagcctatrgtctatttaataatttttgactgcaacatctactgctggtttttactttatactaagttcttaaataagtcaatcatttttattccattccatttgaatt

SEQ ID NO: 455533 - DNA, 201 bp, Homo sapiens
tctaagccttttttagcttttaacacaaattacaggtaggcctcccagccacctgtccctttaggaaagtaaacagctctctagaaagccttctgatatgtttttttaactcattctagagtagcactttttaaactttaatgtgcagttgaattgctccaggatcttgtaaaatgcacatctgatttagaaggtatagaa

SEQ ID NO: 455534 - DNA, 201 bp, Homo sapiens
ttctgagacatgtttgttgttgaaaataataataagaatagggttatttatttcctggcaatgtcctccaactagcttaatgttgaaatactgttttttttgtttgtttgtttgtttgtttttgttgttgttttctaaactaatagtgcaggatcccccaggtctttcagaatctagcatttcttttcccctttccgcaag

SEQ ID NO: 455535 - DNA, 201 bp, Homo sapiens
agaagaacaaacaaaagtgcttgcccctgaagaaagcagtacagttttagtcaaaatcatgacctattaaaatttctggtcttgggaggctgaggcaggcrgatcacctgaggtgaggagttcaacactagcctgaccaacatggagaaaccccatctcaactaaaaatacaaaaaaattagccgggcgtggtggtgcatg

SEQ ID NO: 455536 - DNA, 201 bp, Homo sapiens
tctgagacatgtttgttgttgaaaataataataagaatagggttatttatttcctggcaatgtcctccaactagcttaatgttgaaatactgttttttttgtttgtttgtttgtttgtttttgttgttgttttctaaactaatagtgcaggatcccccaggtctttcagaatctagcatttcttttcccctttccgcaagg

SEQ ID NO: 455537 - DNA, 201 bp, Homo sapiens
agccagataactatttaattctgaaacagtaaatttttgttctcatgaagtttttattgctgtcctatgataattacttttcactttaccactaataatarctagctagcatttattaggttctttcagttgtgtgacactgctaatcactctgtaagttaacacttataatcctcaaaaaacccaatggcatagatagaa

SEQ ID NO: 455538 - DNA, 201 bp, Homo sapiens
aggaggttaaaataactagtaaattatatttatttatttgtaatattgttgttttcattatccaggttgaaatttttaaaaattaaaaattaaaaattttatttaaatttttttatttttatttttaatttttatagatgcatactagttgcatatatttatggggtacatatggtattttgttataaggatacaatctgt

SEQ ID NO: 455539 - DNA, 201 bp, Homo sapiens
ccaacgtcacaccacagatttttaactcaggcaatctgcctccgcaggctgttcttgtatctgctaaactatcctgtgttaaaaattccaacagttattgkgtgtgtgtgtgtgtgtgtgtgtgtgtgtgtgtgtgtgtgtttaattatcctaagaatgctaacctcttggatatttttaataagtccttgctttaatggt

SEQ ID NO: 455540 - DNA, 201 bp, Homo sapiens
cttgtttgtcatagactctactggaataagagataatcaaaggatatactttcttttaatgtggacatattgccacataatgtctttgccctagggaattsatagcaagatgtagaaagtagctcttctaggtcactttgattccagtccaagttgcttgtgattaatactgctaacatcaacagctgctctagtactaat

SEQ ID NO: 455541 - DNA, 201 bp, Homo sapiens
ataatgaatgagaagtatagattacagtagatgtgaaaaatacaaaagaaccaaagaatgaaattaaagagacaaatataaaatctaacatttgcttcaaytgcataagactttgtgggctactagtttgatagtgtttattttaaaaatatttttaaaattttatttgaccttaaatttagcataaggcagtattaaaaa

SEQ ID NO: 455542 - DNA, 201 bp, Homo sapiens
tcgggtcatgctggcattggtattataatcattctcatttttattatctgaactctcagaaaaaaaccagtatcgaaagttaaattaacattatcttggtrtcgagatgataccaagaaaaccgttaatccacagacaaaggactgttaatactcatgaatacaatgtgcttaagtaacacacttaagcctcagcactcac

SEQ ID NO: 455543 - DNA, 201 bp, Homo sapiens
ctatttactagtctgtgacctgggggaaaataacttagactttctatgcctcagtttcttctattgcaaatgagattttaagatttgttttaatatcaagytatctatgtgaaacatttagaagagcgcctagtgcatagcaattgtcaggaatgttaatagttaccattattagtactgtagagaccaggtaaccatgtg

SEQ ID NO: 455544 - DNA, 201 bp, Homo sapiens
aattgcaaatttcttttctgcagattgtgcagtagtttgtcttggttatttgcctccctgatccagttatttctgtccttccatctgtaataagataacaktgtcatttagccttatttttcagcgatattcgggtcatgctggcattggtattataatcattctcatttttattatctgaactctcagaaaaaaaccagt

SEQ ID NO: 455545 - DNA, 201 bp, Homo sapiens
tagtcacagaggtgaataagacagcatgatggctgttttcatggagcttagaatacacaagtgacacaaactaggaagcatgcagctccatcatagaatcrcaattgtcatgctgaggaaacacaagacaccacgaacatggaattcacagatatcctgctatttagcgtactgcaactgggtcaaatacatactaagttg

SEQ ID NO: 455546 - DNA, 201 bp, Homo sapiens
ttcatccatgtccctgcaaaggacacgaactgccagcaattccattactgggtatatacccaagggattataaaccattctactgtaaagacacatgcacmtgtatgtttattgcagcactattcacaatagcaaagacttggaaccaacccaaatgtccaacaatgatagactggataaagaaaatgtggcacatataca

SEQ ID NO: 455547 - DNA, 201 bp, Homo sapiens
gagaggatcaggaggaaggaaagagagacaccataatatgtcagtatttttcatgtagaaattcaatatgtaagatattgctgttagaaaatttataaccraaacaattatttaatacaataattatgaaattttattttgtgggactatgtgtacatttgtccctgtcagcttctgccccagtgtcacattttaaagaaa

SEQ ID NO: 455548 - DNA, 201 bp, Homo sapiens
ttggggcacacattggagggtgcaggatgggaggagggaaaggatcaggaaaaacaaccaatgggtactaggcttaatacctcggtgatgacatagctgtrcaacaaccccctatgatacacatttacctatgtaacaaacctgcacatgtacccctgaacttaaaatagaagttaaaaataataattaaaatatataata

SEQ ID NO: 455549 - DNA, 201 bp, Homo sapiens
aaaataaagctagaaaagtaaaaggaagcaagtttcaggcagtagaaccaggaggggttaggaaaggccagaaggttgtgtattattttgatttccctggrcatgtatccttcatgtaacttctatattttcctgttgggtctttactgcctaattccaacctgaatgttgattcatggactagttttagctgtatagcag

SEQ ID NO: 455550 - DNA, 201 bp, Homo sapiens
aggttgagagatagagaacaaacaaaacaatatggaaatttagattttggaagatttggagcattatatcataaactgggccctctttagggagtcctcartggcctttcttcctgccattgcactggtcaacacgtttaatagttaccactacttagccatgcaacacattttatttctagtttaatgcattattattgt

SEQ ID NO: 455551 - DNA, 201 bp, Homo sapiens
acaccttcggttacaccaaaggcacttcggggttttattgttgtattattgttattactttacactttctgtcctacaattataactgaaagctacgagaytggatttcaggaaatgagaaaagttgaaaagcaattttactgtaacttctcagaagaattactagcagatttaagaaaaaagaagtaaataatcactacc

SEQ ID NO: 455552 - DNA, 201 bp, Homo sapiens
agtgcttgcccctgaagaaagcagtacagttttagtcaaaatcatgacctattaaaatttctggtcttgggaggctgaggcaggcagatcacctgaggtgrggagttcaacactagcctgaccaacatggagaaaccccatctcaactaaaaatacaaaaaaattagccgggcgtggtggtgcatgcctgtaatcccggct

SEQ ID NO: 455553 - DNA, 201 bp, Homo sapiens
gggcgtggtggtgcatgcctgtaatcccggctactcgggaggctaaggcaggagaatcgcttgaacccgggaggcagaggttgcggtgagctgagatcacrccattgcattccagcctgggcaacaagagcaaaactccgtctcaaaaagaaaaaaaaaaagaatttctggtctttagctgctgtttttcataaacaatca

SEQ ID NO: 455554 - DNA, 201 bp, Homo sapiens
ggtgcatgcctgtaatcccggctactcgggaggctaaggcaggagaatcgcttgaacccgggaggcagaggttgcggtgagctgagatcacgccattgcaytccagcctgggcaacaagagcaaaactccgtctcaaaaagaaaaaaaaaaagaatttctggtctttagctgctgtttttcataaacaatcaatcatgtta

SEQ ID NO: 455555 - DNA, 201 bp, Homo sapiens
ggccaggctggtctcgaactcctgacctcaggtgatctgcccaactcagcctcccaaagtgttgggtttacaggcgtgagccaccgtgcctggccagtttrgggggttttgttgttgttttgagatttaaaaagcctatatgtgtaatggatgtttttaattttttctagtttaatgatgaattgaactgctcacttctaa

SEQ ID NO: 455556 - DNA, 201 bp, Homo sapiens
caatgaaacagaaaataatttgaatatttcaaattttaagtttttaaaaattagcaacatgtgttttgcttcttattttttctctctctctttctttcttytttcttttttttttttgagacagggtctcactctgtcattcagcattcaggctgcagtgcagtggcatgacaatcagggctcaccacagcctccacctcc

SEQ ID NO: 455557 - DNA, 201 bp, Homo sapiens
atgtagctgtgcagacaccttgattttagcctggtgagacacatttgggactcacttagtattcatttagctatttcactttttataatgcagaatctgcmgatattataatgcaaattaagatctttatgattagcatctttgaaaaaatactttttttgtttttaaacttcatatatttttgtaactattttgaaacat

SEQ ID NO: 455558 - DNA, 201 bp, Homo sapiens
tacaaaaaaagtatcttggatgtgccaagtaagggtttgatcgtctctgccatcccttaatctccattggaaaccatatcattttctttcttttcttttcttttttttttttttttgagactgagtctcactctgtcacccaggctcgagtgcagtggcaggaccaccgctcactgcaagctacgcctcccgggttcacgc

SEQ ID NO: 455559 - DNA, 201 bp, Homo sapiens
gaaacagaaaataatttgaatatttcaaattttaagtttttaaaaattagcaacatgtgttttgcttcttattttttctctctctctttctttcttctttyttttttttttttgagacagggtctcactctgtcattcagcattcaggctgcagtgcagtggcatgacaatcagggctcaccacagcctccacctcctggg

SEQ ID NO: 455560 - DNA, 201 bp, Homo sapiens
aataatggtccagcaagagctagggtggcagtcgacatgcagaggcatgttttctacttttttaactttttattctgcaggtggtccttcgctggtctcayactgcatttccttaggtcacattggtgcaatctgtaataaaagatgcctcaatgacaaaattgtttgctacatggagggattcctcactcccatgtctgg

SEQ ID NO: 455561 - DNA, 201 bp, Homo sapiens
tttggttggttttgttttgtttttgttttgtttttagcttttaagttcaggggtacgtgagcaagtttgtatgtaggtaaactcgtgtcatgggggtttaytgtacagattactttgtcacccaggcattaagcctagtgctcattagttatttttcctgttccttttcttcttcctactctcttcccttcagtagacccc

SEQ ID NO: 455562 - DNA, 201 bp, Homo sapiens
ggaacatggcttgtgaaagctcctgtcataacagaaaattgtgcaatagggatttaacaggtttttttgtagcattgtgctatagcatgaatattgtttgygcttattacaagtttctggtgatcttgtttgactttcctacacataacaagggatttggacagttggaaaatctgtacaaatagtaccacttgtggttta

SEQ ID NO: 455563 - DNA, 201 bp, Homo sapiens
agtcccaataacaatgttggttgatatattttgtttatataagatacaaattaaatgatgaagtatatgtctaaatttgaccattcatcagtgatgtgaatttttttttgctacaatacataacagtttttgaacaggaagcatattttctcatttttttggtgctatttatattttagtggccacacaaatcacacagtt

SEQ ID NO: 455564 - DNA, 201 bp, Homo sapiens
taagaatagatgccagcaagccatggcaggagtgagaagactggtgtggagactactgtaataatggtccagcaagagctagggtggcagtcgacatgcaraggcatgttttctacttttttaactttttattctgcaggtggtccttcgctggtctcacactgcatttccttaggtcacattggtgcaatctgtaataaa

SEQ ID NO: 455565 - DNA, 201 bp, Homo sapiens
aatgtgcaagctgaaaagtttgctggatactgtttaataaacaaaggaagaagacatacgtctcctaggctggagagagagaattttatttttcatagcartggcagcatccatagtatcagcattcacgttggtttcacatatttcccaggtcacacaagagacagggtggaggacccaaatggatacacaataggtttg

SEQ ID NO: 455566 - DNA, 201 bp, Homo sapiens
ggctggggaggcctcaggaaacacaatcatggtggaaggcgaaggggaagcaaggcaccttcttcacaaggtggcaggaagaagtgctgagccaagggggaaaaaacccttataaaacactcagatcttgtgagatctcactcactatcacaagaagagcattggggaaaccgcccccatgattcagttacctccacctgg

SEQ ID NO: 455567 - DNA, 201 bp, Homo sapiens
ccagaagcaaaacataaatgacaggataatcaccaaatcaggtcagaaccagggtttcttcatagttttaatatttaaaaataaatggcttctgttgcttdaacaacaatatttcttcatcaaaatactggagactgaaatggtgtactttctgtgctttgtgcccaataaaagtccaaaatgatacatttgctggagtac

SEQ ID NO: 455568 - DNA, 201 bp, Homo sapiens
ccttgtgctgtgtaactagtatattctagcacatgaaaacttttaaattctggaaaattctatgacataatttgataacttcaacccattatctcctctctttttttttttttttttaactttctgtagaaaaatgttgaagctcctaaattggcccactatgccccttttctgtctgtctttctttttcttaaagttctt

SEQ ID NO: 455569 - DNA, 201 bp, Homo sapiens
ggagagagagagagagaaagagagaaagaaagaaggaaagaagagggaagggagaggttgttaaaggaaagagccactacaggtacctaagtgatttaaamaaaaaaaatcttatacttataaatattgtgcacttagtgtgtaaataaaatgttttgtaatgcttgttcagctactatgcttttcattgggattaactag

SEQ ID NO: 455570 - DNA, 201 bp, Homo sapiens
ttgtgctgtgtaactagtatattctagcacatgaaaacttttaaattctggaaaattctatgacataatttgataacttcaacccattatctcctctcttyttttttttttttttaactttctgtagaaaaatgttgaagctcctaaattggcccactatgccccttttctgtctgtctttctttttcttaaagttctttt

SEQ ID NO: 455571 - DNA, 201 bp, Homo sapiens
ctcattgtgtatttaaagtttgttaaactatttattgctgcttcaagccagactctggaaccaaatggtgtttgataccaacccttcattgtcatgagccrtgatagtaacagattaagaactgctttgcatggctaattctgatagatgaactgttacttcaaagctagcagtaataaagtctaatcagatgtttaggaa

SEQ ID NO: 455572 - DNA, 201 bp, Homo sapiens
gaccaaatgtaaaacagcatgtcttccattttgcttatttctaaaacttttttttcccctttaaacaattgtaatttgtagcctcttagtccttctactatttttttttttctttgagacagagtctcactctgtcacccaggctggagcgcagtggtgcaattttggctccctgcaacctccacctcctgggtacaagca

SEQ ID NO: 455573 - DNA, 201 bp, Homo sapiens
aagagaaaggagaaggttgaatcaatttattagggccaggtacatatgtggttttttaaaactctcaatttctaccatactaccttaccttgcagaaaagtcatttccatatctgtcatatttgcattttttttgtaattctgaacttctactcctttgttaaataaatgattttaaaaccacacacacacacaaatacct

SEQ ID NO: 455574 - DNA, 201 bp, Homo sapiens
tgagcatgtaatctgaaaagacctgtgccccatttggctgctcttttctctaccttttgatcttacccatacttcagaactgaacaccatataagtaccayagaaatccacttgggaatcagggaatttctctgccgatagggatggcccttccttaggattcctcaaatttcaagacttgcataaagcataagataagaa

SEQ ID NO: 455575 - DNA, 201 bp, Homo sapiens
agagaaaggagaaggttgaatcaatttattagggccaggtacatatgtggttttttaaaactctcaatttctaccatactaccttaccttgcagaaaagtcatttccatatctgtcatatttgcattttttttgtaattctgaacttctactcctttgttaaataaatgattttaaaaccacacacacacacaaataccta

SEQ ID NO: 455576 - DNA, 201 bp, Homo sapiens
tccactacggaaatttattttgtgtgatgtgacatagtgctctaatattgacatttttgcaataatcacctgtctcacgttttttgaatatttcatatttrccacactgatttgatttatcgactttctaatacagtcttttttttaaagagaggtaaaagttttatgatggcagatgattcttttttttattattattat

SEQ ID NO: 455577 - DNA, 201 bp, Homo sapiens
gagaaaggagaaggttgaatcaatttattagggccaggtacatatgtggttttttaaaactctcaatttctaccatactaccttaccttgcagaaaagtcatttccatatctgtcatatttgcattttttttgtaattctgaacttctactcctttgttaaataaatgattttaaaaccacacacacacacaaatacctac

SEQ ID NO: 455578 - DNA, 201 bp, Homo sapiens
agaaaggagaaggttgaatcaatttattagggccaggtacatatgtggttttttaaaactctcaatttctaccatactaccttaccttgcagaaaagtcatttccatatctgtcatatttgcattttttttgtaattctgaacttctactcctttgttaaataaatgattttaaaaccacacacacacacaaatacctaca

SEQ ID NO: 455579 - DNA, 201 bp, Homo sapiens
atgacactgaacggtgctgaagtgctgtctgatactcctaagtgcaagaaggctgtggtgtgtcttatggagaaaatatgtgtgttcaataagctcattcrcacttgaattatagtgctgttgccatgagcttaatgtttgtgcatccacaatatatattaaataagccttctataaacagaaacatgcataaaacaagtt

SEQ ID NO: 455580 - DNA, 201 bp, Homo sapiens
tttctaagacgtcaatgtcctctaccatatttctacacctgactggcacaagcgaagaacccaaacacccattatttagagaatggaaaagcaaattgtgrcactatcaggatacaggatactactcaacaatgaaaagaaacaaatgattgatgcacgcaatgtgcagtattgtggattaaactaagtgcaagaagccca

SEQ ID NO: 455581 - DNA, 201 bp, Homo sapiens
atttcttgtaggaacaatgattgaatatcagtgaattcagtgtttgcagtgattttatggactatcactaccatgaataatgataatcagctgtgtagtcrgcacaaatggcagcacccttgcttccactctggctctcttacagtgtcatcaacaaaacaacaagagtggttcttattatataaaccgtaagtgagatca

SEQ ID NO: 455582 - DNA, 201 bp, Homo sapiens
tgaatcagtttttgttgccattatttgacacaaaactttactgcagaaaacattcaagtaagatctgaaagaatcagctctatagagtaagaggccaacamgtctgttagcaaaattttgtccttttgttttcccacggcacattttatttgaaacctagtaatgaggaaaagtagcttcattccattttatagagctatc

SEQ ID NO: 455583 - DNA, 201 bp, Homo sapiens
tcccataatatgcagaaatattatgcaaatattatgcaaacaatagtctgttttattcactgtggtatgcccagtacctaaaacagtgcctaaaagttttkgaaattttcagtgacttttttttgcaatagagtaagctctatcttgatctgcttctaaagacagcaccagagaacatttctctgaaacataaataaacgt

SEQ ID NO: 455584 - DNA, 201 bp, Homo sapiens
gatgaatcagtttttgttgccattatttgacacaaaactttactgcagaaaacattcaagtaagatctgaaagaatcagctctatagagtaagaggccaayacgtctgttagcaaaattttgtccttttgttttcccacggcacattttatttgaaacctagtaatgaggaaaagtagcttcattccattttatagagcta

SEQ ID NO: 455585 - DNA, 201 bp, Homo sapiens
tctgttttattcactgtggtatgcccagtacctaaaacagtgcctaaaagtttttgaaattttcagtgacttttttttgcaatagagtaagctctatcttkatctgcttctaaagacagcaccagagaacatttctctgaaacataaataaacgtagagacacagctcaaaactcttgatcagactcagtaaagctagaaa

SEQ ID NO: 455586 - DNA, 201 bp, Homo sapiens
aaagctagaaagctaattggaaaaaggtagcagggtgttttcaagctgtcttgaaaagagatgagtggtgaatctcttcatttttaaattgggagcaatgyttgtagtagcatgagagtttatattaggctatcaaaataaaaaaatgacttaaaccctattaactcagaaaaatgttgtctctgtaatttctttgtctaa

SEQ ID NO: 455587 - DNA, 201 bp, Homo sapiens
aattagattctagctaaactgcccacaaaacacgaaatgtttcatttaactaagtgagaagacatagcttgtttaaatcctaaataaagaagcagtctccrttaatggaaggcaagtcccttacaagcatgtttctctctgcacctaaacaggtatcaagcgaactcattgtgcttcctcatattgccacagagagacaca

SEQ ID NO: 455588 - DNA, 201 bp, Homo sapiens
aaaaggatctggtggttatattggaccctgataatgctaacatgtaatagcattgggtttaagaagaacaaacaaaagtgcttgcccctgaagaaagcagwacagttttagtcaaaatcatgacctattaaaatttctggtcttgggaggctgaggcaggcagatcacctgaggtgaggagttcaacactagcctgaccaa

SEQ ID NO: 455589 - DNA, 201 bp, Homo sapiens
tgcccatgtgatattaaaatttggttttctctcttagttttcatgggaagacttaggtaaattagtattttacgtaggaggtatgtacaaaaactgtgtcygctattaaattattctaccttgaattgtgattttattacatataatgcatgcttattttggaagtgtgttataaaaaccattgatactttgccctactgg

SEQ ID NO: 455590 - DNA, 201 bp, Homo sapiens
ataattgcaagtattaaaaatttcagataaagttgattatgcatttttaatagtgtacatgcaaaataaaatttaataaaattagaaggatgaagaagcaygtgttttatttttaatggagatttttattcatttttagcacaaaaaatagcaaaactctagatagtctttgcaataatgtactggtagtatgtatgatga

SEQ ID NO: 455591 - DNA, 201 bp, Homo sapiens
atattcaaatattaactattttaaagttcaaagtttgaagaactctaaaatagtattatctattttaaaaaacctattaaagaaggaaaagtaccaggaaycctggaaaaattaatcttgttgccctgcaatcagagccagccaggaaaagaagcagtacacagagtcagaaacagctacatgtgaaaaatcacatagtat

SEQ ID NO: 455592 - DNA, 201 bp, Homo sapiens
ggagatgatgctctggcgcaagggagtgcatggtctgagaaggaggtcatatagggccttctaagatcttccaaagacttgcaactatgaactattcaccrtgaatgctatgtgaagccattcacgtgctttcaccagaggggtggttttgcctggctggttttgattctgttttttaagataattctagctgatatgtaa

SEQ ID NO: 455593 - DNA, 201 bp, Homo sapiens
gataacatccagtattattgtgaggacttgaaattgacattgttgaattatcgatggtttattcatgttattgaataaatgtacacacaagcacacacatscacacacacacacacacacatatgccagacactgtattaagtaatttacaattattaacttattttatttttaaagcaactctacaaagttgatgatctt

SEQ ID NO: 455594 - DNA, 201 bp, Homo sapiens
ctgtctaaattttttgaaaagtaaggaaaaattaacccagcagaaaaaatttgaaagtactctgagatgcaaaaaatatgattatttttattgtactttaygaatgttgcttatgcaatctaacattaacaaagctaaaagtcaagaattataaactactaagaaatacacagatgaataattacattttatgtctttgta

SEQ ID NO: 455595 - DNA, 201 bp, Homo sapiens
gaaaggagaaggttgaatcaatttattagggccaggtacatatgtggttttttaaaactctcaatttctaccatactaccttaccttgcagaaaagtcatttccatatctgtcatatttgcattttttttgtaattctgaacttctactcctttgttaaataaatgattttaaaaccacacacacacacaaatacctacat

SEQ ID NO: 455596 - DNA, 201 bp, Homo sapiens
ctggtagaaaagattgagtgttccctgaggacaaagattatacattaccaatccctgtatcaccattatcgtatacagtgacagtgatttatagctcaaawattaggacttttaaacacttaacgtgattttaaactacgctaaagtaggtataaagttcagattatttactcccctggggtggctcatccgtgtgtgtgt

SEQ ID NO: 455597 - DNA, 201 bp, Homo sapiens
gtgctccaaacctgagggagccagcaatcccggttaggaagctgagggagcagaaatcatagtcatggcctgataatgagagaaaaagtcaactatatttycccagctgtagatttcccacctgcaaaaggcccagattagaggagggtagaagcctcaatatctaaccagggccagagtttgaattttcactaaggttag

SEQ ID NO: 455598 - DNA, 201 bp, Homo sapiens
tgttattattttcatcatgccttgtataggctatgttttttggcaataattagatttcaagtaaaacaaacttcacatcatcacataaccattttattttaagacagaggtttcactcctgtcacccagactggagtgcagtgggcgcggtcttggctcactgcaatcaccacctcctgggctcaagcaattctcctacct

SEQ ID NO: 455599 - DNA, 201 bp, Homo sapiens
tagctcaaaaattaggacttttaaacacttaacgtgattttaaactacgctaaagtaggtataaagttcagattatttactcccctggggtggctcatccktgtgtgtgtgtgtgtgtgtgtgtgtgtgtgtgtgtgtgtgtaatctttatgtatatgtaatatttatgtatatgtatatgtagtctttatgtatatgtaa

SEQ ID NO: 455600 - DNA, 201 bp, Homo sapiens
tgtaataatttttatgctttttcccacaaggaaagtaaaaaacattcctttaacttgacagcataatcctaatcctttaataccccaattggaatggggtkctttccaagcattctgttcaccattcagcaaggggaaaaaagcagcccccattgattgcccacttagtagctccaggattggtcaacaaatggcttaagc

SEQ ID NO: 455601 - DNA, 201 bp, Homo sapiens
cacatcctctccagcatctgttgtttcctgactttttaatgatcgccattctaactgcacaccaattttttaaataaaatttatttttatcaaaatttccygtgtactcagaaaaaaagtgccgtacatataaaactaataatgtaatataggaattgcttctctacatctccctacatgctcttcccactctagcgaagc

SEQ ID NO: 455602 - DNA, 201 bp, Homo sapiens
gatttttcagttctttacccttagcttgtacctttaatttctctctctttgctaccttcgtccttcagtctatagctatcgtatggttttactcaacttgaaaaaaaaaaaacatataagctagtgagcaagtaaccattccttaaagctgtgctcttccatggcttctattatagattctcccttactaatcatccttaa

SEQ ID NO: 455603 - DNA, 201 bp, Homo sapiens
agctcaaaaattaggacttttaaacacttaacgtgattttaaactacgctaaagtaggtataaagttcagattatttactcccctggggtggctcatccgtgtgtgtgtgtgtgtgtgtgtgtgtgtgtgtgtgtgtgtgtaatctttatgtatatgtaatatttatgtatatgtatatgtagtctttatgtatatgtaat

SEQ ID NO: 455604 - DNA, 201 bp, Homo sapiens
acatgaaataaatataacaataactaagttccattaagtgtttacaatgagccaggcattgtgctaagtaccttgtacatattaacttgtttaatcatcaraacaattcaatatggtaagaactattatgatccctaacagactaggaatttgaagcttggaagaattacataataacgtaaccaaggtaccacaaaaata

SEQ ID NO: 455605 - DNA, 201 bp, Homo sapiens
aatctttatgtatatgtaatatttatgtatatgtatatgtagtctttatgtatatgtaatatttatatatgaagatttatatatatattttataaataagatatatatatatatataatatatataaaatgttcaataaggcctgtaaagtgaccctagacatattgtgttgaagacctaaatgcctactagatatttttg

SEQ ID NO: 455606 - DNA, 201 bp, Homo sapiens
gaggtaaaatttaaaatcaaaactgatttttaagtgtccactgtaccttacactatatcagttcttatataaaaaatcagcagcaagtcttagaggaatayaataaatgcctaaatgaatgatgcacattatttgctgtagggcgattagaaaaggagcagtaactgtggatgaggaagtgaagccttcccagtaaaagtt

SEQ ID NO: 455607 - DNA, 201 bp, Homo sapiens
atctttatgtatatgtaatatttatgtatatgtatatgtagtctttatgtatatgtaatatttatatatgaagatttatatatatattttataaataagatatatatatatatataatatatataaaatgttcaataaggcctgtaaagtgaccctagacatattgtgttgaagacctaaatgcctactagatatttttgc

SEQ ID NO: 455608 - DNA, 201 bp, Homo sapiens
aaagataagcctctaattgctccagatcagacttccttgaactggagaaatgagtgactctgcccatcaatgaactgaccttgagaacacctgagtcaaaytcattaatttagcattttctctttgttccatcccaaaagaaactcaaaaaaaaattaccctatgtaaatactgagactcaagcattggtaacaaaaaggg

SEQ ID NO: 455609 - DNA, 201 bp, Homo sapiens
taccaaattctgtgtttgtcagtttgggctgctgtaacaagatactttagaatgggtaatttataaacaatgtaaatttattgctcacaattatggagactgagaagttcaagatcaaggtgccaacagattccgtgtctgatgaggactccctttctactttaaattggtgccttcttactgcatcctcacatggtagaa

SEQ ID NO: 455610 - DNA, 201 bp, Homo sapiens
caactggcaagtcacctaagatagctgatctgggataccttcagctgagataattcatccctctttcaaatgtgtctctgacatccttctttccaacaggmtagatcaggcacacatcctcacatgtcgtcaggggtccaataaagttaaaccatgcatgtgtcttttgaaacttgtttgcaattttttcatttttttttt

SEQ ID NO: 455611 - DNA, 201 bp, Homo sapiens
atgtacatatacatagtgcattatactggaatgattatctggtttgaactttgaactagataatcattccaatataatgaaatgaaaggcttattttatayataatatgttgttttatatataatatgttataacatttttatgtaatattataacactttatgttatgtagctttatatataatagtttattttatatat

SEQ ID NO: 455612 - DNA, 201 bp, Homo sapiens
ggcatatatctgtagtcccagatacttgggaggctgaggtgggagaattccttgagctcaggagttcaagtctatcctaagcaaaatagtaaaaccccatctctaaaaatacatatatattttttaacatacagatatgctacaaatttaagacagtttattaatttatatgtacaaaagcaacctacatatttaagataa

SEQ ID NO: 455613 - DNA, 201 bp, Homo sapiens
accaaattctgtgtttgtcagtttgggctgctgtaacaagatactttagaatgggtaatttataaacaatgtaaatttattgctcacaattatggagactgagaagttcaagatcaaggtgccaacagattccgtgtctgatgaggactccctttctactttaaattggtgccttcttactgcatcctcacatggtagaag

SEQ ID NO: 455614 - DNA, 201 bp, Homo sapiens
aggcaaactttgaaacggtttgatttgatgttaactctaattctgagttttaccatcagtggttctctcatgctatcataacccaaatttctctaggcctygccaattgaggaatgcaaacaaggccatatcatcatcaatgagaacttcaaattcactgcttcatgtcccacagcagaacatagtgcctacagcctccct

SEQ ID NO: 455615 - DNA, 201 bp, Homo sapiens
atatataaataagtctttcattttaatatcactaaaaaagcatacttataaaatattatatatgtatttagtctgcttgacttttaataaacacttgaaartctttttctgattataaaaaactgtgcaatagcttttaatatcaggttattttattgatttaaaatgtgaaatacaaatagatgtcatctttgttacaaa

SEQ ID NO: 455616 - DNA, 201 bp, Homo sapiens
ataaagagtgctagaataggagatgcaattttaaatacagagatcaaggaaaactgtactaggaggtgatatttgagcaaataactgaaaggggtgaaggaaaaaagctatacattttcactcttacttgatattatcacactggttaacttgtgttagataaatgaaggtaaaaatttgtctcattaggatttttaattt

SEQ ID NO: 455617 - DNA, 201 bp, Homo sapiens
gggtatatacccagtaatgggatggctgggtcaaatggtatttctagttctagacccctaaggaatcgccacactgacttccacaatggttgaactagttkacagtcccaccaacagtgtaaaagtgttcctatttctccacatcctctccagcacctgttgtttcctgactttttaatgatcgccattctaactgctgtg

SEQ ID NO: 455618 - DNA, 201 bp, Homo sapiens
aaagttttgagcagagaaatggtgctatctgaatgaaggtttaaaaggatcacagcagatgctctgttatggtaaactgtagtggacaaagtggaagcagrcagtttcatgtgatatatggcaatgacttggaccataagggcagcaatgtgaagtatgtgaagtggtctgattctgaatagctgagacagaatttgctaa

SEQ ID NO: 455619 - DNA, 201 bp, Homo sapiens
ttgtattttaagcataaaaccaaggagagtagcaaggtatcatgaaaagtgtccagggttttgttatgggcagacctgagttcaaatctcaactttgctgyttattagctttgtgacctaaaagttattagaagttatttaactttgcttagttttagtatttttcatttatagaatagaagaggaaaacaactgcaatgg

SEQ ID NO: 455620 - DNA, 201 bp, Homo sapiens
tatatccaaaatcaacactcttactttcaaattattccattcacccgcatacttattctcattcatccactttattctgaaatatgcctcagaaaatgacttttacatttttcttgcacacttttcatttacatgcttgtttatgggaatttataatggatgaattataattttccctagtttctataaaagaaaaaaaaa

SEQ ID NO: 455621 - DNA, 201 bp, Homo sapiens
cttccagtgtgctccatcacctcaaaatctgctattttgtttgtacacttcgcacctgagttaggtgctgatgatgtgctttaaaagccaattttgactgytctaaatgctataagttgacattcattaagttgcttggatataccaaattttctgtatcttcttagaagtctctcctcttaaatttccggcttcatttgc

SEQ ID NO: 455622 - DNA, 201 bp, Homo sapiens
ctcctgccatgctctatggtcaggatgatgcctgtgttagacggtgctgaaaaatcaccaacaccttgtcattgtttggctctattttctctatgtgtgtrtattagtccttcaacagacagttactagagaaagggatcaaactagttgattaggagacagccagagagcatgggactagaagagtgtccactatgccat

SEQ ID NO: 455623 - DNA, 201 bp, Homo sapiens
atatccaaaatcaacactcttactttcaaattattccattcacccgcatacttattctcattcatccactttattctgaaatatgcctcagaaaatgacttttacatttttcttgcacacttttcatttacatgcttgtttatgggaatttataatggatgaattataattttccctagtttctataaaagaaaaaaaaaa

SEQ ID NO: 455624 - DNA, 201 bp, Homo sapiens
ctcggcctcccaaagtattgggattacaagtgtgagccaaggcactcagctgaatttttttcttaatttagtataggtatttgagtttgtttttgtaccayatttatgttgtaatctacacacctaagaatattatggctacatgcttatattatgccccttgtgctctattacttatgtttactacttatgtttgtacca

SEQ ID NO: 455625 - DNA, 201 bp, Homo sapiens
gtgctccatcacctcaaaatctgctattttgtttgtacacttcgcacctgagttaggtgctgatgatgtgctttaaaagccaattttgactgctctaaatrctataagttgacattcattaagttgcttggatataccaaattttctgtatcttcttagaagtctctcctcttaaatttccggcttcatttgccatgatgg

SEQ ID NO: 455626 - DNA, 201 bp, Homo sapiens
ttatttcacaactgaattgaagtaaataattatttccatcagtaatgggaaataattcttttctgaaaagaagtagactagtttgtgggctcttagaatcyttcacacactatggttgaagttgattggcttatcattccaattcttgtgaacaagtgacagagagtttgtgggctacacatcaagtttaagaactcaggt

SEQ ID NO: 455627 - DNA, 201 bp, Homo sapiens
tgctccatcacctcaaaatctgctattttgtttgtacacttcgcacctgagttaggtgctgatgatgtgctttaaaagccaattttgactgctctaaatgstataagttgacattcattaagttgcttggatataccaaattttctgtatcttcttagaagtctctcctcttaaatttccggcttcatttgccatgatggt

SEQ ID NO: 455628 - DNA, 201 bp, Homo sapiens
ggtgcccatcctataacgtcctataattagcttcaactcttacacctcctcaacatctgttgctgttataattgttatttattactattgtaacaccaatraagaaatactgttattgcaaaaagcatttgagaaattgtgaagaaaattaccaattttttaaaaggcaagttgaggtgaaagaagaagaagctaaagcat

SEQ ID NO: 455629 - DNA, 201 bp, Homo sapiens
catcacctcaaaatctgctattttgtttgtacacttcgcacctgagttaggtgctgatgatgtgctttaaaagccaattttgactgctctaaatgctatargttgacattcattaagttgcttggatataccaaattttctgtatcttcttagaagtctctcctcttaaatttccggcttcatttgccatgatggttacat

SEQ ID NO: 455630 - DNA, 201 bp, Homo sapiens
tgagaaattgtgaagaaaattaccaattttttaaaaggcaagttgaggtgaaagaagaagaagctaaagcatttggaatgagttcagtaagtttggtgaartaaagacaattgaacagatacaattagaccatgtcaaaattgttaacattaatgtaaccccaattaacctttttaaaaatataaatagccataaaagtta

SEQ ID NO: 455631 - DNA, 201 bp, Homo sapiens
gctttggatagttacttcgtggcatcagttttgaccatttggggttttattttgctaacattatgttttatagtaggtacaaaatagtttggcatgcttastaagtgatatctcatgagtgaaatgttgatgcatttactatgagaatttgtaataagagactgcattttattatagtacatcaggttttattgacactac

SEQ ID NO: 455632 - DNA, 201 bp, Homo sapiens
aaaagccctttatagttctgtcttcagttgtgtgagattatgaatccaaaggtggaaccctgagtatgaaagggagagtcctgaaataggaaaagttaaakaactgaagaaggcttttatgttttactcagatttttctctttaaaattggttataagttatgacataaagtttaaaatattagatgatattccaactttc

SEQ ID NO: 455633 - DNA, 201 bp, Homo sapiens
aaatattagatgatattccaactttctctgttttgatgttataaaaccttgtgaactgggactccaaaattattgacataagctgggaatttattctaaastgtgacatatttgctctaaactagacttctaaccaactgaaattcaatgacttctgaaatgtgggttctcattcaactagacaaaatgtgtcagccagaa

SEQ ID NO: 455634 - DNA, 201 bp, Homo sapiens
acacatagatactagtaaagtatggcaaaaagcataatttttcacttttacagcagttatatcttaaaggattctttctttgcactaggtacagtttagarcaattgtttattggaacgaatgataatatggttttttacatcttttcattcatatctgttcatgtcaaagatcatttctatgcaccctgaaactcaaggt

SEQ ID NO: 455635 - DNA, 201 bp, Homo sapiens
ccattacccagttccaaatctgctccacattttaagttatttgttatagcagcaccccagttttgggtaccaaattctgtgtttgtcagtttgggctgctrtaacaagatactttagaatgggtaatttataaacaatgtaaatttattgctcacaattatggagactgagaagttcaagatcaaggtgccaacagattcc

SEQ ID NO: 455636 - DNA, 201 bp, Homo sapiens
aactgaaatcctgtaataaatttatatctcttgggatataattgcttcctatccaataacaaagacccaagagaaagaagcaaaagttatatttttttctratatactgataaagagaatagcaaccatgaccaaatagaaatcatcaccaaagcctattcacatctcatacaagatcttgacattttaacttggatttat

SEQ ID NO: 455637 - DNA, 201 bp, Homo sapiens
ctgtctttgtttgggttgctataataaaaataccatagactgggtaatttataaacaacgtaagtttattgctcacagttatggaggctaagaagtccaargtcaaggcaccaacagattgggtgtctggtgagggctccctctctgctttaaagatagcaccttctcactgtgtcctcacatggtgcaagggcaaaaggt

SEQ ID NO: 455638 - DNA, 201 bp, Homo sapiens
gtcttttacaaacaaacaaagaaattcaggcctcctaaatgctatttattttctagctgttggtgttagataacctaattatacaatagtctcttccagayattttctttttcttatagcttatagctctcgtgttagctgtatctactttaaaaaataaatacgtgaacattttattcattcatatacatactaatgttt

SEQ ID NO: 455639 - DNA, 201 bp, Homo sapiens
tgtaaagatgtccttatttacctgatggcaaatatttctgaaaattgagaatgtccccctttagtcatgcctttctttcacaatatgtgaaactctgtgaycttgcattcaagaaacattatttctagctatggaaaatgaatggaataacatttattttctccttgttagttggatagttctgtatttaaatgtttcata

SEQ ID NO: 455640 - DNA, 201 bp, Homo sapiens
gtgcgctgagatcattttaagaaatggagttttaaaaaatctttatgttcttaactggtaaacactacctacctaggttccattatatcctgtttgattaytgagcttttatttctattaagtgtctatgagagtttgtgagggtagcccaaagtaacaagtattctacttagctcacttaaagtgggctgattaccacct

SEQ ID NO: 455641 - DNA, 201 bp, Homo sapiens
tgtttcttgttatagtcctggtttttgaggggaggttgttcaaatgtgcagtatttttactaggaccttaaacacataccccctgttaatgtaaagatgtscttatttacctgatggcaaatatttctgaaaattgagaatgtccccctttagtcatgcctttctttcacaatatgtgaaactctgtgatcttgcattcaa

SEQ ID NO: 455642 - DNA, 201 bp, Homo sapiens
gtagcctttgctgttagacatacctgggttgaaattctgcctctgtcacttactgattgtttgatctttggacttcaaagcaaattgagtttcaagttctrtaatatgtgaatgtaacacatgtaacatgtgaatagtaatacttatctctcaggatttttgtaaggattaattgaaattatgtttgtaggttacacaata

SEQ ID NO: 455643 - DNA, 201 bp, Homo sapiens
ccgcacacagcataatgcttaataatgataaacatcttttcatgtgggccttactagatttttgaaaagtatattgaaccatattttaaaagccctgtggrttttctttttcaaagatatgcatccaataccaaaaattttggtcaagggatttataagccaaaacatttttactccttaaagctcaattttcatacataa

SEQ ID NO: 455644 - DNA, 201 bp, Homo sapiens
ttttacatttttcttgcacacttttcatttacatgcttgtttatgggaatttataatggatgaattataattttccctagtttctataaaagaaaaaaaamacatggatttctcaatattgctaggaagctactaaactctaaatgtaataataaaaaaaaccctcaaaagatgcaaatgcccgttttggctgaacgtgga

SEQ ID NO: 455645 - DNA, 201 bp, Homo sapiens
aagagattcaaagtcatcacatttcaatatagctctaaagccaacttgttaattggaaaattgctagattatcattatatcccagtgattttcctattagyttactatttgaggtcatatgaattatctatttaataacagaaatttggggcaaattgggccatgatatccttcctgacctcaggtcaatatatttcatct

SEQ ID NO: 455646 - DNA, 201 bp, Homo sapiens
cctgattcagattgtattaaacaacagaatttttcatctattccttaccaagagaaacatacgagttaacatcaacaattctaataaattattagaaaaacttcttatatatcctcttgctctacttgcctcagttaaaagccaaatttttcattgctaattatgtgtgtgtgtgcatgtgtgtgtgtgtatgtgtgcgta

SEQ ID NO: 455647 - DNA, 201 bp, Homo sapiens
ctgattcagattgtattaaacaacagaatttttcatctattccttaccaagagaaacatacgagttaacatcaacaattctaataaattattagaaaaacttcttatatatcctcttgctctacttgcctcagttaaaagccaaatttttcattgctaattatgtgtgtgtgtgcatgtgtgtgtgtgtatgtgtgcgtat

SEQ ID NO: 455648 - DNA, 201 bp, Homo sapiens
tgattcagattgtattaaacaacagaatttttcatctattccttaccaagagaaacatacgagttaacatcaacaattctaataaattattagaaaaacttcttatatatcctcttgctctacttgcctcagttaaaagccaaatttttcattgctaattatgtgtgtgtgtgcatgtgtgtgtgtgtatgtgtgcgtatg

SEQ ID NO: 455649 - DNA, 201 bp, Homo sapiens
ttgtgtcaagaaactcagtttgaataatgtacatgattacaaatgttcaattttatatttttgtctcacatttcaaactgactttaaaaatggatttttaraaaaaaaaattggattactttttgcatcatatgagtgtttttggtcacctatttagatgtcaatgctggtgatactccacacattaagtgagaaagaaag

SEQ ID NO: 455650 - DNA, 201 bp, Homo sapiens
tagacatgcaaagcaatactatttagtagatgcaaaaatagataagtaaagacctataagtttttggtttccaaagtcaaatgtttttatggtttattaawattgagaacactgagccgggcacagtggctcactcctgtaatcccagcactttgggaggtggaggcaggcagatcacttgaggtcaggagtttgaggcca

SEQ ID NO: 455651 - DNA, 201 bp, Homo sapiens
ttcatgtattaatcactcttttaacaggtatttatcaaatttctatattgtagaatgtactgtgcaaactcatttatggaattaccccgcaccccctgccaaaaaaaaaaaaaaaaaagaaatttagaggccagtagtgaatattgactaactatacaaagagctacactctaaggccagaaacaacaaaaagacccaaat

SEQ ID NO: 455652 - DNA, 201 bp, Homo sapiens
gtccttgtttgctaaaatttcaacatcttatcatctcagaatacattgcattttcctggttcctcacatttctggttacatttgattatatattggacttygtggttgatacattgttaagacttgggattatgtctctgaaattgtatattctgaaaaggattgatttttgcttcagtggatagttaaatcactatctgt

SEQ ID NO: 455653 - DNA, 201 bp, Homo sapiens
ctactgaatgaaccatgtactgaagagaagaatgtatattctttagccattggatgaaatgttctttgaatatctcttatgtccatttggtcatagtgcaractagtgtgaaacactagtccagtgtttctttgttgattttctatctgaataatctttccagtgctgtaagtgggctgttgaagtctccagctattattg

SEQ ID NO: 455654 - DNA, 201 bp, Homo sapiens
gaagcagtagaatcacttgaacccaggaggcagagcttgcagtgagccaagatagtgccattgcactccagcctgggtgacaagagtgagactctgtctcaaaaaaaaaaaaaaaaaagtgtttgtggtgtgtttgttcatgtgtgggtgtataacagacacacattgaaccactaactatggccaaatctaggaaatagg

SEQ ID NO: 455655 - DNA, 201 bp, Homo sapiens
tcatgtattaatcactcttttaacaggtatttatcaaatttctatattgtagaatgtactgtgcaaactcatttatggaattaccccgcaccccctgccaaaaaaaaaaaaaaaaaagaaatttagaggccagtagtgaatattgactaactatacaaagagctacactctaaggccagaaacaacaaaaagacccaaatg

SEQ ID NO: 455656 - DNA, 201 bp, Homo sapiens
gggagtacctgggtgtgagctctgccactgctttatactaattgtgaggccttagtacatcatttagcccctctacaactcagtttccccgtctatgaaaytatggtgataatttctatctacctcacagggatgtttgtcaaaagtcaatgagattagaaacatgaaagttaaatgtaagtagaacaacactatatatat

SEQ ID NO: 455657 - DNA, 201 bp, Homo sapiens
aaagccagcacggtactgggtattgcccaacacctgtgccaagtactgcctggctactgctgatgtttattcaaagtccaagggctttttagtcagcaagygatgaatccttccaggaggaaatccttctcctaaaggcagagggttcccttctggctcagggtatgtctagaaatgttgtctgggagctagggtctggaa

SEQ ID NO: 455658 - DNA, 201 bp, Homo sapiens
aagggggaaagaccatcaagggtttgataaacgatgttgaaatttccaaattttattcaaggaataacgtgacactgaaggattattattattattattattttttttttttttattttttattttttgagatggagtctcgctgtgtcattcaggctggggtacagtggtgtgatctcagctcactgcaacctctgcctc

SEQ ID NO: 455659 - DNA, 201 bp, Homo sapiens
tgggggtgtcgatggagtgtggacatgtacagcatgtcacgtgcatgtgggcaagaacccccatgggcagaaaagagctaaaagtggaaagaaaaggatakcatgcagctacaattcaaaaatgtattttactttaaaatttgatagtttgacttaaatatttagaaacgtggcatgccagcttccatttgtactttcacc

SEQ ID NO: 455660 - DNA, 201 bp, Homo sapiens
atattgctctccaccatgacagggtagcactgagttccagtgcaaagtcccacaatcagtgctgtttccatcctgcaagcacacattctccatctgcaccmcatggctgctgctggggcatgggcgggtggtggtgtagacaattcaagactgtctttcctaccctcctcagtgcctctttcctcgatacaatgttaaaat

SEQ ID NO: 455661 - DNA, 201 bp, Homo sapiens
aaagaccatcaagggtttgataaacgatgttgaaatttccaaattttattcaaggaataacgtgacactgaaggattattattattattattatttttttwttttttattttttattttttgagatggagtctcgctgtgtcattcaggctggggtacagtggtgtgatctcagctcactgcaacctctgcctcctgggtt

SEQ ID NO: 455662 - DNA, 201 bp, Homo sapiens
atcattttatattgaatctctgtaatgattttgtgtaatatctttaaatagcatagaatactatttatcagcggtagaaccaatttaaattactttcagcyctgatgagaaatgggaagagactgaagtacactacacattggcatttgtacagttggcagctgggcaaatagcagcaacatccacctacttatattaatt

SEQ ID NO: 455663 - DNA, 201 bp, Homo sapiens
ccatccatatatttgtaaaagttaatactgcatcctcaatctatgttggtattcatatgctttttcttatactttgccatcttttcatttttttttattgkaagttcaggggtatatgtgcaggatgtgcaggtttgttacgtaggtaaacatgtgccatggtggtttgctacacagatcatcccatcacctaggtattaa

SEQ ID NO: 455664 - DNA, 201 bp, Homo sapiens
atgcaaatatatgtatatatacacacacgtaatgttacatggcaactcaaattttcctagatatttcacacaaactagattctttgtatttgtcgtcctctttttttttttttttgcatcttgtatcttagtttctatttacccataaaaatatttgtttgttgggtagaaaatgtggtatttttctggttaggggttttt

SEQ ID NO: 455665 - DNA, 201 bp, Homo sapiens
catccacctacttatattaattatctaggttattacagtagagattaaacagagcaggtaagtcaggtaattagcttctttataaaaattgagactacccyttttattcttcactgcttccctaaatcaggaagcactttatgtattacaagcatctaaagaaagtggaaaaatctactgtaaacattttatgttttaaaa

SEQ ID NO: 455666 - DNA, 201 bp, Homo sapiens
tcaaagaaagggtctctagatcaatgcaaatttttttctttagatcattactaaaaacgcatagtcagggtcaaaatagagctggaattctttttacctayatttaaaaagtatgcagtgaaaagtattcaggctcaactagataaagaagctttacagagtgctttatcagcttcaataattaaaagatttcctgctaac

SEQ ID NO: 455667 - DNA, 201 bp, Homo sapiens
ttatctaggttattacagtagagattaaacagagcaggtaagtcaggtaattagcttctttataaaaattgagactaccccttttattcttcactgcttcsctaaatcaggaagcactttatgtattacaagcatctaaagaaagtggaaaaatctactgtaaacattttatgttttaaaaaaattattttaatttttcat

SEQ ID NO: 455668 - DNA, 201 bp, Homo sapiens
gtaagacataaaccctgtcttctgggaatcatatattacagaatcttctcgatttttattctattatttagtaaaataacaaactggtaaccaattaaagrcagactacattcttcacaatatctgatttgatttgtttctttaaagggagagtccattctaacgaacatactatcaccacttccaaggctctctgtcaac

SEQ ID NO: 455669 - DNA, 201 bp, Homo sapiens
acaattgaaacattccaaatgattctaatgaatgtagacagatctttccttgtcctaatccctaagctgtcctttaaacaagagccagacatacatgaaayaagccattgactttcgattgaaaataaccttagacattctaatcttttattaagcactgtccccaggggttgtaaactcaaatgccttcaaggagtgaca

SEQ ID NO: 455670 - DNA, 201 bp, Homo sapiens
ttaaacaagagccagacatacatgaaacaagccattgactttcgattgaaaataaccttagacattctaatcttttattaagcactgtccccaggggttgyaaactcaaatgccttcaaggagtgacagttaacaaaacttatgatgcgcaccataaatcaaacttgatgtgtgatcatacttcacatttgcttggttagt

SEQ ID NO: 455671 - DNA, 201 bp, Homo sapiens
ctggagacagctaagctgccaggtctcagagcagctgattaaaacaacaagccaaaaaataaaagcgacaatcaagcctttaatctcttcctgcagtagtrtaatcaacaggctgaactggagagccaagagagcattggctccccccaatcccattgcacttgcccatggaagatcacattggtcaagatgaggtagatc

SEQ ID NO: 455672 - DNA, 201 bp, Homo sapiens
attgctcctttgactcatggcatatatggcgtcttctgttttgaagctttggctctatctttcagacagtttgcaagtgccctctggctacatcctgtcaytgctgctaggtgttatactctgaagtataaagtcaaaacaaattatatctaccttaactctgggcacttctggtgggtctgccctgtgcctcaggttcct

SEQ ID NO: 455673 - DNA, 201 bp, Homo sapiens
aggtttatgcctgctgccatttctctcctgtttctttagtagactatcattttctgcctctgctgtttacaggaatatattttatttcaaaagcaagattyttcttggcactcaactcatccatgactttattgttgaattttttttaatgttataactcaactctttgtgtggttaaaatggctgaggctcttttatgtt

SEQ ID NO: 455674 - DNA, 201 bp, Homo sapiens
tatatggcgtcttctgttttgaagctttggctctatctttcagacagtttgcaagtgccctctggctacatcctgtcattgctgctaggtgttatactctraagtataaagtcaaaacaaattatatctaccttaactctgggcacttctggtgggtctgccctgtgcctcaggttcctgtccactaatactcgtgagcgt

SEQ ID NO: 455675 - DNA, 201 bp, Homo sapiens
ttttttatttctttaaatatcataaggcccaataggtcacttccctgttaacttttcttacataagaaatttaattattttaagagaaaaatccaaataayatctcagtaatcttttaagaaataaatatattttctttattgccaacagaacatctaaaaagtggacattaaaaaaatgagtttgaaatttgtttgattt

SEQ ID NO: 455676 - DNA, 201 bp, Homo sapiens
ttataaacatgatgccattgcacacttaatagacttcaatatagtgtaggcataacctttatatgtactgggaaaccaaaaagtcatgtgattcactttawtgcaatatttgttttaatgctgtggtctggaactgaacctgcagtatctctgaggtatgcctataattgggaatagtaatgtatagatatgaaggagcta

SEQ ID NO: 455677 - DNA, 201 bp, Homo sapiens
ttaattgtcttatttttaaaaactgccacagacactccaagcttcagcagttaccaccctgatcagtcagtagccatcaacatggaagcaagaccctccamcagcaaaaagattacaacttgctaaaggctgagatgattgttagcagtttttagcaataaaatatttttaattcgggtatgtacattggcttttataaac

SEQ ID NO: 455678 - DNA, 201 bp, Homo sapiens
tgatgtaagaatccataagattcttctctgcatctgtaagtttagcagccttgtttttcttctatttacatgaaacataattatttgcatttaaattaacyagaatgttagtgggtgttacactctttatcctcaattcctatcagagttgggcacttgatcaccaaaagtataaacaataattttaatggttaagcaaga

SEQ ID NO: 455679 - DNA, 201 bp, Homo sapiens
aatgtaatactctagacttagtgtctttgaactttatcacaaacggaataaggctaggaaaagctgattaaagctggtttcacaaccaatcttaattgcayagtaatgcttaatatcttcataaaagtgttttctcataagttggtaaaataaaatgtacgtcagagatattttacctactaggtacagtggtttctcaga

SEQ ID NO: 455680 - DNA, 201 bp, Homo sapiens
taatttgagcaaaagttattataagaagacataaaaagtaaagattaaataactctacgtttaaggaatcaatatatgtttttcattagaagagttttacrtaatgttgtttgcttatttgtctcatttttgttaagtttgccagtgctgctcacatattattgcagactgaattccagtattaaaatgtaatactctaga

SEQ ID NO: 455681 - DNA, 201 bp, Homo sapiens
atgttgaatggaaataacagtagtaggcatttttggatcgttatcaatctcggagagaaaacattcaacactataccactatactactatatatttataaytaacttagatcagattaaggaaactccatacgttcctgggatatgcataattttatataaaattgcttatacatatgtaaaattataattatgcttatgt

SEQ ID NO: 455682 - DNA, 201 bp, Homo sapiens
acaaaaaataaagttttccagttcgtctcgagtcttaaaaaaaagtttgtttacttcaagagataaaagtgacaatagctaaacaaatataattttgttartcttaccttattagcccaaatccaatttctttgagtgatgacaatgctaaaaaattgtgttttcagtgaaattggtgttctgtgtcctccaagtccccct

SEQ ID NO: 455683 - DNA, 201 bp, Homo sapiens
actgtcttctctataggaaataaatataggtaatcagtgaataaagctagaattttaaaccgtttacttggaataaactgtggctgaaagccccatgggcygcatgaatacagcagccaggggtcttcagaaggtcctgtatgccagttatgccccatcactaacaggcagagtaactctcactgagcaatgcgaacataa

SEQ ID NO: 455684 - DNA, 201 bp, Homo sapiens
tatatatgatttggatttgctatctatctatctatgtatctgtctatctatctatctatctatatttggtagggaaaagcctaacataattgagtgtgtaygcagagctggtaactgtaaatttctaactgtctaaagttgatgacatttagggtaacaggttcttcagtaggtatttttagtgctgagatgtaagatgca

SEQ ID NO: 455685 - DNA, 201 bp, Homo sapiens
ttttgccagttttgttttcttctctgtggattttatttcaatgccatttatagtatctttaaatttagaggaactatgaattttcatccttattattattrctgtttagtattatctaagaaattactccctatcccccagagtcatgaatatattatgctcaattatgttccaagggttttacagttctgccttccaaat

SEQ ID NO: 455686 - DNA, 201 bp, Homo sapiens
ccccagagtcatgaatatattatgctcaattatgttccaagggttttacagttctgccttccaaattaaggtcttttatctatctagaagttttttttttwtatatatacggggtaagaaaaaggtaaaattttactcttcaatactcttcatttgttttattgagatataatttaagtgcacaatgacttagagtagtcg

SEQ ID NO: 455687 - DNA, 201 bp, Homo sapiens
tatatgtttttcattagaagagttttacgtaatgttgtttgcttatttgtctcatttttgttaagtttgccagtgctgctcacatattattgcagactgawttccagtattaaaatgtaatactctagacttagtgtctttgaactttatcacaaacggaataaggctaggaaaagctgattaaagctggtttcacaacca

SEQ ID NO: 455688 - DNA, 201 bp, Homo sapiens
ggagggagaaagtggcattgagcctcctccagctgacaaaggaccagagaggcaaaccgaggctgttagtctaccaccatgctattcataccatgccctctcctgaaatgctcatacacccactctctacatgttataaacataaagccttagtcaaatagccacctccgctatgacactttctttgaccacttttgccaa

SEQ ID NO: 455689 - DNA, 201 bp, Homo sapiens
ttcacaaccaatcttaattgcatagtaatgcttaatatcttcataaaagtgttttctcataagttggtaaaataaaatgtacgtcagagatattttacctmctaggtacagtggtttctcagatatacttagaatctttattcgggctctccagctttaaattcacaaagtctacaactttgtgttcttgggcaaacctaa

SEQ ID NO: 455690 - DNA, 201 bp, Homo sapiens
aatagccagtgattaaatattgcacttgtattcagcattttatttgtattctgattctggaatatctaaaatgacatttatcttttggtattaccctgttktatgtttttttaaagcactttttgcaaactgatattatatcagtctttgtaatataaaacccagttgtaatttgagcccataattggaaaatctgccata

SEQ ID NO: 455691 - DNA, 201 bp, Homo sapiens
cagaaattcctgtctgagctctgctcttagacactcaaaagtgctctggcttccttatttacaaagtagatcaaaactagtttctaacatagaaattttcyccaagtgcctgcttctgaaatggcctgcctgttaaaacaaaggaggatgttttccacattaacttcttgttaaaatgatgtatctgtctgaatggaaata

SEQ ID NO: 455692 - DNA, 201 bp, Homo sapiens
tgattaaatattgcacttgtattcagcattttatttgtattctgattctggaatatctaaaatgacatttatcttttggtattaccctgttgtatgttttyttaaagcactttttgcaaactgatattatatcagtctttgtaatataaaacccagttgtaatttgagcccataattggaaaatctgccatagttatttac

SEQ ID NO: 455693 - DNA, 201 bp, Homo sapiens
ggacagacctaagagtaggaatgccccaggccacagagcaagcagcaaagctattttattaaccttaattacaatttgatttttaccttgcccaaaacctkcttttttaaaactcttcttaaatgtatcctttctctataaaggtcctttaatcatggtggataggctttatagttaagacctccttagatttgcattgaa

SEQ ID NO: 455694 - DNA, 201 bp, Homo sapiens
tgaggcaggagaatggcgtgaacctgggaggcagagcttgcagtgagccgagattgggccattgcactccagcttgggtgacaatgcaagactccttctcaaaaaaaaaaaaagaaaaaaagaaaagaaaatattatgaagtaatagtatgttgtgaacacaatagcttttatttctttatcccattctcctttatttata

SEQ ID NO: 455695 - DNA, 201 bp, Homo sapiens
cttgtttcccacattgaccctcatatcgaaagattccatctctcaagaaaattgagtttatgtagtaatacttaatttaactcccattttcattgaaatcmtatatacagatatagtcaagtttcttatcagcatgaaaccactagtgtgctcacacctaattgataaaattccaacccaaagcaaagaaacttaacatat

SEQ ID NO: 455696 - DNA, 201 bp, Homo sapiens
agtgaattgtaattttggacaaagtattttcaaaattatgttatttagacaaataatcataagtagggttttttagcgaaagtgtgatttttaatttttgrttttttttttggtcacaatgtagtcacacaaaaatatgatggggctgttatatcaatccccttttccaagaagccatttgggtgaatcatggcatagcaa

SEQ ID NO: 455697 - DNA, 201 bp, Homo sapiens
aatgtaatagtcacattctttctacaacgttgttggctaatagtaaatttcccccgtgagattgccactcctctagttaatctgaatggtggggattgcgrtcaaatccattcagtttttctcatctgtatttatttaaagagactataaacaggactttaatgagcaggattgatctcaaccatgcccaccagggtcctg

SEQ ID NO: 455698 - DNA, 201 bp, Homo sapiens
taattagagagactcctggactgcagtagtaggaaagaggtaagatggtacaaatttgttcgtcatatcaaggactttatattttttagcaagtgcagtakgaatccatataagggttatgagcatggaagtgacatgatccgatttagttttgtaaggagagctcagggttttgtacacagaacaaattggagacagaga

SEQ ID NO: 455699 - DNA, 201 bp, Homo sapiens
ctgcagtagtaggaaagaggtaagatggtacaaatttgttcgtcatatcaaggactttatattttttagcaagtgcagtaggaatccatataagggttatragcatggaagtgacatgatccgatttagttttgtaaggagagctcagggttttgtacacagaacaaattggagacagagatagtggaatctgttaaccac

SEQ ID NO: 455700 - DNA, 201 bp, Homo sapiens
agtagaaaatgaaaaccaaaaatttattgattagtctacagatagtgattttttaaagaaatggcataatttaagaaacattttaatcattttccttatayagactattaactttacaaatattgagattgtttctatagatagaagacatttaagcctacaagtaataaactgaaaatatatttcttttatcttcaagaa

SEQ ID NO: 455701 - DNA, 201 bp, Homo sapiens
gcatacatttgtcaggctgaaaatggtccagtgagctgaaaacatgacgcagattaattttaagagcttctaaagtagtgtctacatcagctgatcagacyggaacaataataacacgacctaaaaaagtatctacaacactttcaggcagtcctaagaagtgatcagaggccaaaatagtcaatgtgcttgcagtgggag

SEQ ID NO: 455702 - DNA, 201 bp, Homo sapiens
gaatataaaagcccctgctatccaggtctgagtaactctaacattcaactggagagaggaagaggaatgtgataggaagactgagaaaaacagagttttartaaatcgactcccactggaaagcacttaattgattcttcagcttgaagatataggatgggtatattttcctaaaagagagcagccatcagtagattctga

SEQ ID NO: 455703 - DNA, 201 bp, Homo sapiens
aagtctgagtccctcccttccccaagatttctcagaatattgatacgtgcctagggtgtttagtctctcttatggcaagaatccttcttttaaggcagctratgccagggaaaaggggaaaggaggggaagggattgtggatccagagacctattgtacagcaataagcaaggcactttctgtttcaagtagctactatca

SEQ ID NO: 455704 - DNA, 201 bp, Homo sapiens
agggactcctaatttgaaggaaaagttgccactatccaaaaaatgatgccgtttctctcaccccacccggctaaggtgagagcacctggtaaccaacttcyttcagtacatttatcctccagagaaatttgcctaataaattccaagagcttaacaaatactagttttctcattttctgcctaatgcaagcttagaactca

SEQ ID NO: 455705 - DNA, 201 bp, Homo sapiens
gagtccctcccttccccaagatttctcagaatattgatacgtgcctagggtgtttagtctctcttatggcaagaatccttcttttaaggcagctaatgccrgggaaaaggggaaaggaggggaagggattgtggatccagagacctattgtacagcaataagcaaggcactttctgtttcaagtagctactatcaagttca

SEQ ID NO: 455706 - DNA, 201 bp, Homo sapiens
tctgattctgtgagctctaaaagaaaccccaaggtaaatagaagtactgcagatagtgtaaccatgagcaacaggtatttttgtgtcaaaggaccaaaaaytgtccttgtaagtgtataggtctttggtatattctaaaagttaatttttaagttgagaaagataaaaggacaagtggtatcctgaagttcatgtgtcata

SEQ ID NO: 455707 - DNA, 201 bp, Homo sapiens
tatataaagatttcttaggtaccaaaaagaacattttggactttctcaaaattaaaacgttctgctcattaacatacaacattaagaaatagacaaactaygaactgtgcaataaattctaaaacatagatccgaaaaacgtataaatatgtgaaatatgtaaagtgttcaaagaatacacatatttaaaaactcttaaaa

SEQ ID NO: 455708 - DNA, 201 bp, Homo sapiens
attttggactttctcaaaattaaaacgttctgctcattaacatacaacattaagaaatagacaaactacgaactgtgcaataaattctaaaacatagatcygaaaaacgtataaatatgtgaaatatgtaaagtgttcaaagaatacacatatttaaaaactcttaaaaagcaccagtatgaaaccaaaaacaattttaaa

SEQ ID NO: 455709 - DNA, 201 bp, Homo sapiens
tttctctttcctaggagagaacttcctataattccctcagaaccatccctgtccctattgttcatcatccttatcagagcagtcactccagcgaatctccytatctcaaaacccagaagtcccaagacactcttcattgcctgtcctcttttgcctcccaaatttgttagcttgcaggttcagctgcttctttctacttct

SEQ ID NO: 455710 - DNA, 201 bp, Homo sapiens
tatccaaaactggaagcaactctaatgcccatcattttgagaatggttaaattaattttcatacagtagaatactattgagcaaaataagtaatgaactaktgaaatatgaagaaacactgagttaagtgagaaaagactcacatttataaatgagtaatactgtatgattccatatattttaagtccagtaaatacaaaa

SEQ ID NO: 455711 - DNA, 201 bp, Homo sapiens
tgaaaatctacagctccgaaacatcatgatgaatgttttacagtcttctagttcacagggaaacagaatgcaagagacttaccagcttctcctaggatgcrttaggagtcagtatactttttagtttatgtatgagattgttttgcctgacttaccaatagaatgaattttaatgctctcctgctcatttgtgatttctct

SEQ ID NO: 455712 - DNA, 201 bp, Homo sapiens
gccacgtgttgtcttgttgctgtagagagatgtgagatatttacctctttttaaaatacaaagcacttgtactgtgttttctttatcataatttttgcttytcaattttatgttttaccttcattgtgttaatgatattgaccaacccttccaattttgcattgttctcaattggcttaacatgctagtcatgatttcaac

SEQ ID NO: 455713 - DNA, 201 bp, Homo sapiens
acaataacaacaaacaataagcatataagacctcccaaagtcagctatttttttaacaaattgaaaattaatttactttgttgagtctttcctcatgtgayagtaactattttatatattttgataagctgttacttgaagtaaatatatttctacttgtagtttttatgtgtttctgttttgaaaatctacagctccgaa

SEQ ID NO: 455714 - DNA, 201 bp, Homo sapiens
gtaacaaattattacaaacatggcttaaaacaacacaaatttgctattttatacttctctgggtcacatgttcaaaatggatcttactggctaaaattaargtgtcagcaggtctgttttcttcctggaggttttaggagagagcccattcccttgtctttttcagctcctacaagtcacctacatttctgaactcaaagc

SEQ ID NO: 455715 - DNA, 201 bp, Homo sapiens
agccaacttcatatgaggtgcaaagctcactgaagtgtcaagacaaatcagtagtcaaaaggaatcaaacattactgagtggcaactgaaaatctcaaccyacatttggaatggtcctagagaagtgttatttcctggaactaaatggagattggagacattcagtgtggctttctgtttgtaaaatccattgaggggata

SEQ ID NO: 455716 - DNA, 201 bp, Homo sapiens
aaatttgctattttatacttctctgggtcacatgttcaaaatggatcttactggctaaaattaaggtgtcagcaggtctgttttcttcctggaggttttargagagagcccattcccttgtctttttcagctcctacaagtcacctacatttctgaactcaaagccttttcctccattttcaaagccaacagcatcgtatc

SEQ ID NO: 455717 - DNA, 201 bp, Homo sapiens
tgttattaggagccaaacccagccctgtatttacttgctgtgggaacttgggcaaattattgatcccctctaatcttcactcagtcccaatatttgtaaawtaggaataatacctactcatgaagttattgtaaaacttaatgaaacactgcatgaaaagcattttgctcagtgtcagggatgcagtaagaactcagtaaa

SEQ ID NO: 455718 - DNA, 201 bp, Homo sapiens
tcttcttttgttattttacaccttctagggatgatgttgaatggaaataacagtagtaggcatttttggatcgttatcaatctcggagagaaaacattcamcactataccactatactactatatatttataattaacttagatcagattaaggaaactccatacgttcctgggatatgcataattttatataaaattgct

SEQ ID NO: 455719 - DNA, 201 bp, Homo sapiens
tttggtctgccaaacattaggtttctatgaattttagctgtatttctcatgtcaaaataagataggtttttctgagatttcctcaggcaatacgtatctgsaggtctgcttttcaataaagttctggtaccttctaagtttctagtatgtcttaattttcatgtggaataactaaacgttgggatagagggaaagacaaag

SEQ ID NO: 455720 - DNA, 201 bp, Homo sapiens
atgagacagctcaaaacacaatattgaatgctgtgcaagattaaatgaagagaaaagagaagggctggtattcattcatgctggcccacacaggaataaamgcacttaccgcattttctagagcataatagttttagcaactcttttgaatctgcttctttctgttttatacatttactttaaaacacacatcttggaagt

SEQ ID NO: 455721 - DNA, 201 bp, Homo sapiens
tttctatgagagtgtctcacattgcatttaatctttacattggctaaattctaactaaacaaaaatttcttaaaacataaatgaaagtaaagatttttttyttagcaatgaccaaccctctccctagacagcctacttttggtattttgggactgattgctagaacttccatgaaaagattaaataatttttttttttttt

SEQ ID NO: 455722 - DNA, 201 bp, Homo sapiens
tgtattctcaattatagcatattaatatatctccaaattaagtatatttattgaagcatgacttaagtgaggattgtttaaaatgcacaaggaggtattartttaaatatgtttattcacgtaataataacatgtataaataggctagttttattcataaatatctgcagttataagtaaagttacttataattccattac

SEQ ID NO: 455723 - DNA, 201 bp, Homo sapiens
cattttccttatatagactattaactttacaaatattgagattgtttctatagatagaagacatttaagcctacaagtaataaactgaaaatatatttctyttatcttcaagaattctgttaatattaaccatttatcaaaaagaagtatcataaataaaatattccaatgcattttgtatttttaatgttaaaatgtcaa

SEQ ID NO: 455724 - DNA, 201 bp, Homo sapiens
taaaatagaaaactaaggtatacagggtattctttaaagcttttgaaaaaaaaagtctttaaattatgtgttgaaatgattacaaaaatttataaccactrcagagagctgccaagttcatttaagattgattaaaacaaactaacttatagtctggatctatttatctgaggaaatacatttttacctgacactggacac

SEQ ID NO: 455725 - DNA, 201 bp, Homo sapiens
taccacataaaaatattttatttttatagaattattacctctggatataaaatatgtatatatacatatacacacaatatgtgtgtgtatatatatatatacacacacacacacacacacacacacaatactggtaatactaatatacacaatactggtaatactaatacaacacacaatactggtaatactataatcaat

SEQ ID NO: 455726 - DNA, 201 bp, Homo sapiens
taaatccatggagtttatcacaaaagcaattttacattattttggaaacaaaatttcctatatagtttaaattatttttgattctatatgttatctttatragaaaaaataataaagtttcttaatgtcaaattttaataatcaaaatacatctattaggcacattgcgtacatttttaaaagccaagtaaaccctgtagt

SEQ ID NO: 455727 - DNA, 201 bp, Homo sapiens
gttaatgttatgaaaatgaaagtatataaaatatgtctggatccttcttggggtgatcaagaatgtttgtaacaatattctaagtaattgcacatagcatrtaaaggaagaaaaccaagcaacatgccgttgctctctaataaagtataaacttgaaatagatatatgcaaacaaaaaatatgaaacagaagttacaaaaa

SEQ ID NO: 455728 - DNA, 201 bp, Homo sapiens
tctcatgaacttgcacaggaatggtgcaagtaacatccctttcataacagcaacgtatccacaccatttcatttgtctagccacatagacacatagaaagrtaggctattccttttatatctattggtaaattttctttcgaataactgctgagaacttcactcctataagcagttggtgctgctggttgaagaaaataga

SEQ ID NO: 455729 - DNA, 201 bp, Homo sapiens
atcatttaacttacgcaaatattccaataactcttcattttttggccttttccatttttgcccttttaagtgttggaataaatgcaataaatagatttctaaaaaaaatgaaatcgctatactaaagtctgtagcattctaaagtatttaaatgttatttctgtttactattaaatttttttttccgttttactctttcac

SEQ ID NO: 455730 - DNA, 201 bp, Homo sapiens
aatgtaagctttccagcaaaacaagctatttgaggatagatttttaaactttagactgaaaatctcttgggtatgtgaaatccaaagcacttacacgaagrcatgggaaacctgggaaaaataagctccatggatgacttttggtttctgtgttcctacaatttctcttctcctgaggacataatttcagtgcctaggttt

SEQ ID NO: 455731 - DNA, 201 bp, Homo sapiens
tatgtttgatatgaacattatttaaaccaatgaaatacaatatattgcaatacaatatttcaaagtagcatattcttttaagagatttcctgttacatagkcaggctatttaatttgctcagtataatgattaaaataaacttttctggtgataatgtctattgtgagtattctaattggtccactctgattgtcttgaaa

SEQ ID NO: 455732 - DNA, 201 bp, Homo sapiens
tacaatttctcttctcctgaggacataatttcagtgcctaggtttaatctcattattggtcctgagtcccccacaaggagttatgtttgagttttgaatgwtatatatatatatatatatatcatttgaattatatatatatatcatttgaatgatatatatatataaatatatataatatatatttattttttgagatgg

SEQ ID NO: 455733 - DNA, 201 bp, Homo sapiens
gcaatttatattcctttgagtatgtaactagtattgggattgctgggtttagtggtatttcagtctttaggactttcaggaattgccacactgtcttccayaatctgatcccatttgtcaatttttgcttttgctgcaattgcttttggtcttcatcatgaaatctttgcccgtgcctatgttctgaatggtattgcctag

SEQ ID NO: 455734 - DNA, 201 bp, Homo sapiens
ctctgaaaatgtcttgggtaagccgaagaaataccagggcttctccattgatgttttggatgccttatctaactacctgggttttaactacgaaatttacrtagcaccggatcacaaatacggaagcccacaagaagatgggacatggaatggcttggtaggagaacttgtctttaaggtaagaattactttatttatttg

SEQ ID NO: 455735 - DNA, 201 bp, Homo sapiens
ttttttttttctgtcattgttgatttgacagaaaaatcaatgttgatttgttttcccccccagtggacagaaatttttcaagtcaaaaatttattaaatamtacctgttatttgaaatcatttcttttaaagacattcaaaaaattatgacatcttattcgttctcacatcgtcaccatgagataagtactatttttcaac

SEQ ID NO: 455736 - DNA, 201 bp, Homo sapiens
attggtcctgagtcccccacaaggagttatgtttgagttttgaatgatatatatatatatatatatatcatttgaattatatatatatatcatttgaatgwtatatatatataaatatatataatatatatttattttttgagatggagtcctgctctattgccaggctggagtgcagtggcacaatctcagctcactgca

SEQ ID NO: 455737 - DNA, 201 bp, Homo sapiens
actgcataatattccattgtgtatatgtaccacatgggcatttaggttgattccatgtccttgctattgtgaatagtgctgcagtgaacataagtgtgcakgtctttaaaatagagcaatttatattcctttgagtatgtaactagtattgggattgctgggtttagtggtatttcagtctttaggactttcaggaattgc

SEQ ID NO: 455738 - DNA, 201 bp, Homo sapiens
ttatgataatggcttccagtttcatccatgttgctgcaacaatcatgattttattctttttatgggtggatagtgttccattgaatagtacacacatttctttttttttttttaattttattattttttttattattatactttaagttttagggtacatgtgcacattgtgcaggttagttacatatgtatacatgtgcc

SEQ ID NO: 455739 - DNA, 201 bp, Homo sapiens
cttttttatgactgcataatattccattgtgtatatgtaccacatgggcatttaggttgattccatgtccttgctattgtgaatagtgctgcagtgaacayaagtgtgcaggtctttaaaatagagcaatttatattcctttgagtatgtaactagtattgggattgctgggtttagtggtatttcagtctttaggacttt

SEQ ID NO: 455740 - DNA, 201 bp, Homo sapiens
attaagacagatatatctgacaatggctagatgccataataaaagagtcttgcaactgaaataatacagaaaccagaaagttataagaggaggtgctcgtyagaatagaaaaatagtaggtaaattgttttaatggaattattctcttttgagagtactgatgagagaaacattaaatttcagggctggaaaagctgggta

SEQ ID NO: 455741 - DNA, 201 bp, Homo sapiens
tcagtaactacctcacagggtgatttcgagaattatataactgaattgctacagagtgaacaatgcaggtgaagagataggtgctcaataaatgtgagacrtgttaactatcatgactactactgccattggtgagcacacattatatagttccctttcttgagctttgctttttattcagcaaattgatcgaacgcatcc

SEQ ID NO: 455742 - DNA, 201 bp, Homo sapiens
atttattcataagtaaaatgttcttaacaaatattgatcagcatcaatgtaaagatgcctcttatactgaaatattatgatctcatgctcagatcacaagytattatcaaatagaaattcaatctcagtgatgggccactgttgccagatcgtgtcacctcagaaatctagtatagcatataattatctttattttttaaa

SEQ ID NO: 455743 - DNA, 201 bp, Homo sapiens
tcagtattgcaatgggtctcccacagttccaggcagtttctggttcttggggggaaatgctcctgtggcattattgattgcagccttcatgagaaggacartgatttactgtgttgcttcctgtgcagctgtgaatttgctgtacagtgacagggccttccgtggcatcctctgtctcaacttgacaggagatctggagag

SEQ ID NO: 455744 - DNA, 201 bp, Homo sapiens
catccatgttgctgcaacaatcatgattttattctttttatgggtggatagtgttccattgaatagtacacacatttctttttttttttttaattttattattttttttattattatactttaagttttagggtacatgtgcacattgtgcaggttagttacatatgtatacatgtgccatgctggtgcgctgcacccact

SEQ ID NO: 455745 - DNA, 201 bp, Homo sapiens
ttcaaatattaattttaatgcttggcattctgccataatttcagaaacaccaagactggctgaatacagtactgaagcctttttctactccaagtgaggtcttaaaatgtattacatgattaaaaagattaaatgtgcctaatctacacagaggaggaagaaatgagtagaggaaaaaaataagacacaaaaacttagtga

SEQ ID NO: 455746 - DNA, 201 bp, Homo sapiens
ttgcatatacaatacaatttaagataaatattccattccagggattaggaaaactgaagctcagagggatcatgttatcttgccagtacatagtcaggaartaatgataacagaatttcacccacgttttcctaactaatactcatactgttcttttatttatttatttatttatttatttatttattttgagacacagtc

SEQ ID NO: 455747 - DNA, 201 bp, Homo sapiens
tactattttatgtattccagagaatgccactaaattttgttaaattgcaactgtagtttggaaaatgagtagtattgcaggatacctctatctgtaatacrgtctgtggtatcatcagatggtatagataatatactccatgagggcaagaactgttttttgttttgctcaacattctcttccaagtacctctcacagtgc

SEQ ID NO: 455748 - DNA, 201 bp, Homo sapiens
ttaatccagtctatcattgatggacatttgggttggttccaagtctttgctatcgtgaatagtgccaatatatgaaagtccctggggaatcttgagagccytttgggccagcatcaagactcactgagctgtaatttagtgcttaatgccataaggaatttggaatcaatttttatacagtcatggatcacttagtgatgg

SEQ ID NO: 455749 - DNA, 201 bp, Homo sapiens
ccccttttattcactagtcttaccataacatttgaagtttatgtatacagttaaagttgaataatagaacaaaatatattcttgtattttcattctattgytcattagtggagaaaacagaagaaaaatgagttgtatttatttctttccttttacttttttgaacgtcacattattctttaatatgagctctggaaattg

SEQ ID NO: 455750 - DNA, 201 bp, Homo sapiens
agaccagagctgttcctattcagccatcttggctcctccctccactcccctgctttttaagacatgctgcctgctctcctcaaacaatggtgacctccagrcctctatcttgtaggatccaacttggctttcatctttttaggaagcctcctgtaatatccctttcttcaatgtcgattgttcatgaaattccttagcatt

SEQ ID NO: 455751 - DNA, 201 bp, Homo sapiens
gagatgactctaacctagagagatcaatttgaatgggcaccatatatttcaaatttaaggttcattttctaccaaataacatgtctataaattatgatggktcttagagccaacaaaaatttcatcaaaatttgaacataaatgttgttctaaatgttaaagattaaacaatgtgcttttcaaaacagttaaatgttattt

SEQ ID NO: 455752 - DNA, 201 bp, Homo sapiens
gtctggcactccctagtgagatgaacccggtacctcagatggaaatgcagaaatcacccatcttctgcatcgctcaggctgggagctgtagaccagagctsttcctattcagccatcttggctcctccctccactcccctgctttttaagacatgctgcctgctctcctcaaacaatggtgacctccaggcctctatcttg

SEQ ID NO: 455753 - DNA, 201 bp, Homo sapiens
attctctctcagcgtggtgaaatgtggactcaacacatgatcactctgtactcatttaaagatgcacatgtcataacagatattactacatgttaatacawattaatacactattgaaagagcactggaataggagtcaccatctctggttctaaaacggactcatactttccaatgattggacttgctatatcacttaag

SEQ ID NO: 455754 - DNA, 201 bp, Homo sapiens
tgtaacattgatcacatacaagataggtagtatatattgtacctttgtacatatttgttatgtgtattatctggcattctccaccagaatataatctccamaagtatatgattttaatcagcacagccctagagcctagaagagtggctagcaatagcagccattcaacaaacatttgtagaataaatgaatgaatacata

SEQ ID NO: 455755 - DNA, 201 bp, Homo sapiens
cagtgaataacaaggtgaggtcatcataccatctggagggctacagaatcatcaggggctggataaagaaaatggcagaggctcagaaggatgtagagcaycccaacaaaccaaaggaggctgagtcagcagggaggagcccataagccctacattagccaacttttagcacctatagcctttgcagactttagcagcagt

SEQ ID NO: 455756 - DNA, 201 bp, Homo sapiens
gcttgcagtgaattctctacctgacacgatttgtcatcagatgttttatgtggttctcatcttgtaacttcttagtttaaaaacatttagtcatatgttgyctcattaaaggcattcaagaatgaagaaaactgaatttttcgggttgacttcattgtgcaataaataaagttaactccagtgttgacttcagaatcttaa

SEQ ID NO: 455757 - DNA, 201 bp, Homo sapiens
gttgttttttgacatgagggatacttcctttctcttattgattgaactattgtgttctagtcttaaatttattctctttttgtaagaggatacaataaaaktatgagtcaaagaatatattggggatttcaaaaaattcattagaaatggaatttaacataagctcttaatataagctccatcaagttcaagacatttttg

SEQ ID NO: 455758 - DNA, 201 bp, Homo sapiens
gttttagtgagtctgtgttgctggttcttcgatacgtgtgcatttccttttattttttttctcttgatccaagaattttctttaaagagatatgctttccrgaagaaaaggaacataaaagtacatatgtgttttagtgttcagagtatattcaggtgattcatattggttgggaggggcaggagatcaggtaaaaaaggg

SEQ ID NO: 455759 - DNA, 201 bp, Homo sapiens
tcagttttcccatttgcaaaatgaggataataatggtttcttccttcacatgattgttataaaaattaaattagttaataatatgagaaaagaatagtgcwggtccagaataaattttaaatgttagtgttatattttactgatataaagatagcctgatgtacttgtttaatttgtatctgatctctcatccatgggccc

SEQ ID NO: 455760 - DNA, 201 bp, Homo sapiens
aatgtaagcagtaattgacattcccatttcatttctattactttgctataccacatattttggcatttgttttgcctccatagtcttcttcattggttcaygtgtgtactccttgtttcaagatgataaattttctagtggcaaggactctgttctaacatcatgttaccttgattctaacatcaaagctaatatttaatg

SEQ ID NO: 455761 - DNA, 201 bp, Homo sapiens
ctattgtacaactcttttaaagtatcttgagtaagattagaattttgaggtaccttttcttatttccctactatttaaaacaagagacagaaaactagcastaatggagtgtccatcatgtgtctggcacagtgctatacatgttaatgtatatcatctttttaaacaaagaagactgaaattggtctaatgcaacatgac

SEQ ID NO: 455762 - DNA, 201 bp, Homo sapiens
cacatcatcacataaccattttattttaagacagaggtttcactcctgtcacccagactggagtgcagtgggcgcggtcttggctcactgcaatcaccacytcctgggctcaagcaattctcctaccttagccactcaagttgctggaattacaggcttaagccaatgcacccggctaatttttgtatttttattagagat

SEQ ID NO: 455763 - DNA, 201 bp, Homo sapiens
tgaattttgagttacaaagacaagatgggggtaggataattgtacaaaactaaagtagaattaattccattatttaaaaaatactagtgaatttctgtagytattttatttttgaaaaggcaaaaatatatacagtttgatcatctcattcccgtagaagtcactcacatctcagttgttatcctagaatgtgtttgaact

SEQ ID NO: 455764 - DNA, 201 bp, Homo sapiens
aaaataaacaaacaaaaatctgatgcatctgcaagccttatctgaatttaggcataaataaggtcttggaagaatgattcactctgttatctcaccttagmtagtgactaactagcactgagatcaggttgctactaatagagactggcaagacccctgggtcaggatatatatttgccaggtaagttttctctcctaact

SEQ ID NO: 455765 - DNA, 201 bp, Homo sapiens
gggctcaagtgatccacccgccttggactcccaaagtgctgggattacaggcatgaaccactgtgctgggccccccccttttttaattgtaataaacaatrgaatccagttgcagcaatgtcagtcatatctctggtcatctgatgtttctctgggcttgggtgcacatcacatccggatgtgtgtttcattcttatttcc

SEQ ID NO: 455766 - DNA, 201 bp, Homo sapiens
taaacagagtaaatcagctgcttgggactacacagctttcctaatttttatggttgacacaaagtttggcaattctttagttttactaggtaaatgaattyctatgatgggtattttagttcatcaatgcattaacaatagaaagcatatatttaccgggaggctttataaatattttattttattattttatttatttat

SEQ ID NO: 455767 - DNA, 201 bp, Homo sapiens
tttttcctatgtatacaactagcactatagagccgttatctaggaacatctgttagttgcttaaaccgggtctcctagaatagtgtctctcagtattgttrtatctgtgatctgattttaggaacttgttctttagtcatttattcccacctcaatccataagcaaaaaacacaaacaacaaaaatggactataaacaatt

SEQ ID NO: 455768 - DNA, 201 bp, Homo sapiens
ttccttagagtcatgtttgattcttttttttttttaacctatatgcaattcaagaactattccatttagctttacttttaaatatactcagaaaataatgyctgctcggtacttcagcactactgtctaggccaaaccatcatgtactcctgcctggattattcatctctttgcatctgcccatgccacctacggtttata

SEQ ID NO: 455769 - DNA, 201 bp, Homo sapiens
cgttttggatttaaaaataatctgttccttcagcctaattttacctgagcgtttccaccacctggaaattaaatctcttcatgctaactgattatcaaatrctaaattatatgacaagaattttactccccaaggaaaatagatccaacaatggaagaaagccagaacccaggaaaatggaaaaaaaggaggaataagtgg

SEQ ID NO: 455770 - DNA, 201 bp, Homo sapiens
ctagtaaattatatttatttatttgtaatattgttgttttcattatccaggttgaaatttttaaaaattaaaaattaaaaattttatttaaatttttttawttttatttttaatttttatagatgcatactagttgcatatatttatggggtacatatggtattttgttataaggatacaatctgtaatgattaaatctgg

SEQ ID NO: 455771 - DNA, 201 bp, Homo sapiens
ctccaactctttgtttaaacattgtcttctcaatgaggctttttctgactatctaaaattgaaattcctctcccaatattccctaagcttgctccacagtwtaaatttctcttaagaaattatcctcatctaacattctatatattttactatatgtttattatatccctctattcctttgacatctcaccagaatgtaag

SEQ ID NO: 455772 - DNA, 201 bp, Homo sapiens
aagatacatacttaaaaaattcctttggggtttatatgaagaaaaaagcttgatggttattacaatggaagatttattttatataaagaacatgactggtmgttttggatttaaaaataatctgttccttcagcctaattttacctgagcgtttccaccacctggaaattaaatctcttcatgctaactgattatcaaatg

SEQ ID NO: 455773 - DNA, 201 bp, Homo sapiens
tatcagaagtgtgcaagtaatttagaccttgatgatgagtaatattttgcctgtgatttgaagtagctcctctctagcactagcactctgattatttctcyctaatataacctcacatgcacaaaaatttttgaagctctatttttttaaatggcaaaaattgatttatttccagatatgatctataacactaggttataa

SEQ ID NO: 455774 - DNA, 201 bp, Homo sapiens
tacttcacttaggcacactacgagtacacaaaatactgtactagaacataaaatggcaatatatctgacatcaatatgttaatgtctttggttttattctygtaaacatttctgttactctttaggtttgaaagaagcttatccatcaaaacaaaaagtaggtcatcctaagcaatttgagggatactcagccatgatatt

SEQ ID NO: 455775 - DNA, 201 bp, Homo sapiens
tctattgtattgcctttgctcctttgtcaaagatcaaattactatatttatgtgagtctatatctgggctctctattctgttctattgatctctctgtgcrttcttttgccagtaccacacttcctagattgctgtagctttatggtaagtcttaaagtcaaattgtatcctatggtagctttattgtaagccttcaagtc

SEQ ID NO: 455776 - DNA, 201 bp, Homo sapiens
cctctcttttttaatcctcctccatccttagacctttaacatcaagcagactaaaaagagatctaataggtagtcatatatcccgaaagacacattattgaaaaaaaaaaatgcctacaaagtagttgttgccaaaataatttgcgggaaatcaacccaataagcaacactacaaaaataagataaaaaatggctagcctc

SEQ ID NO: 455777 - DNA, 201 bp, Homo sapiens
agaattaacatggatgacattgttgatgaggtgatactggagcatatgactgagataaaagtaaaggaacaagctatgtgggactaggacatgggtgaagygagcagaggagggatcaataaattccaaatccttgcattttccttgtttgctccacaaaaaacgaaaagatgagtgtggttgtgtctcagggaggcagaa

SEQ ID NO: 455778 - DNA, 201 bp, Homo sapiens
acctgcaagagaccagccaccacctttcccctaaatccctaatttcagggatataatgctgtcctccataaatcctgataccattttgaaaaagagtaagrgaaaagagaagaaatgggaagaattgagtaattctctcaagtagattgagctaaagctagagacatgttaaattattagatgagattaaattttaaatca

SEQ ID NO: 455779 - DNA, 201 bp, Homo sapiens
atgtttttttaactcattctagagtagcactttttaaactttaatgtgcagttgaattgctccaggatcttgtaaaatgcacatctgatttagaaggtatrgaatgaagcttgagatactacaaccctacatactaggtgatgttgatgctgctggtctatagactgcacttttgattaacaagttccaaaggatttatta

SEQ ID NO: 455780 - DNA, 201 bp, Homo sapiens
aaagtaaaggaacaagctatgtgggactaggacatgggtgaagcgagcagaggagggatcaataaattccaaatccttgcattttccttgtttgctccacaaaaaacgaaaagatgagtgtggttgtgtctcagggaggcagaaaaagagtggcaggagttgaaatcagcagtggaggtgatccatatcaggctagtcatt

SEQ ID NO: 455781 - DNA, 201 bp, Homo sapiens
aattcaactatttattatctgtgtgagcaacttaaaaagtcatttaaactctacagcagtgagattgtgtgttccatgtgaaaaatctagggaatcattaygccggattacttagcgtcttcatccataaaatgggggaggagaaacagacggggaagcaataatgtctgcaacctttcccattctaatttcctagtagaa

SEQ ID NO: 455782 - DNA, 201 bp, Homo sapiens
gtactggtcctgttcagtgctctaatgtaatgtcaaagttccataaacttttcagtgtgtctctcctttacaaacagtaacttcccaccatacattttttwaaaatcacatgtggcaaattcaaaacctttttcttgtcttccccttctgagaactgaaacaaagaacccctgtcatacaggcatggttcttataccacta

SEQ ID NO: 455783 - DNA, 201 bp, Homo sapiens
gagattaaaaataaattcaaagggatcagcacatggggaagatttaaaataaatcatggagtgagtgaaatcgagaaaaacgaggtccaaatgtggagtcytggattttccaacattaagaggtaagaaatatgaagataaaagagtacaggagactgaaaagaaacagctgttcaaataggagtaaagccaggaaagtgt

SEQ ID NO: 455784 - DNA, 201 bp, Homo sapiens
aatcattcattgatcatatgggcatgtaattctccattaagaagtatgtaccggaacaggtccaaagaaagaacaatagtgatacatgtgacaataataartctagctttagagttgcaatagccttccgcgtgccaggtaatgagcttttcatgcatcttgctcactgagatcgtcacgtgtggtcttattaattcacac

SEQ ID NO: 455785 - DNA, 201 bp, Homo sapiens
cctgttcagtgctctaatgtaatgtcaaagttccataaacttttcagtgtgtctctcctttacaaacagtaacttcccaccatacatttttttaaaatcayatgtggcaaattcaaaacctttttcttgtcttccccttctgagaactgaaacaaagaacccctgtcatacaggcatggttcttataccactactagtatc

SEQ ID NO: 455786 - DNA, 201 bp, Homo sapiens
atagatatcttaaattctcataaatttaatttattgagtttggctgtaaataagactaataacaaggataattttatttccttccagttttatttctcaartattgggcgttaatactcacttttagtgaaaaatataaggaacttatcaatgggtttcaattccaaaaatctgagattttacttatatttttgtttatta

SEQ ID NO: 455787 - DNA, 201 bp, Homo sapiens
agtagggaggagacttaaccacaaactggctgttttaggtttcactttatgaattcaatttaaatgagtatgtaagcgcattttgctgtttgaaacggggaaaaaaaagtcttagttgagtgatctccgtttaattatctttctctgataagaattgaatctgaacaatgagaacacatggacacaggaaggggaacatca

SEQ ID NO: 455788 - DNA, 201 bp, Homo sapiens
tggggtttgaagaggaaggcggcatggaaactatgtgcaggagtgatgtaggttgcaggtctgcttgtcattttccagtggctgtcttgaataatgaaccmtctggaggccttggtgtcaacttgcttaggtcagggtatggattaactgtgcaccaatttcttctcagaagggagaaaactttaactgccatctccactt

SEQ ID NO: 455789 - DNA, 201 bp, Homo sapiens
gcgcacacatacacacgcacacacacatactctccagagtaattataagactctctccaaaactcttttattcccttatagttaaatcacatttttaacaytcaaaacactcattctactcaacaaacataacgtcaagacactttttactgtttgaaaaattcagtctacttttaaaaggaaaatttgatgtcatcaaaa

SEQ ID NO: 455790 - DNA, 201 bp, Homo sapiens
caggcactgacaccaggaggtccttaaagtaatgcattttgataagtgaaataacccattgacatacccactagtaactacttgcatattgaatttatcawattacctaatttgtattaaagagagcaaggatctgagataatcaaactaagaatgtagtttttgatgaggagacttgagaaaaagtttgctgctggagtg

SEQ ID NO: 455791 - DNA, 201 bp, Homo sapiens
tcctcctcatggcagtcaaactttgtcttaaatgtttggcaggtctcatgcttgggggagattttaccccttttggaatggttgatttttttcttttaccytttacacagtttcattgagttttcacctgtttcctgagaaactatagcaaagctattaagctttgcttccccttccatagtgccttaaagcttttgttca

SEQ ID NO: 455792 - DNA, 201 bp, Homo sapiens
taaatggtatgccaataacaaagggtcctccattacagggagggagagatccatctgaaattgaaactgtcttgcatcagctgaccagaagtaaatatatwgaaaattgaaagctatgggacgatactgaaatattttcccttcctctcatcttcttttgctacaagttagtttaagactctacttaatcaaaactttaat

SEQ ID NO: 455793 - DNA, 201 bp, Homo sapiens
tataccgttgcttctctctcaatggtagaatgccattacttgttattcacaccacttactagtctgcttgtgggtgtgtggggagttgttgccgggggacrggttgtggacagttcttaggcttaggcaggcagtgtgtccctggattggggatctggctttcttggtgatcctactcatcctcctcatggcagtcaaact

SEQ ID NO: 455794 - DNA, 201 bp, Homo sapiens
tataatttttcatccaaccaataaaaaagctaagaaaaaaaatctaagaagaaaaagaaaacaaacacagcacctgcctacccttctttccaactccctgytgtaataatttttatgctttttcccacaaggaaagtaaaaaacattcctttaacttgacagcataatcctaatcctttaataccccaattggaatggggt

SEQ ID NO: 455795 - DNA, 201 bp, Homo sapiens
ctatgcagatttaaatggcaacaaacagccccctcttttctcctacttcttccagctgtcttacttctccttttcttggtcatctattacaagtttgcatyagctgtatttcatcatttttagaaaggcagtgattatttattttaattatgatcatttactacccggtaaataaataattatttctaagaaccatacaac

SEQ ID NO: 455796 - DNA, 201 bp, Homo sapiens
aattcatgaatgaatgacccaggcaaagtcaaaggcctgacctggagtgaaggcaaaagaaatgaaagggaaggaaaagatattgtgaacttagtgttgakcatcaaatggacacagaaatcaacggaaagaggggagcaaaatcattttgaaatctttagcctcaccggctgagagatcaagaagtcattaacaaaagag

SEQ ID NO: 455797 - DNA, 201 bp, Homo sapiens
ctgaggacttcatattcagttttatcttattgttgctaacagaaatatattttgattgaaaatacattggtgcactagagagtgaattgtaattttggacraagtattttcaaaattatgttatttagacaaataatcataagtagggttttttagcgaaagtgtgatttttaatttttggttttttttttggtcacaatg

SEQ ID NO: 455798 - DNA, 201 bp, Homo sapiens
taacaaaagagaagccagaagaggaaactggtttgagagtgaaagtgctaattttggtctaggtatgttgaacttggggcaccagaggatgatatacccayataaggaaatgtagggaatatgacaaagaaatgacaaagtagggtgggaatttgagagagaggctggagcgatggttattgacttgggcaaactctccat

SEQ ID NO: 455799 - DNA, 201 bp, Homo sapiens
gtctgaaaactgtggaacgtatgagacagaaggttgggtaagatggaggaaagaaatatggatttaggatttatcaataaaaagtaacatggggaaaaatyaagagaaactatgtgcagagaaaaaggaacaaagcccctaaggactgatattaaaggaaaaagaggaagaggctttagtaaagaaatgactagaaacatg

SEQ ID NO: 455800 - DNA, 201 bp, Homo sapiens
tggtcacaaacctaattaaatctcttagcacatcatgttgcctgtctcctggatacctgggtcatccctttctctccagactattcacatctaatacattytgtggacctcaccttatgaccagccttaccataaggcttctatagaaaattcagctctttattaaatttccatgttttatcttccctgtaccactgatgt

SEQ ID NO: 455801 - DNA, 201 bp, Homo sapiens
tcagtcccttttctgctgttctaactgattaccacaaattgggaaatatataaaaaatggaagttttttggcttatgattctcaaggctgggaagtccaasaccatggcacccacatctggagagggtcatctcatggcagaagagcatcacatgctgagcagctgcacaagatagagcgaaaaagggggccaagacttcc

SEQ ID NO: 455802 - DNA, 201 bp, Homo sapiens
ccatatcacataatttttaaaatcgttctgtgcctgttgttccttttgcctgtatagaatccttcttattgatcaactcatttctctaacttggcctaatrtctcaaacagtgctttgcctataggaaatcaacaacatgatgttaactaatgcattgggtagcagtctttcagactttcacctaagccaatatcctactt

SEQ ID NO: 455803 - DNA, 201 bp, Homo sapiens
tagaggaaataaatattttaaatagagaatagcctggatctttctcttggtacttgtatcagtcccttttctgctgttctaactgattaccacaaattggraaatatataaaaaatggaagttttttggcttatgattctcaaggctgggaagtccaagaccatggcacccacatctggagagggtcatctcatggcagaa

SEQ ID NO: 455804 - DNA, 201 bp, Homo sapiens
atgactcagtctagggtggtgtaattgagatgtgaaagtggcagctacaggtctctcatagctgtgaaactgataggactggaaactgtttggatgttatwtgatgggtgaggtaaagagagaaatcaggataagcttattttctgaacaaataaatggatgatggtatcattaactgaactggtcaagcatgaacccaaa

SEQ ID NO: 455805 - DNA, 201 bp, Homo sapiens
gaagaacttactaagaaaagtttttttcacttaaagaaggaaaacaagtctactatattcccaagtctatactccgagtattttctccctgcatcacaccrtaaagtctataggtctcttgataacttaaaatcacagaaccataaactcaaaactaagagtgatattttatcatctgtttcaaagccatctttatccagg

SEQ ID NO: 455806 - DNA, 201 bp, Homo sapiens
attacaagcttgagccaccacgcctgcccaattaaaacaacatttttaaaatccagtctaatctctttattttttaaattaagaggaggttaaaataactrgtaaattatatttatttatttgtaatattgttgttttcattatccaggttgaaatttttaaaaattaaaaattaaaaattttatttaaatttttttattt

SEQ ID NO: 455807 - DNA, 201 bp, Homo sapiens
aaatgtagaaagatacatacttaaaaaattcctttggggtttatatgaagaaaaaagcttgatggttattacaatggaagatttattttatataaagaacwtgactggtcgttttggatttaaaaataatctgttccttcagcctaattttacctgagcgtttccaccacctggaaattaaatctcttcatgctaactgat

SEQ ID NO: 455808 - DNA, 201 bp, Homo sapiens
tagaaattacttttttttaaccgtgattcttgttttgttccttaatagcctaaatatcctgtaaagaacactggtattaaatgtaagaagtaggtgaacaytttaattttgaaaaattattgtaatgaataagcaaatccttattaaaaaggaaaagtgaaagatgaagggtgggtttagaactgaccagaattcttaagt

SEQ ID NO: 455809 - DNA, 201 bp, Homo sapiens
tataaatgtagaaagatacatacttaaaaaattcctttggggtttatatgaagaaaaaagcttgatggttattacaatggaagatttattttatataaagmacatgactggtcgttttggatttaaaaataatctgttccttcagcctaattttacctgagcgtttccaccacctggaaattaaatctcttcatgctaact

SEQ ID NO: 455810 - DNA, 201 bp, Homo sapiens
gatcaaactcaagtcagattattagccctctctaatcggccaaaaacttcactttgaaagatatcatgagaaacttgcaaaagtaaattgccatttaaaakttattgtgtagaaattacttttttttaaccgtgattcttgttttgttccttaatagcctaaatatcctgtaaagaacactggtattaaatgtaagaagta

SEQ ID NO: 455811 - DNA, 201 bp, Homo sapiens
taagctgccaggtctcagagcagctgattaaaacaacaagccaaaaaataaaagcgacaatcaagcctttaatctcttcctgcagtagtgtaatcaacagrctgaactggagagccaagagagcattggctccccccaatcccattgcacttgcccatggaagatcacattggtcaagatgaggtagatcagcacagatat

SEQ ID NO: 455812 - DNA, 201 bp, Homo sapiens
ttaatttgtatgcatatttttgatgcaaaaatactttggtgatcaagaaaagactttcaaacacacatttctattgtacttgaattacaattgtgtgaggktggggcggaatataaatatagttcaagcataaaataaaatgatataaatattctacctattaaagcatgaggtcaaatcactatgatatttagattctaa

SEQ ID NO: 455813 - DNA, 201 bp, Homo sapiens
tacccatgtctatgcaaagttttgcatattggcatgaaagagtatatatatgaaaacatacatttatacacaaataaatgtagaagttttgaaaaagcaarttcattaactctgattctctgatatatatacataatatttatatatgttataaaataatatctgctattcagtattttattctgttaaaactaaaagcta

SEQ ID NO: 455814 - DNA, 201 bp, Homo sapiens
gttatgttttgtttttaccttttgggttcttgaaatgagttcaacttattaaaatttgggaaattctttccaaataatttagatgttagacaatgaatttytaatgattctcaaggtattacttctttaaagttggaacagaatgtgtaataatcttttctttttcagtaaataatataagttcattttacaaccagttgc

SEQ ID NO: 455815 - DNA, 201 bp, Homo sapiens
ataataatgtatcccttccatcttggtccccaaacacataaaatctattatctttccttaaagacttttctgtctttccccactcatccaccatttttttwagtaacttatcttttataatcactgattttatgtctccaaactgtggaccagttattccacaggcatcttaagcaatgatgtaggaatggcagacagaat

SEQ ID NO: 455816 - DNA, 201 bp, Homo sapiens
caggcgcgcaccaccacacctggctaatttttgtatttttagtagagacagggtttcaccatgttgggcagagtggtctcgaactcctgacctcaggtgayccatctgtcttggccttccaaagtgctggaattacaggtgtgagccaccacacccagccgacactgaggtattttaaacagggtggtgataaaatcagat

SEQ ID NO: 455817 - DNA, 201 bp, Homo sapiens
ttacaatttcatctaaagacctttgcctgaaatgttctcccaggcaaaatagcctggctaactctgttagctctttcgttgtttccttgaagtttatcttmttaataagcctgccccgattgtattattgaatagtacaactacccctctcctcctttattttttcttttcctttcatgcaattttattgagatataattg

SEQ ID NO: 455818 - DNA, 201 bp, Homo sapiens
cgggcggatcacctgaggtcagaagttcaagacaagcctggccaacatagtgaaaccccatccctactaaaaatacaaaaattagccaggcatgatggcaygtgcctgtagtcccagctactcaggaggctgaggcaggataattgctagaacctgggaggtggaggttgcagtgagccaagatcgtacaccgcattccag

SEQ ID NO: 455819 - DNA, 201 bp, Homo sapiens
caaaattacagttaccaaggtgacaataattagaccccttgaagttttaaacaatggcaaaataatcttaattattgtttcaatgtaagctttccagcaaracaagctatttgaggatagatttttaaactttagactgaaaatctcttgggtatgtgaaatccaaagcacttacacgaagacatgggaaacctgggaaaa

SEQ ID NO: 455820 - DNA, 201 bp, Homo sapiens
aagcaagtaaaaaaaattgtggttgagatatacccacttgactatgtcattagcattagagatactgaaattgttttggtgcctgtcgcaaaatacaaaargcttttaaaaaaacacacgccatccactaaaaaaattaacagtagacttaattagcactttttcagttagataatatacatggtaagacactggatgtga

SEQ ID NO: 455821 - DNA, 201 bp, Homo sapiens
acaccagtgaagctccagtccagctcaaattcaacaatatgatgtggtggtacttaacatccactgaacaacctaattcctagtttcagccactagtggtractaatgtttaggacccagtactatggtaataattattaaaagaacttatattaggaattcacagaattaagaagcatttgctcatatgggtactccttt

SEQ ID NO: 455822 - DNA, 201 bp, Homo sapiens
aaacacaagagaaagacagagaaagagaactaagatgatcagcctagaaacgataccaggtgatgaaaactaaaagaaagatatctcaaagcaagccacaratggtgtcaaatattgaaagcttgtcatgtagaggaggtgagtgtggagatttggtgatgtcaaagaataagtgtagtgccagtaaggtagggagaaatg

SEQ ID NO: 455823 - DNA, 201 bp, Homo sapiens
catgaacccaaagtaggttaacaaacaagggaaattaatacctcggctttgggtttagtaagcttgagatttttattagacagattaatctaagttataayagatgtataaatgtgaaattcaggagaaaacaaaataaataaaaattacaatttgaaaggtagaaggtacttatgaaagatttctgtgttagatgaagga

SEQ ID NO: 455824 - DNA, 201 bp, Homo sapiens
aatctctgtatatggcatatatttatatttaaatatatatttatatatacatatattcccctggagaaccctgacaataccttggtatgatatcttaccaygtttgagggaagagctaattgtgaggaatttagctactattggcatccatactctcagagaacattcacagacatgaatatgctcataaagagaccgaga

SEQ ID NO: 455825 - DNA, 201 bp, Homo sapiens
gaaaagagatttttaccacccactagtttgactgtttagtcaatctctttgtctcaacaacctacttttagtgcatgaaagatgtggttactctctgagaygagagtataatctctgctggaaagtatacatagtcagcgtgtctgattttcttaggagctctacctttggacaagcaggagttagcaagaagtatataaa

SEQ ID NO: 455826 - DNA, 201 bp, Homo sapiens
agatttttttttaaaatacctcaatgaaataaaagttgagcaacctctgtcaatccctccaactttttttcctgaaatttgaaagtcttggaatgcatatyccttactcaaaattactgtgcaaagattcagtctagaaaaaggggcacaaaaataagaaatgtgcaaccaacttgctgtacaagaccctctgttttaatt

SEQ ID NO: 455827 - DNA, 201 bp, Homo sapiens
cttttagtgcatgaaagatgtggttactctctgagatgagagtataatctctgctggaaagtatacatagtcagcgtgtctgattttcttaggagctctayctttggacaagcaggagttagcaagaagtatataaagtcagtgagtctcacacatgggaaaactttatttgccatctatgaaatgttcaaatattagaag

SEQ ID NO: 455828 - DNA, 201 bp, Homo sapiens
atgctttttagattccttacacttaaaaaaagtcctttgggatgttttatgcagaatgctacgtcctagtttaaatctaagaactcttttgaccttcagtscatgtagaaaaatgtaaaaaataaatgagaaaattaacctgttcaaagaaaagctttaaaaaaattcttcaagcagagcttctccctgttatcattgatt

SEQ ID NO: 455829 - DNA, 201 bp, Homo sapiens
ttctactaaattgtttctatttaatgtattagaacagataaatgtattttgtctaagtgggaactatttaaatattaaataaatattttcaaccttaattrtattccacagtctatgggggcattgagaataataagtaccataaagtgtaaagattgggggacaagaaaagctctaaaatatattaggtaatttgtttgt

SEQ ID NO: 455830 - DNA, 201 bp, Homo sapiens
atagtggcctgagcattgttttcatcaagaagtatgagacttataaattaaagaaaatctgaagctaaatcttgattaatttatcttatttccattggacyaaaggggtgaaaatgttttaactgatgaagtcatattcactaaagcttcacaaattgaaacaaaaaccaatctgaatttgctaaacaattttatgtgatg

SEQ ID NO: 455831 - DNA, 201 bp, Homo sapiens
attctgcatcacctcacaaaagatggtagtgaaatccctttaggaaatatttaaataatgagccaattcatattcccttcagagtttctcatatcttttgycaacattgaaaatccatcttatccctcacagcaaacaaccacttcatgtgtttcctaggggttagactgttccatttcctttccaccaaagatgaccttg

SEQ ID NO: 455832 - DNA, 201 bp, Homo sapiens
actgcctccttctctactcatgtagacctatagaagctcttcgatggccccaagcttatcaaatccaaaatccacatcatgaaaacatccaaatttcaatktttctcctttactgtggagtcagcttcacttcagggccatattaaattttatctcaatatctgaaagaataattacagaattacacatatctcttttata

SEQ ID NO: 455833 - DNA, 201 bp, Homo sapiens
ttatccctcacagcaaacaaccacttcatgtgtttcctaggggttagactgttccatttcctttccaccaaagatgaccttgtgtacaggaccagttttgsaggcagcacaagagagttattctttcgataacataggatttaaaattcaggacagctaaatttcataggaagagctccaaaaggatgtggtcacttggtg

SEQ ID NO: 455834 - DNA, 201 bp, Homo sapiens
agtgggaactatttaaatattaaataaatattttcaaccttaattgtattccacagtctatgggggcattgagaataataagtaccataaagtgtaaagaytgggggacaagaaaagctctaaaatatattaggtaatttgtttgtattaattaacctatttgctatttttgaaaaattattgtcagcttagatctactac

SEQ ID NO: 455835 - DNA, 201 bp, Homo sapiens
catgtgtttcctaggggttagactgttccatttcctttccaccaaagatgaccttgtgtacaggaccagttttgcaggcagcacaagagagttattctttygataacataggatttaaaattcaggacagctaaatttcataggaagagctccaaaaggatgtggtcacttggtggagcatatactgtacacagctgatag

SEQ ID NO: 455836 - DNA, 201 bp, Homo sapiens
gagggagatattatctctcttatccacagggggaaaaaaaaagcaaaaaactgacctcgcacctgaagaaaggtactactatctcccaagtgtgttggctwtacaaacatccttgaaaagagtccaggatgaaagttgtccccagatatgcagaaatgaaatggagaattgcatcccaacaaaatgtagtagtcaatcctc

SEQ ID NO: 455837 - DNA, 201 bp, Homo sapiens
ataatgggctttgaaattctctcaaatctcagaatagattttaattcagtgatttttaaaggccatgattcctttgaccagttcacagagatacttaccaytttgtttcacttagttgtttaacttgtaagtaaattcctcgtatctctaagactagccccccaaaaatacaatactgtaataaaaatgatcagaattttc

SEQ ID NO: 455838 - DNA, 201 bp, Homo sapiens
ggagaaaatggaggcaatcccaatgtccactttgaaatccttggaaccaactatggagaagagcttggcagaggtgttcgaaaagtaagacaagacacacygattaatacgctttttcctatactatggttttgcttgattgttttccatgcagtatgatcacagtacccattaaagtcaatattgtagtgtgaaagagaa

SEQ ID NO: 455839 - DNA, 201 bp, Homo sapiens
tagacctcaggtgaaaattatcaggaaagcttcctagtggaattgatactggaaagattatttaaagaacaattgatgttggttaatgttatgggctaaaktttgaagtcctaacctccagtacctcagaatgttactatatttgaatacagggtcttaaaatgtaattaaggtttaaaaaagtcactggggcatgcccta

SEQ ID NO: 455840 - DNA, 201 bp, Homo sapiens
caaatatctaaatggcttactcctgcattgctttcaggtgtttgctaaaatgtcaccgtctcactgcggccgtcactgaccaacctacttaaaggcacacrcccatccctgccaactctggttctcttcatccctctttctgctttgttgttctctatggcaccaccaccacctggcacactataaatattatgtttacct

SEQ ID NO: 455841 - DNA, 201 bp, Homo sapiens
tcgtaagaaaaaagaataggatctgatatcagagtttaggattcatttaccaaaactgtgttgagtatattccatcaataaatatgcacctgctctgtagkaggcaatatggaggatgagtacacactctcgaaaatggaacagactgatcaagtaattataaatgatgataagtgctatgaaggaaaattcttacacttt

SEQ ID NO: 455842 - DNA, 201 bp, Homo sapiens
ccataatgttcataccatgacaaaaatcacctaaagatacatttttcagaacacatccttgtcgttaagcagcacatgactatgtctcttgttcaagccarccagtccatggtacttggttatggcagccctggcaaattaatacagtcgatgaatgacagtaaatgcagtaaatgctaaaaaaaaaaaaaaaaaaaaaaa

SEQ ID NO: 455843 - DNA, 201 bp, Homo sapiens
cctggcttaaacattatttttttcaaacgtattcggattttatggaacctggattctagtgctacaaaggacaatataagataagggagaaaatgagtggratgagttgtggatcaggacttaataatgtatatacagtggtcaaggataaactctctaatatgtgagcagaaacctgaacaggtgaaggagcaagccatg

SEQ ID NO: 455844 - DNA, 201 bp, Homo sapiens
cctatcgctcagctggctgaacctaaaaattctgcaattaaatgattttttttgggtttaaggcttttaattcctattagaatttaaataggtgaggtatwatatatatatatatatatatatgaggcatatatatatatttcaataatgatttctaaagtcaaaatattttccaagtttagaaagaataaggagacaaaa

SEQ ID NO: 455845 - DNA, 201 bp, Homo sapiens
acgtgttatttctgaacaattctcctccagcaatttcataagtctaatggggagaaagtgctaagaatttgcgtctttgttctttttgatctcattatagraaaatttctacttgcttaataaaaaaatataataagtaaaggttattttcttctaaacaagtaggtccataacatttcccacaggagaatttgtaattgg

SEQ ID NO: 455846 - DNA, 201 bp, Homo sapiens
gaaagttaagtaagtgttacccaaaagggttttttccccattttgagcattcaaaagtcttgggacatgagcactgcattgactgtctggtatagaagcckgttgcaaacttgatcagcccctgcccaggtacaatggaagggatcccacactgggagtacctgggtgtgagctctgccactgctttatactaattgtgag

SEQ ID NO: 455847 - DNA, 201 bp, Homo sapiens
cacacatacatacacattattgttgcttataattacaaggtacaattctttagattttcaagttcaatttaaaagggccagtgctttgggaagattgaagrgaacatatctctttgcttattataagaattcatcctattcatcttccaggcagtgcattatattttaccacacttgctttacataatctttaaattgggt

SEQ ID NO: 455848 - DNA, 201 bp, Homo sapiens
gcagccctggcaaattaatacagtcgatgaatgacagtaaatgcagtaaatgctaaaaaaaaaaaaaaaaaaaaaaaaaaaatgaactggaacaaaagagwcaccacttcgaatggagtattaatcaggaatattaatcaggaagtggcagcaaatgagcctgggaagatacacaaaggacatggggacttcttagcttca

SEQ ID NO: 455849 - DNA, 201 bp, Homo sapiens
agtaccagaatattgaaactgcctaataaaacaatagatacaagagaataaaaatagaataaatgcatataaatggatgctttaaaaggccaacaaaatgyaggattacaaaatagacatatagaacccaaaaacccattcataaaaaggattggaattttttgaaaatgataaggagccgaatgagaaaattccactgcc

SEQ ID NO: 455850 - DNA, 201 bp, Homo sapiens
ttcctccattttcaaagccaacagcatcgtatcatccaatctccctctgtctctgaccctcctgactgtctcttaaaaggacccttgtcctttaagattargcccaactggatcatcccagataatctccccatctgaaaattctcaccctaatcatatttgcaaagtctcttttgtcatctatggtatcatatggacaga

SEQ ID NO: 455851 - DNA, 201 bp, Homo sapiens
cttcctagaggaaaaatgcacaaaaaacacctaccaccgaaaacaaaagcaccctgaattatgattttcaaaaatatctagaagtttatatatcaattatwttatctcatataaactgtgtttgattccaggctagctttaaatagactctatattttaatatataactaaacaaatgcctccagtgatagttctgaaacg

SEQ ID NO: 455852 - DNA, 201 bp, Homo sapiens
taaattatttttttaaaaggctctatccataacattgtaagctgcatttgtagtaaaacttcatttttatagacactgaatccatagatcgtatactaatygaatcatgactcaattcagaaaaaaagattttatacctaaaactttatagtcactggttatttaaaaaggattgtaattttaatttgtatgcatattttt

SEQ ID NO: 455853 - DNA, 201 bp, Homo sapiens
taataagtatccggtgtagccagtctgaaagctcatttagaacaggacaaactctgtcttgcttgttgaaacaactccagtacctagcaatgtgtctggtrcattcttcaggtgctcaacaaggcagaatggctttgtttattaattaaataatatagactcaaatccattcagtccctgaccaggactcttcataaaaca

SEQ ID NO: 455854 - DNA, 201 bp, Homo sapiens
gaactttcttttttccatcaagtcaaaagggcaaaaggaggaaagtttaatcactacatagtaatctcataaaatgtagagttctgcgtaaacataagtcwcctaaaaaatctctatgatgggactaatagataccttcaatgggtttataaacctccagtgctttgtgttacagagcatagcaagaacaacatattcgtt

SEQ ID NO: 455855 - DNA, 201 bp, Homo sapiens
caagtcaagatagagaaactgtcacagtccagaggaaactaacaagacataacaactaaatgtaatgtttgatagggttgggaacagaaaaaaaaaagacwttaacagcaaaactgttgaaatcctaataaaatctgaggtccagttaatagtaatgtcccattgatggtttctcagtttttacaaatgtaccatagtaat

SEQ ID NO: 455856 - DNA, 201 bp, Homo sapiens
cgtttttacctccataatgcagttactaaacaaattttcacaaatcaataatttctaggtaaggctacataaggttttctatcctgaaatatttctgcaaygtgaaactatacaaataaatattttgttacataaaaaatttcaggaattacctgtattctctttttaaaatttttattcgtttattaaaaattgtatact

SEQ ID NO: 455857 - DNA, 201 bp, Homo sapiens
gctaatatattaactaggtatatgacctcaaaatctgggttaggcccttattacagaaataaacaaactgaaaatggcttggggtaaaacaagacaacaamctcaacagctttggttctacgaaaacgccaagcctgggctgtcataccactggacttggagggagcagtgtatttgctgcatttgcccttttgccaaatg

SEQ ID NO: 455858 - DNA, 201 bp, Homo sapiens
attaagatgagaagtaagacacagagattttgcctacaaggaattttgccttctaataaataagacaaatcaattttataaaaacaaatggctataaaacrtggtaaaaagtgataattaccatcaaagaaaggcacaaattaagttctatgtgaattgacagaggaaaagataattcttttcttattttactattttcag

SEQ ID NO: 455859 - DNA, 201 bp, Homo sapiens
tgaaagctaaagtgtttatataactcatcctaacataactttccttagttagttaaacttactaatggcaacatttcattctctaaggctattttcatttycaccccatcaagtagtctctcgatttattattttatgccttcttttagtgtttacatagctcctattttctgccttgaattaagcaggtttttgagagat

SEQ ID NO: 455860 - DNA, 201 bp, Homo sapiens
tattcaagttcatttttggttaattatattgaagtgccagtccatgtttgagtgctgtatttttatgtatagctgtcaggtacaatgctgtgcagtctctrgaattaatctattattttctttaaaataaataaaaataatgggcactaaatttgtgtttcagacttcaaaccctccttctgtaatcaatgattagtgtga

SEQ ID NO: 455861 - DNA, 201 bp, Homo sapiens
ctcattaacatttcattccctgttttgatttaaattttaactctcccattatgaataataaacagagtgtctgatcacatttgaccttttgaggcataacrgtgctttttttttttatttctttaaatatcataaggcccaataggtcacttccctgttaacttttcttacataagaaatttaattattttaagagaaaaa

SEQ ID NO: 455862 - DNA, 201 bp, Homo sapiens
ctttaaagggagagtccattctaacgaacatactatcaccacttccaaggctctctgtcaacatacaaacattctttccattagaatgatcctccttgacragggtggtttcaggcaataaaatgagttactgttgaaatgtgaatgatgaagacattaaacatatttaaaagacacgaaatgagtcctacagaagtttgg

SEQ ID NO: 455863 - DNA, 201 bp, Homo sapiens
aaggaataataatggcttatactttccactccaaagaatttcctaagcagaggttggaaacaattttcacgcgtcactgaaagatagcttccttcaactgrataatgttaatgtttattggcacttaatagccttagacaggacagtattttgaaattcaagagtaatttgaggtaaccagaatatgaatacacccgggaa

SEQ ID NO: 455864 - DNA, 201 bp, Homo sapiens
cataaggtaaggttattttcaattgaaattctatggcttgtttatcctatagcattaagagaaaaggaagatataaaattatatatggaattatagttatstatacacacctattcatacacactccagaataaaataaattcaaatgttattagttatctttggataatagcatattagattattgtttttgtctttctg

SEQ ID NO: 455865 - DNA, 201 bp, Homo sapiens
attataaatttcatgaggacataaaccatctctcacttaaatctataaccttggtcctgacgtggtacgtaattcagaataaatgcctgtgaaagtattcractgatacataaataaattattttatttccataatgtgtgagatgaaaatacattgatttatgatgccttgagtttttaacaaggctgaaaataacctta

SEQ ID NO: 455866 - DNA, 201 bp, Homo sapiens
tgtttatatacaggtagctctagttcattcactttaaatgcttcacagtattccatcgtaggaatgcattaagatgtgcttattattttattcatgggtayttgtattgctttcatctatttgctgttaccataatgctaaaaaaaattattgtacatatctcctttggcatgtatgcaagagtttatctgagagaatata

SEQ ID NO: 455867 - DNA, 201 bp, Homo sapiens
agattattgtttttgtctttctgacttttctgtattttccaaatttgtagtagtaaatgtaatgtttagttagatttttggaggatgttttctttatccasaatcagaaattctgaatttcagtattttaaatgaaatccttgtgttctgcttttgaagattacattattaatcacttaaaagatcttagtttgaagagaa

SEQ ID NO: 455868 - DNA, 201 bp, Homo sapiens
tttataaaatggatatatgcatatctgttttaacaaacatgccaagccaagcaacatactgagattccttggtaaaaccacactataacttcacaaagaaygtatttacacactgcttaagatggatttcttatatgtaaataaccataatcattccatattaaagcttatgaaattctatttccaaaggtaacatattcc

SEQ ID NO: 455869 - DNA, 201 bp, Homo sapiens
gacttttctgtattttccaaatttgtagtagtaaatgtaatgtttagttagatttttggaggatgttttctttatccagaatcagaaattctgaatttcartattttaaatgaaatccttgtgttctgcttttgaagattacattattaatcacttaaaagatcttagtttgaagagaaaaatcagaatatgcttaattga

SEQ ID NO: 455870 - DNA, 201 bp, Homo sapiens
ccttcagaatgacatgaggaattgtcccttgatgggaggactgacactttctccattataaaatgagggaagaagagccacctatgcaggtgcaactgggytggatggcaggaagataaagtagttcacatctgatagtttctgtttatcagtggaatataaagtgagatcaacagctgagaatgaggggatagaggcagt

SEQ ID NO: 455871 - DNA, 201 bp, Homo sapiens
taggcctgcttctaaactataaccctgctcagatctcaagttacatcacaagagtctgtgttctggaagaataatgcactgaattttaatcatgataattsaggcttagtatctttaaatacaacatagcagatgcaaggttaaatggcagtttcagtctttgactggaattcgccttaagataagaaaagcaagttttag

SEQ ID NO: 455872 - DNA, 201 bp, Homo sapiens
tagaaagacattatatttcttcctttaaggatgaaaggcaagtacaaaatatttgcatctatggatgtctagcataatgcctggaaaagagtggccctctkataagtacttgtcaaaagacagaatgttttttatttaaccatcacaataacattatactgtccatttacacagatgagaactaaggctaaataactcact

SEQ ID NO: 455873 - DNA, 201 bp, Homo sapiens
ctaaacttaagaaaactgaaatcctgtaataaatttatatctcttgggatataattgcttcctatccaataacaaagacccaagagaaagaagcaaaagtyatatttttttctaatatactgataaagagaatagcaaccatgaccaaatagaaatcatcaccaaagcctattcacatctcatacaagatcttgacatttt

SEQ ID NO: 455874 - DNA, 201 bp, Homo sapiens
ttttggataaataaatcattaacaaataaatttgcataacaaagataagcctctaattgctccagatcagacttccttgaactggagaaatgagtgactcygcccatcaatgaactgaccttgagaacacctgagtcaaattcattaatttagcattttctctttgttccatcccaaaagaaactcaaaaaaaaattaccc

SEQ ID NO: 455875 - DNA, 201 bp, Homo sapiens
cctcttaacttaaaagaattattttaacttgtttctcactagacgttgctttagttttacagtttcttcaggtttatcagaaatagaatgagaagtagcgwtcatctcagacatttgcctaaaataaatataatttctgacacttacaaaatgtatttatctctctcatattccagtttaataatggagaccttacttgtt

SEQ ID NO: 455876 - DNA, 201 bp, Homo sapiens
aacatgtaaacagtgtgtgtgtgtatgtatgtgtgattataatagtcctaaccatattcattcattcaacaaatattcattgaacacttttacatatgctyagtattgttctaggaatcatggaaatcaagaagtcaaaaaagtcaaaaaaagtgacaacaattcttacctacatagaacatgtattcaaatgcggggcgg

SEQ ID NO: 455877 - DNA, 201 bp, Homo sapiens
aatgactatgtagaatcctattcagattataccttaacgtatttagttagccaatctccttctaagttggtccaatttttcggcacgacaaaccaccccayagcaaacaactttgtacctacagccctgcatttacccaacttttttcttcaggaaagattcttaaaaatatacatttatggccgggcacggtggctcacg

SEQ ID NO: 455878 - DNA, 201 bp, Homo sapiens
agagaagaaacacattgtgttatagaggtggaaataacacaaaaaggcacaaagatgtgttttaggataaagacttccatttcaccacaggatgcttaaawaatatttgtttcacctctacattgggtggggtacagcttcctaaatcacctgctgctttcaacagtaggcatactttcttgtcttaggataattctcaat

SEQ ID NO: 455879 - DNA, 201 bp, Homo sapiens
ggccactttaggaaaacgaaatccaccccaaccacacttagcgagtcaccctggccgggcctgggctgccctccagtcggtcagccggactggatttccaygcggccgagccctacgcctcccagaccctgagctccagtctgcacaggccaggtgtctggagccgggcctggtgacaggcatcccccaggtgggaggagg

SEQ ID NO: 455880 - DNA, 201 bp, Homo sapiens
ctcaaaaaaaaaaaagttgggctaggcgggcccccgaggctggcctgactgtcccaggggcacaggctccagcaggctgcctgtctgtggtccaggcttcrggaaccccctggtcttgggtgtgcgggggctgggaagtggctgggggtgcacagtcccacacctgtcattcactgaacaggcacgtattgacagcttgtg

SEQ ID NO: 455881 - DNA, 201 bp, Homo sapiens; identical to SEQ ID NO: 402802

SEQ ID NO: 455882 - DNA, 201 bp, Homo sapiens
gtgaagctggtgggctgccgtgtcagagcgcccagggcagggagcagagctcagaagtaatgctggcccgggcgcagtggctcacacccgtaatcccaacrctttggaaggctgaggcaggtggatcacttgagatcaggagttcaagaccagcctggccaaaatggtgaaaacccatctctactaaaaatacaaaaatta

SEQ ID NO: 455883 - DNA, 201 bp, Homo sapiens
agcgcccagggcagggagcagagctcagaagtaatgctggcccgggcgcagtggctcacacccgtaatcccaacactttggaaggctgaggcaggtggatyacttgagatcaggagttcaagaccagcctggccaaaatggtgaaaacccatctctactaaaaatacaaaaattagcgggacttggtggcatgtatctgta

SEQ ID NO: 455884 - DNA, 201 bp, Homo sapiens
caggtgtctggagccgggcctggtgacaggcatcccccaggtgggaggaggggctgtcctggctctgacctggatatcagatccagagctgagggggaggygcagggtcaggaggggaggggttctgttctgagtttcccctggccaaggctgcagacaagggacgcagacaatcggcacattgtgagcaggggctgcagg

SEQ ID NO: 455885 - DNA, 201 bp, Homo sapiens
ctttggaaggctgaggcaggtggatcacttgagatcaggagttcaagaccagcctggccaaaatggtgaaaacccatctctactaaaaatacaaaaattascgggacttggtggcatgtatctgtaatcccagctactagggaggctgaggcatgagaattgtgtgaacccgggaggcagaggttgcagtgagctgagatc

SEQ ID NO: 455886 - DNA, 201 bp, Homo sapiens
acagcttgtggcgtgtcaggccctgtgcccaactctgggagtcaaggataacctgacagactcaggccactttaggaaaacgaaatccaccccaaccacasttagcgagtcaccctggccgggcctgggctgccctccagtcggtcagccggactggatttccacgcggccgagccctacgcctcccagaccctgagctcc

SEQ ID NO: 455887 - DNA, 201 bp, Homo sapiens; identical to SEQ ID NO: 402805

SEQ ID NO: 455888 - DNA, 201 bp, Homo sapiens
tctggtttcagggaacaggaagctctctccgccctaagcccaggctgctgacaagagctgagggtggggacatcactgggggttggagggtacccggcccygccaagccaggagcagggagcagccctgtcccaccgcccaccagagccttctcaacaggtccaagaggcttgggtccccagccaggacacccaccacacc

SEQ ID NO: 455889 - DNA, 201 bp, Homo sapiens
aaaaagttgggctaggcgggcccccgaggctggcctgactgtcccaggggcacaggctccagcaggctgcctgtctgtggtccaggcttcaggaacccccyggtcttgggtgtgcgggggctgggaagtggctgggggtgcacagtcccacacctgtcattcactgaacaggcacgtattgacagcttgtggcgtgtcagg

SEQ ID NO: 455890 - DNA, 201 bp, Homo sapiens; identical to SEQ ID NO: 402808

SEQ ID NO: 455891 - DNA, 201 bp, Homo sapiens; identical to SEQ ID NO: 402809

SEQ ID NO: 455892 - DNA, 201 bp, Homo sapiens
gtggcatgtatctgtaatcccagctactagggaggctgaggcatgagaattgtgtgaacccgggaggcagaggttgcagtgagctgagatcacgccactgmactccagcctgggggacacagcgagactccgtctcaaaaaaaaaaaagttgggctaggcgggcccccgaggctggcctgactgtcccaggggcacaggct

SEQ ID NO: 455893 - DNA, 201 bp, Homo sapiens; identical to SEQ ID NO: 402816

SEQ ID NO: 455894 - DNA, 201 bp, Homo sapiens
ctccgcagccccgccccaagcgggagcgggccgagctcctataagacaacctgtgattggctccgcggtgccccgtcctcaccgggctctgagtgctcttkcccgtccggccccagccgcggcccgggaatctacgtcacccgaaaagcgactataaacgccggcgcctccgtccccagccgcggctcgggaatccacccg

SEQ ID NO: 455895 - DNA, 201 bp, Homo sapiens
gaaaagcgactataaacgccggcgcctccgtccccagccgcggctcgggaatccacccgaagagtggctataaacgtccgcgcctccattgcgctctcctyttcacttaggtaggtcctgccgcgttgaccactggcgtctcgctggtggtcttcgagaccggcgttggttgaaaatcgcccccggctttggccgtggccg

SEQ ID NO: 455896 - DNA, 201 bp, Homo sapiens
tgcggtcgctcgcgaggtctggcccctgactcctgaccccgactgcagacccctaaccttgttctttctccgcaggacactggtcctcccacgcctgacaycgacgtcgccaggaccgcggggttgggggaacttggctgtcccacgtctttcaaataaagctgttttgtctaactcactgcatgcgggtgttcttggggc

SEQ ID NO: 455897 - DNA, 201 bp, Homo sapiens
cagacccctaaccttgttctttctccgcaggacactggtcctcccacgcctgacaccgacgtcgccaggaccgcggggttgggggaacttggctgtcccaygtctttcaaataaagctgttttgtctaactcactgcatgcgggtgttcttggggccccgactcgcctatcagcctggcaagtgcatatgttcacgctgtg

SEQ ID NO: 455898 - DNA, 201 bp, Homo sapiens; identical to SEQ ID NO: 409141

SEQ ID NO: 455899 - DNA, 201 bp, Homo sapiens
atagcaaagatataaaatcaacttaagcatccatcgatggataattagataaagaaaatgtggtaacatatataagagaatactactcagccataaaaagratgaaagcatgtcttgtagcaacatggatggaattggaggccattatcttttgttttttttttttgtttgtttgtttgtttttgagatggagttttgctc

SEQ ID NO: 455900 - DNA, 201 bp, Homo sapiens
cattaactcgtcatttacattaggtatatctcctaatactatccctgcccccttcacccaccccacgacaggccctggtgtgtgatgttccccaccctgcrtccaagtgttctcattgtttaattcccacctataagagagaacatggggtgtttggttttctgtccttgggatagtttgctcagaatgacggtttctagc

SEQ ID NO: 455901 - DNA, 201 bp, Homo sapiens
atttatatatttagatgctcaactattaggtgcatacatacgtaaaattgatgtattctcttaatgaattgattcttttatccttatccaacgactttgawttttgtgaggttttttttttttttttacaaaagtctattttgcctaagtttagctacccctgctctctattggtttccatttgcatggaatattttttct

SEQ ID NO: 455902 - DNA, 201 bp, Homo sapiens
cccccttcacccaccccacgacaggccctggtgtgtgatgttccccaccctgcatccaagtgttctcattgtttaattcccacctataagagagaacatgsggtgtttggttttctgtccttgggatagtttgctcagaatgacggtttctagcttcatccatgtctctacaaaggacatgaactcatccttttttatggc

SEQ ID NO: 455903 - DNA, 201 bp, Homo sapiens
ccagtgatgatgagcattttttcatgtgcctgttggctgcataaatgtcttcttttgagaagtctctgttcatatccttggcccactttttgatggggttktttgattttttcttgtaaatttgtttaagttctttgtagattctggatagtagccctttgtcagatgggtagattgcaaaaattttctcccattctgtag

SEQ ID NO: 455904 - DNA, 201 bp, Homo sapiens
tgttgccattgcttttggtgttttagacatgaagtccttgcccatgcctatgtcctgaatggtattgcctgggttttcttctagggtttttatggttttargtctaagatttaagtctttaatccatcttgaattaatttttgtgtgaggcgtagggaagggatccagtttcagctttctacatatggctagccagttttc

SEQ ID NO: 455905 - DNA, 201 bp, Homo sapiens
tttgaattggatgagtcaggaccatctagttgctgagacggttcggccagccagtcacataggtctgttagtatctgcagtcatggggttgatggtcctgycacctgctgggcgagttttaaaaagccgctgggcattgggacagttcacttatatacacataaaagaggctgattctacataaagaaactagttttacaa

SEQ ID NO: 455906 - DNA, 201 bp, Homo sapiens
tagtatctgcagtcatggggttgatggtcctgtcacctgctgggcgagttttaaaaagccgctgggcattgggacagttcacttatatacacataaaagargctgattctacataaagaaactagttttacaaattcctatgtgtgtgagaattacttttggagctgctggcccctaacataatgtaagcacagaacagat

SEQ ID NO: 455907 - DNA, 201 bp, Homo sapiens
gagtaagatggtcctggctccagctgtgtaaccctgggtaaatcactaaacccagagtgtcatgtgtaaaggaagtttatctgtctaccttcatggtgtagtgtaagaaccgagtaagataattatgcacacagagcactgaagtgtgcctgcactttgtgagcactgggagaacagtggagaccatgctcctccttttct

SEQ ID NO: 455908 - DNA, 201 bp, Homo sapiens
catagcttcaaaattaatctttttatgtagcataaaagtacaagaaaatccagctgcatttgttagagctatacagcaatatgttgatcctgatgttcagytggtaagtacaggatactttttgaactcctttaatctataattttagttctgctttatatctacagtctgaacataccctcccatgatatatttgcaaat

SEQ ID NO: 455909 - DNA, 201 bp, Homo sapiens
tttttacaaaagtctattttgcctaagtttagctacccctgctctctattggtttccatttgcatggaatattttttctatccttttactttcaatctatrtgtgtccttacagctgaagtgaatctctttgtaggtggcatttagttaggttttcttttttatccatttagctacactgtgtcatttgattggagaattt

SEQ ID NO: 455910 - DNA, 201 bp, Homo sapiens
tccactgtatggtggattatggtgacatctgcccgatttctccactgtaaagttaagctttatcagttgcatgtgtacatatgtagatattttgagactayataaataatcctgttcctcatcaaacttttacccatttgtcttagcatctattataattcttgcctgaatccatcattattatgatggttaacaaatgat

SEQ ID NO: 455911 - DNA, 201 bp, Homo sapiens
cattattatgatggttaacaaatgatagtattccattccatcagtccttctacagttattaggtggcataggaagaactttctcttctccccatttattcrtttgtttctttatatctgcatagactcatagattcctattttgttatagtccattactcttattatttattttgttgctcttaatattgtacctgatttt

SEQ ID NO: 455912 - DNA, 201 bp, Homo sapiens
atggaaaataggagaggacaataatcttaagtcagcttcttaaaatatttggaaagcatcttattccaagcaggacacatagccctatctgtagggttacmtcatcatcatcaccatcaaccaaagggtcacagccacaagtcacaaaggagctgagtcttgacctcagtcggttattgttagagtggaggggaagcctga

SEQ ID NO: 455913 - DNA, 201 bp, Homo sapiens
tgctcttaatattgtacctgattttgccagtgggattccccttcaagctggcttctgtgtctttttcatgtgtctccatctttcttggaacactttcttaytttctggcaaaataagatattccaggctcatcttacagtgttgcttccccgccctggaatcagatatctttcccaggagtcctgattccttttagcagag

SEQ ID NO: 455914 - DNA, 201 bp, Homo sapiens
tatataattaaatgtaaataattttagcttttgacattgtgactttaaataattctataggtggaaaaattactttgttttcttctgctaatcattgacartgcatgtcttttctacaatttgggggcttttgaaagtggagaataaaagatgagaaggaggcggaggtaggcccttcagtgcggaaagcatctgataaga

SEQ ID NO: 455915 - DNA, 201 bp, Homo sapiens
ttcacctgatgattttaggagtggactgtaagtgcagcagagtcagagtgcgagagtttgaattggatgagtcaggaccatctagttgctgagacggttcggccagccagtcacataggtctgttagtatctgcagtcatggggttgatggtcctgtcacctgctgggcgagttttaaaaagccgctgggcattgggacag

SEQ ID NO: 455916 - DNA, 201 bp, Homo sapiens
caggccggggtgagtggatcacaaggtcaggcatttgagtccagcctggccaacatagtgaaaccccgtctctactaaaattagaaaaaattagccgggcrtggtggcaggcgcctgtaatcccagctactcgggaggctgaggcacaagaatcgcttgaccccaggaagtggaggttgcagtgagccaagatcgtgccac

SEQ ID NO: 455917 - DNA, 201 bp, Homo sapiens
cccgtaacatcctactatcctagaaggtaaggacagtcatgctgttttgggaaatctgagattgtctcaatataactcgcctccagcttgtgtatagatawtttcaaaatgaatatagatgtttagagccagatagttaagcatggggcagtctacctcagtcatcagtagtagaaatgctggctctgagtcagtcccagt

SEQ ID NO: 455918 - DNA, 201 bp, Homo sapiens
cagttgcacctgctactttcaaatgagattcttgacttggtttttattttaatgacaaagtttttcttgaaatatagaaatgctcacatttgacttctttwattgtgattattgatctcagtgtcacaatacccaggcattttgtaaattataattccagttgttctgtcactaatgtggattaaattataatggaaatga

SEQ ID NO: 455919 - DNA, 201 bp, Homo sapiens
agtcatcagtagtagaaatgctggctctgagtcagtcccagtgatgtcattgaactatgtgtagaaccagctggagtctattctgaatctggctgaaaccragagacagcagggaaacgatatttttaatggtgttgcattagaaaagataattaaaataataaaactggccctcagatataaaagataggtcctgggaag

SEQ ID NO: 455920 - DNA, 201 bp, Homo sapiens
ttgttgaatgtaaggatgctcacctggcggtgcttccatgttaactttttacttattaatcttgcattttatagcagtatgatattactgtatcggacctraatcagcccatgcttgttagtctgttaaagaagaagagaaatgacaacagtgaggctcagctcgcccacctgatacctgagctctgctttctaacaggta

SEQ ID NO: 455921 - DNA, 201 bp, Homo sapiens
taaggatgctcacctggcggtgcttccatgttaactttttacttattaatcttgcattttatagcagtatgatattactgtatcggacctgaatcagcccrtgcttgttagtctgttaaagaagaagagaaatgacaacagtgaggctcagctcgcccacctgatacctgagctctgctttctaacaggtaatgtttgtgt

SEQ ID NO: 455922 - DNA, 201 bp, Homo sapiens
ctcagctcgcccacctgatacctgagctctgctttctaacaggtaatgtttgtgttttatacctctgtcaggctcctggatacaggcccctgatgcttggyagtgggcagaccctctttaagttacatgaatgccaggacatcgatttaacccatggaggatggtccttttaagtaatttattcaataatagagacatgtt

SEQ ID NO: 455923 - DNA, 201 bp, Homo sapiens
tctttaagttacatgaatgccaggacatcgatttaacccatggaggatggtccttttaagtaatttattcaataatagagacatgttgggggaatcgattycctttatctcatatattccatgtattactttgatgtaaaatagaccccctgatatcatcctaaaaccaagtttctctttgccattatttgaatttactag

SEQ ID NO: 455924 - DNA, 201 bp, Homo sapiens
tgtcctgaatggtattgcctgggttttcttctagggtttttatggttttaggtctaagatttaagtctttaatccatcttgaattaatttttgtgtgaggygtagggaagggatccagtttcagctttctacatatggctagccagttttcccagcaccacttattaaatagggaatcctttccccatttcttgttaatgt

SEQ ID NO: 455925 - DNA, 201 bp, Homo sapiens
ccccagcgtgtgtttttcccctcctcgtgtccatgtgttctcattgttcagctcccacttataagtgagaacatgcggtgtttggttttctgttcctgccytggtttgctgaggataatggcttccagctccatccatgtccctgcaaaggacatgatcctgttcctttttatggctgcaaaaatacttcttttaggggac

SEQ ID NO: 455926 - DNA, 201 bp, Homo sapiens
atgctgttttggttactgtagccttgtagtataatttgaagccaggtagcgtgatgctgccagctttgttcttttggcttaggattgtcttggcaatgtgsgttcttttttggttccatatgaactataaagtagttttttccaattctgtgaagaaagtcattggtagcttgatggggatggcattgaatctataaatta

SEQ ID NO: 455927 - DNA, 201 bp, Homo sapiens
cttttttaaatcagaaaaactacctgggaggtcagaaactcttgagtgacaccagaagataatgggaaagttttgagcaatgcttcagcctctgaacattyaagaatgatttacctgaagttagagtatctatcagtgagaaaactagactgtggtctaaggactttcccacaggttttgttggaatgtggacagaagtct

SEQ ID NO: 455928 - DNA, 201 bp, Homo sapiens
gtcaacaagcagaatgcctggagcatctcaagaaactattgccatgacctttgctcttgatgggttggcttttcctttgactggaccacttccacctctcrgtagtgattgctctgattgtgctttgtcttcaggatcgtactggtaaagccaggtttcatctcctcttacaattttttgaagaaatgcttcaggatctta

SEQ ID NO: 455929 - DNA, 201 bp, Homo sapiens
ttattttaatgacaaagtttttcttgaaatatagaaatgctcacatttgacttcttttattgtgattattgatctcagtgtcacaatacccaggcattttrtaaattataattccagttgttctgtcactaatgtggattaaattataatggaaatgagtgttcattgtaacctttgtcattagagggtaaatgagctttt

SEQ ID NO: 455930 - DNA, 201 bp, Homo sapiens
aaagttttgagcaatgcttcagcctctgaacatttaagaatgatttacctgaagttagagtatctatcagtgagaaaactagactgtggtctaaggacttycccacaggttttgttggaatgtggacagaagtcttcctgtataggaaattattaaggaatgcccttttcagataagagctgagtattttttaaaaagtga

SEQ ID NO: 455931 - DNA, 201 bp, Homo sapiens
agtgtccttgaaattggcaccttaaaaaataattcccaaagtaggcaagactaagaaacaccatttggcctatggcttcagaactttaaattaattctacmtttttttgctcctgcacccttgtgcctgtatgtccaaataattttacatcaatttttgattctagaattgccgtttatttaactacttgctcgatcataa

SEQ ID NO: 455932 - DNA, 201 bp, Homo sapiens
aagagctggggatcagattcacatttgtcagacttcagggctgcttccccgtaacatcctactatcctagaaggtaaggacagtcatgctgttttgggaawtctgagattgtctcaatataactcgcctccagcttgtgtatagatattttcaaaatgaatatagatgtttagagccagatagttaagcatggggcagtct

SEQ ID NO: 455933 - DNA, 201 bp, Homo sapiens
agtagctgggattataggcacctgccaccacacccggctaatttttgtatttttagtagagacgcggtttcaccacattgggcaggctgggctcaaacttstgacctcaggtgatccacccgcctcagcctcccaaagtgctgggattacaggtgtgagccaccacgcccggcctgccaggctctttatagcatgatctca

SEQ ID NO: 455934 - DNA, 201 bp, Homo sapiens
ttatagcatgatctcatttaatcctgtcatcacccttggggcctagtgaggctaaatatattgcccaaggttgtcagagagagcttgatgaaaggcaagawtatttctagcaggacacctgagcgagagtgatagttccttgtttaggattttgatcagtgaggtggacaatgggagatatgggattcctaggcagaagag

SEQ ID NO: 455935 - DNA, 201 bp, Homo sapiens
gctacacagtgctgaaggggagaaggagcttagagtaatcttagctaacctgttttgtagttttgccaagggccagccctagcgggtaggttaagcaagaygccagcattgtgggttgattggccttcttttggtgcttttttaaatcagaaaaactacctgggaggtcagaaactcttgagtgacaccagaagataatgg

SEQ ID NO: 455936 - DNA, 201 bp, Homo sapiens
tatgggattcctaggcagaagaggcaaacatgcaatgatgggaagtgagggccatattttagaaacttttgctcattcaggtttagctaggaaggtgtggragttgtgatttcaaaggtaaagagaactttaaatgtcctgccaaggaacagagactcttccatggatcactgaagacgttggagagcatttccatggcag

SEQ ID NO: 455937 - DNA, 201 bp, Homo sapiens
tcccaccggctggaactgatctcttccttccttgactcctgggacacatccctgcggttctctgctactttcaggttgttctatcttagtctcctttgacrttttcctccttccttcctcacaaaggaaccattattcaccatggttccctcatatagaaccttttcattgtattttgagatggctcaaatatagtgcttt

SEQ ID NO: 455938 - DNA, 201 bp, Homo sapiens
ctgctgactggtccaaggatattcgaacttgcaagattttaaatgcacagtctttgaatacctggttgattttatgtagcgacagaactgaatatgttgcygagagctttctgaactgcttgagaagagttgcaggttccatgggatttaatgtggactaccccaaaatgtgagaatacattgaattttgttcatatatta

SEQ ID NO: 455939 - DNA, 201 bp, Homo sapiens
tgaataaaaccagttagccaggccgggcgtgatggctcatgcctgtaatcccagcactttgagaggccaaggtgggcggatcacctgaggtcaggagttcragaccagcctggctaacatggtgaaaccccgttcctactaaaaatacaaaaaattagccaggcatggcggtgcacacctgtaatcccagctgcttgggag

SEQ ID NO: 455940 - DNA, 201 bp, Homo sapiens
tcgccaccaagatcgctatgcagatgacttgcaagctcggaggcgagctgtgggctgtggaaatacctgtaaggaccctgtcacattttttctattagtawttaataaatttattttaaagattaaagtaggagatgttatcacatgatcccagaattatttggtttgcttgtttcttgagcctttgccctgggttctggc

SEQ ID NO: 455941 - DNA, 201 bp, Homo sapiens
tgggaattatctaaaataaggtgcattgaacatctccacccatagtaaatactcaatacatacttcttgttatgattattaatatttgcagacatttgacrtggctgttgttcagacagctattaaaaacaggcaaaatcagggataatgccttaaacattggctaatagtactcattaaactatgggtcttagaattgtt

SEQ ID NO: 455942 - DNA, 201 bp, Homo sapiens
cttggctcactgcaacctctgcctcccgggttcaagcgattttcctgcctctgcctcccgagtagctgggattacaagcaagcactgccacgcctggctarttttgtatttttagtagagacggggtttctccatgttggtcaggctggtctcaaactcccaacctcaggtgatccacccgcctcggcctcccaaagcgct

SEQ ID NO: 455943 - DNA, 201 bp, Homo sapiens
tgtgagactctgtctcaaaaaaaaaaaaaaagccaggggacttgaaacttctctatccaccccccactcatatccatactctcaacttcagcttttttttwaaaaagtgtatttttgtgtcctttattttggttatcttgtacctaatgggaaaagcaccatagtttaagctaattctcaactttggcttatctttgggtg

SEQ ID NO: 455944 - DNA, 201 bp, Homo sapiens
taaaaacaggcaaaatcagggataatgccttaaacattggctaatagtactcattaaactatgggtcttagaattgtttccacctttgtaattgaacaatrtgttttgagcctatagcagccctttgcaaaatgttttcttcctggcttaagctattttatttactccattaaattcatgatcaggtatgtattttggatt

SEQ ID NO: 455945 - DNA, 201 bp, Homo sapiens
atgtatacattgtgaaataattaccacagtcaaggtaactaacatatccattacctcacatagttaccatttgtgtgtgtgtgtggtgagactacttaagrtctactctcttagcaaatttcaactatacaatagtacatgataattaactatactcaacatgctgtacattgtgtccaaaacatattcatcttataactg

SEQ ID NO: 455946 - DNA, 201 bp, Homo sapiens
gattgcaaatgttttctcccattatgtaagttgcttttcattttgttaattatttcctttgctatgcagaaacttttattatattgttgtatttttggtgycatattcagaaaatcattgccaagatcaatgtcatggagctttatgttttcttctagaagttttgcagtgtaagatcttttgtttaagtctttaatccat

SEQ ID NO: 455947 - DNA, 201 bp, Homo sapiens
accctcactagagcaacccgaggcaagtgctattaaaatccttatttttaagagaaaggggcttaggctcagtgacatttggcagccaaaatcacagttgraacgcgtttcctgacttgaaacccccatgtaggtcaaattcctaaggtgaccaggattacttgctgaagacacagtcttggtcatttggcagtacctggg

SEQ ID NO: 455948 - DNA, 201 bp, Homo sapiens
ggtgttgctattcatgtccacatctatttgccactctcatatacttataaagagcctactctgaacctggcagggtgttgcgaccatggagcaaacaaagrtaaataaaacagagtacttgttctccaaaatttcaatttcgaataaaagttctttacaaataaatactatgtaaggtagaatgaaataagtgtcataata

SEQ ID NO: 455949 - DNA, 201 bp, Homo sapiens
tagatgctcaactattaggtgcatacatacgtaaaattgatgtattctcttaatgaattgattcttttatccttatccaacgactttgatttttgtgaggktttttttttttttttacaaaagtctattttgcctaagtttagctacccctgctctctattggtttccatttgcatggaatattttttctatccttttact

SEQ ID NO: 455950 - DNA, 201 bp, Homo sapiens
ctgggtatctacccaaaggaaaataaatcattatatcaaaaatttatctgcacttgtacgtttattgcagcactattcacaatagcaaagatataaaatcmacttaagcatccatcgatggataattagataaagaaaatgtggtaacatatataagagaatactactcagccataaaaagaatgaaagcatgtcttgtag

SEQ ID NO: 455951 - DNA, 201 bp, Homo sapiens
catctcattctcctggcctgtaaggtttctgctgagaaatctgctgatagcctatgagggttcctttgtatgtaataagcctctcttcttgctgctttcawcattctctgtctttgatttttgacagtttgattgtaatatgtcttggtgaattcttctttgggttgaacctgcttcagaacttttgagctacgtgtacct

SEQ ID NO: 455952 - DNA, 201 bp, Homo sapiens
tgaggcacaagaatcgcttgaccccaggaagtggaggttgcagtgagccaagatcgtgccactgcactccagcctgggtgacagtgtgagactctgtctcaaaaaaaaaaaaaaagccaggggacttgaaacttctctatccaccccccactcatatccatactctcaacttcagcttttttttaaaaaagtgtatttttg

SEQ ID NO: 455953 - DNA, 201 bp, Homo sapiens
gttggatatactgggctaaataatatacactattcaaagtaatttcgtctgtttcttttttgccttttcttaatgtggctaccagaaaacttaaaatgacwtacgtggttttcatttctattggatgtgctatacagatggtgaatgcattcaagtggaaaggtttaaactgggcctttgatgggctgagttgcttatgtt

SEQ ID NO: 455954 - DNA, 201 bp, Homo sapiens
aatctaaacaataacaacaaccttcaagcaaacaaagcaaccagaaaaacaccaggcccccagtattaagggtcaggaatgctcagctcttactacaatgkcctcagcagactgaactttaggaaaaccccactatgtgccttttaaatttgagatatacctttgtgccatctggttctgcccatctgattatcagactat

SEQ ID NO: 455955 - DNA, 201 bp, Homo sapiens
caacgtgcaggtttgttacatatgtatacatgtgccatgttggtgtgctgcacccattaactcgtcatttacattaggtatatctcctaatactatccctscccccttcacccaccccacgacaggccctggtgtgtgatgttccccaccctgcatccaagtgttctcattgtttaattcccacctataagagagaacatg

SEQ ID NO: 455956 - DNA, 201 bp, Homo sapiens
ttcttcctgtagtctgagtaatctccctttaaagcatatctgatcacactgctcgcaacgctaatacatttccatgtctccttattgccttaggaccaccygtaagccctttagcagagtttccaaatctccttatgatgtggccaattcctgcctttaaagcctcatctcttcccattcccctgctcccttccctggctc

SEQ ID NO: 455957 - DNA, 201 bp, Homo sapiens
tatttatttatcttaaaatatatataacataaaatttaccatttaaattacttttaaatgtgcagtcttgggagatgaacttcatttattttgttgtgcartcatcaccaccatccaactttagatcttttttcactgtgcaaaatggaaactctgtactcattaattaataactcccattcccccctccctccagctcct

SEQ ID NO: 455958 - DNA, 201 bp, Homo sapiens
tagacttttaagatgtgaataaaaatgtctgtaaggggctggaagtcccggaagcacacatggcctccatgtgtctgcagaaaacagaagcccagaaaccytgtctgttttcacgtcggaaaaatgacagttccttcctctctccgcagccttccccttaatctctgagggtcttctctgagattgtttggtctaaccact

SEQ ID NO: 455959 - DNA, 201 bp, Homo sapiens
ctgccacgcctggctagttttgtatttttagtagagacggggtttctccatgttggtcaggctggtctcaaactcccaacctcaggtgatccacccgcctyggcctcccaaagcgctgggattacaggcatgagccacagcgcccggcctaaggggtgctcattcttaatggtgttctgatattgtaggtctgcaggaccc

SEQ ID NO: 455960 - DNA, 201 bp, Homo sapiens
gtttctccatgttggtcaggctggtctcaaactcccaacctcaggtgatccacccgcctcggcctcccaaagcgctgggattacaggcatgagccacagcrcccggcctaaggggtgctcattcttaatggtgttctgatattgtaggtctgcaggacccaatacagtagccagtagcacatgagtttttgaacacttgaa

SEQ ID NO: 455961 - DNA, 201 bp, Homo sapiens
caagccatcctcccacctcagcctctcaaagtgctgagattacagacatgagccaccatgcctggccttgtcatatctttacaataatctatccaagttacaaaaactctcattggagaagataaggaagtactatttttcaacacaaaacaaaacaaaactttatggtaaagtactaaaatgtagactcccattaggatc

SEQ ID NO: 455962 - DNA, 201 bp, Homo sapiens
gtctttttgtgtctggcttattttacttaatataatgtccgtgggttcattcatgttgttgcaaatggcaggattttcttaaggctgaataatattctattgtgtgtgtgtgtgtatatctcacaatttctttacctaaccatccatcagttgtcacaggttgattctatcttggctattgaacatgggaatgtagatatc

SEQ ID NO: 455963 - DNA, 201 bp, Homo sapiens
aataattcccaaagtaggcaagactaagaaacaccatttggcctatggcttcagaactttaaattaattctacctttttttgctcctgcacccttgtgccygtatgtccaaataattttacatcaatttttgattctagaattgccgtttatttaactacttgctcgatcataagaaattatgagttatttatatcaattt

SEQ ID NO: 455964 - DNA, 201 bp, Homo sapiens
ccatttctttcccccacacctacatggttgtagctcagctcttcagtgttctgcagactggtctaaggatcacatactccagcgtcttcttaggggtggartggagctccataaaaggcatattccctggaccttcactgaatctagttagtaaacagaagttcacagataggcctgaaaattcacatttttaggatacac

SEQ ID NO: 455965 - DNA, 201 bp, Homo sapiens
gttctttaggaaattcatagttacagtgagtagaaatgttttcagagttcattccctcagtgagaattggaatcaattgggtgagtcagtgtgaagatatrttttcagaggaacagcaaagccatttccttagattttcatatttattctcattaggaaggaaaatgacataaaattagtttatatctaattagaggattt

SEQ ID NO: 455966 - DNA, 201 bp, Homo sapiens
tctttttgtgtctggcttattttacttaatataatgtccgtgggttcattcatgttgttgcaaatggcaggattttcttaaggctgaataatattctattgtgtgtgtgtgtgtatatctcacaatttctttacctaaccatccatcagttgtcacaggttgattctatcttggctattgaacatgggaatgtagatatct

SEQ ID NO: 455967 - DNA, 201 bp, Homo sapiens
ctgttgtctgtgtttcagtacaaaattttctgcagtgattatgtgaaatggcaagttcaagaaaatgttggaaatggaaaataggagaggacaataatctwaagtcagcttcttaaaatatttggaaagcatcttattccaagcaggacacatagccctatctgtagggttacatcatcatcatcaccatcaaccaaaggg

SEQ ID NO: 455968 - DNA, 201 bp, Homo sapiens
atatattttggatatcatccccgtatcagatatgtgattgcaaatgttttctcccattatgtaagttgcttttcattttgttaattatttcctttgctatrcagaaacttttattatattgttgtatttttggtgtcatattcagaaaatcattgccaagatcaatgtcatggagctttatgttttcttctagaagttttg

SEQ ID NO: 455969 - DNA, 201 bp, Homo sapiens
agacagataaaaataatttcagttgtagtattctcaaatatgaagaagtgatagttctttatagacattcatatgtatatttagtatctaaaccttgcagwcctgtgagaatgagaggtctgtatttcctatatatttttaacattatgttcagtaagggtttgaacttagaattacactgttactgactgatatttacca

SEQ ID NO: 455970 - DNA, 201 bp, Homo sapiens
gagactctgtgatatgaaatgtaatgaattttttataattttcaagtttttttaataaaatggttcatgtgaacgtgaagctagcagctttgttttcttayattagtgtgatagataattatcacaaatcctagaaggaattcagaaactgaattttctgtgtgtaataagtaataatgaaagcaggatgagctgtatttt

SEQ ID NO: 455971 - DNA, 201 bp, Homo sapiens
aattcaagtccaatgtttccttattaattttctgtcaggatgatctatctgttgttaaaagtggagtactgaagctccctactattattgtattgctgtttctctcttcagatgttaatatttgatttatatatttagatgctcaactattaggtgcatacatacgtaaaattgatgtattctcttaatgaattgattctt

SEQ ID NO: 455972 - DNA, 201 bp, Homo sapiens
tctcaaaaatactgtggtcaaactatagacagagaggcaactggtagcccaaacgtagattcataaagggagaagtgcataaaagatagaaaatgggagtrgggtgtttggccttctgcttggtggaggaaaaatgacggagtttccatatgttcattcagagtgtcagcgtgctctctataaagcacccaattcgtcctt

SEQ ID NO: 455973 - DNA, 201 bp, Homo sapiens
attcaagtccaatgtttccttattaattttctgtcaggatgatctatctgttgttaaaagtggagtactgaagctccctactattattgtattgctgtttctctcttcagatgttaatatttgatttatatatttagatgctcaactattaggtgcatacatacgtaaaattgatgtattctcttaatgaattgattcttt

SEQ ID NO: 455974 - DNA, 201 bp, Homo sapiens
gattgtactaaactgccctaggtgctcagcacatatgcctgtcccggaggctggcttagtatcacagtgtctacttaatagtccacaaaatataaactggmattattttttaaaatagtagtctattatttcatgccatttctgtaacttcttattcaagatttttaagtttatgtgggaagaaactgtaggctgtgttcc

SEQ ID NO: 455975 - DNA, 201 bp, Homo sapiens
ttcaagtccaatgtttccttattaattttctgtcaggatgatctatctgttgttaaaagtggagtactgaagctccctactattattgtattgctgtttctctcttcagatgttaatatttgatttatatatttagatgctcaactattaggtgcatacatacgtaaaattgatgtattctcttaatgaattgattctttt

SEQ ID NO: 455976 - DNA, 201 bp, Homo sapiens
aggtgctcagcacatatgcctgtcccggaggctggcttagtatcacagtgtctacttaatagtccacaaaatataaactggaattattttttaaaatagtmgtctattatttcatgccatttctgtaacttcttattcaagatttttaagtttatgtgggaagaaactgtaggctgtgttccggtttctcttgtatatctg

SEQ ID NO: 455977 - DNA, 201 bp, Homo sapiens
tttgtttttctcctagccgattgatttaggaaagaagatcactgtctgctttctgccctggctccaccctcagcccatttctttcccccacacctacatgrttgtagctcagctcttcagtgttctgcagactggtctaaggatcacatactccagcgtcttcttaggggtggaatggagctccataaaaggcatattccc

SEQ ID NO: 455978 - DNA, 201 bp, Homo sapiens
tcaagtccaatgtttccttattaattttctgtcaggatgatctatctgttgttaaaagtggagtactgaagctccctactattattgtattgctgtttctctcttcagatgttaatatttgatttatatatttagatgctcaactattaggtgcatacatacgtaaaattgatgtattctcttaatgaattgattctttta

SEQ ID NO: 455979 - DNA, 201 bp, Homo sapiens
ttgaattggggtgcttttctgaacctagatgttttcctgcggggacagatcactccataaatgtattattcctatagttacggttttcaggcagggacatwtcccccccctcttcagggaacattttgtattgtctggagacgtttctggttgtcacagctgggaggctgctactggcgtctagtgggtagaggccaggga

SEQ ID NO: 455980 - DNA, 201 bp, Homo sapiens
gggtgcttttctgaacctagatgttttcctgcggggacagatcactccataaatgtattattcctatagttacggttttcaggcagggacatttccccccmctcttcagggaacattttgtattgtctggagacgtttctggttgtcacagctgggaggctgctactggcgtctagtgggtagaggccagggaaatgctgc

SEQ ID NO: 455981 - DNA, 201 bp, Homo sapiens
tacggttttcaggcagggacatttcccccccctcttcagggaacattttgtattgtctggagacgtttctggttgtcacagctgggaggctgctactggcrtctagtgggtagaggccagggaaatgctgctaaacatcctacagtacacaggacggtccctaacaaagaattatccagttcaaaatgtcagtggtgccaa

SEQ ID NO: 455982 - DNA, 201 bp, Homo sapiens
gtggctgctggtttccctgacaagcagtttgaaggtcaaaagaaaccaaccctggaggaactcgagttatgacagagcaatgttaagtgtagacctaggarggaagcctatagggctaggataggggtgctaacagataaagtggcaaagcaagagaagaagggaaagacagcagatgaggaaaggtgccctatccatagc

SEQ ID NO: 455983 - DNA, 201 bp, Homo sapiens
ggtagcagttactctatggtccctgttctttaggaaattcatagttacagtgagtagaaatgttttcagagttcattccctcagtgagaattggaatcaaytgggtgagtcagtgtgaagatatgttttcagaggaacagcaaagccatttccttagattttcatatttattctcattaggaaggaaaatgacataaaatt

SEQ ID NO: 455984 - DNA, 201 bp, Homo sapiens
gtaatgagtgagttcttgttctgttagtttgtgcaacagctggcggtttaaaagagcctggcatgtctcttgatctctctcttttgctccctctttcaccrtgtgacaccctggcccccctttgcctttcatgatgattataagcttcctgaggccctcgccagaagcagatgctggcactatgctttatgtacagcttgt

SEQ ID NO: 455985 - DNA, 201 bp, Homo sapiens
gagacagaggaatgctccctaaagttatccattgttatattcttgcaaatataacccaaattatgtattgccctattttacagtggtctgaaatagcaaayccatttaaacactgcaatatatgggaatgttattttttgttggcattagaaaagtaattcttttcttactgacaccaaattctgcaggagcactcaacaa

SEQ ID NO: 455986 - DNA, 201 bp, Homo sapiens
tgtaaatatgatactcaagagtcccacctaggaattatcatacacgtcatctttgtatccctagatatagcacaatacctgatatttcctaaagaaggaakgaatgaatgaatgaatcaatgaatgaatcacttcttgagtccacagtgggaggaaagcagtctatcatagaaacaaaataacaataactattataataca

SEQ ID NO: 455987 - DNA, 201 bp, Homo sapiens
ctgttgtttacccagaagcccattctattatctgtgtaaccagtagacaaagtaaaatcagaaaaaatctctttgaagaacaaggtaatctcttaattatyatcaatacttttttctcctcagggcatagtcagtgtcccagcaccatgtcagtatgctcacaagctgacctttctggtggcacaaagcattcataaagaa

SEQ ID NO: 455988 - DNA, 201 bp, Homo sapiens
aatttagtgagggtaatagaattctagaaattcatattactttgcagtaacattttgtatttttataaagttattttcaacatgccagaaagtcagcatcycccgtactaatttaaacagaaaatactcatttggaaacagattttaatttcatgttttctagaagctgtcagtaagtgatatgccctgaggtgaaacact

SEQ ID NO: 455989 - DNA, 201 bp, Homo sapiens
gttaatatttgatttatatatttagatgctcaactattaggtgcatacatacgtaaaattgatgtattctcttaatgaattgattcttttatccttatccmacgactttgatttttgtgaggttttttttttttttttacaaaagtctattttgcctaagtttagctacccctgctctctattggtttccatttgcatgga

SEQ ID NO: 455990 - DNA, 201 bp, Homo sapiens
tttattcaccataattttttattgatccttcaattctttgtcctatgaccagatgttgatagcacgctaatatggcttctcatacttaaatgatatatttyaagtctgttgttaccattaaaaatgttcttgtagatacatttctagcactagtttagaaatttagatacgttgaaattattaaatactacccttgaagtg

SEQ ID NO: 455991 - DNA, 201 bp, Homo sapiens
gcctggggactggagggtctgaggtccaataggagatgtaggaagtgaaacaggagtgggtgtttggtgggagaggtacaaggcggggctgaagagtttgmtcttaggtggttgttgaaaatgcagttcctgagaccatctgctgccacctcccctcaaccactcatcccaaaggattaagacatcctttgttgtcttaat

SEQ ID NO: 455992 - DNA, 201 bp, Homo sapiens
ttggcgagagttcagtaaagagaagctcagtttcagatccacatgtgaagaaggacttatgtacttaaaatgatccatctcataatttctataagtaaagycgtatttcccagagcctttcatttttatgtatttgtttgcatttttttggtgtagaaactggtgtccataggagaaagggcattaaaacaggagaactca

SEQ ID NO: 455993 - DNA, 201 bp, Homo sapiens
gtcctgggtctcctcccagccccataagacaacagcaggaagaaatgttgtgggcagaaggagtacagctctcctcatgccctaatggacaggaatgaackttgactccagagggagccattgatggaaagctagcccttctcctttgctctcaggccgaggtaggtggactcctggggctgaatccagcccagccagtgg

SEQ ID NO: 455994 - DNA, 201 bp, Homo sapiens
gattttcaaaaggggagggagtgtacgaatagggtgtcggtcacaaagatcacgtactttacaaggtaatagaatatcacaaggcaaatggaggcagggcrggatcacaggaccgggcgaaattaaaattgctaataaagtttcgggcaccgttgtcactgataacatcttatcaggagacaaggttttgagagcaaccgg

SEQ ID NO: 455995 - DNA, 201 bp, Homo sapiens
gtcactgataacatcttatcaggagacaaggttttgagagcaaccggtctgaccaaaatttattaggcaggaatttcctcttcctaataagcctaggagcrctataggagactgggtctatttcacctctatagtctacagaccataaaagacagccacgcccaggggggccagttcagagacctactcccaggcgtgcat

SEQ ID NO: 455996 - DNA, 201 bp, Homo sapiens
agaattcagcaatatttctcctatttgcttttgaaagaagagaaatatggctctgttccgcccggctcaccggtggtcagagtttaagattatctctcttkttccttaaacattgctgttatcctgttcttttttcaaggtgcccagatttcatattgttcaaacacacatcctctacaatttgtgcagttaatgcaatta

SEQ ID NO: 455997 - DNA, 201 bp, Homo sapiens
tttcatgatcattatttttctcagtgtcaacctgtgtctgctgctgactggtccaaggatattcgaacttgcaagattttaaatgcacagtctttgaatamctggttgattttatgtagcgacagaactgaatatgttgccgagagctttctgaactgcttgagaagagttgcaggttccatgggatttaatgtggactac

SEQ ID NO: 455998 - DNA, 201 bp, Homo sapiens
gctctactttctctaaacccatgagctaataaagcaggaaatgattatgaaagaagccacagtccgcagatcctgggctgacatcacaggctctttctcaygtgaattctggaacaagcccattgctatgttctgtccttggcctgttttatttgaaagctcgtattttatttcaaccttcttttttccatgaagtatcca

SEQ ID NO: 455999 - DNA, 201 bp, Homo sapiens
tatccatgtaacaaaactatgctcttatgccttaaatgtatacgcatttttaaaaaagcagaaaaaaaaaatctgaacggcatataaatgccaatgccatkgcttggaaggatggtagaaacctggtatctaccagtgcatgtagccaactgctctctttcttcccctcctgtggtaaacatcaccattcaatggtagctc

SEQ ID NO: 456000 - DNA, 201 bp, Homo sapiens
aattcacatattcacaaaagacatctccacatccactggctccaaaatatctccttattaacgagtgtgttatcaggaatgataatatctcataggttttragcacatgccatgtgccagggactgtggtgagcactttctgtgcattatcatatttcatctttatatcaatcctacgaagtaggtgcttttattatcctt

SEQ ID NO: 456001 - DNA, 201 bp, Homo sapiens
aatgccattgcttggaaggatggtagaaacctggtatctaccagtgcatgtagccaactgctctctttcttcccctcctgtggtaaacatcaccattcaakggtagctctcctcacagcaaagccagatttggtctcaggatacttgtcaacatgctactccaagtcaccacaatcacacactgtgagttggcatgcccca

SEQ ID NO: 456002 - DNA, 201 bp, Homo sapiens
aaatcaccatttaaaaatctttattgtgtttccggtataacattgacaatattcctttttttcttttttgtttttaaagattatccctttggcctgggttygccatttctgtgtcatattttgaaaggaagctcctgtttagtgctgatgtgagttacaaagtcctccggaatgagacggttctggaattcatgactgctc

SEQ ID NO: 456003 - DNA, 201 bp, Homo sapiens
aaattctcgcttgcggtaccctcctttcccctaatgccactctctattctaacccccagcggtctgcactttgcatgcttcagttcagttcaattcagttyacttcagttgcctggattcccttccccaaattctgccttttaaacttcagttttcacaaagctcaattctaatgtcctggcttttctgacacctccattt

SEQ ID NO: 456004 - DNA, 201 bp, Homo sapiens
ctccttgtttttggattcccaggactagctcagtgctttgcgcatattagatactcaagaaactattgatggaatctgttgctgcctctagaagctctagycgcatttgcaacagttatccttacccctcatcttccatgttcaattctttttgaaagcaccttctctttaatgtatagtaatattcaggttaaaacaaac

SEQ ID NO: 456005 - DNA, 201 bp, Homo sapiens
aacctcctcattcacttgtcaccaagacgagttctgtatcctttatccgtgaattttctttttgccagccctgttcccactgcattaatgcaggccatctygtggatcccctcccactaccgtcactctttatgccctagctctctcctcactgtgatccctcaccctcacagccatcagagagatctttctgaagtgctg

SEQ ID NO: 456006 - DNA, 201 bp, Homo sapiens
tcctctctagcactgcatagtttggccccctctttctttcttatatttctcagcatccctcctatgcaccccatgcctttatcaccccatccactcactgrcctacaccttcctcagcctttgtgtgtgttcactaggcatctgcagaaagccacgctgtacctttctcctttacccctaggtcaaatcctagcttcaagg

SEQ ID NO: 456007 - DNA, 201 bp, Homo sapiens
atccctcctatgcaccccatgcctttatcaccccatccactcactggcctacaccttcctcagcctttgtgtgtgttcactaggcatctgcagaaagccaygctgtacctttctcctttacccctaggtcaaatcctagcttcaaggccaagtgtgaagtcctctctgactttgctttctgtcacacacgtagaagagcaa

SEQ ID NO: 456008 - DNA, 201 bp, Homo sapiens
gttgtgcttcactgcatatatattgtaattagggaggaaaagaaagaaaactgtgacagcttctagtatgccctcctccctgtcccaggaaagaaagactrattattatgtagtcagttttcaaagtggaagacatcctgatattgacctttatatttctctattttatcttatcatacaaagtattttcaaatgctaaga

SEQ ID NO: 456009 - DNA, 201 bp, Homo sapiens
tggaggatttggaaacttacgtagcacaaagaaaggagagagaaaagagtgtgtatgtgtgtttactcagtaaatatttaacaaatgagtgaatcacaatkgaattaataattaattcaattaatattagtaatattctttcagactctgcaaacgcatataatcctattttttaaaagagaaatggtataatactgtacg

SEQ ID NO: 456010 - DNA, 201 bp, Homo sapiens
agctgtgctaatttccagttatggagccttgggaagattgcttaatgtttcacagtgttttctcatctgcaaaggggacaataatagtatctctttcatcrgtttgttgtgctttatcgtgctttgttaagcattgtttgtgcttcttgtggacctcgctttgtagataatgtattgatgcagaaaggcagggactgtgcc

SEQ ID NO: 456011 - DNA, 201 bp, Homo sapiens
agaaaagagtgtgtatgtgtgtttactcagtaaatatttaacaaatgagtgaatcacaattgaattaataattaattcaattaatattagtaatattcttycagactctgcaaacgcatataatcctattttttaaaagagaaatggtataatactgtacgtcatgttttgtagcttgctcttttcacttcagggtttttc

SEQ ID NO: 456012 - DNA, 201 bp, Homo sapiens
attcttttatccttatccaacgactttgatttttgtgaggttttttttttttttttacaaaagtctattttgcctaagtttagctacccctgctctctatkggtttccatttgcatggaatattttttctatccttttactttcaatctatgtgtgtccttacagctgaagtgaatctctttgtaggtggcatttagttag

SEQ ID NO: 456013 - DNA, 201 bp, Homo sapiens
gaacacagtaagcacgccatgtgttctaaattaatggagtcatgcatacaaactcacttgataaaggcttctccaaactttttagccatagcatcagttgyacctgctactttcaaatgagattcttgacttggtttttattttaatgacaaagtttttcttgaaatatagaaatgctcacatttgacttcttttattgtg

SEQ ID NO: 456014 - DNA, 201 bp, Homo sapiens
ttcagactctgcaaacgcatataatcctattttttaaaagagaaatggtataatactgtacgtcatgttttgtagcttgctcttttcacttcagggttttyctcaaacatttccatatgataaacatgatctctattatcatgctagtgttttcatagttttttaatttcatggatatactttacgtcatttaccctggac

SEQ ID NO: 456015 - DNA, 201 bp, Homo sapiens
ccggcagcagcgcctggccaggcttgtggacaacatccagaggtactggatcaccgcatgcatccttcctggggctgagtttttagtattagatggcctaygtaacactgatatattccttgaaggaaatgtgtcattcatattgattcagagcaaggagcttttgaattgtgctgtccacagcccttcatctgagatgtc

SEQ ID NO: 456016 - DNA, 201 bp, Homo sapiens
agatgctcaactattaggtgcatacatacgtaaaattgatgtattctcttaatgaattgattcttttatccttatccaacgactttgatttttgtgaggttttttttttttttttacaaaagtctattttgcctaagtttagctacccctgctctctattggtttccatttgcatggaatattttttctatccttttactt

SEQ ID NO: 456017 - DNA, 201 bp, Homo sapiens
gatgctcaactattaggtgcatacatacgtaaaattgatgtattctcttaatgaattgattcttttatccttatccaacgactttgatttttgtgaggttttttttttttttttacaaaagtctattttgcctaagtttagctacccctgctctctattggtttccatttgcatggaatattttttctatccttttacttt

SEQ ID NO: 456018 - DNA, 201 bp, Homo sapiens
gctattcacaggcacagtgatagcacaatacagccttgaactcatgggctcaagcagtcctcctacctcagcctcccaagtagctgtgactataggcacgygccaccacatgtagctgtattactgttgttgcatatatttagagaggtataataatgctggaacatacctaacacaaagtcatgatcttcatttccaagt

SEQ ID NO: 456019 - DNA, 201 bp, Homo sapiens
acggacaatccctaatttaaaaaattgtatgtatctctagggaaggagggattgtaggtaatttttattttctgttttgcagtgtttttcaaatggaatttttatttatttcattttttaaattacacaaaaatagaaagctatatagattggattgagttcttttcatattttgcctctctaatttttagctcaagactg

SEQ ID NO: 456020 - DNA, 201 bp, Homo sapiens
cggacaatccctaatttaaaaaattgtatgtatctctagggaaggagggattgtaggtaatttttattttctgttttgcagtgtttttcaaatggaatttttatttatttcattttttaaattacacaaaaatagaaagctatatagattggattgagttcttttcatattttgcctctctaatttttagctcaagactgt

SEQ ID NO: 456021 - DNA, 201 bp, Homo sapiens
ggacaatccctaatttaaaaaattgtatgtatctctagggaaggagggattgtaggtaatttttattttctgttttgcagtgtttttcaaatggaatttttatttatttcattttttaaattacacaaaaatagaaagctatatagattggattgagttcttttcatattttgcctctctaatttttagctcaagactgtc

SEQ ID NO: 456022 - DNA, 201 bp, Homo sapiens
gacaatccctaatttaaaaaattgtatgtatctctagggaaggagggattgtaggtaatttttattttctgttttgcagtgtttttcaaatggaatttttatttatttcattttttaaattacacaaaaatagaaagctatatagattggattgagttcttttcatattttgcctctctaatttttagctcaagactgtcg

SEQ ID NO: 456023 - DNA, 201 bp, Homo sapiens
gctaacctgttttgtagttttgccaagggccagccctagcgggtaggttaagcaagatgccagcattgtgggttgattggccttcttttggtgcttttttwaatcagaaaaactacctgggaggtcagaaactcttgagtgacaccagaagataatgggaaagttttgagcaatgcttcagcctctgaacatttaagaatg

SEQ ID NO: 456024 - DNA, 201 bp, Homo sapiens
ttcttcctcttcttcaccttaacctcctcattcacttgtcaccaagacgagttctgtatcctttatccgtgaattttctttttgccagccctgttcccacygcattaatgcaggccatctcgtggatcccctcccactaccgtcactctttatgccctagctctctcctcactgtgatccctcaccctcacagccatcaga

SEQ ID NO: 456025 - DNA, 201 bp, Homo sapiens; identical to SEQ ID NO: 437848

SEQ ID NO: 456026 - DNA, 201 bp, Homo sapiens; identical to SEQ ID NO: 437785

SEQ ID NO: 456027 - DNA, 201 bp, Homo sapiens
ttacccccagggactgttgccactcggggttgtagagtaatatgtaaccagactggagaaccacagcaatgctctctcctctgcccatcacctccccttgkcccctccctcttcatcagccccattttggagaagggagaaagaagggagaggcagcagtctcctcccaggtggggccggactccagggaaggagaatttt

SEQ ID NO: 456028 - DNA, 201 bp, Homo sapiens
aagtggtgggtcagcgagagaggcaggcggtctgtgagccctgcatctgagcccctctccactcttgtccctgcaggtcctggcaggagctctggtacctrggaagctggatggagagcctgggccagaatcccggacccctcacctctgcggcctagctttgtgaccttggcaaatccattctatgcacctccatttcct

SEQ ID NO: 456029 - DNA, 201 bp, Homo sapiens
actgctgggattataggcatgagccaccgtgcccggcccatagattacttttataatcaagtttttctttactttttaaagagtaaattctctcacctcargtagctcagagagctgcgctggaggagaaaagccagtaagtgaacaactggaataaactctgcaggggtggcagtgggggcagaaggagagcaaggatgg

SEQ ID NO: 456030 - DNA, 201 bp, Homo sapiens
tggcctctgttaatttttcagctttggtttccagacttctttgtattacaacatatgttccagccacaataagcgactgacctgtagtttttggcaggctgggctgggctgggctctgttattgcttcaggccatctcatgtgctttcttctcttcctggggtgtactctcccctttccttcctgtcctgtagccagctcc

SEQ ID NO: 456031 - DNA, 201 bp, Homo sapiens
tttcttctcttcctggggtgtactctcccctttccttcctgtcctgtagccagctcccattctcccatcaaaatcagcctgctctgagttacagctggtcycttccccagcagttcccaggcctcacccccgttagtgggtttgccctcccatctcagttgggtccctttccatgtgctccttccttgtagaatgtagtct

SEQ ID NO: 456032 - DNA, 201 bp, Homo sapiens
tttgaaaagatagtgtgaagccaagacagtcagtgcctctgctcataggtgagcagaacacaagatgcatggagcatcgtcttccagcaagtatgtgttgragtcttctgagtgtgcttttgacttcctagggcttttctattcacggagctgagatgaaccctgagctctcagacagggaggctctgggctggttctctc

SEQ ID NO: 456033 - DNA, 201 bp, Homo sapiens
gtccatgctggtgagaaaaatgtttttgatccatgtgtgtgggagcaatgatgccagctcaggtctcagttttagagatttagagtttcagggaaatgagyccatggccccttgggtatttgtagtgttggacagccgtggggcatattccaggaggttttagaatgctcatgagcccatcactttccatttgaggattcc

SEQ ID NO: 456034 - DNA, 201 bp, Homo sapiens
tcctactcaaggaggtttctagtgggaattttgaggcttttgtgtcccattccagtcacaaagtcttctgaacacagagagaatgcagtgttcctggtgaygcttatggtggtggcaagaactgtgatgcgtctgagatttgcccctacttgccccaggtttatagatgctggcagaaaacctgaaactcccgagccagag

SEQ ID NO: 456035 - DNA, 201 bp, Homo sapiens
gatctgtcctgtggttccacatcactactgagtggttggctgtttctccttcctttgattcactgtgaactcatgtctggcctctcagaaactctaagccrgcaaggaagaggcctgtgggacaggaaagcatggggagaaagagacagggacaaggggtttggggctgttggggagacacagctatggggaaaagcagtc

SEQ ID NO: 456036 - DNA, 201 bp, Homo sapiens
agtgcaatggcaggatctctgctcactgcaacctctgcctcccgggttcaagtgtttctcctgcctcagcctcctgagtagctgggattacaggaatgcaytgccacacccggctaatttttttgtatttttagtagagatgggtttagtagagatgggtttctccatgttctcaaactcctgacctcaggcaatctgccc

SEQ ID NO: 456037 - DNA, 201 bp, Homo sapiens
gataccatctctgtctcttctaagactatttgctctacaaactctttgaaaagatagtgtgaagccaagacagtcagtgcctctgctcataggtgagcagmacacaagatgcatggagcatcgtcttccagcaagtatgtgttggagtcttctgagtgtgcttttgacttcctagggcttttctattcacggagctgagat

SEQ ID NO: 456038 - DNA, 201 bp, Homo sapiens
ctccgcaccaagaatggtgttgtctaccagaccttctgtgacatgacttctgggggtggcggctggaccctggtggccagcgtgcacgagaatgacatgcrtgggaagtgcacggtgggtgatcgctggtccagtcagcagggcaacaaagcagactacccagagggggatggcaactgggccaactacaacacctttgga

SEQ ID NO: 456039 - DNA, 201 bp, Homo sapiens
gtttaggactgacgtgcaccagccactggccataaaggtactgggctgcacccctacagcctggggtgtttggctgtagcctcagcttttggcttagggartccctggactggccaatgggatgctgcttctagttcatcctttgactacttggctgtttcttcacctcttctttttcaggggaatttgttgcaggattcg

SEQ ID NO: 456040 - DNA, 201 bp, Homo sapiens
cgagtggaagattccaggtgtttaacctataccagctgttggatcagaccgtcttagcatagggaatccctgacctcctgggacttcagagcagagtgatragttgatacaggggcagagattggccaggaaagatggcctcagtggtcagacttctaatgagactcattctcacattttctagcagcagcctcttctctt

SEQ ID NO: 456041 - DNA, 201 bp, Homo sapiens
acccagagggggatggcaactgggccaactacaacacctttggatctgcagaggcggccacgagcgatgactacaaggttggtgccacttctctcccactygggtgagggtgaggtgtggagtgtggctggccaccagcctgcaggagggagggctggaaggtggggatatggggaagggctggagaagaagagagaaata

SEQ ID NO: 456042 - DNA, 201 bp, Homo sapiens
gtatactcttataattgtggggaaaagaaaaagagatcagactgttactgtgtctatgtagaaagaagtagacataagagactccattttggtctgtgctragaaaaattcttctgccttgagatgctgttaatctgtaaccctacccccaaccctgtgctcacagagacatgtgctgtgttgactcacggtttaatggat

SEQ ID NO: 456043 - DNA, 201 bp, Homo sapiens
accctgtgctcacagagacatgtgctgtgttgactcacggtttaatggatttagggctgtgcaggatgtgctttgttaaacaagtgcttgaaggcagcatrcttgttaaaggtcatcaccactctctaatctcaagtacccagggacacaatacactgcggaaggccgcagggacctctgtctaggaaagccaggtattgt

SEQ ID NO: 456044 - DNA, 201 bp, Homo sapiens
agtgtctagggtagggggcagatctgtcctgtggttccacatcactactgagtggttggctgtttctccttcctttgattcactgtgaactcatgtctggyctctcagaaactctaagccagcaaggaagaggcctgtgggacaggaaagcatggggagaaagagacagggacaaggggtttggggctgttggggagacac

SEQ ID NO: 456045 - DNA, 201 bp, Homo sapiens
gctgaatcttatgaagtgggcacaacctttgctctgagctgcacagaggccctatcctgctgtagaatcagatgtggcgtgtgctgatttctggcctctcstggccacagggtggcactgtcgagagggagataccatctctgtctcttctaagactatttgctctacaaactctttgaaaagatagtgtgaagccaagac

SEQ ID NO: 456046 - DNA, 201 bp, Homo sapiens
cccacaggtgtggaggggcaggccaccccttcaataatagttaagaaaaggtgcatacaaaacattagctgggcatgatggcgcatgcctgtaatcccagytcctcgggaggctgaggcaggagaatcgcttgaacctgggaggcggaggttgcggtgagctgagttcacaccactgcactccagcctgggcaacaagagc

SEQ ID NO: 456047 - DNA, 201 bp, Homo sapiens
gactacccagagggggatggcaactgggccaactacaacacctttggatctgcagaggcggccacgagcgatgactacaaggttggtgccacttctctccyacttgggtgagggtgaggtgtggagtgtggctggccaccagcctgcaggagggagggctggaaggtggggatatggggaagggctggagaagaagagaga

SEQ ID NO: 456048 - DNA, 201 bp, Homo sapiens
tccttgacaagtttctctactggctctgtgctcctcagactgtccattagtgcgtgtttgtgtatgttcctgcatgcattactactttaaaatacatgcakagggccaggtgtggtagctcacacctgtaatcctagcactttgggaggccgaggcaggcggataacttgaggtctggagttcgagaccagccttgcgctc

SEQ ID NO: 456049 - DNA, 201 bp, Homo sapiens
cctctgtctaggaaagccaggtattgtccaaggtttctccccatgtgatagcctgagatatggcctcgtgggaagggaaagacctgactgtcccccagccygacacccacaaagggtctgtgctgaggaggattagtaaaagaggaaggcctctttgcagttgagataagaggaaggcatctgtcttctgcttatccctgg

SEQ ID NO: 456050 - DNA, 201 bp, Homo sapiens
ccactggcctctgttaatttttcagctttggtttccagacttctttgtattacaacatatgttccagccacaataagcgactgacctgtagtttttggcaggctgggctgggctgggctctgttattgcttcaggccatctcatgtgctttcttctcttcctggggtgtactctcccctttccttcctgtcctgtagccag

SEQ ID NO: 456051 - DNA, 201 bp, Homo sapiens
ttagtgggtttgccctcccatctcagttgggtccctttccatgtgctccttccttgtagaatgtagtctcttgaagaaatgtgtcaaattgtctttgtccrgtgtctaggtagttcacacagtaggtatttaattaaaattagtcgagtggaagattccaggtgtttaacctataccagctgttggatcagaccgtcttag

SEQ ID NO: 456052 - DNA, 201 bp, Homo sapiens
aatgcactgcggaaagccgcagggacctctgcccaagaaagcctgggtattgtccaaggttttcccccactgagacagcctgagatatggcctcatgggaraggaaagaccttaccatcccccagcctgacacccgtaaagggtctgtgctgaggaggagtagtgaaagaggaaggcttctttgcagttgaggtaagagga

SEQ ID NO: 456053 - DNA, 201 bp, Homo sapiens
cactggcctctgttaatttttcagctttggtttccagacttctttgtattacaacatatgttccagccacaataagcgactgacctgtagtttttggcaggctgggctgggctgggctctgttattgcttcaggccatctcatgtgctttcttctcttcctggggtgtactctcccctttccttcctgtcctgtagccagc

SEQ ID NO: 456054 - DNA, 201 bp, Homo sapiens
gtcttatgaatataatttattttttatttctttttttttctttgaagagtccttttctttctttttttttttctttgagacagagtctcgctctgtcaccmaggctggagtgcagtggcgcgatctcagcttactgcaagctccacctcccgggttcatgccattctcctgcctcagcctcccgagttgctgggactacag

SEQ ID NO: 456055 - DNA, 201 bp, Homo sapiens
actggcctctgttaatttttcagctttggtttccagacttctttgtattacaacatatgttccagccacaataagcgactgacctgtagtttttggcaggctgggctgggctgggctctgttattgcttcaggccatctcatgtgctttcttctcttcctggggtgtactctcccctttccttcctgtcctgtagccagct

SEQ ID NO: 456056 - DNA, 201 bp, Homo sapiens
ttccaggtgtttaacctataccagctgttggatcagaccgtcttagcatagggaatccctgacctcctgggacttcagagcagagtgatgagttgatacargggcagagattggccaggaaagatggcctcagtggtcagacttctaatgagactcattctcacattttctagcagcagcctcttctcttgagatgctctc

SEQ ID NO: 456057 - DNA, 201 bp, Homo sapiens
agactatttgctctacaaactctttgaaaagatagtgtgaagccaagacagtcagtgcctctgctcataggtgagcagaacacaagatgcatggagcatcrtcttccagcaagtatgtgttggagtcttctgagtgtgcttttgacttcctagggcttttctattcacggagctgagatgaaccctgagctctcagacagg

SEQ ID NO: 456058 - DNA, 201 bp, Homo sapiens
agtgggtttgccctcccatctcagttgggtccctttccatgtgctccttccttgtagaatgtagtctcttgaagaaatgtgtcaaattgtctttgtccggygtctaggtagttcacacagtaggtatttaattaaaattagtcgagtggaagattccaggtgtttaacctataccagctgttggatcagaccgtcttagca

SEQ ID NO: 456059 - DNA, 201 bp, Homo sapiens
gtctcttctaagactatttgctctacaaactctttgaaaagatagtgtgaagccaagacagtcagtgcctctgctcataggtgagcagaacacaagatgcrtggagcatcgtcttccagcaagtatgtgttggagtcttctgagtgtgcttttgacttcctagggcttttctattcacggagctgagatgaaccctgagct

SEQ ID NO: 456060 - DNA, 201 bp, Homo sapiens
ctggcctctgttaatttttcagctttggtttccagacttctttgtattacaacatatgttccagccacaataagcgactgacctgtagtttttggcaggctgggctgggctgggctctgttattgcttcaggccatctcatgtgctttcttctcttcctggggtgtactctcccctttccttcctgtcctgtagccagctc

SEQ ID NO: 456061 - DNA, 201 bp, Homo sapiens
cacagtgcccaggaaagttcacatgagacgccacggtgtctcttgccatggccccaccactccaggggccagggggtgctgctggagggaggacagacggrcaggcggcctgggtggccggccccagaaaggctggcgtggatgttcgagatgagccaccagcgaagccagtagggatgtctgggccgtcctggtgggatt

SEQ ID NO: 456062 - DNA, 201 bp, Homo sapiens
tcccagcaggcaccagacggtcttcaggtttatttcttaaatcaattaggaaataaaaccacagtgcccaggaaagttcacatgagacgccacggtgtctyttgccatggccccaccactccaggggccagggggtgctgctggagggaggacagacggacaggcggcctgggtggccggccccagaaaggctggcgtgga

SEQ ID NO: 456063 - DNA, 201 bp, Homo sapiens
gggaggacagacggacaggcggcctgggtggccggccccagaaaggctggcgtggatgttcgagatgagccaccagcgaagccagtagggatgtctgggcygtcctggtgggattgtctgggacatcgccaccaacacggtgtcagagccatcagtggggacatcggaggggccaccaccaggtggggtatattcaacagg

SEQ ID NO: 456064 - DNA, 201 bp, Homo sapiens
ggtggggaggccccagtccgagtccagggcccaggggagatgattcctgcagtccccaaaagcagctggaccctacacaagatgcagctcccaggacacgygtgttccactctcggcaggagaggagaggaaaaaggaaaggccgggccagaggctcacgcctataatcccagcactctgggaggccgaggccagcggatc

SEQ ID NO: 456065 - DNA, 201 bp, Homo sapiens
gacccccggctcctccattcagcagggagggcggagggcctgcttggaagtcacatggagctgcagcatctggaacccaacagccacaggaggcctggatyggggctccgtaaggcacagccgagagggaggtggggaggccccagtccgagtccagggcccaggggagatgattcctgcagtccccaaaagcagctggac

SEQ ID NO: 456066 - DNA, 201 bp, Homo sapiens; identical to SEQ ID NO: 317088

SEQ ID NO: 456067 - DNA, 201 bp, Homo sapiens
aagtggaaatggcttaagatgctcatagcccagccccggctgtgtctactccaggccaagcctgggctgcagtccttgctatgttccccccagggccctgrggggagggatcagggtgctgggggtttcctaggacaggggtcttcccccttgagacaccaagctctggctctagaagagctctctcctggagtggggagt

SEQ ID NO: 456068 - DNA, 201 bp, Homo sapiens
ttttaatctagggtaggcagttgtggtagcccagcattttcctgtggacgagacatggtgcatgttgttgctggattgaatggaacccattcctgtccccyggcctcgtcttctgtcctcacttttggtcatccacacccatgagcagcttcagcagagtgtaggtcccacttcaccccattctcctctcctctgacccct

SEQ ID NO: 456069 - DNA, 201 bp, Homo sapiens
gataggctctgattaattagttactctgactctggtctgccgagatccatttccaacccagttgcgttgggagagggttgggaggcagcagagcatgggtracagtgggagcacacgacttccttggagcctgggcctttgcgggtcccaggtggtcaggcagctggagcagaagtggaaatggcttaagatgctcatagc

SEQ ID NO: 456070 - DNA, 201 bp, Homo sapiens; identical to SEQ ID NO: 317110

SEQ ID NO: 456071 - DNA, 201 bp, Homo sapiens; identical to SEQ ID NO: 317096

SEQ ID NO: 456072 - DNA, 201 bp, Homo sapiens; identical to SEQ ID NO: 317132

SEQ ID NO: 456073 - DNA, 201 bp, Homo sapiens
aagctctggctctagaagagctctctcctggagtggggagtctggaggggactgggtgggtgcaggtaaagccagattctctctggaagggaattttctakgaatggatgatttccaggctcagggtgggctgtgtgttagttctgagcaaatccctcaccaagacccttccctcccaagccctcaaagaaatgaggcaaa

SEQ ID NO: 456074 - DNA, 201 bp, Homo sapiens
aattatactgtaattgatatcagttctcccacatctttggaaaaccatacaattaacacatatccccacagttggacactatcttttgtcttttgtaatgrtgccatattggagtactgttttgaaaagcgtttctaaatattttcttcttcttttaaactcattttaaaaatttcaatttcagaatttttttttagtttg

SEQ ID NO: 456075 - DNA, 201 bp, Homo sapiens
ttttctagcatttttcataacaaacttcttccattaaaaaaaccttatggtggaaaaattttcaaacctacacaaaagtagagaaaatagtatgatgagcmcttatggacctatcatctagcttaaacaatcataaatatttcatctgttctaccacttttttggttaaagtttaattaaaaaatataaatcatgaaatat

SEQ ID NO: 456076 - DNA, 201 bp, Homo sapiens
gttgcatagatcccagtacacactgagatgcttttatctagcagcttattctgaatatcaccgtggaccctggaaatctgtaaaagacattctcttattcragaaggaaatcctctccagaggcaagaaataagacaacaactggatattcattttatatggctttaaaaatcatgatattttgctttatttcaagaagct

SEQ ID NO: 456077 - DNA, 201 bp, Homo sapiens
ttaaactagtaggtttgtttcatacatcaaatttactcattatacaggcttatccaatattgtttactgattgatggctatagttaagaaaaagatcttcyctacactcacacatgcttatatttttacaataacaacttttattgagcatataccatataccagacactgtactaatcactttaaatgaattgtctcatg

SEQ ID NO: 456078 - DNA, 201 bp, Homo sapiens
gaagaggctcacaagggaaatagtagcgggtgggtttggtatggacgtaggggtagactgacatacgtgggtttctattgcacccacacttcctggatcayagctcttctaaaacacatttgcatttgcttggtgatgtacctgtattccctagtaaactgatgctcaaccagggaagggcaccgtgtttgtttaattcac

SEQ ID NO: 456079 - DNA, 201 bp, Homo sapiens
tacatacttccaaaaggcctatacttgatttgtctttccttattaaactcattgataaccttctttttaaactagtaggtttgtttcatacatcaaatttrctcattatacaggcttatccaatattgtttactgattgatggctatagttaagaaaaagatcttccctacactcacacatgcttatatttttacaataac

SEQ ID NO: 456080 - DNA, 201 bp, Homo sapiens
cagagaaaaactgaggagagtattctgtgcatcaatttgtgtagtaaattatatatacctagaaaattactggaaggatatttagtaaactgttaacagasgttgactgtgcagtaggaaatgaatggtttagggtggggctgatttttaaattttgtgctgcatagttcgtactgtaggacttttaaaaacgatgcgtta

SEQ ID NO: 456081 - DNA, 201 bp, Homo sapiens
atagactttcaaaaactgttcaggatcaaatgttcttatcatggaaatgtgtttttttaaccaccatttaaaactgggcttaaaaatttaaaaaagttagkgggtatcaagaaacagttatagctggccaatttgatagagttactttgcatattcaagaaattcctgtattaatctctacttcacattcattgtgtatgt

SEQ ID NO: 456082 - DNA, 201 bp, Homo sapiens
ccattactagtacaactagtacaactaccctggagttgacaatgattccacattgaactctctaacttcattttaggtccatttcttagatctaagcacaraaacacctaaaattggagtattttattcagaatagacacaagcttcaagtgaggaattaaatatagcatctctttacctttagataattttcccccaagt

SEQ ID NO: 456083 - DNA, 201 bp, Homo sapiens
gataggcaaggaaaatggtttccctttccaaatagaaatataggtgtgtgacttctagaaagccctagaataaggaactggctgtctagtgactaatcctyagaaacactgatcacagagttatgcctatcctacggtagactcttgtttcccttgattattggagaacctgctgggatcttgattcaaactagctgggcc

SEQ ID NO: 456084 - DNA, 201 bp, Homo sapiens
gaaatgattactagtcaagcaaattaacatatgcatcacctcacatagttaccttgttctgtgtgtgtggtaaaagcacctaaaatatactctcctagcaratttacagcatgcagcacaatattatcaacttcagtttttatgttgtagagtagagctatagacttattcatcctacatacctgcaactttgtacccttt

SEQ ID NO: 456085 - DNA, 201 bp, Homo sapiens
ctccagagtacattttgttttcaactaaaatggatttggtttctatcaatatgtagtatttatatgacaaaacgataattaaggcaaaggaatttattgamatagtatgttatttatgttattacagtgtccttatatatgcatattgaatattcatacatataaccatacaatatgaacacctttctttgtttttaaaaa

SEQ ID NO: 456086 - DNA, 201 bp, Homo sapiens
aatatggtctttcttattacttttttttctgattaaaaaaccaaactatggttattggaaaaagtcagaaaatatgaaaaagaaattataaaagctctgtratgacatttagggatacctcagaatgtttatactgattatatccttgacgtttttctgtttagatacacatattttttaaaggaaagatgggatcttatt

SEQ ID NO: 456087 - DNA, 201 bp, Homo sapiens
atttaataatctataagaattttctgtcatttaggatttgagtccttactgttaaagtgacctgtaggttttctcttcatccatgttcaagttgataaaayacattattttcatcttcaggttttctttcactatctaatttctttcttttttttttaatcaagctctaaacttgatgttattgttctggggccccaaatc

SEQ ID NO: 456088 - DNA, 201 bp, Homo sapiens
ttaaggtatatacactttttgtattgaagattttatgtctgtgcctatctatctaatatgcatatatgtatatttaaacaaaaatgagatcatatggtatmaaatatttatattatattataatctactttttaatttaatggtatatcatttacagtttctatgataccacctgttgttttacattattaattttaatgg

SEQ ID NO: 456089 - DNA, 201 bp, Homo sapiens
tctggggccccaaatctttgtgcttgatttagttttcacttggaagagaaatagtcaccatctatttgcaggtgcaagttaaggcctgttagaaagcttgrcgtctacgctatgagctctgagtaatattttctagtgtatagttttgatcagatgaagtgtgtatttgtgggaagaaagaagcttgtattgttttatgtt

SEQ ID NO: 456090 - DNA, 201 bp, Homo sapiens
tgtatagttttgatcagatgaagtgtgtatttgtgggaagaaagaagcttgtattgttttatgtttgtaccataggtcataattactgtattgtttatagsataataaactcattaggcaattatgccttgttgggttatttgaaacatttgtttttaacttgaatgctctcaggtaggtaataattagatttcatttggg

SEQ ID NO: 456091 - DNA, 201 bp, Homo sapiens
ttatgacatggtgtagaaaatccctttttcttatggcaatgtaaaaatatatagatcataattacaatgatctggggaggaaaggtgatggtctgatttcygacattcttttagatacttgatggttaactcaatgaacagctatttgagataggcaaggaaaatggtttccctttccaaatagaaatataggtgtgtgac

SEQ ID NO: 456092 - DNA, 201 bp, Homo sapiens
catttacagtttctatgataccacctgttgttttacattattaattttaatggttgcagactattctattgtggccatttcatagcttagctgatcatctrtaggtaaggttgtttttgattctccattattattaacaatattgcagtaaactcatctgtagctaaatctttgcacacatctgtaattatttctttagtt

SEQ ID NO: 456093 - DNA, 201 bp, Homo sapiens
aaggatttagtatttaaatctgcattcccttttggaaacatgacctatttgttaagatttgaggcttaaaagatacaaataaatagtggtaagcagtagcrccagttgcaaatccatttgcatagagagcagaaataactcattgagaaaaatttggtaattatcaagacattctaaagtttggatttctgtagtctttat

SEQ ID NO: 456094 - DNA, 201 bp, Homo sapiens
ttaagaaaaactacacaaaacttcagtgctcagagtatataccccagaagaatttcctggtggggtgggtgggtttacacctgatattgtatttttccccstttttacttggctctctactactaccagtactccctttgaaatgttttctgtggtgctctaagcatagccaaccttttgttacattaaaaagaactgaag

SEQ ID NO: 456095 - DNA, 201 bp, Homo sapiens
agaatagcctatcacaaagtattgtacattattctaatgggtaattaattcttattgatttataagaggtctttatatgctaaaatagtaaccctttgtcwtatatgatttagacttttttaaattttgtcattttgtctaattaaaatttttagaaaatcaaatctctctcatgaaatctaaagttttatttttgatttc

SEQ ID NO: 456096 - DNA, 201 bp, Homo sapiens
ggttgagtcacaggggcatttattgcagtaaagccaatgcctatatatttcaaacatctgtatggaaaacataatttcatatgtaaaaagcactatgttayctggcaaatgcactctctaaggatagcacagctacagatactatcacccttgtgacagtttattggtatggtatgcagctctcttctttaaatattacac

SEQ ID NO: 456097 - DNA, 201 bp, Homo sapiens
ttctgctatagatattaacacaatcaatggaaatgttattctccatgcttgggcagagtcacatgtgcaggaaccagataataataacaatgaaaagaaamcaataaatattactttagaataatgtcttcaagtggatgtttttttccatcttaaattgtttttctttttttgtacagtgaaatcacttgttcccctctt

SEQ ID NO: 456098 - DNA, 201 bp, Homo sapiens
cctatgcccagctaatttttgtatttttagtagagaaggggattcaccgtattggtcaggctggtcttgaactcctgacctaaggcgagccacctgcctcrgcctcccaaagtgctaggatacagacatgagccaccgtgcccagcctatctcttcaaattttgaactacaaaatgcctaagaatagggactgtgtctgct

SEQ ID NO: 456099 - DNA, 201 bp, Homo sapiens
ttgtaccataggtcataattactgtattgtttataggataataaactcattaggcaattatgccttgttgggttatttgaaacatttgtttttaacttgawtgctctcaggtaggtaataattagatttcatttgggatcttttatttaaatgaaagttacccagaataaactgcattttttttggtttaaaaattaaaaa

SEQ ID NO: 456100 - DNA, 201 bp, Homo sapiens
ataattactgtattgtttataggataataaactcattaggcaattatgccttgttgggttatttgaaacatttgtttttaacttgaatgctctcaggtagrtaataattagatttcatttgggatcttttatttaaatgaaagttacccagaataaactgcattttttttggtttaaaaattaaaaaaacgttatttggca

SEQ ID NO: 456101 - DNA, 201 bp, Homo sapiens
aggacccgtttgcttggattgactgctgacacatctctcttttaggcatgtgtctagaatttactgctttacattttgtagacatatagaactgcatatcrtgaattgtcctttgtggttgtcattctgcctgtgaaggatgaaaatatgttagaaacaaaaagttgagatagttttgccgtaaccacagttttacgatga

SEQ ID NO: 456102 - DNA, 201 bp, Homo sapiens
ctctttaaatggttgagataaggtaacttaacattttataagatttaggtaaaatttgcctggattgttcattgttgatcctatcaatcactaagagagawatatatatataggctgtgacttttatcaagtactttctgtaataccaggcattggccaagtgcttttaatacatgatctcatttagtattcacaataact

SEQ ID NO: 456103 - DNA, 201 bp, Homo sapiens
tatgattcttgctttcagtacactcacaatgtaaacaaattaaggcagtataaaatgttgaatttgggaggttttacctgtcatttaacaaatattaggtsccttttataataatattagctaacatatactgagtattatctatgacccagccattgtgctaaagttctttaaatgtattacaggtcgagcaaccctaat

SEQ ID NO: 456104 - DNA, 201 bp, Homo sapiens
taacttaacattttataagatttaggtaaaatttgcctggattgttcattgttgatcctatcaatcactaagagagaaatatatatataggctgtgacttwtatcaagtactttctgtaataccaggcattggccaagtgcttttaatacatgatctcatttagtattcacaataactctatgatgtagatactattctta

SEQ ID NO: 456105 - DNA, 201 bp, Homo sapiens
aaaggaatcaaggatgactctaggattctggcctgagaagctaaggatggagttgcaagcaagatgggaaaggctttggaaggtacagggtttagagggartatcaaaagctcagttctggacttgttaagtttgagatgcatgttagacctccaaatggagatatggagtaggcaagagggaggagtgggttggagataa

SEQ ID NO: 456106 - DNA, 201 bp, Homo sapiens
cactcctacacccaggctggagtgcagtggcatggccttggctcactgcaacctctgcttcccaggttcaagctattctcctgcctcagcctcccaagtakctgggactacaggtacccacccctatgcccagctaatttttgtatttttagtagagaaggggattcaccgtattggtcaggctggtcttgaactcctgac

SEQ ID NO: 456107 - DNA, 201 bp, Homo sapiens
agttttatagatttagcttttgtttttgattcattttcaattaattttaaaaataagcataagataagggttaaacttcattttttaaataggtagatatrcagttttccaagcaccatttgttgaaaagacattttttaattcttttattattattatgatttttgagacagggtctcgccctttcacttaggctggagt

SEQ ID NO: 456108 - DNA, 201 bp, Homo sapiens
atgaataaacaaggagaataaagtccataattaaacccaaatatgtgtggaagtttagtatataatgaagttagcatttcaaatcactagggcatagataractttttaatatatggtatagccatatattaaattcaaatgcggtagccatttaaaaaagataacgttagatctatacttaatactatagaaaagaataa

SEQ ID NO: 456109 - DNA, 201 bp, Homo sapiens
agcctatgaagatttatcttttgttaagtacttgtggaagataccagactttattgtgcagtccaattttttctttttattctatctgcttctttgtaacwggagctgatcacacagtgtttacagtcagcttggattccataacaaaataccacagacaggatggcttaaacaacagaaatttatttttcacagttttgg

SEQ ID NO: 456110 - DNA, 201 bp, Homo sapiens
atcttgcacttcactgggctattctctttcttccttttgcttcatactgtggatacgcagtactatctgtactttgggagtaggttctttcctttaagccscaagggagaaaatgtggttacgctttgtgtcataactttgtgaatgacttgggccaccagtggcatcattaaagatctcagtatgtatactgtctcttct

SEQ ID NO: 456111 - DNA, 201 bp, Homo sapiens
aaaacataatgggagtgctagtcaattgaagaattatttcgtggccaatagacaagtaagagactatagtaagtcctcacttaacatcatcaataggttcrtggaagccgcgactttaagtgaaaagacatgcagtaagtccctgaataatgagattaataatgttttgttataactatgagaaaaaaattggttttgtta

SEQ ID NO: 456112 - DNA, 201 bp, Homo sapiens
ctgggattgccttctttctttggttttcagctagatttttttaggtgtctagaaatgctactactgttcagtgaagctaacagttactgagcagctgtctrgtcaaaattttagcaaactacttcaaaagaataatttcctgtgaaacagtgtgattaaacttgactaaatttttttgccttttattttttaaccttaata

SEQ ID NO: 456113 - DNA, 201 bp, Homo sapiens
agtgctaacttttgtgaactgatgtaaaaaaaggcttttaaatacattttaaacttaattttttattttaatttttcatgctatatcaataagagaattgycttatttatctcattttacctaaattctcatctgttttgaatcttctctgtggctttgggcctggggacaggtagtaatagtttgtaaagttaaaaaaaa

SEQ ID NO: 456114 - DNA, 201 bp, Homo sapiens
gcaatgtaggaggattccaatttttccacatccttaacaaacatttgtcatttttattttcttttttaaaaattatagtcattctagcagatgtgaagtcrtatgtcattgcagttgtgatttgcatttcccaagtgattaatgatgttgagcatcttttcatgtgcatcttggccatttgtagatattctttggagaaat

SEQ ID NO: 456115 - DNA, 201 bp, Homo sapiens
aattttgagttacatttacagaaagtggtagaaataagtttggacttagactttctcggtcaggatcctacttctactatatattagctatctggacttgrggaagtttcccaacttctctgacctcattctacatacttgtatattttaatgcaattcatatatttaaagtacttagtttaatgtacatcatattatatc

SEQ ID NO: 456116 - DNA, 201 bp, Homo sapiens
aaatgaggattaaaattgaccatctttagctgcctttaaatttatcttgatttaattatctagaacaagtacaaataatggccctgccttagttttttctrtacgtctgctctatacaaaatacgctgattaaaaagaggtatggacttaaaaattagaatttatttgcaagattttgttaaatgattgctttttaaatct

SEQ ID NO: 456117 - DNA, 201 bp, Homo sapiens
tccagatctggtcttcagtgacttcccaatgaccagtcttatttctagcaccactgattttgattatatatatttcataagggcaaaattagcagactgtmgtgctaacttttgtgaactgatgtaaaaaaaggcttttaaatacattttaaacttaattttttattttaatttttcatgctatatcaataagagaattgc

SEQ ID NO: 456118 - DNA, 201 bp, Homo sapiens
gaagtaatagggaaatttaaaaagtaagacatagctgtccaatgccccttgcctaggctacctgcatactattatacttaatgacataataataaggtgakaatttgttacacaaagccaaaaggcctaataatttatttaggggaaatctcttagttgagatttcacgtattgtctttgggttagctgtctgaaaatact

SEQ ID NO: 456119 - DNA, 201 bp, Homo sapiens
gctgaggaaggacttgcacatatttttgcaaatctgagaagtcatatttttgtgtctctttagagataattttgagttacatttacagaaagtggtagaartaagtttggacttagactttctcggtcaggatcctacttctactatatattagctatctggacttgaggaagtttcccaacttctctgacctcattctac

SEQ ID NO: 456120 - DNA, 201 bp, Homo sapiens; identical to SEQ ID NO: 159204

SEQ ID NO: 456121 - DNA, 201 bp, Homo sapiens
gtgccacctacctgggcaagttattaaacttctctaacttttgttttctcatgtgtaaaatgaaatgaatagtggaaactatcttgtatgattgttgagargatccaatgaggcaacgcttttaaaagtactttatatagtgcttaatacgatatcaataaaggtgaactctagcattatcattactatttaatatgtatt

SEQ ID NO: 456122 - DNA, 201 bp, Homo sapiens
gggaccttctgatagattgttagtctcttcagcttaccctgtttattttttgttgactttttgttgctatgttttgtgacatttaaaagaaggctgtatcyaaaacggccaatgctaaatgatggactgagcttgtgaagtggagacatcacagtccatcagatgtgtgaggaggctgcagtgtaaagatgcagcagtttt

SEQ ID NO: 456123 - DNA, 201 bp, Homo sapiens
ggaataatcatttgtcttcttgctacccagcactaaacatggttaatctctttgcatatttacctctgtgtgtttttaaagaaaaataattgttgtttttyttttaaagatccttttgagaaagaatcaatacagaaatgtatgaaaattaaaaatagaaaaattaataccaccacctagaaattaacatcattaatatta

SEQ ID NO: 456124 - DNA, 201 bp, Homo sapiens
atttatggaaggcataccccatctaggaagcattttcatatatcaaatccccacaaaaactttgggaggtaaatgttaacatcctcatctttaaaagtatktttttttattttagaaagtgagattatatagttttacaatctgctttcttctctttacacatttcatgcaaagctgtaattatttgtcttctttactagg

SEQ ID NO: 456125 - DNA, 201 bp, Homo sapiens
atcaggggaccttctgatagattgttagtctcttcagcttaccctgtttattttttgttgactttttgttgctatgttttgtgacatttaaaagaaggctktatccaaaacggccaatgctaaatgatggactgagcttgtgaagtggagacatcacagtccatcagatgtgtgaggaggctgcagtgtaaagatgcagca

SEQ ID NO: 456126 - DNA, 201 bp, Homo sapiens
tgcatacttttttttgcttaatttattttttccaatttcaaatgttcagcattaaggaaatttagaaaaatgtgaaaaatggaaagtgtttacctattgtyccatgcccaatggcagcctttgttaacagcttattcctctcagtccttttcctaagaacatagtcttttattattttttaaaaagtgtgtgaatataatt

SEQ ID NO: 456127 - DNA, 201 bp, Homo sapiens
tctattgactatgtctattatataatacagtagatacataccataaatgtttcctcatgctgttgtctaggattccaaataaaagttttaataaccacatmatgacataatattatgcctagtgagtgggctgtattttaaactttcccttatttttggatgtaggatatagaactcacattattaattagaagatttact

SEQ ID NO: 456128 - DNA, 201 bp, Homo sapiens
atagtatatattaatatctcaggaaacaagtggtatatagaacacactttgcaaaatagtgatctaaaatatatatatgattattaaaggagtatacctarggggtcatagataagagagctatttagatatctccagttggggagtctattaaagcagggttaagcaaactatatcaaaggagcccaatctggcacacta

SEQ ID NO: 456129 - DNA, 201 bp, Homo sapiens
gcttagtttttcatctgtgaaatgaaaataacaatgtaactttttggatgaggattaagataacaagaatttttaagaaaatgccttgttaataaagtctrtttttcttactccttcccttcctctcctaacgctcatggagcttctagagaaagagccaatcctgcaatacttggtggtgatattgacacaaatgattta

SEQ ID NO: 456130 - DNA, 201 bp, Homo sapiens
ctttgcctttaacccttttttgtctgatattatagttttcttttggttagtgcttgcaccaaaactaaaatctatttaactcagaactttctaaacttatrtgaacatagaattttatcaaggcatagtatatattaatatctcaggaaacaagtggtatatagaacacactttgcaaaatagtgatctaaaatatatata

SEQ ID NO: 456131 - DNA, 201 bp, Homo sapiens
gaggtttctcaaatcatgctagactcacttcctagacttctccacatacctttctcttggctagaacctgacagcctcagcctacatatacactgcacccrgggcagcaggacactggactcctgcaaatatttgagtgtatttctcatactttcatgggtgttgtaaatattgtatctggaatgctggagaatgccggag

SEQ ID NO: 456132 - DNA, 201 bp, Homo sapiens
tatcatagtggttaagaggacagaatctgttgccagactttctgattttgaatctcagatatatgatttaatagctaaggatttgggcaagctgcgttacytttgcatgcttcagtttccttgtctttaaagtggaggtaacaatatgacctacttcataggactgttgtgaggaatagatgacttaatatataaagcttt

SEQ ID NO: 456133 - DNA, 201 bp, Homo sapiens
cttttcttttgtcttgtttattttaagcatggcttaatttttcactggagcaagagcttaaaaacgtcagagtaagaagagaacaattacatttgtgacarttatcaattacttgaacattattcaagatagaatatattttccaattaatgttaaaaacagaattgtagaattacttttgagtttgattcactttgagaa

SEQ ID NO: 456134 - DNA, 201 bp, Homo sapiens
tcatcattattatctagaagtcaggtatttgggagggtgtttctctgtaagaaattgcaaaaacaatgtttttattttagagaaaataagatattttgcattttttttttatttttaaaatttctcactatggttttcaggtctaatccttgaactgtatctcttttggtcttgattttgttttcaaagaaatagcagagc

SEQ ID NO: 456135 - DNA, 201 bp, Homo sapiens
aaaccataatgtgtggtgtagtgagcacacaccataaatttgataatcatacttgtgaattcatcatattttatacaggagatcgttgtagcattatgaayagtaatgtgcaaatggcatgaaaaaaatgttgccacactcttaaatctgtgccaagttgcattgattgataagtgaagatattaaaatagcagaaatttt

SEQ ID NO: 456136 - DNA, 201 bp, Homo sapiens
attttattactctcgtctgattatacttagatactttcctccttgaaaatggaatttaaaactctgcagatgtacccctgtcttataaacagcaccaatarggctgttttcaaggatgttgtgcacaattctataattgaatgtaagaaatatggactagatggtggcctaagcattattctctgatgtgatatgtaagca

SEQ ID NO: 456137 - DNA, 201 bp, Homo sapiens
catgtgcaaaagctgtgttaattgctagcttattttccaaatggttctgttttaatgaagcatatttaatgcagatggttggaaagtaagttgggcaatgrctaaactgactctaacagtaaactgattcttacagtgctttcactccaatacttaacagtgcctttgtaaagttccttcattcacagtttttacttgaaa

SEQ ID NO: 456138 - DNA, 201 bp, Homo sapiens
tttggatcattgaccagatttattgtatagactagattatttacatctgtcagacagaaatagccctgtggttcactttccctatattatttttcttcttrtttttcttttctactacagattgaaaatgaagaagataacaaaacttgttcagtttgcttctttccagatttggaaatattaatgacaattcttagtatt

SEQ ID NO: 456139 - DNA, 201 bp, Homo sapiens
ctcttgaatgtatatgggaacttaatttggtctcatttatttcattcattaaaagtcatttttcatctatatcttgagacaatgttttctagaactatttrttattgagatttaaatcagatgacttattttctcatatctataacaattgcagtaattataaaatattgattggttggaaataatgaccaaattacatat

SEQ ID NO: 456140 - DNA, 201 bp, Homo sapiens
gattctttagaagagtagagaaagagagatgaaacccgtcattccaatgctttagtcattgtccattttgcagtcactgttactttttctccctctgtaayacaagatactcttatttcccttttcttctttgagaggaaccacatgatacaagggaaagggctttgttttaggggactgggattttaggtttcaccactt

SEQ ID NO: 456141 - DNA, 201 bp, Homo sapiens
atttatttcattcattaaaagtcatttttcatctatatcttgagacaatgttttctagaactatttattattgagatttaaatcagatgacttattttctyatatctataacaattgcagtaattataaaatattgattggttggaaataatgaccaaattacatattttgctaaagatcgtgaaattactttagcccata

SEQ ID NO: 456142 - DNA, 201 bp, Homo sapiens
atatctattttgatccaattaaatgaatgttacacaagtaatcgtgataggaatgcaatggtgaactaatattttgtggacaggcttctggaagaagtaakatattagctgagccttgaaggtagagtctggaaatgtagagatggggaagagttctgtagggaaggaaagaatcagaatatatacacatcataatgtagt

SEQ ID NO: 456143 - DNA, 201 bp, Homo sapiens
actgtgtgctaactgattgtaccactggagcacccaaaataatttctgttaacacataattagatggacattaaacaagataattttgtggttgatatttraatttctttgccttttaaatgggcaccagtgaatagagtgagctctgactgttttgttgcactggcattttgttttatttaattttgatataatccctaa

SEQ ID NO: 456144 - DNA, 201 bp, Homo sapiens
atcatttgtgaagtggatagatgaccatcttcccccctttttttggtttctgtgttcttaaagtctgctaatcccagcctcgaactgttcttatgtagttyatagtttatatgttcttcacaataaaagagattgatgagattagatgaatgaaataaagaaactttgatcattaacacaatttaaaatcaaaggtcttta

SEQ ID NO: 456145 - DNA, 201 bp, Homo sapiens
gcagcaaatgaagaaattgtggttcagttatacttcaggtgacaaaattattaggtgctaaaactggcattaattaggaatgttttaagatgcaagtatcyacaacaaaagaaaacaaataaaacaaaatactcaacacactgtagcttaaagaaataggtgtttaattttttcacatagcaggaagtctgaaggtaagtg

SEQ ID NO: 456146 - DNA, 201 bp, Homo sapiens
attgtttgggtagtctaaataaaagaatccgtattattttgcatctactaagcattatttgtttaggtgtggcttggtttgattccagattaacacacagygaaggctgtcactttagctgggtgtagcaaaaaccaagtagttttatacatgttttccaaatgatgtgcaagcaatgtgtcatttgattctaattgtgac

SEQ ID NO: 456147 - DNA, 201 bp, Homo sapiens
atgaggacattcttaagctacttttttaggtagtgtattttttttgagaaggtgatgaaagatatgggtaatttctccagaaacatacaaatcattttatrtaactttaaggtgttcatggaacctttgaaggccttccatagaacccctagtactttattgatcgcaggttcggaatctctagtcattgttttacctttt

SEQ ID NO: 456148 - DNA, 201 bp, Homo sapiens
gttcctttttgaaggcagtagactgtaggagttgaacccaggtttgcctcatgacaataggtaaactcttactaatcattccatactgttttcctagtgarggcagcagtggaaaaaggacagtagctgtagcagtgggggcatctatgtgttcaccatctaaacggatagatgatatgctatttgagtgggcagctgtaa

SEQ ID NO: 456149 - DNA, 201 bp, Homo sapiens
atatgttcttcacaataaaagagattgatgagattagatgaatgaaataaagaaactttgatcattaacacaatttaaaatcaaaggtctttatacctggraattaagaaaagaaaaatttttactaaaaactgttaaataaaaggggaaatataatctgaatgttacagaactaaaaaataattatgaagaaaacacttc

SEQ ID NO: 456150 - DNA, 201 bp, Homo sapiens
gcaaataacataaactctatgaaaattaatagcccatgtactaatgtagtaactcttttagttagattatttaattagcatgaacacccagttctctactrtaagagatatcagaagcagcttgatagacttgagagagaaggtatctgtagtcttaggtgattggagttaacattttagggttgaaaataacacttcttt

SEQ ID NO: 456151 - DNA, 201 bp, Homo sapiens
ggaattgcaacagactatttaaaaacagatttggttttcctgagggttgaatatgcatacctttatttgtagcatctcgtagatttttaacatgtgattaytttttctgtataatctaaggtcctgagtactattatctatgaggaatcatagattccctacatgaatcttttcaataaaatcaatctttccaatatacac

SEQ ID NO: 456152 - DNA, 201 bp, Homo sapiens
gtagtcttagtttggattccaacaaaagtagagccttttgatgaggactagggtactgatagctttttgggagataatctgaggaagtagaagtgagggartagtgaggtttggaagaaggaaaaagcctccttcttattaaggtcacactataggcaatgggaactggattcttttagaacctctgagaagggcacagaa

SEQ ID NO: 456153 - DNA, 201 bp, Homo sapiens
atcccactttttacatttatatgcaaataaatttgaaaaccaatgtaatgtggatcattttctagagaaataaaaataaccaaaattgactctgttaaagwtagaaagcctaaagagattgatttccatagaggagataaagaaagttatcacagaaatactcttaaagcactaggcccagaaagttttacaggagaatgc

SEQ ID NO: 456154 - DNA, 201 bp, Homo sapiens
ttgtttcaccaagttgctcttcacattgtgtcttaaaaactgaattatctagggaaactggggtgttgtgagagtgactttctttatacacatttaaaatrtctgagtaaagcatggtattaaaaaagacataactatggaattcttaggttggaaagaataattgtggcttaaaactcagtacttataattgaattatga

SEQ ID NO: 456155 - DNA, 201 bp, Homo sapiens
ttttatgcactatggtaaaagatgtttttactaatgaaaatatttaatcataataaacatttcaaagaaacacaactgacaagcagaccactgggtaattrctgatgtgtttttagtaaaaacttaaaattattaatgttcataagctgctataactaagcaagactggtattacattgagatttatagtatttaatgcta

SEQ ID NO: 456156 - DNA, 201 bp, Homo sapiens
tgttgaagaggataagaactgattaaagaatgacttggtttacaaaacttttaaactcttttctatctccaggcaagaaactaattaattgattcttgtayttaaaatatattagtgaataaaacaaatacttttcagttctcatggaacagacaacaataagcataacaagtaagtatattatatagtatgttaggagtt

SEQ ID NO: 456157 - DNA, 201 bp, Homo sapiens
gccaagtgagaacaagaaaatgtctgcaattcactttttcagtaagtactaccatgtgccaggttctagttatgtcaaaggacagaagaaaaaagaaaaaygagaaaacttagcaccaggagtgttatatggtagagatccgacttgactatgaggagcagctttttgtctcagcaggagttttgtggcgctagtaaagga

SEQ ID NO: 456158 - DNA, 201 bp, Homo sapiens
actgacaagcagaccactgggtaattgctgatgtgtttttagtaaaaacttaaaattattaatgttcataagctgctataactaagcaagactggtattayattgagatttatagtatttaatgctataactatgtattgaaagtattatttatataaaactatagtaaattaaattgatgattggcaagtgcattaaaaa

SEQ ID NO: 456159 - DNA, 201 bp, Homo sapiens
ctgacaagcagaccactgggtaattgctgatgtgtttttagtaaaaacttaaaattattaatgttcataagctgctataactaagcaagactggtattacrttgagatttatagtatttaatgctataactatgtattgaaagtattatttatataaaactatagtaaattaaattgatgattggcaagtgcattaaaaat

SEQ ID NO: 456160 - DNA, 201 bp, Homo sapiens
agaatccagagataataaaggaaaagcatgctagatttgaatacatacaaataaaagtatttgcatgttaaaaagatcataagtaaaaccaaaacaaaacytacaaattgagagaaaatatttgtccatatataaaaaataaaggactaatattcctaatatataaagaactctggaatttctgaaaatttgagggaaata

SEQ ID NO: 456161 - DNA, 201 bp, Homo sapiens
tggattttttttttatttttgacttttaaaaatgcttagattttcctcagtattttatcaatagtgtgtaagctggaaaacttgagtttgagatcacatayctgtctcactagtctattcacttctgtgggcatttcggcagaagtggcaactggaagttgtaagcatggttttgggcagggagaccagagttcgatggtc

SEQ ID NO: 456162 - DNA, 201 bp, Homo sapiens
actgaaaatttgaatattaggtcactttatggtgtcccacagatcacatagtcttccttcattcttaaaagttctttttttctttattttaatctgacttkgttatttcaaaagacctgccttcaagttctgaaatttgttcttctacttgatatagtgtatgatcgaagctttcaaatgtattttttatttcatttaatg

SEQ ID NO: 456163 - DNA, 201 bp, Homo sapiens
gctaactttctggcactgatttagataatttctgtattttctggtgaacaatgaacattggctactgaagctaacttttctacttgttctaaactaaaggrcagtgttttttatgatgtactcctttttatgttgtgggaagagtgttgatactaaaagtgtccaattaaaagaaaaactttaccaagcctaataattagt

SEQ ID NO: 456164 - DNA, 201 bp, Homo sapiens
tttcttgtcaccttctgagacactgaaaatttgaatattaggtcactttatggtgtcccacagatcacatagtcttccttcattcttaaaagttctttttktctttattttaatctgacttggttatttcaaaagacctgccttcaagttctgaaatttgttcttctacttgatatagtgtatgatcgaagctttcaaatg

SEQ ID NO: 456165 - DNA, 201 bp, Homo sapiens
agaggcttagaaatttctttttagaattttattcatgttctactttagcatgttcaaaataatcctgtgacaggagactcttggtcatttctggacccagkctttaactgtcttttcttctctttgacattccattattttctgtgccctgaatattgtgaatgctacataggaaacattagataatcttgaaagaagttt

SEQ ID NO: 456166 - DNA, 201 bp, Homo sapiens
taatgtattttgaagtcagatagcattatgccttgagcttttttctttttgcttagtattggtttggctatttgggccctttttttagtttcataaaaatwttaggagtgtttccttctatttctgtgaaaaaatgacattggtattttgatagggattgcattgactctacaggttgctttggttagtatggttattgta

SEQ ID NO: 456167 - DNA, 201 bp, Homo sapiens
gtgccatgctggtgtgctgcaccaattaactcatcatttagcattaggtatatctcctaatgctatccctccccactccccccaccccacaacaggccccrgagtgtgatgttccccttcctgtgtccatgtgttctcattgttcaattcccacctatgagtgagaacatgcggtgtttggttttttgtccttgcgatagt

SEQ ID NO: 456168 - DNA, 201 bp, Homo sapiens
agttacatatgtatacatgtgccatgctggtgtgctgcaccaattaactcatcatttagcattaggtatatctcctaatgctatccctccccactcccccsaccccacaacaggccccagagtgtgatgttccccttcctgtgtccatgtgttctcattgttcaattcccacctatgagtgagaacatgcggtgtttggtt

SEQ ID NO: 456169 - DNA, 201 bp, Homo sapiens
gtatatcataacttcttttttattgagggataatatgaaaataaattaatcctcagagtggttatttaaggtttttggaagaaatacaaattataattatmcaatgatagtgatggacagtagtagtggcagaagcagcagtagcagcagtaaaccctctctactgataactttccaatggggatgataaatccatttatt

SEQ ID NO: 456170 - DNA, 201 bp, Homo sapiens
ttaaacatcagttctatatgtctttgattaatacaaattagaaaattatgtaataataagtgtggcaagtttgatagaaaacaatctttcaaaacatgagkttcattaataaaagaatccttgatggtgaaaaggctgagaagaacttgattacataatttcaaagatgaaaatgcattgtactagtgaagaggtatggat

SEQ ID NO: 456171 - DNA, 201 bp, Homo sapiens
gagattgcagtgaggcgagatcgcactactgcactccagcctgggtgacagagcaagactctgtctcaaaaaaacaaacaaccacaataacaaaaccccccaaacaaacaaacaaacaaacaaacaaaaactgaatgtagaggctgggtacagtgttgcatgcttgtagtttcaactgctaaggagactgaggtgggaaga

SEQ ID NO: 456172 - DNA, 201 bp, Homo sapiens
tctctttcttctcagaaaaatctcccacgataacccttgaaatgatctgtcacccttgctaccttcaataatttgttgtttccagtcatcttaaagagacraattgtctatctttgatatatccattcacatgtaaaaagggactttatgctgtttgtgattttgacttcaccgagcacaatttctttgcttctttgaaaa

SEQ ID NO: 456173 - DNA, 201 bp, Homo sapiens
ttatcaagttatgtaggtatatgagatttaatgataacagattttattatagaaacctgctaaaaatgaacattcactgctgtttagaggaagaaatggaytatctttgggtttggatttcttcttaagaaatatgtctctcctctgttttttttcctaataaggaaaataaggtattagaacagtttatgtattcatcct

SEQ ID NO: 456174 - DNA, 201 bp, Homo sapiens
agattgcagtgaggcgagatcgcactactgcactccagcctgggtgacagagcaagactctgtctcaaaaaaacaaacaaccacaataacaaaaccccccaaacaaacaaacaaacaaacaaacaaaaactgaatgtagaggctgggtacagtgttgcatgcttgtagtttcaactgctaaggagactgaggtgggaagat

SEQ ID NO: 456175 - DNA, 201 bp, Homo sapiens
ggagatgaggtttcaccatgttggccaggctggtgttgaactcctgacctcaggtgatctgcctgcctcggcctcccaaagtgctgggattacaggcgtgmacagccgcgcccggcccagggttagcttttctatggcagcaagagtgcacctttcttggtgggaaatgaggacacggtttattaagttgcatttgctttt

SEQ ID NO: 456176 - DNA, 201 bp, Homo sapiens
gattgcagtgaggcgagatcgcactactgcactccagcctgggtgacagagcaagactctgtctcaaaaaaacaaacaaccacaataacaaaaccccccaaacaaacaaacaaacaaacaaacaaaaactgaatgtagaggctgggtacagtgttgcatgcttgtagtttcaactgctaaggagactgaggtgggaagatt

SEQ ID NO: 456177 - DNA, 201 bp, Homo sapiens
tataaccatgtatgagatagagaaagtccctgccctcatgacctttgaattctttgggtcaagtaatttggcaactgaatgaagtcatgagtcttctgttkggctaaactaaatacttacattcatatcttaggaggtgtctgggtttgtgggtgtgtgtatgtttatttacagtaggtgaagcagtatagctgtggtcat

SEQ ID NO: 456178 - DNA, 201 bp, Homo sapiens
attgcagtgaggcgagatcgcactactgcactccagcctgggtgacagagcaagactctgtctcaaaaaaacaaacaaccacaataacaaaaccccccaaacaaacaaacaaacaaacaaacaaaaactgaatgtagaggctgggtacagtgttgcatgcttgtagtttcaactgctaaggagactgaggtgggaagattg

SEQ ID NO: 456179 - DNA, 201 bp, Homo sapiens
aaaagattatgtgaggtaatatccattaagtgttgaatgagtgatataaaaagtaatttctcacagatcttattagaggtgtttagaagaggggtagatcrtagttacctggaatagtctcagttggtttcctaacactaagaaaggaaagtgaggaaaatagggagagacaggcagagcaaaggctaggaggcaacaata

SEQ ID NO: 456180 - DNA, 201 bp, Homo sapiens
ctatataattagctgccacagttgctgcttttggaataaaacctaatgtgaacaacatgaaggcagggactatgtctttttaactgttcttacccagtatrcagtgttgtgcctggcacatggtgggaatatagtagttattgtaagaataaaggaaaataggatgggagagaagaaagaaaggggaaaaaacctaagtta

SEQ ID NO: 456181 - DNA, 201 bp, Homo sapiens
taaattcagtcataggaatcagagtaggttttagtaagtaaacttttccattgacacttaaggcactatgggatttagatgggcattgctgaagggtgagyatctcaaaatgagtgagttttgtctttgctatgtttgcaaatttatatcatctgggcacttttctttgggcttatattaactggttataattatgaagga

SEQ ID NO: 456182 - DNA, 201 bp, Homo sapiens
tcttcagtactgtgccatgtaatttctagccacctaagtctttttgaacttttagttcaatctcttgactctggaaaataggctttacctgagttcttctrccttgtactgtagcctggaaactctctccaggcagtaagctgggaaaatggtagggctcactcatttgtttactctctctcaagggatactgctctttgt

SEQ ID NO: 456183 - DNA, 201 bp, Homo sapiens
tgagtatggtttctgtcaccagcagagttggctgtctttgaagtctgttagttaacctcttccagaatcttggagtgcaactagcactcaagagaaggagrataaaggaatctctaggaataaataacacccctattttcattaacaacttagttctcttcttacaccagttttttgaagcatttaataaatgaacagatt

SEQ ID NO: 456184 - DNA, 201 bp, Homo sapiens
gttgtagccccacacttcattattcattttatttatgtatacattttcgtataaacatatatgtacgtataaacatatatgtacgtataaacatatatgtrcgtataaacatatatgtacgtataaacatatatgtacgtataaacatatatgtacgtataaacatatatgtacgtataaacatatatgtacgtataaaca

SEQ ID NO: 456185 - DNA, 201 bp, Homo sapiens
ttattatttaatctacacaaccgccctgggaggtagatgtcattattttagttttataggaaaggaacttaaggtttagaaaggaaaaatgacatgcccargtttacatagccattaaatggcagaaccaaatctaaacctagatatcctgccttgaagttctatggtatttctgccatataaatgcagctctctgtaaca

SEQ ID NO: 456186 - DNA, 201 bp, Homo sapiens
ccaaaacaaaacctacaaattgagagaaaatatttgtccatatataaaaaataaaggactaatattcctaatatataaagaactctggaatttctgaaaayttgagggaaataaggacaaaaaaatctcaaaacaaagagaaaaggacatggatagacaattcaaaaaacaaatgtaaaaatggccctatgtagcctatga

SEQ ID NO: 456187 - DNA, 201 bp, Homo sapiens
gaagctctgttactaggtgcataaacaattagaatgaccgtcttctctatcgtatcatcatatatcatatcatatcatatactttgccattatgaaatgaycctctttatccctgataatagtttttgctctaaactctactttgatatttatatagcaacatagtcttatcaaggtatatatgagttttgctttttatcc

SEQ ID NO: 456188 - DNA, 201 bp, Homo sapiens
agcaacatagtcttatcaaggtatatatgagttttgctttttatccagcttgactatctctaactttttaatgttatgtattgacaaattatagttgtatrtatttatggggtacatgatgatatgatgatttttgaaaatgatgtggagtgattaaactaacctattcatcatgtcaaatatttgacatttttgtgacaa

SEQ ID NO: 456189 - DNA, 201 bp, Homo sapiens
ttttgctattatgaatagtgctgctatgaacatttgtgtataaaattttgtgtggatatgtttttattccttttgggtataaatacctagagatggaattrctgggtcatctagtaactctgtttaacctttggaggaactgatagactgattccaaagcagctataccattttacattccaaccagtagtgtatgtgggt

SEQ ID NO: 456190 - DNA, 201 bp, Homo sapiens
gtgaagtttgactggtgaagataaatgtataaagattggttgtatctggatggagggcctcaagtgccagggtcaggagtttggactttattttgtcatcrggggagagccactgatgttttttgatcaggagagtggcttgatgaagggagtagcagttaagattgatttggtggaggagatactaaaatagagaaagta

SEQ ID NO: 456191 - DNA, 201 bp, Homo sapiens
tgtgaaacacattcttctgtcaaggttgtgaagaaacaggtattctaattttggagggcatggaagttattataagtctttcagaaacaaatttcacagcrtctgtcaaaacaacatatacactttcttttgatccagtagtcctcttcttggaatttaccctgaagatacaccttcagtgatatgaaaaaagatatgcaa

SEQ ID NO: 456192 - DNA, 201 bp, Homo sapiens
tgttataaataggtagcattcctgaatggccactggaggaatcaccagaagactgttgatgaagtagaggtgaagcctttcctcactaattgtattcagcrtgtaatttctaaacttccctctgaattttgattttcaattaacactccccatttgaagataattttctatttaatgtaattgcaggaaataatttattgg

SEQ ID NO: 456193 - DNA, 201 bp, Homo sapiens
agtatatgtagctataaaaaagattgaagaaactatctgtaatttggtatgaagtgatttccaatgtaatttaatataaatttagaagaatgtttatagartgccatcttttgtatagaaggaagaagaaatgagataacatacacatatctgttcaattgtgcagaaagaaacagaggaagggtaaactataaactattg

SEQ ID NO: 456194 - DNA, 201 bp, Homo sapiens
tcatttgagggaataatctaagcagacacagacattaagcagatagaccttcataggaaagctccagaagggaagaatcgtctttttcatctttgtcttckccactaagcccaacacaaagccttgcacacacttgcaattaataaatatttgttgaattgagtatgctacagaaatagatgggtgccatattaaggagtg

SEQ ID NO: 456195 - DNA, 201 bp, Homo sapiens
gtatattttggagtcagttattatagctgtcactcaactgggcttatctgtgaatggtgttttggagaagtggcctttccaacaaagtcccaccctttgcygtcaactgaagtctctgttagtgctttactctccctggtgacttctaacaaccttgattagttggctctacaattttaaagtctgccatctgtctctact

SEQ ID NO: 456196 - DNA, 201 bp, Homo sapiens
ggacactgagaaaatttttatttcttaacaaaaataaggtaatatttacaatgcctttactactaataacacatatttaaattcttatttgatgcttaatrtctcagagacttaattcaataatttatgaaggcagacatttttctttttcagatgattttgcagacacagtcaatgctctgaaacagtaggtgagaagca

SEQ ID NO: 456197 - DNA, 201 bp, Homo sapiens
agactggttatctagagatgatgggtgcaaatggagtagaaaagatggggttggtgtgagtagggtagaatggatgggatggggattagtagttgagtgaytacttttcatatatttgtgtatttcagaaccatactactatttctcatactaaatatacaaacaaacaaacatgaatgaagaacccaaatgattacacac

SEQ ID NO: 456198 - DNA, 201 bp, Homo sapiens
gtacatgtgggcagaaacatagtcaagaatgacaagaaatgacgttggtgagaccaaggagaggagggaagcgagtagaaatgctctcggccagagaatgsgccgaggtgagagacaagctttttgcctaagaagcaactcttagtaggtggcttctgtggtaggccatggagatgtgggtaaggcaccaacactcttatg

SEQ ID NO: 456199 - DNA, 201 bp, Homo sapiens
tatttctcatactaaatatacaaacaaacaaacatgaatgaagaacccaaatgattacacacagagacaaagggatttaactgtatttcagatgatataaycatactgagcatgtataggggtagtgggtgggactacctaaataacattggaccagtattttgactatgtattttaagtccaaagaataaaagtactaaa

SEQ ID NO: 456200 - DNA, 201 bp, Homo sapiens
ctacaaagttaaattcactgtatttgttaatcagctaaaaggcaggctcaggcaatggtacacaactacatttcaatggctataaaaattattacagatckcttgttttttatagtttgttaactagcatttggtgtatgtataaaaagatgctttgacaaagtagttatgaagcaatggttaatctcctttgaaaggtgt

SEQ ID NO: 456201 - DNA, 201 bp, Homo sapiens
gacctggtgaaaaggagtaacagccacacaggctgggatataagcagagtcgacaaagccctgggctctggactaactctgttgtatgagtatcacaaaamtgtattttactgtggatataaacagttttagaggatcctgtgcaccagtttatatcagcactatatataaagtgcagctctcttaaacaagcaaataaac

SEQ ID NO: 456202 - DNA, 201 bp, Homo sapiens
aaggtttagacttcttgagacatttagttactacttctctcatttttggattttggaaattcattcaattttagtaaagttcaagcctagatttctgttarcaggtgaaaatggccatccttaccttgaatcactgaatagtattttctaggaagactcatgggagatttcccagttcctgtaactttgaaactatatttg

SEQ ID NO: 456203 - DNA, 201 bp, Homo sapiens
catgaatgaagaacccaaatgattacacacagagacaaagggatttaactgtatttcagatgatataaccatactgagcatgtataggggtagtgggtggractacctaaataacattggaccagtattttgactatgtattttaagtccaaagaataaaagtactaaaaatattgtactgtagagacagggagagataga

SEQ ID NO: 456204 - DNA, 201 bp, Homo sapiens
accagcagactggtgactgaggccaggatgggtagtgagggaggcccaagacctggtgaaaaggagtaacagccacacaggctgggatataagcagagtcsacaaagccctgggctctggactaactctgttgtatgagtatcacaaaactgtattttactgtggatataaacagttttagaggatcctgtgcaccagttt

SEQ ID NO: 456205 - DNA, 201 bp, Homo sapiens
gtgggctgcgtattgagcacctgccaaaatataaaaatccagtactttgctacatctgtgcaaagactttttgcatttcttttgtattttgacagataaaygaaaatcggacattagtatcttttttttttcagtgaagttgtgtattcagaatgtctttaaggaggtgtcacatgtcatgtttatttttattttaatcat

SEQ ID NO: 456206 - DNA, 201 bp, Homo sapiens
  misc_feature (1)...(201): n = A,T,C or G
gtggctatagctaatgatttacagaacttgcactctgagacattgtctcttttaaagagcacacttttagactggcttcactattttcgtttgttcagcantgttacatttcagcttcctaagaaatgtttctgcctatcttggcagtgattttcctcctcactttagttcagtatctggtctgtgtttatatattttact

SEQ ID NO: 456207 - DNA, 201 bp, Homo sapiens
tgtgatcttggacatatttttaaccttcctcagcatcattttcccaagtttgttgcagtagagaaaaaatgcgaaatgctaatcctagcacatagaaagtrtttggacgatcatttgtgctaaaaaaaagtgtttattgaatgttttttagttcaaattctttatctcttgtcttctcttagatttgattttctaccactt

SEQ ID NO: 456208 - DNA, 201 bp, Homo sapiens
atacacgtaaaaagataagactcaggtaaatcagagggaacattaactagagctatgctgtgggcatatgggtctggctttccatagctacccaaaatggygtccaggcatttcagagaaatgaataggcaatagcatctctgtggaaccagcagactggtgactgaggccaggatgggtagtgagggaggcccaagacct

SEQ ID NO: 456209 - DNA, 201 bp, Homo sapiens
gaaaggaagagtgaggtaagacagggcatctgaaacagtgggacagaaactgaagaaggacccgtttgcttggattgactgctgacacatctctcttttargcatgtgtctagaatttactgctttacattttgtagacatatagaactgcatatcgtgaattgtcctttgtggttgtcattctgcctgtgaaggatgaaa

SEQ ID NO: 456210 - DNA, 201 bp, Homo sapiens
gtaagaagttatgttcgcacatttgatgctcatatagagccaaaactcatagatgtataacattagcctccaatttagtttatagatggattctctttgayactattaacagttgtcaaatttgaatagaggattaagaagaacatcaagttcatcatcaagctgtttagggagctgttgaaagagcctttgtgctttatg

SEQ ID NO: 456211 - DNA, 201 bp, Homo sapiens
aacattaaattgtaattatcctaaatataaattagtgtgccttttaatatcactgtatctcccaacagcgtactttaatgttttaaaatgcaggaagaagkcttgaaggctatgtgaagtcattgtcttaaactagttaactttttttaaaatttctcttttttccagaaacatttatagtttactgaaaagaggctgggg

SEQ ID NO: 456212 - DNA, 201 bp, Homo sapiens
agacattgtgaggacctgattgcagttagacttttaatttgctgccttgtgttaaattggtgacattttgtgccccgtttcccttttgctggaaatgtacrtagagataggtgggtggatgcatggatggatagatcattgttttataagtaacataacctctgaggaatcatttttagtctctttgtacttgttctagtt

SEQ ID NO: 456213 - DNA, 201 bp, Homo sapiens
tcagacttcttttactgttcacggaccttaaataacattaaattgtaattatcctaaatataaattagtgtgccttttaatatcactgtatctcccaacarcgtactttaatgttttaaaatgcaggaagaaggcttgaaggctatgtgaagtcattgtcttaaactagttaactttttttaaaatttctcttttttccag

SEQ ID NO: 456214 - DNA, 201 bp, Homo sapiens
aagtggttacctcttaagaggagctctatggaatcatttgagactctccaggcatagaaatgtgctctgtaagaatttgtccaacatctccaacttctgcrtaatcactccctttatttctcaatgccataaattgtcaaaaagacattctttttgtttggtaggggttcctttttttctttttttatctgggggccttag

SEQ ID NO: 456215 - DNA, 201 bp, Homo sapiens
aggaggcagatttaagaactgagaaacctgatatctggaccaactaatagtgacacagggtcattcttccaacttttgagattcaactaaagaatggcttkttttttatctaaagtataacttctgaaaacattctcctacaaaagctttggtggcattatggaaggtgaattaatttatcaatcatctgtgactccatgg

SEQ ID NO: 456216 - DNA, 201 bp, Homo sapiens
agagaagagaccatgcagaaaggtcatgtagagctagagtaagatgtccaagaaaccctagttatctcagccccgaactcttaaaatgttcccagcccaastaccttatctgtgagtaaagaagcctttggccttagccactgacttaactgtaacctcatgggagactttagacagaaccacccagcccagatgctccaa

SEQ ID NO: 456217 - DNA, 201 bp, Homo sapiens
tcctatttacattttagaaagagattaagagatattctatagatgtgtcagtatgatggaaagaatgcattgtttttagaaagtcaatgagcactttaaamactttcaactctgttttaaaccttaagtataaaagaaactagctacaaatacccatttaattaaaactgtttttgagaagtagaacaggattctcaaatg

SEQ ID NO: 456218 - DNA, 201 bp, Homo sapiens
taaaataatgtgggaaagtttttgctttacgatttttatgctacacaggacattctactagtcttcctttacaataaaattcattatgtcttcactatgtrtatattaataacatggccttagaatcttcagaagcaaatgaaaatttttcattggtttatgttttctttgtgtgtattttcatcgtataagagttgaaca

SEQ ID NO: 456219 - DNA, 201 bp, Homo sapiens
ttttatttttttcgtatgtccttatttcagtaatgcagcagtatcttgaaatgacatggtatggatgaagcacgcctagggactgctgccaagtcctacayagcagcagcatggaagtagttgagtcagtttcaccaaaagtttgaaatctattgtgttagaggcatgtgcaaaagctgtgttaattgctagcttattttc

SEQ ID NO: 456220 - DNA, 201 bp, Homo sapiens
tctaagccctctagaagaggaaatttatttatgataataataattactattttataccatacaagatacatacacacacacgtgcatgcacacacacaaacacacacacacacacacacacacagtacttccctgtttatctgatggggatgtgtttcaagaccctcagtggatgactgaaaccacagatagtactgaacc

SEQ ID NO: 456221 - DNA, 201 bp, Homo sapiens
ctaagccctctagaagaggaaatttatttatgataataataattactattttataccatacaagatacatacacacacacgtgcatgcacacacacaaacacacacacacacacacacacacagtacttccctgtttatctgatggggatgtgtttcaagaccctcagtggatgactgaaaccacagatagtactgaaccc

SEQ ID NO: 456222 - DNA, 201 bp, Homo sapiens
taagccctctagaagaggaaatttatttatgataataataattactattttataccatacaagatacatacacacacacgtgcatgcacacacacaaacacacacacacacacacacacacagtacttccctgtttatctgatggggatgtgtttcaagaccctcagtggatgactgaaaccacagatagtactgaaccct

SEQ ID NO: 456223 - DNA, 201 bp, Homo sapiens
tgccctttgcattcattttcatattgaaagaaaatggtataattaaatacttgggaagaaacttctaacatatatggtgagcattctgattttttttttttctaaaggtggattttgatttgttcaacgttcttcccatcgtttatataagcaggaataactcattttaaaggtgatgaaggccaaagacatagtctagaa

SEQ ID NO: 456224 - DNA, 201 bp, Homo sapiens
catgggttagctgtgggacttcaggcaaatttccatgcttatctggttagttccctcatctgaaaagtgagaggctagagccagataacttctaacgtactttttttttttatctttaagctcattcaaatcttatttcttgatgccaattagagaaaaactaagtgttaaattgtatggtattaataagtacacagataa

SEQ ID NO: 456225 - DNA, 201 bp, Homo sapiens
tgagcctggaaggtcctggctgtggcaaaccgtgatcacgccactgcactacagcctgggtgacaaagtgagaccctgtctcaaaaaaaaaaaaaaaaaaaagtaaaaaaaaaaaaattctccgttgagtctttgttgactcccccgccccattaatgctgtgtttgaaaacctgtttttagtattttttgtcaagcatct

SEQ ID NO: 456226 - DNA, 201 bp, Homo sapiens
ttcttcttttttttttttgagatggagtcttgctcttttgcccagactggagtgcagtggtgtgattttggctcacttcaagctctgcctcccgggttcaygccattctcctgcctcagcctcccgagtagctgggactacaggtgcctgccaccatgcccggccaactttttgtatttttagtagagacggggtttcacc

SEQ ID NO: 456227 - DNA, 201 bp, Homo sapiens
agtcttccctgaggaagtagggattgaaacgagatctgaaagaagagtaggcaatgacaaagtaaaagggctggggtcggggtaagcaatatgtaaaatgytttaggcaaaggaaagaatatatgcaaatttcctatggtggaaggaacatgtgttccaggaactggaagattgatagtgaggccaaagctcagagagcca

SEQ ID NO: 456228 - DNA, 201 bp, Homo sapiens
gagcctggaaggtcctggctgtggcaaaccgtgatcacgccactgcactacagcctgggtgacaaagtgagaccctgtctcaaaaaaaaaaaaaaaaaaaagtaaaaaaaaaaaaattctccgttgagtctttgttgactcccccgccccattaatgctgtgtttgaaaacctgtttttagtattttttgtcaagcatctt

SEQ ID NO: 456229 - DNA, 201 bp, Homo sapiens
acatgtagcagtgcttagcacagtgcctgcctggtactttctaagcatctagtaaaaattatctatgtatcttttcaaccatctcttcaacatccatccayccttccatccatccatccatccatccatccatccatccatccatccatcatctgcccattggttcattcatttatccatctttttttatgtttctgacaa

SEQ ID NO: 456230 - DNA, 201 bp, Homo sapiens
aaattttgttcagctgtataaattgtttattttggaaatttgtctagtttgttgtatggaagttatcatcttagatgtagagtcaactatgtgctgggtastgtttgagagaatggggagatagtgaacaaagcaaaatacctgctctcattaagtttatattctagtggtagtggtaggagagatattaaaaaacaacaa

SEQ ID NO: 456231 - DNA, 201 bp, Homo sapiens
aaatttccctctacacactgcattaaatgtgtcccagagattctggtatgttgtgtctttgttctcattggtttcaaaggacatctttatttctgccttcrttatttacccagtagttattcaggaacaagttgttcagtttccatgtagttgtgcagttttgagtcagtttcttaatcctgagttctaatttgattgcac

SEQ ID NO: 456232 - DNA, 201 bp, Homo sapiens
ttatctatgacaaatacttgatatgaaatctgagccacagtgggacaagtaaaaccctaggaagtttagtaaattcaagttaccaataacaattaacattratatgcttcatagttgttaaaaggtacattgttttttcttttataatctgtggttccattttattctttctcatgtttttatttttcctcatctagttta

SEQ ID NO: 456233 - DNA, 201 bp, Homo sapiens
agtattaacatggagtggtattttctgtgattatctattcactttaatttaaaacaataagctatttgcctatctctccctctctgccttttcctccctcwttcccatagtattgattgtctacgatgtgttgtgcactgtgctgggcactggggatccagcaatgaacaagacagatgatccctgtcctcatgaaatata

SEQ ID NO: 456234 - DNA, 201 bp, Homo sapiens
ttcacttttgaagcttagtttggctggatatgaaattctgggtggaaaattcttttttttaagagtgttgaatattggcccctccctcttctggcttgtayggtttctgcagagagatctgctgttagtcttatgggcttccctttgtgggtaacccaacctttctctctggctgcccttaacattttttccttcatttta

SEQ ID NO: 456235 - DNA, 201 bp, Homo sapiens
catgaaatatacagaattaacttgttttttaattaaacaaaatattttaatgagttctccttttacccatttaccatgagcttatgctatgtaagcatttrtctcccagggtctgaaagatgttctctgacaagaagtttccttttcttcctctcgttgatactttttattttagtatattgtaataaatactctgtagga

SEQ ID NO: 456236 - DNA, 201 bp, Homo sapiens
tgttttttctctattcttgtgttcttgctttatttcattaatttgatctgcaatcactgatatgctttcttccacttgattgaatcggctattgaagcttrtgtatccatcacacaattctcatgctgtggttttcagctccatcaggtcatttgaagtcttctctacactgtttattctatgtagccattcatctaacct

SEQ ID NO: 456237 - DNA, 201 bp, Homo sapiens
cgtgaatctagtctagtgagtctgattgagcaggactgttctactcagcttttatctttcttaatggattcaaatgtcatttgaatgtagctttttttttwaaataaaccttttattaaagttggtcagggttaatcaatggaagctaatcttgggacactaataatttcctgattaaagcagaactctatgagcatgttt

SEQ ID NO: 456238 - DNA, 201 bp, Homo sapiens
ggctatgaaagggagatccccgaccccttgtgcttcccaggtgaggcgatgccccgcccttcttcagctcaccctccatgggctgcacccactgtccaacyagtcccagtgagatgaaccaggtacttcagttggaaatgcagaaatcacccatcttctgcgtcaatctcgccgggagctgcagactggagctgttcctat

SEQ ID NO: 456239 - DNA, 201 bp, Homo sapiens
gagtggggaggtctacacactttttaacaaccagatctcatgagaactcactcattatcataagcaaggggaaagtctgcctccatgatttaatcaccacycaccaagcctctcctccaacattgggaattacaattcaacttgagatttgggcagggacacaaatctaagccatatcagatattttgcctcaattgatgt

SEQ ID NO: 456240 - DNA, 201 bp, Homo sapiens
ggatatgggaaaatatatactgactgtaatactggatagaataagattaattttaaaatagttcaggagagagaatttctaaggcccttaccttttttttwaaaaaaaaaaatagagacagggttttgctctgccccccaggccggagtgcagtggcacaatcatggctcccttcagccttgagctcttggggtcagtcca

SEQ ID NO: 456241 - DNA, 201 bp, Homo sapiens
agctcaccctccatgggctgcacccactgtccaaccagtcccagtgagatgaaccaggtacttcagttggaaatgcagaaatcacccatcttctgcgtcartctcgccgggagctgcagactggagctgttcctatttggccatcttggaagcgaccttgatttataccattatttttataacaaacatcaaataaccatc

SEQ ID NO: 456242 - DNA, 201 bp, Homo sapiens
ataatatatttacattctatatatatataaaatatgtttacattattttcctatatctctccttagtttttggcattagaagtttggtgtggcttacaacraagcaccttaagtcaggctatccgtgttgtgatctggtcatctctgcttcctttccttcacctcggacagtgtcttaggagattagattatagacaagat

SEQ ID NO: 456243 - DNA, 201 bp, Homo sapiens
aaactataagcaactctttgaggtatttattatatctattttcccagttttatacatgaggaaactcagcacagacaagttaaataattttccccatattrtgtagtttacaggtggaagaatgaacattttaacacatcaagtgctgagaagagtgcctggcacatagtaagctttcactgaatgttagttgcccctgtt

SEQ ID NO: 456244 - DNA, 201 bp, Homo sapiens
aaagtggaaatgcaatttcatgaagctgtcagtttccaggattctaaaatgaagtgtctgtggcagtgacccttttcttttgactaattgcctaggttgatttttttttccctcttcagtgctctaggaatttttatgagcctctttaaagtaactgagatgccagtcaggatacttgcaatgaacagctgatatctggct

SEQ ID NO: 456245 - DNA, 201 bp, Homo sapiens
aaggcattattgaggaaatgacttttaaattataactgaatgaataggagttagttagatgaaatggagtggttgaatgtttcagacagagggaggagtakgtgtgaaggtcacaagagagaaggaatatagcagatagcagctggtgctttgggggaatttaaagaatttcagtacaataagactgtgtagtatgaggga

SEQ ID NO: 456246 - DNA, 201 bp, Homo sapiens
cctagattgcttcattcctaattccccagctacttgtcttcggatgataatggtcacatagaaggtgtcattttacttctagctagagcaggtagacagtrtgtcccttttattgaaccaagacaaaaatacatatatttttcagacaccttgagatcttataatttcagttttgttcctattctgaagagcatggcttgt

SEQ ID NO: 456247 - DNA, 201 bp, Homo sapiens
ttcacgtgagtttattgtgcaacaactaatcaaatttttctcttatgttatattattttaatacctttattcttctaggatgtcatggaggtgatttgaamagggaactcagtatagaatgagttaatctattattgcacatttatgtatttcttaggtttctaaagacttcctccttaagtgccaacattatttttacat

SEQ ID NO: 456248 - DNA, 201 bp, Homo sapiens
aagaagcctttggccttagccactgacttaactgtaacctcatgggagactttagacagaaccacccagcccagatgctccaaaattcctgacctacagayagcattaaggataataaatgattggttttgttttaagcactttgtttttggatgatttcttatacaacaatacataagtaatacaagttacttcttggta

SEQ ID NO: 456249 - DNA, 201 bp, Homo sapiens
atatgtatatatatgtgtgtgtgtgtgtatatacatgtatatagcccgtccctccctctcagactcccctattatcaacatctcataacagagtggtagawttgttgcaacagataaacttatgttgacatcattatcacccagagtttatagtttatattatggttcactgttggtggtgtacattctataggttttgac

SEQ ID NO: 456250 - DNA, 201 bp, Homo sapiens
attatgctggaacttttttttgttggtgatgagggaaaaggagataaaaaagaggatttaattaaaatgttttggtgttaaaaggaggggatttatagaaygtctcacttgaggtcatagaaagtgccattattaataacattgcaccttatgtttttattacatggtatactttcaagtgaactttttcatgtattatct

SEQ ID NO: 456251 - DNA, 201 bp, Homo sapiens
tagcccgtccctccctctcagactcccctattatcaacatctcataacagagtggtagatttgttgcaacagataaacttatgttgacatcattatcaccmagagtttatagtttatattatggttcactgttggtggtgtacattctataggttttgacaaatgtataatgacatctatccaccattgtagtattgcagt

SEQ ID NO: 456252 - DNA, 201 bp, Homo sapiens
tctgcattttaacacacttgccagataattctacacattgaagcttgagaaccactactttagggaaatattgtctcaagtctcttcacagcagtgctgcmgtgacatgcattaagacttggtagatattatcattggacattggtttagaccattctcacactgctataaagaaatacctgagactgggtaatttataaa

SEQ ID NO: 456253 - DNA, 201 bp, Homo sapiens
acgaaaatttattctcagatattagcctagaagaattggatgttttgaagtggaaagggaaataggttttaagttagagtttaaattttgggtcaatcatrtatcctctttgtatgtttcatcatatgtaaattggtggtggtgataacagctacttaaaaagtggtgttttttttttaattgacaataaaattgtatgta

SEQ ID NO: 456254 - DNA, 201 bp, Homo sapiens
cagataattctacacattgaagcttgagaaccactactttagggaaatattgtctcaagtctcttcacagcagtgctgccgtgacatgcattaagacttgrtagatattatcattggacattggtttagaccattctcacactgctataaagaaatacctgagactgggtaatttataaagaaaagaggtttaatagctca

SEQ ID NO: 456255 - DNA, 201 bp, Homo sapiens
aaggattcttgtggcccatatgtcagtggttaaatttgatcagtgatgggcattgaagtctttcaaagcccatatgtaactgttttccctatagaagatcycaatttgctatttctgaaaaaaatatcatttaaactatggttaatctcctcccttaactagcacatatgaaaactcatatgctggttctatcgtggaatt

SEQ ID NO: 456256 - DNA, 201 bp, Homo sapiens
attctttgtcaagatttttttttaaagttggcattattgacttcatattagacagtaacctattataagtttattaatttacgtgccccttttactcagaygaattgcttacagacttccacttatgaaaggttaatatttgttaggtgttagaaagttaaaaagtgatggctggaaatggtaaattttgccccctcccat

SEQ ID NO: 456257 - DNA, 201 bp, Homo sapiens
gtaccatataatttacccacttaatgtatacaattcaatggtttttaatatattcccaggtttcacaagatttatcttagttggagactcatgaacatttkttacttcataattcctcaggtccagaaggaagacaaatctctttagtcccattcccaaatctgttccttccttcaagaaatagtatctaccagttattaa

SEQ ID NO: 456258 - DNA, 201 bp, Homo sapiens
agcactatgccgtggtgccttacaaatataatctcattatgtgctttcaataaccctgaaaatccattgtatcccaccttatatacaatgacaataatccraaatacctagcatttgttgagtacaattattatgtcatttaatatatgtagaaatttactgctgtagatatcattttccttttccccccttttcccatta

SEQ ID NO: 456259 - DNA, 201 bp, Homo sapiens
ttttgcacataaatgtccagttttttcagcatcatttgttcaaaggattatcttttctcctttagattgcctttgctttatgtcaaaaatcagttgaccayatttatgtgagtctgtttatgagcgctctgttctgttccattcaacgattttttttcttttaccagtaccacacagtcctgattattgtagctttatatt

SEQ ID NO: 456260 - DNA, 201 bp, Homo sapiens
cctcctgttatagaagaaattttgatgtcaatattcaattctataagattgagattttgcataaattacttcatattacaaaaatgaacctttcaagcatratgtggaccatacattactgaatattattgaaactctatgtaatcagaagccatttcaatatactattgttgtacttaggagaagttaggaaacatatta

SEQ ID NO: 456261 - DNA, 201 bp, Homo sapiens
atgtaaaaataaaggcattgattgatgatgatttttttcctgaactactagggaattttaaatcattttttccttgcaagtaatggttaattttctcttcrtcctctttgttaccatgtgttacagttgattttgtataagagagacacttacagaatgagacagtagtcctttaagagtcatttattactgtatttctac

SEQ ID NO: 456262 - DNA, 201 bp, Homo sapiens
aattattaagcttattcctcagccgtgctaattaaccccaaacaaatttcacattaaggaaacagaattcaatcaatgtaaatgttattgctgtgtattastgtaagcaataatatagtggctaaaataattaattattttggatttttttaaaagaaagtattcctttttatggtgttgcaaaatgttttgtggatatct

SEQ ID NO: 456263 - DNA, 201 bp, Homo sapiens
tatgaagtaattcctgcacaaatatttctataataagcctgtccttttttttaagaaaaatatttctcatctgaggataaacttgtccttttgtaaaataaaaaaaaaaagacgtttataaatcatgctgctataaagacacattaacacgtatgtttattgcggcactattcacaatagcaaagacttggaaccaaccca

SEQ ID NO: 456264 - DNA, 201 bp, Homo sapiens
tataaatatattaaatgcagatattaaatgaccaaaaacatgctcatcaaatttacctatctcacaaatctggaacagtgaatataacggattaaagaaayaaaacttaaaatgttttgacaaactgaaactatgaacttaaaaataacctaccaagataaaatttaatagatcttattatcaagttcagaagttgtgacc

SEQ ID NO: 456265 - DNA, 201 bp, Homo sapiens
gcagaagaattgcttgaacccgggaggcagaggctgcagtgagctgagatcatgccactgcacttcagcctgggtgacagagcgagactctgtctcaaaamaaacaaacaaacaaacaaccagtaaataatttaaaacatttgtgatatggtagaatatgctattccactaatgcattaagaaaacaagatcttatagagg

SEQ ID NO: 456266 - DNA, 201 bp, Homo sapiens
aatggtaatgcctaggttttcttctagggtttttatggttttatgtctaacgtttaagtctttaatccatcttgaattgatttttgtataaggtgtaaggwagggatccaatttcagctttctacatatggctagccagttttcccagcaccatttattaaatagggaatcctttccccattgcttgtttttctcaggttt

SEQ ID NO: 456267 - DNA, 201 bp, Homo sapiens
atatcccactacaactttatccagctgtactcaacacacacatactttgcctcatcacaaacaaggccatatcacttaaacgtgctttttaaaattttatwttatttatttatttatttatttatttatttttagatagggtcttgctctgtcacccaaactggagtgcagtggcatgaccatggcttgagtagctgagac

SEQ ID NO: 456268 - DNA, 201 bp, Homo sapiens
cagtatgatattggctgtgggtttgtcatagatagctcttattattttgagatatgtcccatcaatacctaatttattgagagtttttattagcatgaagrgttgttgaattttgtcaaaggccttttctgcatctattgagataatcatgtagtttttgtctttggttctgtttatatgctggattacatttattgattt

SEQ ID NO: 456269 - DNA, 201 bp, Homo sapiens
acgcggtcaggagatcgagaccatcctgaccaacatggtgaaaccccgtctctactaaatatacaaaaattagccgggcatggtggcatgtacctgtagtytcagctactcaggaggctgaggcaggagaattgcttgaactggggaggtggaggctgcagtgaaccaagatcgtgccactgcactctagcctgggtgaca

SEQ ID NO: 456270 - DNA, 201 bp, Homo sapiens
tatgtcccatcaatacctaatttattgagagtttttattagcatgaagggttgttgaattttgtcaaaggccttttctgcatctattgagataatcatgtrgtttttgtctttggttctgtttatatgctggattacatttattgatttgcgtatattgaaccagccttgcatcccagggatgaagcccacttgatcatgg

SEQ ID NO: 456271 - DNA, 201 bp, Homo sapiens
tcaagaggctgaggcaggagaatgtttgaacctgagaggtggatgttgcagtgagccgagatcgcaccactttactccaacctgggtaacagagcaagaaytccgtctcaaaaacaaacaaacaaaaaacaaacaaagaaaccccccacaaaactatttacattttctccaaataaaatgatatgcttaggtatgcactta

SEQ ID NO: 456272 - DNA, 201 bp, Homo sapiens
ataatttctaatgctaggttttaagcttatggtttcctattttcattctgttaaatctccagaagctcttttagccttgatattctattattctaaaaaargcaaggccgtggcttgcaattatgttttataaaatttaatggcactcaaaattctttatcataaggagagcacagtatagatctcttgcatgtaccattc

SEQ ID NO: 456273 - DNA, 201 bp, Homo sapiens
caaagaacatctttatttcagccttcgtttccttatgtacccagtagtcattcaggagcaggttgttcagtttccatgtagttgagtggttttgagtgagyttcttaatcctgagttctagtttgattgcactgtgatctgagagatagtttgttataatttctgttcttttacatttgctgaggagagctttacttccaa

SEQ ID NO: 456274 - DNA, 201 bp, Homo sapiens
aatcttcagttgctgtgggacttcaggctcattagacgaatgagaatgtcagggtgcagttagttacagacaaccctctgacttcatgagtcttgatcccdtatattaaaaatgggagaataattatatattcagttataatatatgctacctcagagaaagttctcccctcaaaattattattttttggagacaggatct

SEQ ID NO: 456275 - DNA, 201 bp, Homo sapiens
ctctaattaggtcaatcatttgtgtcagccctgatacaacttctttgttttagtgagcagttgataaatgccattacacattggctatttattgtggtatmaaatgaatgcatgagattctacttaaaatagaagatagaaatacaattaaataaaagaaatagaattgtatttggagtgactgtaattaaggctctctgt

SEQ ID NO: 456276 - DNA, 201 bp, Homo sapiens
tttgtctacttttgtttttgttgcctgtgctttgggtcttagctataaaattcgttgcctagatcgtgtcctgaagcacttcccctgtattttctcctagyggttttatagcttcaggtcttatattaaagtctttaattcatcttgagttgacttttatatatggtgagagataggggactagttttattcttctgcata

SEQ ID NO: 456277 - DNA, 201 bp, Homo sapiens
ctgactgcttaaaaatattaccgaacacttgtcaaaatgaaatattcataatactatattatgataaattcagtgaagtattatttggtgcatttatgttrtaatttatggaattttttttgtggggcagaagaaacagtagacacttgcttcttgggtgaaagtaaggaagacaaaactgtaaatcagtccaattacaaa

SEQ ID NO: 456278 - DNA, 201 bp, Homo sapiens
gaatgttaaacttaattatagtctatggttggcagctttaactgaaattacatagtgtaggaattattgggacaatcttgctgtggaaagacaactgtatrctgtttccctgctgtaaatttcagttgtaaaaattcaatttcttacacagggaatgataccatgaaaagacagtttgtgaataaaattttatggaagagg

SEQ ID NO: 456279 - DNA, 201 bp, Homo sapiens
tgggatggagagtcctgtagatgtctattaggtccacttggtgcagagctgagttcaattcctggatatccttgttaactttttgtgttgttgatctgtcyaatgttgacagtggggtgttaaagtctcccattattattgtgtgggagtctaagtctctttgtaggtctctaaggacttgctttatgaatctgggtgctc

SEQ ID NO: 456280 - DNA, 201 bp, Homo sapiens
aattttttaaattccttctaaaaatatatataaatatatatacatatttgggatggagtttcgctcttgctgcccaggctggagtgcaatggtgcgatctygactcactgccacctccgcctcctgggttcaagtgattctcctgtttcagcctcccgactagctgggattacaggcgtgtgccaccacgcccagctaatt

SEQ ID NO: 456281 - DNA, 201 bp, Homo sapiens
tctctttgtaggtctctaaggacttgctttatgaatctgggtgctcctgtattgggtgcatgtatatttaggatagttagctcttcttgttgaattgatcyctttagcattatgtaatggccttctttgtctcttttgatctttgttggtttaaagtctggtttatcagagactaggattgcaacccatgcctttttttgc

SEQ ID NO: 456282 - DNA, 201 bp, Homo sapiens
gaggccgaggcgagcagatcacggggtcaggagatcgagaccatcctggctaacacggtgaaacactgtctccactaaaaatacaaaaaattagccgggcwtggtagcgggcgcctgtaatcccagctactcaggaggcggaggcaggagaatggcgcgaacccgggaggcggagcttgcagtgagccgagatggctccac

SEQ ID NO: 456283 - DNA, 201 bp, Homo sapiens
tgtaaaggattttatttctccttcacttatgaagcttagtttggctggatatgaaattctgggttgaaaattcttttctttaagaatattgaatattggcycccactgtcttctgggttgtagagttcctgccaagagatccgctgttagtctgatgggcttccctttgtgggtaacccgacctttctctgtggctgccct

SEQ ID NO: 456284 - DNA, 201 bp, Homo sapiens
tatgaagcttagtttggctggatatgaaattctgggttgaaaattcttttctttaagaatattgaatattggctcccactgtcttctgggttgtagagttyctgccaagagatccgctgttagtctgatgggcttccctttgtgggtaacccgacctttctctgtggctgcccttaacattttttccttcatttcaacttt

SEQ ID NO: 456285 - DNA, 201 bp, Homo sapiens
gagaaggaagggcatcaataatggcattaatattttataatacatttattagttttattaatgtttctgtgctgcacttgggctgatttcagagtagatgrtatggccataagcaagaaccctttactgagtgtacatgtctaactgaggtggaaggaaaagaggtggtacctgaggagagattcttaagcaggaagagag

SEQ ID NO: 456286 - DNA, 201 bp, Homo sapiens
gcttagtttggctggatatgaaattctgggttgaaaattcttttctttaagaatattgaatattggctcccactgtcttctgggttgtagagttcctgccragagatccgctgttagtctgatgggcttccctttgtgggtaacccgacctttctctgtggctgcccttaacattttttccttcatttcaactttggtgaa

SEQ ID NO: 456287 - DNA, 201 bp, Homo sapiens
taaaataaaagttagaataaaatatttttaaaagaattttttaaaaaagaaaaaaatagaggctttctttttaaacttaaaaacaatttgtggagattttrtcaaggacctagcactgtggttggtttacaacaggtgctaaataaatattattaaatcaaaatgcagagataaagatgtgcatgttcattcattcattct

SEQ ID NO: 456288 - DNA, 201 bp, Homo sapiens
aggcaaccaattggaggtttatatattttaaaaataaagaaggggcggccgggcgccgtggctcacgcctgtaatcccaacactttgggaggccgaggcgrgcagatcacggggtcaggagatcgagaccatcctggctaacacggtgaaacactgtctccactaaaaatacaaaaaattagccgggcttggtagcgggcg

SEQ ID NO: 456289 - DNA, 201 bp, Homo sapiens
ataggaaagtggttgacttttgtatattagccttgtattttgcaacctcgctataattacatactggttccaggaatttttgtcaattatgtcttattttstactcagatgatcatgtcatctgtgatcaaagacagtttcattttttcatcccaatctgtataccctttattttattttatttattttatttttaaactg

SEQ ID NO: 456290 - DNA, 201 bp, Homo sapiens
tcccaaagtgctgggattacaggtgtgagccaccgtgcccagcctgtccagtttctttaaactgttttttgccttttggtatgtcttataattttttgttkaaaggcagacatgatgtactgggtaaaaggaaccgtaataaataggactttagtcatgtagtggtaacgtgtgagggaagggtaagaattccatagtcct

SEQ ID NO: 456291 - DNA, 201 bp, Homo sapiens
tcattccagttctcaagggttttcctttaggtttttatggttttttttttccatagcctttatcttttccttaattctggttatgaacatggccttttgtrgcaatttgtgaaaccactggctgccatgtctgccttttgaccttatagaagaaatacataaaacaggatattaaagagtttcataaagcagagaaaggaa

SEQ ID NO: 456292 - DNA, 201 bp, Homo sapiens
atccataatttaaggaaatgtaaattttcaatacagtctagtgaaaaataatttttccacaaaagtttacagaccccttgaattctatctatgtctgctgragtctgtggaccaccagttaagaatccctatgctagatgatatggtacacccataatgaataaaacaatggtctctaacttttaataattcatattccag

SEQ ID NO: 456293 - DNA, 201 bp, Homo sapiens
cttctcaataatttccctgcttaggtgggagaggatggctggagtgggctggagttgagtattttccttctcccaagtggaaggcttgagggggttggagytgggtatttcccttaccctaggtaggttatgctgtgataaaacagcaggttaggctctggaaaaatcgtttttcctgaaggcaggacttgttaaaaagaa

SEQ ID NO: 456294 - DNA, 201 bp, Homo sapiens
agtgaaaaataatttttccacaaaagtttacagaccccttgaattctatctatgtctgctggagtctgtggaccaccagttaagaatccctatgctagatkatatggtacacccataatgaataaaacaatggtctctaacttttaataattcatattccagtaagagatataaggcatataaaaatgaactctaattcag

SEQ ID NO: 456295 - DNA, 201 bp, Homo sapiens
atcttgaacattttgcttatgttatggacaggggagagatggaaaatttaagaattaaagcataagccacatgttttggaactatttttctttgatttcargtagaagaggtagacaggaaactgtcttatgtgcccaatgtacatagtcctaaaaattattccttggttttaatttaactcttaagccttgaccctgatt

SEQ ID NO: 456296 - DNA, 201 bp, Homo sapiens
tatttttttttcataatgtccctgtcgatatttggctggtcccctaacatgagttggatagtgtttcccaagtttgtactacattggtattatttcctccrtgaatgtttggaacaattcaccagtgtggcaatcaggacctggagtcatctctgtgagagggctttacattatagatccaatatctttatatagcactat

SEQ ID NO: 456297 - DNA, 201 bp, Homo sapiens
tttggaactatttttctttgatttcaggtagaagaggtagacaggaaactgtcttatgtgcccaatgtacatagtcctaaaaattattccttggttttaayttaactcttaagccttgaccctgattaatagcagaaagtctggtctcacttctaggtaaatcaggaacttcagtatttaactttagtcatttagaattat

SEQ ID NO: 456298 - DNA, 201 bp, Homo sapiens
tattactctggctttcaagccccattttatattactttactcttctctgccatggacgactcccctcctccttaaacatgtcttaggacctttgcacttgygcaaacatataacttggacattccttagttatattagacacactgcacataattagaatttggttcctggagttctgttgtaatctttctctagtgagca

SEQ ID NO: 456299 - DNA, 201 bp, Homo sapiens
ctttggtttatgttattggttttatgtaattttaggattgttggaattttcctgttattattatgtgatacttttctttattgatgcttcttgacttagartattaattatctgatattaatacatctacatcagcttttttggagttagtgtttacatgatataaccccacttatcttgtttactttgaatattttttgt

SEQ ID NO: 456300 - DNA, 201 bp, Homo sapiens
gggatccaatgttattcaatttcattaggtgttatgagacataaaaattggtatataattgaaaaatgcaatacacatttggcagaatattgtaagactgmaaatttgtgctttatgcaaacacagatatcacaaaacaaatatggactataatgtttagatcaatataaaggccatggtttgtttttggcaccattcaga

SEQ ID NO: 456301 - DNA, 201 bp, Homo sapiens
tatttagtccaacatacttcaagcttagtcattatccctcctatccagaataactttgtattctctccgtttattgaaattttccatttatccattttccrgatcatacctaatcttctactgactggcacttgtgaatgtctcctcctctaaaattattaatactcaaacctgtacaccactgcatttatcaataaatta

SEQ ID NO: 456302 - DNA, 201 bp, Homo sapiens
aggaggaggaatatttgctggaggtacgtcattattttgcaaatttcgattagctcatcatgttgtctgtagtgtgaaaatcgtagctaattagggcagcsagttagactaccagcttttgagcttatgagttaaaaggtagcatacttgataggccagtgatgtgaaaaaggtggtaaaaaggaggattagagcagttgc

SEQ ID NO: 456303 - DNA, 201 bp, Homo sapiens
ttgatgtaatgaaaagagaaagtgtgcaacagtgagattgttaattaatttagcctaacaagatgaagataaatgaagcaaagcacagtttgaatgaagcragaggtcttatttacaatttaatacatttttatataatgcagatttcacttggtaaaaaacaaacagaccctcaccccaaatacccactaacagcaaaag

SEQ ID NO: 456304 - DNA, 201 bp, Homo sapiens
agaagatgaacagagataaatattgttttttagtagctcataatttagtaggaaacacatgtaaataaggtaattatcataagtacaatagtagaagaagmtataaaatgctgtgttggctgggtactgtggctggccgggtgcggtggctcctgcctgtaatcccagcactttgggagaccgaggcaggtggatcacttg

SEQ ID NO: 456305 - DNA, 201 bp, Homo sapiens
tttagtaggaaacacatgtaaataaggtaattatcataagtacaatagtagaagaagctataaaatgctgtgttggctgggtactgtggctggccgggtgyggtggctcctgcctgtaatcccagcactttgggagaccgaggcaggtggatcacttgagttcaggagtatgagatcagcctggccaaaatggcaggaccc

SEQ ID NO: 456306 - DNA, 201 bp, Homo sapiens
agaggaaaccataatttttttctagatctaaatagggatttattgacattcgagctagattttgataagctcatcatagtgaacaagagatataatggaawcccaggtagagagaacagcatgtacaaagtttcatggtatgaataaacctgtgagtttaatgaatgtgaagaagtttggtgtgactaggacaggagacac

SEQ ID NO: 456307 - DNA, 201 bp, Homo sapiens
atgactggctgaggaggaacatgtttactaataatgaattaattcattcactgactaaacatcaatttgtacctactatatgccaggcacaaagaggatawaatgaaaaagatatgattcttgcaagaatcttacaaatttgtcagcaagacagacacataaactaatgaataatgtgacaagagcttgggtaaatcaggg

SEQ ID NO: 456308 - DNA, 201 bp, Homo sapiens
aaagtatcccaaattaattttttttcttgcatctactgtgcattgtatgtcctgaatttcctaaatctgtattgtcctttttagtaaaagggtgtgtgtgtatatatatatatatatatatacatgattttatatatatgtgattttatatataataacttgtgtatataacttgtctaatattatgtaacttgcttttat

SEQ ID NO: 456309 - DNA, 201 bp, Homo sapiens
aagtatcccaaattaattttttttcttgcatctactgtgcattgtatgtcctgaatttcctaaatctgtattgtcctttttagtaaaagggtgtgtgtgtatatatatatatatatatatacatgattttatatatatgtgattttatatataataacttgtgtatataacttgtctaatattatgtaacttgcttttatg

SEQ ID NO: 456310 - DNA, 201 bp, Homo sapiens
cctgagcatgagagagcctttagatagttccagcaagtaattctgattggattgaatttgtctttgtgtggcaagggggagcagtagaaggcaagcaacayagaactatgattgaccactctcatcaagacaacagcagtcagaaatattttcccaaagaaaccaaaataaagaatataggacacactggatacagaaatt

SEQ ID NO: 456311 - DNA, 201 bp, Homo sapiens
ctttggtcctttttatactagctattctaaacaggtgtgcaatgatatctccatatgattttgatttgcatctcccttgtgattaatgatttcaagctttktaaatgtatttcttagccacttatacgccttcttttgagaaatgtgtattcaggccttttgtctatttcttaatcaaattatttgtttttcttttataaa

SEQ ID NO: 456312 - DNA, 201 bp, Homo sapiens
gatagagaagatgtcacgatgagtaatattttagcaacatggacagccatagtttctaatggaatgtttttattccattaaaattgtggcacatctgaagrcctcctgggcaataagatacagtgaaaaaccaaggcttcagcctgcacatgtacttctgatagatgaaaataaaacttaccttggaaggaattaccttat

SEQ ID NO: 456313 - DNA, 201 bp, Homo sapiens
agtttggctggatatgaaattctgggttgaaaattcttttctttaagaatattgaatattggctcccactgtcttctgggttgtagagttcctgccaagaratccgctgttagtctgatgggcttccctttgtgggtaacccgacctttctctgtggctgcccttaacattttttccttcatttcaactttggtgaatctg

SEQ ID NO: 456314 - DNA, 201 bp, Homo sapiens
tgagccgagattgggccactgcactccaagctggatgacagcgagactccgtctaaaaataaatacataaatgaatatatatatgtatatgtgtatatatmcacacacacacacacacacacacacacatatttgggacattgaagtataacatgcgtgtggtaaaatatgcaatcttaagtgtatctttcactaaatttt

SEQ ID NO: 456315 - DNA, 201 bp, Homo sapiens
gtccagctcgcgatttttgatagtactcttttaatcattattatttataaaaattagagaagataaagtcctgcatttcattgaataaatattggttaatkgaaacagattctttcaaagtaagaggaattaattttggcattttctatttcaatacgactttagcataatgctactttagcattatgacttacgttcatt

SEQ ID NO: 456316 - DNA, 201 bp, Homo sapiens
tggctggatatgaaattctgggttgaaaattcttttctttaagaatattgaatattggctcccactgtcttctgggttgtagagttcctgccaagagatcmgctgttagtctgatgggcttccctttgtgggtaacccgacctttctctgtggctgcccttaacattttttccttcatttcaactttggtgaatctgacaa

SEQ ID NO: 456317 - DNA, 201 bp, Homo sapiens
tctcacataataacatatatagcctttatatgggactaggtagcctaaaataataacagtcccattttccccctagtttcttaacagtattgtacagttgwtgatggtattttagaaaaaggcaaaaatagccaagaacaatagtaacaaaaacccactcatagcttcagaggaaaaaaaagtcgtgagagctgaatgatt

SEQ ID NO: 456318 - DNA, 201 bp, Homo sapiens
gagccgagattgggccactgcactccaagctggatgacagcgagactccgtctaaaaataaatacataaatgaatatatatatgtatatgtgtatatatacacacacacacacacacacacacacacatatttgggacattgaagtataacatgcgtgtggtaaaatatgcaatcttaagtgtatctttcactaaattttt

SEQ ID NO: 456319 - DNA, 201 bp, Homo sapiens
tgcctactaaccaaactcttgctgattcatttatggagaagaagtgctgtattattattatttttgcattatgaatgaaattcatgatcacgcatcaactytgtcaatccttacggacagtcatcactgtgatttgcactaacaatttgggtacttagttacattagttttctgaatttatccaacaactttaggtgaatc

SEQ ID NO: 456320 - DNA, 201 bp, Homo sapiens
tttttttcaaagtttttaacttctttgcctttggtttgagtttcctcctgtagctcggagtagtttgatcatctgaagccttctcttaactcgtcaaagtmattctccatccagctttgttccgttgctggtgaggaactgcattcctttggaggagaagaggcgctctgctttttagagtttccagtttttctgctctgt

SEQ ID NO: 456321 - DNA, 201 bp, Homo sapiens
agctggatgacagcgagactccgtctaaaaataaatacataaatgaatatatatatgtatatgtgtatatatacacacacacacacacacacacacacacwtatttgggacattgaagtataacatgcgtgtggtaaaatatgcaatcttaagtgtatctttcactaaatttttatatgtgtttatattccaccacatttt

SEQ ID NO: 456322 - DNA, 201 bp, Homo sapiens
caaagaattcatgactatgacctcaaaagcaaatgcaacaaaaacaaaaactgacaagtggaacttaattaaactaaagagcttctatacagcaaaagaarcaatcaacagattaaacagacaacctacagaattggagaaaatatttgcaaagtatgcatctaacaaaaaacatatccagaatctatgacgaatttacac

SEQ ID NO: 456323 - DNA, 201 bp, Homo sapiens
ttttaggttttaaatttatttctatatatacaaccaaattgtttgtgaatggtgaattttatttcttttctcctttacatgttttttaaaattaataaacttaatttttaatagcagtttcaggttcacaaaaaatagagtgcaaagtacagagagtttctatacatacatatatgtatgtgtgtgtatatatgtatatat

SEQ ID NO: 456324 - DNA, 201 bp, Homo sapiens
tccctaaccttggttagtttcttcatatacatgtactaatcagtacttgcttaagtttttgtcagactctctgcatatctctggaactctatatgcaggtmtctttttgccattgctctgctctacaaactgtagataccttggctcctctagactacaagctccatcttcttaactcactgaagttattagagttcacct

SEQ ID NO: 456325 - DNA, 201 bp, Homo sapiens
caagggcagtgagagaatagaaagtagttaaatttgagaatcattttggaaatggcataaataatgacaaatatttcatttggaaatgaacctagtgacarattagttttcagactcaatatgcattttgtagatatactttagaggattgggcaaccagttattcaggaatacttttaatgaactgttttaaataatctc

SEQ ID NO: 456326 - DNA, 201 bp, Homo sapiens
tttaggttttaaatttatttctatatatacaaccaaattgtttgtgaatggtgaattttatttcttttctcctttacatgttttttaaaattaataaacttaatttttaatagcagtttcaggttcacaaaaaatagagtgcaaagtacagagagtttctatacatacatatatgtatgtgtgtgtatatatgtatatatg

SEQ ID NO: 456327 - DNA, 201 bp, Homo sapiens
catgggtttaagtcctaacattgggtgtaatatatatagatgttaaatgtataggttatatgtaagaagtattgaaactgcattgctagcatgtctggctsttcctaagctcatatgagaatgaaagcaaaagtactattttgagtggttataatgatgtcttgattgtaaaattttatattttcaaagaattttcattct

SEQ ID NO: 456328 - DNA, 201 bp, Homo sapiens
gtaggtttttgtgtggacataagtttttatttgagaaaaaccaaagaacatgattactagattgtatgattagagaatgttagttttataagaaactgccaaagtgtcctgtactaagttgtgtactattttgcatttccatgaacaatgaatgagcgttcctgctgatccacatcttcaccagcatttggtattatcagt

SEQ ID NO: 456329 - DNA, 201 bp, Homo sapiens
ttattctagggcactttctcatgtagtgtcctcagaccaattttctttgtatgtttttcgcagacaaagctcttggaggaagcatagagatgtgatagggmttggacttcaaaagaatttttagttttaaacactgctattgtggctatatctgctgttgtaaaggggtgtgaaatactgttttctggtattctgtggaat

SEQ ID NO: 456330 - DNA, 201 bp, Homo sapiens
ctctctgaaagttttaaaaaattagccaggcatggtagctcatgcctgtggtctcagctactttggagaatgaggtgggaggattgttgagcccaggagaytgaggctgtactgagctgtgataatgccactgcgctctagcctgggagacagagcaagaccctgtctccagaaaacaaaatgaaacaagataaaacccaa

SEQ ID NO: 456331 - DNA, 201 bp, Homo sapiens
taggtttttgtgtggacataagtttttatttgagaaaaaccaaagaacatgattactagattgtatgattagagaatgttagttttataagaaactgccaaagtgtcctgtactaagttgtgtactattttgcatttccatgaacaatgaatgagcgttcctgctgatccacatcttcaccagcatttggtattatcagta

SEQ ID NO: 456332 - DNA, 201 bp, Homo sapiens
gcataacgtgcaggtttgttacataggtatacatgtgctatgttggcttgctgcacccatcaacttgtcatttacattaggtatttctcctaatgctatcycttccccaagccccccattcccaacaggccccagtgtgtgatgttccctgccctgtgtccatgtgttctcatcattcagttcccacctatgagtgagaac

SEQ ID NO: 456333 - DNA, 201 bp, Homo sapiens
ccccaagccccccattcccaacaggccccagtgtgtgatgttccctgccctgtgtccatgtgttctcatcattcagttcccacctatgagtgagaacatgyggtgtttggttttctgtccttgtgatagtttgctgagaatgatggtttccagcttcatccatgtccctgcaaaggacatgaactcatcattttttatggc

SEQ ID NO: 456334 - DNA, 201 bp, Homo sapiens
tgaccttgttggggatccttgtcattcatattaccttatcattcatactaacactaacattcattcgttccttcacactataagaatatgaactcagagawcttctggacatgaggtgggattcaaaatagaaaaggaagaattagtctggaggagtttataatcagtttgtgagtggagataaaatatatgtacatgaaa

SEQ ID NO: 456335 - DNA, 201 bp, Homo sapiens
ggtgtatatgtgccatattttcttaatccagtctatcactgatggacatttgtgttggttccaagtctttgctattgtgaatagtgccacaataaacatayatgtgcatgtgtcttaatagtagcatgatttataatcctttgggtatatacccagtaatgggattgctgggtcaaatggtatttctggttctagatcctt

SEQ ID NO: 456336 - DNA, 201 bp, Homo sapiens
agaataaagtcaaagtgaccttgttggggatccttgtcattcatattaccttatcattcatactaacactaacattcattcgttccttcacactataagartatgaactcagagatcttctggacatgaggtgggattcaaaatagaaaaggaagaattagtctggaggagtttataatcagtttgtgagtggagataaaa

SEQ ID NO: 456337 - DNA, 201 bp, Homo sapiens
ttatcataaggagagcacagtatagatctcttgcatgtaccattcacaataaggttctcagtcctatgagaatcaaacgccactgctgatctcacaggagrcagagctcaggtggtaatgctggtaccagtaaggctggtaccagtccatggcccaggggttggggactcctgctttataaagtttggcttcccctctgcc

SEQ ID NO: 456338 - DNA, 201 bp, Homo sapiens
tgagacaacagccttttaaaaagtaatattctacttctgcttctggccataaagaagtaactggtactggaattaacctcgtaatataaacaatgagaacrcttgatcaactgtatgaaataactgttttaagaaattagacaatagttagcactagactgcagtatatgagagaaggaaaataaagtaagccatgagatt

SEQ ID NO: 456339 - DNA, 201 bp, Homo sapiens
gttactaacaatattgcagcgaatattcttgtatatccttctttgtgttcttgtacaaatgtctacgtaggaaaaatttctagagatggaattatgggttmaagcttatattcaatttaaattttaaataaatattatcaaattgcctttcgtagctgctgtgtcaatttgtactcctaacaataatgtttgagaacgctt

SEQ ID NO: 456340 - DNA, 201 bp, Homo sapiens
aaagaaaaggtattgtgtggtttcagatgtaataatctggattcagatattgtttctgtaccttgatcaaaggtatagcacacaggtcacagagtgatccsttatcttatcttatggtgcttaataaatattattggatgatgagccaaaataatgtgaaaaacaaaacccacaggctttaacatttaatggccaaagaaa

SEQ ID NO: 456341 - DNA, 201 bp, Homo sapiens
gaaacaccaggatgtccaggtagaagtttgctgcagaggtggagctgtcatggagaacctctgatagggcagtgtggaaggaaaatgtgggattggaaccyctacacagagtccccactggggcactgcctagtagagctgtgagaagagggccaccattctccagacccaaaatggtagatccaccgacagcttgcactg

SEQ ID NO: 456342 - DNA, 201 bp, Homo sapiens
attctagagatattttctatctagtccatatattaacctaaagtatagtagtagccttatggggcacagaacgatttagtccataaagaaagataaagcaraaaatacctacaagtaggcaagtaattgaggtaagttcatacagtaggaaatgcaaaggacaatataccctttgtcgagagcaattttgactaaggagaa

SEQ ID NO: 456343 - DNA, 201 bp, Homo sapiens
atagctacttgtatcaaacagataaattgcaacgtacatgttattttgagccttcccttccttacttttttttcttttgctttagagtataatttagaaakgagttattatcatcactggatacctgagtgtatagtacctactaaagttccaggcacaaggactaacttgtgaataatgtagttaagatccctgttatca

SEQ ID NO: 456344 - DNA, 201 bp, Homo sapiens
aagaaaaggtattgtgtggtttcagatgtaataatctggattcagatattgtttctgtaccttgatcaaaggtatagcacacaggtcacagagtgatcccwtatcttatcttatggtgcttaataaatattattggatgatgagccaaaataatgtgaaaaacaaaacccacaggctttaacatttaatggccaaagaaaa

SEQ ID NO: 456345 - DNA, 201 bp, Homo sapiens
tattttctgacatggaaatgaagtacaaatcaataacaatatgaaacatttttaaattcaaattatttggcaattaaaccacatatttctaaataaaccayttaccaaagaagaaagaacaaggaaaattgtaaagtattttaaactaaatgataatgaaaacccaacctaacgaaatgtgtgggatgcagctaaagtaat

SEQ ID NO: 456346 - DNA, 201 bp, Homo sapiens
gcggaattctagagatattttctatctagtccatatattaacctaaagtatagtagtagccttatggggcacagaacgatttagtccataaagaaagataragcagaaaatacctacaagtaggcaagtaattgaggtaagttcatacagtaggaaatgcaaaggacaatataccctttgtcgagagcaattttgactaag

SEQ ID NO: 456347 - DNA, 201 bp, Homo sapiens
cttgtaagtcattgtaggagagtggcttttgtattatatttaatacaaaaatatgtaaaacttttattttgaaatataattcaggatcttattccttcttsttattgagaagatggacacattttaaattcgaagacagtctttaatttgtggctgtcctgatgggtgtttttactctgccttttctttttcttatcctct

SEQ ID NO: 456348 - DNA, 201 bp, Homo sapiens
tgtattggcttacattaccaaaagcccaggaataaaattctgttttatctattttgggatgtaagtatgctaacatgaggtaaagatttttttctgtatcyattcttactgctgctccttctgcttttctttctatttttggcttcattcactcttattgcaggcaggctctatctatgtgccaggtgggatggtcatgac

SEQ ID NO: 456349 - DNA, 201 bp, Homo sapiens
gagagtggcttttgtattatatttaatacaaaaatatgtaaaacttttattttgaaatataattcaggatcttattccttcttcttattgagaagatggamacattttaaattcgaagacagtctttaatttgtggctgtcctgatgggtgtttttactctgccttttctttttcttatcctctgaagattccactattat

SEQ ID NO: 456350 - DNA, 201 bp, Homo sapiens
gatgtaagtatgctaacatgaggtaaagatttttttctgtatccattcttactgctgctccttctgcttttctttctatttttggcttcattcactcttaytgcaggcaggctctatctatgtgccaggtgggatggtcatgactgtccacatgcatatagcttccaacctgagcatgagagagcctttagatagttccag

SEQ ID NO: 456351 - DNA, 201 bp, Homo sapiens
agctcgcgatttttgatagtactcttttaatcattattatttataaaaattagagaagataaagtcctgcatttcattgaataaatattggttaatggaamcagattctttcaaagtaagaggaattaattttggcattttctatttcaatacgactttagcataatgctactttagcattatgacttacgttcatttttt

SEQ ID NO: 456352 - DNA, 201 bp, Homo sapiens
aaaaataaaacttaaaagaaaatctaaaaaataacaataattttttcagcacttatacagtttccattgttatttactttctgtaatggccctcatggccytcattcatgaactgttagaaacaagccctaaaagtttcttatctcttgggtacaggaagggttttactttgaaatgtcatgaccacagaggaagttttct

SEQ ID NO: 456353 - DNA, 201 bp, Homo sapiens
acgcacattatttactgcctgctgaaaaccttagctatttaagagatgaaaatcctgaggtagtcatgctcaaagagtaggttatggaagctaccagagtrtgccagacttgtcagttacttcatatgcacagatctagtcacatatcctgcaccttgatttctattcatacaaccagggagttgtatgaaattgttaatt

SEQ ID NO: 456354 - DNA, 201 bp, Homo sapiens
ttaaatatactttaaatttcatttacaacccatctttcttcttccctgctcactattttggagtcaatgggaaacttaggaaccacctgacggtacccaargcccaacaaagcttcccagtgtggggtcaaatgtgtaatggcttgactttgttgtataaatgagtataccaggaattctctgggtctttgttaagttaat

SEQ ID NO: 456355 - DNA, 201 bp, Homo sapiens
gttttcatgttgctttgaaaaaactgtcaaatttaatttttttctagcatttttcataacaaacttcttccattaaaaaaaccttatggtggaaaaatttycaaacctacacaaaagtagagaaaatagtatgatgagcccttatggacctatcatctagcttaaacaatcataaatatttcatctgttctaccacttttt

SEQ ID NO: 456356 - DNA, 201 bp, Homo sapiens
agttatgcctatcctacggtagactcttgtttcccttgattattggagaacctgctgggatcttgattcaaactagctgggccagtgtattctgaattatrttattacttttcttgaggttaatatcatgcccttctgtattttaaaaaaaaaatcagtagcatgaggtcatagtttactgcaatattctatctcattgat

SEQ ID NO: 456357 - DNA, 201 bp, Homo sapiens
gaatttggttgaatctgtaggtaaatttgggaacaatcacattgtaacaatattgagtcttctgattcaggaaatggtatattcctccatttatttatttwtttattttttttttttttttgagacggagtctcgctctgtcgcccaggctggagtgcagtggcgggatctcggctcactgcaagctccgcctcccgggtt

SEQ ID NO: 456358 - DNA, 201 bp, Homo sapiens
gttgtttacatgtattgcagatatcttcttccattttggcttgtcttttcactttatggaatcttttgatgaacagatgttctcatttttaatattgttgwatagttattgatcttttcttttttggttaatgcttttcctgtgctgtttaggaaattatttcctatctgaggtcataaagataatctccagtgactttca

SEQ ID NO: 456359 - DNA, 201 bp, Homo sapiens
ctcccttccctttgtggtgttgggtattactatacttgattattttcattttcagctggttggcctagggctgtgaatagagagtatatgtgaaaactttrcacatggatgtactttatatattctttacatcactgattccctctcagcattgtcttaaatctggttgtcaaaaatgtgccattgagagcagtctggcag

SEQ ID NO: 456360 - DNA, 201 bp, Homo sapiens
ggcctttcagcaactgtcatttgggactgctgttgctggtaattaaagactcttaggtcagctggaaagccgtctccaggtacataactgtgggtctaggyttctaactgctttccatgaaaaatcatacgctgaactcacaaatgacccctctgctgttaaaaggagaagaagctgcctcatagaattatgagccattcc

SEQ ID NO: 456361 - DNA, 201 bp, Homo sapiens
gactttgtggcctctaatactttcttaaaattctgaatctaagtttaattcaaacttagattgtaaattcaggtaatagataagttgtcagctttaaatgaaaaaaaaagtaatattgggagatgttttctatcagaatattgaagaaatatttgttgaaaacatctatctttctgcatagtactcatatggatgcttcag

SEQ ID NO: 456362 - DNA, 201 bp, Homo sapiens
attggacatcttttcatatgtttacttgcatctgtgtatcttctttggtggtgtctgttcaggtcttttaccattttttaattggattgttgttttcttaktgtgttttaagagttatttgtatattttggctaacattcctttatcagatatgtcttttgcaaatatttttttcccagtctgtggcatgttttttcatta

SEQ ID NO: 456363 - DNA, 201 bp, Homo sapiens
taagtgtggtttttatttttagagcttcagagttatgcatagggatgttattttgaatttaaatatctttcaaaccaaaatgttcctagtggacatacatttttttttttctagttaaatgacattctaaaaaaaaaaaaaatcagtgcttctctggccttacagttttatatctaacttgaagattttcatatttttctg

SEQ ID NO: 456364 - DNA, 201 bp, Homo sapiens
tgtcaaatgtttttctggatcaatatgatcatatgatttatcattgttagcctgttgatgtgtgatgtattccattaattgattttttgagtggtgagccmgcctagcataactgggataaatcccacttgattgtggtatataattcttttaacacattatttgattcaattagctaatattttcttgaggatttttgca

SEQ ID NO: 456365 - DNA, 201 bp, Homo sapiens
agagttatgcatagggatgttattttgaatttaaatatctttcaaaccaaaatgttcctagtggacatacatttttttttttctagttaaatgacattctaaaaaaaaaaaaaatcagtgcttctctggccttacagttttatatctaacttgaagattttcatatttttctgcccttttagtagcaatatgagtaagcct

SEQ ID NO: 456366 - DNA, 201 bp, Homo sapiens
ttcaacatctcctggcaacacatttcctcaatttttatttgtctgagaaagtcttcatttctactttacttttgaaggataattttacaggtacaaaatgstaagtgttttttttttcatcactttaaatatttcactccatattcttgtttgcatggtttctgaggagaagtcatatgtaattcttttctttgctcctct

SEQ ID NO: 456367 - DNA, 201 bp, Homo sapiens
atttctggttctagatccttgaggaatcgtcacactgtctcccacaatggttgaactaatttacactcccaccaacggtgtaaaagcattcctatttttcyacatcctctccagcatctgttgtttcctgactttttaatgctcaccattctaactggtgtgagatggtatctcattgtggttttgatttgtatttctctg

SEQ ID NO: 456368 - DNA, 201 bp, Homo sapiens
ctgagaatcctgtcatgctcaaaagtatgcttaggaggtttagccttttatccctgttgagagggtaggcaggtggatggggaaagaccttggtgtaggcratgatctttaagcagcaaagatatattttaaaatactatagtagcatcagtcttaaactattgagataaataacacaagaaagtatcatacgcaaaattg

SEQ ID NO: 456369 - DNA, 201 bp, Homo sapiens
ctcagcttcccgagtagctgggactacaggcatgtgccaccatgcccagctaattttctttttgtatttttagtagagatggggtttcaccgtgttagccrggattgtctcaatctcctgacctcataatctgccttccttgggctcccaaagtgctgggattacaggcatgagccaccgtgcccagctggagccaagtgt

SEQ ID NO: 456370 - DNA, 201 bp, Homo sapiens
ttgaaagaaatacagttaccatagattggcctattcaactggaaggatgaagtaatcattaaccaagaacaggatggccatgagaggggcaggtatgtggkagaatgatcaggactttaagttctgcacctatgaggttgagacagcatttagaaatccaaatcaaataagcagttttatatatatatatatatatatatg

SEQ ID NO: 456371 - DNA, 201 bp, Homo sapiens
ggttgaactaatttacactcccaccaacggtgtaaaagcattcctatttttccacatcctctccagcatctgttgtttcctgactttttaatgctcaccaytctaactggtgtgagatggtatctcattgtggttttgatttgtatttctctgataaccagtgatgatgagcattttttcatgtgtctgctggctgcataa

SEQ ID NO: 456372 - DNA, 201 bp, Homo sapiens
ttacaggccaaaaggcctaggagggaaaaatggttctgtgggccaggcccaaggcccccctgcactgtgtagctttgggatatgatgccttgcattccagmtgcttcagctcctgctgtggctacaaggggcaaaagtacagctcaggctgttgcttcagagggtgcaaggcccaagccttggcaactttcacgaggggta

SEQ ID NO: 456373 - DNA, 201 bp, Homo sapiens
ttttactattttgggggtgatgaagataggataattagaaagaaattatagtctttattgggccagcagtttactaaacttgaattgggatttgtgaaatkttaaggcttactgaatatttgctctctaagaacaggatagagaaataatcttgatcttaaaaggagaattttaaattttttagaaagatctcttacagtg

SEQ ID NO: 456374 - DNA, 201 bp, Homo sapiens
cagcatttagaaatccaaatcaaataagcagttttatatatatatatatatatatatgtaaaatatatataaaataagcagttatatatataaaataagcatgtatatatgcttatatatatgctcatatatataaaataagcattatatatgcttattttatatataatatataatatataatgcttatatatattatat

SEQ ID NO: 456375 - DNA, 201 bp, Homo sapiens
tctattttggcttttgttgccattgctttcggtgttttagtcatgaagtccttgcccatgcctatgtcttgaatggtattgcctaggttttcttctagggtttttatggttttatgtcttacatttaagtctttaatccatcttgagttaatttttgtataaggtgtaaggaaggtatgcagtttcagctttctacatata

SEQ ID NO: 456376 - DNA, 201 bp, Homo sapiens
tcagcttcccagcgtgaagagcaggcctgaaaacagcctctatttatactcccttgttcttatttggaaaatcagttgtttcattggagagagagggagasggggagagagagagaagagcatgagcagtcgtcagggagtgtgctttgtacgttatagtgacttcaaaataaaactggcacattttagtgtctaattatt

SEQ ID NO: 456377 - DNA, 201 bp, Homo sapiens
agcatttagaaatccaaatcaaataagcagttttatatatatatatatatatatatgtaaaatatatataaaataagcagttatatatataaaataagcatgtatatatgcttatatatatgctcatatatataaaataagcattatatatgcttattttatatataatatataatatataatgcttatatatattatata

SEQ ID NO: 456378 - DNA, 201 bp, Homo sapiens
gcaggggacgcagagccaaaccatatctgttattttaacaatattaatttttccagtccatgagcatgggatgtctttctatttttttgtgtcctcttcattttttttttccatcagtggtttacagttttccttgtagaggtctttatccttgattaaatttatttcgaagtttttttttgtagctattgtaaataggat

SEQ ID NO: 456379 - DNA, 201 bp, Homo sapiens
atgcagtctcactctgttgccaggctggagtgcagtggcgtgatctcagctcactgcaacctctgcctcccaggttcaagcgattctcctgcctcagcccyctgagtagctgggcctataggcgtgcaccaccacgcccagttaatttttgtatttttagtggagaggggtttcaccaggctgaccaggatgttcttgatc

SEQ ID NO: 456380 - DNA, 201 bp, Homo sapiens
caccagcatggcacatgtatacatatgtaactaacctgcacaatgtgcacatgtaccctaaaacttagagtataataaaaaaaaaaaaaaaaaaaaaaaargagagagctaacagaaaaaaacaaaaaaaagaatggcaggtagctaagctacttcttcatagattcagagtattttcctgtttgagtgagatggatagaa

SEQ ID NO: 456381 - DNA, 201 bp, Homo sapiens
tttttcttgcctaattgttctggctaggactttcagtattatgttgaataggagtggtgaaaagtaggcattcttgtcttgttctagttattagaggaaastcctatagatctattcatatttgctttatatatttgggggctctggtattgagtgcatgtaagcttatttatttatttatttatttatttatttatttat

SEQ ID NO: 456382 - DNA, 201 bp, Homo sapiens
atacaatcatgggttatcagtatttaatattatatctcaagcattgtgtatttttgatagctcttatatttttctgattataaaattcatatgtatttatytgtaagaaacatacaaaaaaacaaaaaggtagtgaaattatcttttaattctacttgtatcttattgtatattctttccattttaaattatgcatactta

SEQ ID NO: 456383 - DNA, 201 bp, Homo sapiens
tgttttactttatgatttgtcaaaaagtactaatttttttgggggccgtgtatgttaatgtttagaatgttggaaaaaattttaggcattactatagtggtgtctgtatacaatatacaatatttgggtttcaataaaatatgaaaaattgggaaaatagaagatgtatcttatagatgtgtaagaaaaatgtacattata

SEQ ID NO: 456384 - DNA, 201 bp, Homo sapiens
tttatttatttatttatttatttatttatttttgagatggagtttcactctgttgcccaggctggagtgcagtggtgcaatctcagctcactgcaagctcygcctcctgggttcatgcaattctcctgcctcaacctcccgagtagctgggactacaggcacccaccaccatgcctggctaatttttgtatttttagtaca

SEQ ID NO: 456385 - DNA, 201 bp, Homo sapiens
tttttttttttcttttgagatggggtcttgttctgtcgcctaggcaggagtgcattggtgcagtctcggctcactgcaacctctgcctcccgggttcaagygattctcctgccttagcctcctgagtagctgggattacaggcatgtgccaccacgcctggctagtttttgtatttttagtagagacagggtttcaccatg

SEQ ID NO: 456386 - DNA, 201 bp, Homo sapiens
aaaagcagcatttttttctgacctggagaatcaaggcaacagactttgggcaaccacaactgctaagaggtgaggaggtaatcttgggaaggaaaaagccmcagaaagggaaccccaacttctatattacaaatctctgactgatccccaaaccatccacgaacaggattgatctcaagtagcccaagtaaggttaaaaga

SEQ ID NO: 456387 - DNA, 201 bp, Homo sapiens
gtggtttggtaattttctgtagtggtaacatttgaattctttctcttatttatgtgtttgctctaccagttttatactttcatgttttttttttttcatgrtggtagatgttgtcttatcacttccaggggtagaactccataagcatttcttgtagagcttgtcctgtggtgatgaattccctcagtttttgcttatcta

SEQ ID NO: 456388 - DNA, 201 bp, Homo sapiens
atcccagcactttgggaagccaaagcaagaggaatgcttgcagataggagttcaagaccagcctgggcaatatagcaagaccccatctctacaaaaaattwaaaaaagtagctgggtgtggtgacatgtgcctgtagtcttagctactggagaagctgaggcaggcagatcgttttagcccaggggttcagggctacagtg

SEQ ID NO: 456389 - DNA, 201 bp, Homo sapiens
aaaaggagttctacagtttttcccccctgatttatgtaaagtttatttatttcaactcagtgccttctaagtacaactttaggaattttaggaaatgtgtscctacttggtaaaaaccaatgagaacaattttgctttctctcggtaaagattaatatagatgtgtatgaaaataatcatctatgtattacactctgatat

SEQ ID NO: 456390 - DNA, 201 bp, Homo sapiens
gctattagtttgacgggggtgcttttctaagttactgggcacttttctcttgctgttttaattctctctttaacttttgacagtttgactataatgtaccrtggagaagacctttttaacttgcatctctctggggatctctgagcttctcatatctggatgtctaattctcttgctagatgtggggagtttttagctatg

SEQ ID NO: 456391 - DNA, 201 bp, Homo sapiens
ccagtaacgggatggctgggtcaaatggtatttctagttctagatccctgaggaatcgccacactgacttccacaatggttgaactagtttacagtcccamcaacagtgtaaaagtgtttctatttctgcacatcctctccagcacctgttgtttcctgacttttcaatgattgccattctaactggtgtaagatggtatc

SEQ ID NO: 456392 - DNA, 201 bp, Homo sapiens
tgcatttggtgttttagacacgaagttcttgcccatgcctatgtcctgaatggtattgcctaggttttcttctagggtttttatggttttaggtctaacatttaagtctttaatccatcttgaattaatttttatataaggtgtaaggaagggatccagtttaagctttctacatatggctagccagttttcccagcacca

SEQ ID NO: 456393 - DNA, 201 bp, Homo sapiens
ttctcccatgaagttttagcattcttttcttggagctctaaaagatttcaggtctatttatagaaatgagagacatattttagcctgttttacatcctaamatgcatttaatcctagtatatggacttgctctgaatttgttattattacaaataaattgggcttttatctttgactactatactatatgctctcaactca

SEQ ID NO: 456394 - DNA, 201 bp, Homo sapiens
tctcataaaacatctaggcctagaattttctttggagatttctttttaacattttctacttttcttttaagtcagttttgccataaaatagttttcctaawtaatttttaaagagaagaaaactcttacagaattgtatatctcatgagattttcaaatctcattgacttcatatacatattttatttttagttcttccat

SEQ ID NO: 456395 - DNA, 201 bp, Homo sapiens
tatagaacctaaatactatcattatagttcactgttaaagactggaagcattactccctgttactttattagggttttactaaaagaagtaaaattaggarctgcatacatcaaatagtacaagcatattatggttgggtttggtgcaaatactgaattaaaatgcaaatttattacaacactgctactaagtgccactga

SEQ ID NO: 456396 - DNA, 201 bp, Homo sapiens
ctttgaatgaatcttttactccatgcatgattttgtaacattgtgtataactcttttccttatgttgacacatttcattatgtaatatcagaaaattgcaytcattaatatcaccaccaatctcatcagaaaagtctttaaaagtatttggaaactgtcatgctcttgatggcagatagaagttttccaaaactgtcattt

SEQ ID NO: 456397 - DNA, 201 bp, Homo sapiens
aggattatttcatattattctggctttctaggataatgtgatctacaacgcaacagtgaatcatctctggctattagacagttgacagggtgcctagatawgtcatgagagtaattatagaatataagctttggaaactggatgctggctagacttctgggattcttacattgttagcatagtggcatatgtatttctgtg

SEQ ID NO: 456398 - DNA, 201 bp, Homo sapiens
taatgtgatctacaacgcaacagtgaatcatctctggctattagacagttgacagggtgcctagataagtcatgagagtaattatagaatataagctttgraaactggatgctggctagacttctgggattcttacattgttagcatagtggcatatgtatttctgtgtttactgcaaaaacttatgaatcatgaatagaa

SEQ ID NO: 456399 - DNA, 201 bp, Homo sapiens
aaaagttctaggctgggcgcgatggctcacgcctgtaatcccagcactttgggaggccgaggtcagctgatcatgagatcaggagttcgaggccagccggwtcaacatggtaaaaccccgtatctactaaaaatacaaaaattagctgggtgtggtggtgtgtgcctgtcatcccggctactcaggaggctgaggcaggag

SEQ ID NO: 456400 - DNA, 201 bp, Homo sapiens
cttttctaccacatggccaggctgcaaatttttcaaacttttccactttgcttccattttaaatataaattccagtttcagattatgtctttgctcatgartataaacatatgccgttggaagcagccaggccacatcttgaatgctttgctgcttagaattttcttctgccagataccctaagtcatctctctcaagttc

SEQ ID NO: 456401 - DNA, 201 bp, Homo sapiens
tcaaacttttccactttgcttccattttaaatataaattccagtttcagattatgtctttgctcatgagtataaacatatgccgttggaagcagccaggcyacatcttgaatgctttgctgcttagaattttcttctgccagataccctaagtcatctctctcaagttcaaagttcaggcaggggcaaaatgccaccagtc

SEQ ID NO: 456402 - DNA, 201 bp, Homo sapiens
aggagttgccacatcacaaagtatacatcagtatatcgccctggtatagggtgcatgaaaacaagtaagaactatgttcattcattcatttatttattcawtcatgcattaatataacatattttactaattgaaatcctatgtgccaagtactttattgaatcctaggaatacagcagtgaataagacccatcccttgcc

SEQ ID NO: 456403 - DNA, 201 bp, Homo sapiens
aaaacaagtaagaactatgttcattcattcatttatttattcattcatgcattaatataacatattttactaattgaaatcctatgtgccaagtactttaytgaatcctaggaatacagcagtgaataagacccatcccttgccctatcttcagggagctttcaatctagtatgttactagagtcagctctttggaaatta

SEQ ID NO: 456404 - DNA, 201 bp, Homo sapiens
ccaaataatctttgcttaatgaatattttattatctattatgtgaaaaatcctgaggatacaagaataagtacagcataatcattaactttaggtatctcrtattcctgagaggagtggaaaggagggagatagtcacataaacaataattactatggggcatgtctcctgaaagcaagaggactgagtgcagcctgggga

SEQ ID NO: 456405 - DNA, 201 bp, Homo sapiens
tgtgtgcattctgtgaaaaaattattaggaatatagtaagtatattcattaaaatgtaaagttttaagtgcaagcgtttcaagagcaccaagaattcttckttaattggggctttaagctgctggaaaccagcagaacacagagaagcctatctgcttaggccttctacacaacttttgaacaacaatcaggaaagagcag

SEQ ID NO: 456406 - DNA, 201 bp, Homo sapiens
gagttacttcacttagaataataatctccaattccaaccaggttgctgtgaatgccattatttcattcccttttatggctgagtagtattccatggtgtayatatatatataccacattttctttatccatgcgtagattgatgagcatttgggctgtttccatatttttgcaactgcaaattgtgctgctgtaaacatgc

SEQ ID NO: 456407 - DNA, 201 bp, Homo sapiens
acagttcactcccagctgatcacccctgtcattgtctcccaagccaatttaagatgctcagtggccacacacagagtttctggtagtttatttaagcagayacacagggaggaaaaataaaaactaaccttaagaaatccccataagctttccagcttctctgggtggtgcttctgactctaatcacaatagtctgctttt

SEQ ID NO: 456408 - DNA, 201 bp, Homo sapiens
aatgtgaagattagacaggtagttgtaaagtgactgacaagatagattcttggtaaatagttttccagtaggaataggaacaagagaatttggatatgtgccaccaatagggacctggaactgtcattacctcttgtatcacaaattatctcatgggaaacgattaaacatgtataatattgcaaggaagccccagaaatt

SEQ ID NO: 456409 - DNA, 201 bp, Homo sapiens
atgtgaagattagacaggtagttgtaaagtgactgacaagatagattcttggtaaatagttttccagtaggaataggaacaagagaatttggatatgtgccaccaatagggacctggaactgtcattacctcttgtatcacaaattatctcatgggaaacgattaaacatgtataatattgcaaggaagccccagaaattg

SEQ ID NO: 456410 - DNA, 201 bp, Homo sapiens
tgaggctggagaatcgcttgaacccaggatgcagaggttgcagtgagccgagatcacgccactgcactccagcctgggcgacaagagtgaaactccatctaaaaaaaaaaaaaaaaaaaaaaaaaagtagaagtcttttcagatacaaattaaactaaatgaattaagttatatgggatcctcattccctcattcatgttt

SEQ ID NO: 456411 - DNA, 201 bp, Homo sapiens
tgtgaagattagacaggtagttgtaaagtgactgacaagatagattcttggtaaatagttttccagtaggaataggaacaagagaatttggatatgtgccaccaatagggacctggaactgtcattacctcttgtatcacaaattatctcatgggaaacgattaaacatgtataatattgcaaggaagccccagaaattgg

SEQ ID NO: 456412 - DNA, 201 bp, Homo sapiens
gcatttggtgttttagacacgaagttcttgcccatgcctatgtcctgaatggtattgcctaggttttcttctagggtttttatggttttaggtctaacatttaagtctttaatccatcttgaattaatttttatataaggtgtaaggaagggatccagtttaagctttctacatatggctagccagttttcccagcaccat

SEQ ID NO: 456413 - DNA, 201 bp, Homo sapiens
aaatgcatgggatcataattaatctccatctccatgctatttataggcccaggaatgctctgtgcctagcaccctaggtactaggatgtgctctgggtatwtctttagtttagagtctgttcttaaccaaagtctcaagggatagctatgtcgcattaggaactggcccatagtactagacctcctacatacttagtattt

SEQ ID NO: 456414 - DNA, 201 bp, Homo sapiens
gtcctgaatggtattgcctaggttttcttctagggtttttatggttttaggtctaacatttaagtctttaatccatcttgaattaatttttatataaggtrtaaggaagggatccagtttaagctttctacatatggctagccagttttcccagcaccatttattaaatagggaatcctttccccatttcctatttttgtc

SEQ ID NO: 456415 - DNA, 201 bp, Homo sapiens
aatgattcaatatcatgaaaatggtttggccagggaatagagtaaggtagaaaaacccaagtattaaatgaaaggaggaactccacatccattttgttcgrtcgacatcaccagtgttagttttctttcaagttaatgtgcgactatttttatacatgttttaataatattcttaaatatctctccatgaaagaggggaga

SEQ ID NO: 456416 - DNA, 201 bp, Homo sapiens
ggaggattccctctttttctattgattggaatagtttcagaaggaatggtaccagttcctccttgtacctctagtagaattcggctgtgactccgtctggycctggactttttttggttggtaagctattaattattgcctcaatttcagagcctgttattggtctattcagagattcaacttcttcctggtttagtgttg

SEQ ID NO: 456417 - DNA, 201 bp, Homo sapiens
atccattttgttcgatcgacatcaccagtgttagttttctttcaagttaatgtgcgactatttttatacatgttttaataatattcttaaatatctctccrtgaaagaggggagatttaaaatgagatatttttcatagctttaaaatatgttttttcatataatagtaatgagagacttgtgttcttatgcttaaagcaa

SEQ ID NO: 456418 - DNA, 201 bp, Homo sapiens
gaggtgttgatagtattctctgatggtagtttgtatttctgtgggatcggtggtgatattccttttatcgttttttattgcgtctatttgattcttctctmttttcttctttattagtcttgctaacagtttatcaatttcgttgatcttttcaaaaaaccagctcctggattcattgattttttgaagggttgtttggtg

SEQ ID NO: 456419 - DNA, 201 bp, Homo sapiens
gttacttataggagtgtgattgtaaaagaaatcttctgtacatctttatgactgttaagacatttttaatattggctcataatcatcctttttaaatgaarattttactttattttttattttagaagtacattgagatatacctctgaccatattataaataggtaggtttttactactttgatattcatcgacagcaat

SEQ ID NO: 456420 - DNA, 201 bp, Homo sapiens
cttgtgggcatttagtgctataaatttccctctacacactgctttgaatgtgtcccagagattctggtatgttgtgtctttgttctcgttggtttcaaagracatctttatttcaaccttcgtttcgttatgtacccagtagtcattcaggagcaggttgttcagtttccatgtggttgagtggttttgagtgagtttctt

SEQ ID NO: 456421 - DNA, 201 bp, Homo sapiens
tgatttccctttctctttgacttccagttgggttcaaccaatgtgagacactgtggagaacaggagaagagtggcatcagtgtcttctccctggtcttagmtcttttcttgccagattgctatagactggttgtaacctttcatgaccctcttcatacaactacattctccagattccaggaaccattctctcaccttacc

SEQ ID NO: 456422 - DNA, 201 bp, Homo sapiens
ccctctacacactgctttgaatgtgtcccagagattctggtatgttgtgtctttgttctcgttggtttcaaagaacatctttatttcaaccttcgtttcgktatgtacccagtagtcattcaggagcaggttgttcagtttccatgtggttgagtggttttgagtgagtttcttaatcctgagttctagtttgattgcact

SEQ ID NO: 456423 - DNA, 201 bp, Homo sapiens
tgaggcaggagaatcacttgaacccaggaggtggaggctgcagtgagccgagatcacaccactgcactccagcctgggtaacagagtgagactccatctcaaaaaaaaaaaaaaaaaaaaagaagaagaagaagaagacagaggaccagtcaaatcagtctgttggggaagccaaatttctaccatttgagagtccaagtc

SEQ ID NO: 456424 - DNA, 201 bp, Homo sapiens
gagttctagtttgattgcactgtggtctgagagacagtttgttataatttctgttcttttacatttgctgcggagtgctttacttccaactatgtggtcarttttggaataggtgtgagtggtgctgaaaagcatgtatattctgttgatttggggtggagagttctgtagatgtctattaagtctgcttggtgcagagct

SEQ ID NO: 456425 - DNA, 201 bp, Homo sapiens
gaggcaggagaatcacttgaacccaggaggtggaggctgcagtgagccgagatcacaccactgcactccagcctgggtaacagagtgagactccatctcaaaaaaaaaaaaaaaaaaaaagaagaagaagaagaagacagaggaccagtcaaatcagtctgttggggaagccaaatttctaccatttgagagtccaagtcc

SEQ ID NO: 456426 - DNA, 201 bp, Homo sapiens
cggttgttcctttccatgtttagtgcttccttcaggagctcttttagggcaggcctggtggtgacaaaatctctcagcatttgcttctctgtaaattctcyttcacttatgaagcttagtttggctggatatgaaattgtaggttgaaaattcttttcttcaagaatgttgaatattggcccccactgtcttctggcttgt

SEQ ID NO: 456427 - DNA, 201 bp, Homo sapiens
gcccccactgtcttctggcttgtagagtttctgccaagagatcagctgttagtctgatgggcttccctttgtgggtaacccgacctttctctctggcttcscttaatattttttccttcatttcaactttggtgaatctgacagttatgtgtcttggagttgctcttctcgaggagtatctttgtggcattctctgtattt

SEQ ID NO: 456428 - DNA, 201 bp, Homo sapiens
tgtgggtaacccgacctttctctctggcttcccttaatattttttccttcatttcaactttggtgaatctgacagttatgtgtcttggagttgctcttctsgaggagtatctttgtggcattctctgtatttcctgaatgtgaatgttggcctgccttgctagattggagaagttctcctggataatatcctgcagagtgt

SEQ ID NO: 456429 - DNA, 201 bp, Homo sapiens
atctccttatagagaaatagagtttagacaatcaacactgacagtataggagcagcgggtaatggttattttagcagttgagtcactctaagggatcagasaggtccaagaatgtaagttaggagaatgaagaacataaaggcagttacccaagcacctgtgcattagataacaagtgtcaaaaagtaagctctgttaaaa

SEQ ID NO: 456430 - DNA, 201 bp, Homo sapiens
aaacagcttgacttttaattaacaggtttggaaaacaccttgggccgttttccaaagcattcataattagctgtgtcttagttgtgaagttttgtgtttgmtttctttgttatgtccacatggaaagctcatcaatgttatcaggagctgtgtaaatagagcatataaaaagtatacccctttatattgtacatgaatttt

SEQ ID NO: 456431 - DNA, 201 bp, Homo sapiens
tatagactaatgtttatggctagatagaaggaaaaattttctagactattctaaacctgtgttgcccaatactgaagctattagccacatgtggctacttratcaattcaaatcaaattaactaaaattaacatcagttcctcagtaacattggctgcattttaaggcttacttaacataccttgttatggctatcatatt

SEQ ID NO: 456432 - DNA, 201 bp, Homo sapiens
caaattttgttctaccatttacaatttatttatcctctctgaatctatttccttaagtgttaaatgagaatattaatgccttcttcctaggatattgtgarggttgaggagatgatgtgcataacacacttagtaccttgtttggttcataataagtgcttggttgtcatttttctatgaaagtctgattacagtacaaaa

SEQ ID NO: 456433 - DNA, 201 bp, Homo sapiens
tttctaattttaaaaatggggatggtgatataatttattccatgggttgttagaaaggttaagtttgaagctactgtatatatatttaatatatatatatacacacacacatatacatacatacatacatatatatatacatataagtgggtagaacagttctggataacggtgttaggataaattgacaatagttatatg

SEQ ID NO: 456434 - DNA, 201 bp, Homo sapiens
aggactctagttatgcatatattagaccacttgatattgtctcacagcttactgatgctctgttcattttttttacattttctgtctgcatttcattttakatagtttctactgctatgtcaacaagattactaattttttctgcaatatttaattggacatttgatttattcagtatgtttttcatttcagacattttgg

SEQ ID NO: 456435 - DNA, 201 bp, Homo sapiens
ctattggacagtgttcttctatattataatagccataaaaggctaagtcttttggggagttctaatgctatcaaaatgtagaatctacaggtatatataayaagacgtttctatgataccatactttaaagaagccaagaaataatattatgtcaaatttagtgagctttctgaaaacaagattttgatggaagaattcta

SEQ ID NO: 456436 - DNA, 201 bp, Homo sapiens
ttctaattttaaaaatggggatggtgatataatttattccatgggttgttagaaaggttaagtttgaagctactgtatatatatttaatatatatatatacacacacacatatacatacatacatacatatatatatacatataagtgggtagaacagttctggataacggtgttaggataaattgacaatagttatatga

SEQ ID NO: 456437 - DNA, 201 bp, Homo sapiens
atacagggaaagacagggtgcggcagacagagagatttagacatgctaaggaaaatactaaagaagaagaaaaatattagatttatcctttcaaagtaaawaaaactctaagagaaaaagagagaactatttgcatttataattttgtatctagtattttccctgatatactaaacccatgccagctaagctttctgggca

SEQ ID NO: 456438 - DNA, 201 bp, Homo sapiens
tctaattttaaaaatggggatggtgatataatttattccatgggttgttagaaaggttaagtttgaagctactgtatatatatttaatatatatatatacacacacacatatacatacatacatacatatatatatacatataagtgggtagaacagttctggataacggtgttaggataaattgacaatagttatatgat

SEQ ID NO: 456439 - DNA, 201 bp, Homo sapiens
gagtgcttatgatggccctaaacatcctatcaagatacatatggttggttcccttttacctctttaatttcatcttctattaatctcccctttgctttttwaatttttttatttttatgtgtttacctactgattcttcccaaagaggcaccacattaggacttttgcatctgttttttattcttagaattctctactcct

SEQ ID NO: 456440 - DNA, 201 bp, Homo sapiens
ctaattttaaaaatggggatggtgatataatttattccatgggttgttagaaaggttaagtttgaagctactgtatatatatttaatatatatatatacacacacacatatacatacatacatacatatatatatacatataagtgggtagaacagttctggataacggtgttaggataaattgacaatagttatatgatc

SEQ ID NO: 456441 - DNA, 201 bp, Homo sapiens
tcacaactccccacccctaaacaaccactaatctactttctatctctgtagatttgcctattctggacatttcatatgaatggaattatatatgtggtctkttgtgactggcttctttaacttagcacaatgttttccaggctcatccatgttgtagcatgtatcagtacctcgttcctttttattgccacatgatattac

SEQ ID NO: 456442 - DNA, 201 bp, Homo sapiens
ctgaggcaggagaatggcgtgaacccggcaggcggagcttgcagtgagccgagatcacgccactgcactacagcctgggtgacagagtgagaccctgtctaaaaaaaaaaaaaaaaaaaaaaaaaagcaaaaaccgaaaagaaaataaaaattgaaagaatatagcagctgaacaaagtttaaataacttggaaaacagca

SEQ ID NO: 456443 - DNA, 201 bp, Homo sapiens
aactaatttacattcccaccaagagtgtaaaagcattcctatttccccacagccttgccagcatctattgtttcttgactttttaataatcgctattctgwctggcgtgagatggtatctcattgtggttttgatttgtatttctctaatgatcagtgacgttgagctttttttcatatgttgttggccacataaatgtct

SEQ ID NO: 456444 - DNA, 201 bp, Homo sapiens
ggatctaccacaagataattggcctcgacattggttagaggacctcatttttggcataagatccagaactcctgttgcagtaaattattctgtggtgggascagtaacaatgtgtattttcttgcttaaatcagaaactagacatgcttttgatatcttcaagtctgatttcatgtcattttgtttaaaaattaggtaata

SEQ ID NO: 456445 - DNA, 201 bp, Homo sapiens
aaaaattaggtaatagatttctggtataaatttcaacttggctgactggctgtctgcattcaaaagaggcccctcataaccacagtagtcaggataagtgsggatgcagatgactgtagattccagcatacccagacctagaagcacagcagggtggcaaatccagagggccatttgaggcacagacctgaagcagctgga

SEQ ID NO: 456446 - DNA, 201 bp, Homo sapiens
taggtaatagatttctggtataaatttcaacttggctgactggctgtctgcattcaaaagaggcccctcataaccacagtagtcaggataagtggggatgmagatgactgtagattccagcatacccagacctagaagcacagcagggtggcaaatccagagggccatttgaggcacagacctgaagcagctggactcaga

SEQ ID NO: 456447 - DNA, 201 bp, Homo sapiens
gttttctattcactttcaaaacttttattgagcacttacttatgaacaacgtattctgctaagggctaaggatacaaatcaaatagaaaagggccttttaygtcaaagaattttgtaggctggagaggaagatgagacagatacataaacaattatagtacaatatgatatactgcactaaacgtctatataaagtgctat

SEQ ID NO: 456448 - DNA, 201 bp, Homo sapiens
ggttgaagttatgattatatataagactgttagaatggccagctgtgaagcaatttgaaatatctagagggaacagcctgcacctctcccacaatagtacytaacagtgctccaacacttccaagtttctgtggtggggaaagaatgggagagaatagacagtcgagggtctatacttggcatagagaagttaaccaaaaa

SEQ ID NO: 456449 - DNA, 201 bp, Homo sapiens
attgtatgataattttaatcaacacagcttttaagcacatactatgtaccagatgagatatatgtatgcatgtgaaatatatatgtgtgaaatgatagaatcaggtgaatggatatgtagagacaatgttcttaaggagttcgagctttccttttccgtctttgttctttatggtcctttccttttctgatatgcaagcac

SEQ ID NO: 456450 - DNA, 201 bp, Homo sapiens
acccaggaggtggaggctgcagtgagccgagatcacaccactgcactccagcctgggtaacagagtgagactccatctcaaaaaaaaaaaaaaaaaaaaagaagaagaagaagaagacagaggaccagtcaaatcagtctgttggggaagccaaatttctaccatttgagagtccaagtccagaggtccagtggaatgaaa

SEQ ID NO: 456451 - DNA, 201 bp, Homo sapiens
agagcaagaggggagagtgagtgagaattttaccagtgacaatactttctcttggcaggaacagtgaggaaccctagctttcattccactgctgtaattactctctggtgttcctgtaccctcaatggcctccagtcattgtcccagatctttaaatgtcttaggatagtccctttctaaattctgccctcctttccctta

SEQ ID NO: 456452 - DNA, 201 bp, Homo sapiens
gcttggtagatcttcctccatccctttattttgagcctatgtgtgtctctgcacgtgaaatgggtctcctgaatacagcacgctgatgggtcttgactctwtatccaatttgccaatctgtgtcttttaattggagcttttagcccatttacatttaaggttaatattcttatgtgtgaatttgatcctgtcattatgatg

SEQ ID NO: 456453 - DNA, 201 bp, Homo sapiens
gagcaagaggggagagtgagtgagaattttaccagtgacaatactttctcttggcaggaacagtgaggaaccctagctttcattccactgctgtaattactctctggtgttcctgtaccctcaatggcctccagtcattgtcccagatctttaaatgtcttaggatagtccctttctaaattctgccctcctttcccttat

SEQ ID NO: 456454 - DNA, 201 bp, Homo sapiens
atatgtagagacaatgttcttaaggagttcgagctttccttttccgtctttgttctttatggtcctttccttttctgatatgcaagcacttttgtttctctttgcctctctgtcaaagcaaagagagttttaaaagaaattttgagttgaacgtaagctgcttcctttcagaagagttagtacagctctctgaacatggac

SEQ ID NO: 456455 - DNA, 201 bp, Homo sapiens
ctggcttcccttaatattttttccttcatttcaactttggtgaatctgacagttatgtgtcttggagttgctcttctcgaggagtatctttgtggcattcwctgtatttcctgaatgtgaatgttggcctgccttgctagattggagaagttctcctggataatatcctgcagagtgttttccaacttggttcccttctcc

SEQ ID NO: 456456 - DNA, 201 bp, Homo sapiens
ggtttccattactactttaaataaacttgacataatatttggattaggggaacagctactagagcctattagctactaaaataattcttatgtctaagacwatatatatatatatacaagactatatatatgactttatacataatcttaaacataagacatatatatctgatatatatatatatatatcaaattcattgt

SEQ ID NO: 456457 - DNA, 201 bp, Homo sapiens
tatgtagagacaatgttcttaaggagttcgagctttccttttccgtctttgttctttatggtcctttccttttctgatatgcaagcacttttgtttctctttgcctctctgtcaaagcaaagagagttttaaaagaaattttgagttgaacgtaagctgcttcctttcagaagagttagtacagctctctgaacatggact

SEQ ID NO: 456458 - DNA, 201 bp, Homo sapiens
agaagaacagtgagaccatatctggaaccgtgtgtttataagttaacggcatagtaccagacttataaagatctctatgactagaagtatcacaggtataycctgtgtggccattttcacagtggctgcctctgcaatgaagtgtctgacttgtcattccttgcacatgaatgttgaaaattctatgttctggttctgaga

SEQ ID NO: 456459 - DNA, 201 bp, Homo sapiens
aatgttggcctgccttgctagattggagaagttctcctggataatatcctgcagagtgttttccaacttggttcccttctccccgtcactttcaggtacaygaatcagacgtagatttggtcttttcacatagtcccatatttcttggaggctttgttcatttgtttttattcttttttctctaaacttctcttctcgctt

SEQ ID NO: 456460 - DNA, 201 bp, Homo sapiens
caaaaagcatacaagattgggataattttaaagaactttctggaactttggtcttaaagactggatgggatttggatattcagggagaagggaagggcaayatgagagtaaatattaaagtgaagatgtgataacgagcttggagtgtatagcctatgaaaagatgtcctatggtagagtttttattagtgaataagggaa

SEQ ID NO: 456461 - DNA, 201 bp, Homo sapiens
acacgaatcagacgtagatttggtcttttcacatagtcccatatttcttggaggctttgttcatttgtttttattcttttttctctaaacttctcttctcrcttcatttcattcatttcatcttccatcactgattccctttcttccagttgatcaaatcggctacttaggcttgtgcattcgtcacgtagttctcatgcc

SEQ ID NO: 456462 - DNA, 201 bp, Homo sapiens
gaggttttgattgaaaaacctgtagactcatttgccaagttgggaatttgaacatagagatagagtggcctgggaaataatttctaaagaaaaagaaaactttttttttttttctgacaatcagtctgacccacactccacagttaagcaaagagggtagttcaaggaccacctacagaaaagaaggagcgatagtcttaa

SEQ ID NO: 456463 - DNA, 201 bp, Homo sapiens
cttttcacatagtcccatatttcttggaggctttgttcatttgtttttattcttttttctctaaacttctcttctcgcttcatttcattcatttcatcttscatcactgattccctttcttccagttgatcaaatcggctacttaggcttgtgcattcgtcacgtagttctcatgccgtggttttcagctctgtcaggtcc

SEQ ID NO: 456464 - DNA, 201 bp, Homo sapiens
cggagtgctttacttccaactatgtggtcaattgtggaataagtgtggtgtggtgctgagaagaatattattctgttgatttggggtggagagttctgtakatgtctattaggtccgcctggtgcagagctgagttcaattcctggatatccttgttaactttctgtctcattggtctgtctaatgttgacagtggggtgt

SEQ ID NO: 456465 - DNA, 201 bp, Homo sapiens
cgcttcatttcattcatttcatcttccatcactgattccctttcttccagttgatcaaatcggctacttaggcttgtgcattcgtcacgtagttctcatgycgtggttttcagctctgtcaggtcctttaaggacttctgtgcattggttattctagttagccattcatctaattttttttcaaggtttttaacttctttg

SEQ ID NO: 456466 - DNA, 201 bp, Homo sapiens
ctttttttgttttccatttgcttggtagatcttcctccatccctttattttgagcctatgtgtgtctctgcacgtgaaatgggtctcctgaatacagcacrctgatgggtcttgactctatatccaatttgccaatctgtgtcttttaattggagcttttagcccatttacatttaaggttaatattcttatgtgtgaatt

SEQ ID NO: 456467 - DNA, 201 bp, Homo sapiens
ccttccttgccttaggtatttcctattacttccctattgaatttcagtgttctctcttaagtgatcgatttgaagggtgattattgacttcctattttggttcttctttgtgtaggaggcctaccagatgcctctagtcagcaatcttgaagcctctttgtttgtttttccttaacacaaatggtactttattatacatat

SEQ ID NO: 456468 - DNA, 201 bp, Homo sapiens
tgatgtatttatgaataaatgaaaaaataaaagagaagagaaagctcttccttaatgtgccaactaataaatatacaagacattacagaaagaaagtcacrtggcaaccatcatagtaataatgaattctgacaagaaacatgaagggatgctaaaactattgggtgagagctggataaagaacgatacattcacatagtc

SEQ ID NO: 456469 - DNA, 201 bp, Homo sapiens
cttccttgccttaggtatttcctattacttccctattgaatttcagtgttctctcttaagtgatcgatttgaagggtgattattgacttcctattttggttcttctttgtgtaggaggcctaccagatgcctctagtcagcaatcttgaagcctctttgtttgtttttccttaacacaaatggtactttattatacatatt

SEQ ID NO: 456470 - DNA, 201 bp, Homo sapiens
cattaacagtgatgggataaattgatgtatattacctgatgggatatattgagaagagcacagcatcgcttctggtgatatgtctgacaaaaatgtattamctgaatctaatcataaggaaacattaggaaaaaagtttaggtacagtctacaaaataactgtcttgaaatctccaaaaccaacccaaatgtccaaaaatg

SEQ ID NO: 456471 - DNA, 201 bp, Homo sapiens
ttccttgccttaggtatttcctattacttccctattgaatttcagtgttctctcttaagtgatcgatttgaagggtgattattgacttcctattttggttcttctttgtgtaggaggcctaccagatgcctctagtcagcaatcttgaagcctctttgtttgtttttccttaacacaaatggtactttattatacatattt

SEQ ID NO: 456472 - DNA, 201 bp, Homo sapiens
gaagaagttgtatcataaaatgaatatctgtgtaactaccacccaggttaagaagtagaatgtttatattacccggaagcctttcttcttcctataccaamcactactccccttcctcctccaaagggaaaaaacatcattacctttcttttatgataatcacttcttgcttttctttatagtttcacccccagagcatgc

SEQ ID NO: 456473 - DNA, 201 bp, Homo sapiens
agtttatcttgatatctgatagatcaagtctattctttgtgctcaagattttcttgtcttttcttagatgtttggattttcatatgaatttcaaaatgaasttactatattaggcacacacacacagacacacgcacaccacacacacacacacacacacagactgttggaattcagattggaattgcactgaatctccag

SEQ ID NO: 456474 - DNA, 201 bp, Homo sapiens
gatgaggtttcaccatgttgctaggttggtctcaaactcctgaccttgtgatccacctgccttagcctcccaaagtgctgggattacaggatctttttttwaaaaaaatgatttgtagttttctacaaatctgtatataaattctatacaattctgtatatgaactgttgtttacatgtattgcagatatcttcttccatt

SEQ ID NO: 456475 - DNA, 201 bp, Homo sapiens
gtactggggatgttttatagcttggtctgggtggtgattatatgggagaatacgtatataaaaactcatcaagtaccttgatggactgaatttaggattaktgcatttcactgtttttatattctatatattaataaaattttaattaataaaataagtagagcatttaaaagaagagaaaaatatcttttgaattctaaa

SEQ ID NO: 456476 - DNA, 201 bp, Homo sapiens
agagagtatgcttacttttttctgtccttgtctgttcttctaattgtatgataattttaatcaacacagcttttaagcacatactatgtaccagatgagakatatgtatgcatgtgaaatatatatgtgtgaaatgatagaatcaggtgaatggatatgtagagacaatgttcttaaggagttcgagctttccttttccgt

SEQ ID NO: 456477 - DNA, 201 bp, Homo sapiens
ctttattacgttcttttgatgtgtttgtcaatccttgcacccatacaaccctgacttaattatatttactttataataagttttgttattttgtagaatargtcctgccaccttattcttatttttcaagtgtcttgatacttcttggccctttgcatttccatataaatttagaattaacttgttgagttccacacacat

SEQ ID NO: 456478 - DNA, 201 bp, Homo sapiens
ataatagttttgtttgagattaagtaaataaataatatgttaaaatgcatatcttctcagtattttagttttccttttgctacagtaatagtaaatacaattttttttgattataagcaaagtataccatgacacatttattttaaacaatataatactgacactgtaagttcagaagtaactggaacaaagaagaaacat

SEQ ID NO: 456479 - DNA, 201 bp, Homo sapiens
tgtgcatttaaataaaaggcttctgggaaatacgttcccagagaatgtaaggagaattagttggacatttaaaatacatagttttctttttaaatacaagttttttttttcattgaaaaacctaagcaagtagacattgctaccaaatttacctgtattaagtttaaatatgttaatgcttttcccagtcaacaaatattt

SEQ ID NO: 456480 - DNA, 201 bp, Homo sapiens
gcagctatgttaaaatctcaatcatgtggatatatcttatttttctttgtcagctttggtttatgttattggttttatgtaattttaggattgttggaatkttcctgttattattatgtgatacttttctttattgatgcttcttgacttagaatattaattatctgatattaatacatctacatcagcttttttggagtt

SEQ ID NO: 456481 - DNA, 201 bp, Homo sapiens
gttagccaggatggtctcgaacttctgacctcaggtgatcattttaatagtctcatttatgcaaggtggtacattgctatatccaagaaacaaaatgtatsacttacatatttttctgatttttggtgaaactattcagttaaagggatggtcttcttataatttttgataattcttatatttaaaataatttctcacaca

SEQ ID NO: 456482 - DNA, 201 bp, Homo sapiens
acctgtaatccttatactttgggagaccaaggcgggtggatagtttgaggtcaggagttagagacctgcctgggcaacatagcaagtttctgtctctatgaaaaaaaaaaattagccaggtgtggtgatgtgtacatgtagtcctagctcctagggaggctgaggtggaggttcttttgagcccaggagtttgagattaca

SEQ ID NO: 456483 - DNA, 201 bp, Homo sapiens
ccaccactgaactccagcctgggtgacgaagtgagaccttgtctcttaaaaaaaagttacactatactgtggtctattaagtgtgcaattgcattatgtcaaaaaaaaaaaaaaaaaaaccacacacacacaatgtacataccttaatccaaaaatactatattgctaaaaaatgctaatgatcttgggaggccgaggcgg

SEQ ID NO: 456484 - DNA, 201 bp, Homo sapiens
gttagcaggcatgaaaacaacattaatctccatgtgtatctccatcagagttcttgggtgatctgcattgttaatgagcagtaatattttgaaaggaatctttttttttctgagcagtaggtctcaacagtaggcttaaatattcagtaaaccatgctgtaaacagatatgttttcatccaggctttgttcttccacttat

SEQ ID NO: 456485 - DNA, 201 bp, Homo sapiens
gcctgtaatcccagcactttgggaggccaaggtgggcagatcacctgaggtcgggagttcgagaccagcctgaccaacatggagaaaccccatctctactaaaaaaaaaaaaaaaaaaaaaatgccaggcatggcgttgcatgcctataatcccagctactcaggaggctgagacaggagaatcacttgaatctgggaggt

SEQ ID NO: 456486 - DNA, 201 bp, Homo sapiens
gttagctaatagcagggaaagcaagatcatgcacttctttgggctagtggcaactattatgtaccaatgttactctgcttttaccagttttcttttgggcygacctacttttagtgaaataactgcatagatatcacagataactcctccgttgtctctaattcatttaaagaacatgtaacaatatgtacatggtggtat

SEQ ID NO: 456487 - DNA, 201 bp, Homo sapiens
tcctcctgcttcagcctcccaaaatgctgggattataggcttaagccatggtgcctggcctagtgtgacatttttaatatgagaaaggaagcagatttaayccatcttttattctttaaggcaaagcagtttgagtcattttgttggtgtgagggggtcagcaaagttccatagttaagtgtatttatcatgttcaggaga

SEQ ID NO: 456488 - DNA, 201 bp, Homo sapiens
cctgtaatcccagcactttgggaggccaaggtgggcagatcacctgaggtcgggagttcgagaccagcctgaccaacatggagaaaccccatctctactaaaaaaaaaaaaaaaaaaaaaatgccaggcatggcgttgcatgcctataatcccagctactcaggaggctgagacaggagaatcacttgaatctgggaggtg

SEQ ID NO: 456489 - DNA, 201 bp, Homo sapiens
agatcaagtctattctttgtgctcaagattttcttgtcttttcttagatgtttggattttcatatgaatttcaaaatgaacttactatattaggcacacasacacagacacacgcacaccacacacacacacacacacacagactgttggaattcagattggaattgcactgaatctccagattaatttggggagattgac

SEQ ID NO: 456490 - DNA, 201 bp, Homo sapiens
acttttccatacagcttttcatagagtatatttccatagtgtgctcctggagagtgctcttgctttctaacctaaagtgtctaatgagaactttagaaagraaggaagtgttagcatctggagggttgtgcctgtgaaggaggttgggctggatgaaataggcagggcattgggacacagccatcaattcattgcgtgtgt

SEQ ID NO: 456491 - DNA, 201 bp, Homo sapiens
aaaatacagttattactgtaactattggagaattggagagtagagaataatggcaattagttaaataacttcactcaaataaactttccttccttccttccttccttccttccttccttccttccttccttccttccttccttccttccttccttccttccttccttcctatgatttctttaagaacatgtgaaagtttca

SEQ ID NO: 456492 - DNA, 201 bp, Homo sapiens
tgctcaagattttcttgtcttttcttagatgtttggattttcatatgaatttcaaaatgaacttactatattaggcacacacacacagacacacgcacaccacacacacacacacacacacagactgttggaattcagattggaattgcactgaatctccagattaatttggggagattgacttctttataattttgagtc

SEQ ID NO: 456493 - DNA, 201 bp, Homo sapiens
agaggttttattaagctaatacacttggaacagtacttgatatgttgtaagctctcattaaacattagtgattattattttattatttaatctacacaacmgccctgggaggtagatgtcattattttagttttataggaaaggaacttaaggtttagaaaggaaaaatgacatgcccaagtttacatagccattaaatgg

SEQ ID NO: 456494 - DNA, 201 bp, Homo sapiens
aaatacagttattactgtaactattggagaattggagagtagagaataatggcaattagttaaataacttcactcaaataaactttccttccttccttccttccttccttccttccttccttccttccttccttccttccttccttccttccttccttccttccttcctatgatttctttaagaacatgtgaaagtttcaa

SEQ ID NO: 456495 - DNA, 201 bp, Homo sapiens
gctcaagattttcttgtcttttcttagatgtttggattttcatatgaatttcaaaatgaacttactatattaggcacacacacacagacacacgcacaccacacacacacacacacacacagactgttggaattcagattggaattgcactgaatctccagattaatttggggagattgacttctttataattttgagtct

SEQ ID NO: 456496 - DNA, 201 bp, Homo sapiens
atggcagaaccaaatctaaacctagatatcctgccttgaagttctatggtatttctgccatataaatgcagctctctgtaacatgcaagttaagctaagarattttccccaggtaatctacagaccagataataaggagcttggataatagggataataaggaactgaacatattattatgtggtgttgaatttcagcagg

SEQ ID NO: 456497 - DNA, 201 bp, Homo sapiens
aatacagttattactgtaactattggagaattggagagtagagaataatggcaattagttaaataacttcactcaaataaactttccttccttccttccttccttccttccttccttccttccttccttccttccttccttccttccttccttccttccttccttcctatgatttctttaagaacatgtgaaagtttcaat

SEQ ID NO: 456498 - DNA, 201 bp, Homo sapiens
tttcttagatgtttggattttcatatgaatttcaaaatgaacttactatattaggcacacacacacagacacacgcacaccacacacacacacacacacayagactgttggaattcagattggaattgcactgaatctccagattaatttggggagattgacttctttataattttgagtcttccaatccatgacatagtg

SEQ ID NO: 456499 - DNA, 201 bp, Homo sapiens
tccccaggtaatctacagaccagataataaggagcttggataatagggataataaggaactgaacatattattatgtggtgttgaatttcagcaggtgtgkttattaaggcagtccttgctttgcatggcatggtgttaactgaaagtcttgtacatcataaccctgtcttcactttgtatagctctgatcccaactttac

SEQ ID NO: 456500 - DNA, 201 bp, Homo sapiens
atacagttattactgtaactattggagaattggagagtagagaataatggcaattagttaaataacttcactcaaataaactttccttccttccttccttccttccttccttccttccttccttccttccttccttccttccttccttccttccttccttccttcctatgatttctttaagaacatgtgaaagtttcaatg

SEQ ID NO: 456501 - DNA, 201 bp, Homo sapiens
tctaataatctttaaaattattttctttttttaaatttttattttattattattatactttaagttttagggtacatgtgcacatttaattttgagatggmgtctcgctctgtcacccaggccagagtgcagtggcgcaatcttggttcactgctgcctctgcctcccaggttcaagtgattcttctgcctcagcctcctg

SEQ ID NO: 456502 - DNA, 201 bp, Homo sapiens
actacaaaaatgtgctatcatgtttggctaatttaaaataatttttttgtagagacggaggtctcactgttgttgcccaggctggtctcaaactcctgtgstcaagcaattctcccgcattggcctcccaaagtgctgggattacaggtgtaatcccaacagtttgcagtcttacatttagatggatttttgcttttacat

SEQ ID NO: 456503 - DNA, 201 bp, Homo sapiens
attgctttttaaaaatcagcatgttagcttatccttatagtcatcttcagcgtcaccttgttcattaaagggagatagcaggtgtaggagtatgtgtgtgtgtgtaatgcacatgctgggagtggaggtcaggggttgcaggttatgctccaaaatgacattactgtgcatgtcattagctttgtactctaaaatgacgag

SEQ ID NO: 456504 - DNA, 201 bp, Homo sapiens
aacagtccttttattaatactagtttctgatggaaagttttgtgtttttttttaaacttgcaggggtattaagtataatccatcttactacatgaccatayataatgcccattattcagtaggcactcagtttataattactgagggaattaattaaaaattctgcaaatttccatattcccaattcttttcataatttac

SEQ ID NO: 456505 - DNA, 201 bp, Homo sapiens; identical to SEQ ID NO: 159202

SEQ ID NO: 456506 - DNA, 201 bp, Homo sapiens
taatcaaaattagaaaagagaactcactttctggagctatttttttcttttgctttaaaccaacttttcattgaagtatatttatgcagaaaagtgtgtgwatatatatatatatatatatgtgaagttagctctttattaatgttttaactaaaacatatgactttgaagtcccaatcctgagtttgtaaagggatgctt

SEQ ID NO: 456507 - DNA, 201 bp, Homo sapiens
taaaaaaattggtttaatcctccctagagtgttaagtgctaagtcaatattttgctaattatgcagaaggagcaccagatggtttctgaggatgacactcyatgggtgggagcactgatgactgaaactgtggtaaactttgtagctctgtaatcatcctcatctatagaatacatccatgtgcttttgaaacagaagaac

SEQ ID NO: 456508 - DNA, 201 bp, Homo sapiens
tttgccttcagttagcctgcaagaaggattggttgctctcctctatcacccactccccaatcagtttacccacatggaaaatggagaataaaaattaattrctatgctagaaatgtctctgtaatggactccaaatctaaagcaatgatggtaccaatctccaggatgtacatataacaacaattatgacaatgtagtaag

SEQ ID NO: 456509 - DNA, 201 bp, Homo sapiens
ttctaagccctctagaagaggaaatttatttatgataataataattactattttataccatacaagatacatacacacacacgtgcatgcacacacacaaacacacacacacacacacacacacagtacttccctgtttatctgatggggatgtgtttcaagaccctcagtggatgactgaaaccacagatagtactgaac

SEQ ID NO: 456510 - DNA, 201 bp, Homo sapiens
actgacttatttggtactgatgttgagactattgattttactcacagtactcccagagtcattcccttcttctggaccctgattactcaggcagtggttakaaaagtgcattttcagatacttttgttattttcctttacttatcaccagtgacttgcatttatttacttgagttttttacattcatgatcaagcaggctt

SEQ ID NO: 456511 - DNA, 201 bp, Homo sapiens
ctaacagtttactttactacatggttgggataaaaaaaaacttcaatatttatatactaataacttagtagctctttgaagaaataatacagatatattgaagccaaaagcactactttaattttattcttaaataatcacaattattaatgagatgtgtgtgcttcttgagcactgcacacttttcagacactgcaaaca

SEQ ID NO: 456512 - DNA, 201 bp, Homo sapiens
aagaacaatcctggactagcctgttggaggatgagacatatggagcagagttgaattataccagttgtcccagccaaggccaaccacaagatatgttagtraactcaactaaaaccagagaaatgtccagctgacctacagatgcataagctaaatacatgcttattgttttaagccactaagttttggggtggttaaacc

SEQ ID NO: 456513 - DNA, 201 bp, Homo sapiens
gatgtaatgttgaaaccgtaaactgatttgtgtttgcggttcactaagtgatcaacaaatgtcatgtgttactatttctcttaaaaagttaagatatcccmcagtacttctgtgacttctttatggtgtcttggggtgccttgatacacaatttgggacatatagcccttagtactcttttcttgtctaccttgacaccac

SEQ ID NO: 456514 - DNA, 201 bp, Homo sapiens
taaagatgtaataaactaaaaacaatgtaaagttttagaaaagtgctcaattccctcttctgttaagttatacactttcagtggttttattttctaaccawtttgccaagaaattcatcttaataaaatgatattctaaacattttgaaattctatttaataatcatggttttctgattttatatgagagcacagaatgga

SEQ ID NO: 456515 - DNA, 201 bp, Homo sapiens
tggaagatggtaggttttggttggtttctattgtccttaggcaaatgtctgattcatggaagttgggacaaaaaaagaacatatatacaatctgctgttcygaaataagacattttaaagtgtaatactttgtttagttatgtcttgccatgcttattgctttcctcttgaatgaattctgatgactgtaagacactgaaa

SEQ ID NO: 456516 - DNA, 201 bp, Homo sapiens
tgaaacaatttaagagttgccccattcatgtaggccaggatcagatgctgaattaatacaagttgaagggaaaaaaaatagggcggtatagaattaagatwaataggccattgactccaactagttcagaatgataaacttttcttgatttgaaaaaggaagtaaatgagtaaaactacctgtatgtttaaatgtaaattc

SEQ ID NO: 456517 - DNA, 201 bp, Homo sapiens
ttcaattgcatccattactgtcaccaaataatattcaccacagaaatatgcaactttagagttttagtgaattctttaggaccaggacaatttcttctctyttttttttttcttttctgtacaacacttagtgctttgaagtttcaagatctggattggtgttttggagtttggagaactgggttctaattttaactctgc

SEQ ID NO: 456518 - DNA, 201 bp, Homo sapiens
tataaatatataaattcaattaaataaatgcaattaaataaatacacatatatggtaaacatttctaaaggtacaaaaggtatagagtaaaaaacaggtckcctgtttatttcctgcaagttcctcagttctcaggttctctccctggaagccatgtctattaccagtttttaatgtatttatcaaaatatgttctgtgaa

SEQ ID NO: 456519 - DNA, 201 bp, Homo sapiens
gctatactgagggctacatttctgtattaataaagataagttagcttccttccttcttcccttccccttctccctcccttccccttctccctcccttcctycctcccttccttccttccttccttccttccttccttccttccttccttccttccttccttcctctctccctccctccctccccctttcttttcatttcag

SEQ ID NO: 456520 - DNA, 201 bp, Homo sapiens
tatttgcatatatttatggagtatacatgttattttcttataagcctagagtgtataatgatcatgtcggggtatttaggactcatcactttaagtatttrtcatttctatgtgttgggaacatttcaagtcctctcttccagctattttgatataatacattgttgttaatgatagtcatcctactctgctattgaacat

SEQ ID NO: 456521 - DNA, 201 bp, Homo sapiens
gtgaaggatgaaaatatgttagaaacaaaaagttgagatagttttgccgtaaccacagttttacgatgaaattttatttttgtgcactgttgcttatagawgtatatgtattcatatactaacacactattaggaataacattctgtacaatgccaattttccttctcactattttttcttcctaaatatatctacatacc

SEQ ID NO: 456522 - DNA, 201 bp, Homo sapiens
ttttcccttctatctaactataggtttgtactcattaaccaacctttcctcatctcccaccctcctacccacacatcattcctaacctcgggtctatactmtctctccatgatcatgaccacattttttttttacctctcatgtatgcgggagaacatgcagtatttttctttctgtgcctggcttatctcacttaacata

SEQ ID NO: 456523 - DNA, 201 bp, Homo sapiens
gttctgaacatagttcgcactaactaatgtgaacttttatggcataaggacaaaaaatgaaatcttcctagtgatgggcagggattcatataaatgaaatmacatttttatatcagaaccttaattttactttttttctaaggatctttcagttccagttgttccatccacgtgtccagctggtgatatcaaattgactaa

SEQ ID NO: 456524 - DNA, 201 bp, Homo sapiens
aattgtgtttatttgttctgttttctttattaatctagctagtggtctattaatcttatttattctttcaaataacaaactaccaggtttgttgatttttygtatggttttttgcatctcagtttccttcagttcagctctgattgtggttatttcttgtcttctggtagttttggggttgatttgctttggtttctctag

SEQ ID NO: 456525 - DNA, 201 bp, Homo sapiens
ccagctggggattggagatacatcaatgatcaaaacagaaatctctgccctcaaggagcttacgttctagtagagggaaacaggcaatttatttttttttwaaaaaaagaaaaagtaagttattataaagcaaggtagaagataaatgctatggagaaaataaaacaaaaaagggggatagggagcacccagggtggaggt

SEQ ID NO: 456526 - DNA, 201 bp, Homo sapiens
tgatcttttccctctttaatctgaaattttaataaatctagatattggagagaaacagactagagacctatagtttattgcagttttattgtgttcaatgmtctttttgctatgcctctgttgtctgctataatttgcaaaacataatgggagtgctagtcaattgaagaattatttcgtggccaatagacaagtaagaga

SEQ ID NO: 456527 - DNA, 201 bp, Homo sapiens
tttttttgaaatatgtatacgttatggaatggctaaatcaaattacctcacatacaaaataaatttacttcatttatttgtggtgagaacacttaaaatayagtcttttagcaattttcaagtatataatatattgttattgactatagtcactatgttgtacaataggtctcttgaacttattcctcctgactaactgaa

SEQ ID NO: 456528 - DNA, 201 bp, Homo sapiens
gcccattgtggcttcatttttatggaaggggcagggatcatttgttttgcctatggagctccaattattcacgactatcttttgaagatattaaaaattgrgaacattttctgttagagtttcccttatagttaccatttctaacactcttcattcttttgataaatctacattgccattctgtattttttttccatctaa

SEQ ID NO: 456529 - DNA, 201 bp, Homo sapiens
cataggggaccatcacaaccaaatagtccaggagcatgccaagagcttcgcttttgaaaaattaattcagtgaatagttagtagagtggattagagggttaaaaaaaagagaagctacagaagcaacttgtgaggactactgcaaaatttcaggtaaaaggtaaaagatttaaacaagtgatgaataagactggtaagggt

SEQ ID NO: 456530 - DNA, 201 bp, Homo sapiens
agttttgctctttgtgctagcaaaatcagttttacttcttcatctataggataattaaagaatctctgaatttgtgtttagggaaagttacactttcaagaaaaaaaagatgctatttgaaattttgataacttcttggaaaagacatgtggagactggtcagtctttgatggagtgaggggagttctattattttttatt

SEQ ID NO: 456531 - DNA, 201 bp, Homo sapiens
actttctgctaatatcacttgcattgggtcatactgatgagcattctgtagaagatggcatttagaaatattgatagaccctcgttgcctttgcttgttttttgtttgtttgtttgtttttgttttgttttgttttttgagatggagtctcgctctgtcgccaggctggagtgcggtggcatgatctcggctcactgcaac

SEQ ID NO: 456532 - DNA, 201 bp, Homo sapiens
ctttctgctaatatcacttgcattgggtcatactgatgagcattctgtagaagatggcatttagaaatattgatagaccctcgttgcctttgcttgttttttgtttgtttgtttgtttttgttttgttttgttttttgagatggagtctcgctctgtcgccaggctggagtgcggtggcatgatctcggctcactgcaacc

SEQ ID NO: 456533 - DNA, 201 bp, Homo sapiens
tttctgctaatatcacttgcattgggtcatactgatgagcattctgtagaagatggcatttagaaatattgatagaccctcgttgcctttgcttgttttttgtttgtttgtttgtttttgttttgttttgttttttgagatggagtctcgctctgtcgccaggctggagtgcggtggcatgatctcggctcactgcaacct

SEQ ID NO: 456534 - DNA, 201 bp, Homo sapiens
ttctgctaatatcacttgcattgggtcatactgatgagcattctgtagaagatggcatttagaaatattgatagaccctcgttgcctttgcttgttttttgtttgtttgtttgtttttgttttgttttgttttttgagatggagtctcgctctgtcgccaggctggagtgcggtggcatgatctcggctcactgcaacctc

SEQ ID NO: 456535 - DNA, 201 bp, Homo sapiens
aaattgtttacatggtggaatgactgataaaaccctgaagttctaagccctctagaagaggaaatttatttatgataataataattactattttataccawacaagatacatacacacacacgtgcatgcacacacacaaacacacacacacacacacacacacagtacttccctgtttatctgatggggatgtgtttcaa

SEQ ID NO: 456536 - DNA, 201 bp, Homo sapiens
agttagcaaagcatggtggtgttcacctgtagtcctagctacccaggaggctgaggtgggaagattgcttgagcccggtaggttgaggcagcagtgagccrtgattctgccactgcactccagtcttagcagcagagtgagaccctgtctcaaaaacaaaatgaaataaaataaaataaaataaaaaagaaaagaaatgta

SEQ ID NO: 456537 - DNA, 201 bp, Homo sapiens
tgtcaaaaatcaatcaactatatatgtaaaggttttaattttgagctttctattatatttaattggtagatatgtatatatatatacacacacacatatgtatatatatatatatgtctccttatgccagtaccatcctgttttaattgctgtagctttgtgttaaaatttgaactatgagctttccaactttattcgtct

SEQ ID NO: 456538 - DNA, 201 bp, Homo sapiens
gcaatgttggataaagtcaaatgtcatgtaacaaataccccaagcttttacttcttcaagtcagtctgaactctgtctttaggtagatggttttggatgaraaatgtcaccagtatcactccttatccctttcctcatctggaagtccttctgttaagaaccttaaggcttaagtatgaactgggcaaactcaggttaatc

SEQ ID NO: 456539 - DNA, 201 bp, Homo sapiens
gtcaaaaatcaatcaactatatatgtaaaggttttaattttgagctttctattatatttaattggtagatatgtatatatatatacacacacacatatgtatatatatatatatgtctccttatgccagtaccatcctgttttaattgctgtagctttgtgttaaaatttgaactatgagctttccaactttattcgtctt

SEQ ID NO: 456540 - DNA, 201 bp, Homo sapiens
attgtttacatggtggaatgactgataaaaccctgaagttctaagccctctagaagaggaaatttatttatgataataataattactattttataccatacaagatacatacacacacacgtgcatgcacacacacaaacacacacacacacacacacacacagtacttccctgtttatctgatggggatgtgtttcaaga

SEQ ID NO: 456541 - DNA, 201 bp, Homo sapiens
gttttcttgtagaggtctttcacatctttagttaggtatattcctaagtattttattttattgcagctattgtgaaaggggttgagttcttgatttgattytcagcttggtcactgttggtgtatagcagagccactacgttgtgtacattaattttgtatcctgaaactttgctgaattcatttaccagttctaggagct

SEQ ID NO: 456542 - DNA, 201 bp, Homo sapiens
tattcctaagtattttattttattgcagctattgtgaaaggggttgagttcttgatttgattctcagcttggtcactgttggtgtatagcagagccactamgttgtgtacattaattttgtatcctgaaactttgctgaattcatttaccagttctaggagctttttggattagtctttaggactttctaggtatacaatc

SEQ ID NO: 456543 - DNA, 201 bp, Homo sapiens
ccactttgcccggctaatttctgtatttttagtagagatggagtttcaccatgttggccaggctggtctcaaacttctgacctcaagtgatccgcccgccytggcctcccaaagtgctgggattacaggcctgagccactgtgcccggcccccttccactgttttactttatcccctgtgtccctctcttttgagtgtgtg

SEQ ID NO: 456544 - DNA, 201 bp, Homo sapiens
tacatgtattatttgtatatatacaaacctcaaggtgccagataacagtttctctttatgctaatattggtgtttagtcctttggaaattttagccattgygccattttgattcacactgttgtggtgataagctcctagaatttgtaaatcatgcattttattttgtgatgtgtctaagctgagggtgagattgagagca

SEQ ID NO: 456545 - DNA, 201 bp, Homo sapiens
ttcactttgagtagtaagttttcctagtaaatttgtgtatatctcaatgcagaaagaaagtaattgtgatgataggctatggactatcaagtaatcagttstctgtggtagtcattgaatggtgaaaacatggaatttgacctgggtttatatctttgttctacaatttgcttgcagtgtccttaagcctttctcaatatc

SEQ ID NO: 456546 - DNA, 201 bp, Homo sapiens
gttaattaacatctaatttttttttactatgttgatcaagaatgttgtttttgtggttggtggggtttacattatagatattaaaattgtttacatggtgsaatgactgataaaaccctgaagttctaagccctctagaagaggaaatttatttatgataataataattactattttataccatacaagatacatacacac

SEQ ID NO: 456547 - DNA, 201 bp, Homo sapiens
ttgtccattttgcagtcactgttactttttctccctctgtaacacaagatactcttatttcccttttcttctttgagaggaaccacatgatacaagggaargggctttgttttaggggactgggattttaggtttcaccacttcctacctaaacaactgtgggaaattatcttctttaagcttcatttgtagaggctgatt

SEQ ID NO: 456548 - DNA, 201 bp, Homo sapiens
attattttgtgaattgaaagaaataatgtacaagataaggccttgcaaattataaattatgaataacatacaagcatatagcacttacgtctagttttcaygattttgaagttatcaagaatttcctgttgccatttaaaagtaaagatatatcttacatattttttcctgaattttgcaacagcttaataaagtttaaaa

SEQ ID NO: 456549 - DNA, 201 bp, Homo sapiens
agagaggaactggtcagtatcacatgtcgagcagaacaccaaggacaagataagaaaaggacaggtaggcacagataaatacaaatgacaggagcataaayatatatacaaccttttggatgagtcatccttcctaaggccactggagatttttttttcataagggaaattcagacctactactccctatgttaatccaat

SEQ ID NO: 456550 - DNA, 201 bp, Homo sapiens
atatggaacaatggttaaaagtaggattctggaggcagactgcctggattcaaatcctggaccatccccttaatagctgcctgatcttgaggcaagctatyaagcttttctgtgcctcatctgtaaaatggggaaaataacagtatttacctcatgaagatgttttgagaattaaatgtgttaatgcatgtaaagcactta

SEQ ID NO: 456551 - DNA, 201 bp, Homo sapiens
tcctactagatatttttcctgctacttcccaccatgcactccatagttcagtcacttcaaagttcttcctcttcttggaatgtaaccatattcttttatawgtctcagcccttgcacatcttggaatgtcctttttttttttagttccaccagacaaacttctcgttctgaggacccggttaagtgagtcttctgtaatgt

SEQ ID NO: 456552 - DNA, 201 bp, Homo sapiens
actccatagttcagtcacttcaaagttcttcctcttcttggaatgtaaccatattcttttatatgtctcagcccttgcacatcttggaatgtccttttttkttttagttccaccagacaaacttctcgttctgaggacccggttaagtgagtcttctgtaatgtctctgatccctccaaaatgaggtatttgttccttctt

SEQ ID NO: 456553 - DNA, 201 bp, Homo sapiens
ttccctgtgtaaaaagtgattccctcctgtccataccccttttgagaaacagtaacaatatatttttaccctgtgctttttattttcttggcatggttctygtcattagttcactcagcactgggtcacgagtatattgggactggaaaacttatattccgtggaatttttatttattgtgatgtgtaaaaattcagaatc

SEQ ID NO: 456554 - DNA, 201 bp, Homo sapiens
tatgtgaggtaatatccattaagtgttgaatgagtgatataaaaagtaatttctcacagatcttattagaggtgtttagaagaggggtagatcgtagttamctggaatagtctcagttggtttcctaacactaagaaaggaaagtgaggaaaatagggagagacaggcagagcaaaggctaggaggcaacaataagtgaag

SEQ ID NO: 456555 - DNA, 201 bp, Homo sapiens
ctgactttctgaattactgttttttcttgcaaacctttaaaatggcctgccaccaaaataaggtaggatttaggtgtatgaaatttgcttcactgactgtrtttaaggacaaaaatgctactctttattgtcatactatggttttagtcagaaaagcccattgttggagaccttaatggaataaacagtgaagaggaattc

SEQ ID NO: 456556 - DNA, 201 bp, Homo sapiens
tgtgctgaaatgtgaagtatgtataaggcacttacactacatactcaagtatgatggttatcttgaggaaaatcacttataattgagttgaactaactacttttttcaaagaacaccattttttacttgaaagaacaactaacaaacacacaatggttatttagacttaaaaacttggcagacatattctcaaaaatgaac

SEQ ID NO: 456557 - DNA, 201 bp, Homo sapiens
atattgcaattaacttttgagaaatgattacttgtcaaattttgatataatataaaagaatagccacaattatttgaaaaggctattaaaacattctgcctctttctaactacctatctgtgtgaaaatggatacttttcacatacttccaccaaaccaacatatcacaacagattgaatgcagtagcacctatgataatc

SEQ ID NO: 456558 - DNA, 201 bp, Homo sapiens
tattgcaattaacttttgagaaatgattacttgtcaaattttgatataatataaaagaatagccacaattatttgaaaaggctattaaaacattctgcctctttctaactacctatctgtgtgaaaatggatacttttcacatacttccaccaaaccaacatatcacaacagattgaatgcagtagcacctatgataatct

SEQ ID NO: 456559 - DNA, 201 bp, Homo sapiens
attgcaattaacttttgagaaatgattacttgtcaaattttgatataatataaaagaatagccacaattatttgaaaaggctattaaaacattctgcctctttctaactacctatctgtgtgaaaatggatacttttcacatacttccaccaaaccaacatatcacaacagattgaatgcagtagcacctatgataatcta

SEQ ID NO: 456560 - DNA, 201 bp, Homo sapiens
ttgcaattaacttttgagaaatgattacttgtcaaattttgatataatataaaagaatagccacaattatttgaaaaggctattaaaacattctgcctctttctaactacctatctgtgtgaaaatggatacttttcacatacttccaccaaaccaacatatcacaacagattgaatgcagtagcacctatgataatctag

SEQ ID NO: 456561 - DNA, 201 bp, Homo sapiens
gattgaatgcagtagcacctatgataatctagctgtctttttctaaaccagacatttgagagatttgcaaagatgtaaagcaatgttagttttctctctcttttttttattttggaaaatatgcttgtatttcataaaatactttataatactatgtaataggtttattattgttatttaaaataactctttaaaaacttt

SEQ ID NO: 456562 - DNA, 201 bp, Homo sapiens; identical to SEQ ID NO: 159203

SEQ ID NO: 456563 - DNA, 201 bp, Homo sapiens
tgcacccactgtcctacgcccactgtctggcactccctagtgagatgaacctggtacctcagatggaaatgcagaaatcacctgtcttctacgtcgctaaygctgggagctgtagaccagagctgttcctatttggccatcttggctcggcccgaggtttactttaagaagtttaacctggtgaatagaatttggaagaca

SEQ ID NO: 456564 - DNA, 201 bp, Homo sapiens
caatgtagaattcaaagagctgtcagcacatgaggagataatgtacaggcatacctcgttttattgcactttgttttattgtgctttgcagattttttttwaagcaaattagaggtttatggcaaccctgcattgggcaagtctatcggcaccatttttccaacagcatgtgctcacttcatgtctctctgttacattttc

SEQ ID NO: 456565 - DNA, 201 bp, Homo sapiens
aaaagaaacaatcaacagattaaacagacaacctacagaattggagaaaatatttgcaaagtatgcatctaacaaaaaacatatccagaatctatgacgartttacacaaatcaacaagaataaaacaaataactgcattaaaatttgggcaaaggacatgaacagacacttcccaaaagaagacatgtaagtggccaaaa

SEQ ID NO: 456566 - DNA, 201 bp, Homo sapiens
aatatatatagatgttaaatgtataggttatatgtaagaagtattgaaactgcattgctagcatgtctggctcttcctaagctcatatgagaatgaaagcraaagtactattttgagtggttataatgatgtcttgattgtaaaattttatattttcaaagaattttcattctatcatcacattcctctcttacatcaact

SEQ ID NO: 456567 - DNA, 201 bp, Homo sapiens
tgtatcctgaaactttgctgaattcatttaccagttctaggagctttttggattagtctttaggactttctaggtatacaatcatatcatgagcaaacagygacactttgacttcctttttaccgatttggatgcccctattttctgtctgttgtctcattgctcttgctaggacttccagtactatgttgaatagaagtg

SEQ ID NO: 456568 - DNA, 201 bp, Homo sapiens
tgcccaagatcacacagctagttaacagtggtttactatactattctttctctcatagaaacttgtaagacctcattttttctaaatttctttttcagtcttttttttttttttttttagttttcttaaatatttatttataattgacaaataataatagtccacatttatggggtacagtgtgatgttttgatctatgta

SEQ ID NO: 456569 - DNA, 201 bp, Homo sapiens
acagtcttgttgccctcaatttagtgctcttgtgcaacctctgacacctctttgagggaggccaggttggagagtagatcaagtttgtaagtgcagctcargaagatttcctttcagctaggctagtagataggctgttttcctgaaaatgcaagtctttgggctactaagttatttttttggaaaaacctaattggaatg

SEQ ID NO: 456570 - DNA, 201 bp, Homo sapiens
caaaatgtgctgaagttctccagttggcagtactaataatttgcagtttaaaaagtgatggttagtaaagttgccttgaaatggggtaaaacatttttttwaatttaaaaaatacagaagaaaatgtaagaagaaagtaagaagacgatattttatatttcttgtctagtctacctgatcacttataagtaaattcaaaat

SEQ ID NO: 456571 - DNA, 201 bp, Homo sapiens
ataagtacacagataagcaaagatgcagagactaactgttggagtactgacttttagtaaccaagtagtccttaaaaataaagttttaacctgtttttatcaaaattataaggtgttcctagaatagcactcagacagggcatggttcttagccctaccacctaccattgtgatttatttaaccaactaaatctgtttcta

SEQ ID NO: 456572 - DNA, 201 bp, Homo sapiens
tgtaggaagaattaatatcgtgaaaatggccatgccgcccaaggtaatttatagattcaatgccatccccatcaagctaccaatgactttcttcatagaaytggaaaaaactacattaaagctcatatggaaccaaaaaagagcctgcatttccaagtcaatcctaagccaaaagaacaaagctggaggcatcacactacc

SEQ ID NO: 456573 - DNA, 201 bp, Homo sapiens
aatctcggctcaccacaacctctgcctcccgggttcaatcgattctcttgcctcagcctcccaagtagctgggattacaggcatgagccaccatgcccggyggattttgtctttttagtagagatggggtttctccatgttggtcaggctggtctccaacttccagcctcaggcaatccacccgtctcagcctcccaaagt

SEQ ID NO: 456574 - DNA, 201 bp, Homo sapiens
gagaatggcgtgaacccgggaagcggagcttgcagtgagccgagattgcgccactgcagtccgcagtccggcctgggcgacagagagagactccgtctcamaaaaaaaaaaaaaaaaaaaaaaaaaaatgtgtagtacctcccccttctctctcttcctcttgttccagacatgtaagatgtgcctgcttccctttcgcct

SEQ ID NO: 456575 - DNA, 201 bp, Homo sapiens
tggctttttgagttgccagagttcttgcgctggttctttctcatctgtgtgggctgatgttccttcagtctttgaagctgctatcctttgaatgtttttcttttttttttttttaatcttcttagatgcccttgggggttggattatggtaaaaggtgggttcagttgactggctttgattctagtctgggtcttgaagga

SEQ ID NO: 456576 - DNA, 201 bp, Homo sapiens
accactgggctggaagttataacatgtgttgctcacctggctacaagaggtggggttgagtagagtcatccaccctgccttctgggcacttcccaggacawcaggaagctgcacctgctggctaagttcagacagaagtgagaccactgggctagaatctctagcaggtgttgcctgcctggctaccagtggaggggtttg

SEQ ID NO: 456577 - DNA, 201 bp, Homo sapiens
cttggtttactagtattttgttgaggatttttgcatcaatattcatcagaggtaatatggcttcatatatatatatggcttcatatatatatatggcttcatatatatatatatatgtatggctttgtctggttttggtatcaaagtagtactggccttgtagaatgagtatggaagtattctgagagatgatttttattt

SEQ ID NO: 456578 - DNA, 201 bp, Homo sapiens
ttggtttactagtattttgttgaggatttttgcatcaatattcatcagaggtaatatggcttcatatatatatatggcttcatatatatatatggcttcatatatatatatatatgtatggctttgtctggttttggtatcaaagtagtactggccttgtagaatgagtatggaagtattctgagagatgatttttatttc

SEQ ID NO: 456579 - DNA, 201 bp, Homo sapiens
atgtttttccatttgtttatgtcatctacaatttttttcatcagtgttctatagttttccttgtacagatttttcacctctttgtttaaatatattcctgtttttttttttttgtagctattgtaactgggattgccttctttctttggttttcagctagatttttttaggtgtctagaaatgctactactgttcagtgaa

SEQ ID NO: 456580 - DNA, 201 bp, Homo sapiens
tgggtttccccttagttaccctgtttgtttgctgtaacactttcctgttggtagaactatttgttctttcataataaaattgagaattttcttgtaaaatrtatttttaaggtaaaacaatgtaatgatttgtcctggcattctataattttgaaagtcgttgatggcaggagaatggcagagtggaaggatgtctcctag

SEQ ID NO: 456581 - DNA, 201 bp, Homo sapiens
agttaacagtgttttgtttagcaaattagatgttgcttaaagttatggctacaattggtagcctgagacttggcagagattaattagctgtggggttgggttttttttttttttggttggcagtcagaggtttcttgtgatttgggaaggtgtcaaaggtgttatgccctcaagttctgaagttctggctgatgtggtaag

SEQ ID NO: 456582 - DNA, 201 bp, Homo sapiens
ctgaaccatacccttagtagtttcactccaatttgacaggcagtatgaaaaagtcatttttcatttaatatgaaaaacaaattttccattggagaaatttktctctcagccctgaatgggtagatgtattttcaggatggagcaggaaacttgtattctggacagacactgtgtttgcagatttcacttatcctggtaact

SEQ ID NO: 456583 - DNA, 201 bp, Homo sapiens
ctttgggtcaagtaatttggcaactgaatgaagtcatgagtcttctgtttggctaaactaaatacttacattcatatcttaggaggtgtctgggtttgtgrgtgtgtgtatgtttatttacagtaggtgaagcagtatagctgtggtcattcacaggagcagttcaggctactgagcccactgtggtgcccagaggcagtg

SEQ ID NO: 456584 - DNA, 201 bp, Homo sapiens
ggctcgcgcatgttgtgctgcacccactgtcctacgcccactgtctggcactccctagtgagatgaacctggtacctcagatggaaatgcagaaatcaccygtcttctacgtcgctaatgctgggagctgtagaccagagctgttcctatttggccatcttggctcggcccgaggtttactttaagaagtttaacctggtg

SEQ ID NO: 456585 - DNA, 201 bp, Homo sapiens
aaaagtaaataacattattatccttattgtgaaaaaattagacccctgaaagagtcttggtaacccctggaggtttcatgaccatacattgaaaactcctrccataaactataatctgtccagggacttgaaaatattaatgttgacaatatcagttttagaacaatttttgttaaatacctattgttctagtcaggcact

SEQ ID NO: 456586 - DNA, 201 bp, Homo sapiens
tcacactgctgtgctagcaatcagcgagactccgtgggcgtagaaccctctgagccaggtgctggatataatctcctggtgtgccgttttttaagcccatyggaaaagcacagtattagggtgggagtgacctgattttccaggtgccgtccatcacccctttctttgactgggaaagggaactccctgaccccttgcgct

SEQ ID NO: 456587 - DNA, 201 bp, Homo sapiens
agaacagaaaataaatttactgtctgagtaagtttgtagtaggccaaacattcagactttgtactggtgttttggagtaaaataattatgacctttctagmggtgttcgtactgacttcctagagaacattctcagtaactggaggctttatctccagcaatctcatttccaaaagtcctaagcccgaagttcttcccaat

SEQ ID NO: 456588 - DNA, 201 bp, Homo sapiens
aagtctattcatatctgtgtgggaacctaatcaggctcttgtttccagtgacgatgactccacagtcgcaccaggtctgtgacaagaatgctccttttgtmtgccgataatgtggaaacgataaaatttcctttaagagacatatgtgtttacatcatgagatatgttatttgacaaaatgctttgttctcctcatatttt

SEQ ID NO: 456589 - DNA, 201 bp, Homo sapiens
tctatttaatgtaattgcaggaaataatttattggctgattaagactgaggacccagccttccttaagaaaacattctaacaaaccatcctttaaactcamctcatagatttagtctatttttacagctgcagagttgtatttaattaggattgtgcactattgttcactggtgcagtttatagttgaaattattcttaag

SEQ ID NO: 456590 - DNA, 201 bp, Homo sapiens
ctccatcagctcctttaagcacttctctgtattggttcttctagttatacattcgtctaaatttttttcaaagtttttaacttctttgcctttggtttgartttcctcctgtagctcggagtagtttgatcatctgaagccttctcttaactcgtcaaagtaattctccatccagctttgttccgttgctggtgaggaact

SEQ ID NO: 456591 - DNA, 201 bp, Homo sapiens
cagagctagaaaggtcttcagaggctttgagggtcaagtcccaactctaccactggttccatgtgcttggacaaattaatcttcctggtacctagcttttrtcaaatgggattaggaaaaatacccccatagggaagttgtgaggaatacataagaaaatgtttgtgaaaagtgctttatacactgtcaagtgctatataa

SEQ ID NO: 456592 - DNA, 201 bp, Homo sapiens
tcttttaaaaagctttagatggcactaagtagtgttaggcccagccctaataatgcaaagtgtaaacaaagaagtcaggatcagatttgtttaggactttrattatgaattatttactctcctgattatattttcctacatatcccccttcttttgctcctacataaaccataggagaaagttggataattgtgctttcaa

SEQ ID NO: 456593 - DNA, 201 bp, Homo sapiens
accttaatttccatgtcctacaactgcttatttgctacatgatctaaggcagaaagttatacctcatggccatgggaagatttcttagtaaggtgtgcaabtctgtgagataaggaaggtgggatattgttttgcacatccataatgaatgggctacaccaaaagtgtgtgagaactgactggaatcttagctactcaaat

SEQ ID NO: 456594 - DNA, 201 bp, Homo sapiens
aaaattagctgggcatggtggcacatgcttataatcccagctactcaggaggctgaggcaggagaattgcttgaacccgggaggcagaggttgaagtgagycaaggttgcaccactgtactccagcctgggtgacagagtgagactctgtctcaaaaaaatatatatattttttcatattaaaattacttttgttttactg

SEQ ID NO: 456595 - DNA, 201 bp, Homo sapiens
tattttgcatgttcttatctcacatttgattttttcttatctctaatgaaaaataattatgtaattctgaccgtttaattttaccagagcagtaaatgatkggttaaaaaaaaaacaaaaaaaaaatcggacatagtttattagctaccctgctttttcaggttacccaagtctttttagtaatttgataatgaattcctt

SEQ ID NO: 456596 - DNA, 201 bp, Homo sapiens
atgttgacactgtccactaaaatgtgcttttgttctcattaggactgactcattaggctggaatacattcacataatttttttcatggaaaaatgtacagsatattattatttttgatgttaataagcatggagaggaatatttttgtgataatgtttcatgacctgtatatgatattgtgtgtaatgattatctgctaga

SEQ ID NO: 456597 - DNA, 201 bp, Homo sapiens
ttaagcagagctattgaaaatttatttaataccagctttacctttcttttaataatagtattgattaggataggcattttgaaccagcttaaaaaaatagwtgttcatgtttaatatagtttaatacattttatgtatttttaatgttttaataataaattgttattttatgaaactctatcaatttacattttattattt

SEQ ID NO: 456598 - DNA, 201 bp, Homo sapiens
gaaaaatgtacagcatattattatttttgatgttaataagcatggagaggaatatttttgtgataatgtttcatgacctgtatatgatattgtgtgtaatrattatctgctagattgtaactgtagaaaggacagataaacttatatattgttggtgatcttgtctgcagattacatacaattttttggtgcaaattatgt

SEQ ID NO: 456599 - DNA, 201 bp, Homo sapiens
tctgtataagatccaatgactagggtttgtagtgcactgactataacatgaaccccttaatgaactctatcactgacactcacaatttgcaacattactgyatgttcaaaaggattatcttttcttggagtcagccaacgttctcctaatttgcctcagttttatgtttgcctcagtttgatggatattttgttttcattt

SEQ ID NO: 456600 - DNA, 201 bp, Homo sapiens
cagacagtactgagtatattgagtttagggcaccactctttaagagatatataaagagaaacaattggaacacactcagagaagaatgttcagactggccraactgtgttttatgaagaagaaatgaaggaaaaagggatattttccctagatgaagagaggatagaaaggtactgtaatagctgtgagtatgtattgaat

SEQ ID NO: 456601 - DNA, 201 bp, Homo sapiens
gagaggccaaatagtcacttgtcaaggaaattgtaaccaccaccatttaattatcacttactatgtaatgccactgttctaagtgttttatttttattaawtcatttaattcccacaactctttgagataaattctttactgtactattattattgccattttgcagacaaggaaattaaggtgaaaagaagttaactaac

SEQ ID NO: 456602 - DNA, 201 bp, Homo sapiens
cacttgtaacatgatactgaatgctctgcttcatttttcttacaacaggcaaagtaaaaccagaatcacaaatacatgttgatgaaaattggtttatggtytggagagactatatacttatgtaggcatacctcagggacatttcaggttctgttccagaccaccacaataaagtggatttcataataaaatgagttgcat

SEQ ID NO: 456603 - DNA, 201 bp, Homo sapiens
ataaaagaaaaaaatacactttcactatcattcaaaaaatgatacttttgtcatgaataatctgttggcaattagaaccaaatatagcattttaatttatrtatgcttctttaacccaatccttttctttacagtatgtcacattagaaaaaaacatacttttttcctctgagaaagaaccgtaaatgtttgcaatttagt

SEQ ID NO: 456604 - DNA, 201 bp, Homo sapiens
tgtgataacgagcttggagtgtatagcctatgaaaagatgtcctatggtagagtttttattagtgaataagggaaataaatttggaaactttggttagaayaaagattgtagatttgatggcatgggaaagcaatagagactttggaactagttcacctttaataaaagcatgttgtggaagaggaagatacactagactg

SEQ ID NO: 456605 - DNA, 201 bp, Homo sapiens
ctcatgggagactttagacagaaccacccagcccagatgctccaaaattcctgacctacagatagcattaaggataataaatgattggttttgttttaagyactttgtttttggatgatttcttatacaacaatacataagtaatacaagttacttcttggtaattcttggattaaggtgaataataaagtgtaatttttg

SEQ ID NO: 456606 - DNA, 201 bp, Homo sapiens
tgagtttaataaagttttcttattaaatttctactagtctttgggtactatgctggaaacaagaataaaaaaagaaagataaattacttatctttggaagytcacagtctagtaaatggcaacaatataatgtgctaagtgttatggtagatatattcactgactgccatagaagtgcagaggaagagcatttaatcccaa

SEQ ID NO: 456607 - DNA, 201 bp, Homo sapiens
gccagcagtagtgactggctgcaggtggagggtgtcaatggggatccagggatgtggagatgcaggggctgttgggctccaaggcaggatgcagtctggarggtgctgggctctcaaaatggcatcttgctgtagttgcttaggacttggggcagtgtgtgagaaccaatgtgagctccctcttgggagcaatattgttac

SEQ ID NO: 456608 - DNA, 201 bp, Homo sapiens
ctttggctttgatcctgggtacatgcatttgtgtagtctctgtatgatttctttggctgtaaacagtgtcaatggtgtctgagatttcctcagtggcttargctgtggttgttagtggaggctgtggtgatattttgttggagacagggacaccagatgggccagtccttgttccccagtggttacagtagcaggctaagc

SEQ ID NO: 456609 - DNA, 201 bp, Homo sapiens
tctcagtgtctcagtttccttatatgtaaagtgggaataataatattacttatgtcatagatctgttgcaaggatgaaattcatgaatatatataaaaaawatttagaatagcctatcacaaagtattgtacattattctaatgggtaattaattcttattgatttataagaggtctttatatgctaaaatagtaaccctt

SEQ ID NO: 456610 - DNA, 201 bp, Homo sapiens
ttaatctacttttttctgcttataaaacaaatgtgtgcatctctaagtttagttctttctatgctgttttcactctgtactttctaggaggtctgatttaytctattgccttttaactctacatggatggatctcatgtctacttttccaggtctgtcctcagccttagttctgcctgtttaactctatatttttacctgg

SEQ ID NO: 456611 - DNA, 201 bp, Homo sapiens
attctattgccttttaactctacatggatggatctcatgtctacttttccaggtctgtcctcagccttagttctgcctgtttaactctatatttttacctsgatgtctcattgtcacttcaaattcagcaagtttaccatttctttcccctaagtcaatctccttttcagccttttttatttttgacagggatgcaagcag

SEQ ID NO: 456612 - DNA, 201 bp, Homo sapiens
agagcaaaggctttggagttagatggccctaacatctccatctgagaaatgctattaatttgcatagtttctatgcacaagggtttgttatgatgattcartaaagtacaatcatccgtcaatactcttggagaattggtccaggaccccacctccctaccctgcagatcccaaaattcctggatgctcaagactcttata

SEQ ID NO: 456613 - DNA, 201 bp, Homo sapiens
ctatgaatacataaattagaaaaaaaataaaggttttttgagtagatgtcacttcctctattagcatggctttgtgagttggcaaaatttttccttggagktgccttttccttagatgtttacagccctgtgcagggtgcatgatttagtgagcagtgctggctaggtttgcagcctacttgctccttcagctgggcaccc

SEQ ID NO: 456614 - DNA, 201 bp, Homo sapiens
ctatgcatatgcttatgtaatcttcaaacaagttgtgcagccttttacaaatgtgtctagcctcatttaatctcaagtaagcctgtggataccacaaaggaaaaaaaatgaaaaaaagtcagatgtaggaaataaactaaatcttcaaaaatatgcaaaatataagttcccaataaaatattatctgctacattaattagc

SEQ ID NO: 456615 - DNA, 201 bp, Homo sapiens
gaaaagctcttaggagatacaatatgcttatatatatcataaattaaaacaaatacatggtagcagtaccttacattttcccactttttgtgtttatgttyctgagggaaaaaaatcttcaaatttatcagttttccagctaaaactgaaatggaagctatatttctaaagaaaatatttattcttggttcgtatagcttt

SEQ ID NO: 456616 - DNA, 201 bp, Homo sapiens
gcaatggactataccatatagcctaggtgtacagtagactataccatctaggtttggtaagtacattctatgatgtttgtacaatgacaaaattgccaaargattcatttctcagaaggtatccccatcattaagcaatgcatgactgttttttaatatctccttctagattcctcttcttgtttggttctgcttgtctat

SEQ ID NO: 456617 - DNA, 201 bp, Homo sapiens
ccttaagatgagaggcactgtgatatatttttggaaaattagttgtttatttctcaatatcagctcaagtacagcattatattaacagtgaattatctgactgaaatgagtctaccttggtagcctggggctgagctgcaaaaataaatgggaatgttggcctgaagttttaatttttttgaataagtagaacaactctta

SEQ ID NO: 456618 - DNA, 201 bp, Homo sapiens
agggaggctgaggtggaggttcttttgagcccaggagtttgagattacactgagctatgatcgcgccactgcactccaatctgggtgacagagtgagagaycatctattaaagaaaagtaaataacattattatccttattgtgaaaaaattagacccctgaaagagtcttggtaacccctggaggtttcatgaccataca

SEQ ID NO: 456619 - DNA, 201 bp, Homo sapiens
tagtttatttagtgaatttcttgatgtagatagcttcaacagttgaagtaaatagggatttgtttttagtagggctaaggaaccttaagatgaaaacaaagatattaaactttacttatggttttcctcaacattcagcaaatgaagaattaacactttaattaaagtaccacaggtaattcaccttttgttcctgtacca

SEQ ID NO: 456620 - DNA, 201 bp, Homo sapiens
tgcaaccatcaacctgtcacctacattaggtatttctcataatgttatccctcccctagccagtgtgtgatgttccccagtgtgtgatgttcccctccccrtgtccatgtgttcttattgttcaactctcacttatgagtgagaacatgtggtgtttagttttctgatcttgtgatagtttgctgagaatgacggtttcca

SEQ ID NO: 456621 - DNA, 201 bp, Homo sapiens
aacattttgaaattctatttaataatcatggttttctgattttatatgagagcacagaatggagacgttgtcatgtagcgtgtagtcaatgtttatttgtrggcatataaatgaatgttcaatattgtatttggaggttttaaatattatgcacagtaggcattttactattttcatggtaaatgcttcgaatcttgtata

SEQ ID NO: 456622 - DNA, 201 bp, Homo sapiens
caggtgtggtgatgtgtacatgtagtcctagctcctagggaggctgaggtggaggttcttttgagcccaggagtttgagattacactgagctatgatcgcrccactgcactccaatctgggtgacagagtgagagatcatctattaaagaaaagtaaataacattattatccttattgtgaaaaaattagacccctgaaag

SEQ ID NO: 456623 - DNA, 201 bp, Homo sapiens
cacttccttaatgattaaggctcttgctccgccatggaatgtattttgcctgccaaacaaaccactaggatagccaaatcctttttctttttttttgcaaraagaaatcaaatttgaaatccaagcagccttcctgtaatgaaagtaagttcacattctggcagaacaggaatgagaagttagcagtaggtttccataatc

SEQ ID NO: 456624 - DNA, 201 bp, Homo sapiens
tatctgaataagacatctgctaactagtttggccctttttacctgattgtttaagaagtcttagctaaatgttaggccttggaggcccaggaatctgctamatgctgctgagcttgaaagacataatgtccttggtctgttttgtctcttccactcttggatatctttgataaataaccccgatgtaaatgtgggataaat

SEQ ID NO: 456625 - DNA, 201 bp, Homo sapiens
gcaagtggtccatttcatctaaattgtcaaatttatgtgtgtagagttactgctagtattcacttactatcctttttatgtctgcacggtctgtaatgatwtcccctatttcattactaatattggtaatttgtgttttctctcattctttgtcagtcttgataggggcttgccaatattattgatcatttcaaagaacca

SEQ ID NO: 456626 - DNA, 201 bp, Homo sapiens
tttgataagcagagttttaatttttataaagttcagtttaacatttttcttgtatatttagtaatttatatgttgtatctaagagtcattttactttaaastcactaaaatattgtcttatgtatatttagaggagtgttatagttttttctttcttgatttaagtcatgattcatctctaattgttgtatataatgtgtg

SEQ ID NO: 456627 - DNA, 201 bp, Homo sapiens
cttaaacataagaattcaattttcttaagagttatagggctattcaaattaactatgtcatttcatattgagtgaattgtagtaatttctgttttttgagmaagtggtccatttcatctaaattgtcaaatttatgtgtgtagagttactgctagtattcacttactatcctttttatgtctgcacggtctgtaatgatat

SEQ ID NO: 456628 - DNA, 201 bp, Homo sapiens
tttttataaagttcagtttaacatttttcttgtatatttagtaatttatatgttgtatctaagagtcattttactttaaagtcactaaaatattgtcttaygtatatttagaggagtgttatagttttttctttcttgatttaagtcatgattcatctctaattgttgtatataatgtgtgatacaagatgcaggattttt

SEQ ID NO: 456629 - DNA, 201 bp, Homo sapiens
tttgcttatgtggtctatttctttttttttttttttttgagacggagtctcgctctgtcacctaggctggagtgcagtggcccgatctcggctcactgcargctccacctcctgggttcacgccattctcctgcctcagcctctcgagtagctgggactacaggcgcccgtcaccacgcctgactaattttttgtattttt

SEQ ID NO: 456630 - DNA, 201 bp, Homo sapiens
taatttatatgttgtatctaagagtcattttactttaaagtcactaaaatattgtcttatgtatatttagaggagtgttatagttttttctttcttgattkaagtcatgattcatctctaattgttgtatataatgtgtgatacaagatgcaggatttttttccaatgtgtctatcaacttgttctggcggtatttgttga

SEQ ID NO: 456631 - DNA, 201 bp, Homo sapiens
taaaagatatgcattcttaagatatgcattcttaagaaattctgaatagtaaataatataaattgctttgataattggtatttgaagcatttggattgctscagggaggtgtaacttgatgctagccttcaatgttggagaggtgctgacctctcaatacaaaagcatcaatatctacaggacaccttgagtgttttttgt

SEQ ID NO: 456632 - DNA, 201 bp, Homo sapiens
gtctttctcccatatcccaaacacacactttcagaaaggaatctattgtcctatttctggaaaatgttgaaatgttgccctctactttgttaccttctcargagtaagattggtctgtagatattgtatgaccattagagaaaaaccaaagattccaaactaaaatttggcattaatccaggtacttctgccacattaact

SEQ ID NO: 456633 - DNA, 201 bp, Homo sapiens
ttgagagcaaacagtaaacaatgtgttgtaattaatgtcttagtccaatactgctgctaataacaaaataccatacactgggtaatttataaacaacagayatttatttctcacaattctggaggctgggaagtccaagatcaaggcaccagcaggtttggtgtctggtgtctggtgaaggcccagtctctgcttccaaga

SEQ ID NO: 456634 - DNA, 201 bp, Homo sapiens
tgagatttgctttcatcctctttacatgatgtaggtttatgtttaagaaaacatatttaggctaaagttgaggacagaaagagggtatgtttgtatttaagttttaccttaaaaaagagataaagatggacaggtggggtggctcatgcctgtaatcccagcactttgggaggccaaggtgggcagatcacctgaggtcgg

SEQ ID NO: 456635 - DNA, 201 bp, Homo sapiens
aataccatacactgggtaatttataaacaacagacatttatttctcacaattctggaggctgggaagtccaagatcaaggcaccagcaggtttggtgtctrgtgtctggtgaaggcccagtctctgcttccaagacgacaccttgacaggatcaacaaactgtgtcctcacatggcggaagggtggaagggcaaaaaggaa

SEQ ID NO: 456636 - DNA, 201 bp, Homo sapiens
tataattcccatagttgttcaatgtttattctatatgtatatgaatttagtcatcactcctaattcttttaccacagcttctctttttctgactttttttyactttttcttttagttggcagaatttcattgttaagaacaaggccctcttcttacagccccctaagggcttaggagtgtagtattcccaaatttctataa

SEQ ID NO: 456637 - DNA, 201 bp, Homo sapiens
ttattggactgatgaggaaatccagtacaatattgattagaagtggtgagagtagacattattgcctattttgtctgatcttaggtagaaagcaaggatcytttcactattattgattatgatattagctgtaggtgtttcaaatatacttttaatcagattgaggaagcttccttctatttaaatttgctgaaagttatt

SEQ ID NO: 456638 - DNA, 201 bp, Homo sapiens
aattatttctatgacttctttgatatttatatttaaatgtgaagatgaaatttattttctgattaaaagtattatttgtgataggacatttacaaaatatmgagaacttcaaaaaggaaataaaattatctgttgtcccaatactcagagggccattaacattttattgtgtactatggtctctttttttctgtacataat

SEQ ID NO: 456639 - DNA, 201 bp, Homo sapiens
gtgctctcaccagtaatatctgcaggtttttattctcttgccctgaataacaagtattattaatttaaaaatttcttgccatttttataggggaaaaaacrtatcattgttgatttaatgagttttttgactattagtgagaatgaggtgttatatctacattaatttgcaattaaatatctcttcctttgtgaactgcat

SEQ ID NO: 456640 - DNA, 201 bp, Homo sapiens
tattgtgtactatggtctctttttttctgtacataattttttaatgatgtataatgtgctaccaaacagtagatcttattccttctatctaactatatttycatactcatcaaccaactcctctttattccccatcaccactagccttcctagcctctagtaactactgttctattcactacttctcacatgtgagtgaga

SEQ ID NO: 456641 - DNA, 201 bp, Homo sapiens
gatacattttatttctttttcttgtctaatagcagtggctagcacttccactacaagactgaatagcagcagtgaaagtgaacattattgtcttgttctcratcttaaggggaaagctttcagtctttcaccattgaatatgaagttagctgtggatgtttgtttgtttgtttaacaaacagggtctagctctgttgtcca

SEQ ID NO: 456642 - DNA, 201 bp, Homo sapiens
gcttcaaaacatttcatcatatagataaaatcataatgccctcaaataattcctacaattggaataactaggttgcctatagttattcatcactgtaaacracagtatgttcaataggtatgtttgtttttaatggctgtgttgtattccactgtgtagttgtatcatcaattccttatgttttaatatctcagttctaaa

SEQ ID NO: 456643 - DNA, 201 bp, Homo sapiens
ttgcccaggctggagtgcagtggagcaatcatggcttactgtggcctggacctctgaagttcaagcaattttctcccctcagcctcccaagcagctgggascacaagtgtgcacccccacactcagctaattttttttattatttgtagggatggggtctcgctatgttgcataggctggtctcaaactccttggctgaag

SEQ ID NO: 456644 - DNA, 201 bp, Homo sapiens
tcaagcaattttctcccctcagcctcccaagcagctgggaccacaagtgtgcacccccacactcagctaattttttttattatttgtagggatggggtctygctatgttgcataggctggtctcaaactccttggctgaagtgatcctcctgcttgacttctcaaagtgctgggattacaggtgtgagtcactgtgcccag

SEQ ID NO: 456645 - DNA, 201 bp, Homo sapiens
attctatttttgccgatatggaaaaactgctttttctttcctagaaactttttctaataactatttttgatactactgtgtactttttcaatcatctacayatattttacatattgtgtttaattgatttccagtgaaatgctctttagattatctgaatcaacatggcttttttcctttatttgggactaggatactttt

SEQ ID NO: 456646 - DNA, 201 bp, Homo sapiens
gtcatcactgcaataaggaacccatggttattgtctgtggtgcaggatggcagtgaccacattcccatgagtaaacaacaagtaacatagtccaacaagtmcataacaatgcgtaaataagattgtttggcattagtcctgatagaaaaaaaatggtactctttggagcctaaatgctctcaggacaatctaaagttgtta

SEQ ID NO: 456647 - DNA, 201 bp, Homo sapiens
atacacatttagtcatcatttgtgttaccaataatatgaagaaacaggacatttatcatatgatttttatatataaattacagttgagataaagataagtkgactcttgggagatgtgggaaaagaaatctattaatgagattcactaattgttgttgttgcattttggcatcagtttcattttgaacagaagagaacaag

SEQ ID NO: 456648 - DNA, 201 bp, Homo sapiens
acaagttcacatcatctaatatttctctgtcaaattacctactgatactataaggccaaataaaaatattaaagggaggaaacaaagtattttttaaaacyaaacaccaatttattttcacgtaactgttttggagagctgtatgaaaatgttgagaaataaggtaggtagaaaagataagaaatataagaaacagtaata

SEQ ID NO: 456649 - DNA, 201 bp, Homo sapiens
tttagtgatttcattttcttgaaaatatttctatcagaaattcatattatacttgcattatgctgaacatgatgaaacattctcttctctttcccttggcrtgtccttattgcaacacacaccaaaatatacagatgtttaatttaaactgaaatattcctccatagaataaacagaatatctcacctatgaagagtgatt

SEQ ID NO: 456650 - DNA, 201 bp, Homo sapiens
aaaggtactttttataaataaagaaggcaaatttcaagaaaaaaattgaatgaactttaaaaacctattaaagtacttgaaattaatcaatatatattatwtagaagtgctatagagtatgtagcaggtattaaaaatgtctctgtggatgtaaacctacatttaagtaacttgcatttaaaatatatgtgtatgtataca

SEQ ID NO: 456651 - DNA, 201 bp, Homo sapiens
aacagaggaagggtaaactataaactattgagactggttatctagagatgatgggtgcaaatggagtagaaaagatggggttggtgtgagtagggtagaakggatgggatggggattagtagttgagtgactacttttcatatatttgtgtatttcagaaccatactactatttctcatactaaatatacaaacaaacaaa

SEQ ID NO: 456652 - DNA, 201 bp, Homo sapiens
aaagaaggcaaatttcaagaaaaaaattgaatgaactttaaaaacctattaaagtacttgaaattaatcaatatatattatatagaagtgctatagagtaygtagcaggtattaaaaatgtctctgtggatgtaaacctacatttaagtaacttgcatttaaaatatatgtgtatgtatacattgttgtaaactgttggta

SEQ ID NO: 456653 - DNA, 201 bp, Homo sapiens
tatgtagcaggtattaaaaatgtctctgtggatgtaaacctacatttaagtaacttgcatttaaaatatatgtgtatgtatacattgttgtaaactgttgrtatttaaggggcttttttacatttgataacagcaaagacacaggaaactttttctttgttagtgtactgctataaaggaattttaaagaatatacttcta

SEQ ID NO: 456654 - DNA, 201 bp, Homo sapiens
ggatcttctcctttagtatagcatggcttttctaatttgctgtcaaggattatttcatattattctggctttctaggataatgtgatctacaacgcaacartgaatcatctctggctattagacagttgacagggtgcctagataagtcatgagagtaattatagaatataagctttggaaactggatgctggctagactt

SEQ ID NO: 456655 - DNA, 201 bp, Homo sapiens
cccatatttttgtaaatagtttttttttttttaatttaactctcctcaaattatccagcttaaatttgccattgctatcaccttggtccaggccattaatytctcttgcttggattattgtaaaagcctcctagcttaaatccctgctttctcctttgtctccacacagtctgttttccacacagaagccagactaacctt

SEQ ID NO: 456656 - DNA, 201 bp, Homo sapiens
taaagaaatatagccggatactatgactaagataagtcagatgaaattaacatggcatccaaaattcctgagtttctagttctctcatttgttgtggaaaytgttcaaccacttagactgaaagatgaggcttctaaaacgatagaaatatttgtctagtcaggcctaagaacaggcaaatgggttcagtgacaattactt

SEQ ID NO: 456657 - DNA, 201 bp, Homo sapiens
tgacaattacttcttttatgaaccttaatttccatgtcctacaactgcttatttgctacatgatctaaggcagaaagttatacctcatggccatgggaagrtttcttagtaaggtgtgcaagtctgtgagataaggaaggtgggatattgttttgcacatccataatgaatgggctacaccaaaagtgtgtgagaactgac

SEQ ID NO: 456658 - DNA, 201 bp, Homo sapiens; identical to SEQ ID NO: 159200

SEQ ID NO: 456659 - DNA, 201 bp, Homo sapiens
ggtgttatttctgcttaaggatttgtattctcttttaagtagttgtagttgatagattattaatttcctgaagtttttctttggaaattgatctttattasatatgaggttattacaagagttgagcaaaaaacaaacaaaaattcaaatatttctattgacgttttgatggaatgggttcagatcaatttttatagctga

SEQ ID NO: 456660 - DNA, 201 bp, Homo sapiens; identical to SEQ ID NO: 29719

SEQ ID NO: 456661 - DNA, 201 bp, Homo sapiens
gattaagtcatcaaattatcttaaacaggttctacttaaaaagttctaggctgggcgcgatggctcacgcctgtaatcccagcactttgggaggccgaggycagctgatcatgagatcaggagttcgaggccagccggatcaacatggtaaaaccccgtatctactaaaaatacaaaaattagctgggtgtggtggtgtgt

SEQ ID NO: 456662 - DNA, 201 bp, Homo sapiens
actgctctagcacctcggccagcccggagcccagcctcccggtcatccagagcacttatggtatgaagacagatggcggaagcctagctggaaatgaaatsatcaatggagaggatgaaatggaaatgtatgatgactatgaagatgaccccaaatcagactatagcagtgaaaatgaagccccggaggctgtcagtgcca

SEQ ID NO: 456663 - DNA, 201 bp, Homo sapiens
tctggaggtgttgctgagagattctgggaaatacatatgatctttagtgcatgaactacatgctgacacttttggcttctgaggctttgttgtccacattyttggctatgttctgaataatggggattgccagataattatctactgaataagtaagatcactagattacttttaattgtgatccaccaaaagatggtttc

SEQ ID NO: 456664 - DNA, 201 bp, Homo sapiens
attctaggtctaaggaggtataacagctccaccaatatttgcctgacattgatcctttaaagttccaggtccatctcctcatttgggatgtattatctcaytggacacctaaaagtcttcaaatgcattacccacctctccctcacatctacttcatggtttgagggccatatttcatgattagctgagagacaagcctgt

SEQ ID NO: 456665 - DNA, 201 bp, Homo sapiens
caggtccatctcctcatttgggatgtattatctcattggacacctaaaagtcttcaaatgcattacccacctctccctcacatctacttcatggtttgagrgccatatttcatgattagctgagagacaagcctgtgtgattgacatgataaatgattacctttcttgcattattcttgttctggagaatatttttactct

SEQ ID NO: 456666 - DNA, 201 bp, Homo sapiens
agaaattagagtatttgcccagtggaattgtgtgctttctgctatcatggtaataaaagtatgtggattcattttactgtgcatgtaagaagggacagcarcatttgagctttgaattcctggtgggacaggctttccaatggattatgcagctgtttcccagcacaagaatgagcatgtgtttatgtgtatatttgatgg

SEQ ID NO: 456667 - DNA, 201 bp, Homo sapiens
ttcaaggtccatccatattgtagcatacattaaaatataattttattgctgaataatattcaattgtgtatatatatgtatatatatgtatatatatatayatatatatacatatatatgtatacagatcacattttgtttatctgttcatctgttgataggcacttagtttgtttctaccttttggctattatgaataat

SEQ ID NO: 456668 - DNA, 201 bp, Homo sapiens
gcacaagaatgagcatgtgtttatgtgtatatttgatggattattatcattgttcacatctctaaacaatcatttgtatttctacatatattttcactgaratatatttactttgcttataagttgtgttttgctcctctgatagactttgctctactaaaagagatatatggtatagtttaaacaatgaggaaattcatt

SEQ ID NO: 456669 - DNA, 201 bp, Homo sapiens
atttcaaggtccatccatattgtagcatacattaaaatataattttattgctgaataatattcaattgtgtatatatatgtatatatatgtatatatatayacatatatatacatatatatgtatacagatcacattttgtttatctgttcatctgttgataggcacttagtttgtttctaccttttggctattatgaata

SEQ ID NO: 456670 - DNA, 201 bp, Homo sapiens
ttaaaatagtttccaatcggtcgctaaataatgattgtttagccttgttttcaaacttcataaaaatgatgtcatactgtaacctcttgtgacttgctttytattcttatattctatcatcagttttgctgtgtgaactttcattcattttctcttttgtgtaatcttccatatactattccatgctatgctatatagcag

SEQ ID NO: 456671 - DNA, 201 bp, Homo sapiens
atgttggccaaactgtgttggataaggcaggacaatgggttttgagatgtaggaagagttttaattacaagcaaggttggtaaaaaaaagtgtttactttygtgtgactcctaaattatgtcagacaatttcattaatcagaactctaattctttcaatattttggctaacctaggctttattgtatatgaaaaatgtgtt

SEQ ID NO: 456672 - DNA, 201 bp, Homo sapiens
ttacggacaaagccatggcttcaaggctgtggcttaaagctgaatatgtgtggtgctcagacctatcgtagctttcttagttgatgtcttgagtttaagtrtaactgagtagctgtacctagaactgagagaacagacaagtactctcacaatgaagtaatagaatatatgccatccgctagcattgggagtgcagaaatt

SEQ ID NO: 456673 - DNA, 201 bp, Homo sapiens
ataataaaaatgctaggtatgcattttaggaagacaactaattagacctgctttttcttaaggaagggacagtaaaaatgtctaatattgtggactttctycatttgtataagtccttttttttaatccctgctcagctcagtatttggtttagaaacttatcatgcctgagaaataatttgaacaactttgtattgtggc

SEQ ID NO: 456674 - DNA, 201 bp, Homo sapiens
aggattctattcaatggcttacaatagttccttgcaaaagtttaaaatagaaagcatagaatactttcactttctatagtacaaattgaagctataataasctgcatataattactcctggaaattttgttttggttaggaatgcaatgggagtgattaggacttagtattgtgatacagagtaagttacatctaggagaa

SEQ ID NO: 456675 - DNA, 201 bp, Homo sapiens
ttggttaggaatgcaatgggagtgattaggacttagtattgtgatacagagtaagttacatctaggagaactctagggttctttgggaaactataaattasgatcaaggctattgttcttaagcaatttcaactcgcattggagtctcttttaagtttagagttcatcaccatcattgttattattaatatttttattact

SEQ ID NO: 456676 - DNA, 201 bp, Homo sapiens
aatttagacttttggatatacagcattttgctataaaatttattttgtgggtaacttctttataaggaaattataatttataactcagcgggggatagcaygtgaggatggtttgaatcagaaccagtactctttgatggttttggataatacacacagtgtgtccaggtaggcttgtctggtgtcccagataaaattact

SEQ ID NO: 456677 - DNA, 201 bp, Homo sapiens
caggcatgagccaccgtgcctggcctctcatttcttgtaactgactacattatattccagtgtctgggtgtactataacatatttaacctgtcttcattartggactttttgattggttctaatattttggtgttactaacaatattgcagcgaatattcttgtatatccttctttgtgttcttgtacaaatgtctacgta

SEQ ID NO: 456678 - DNA, 201 bp, Homo sapiens
tgatcactatctcagtcttcacttggttgctgtataaatatttttgaaattttgagatagactaagtcggggaggagattgtagagacgcttctaccactkacttcatttcctcaggttcctggaccatttggtcctccctgatattttcctactcctctattccaaaattgccacatgtcatgcttcagctgaaattttt

SEQ ID NO: 456679 - DNA, 201 bp, Homo sapiens
taaacaggttctacttaaaaagttctaggctgggcgcgatggctcacgcctgtaatcccagcactttgggaggccgaggtcagctgatcatgagatcaggwgttcgaggccagccggatcaacatggtaaaaccccgtatctactaaaaatacaaaaattagctgggtgtggtggtgtgtgcctgtcatcccggctactca

SEQ ID NO: 456680 - DNA, 201 bp, Homo sapiens
ttcttactgatataagatggtatcctattgttttgatttgcgtttctctaatgatcagtgatgttgaacttttttttcatatgattgttggccacatgtaygttttcttttgagatgtgtctgttcatgtcctttgcccactttttcatgggagttgtatttttttttttttttttttttgagacggagtctcgctctgtc

SEQ ID NO: 456681 - DNA, 201 bp, Homo sapiens
ctgcattaaggtaaaattattgaagttgaatagatttctccttcaattctcattattatcccactttccaagctaaatgcaaaaccacatgtataagaacracaacaaaaaacaacaactctgctaatattcctcaagggccatatgcataccaatacaagcagagtctccctatgagcattacattttgccaaagacagc

SEQ ID NO: 456682 - DNA, 201 bp, Homo sapiens
tctgtttgtttctctgtatgtcatttcagtctgtgattcaaattgaaggagcagctcctatctgggacatgctgttctccaaacagaggccaagaatacarcactatgcaggtgcattaatagttttcgtacagatatggcatttgttacatcttctcatattctgttagccaggttatatgtctaagcctggtgatgagg

SEQ ID NO: 456683 - DNA, 201 bp, Homo sapiens
atgtcctagtgtgagaataggacatcctatttgtgacaaattattttttataggttgaacaaatgtatattaacttttaatttttataagtagaggcttaraaatttctttttagaattttattcatgttctactttagcatgttcaaaataatcctgtgacaggagactcttggtcatttctggacccaggctttaactg

SEQ ID NO: 456684 - DNA, 201 bp, Homo sapiens
acagagcaagaactccgtctcaaaaacaaacaaacaaaaaacaaacaaagaaaccccccacaaaactatttacattttctccaaataaaatgatatgcttwggtatgcacttaacaacatgtgcaggatctatatgctgaaattacaaaatgctgattacaaaaatgaaaaaagacctaaaaatatgacaagacatattgt

SEQ ID NO: 456685 - DNA, 201 bp, Homo sapiens
tccaaagatgtgactcagataaaaaatgtgttgagagcagcctgtccaggtgcatcagggatggcatgggttttagatttttaaaaagcactcaatgcccrtaaggtaggagaccaccagtctcaaaacagtcactagagtgaatacatagtagtattcaggcagctacaaaataactgggtgtgtacttttgaaggaaag

SEQ ID NO: 456686 - DNA, 201 bp, Homo sapiens
catttattaagctttttcatgcagtattgtagtgggcctgggttggagagaagtaaaagtggagaaaagggtagaagaagatgaacagagataaatattgttttttagtagctcataatttagtaggaaacacatgtaaataaggtaattatcataagtacaatagtagaagaagctataaaatgctgtgttggctgggta

SEQ ID NO: 456687 - DNA, 201 bp, Homo sapiens
ctgctgcagttttcttctcatgcctgggaaaatatttgcctgtttttctttttctctccattgtgtgttagagtaacaggatcttccaatatagccaaacraaatagcatggaatgcttatacaagacttaattagtagtaatgtactgtatcactcggagattttggcagtctggctatctggcttggaggcctgctata

SEQ ID NO: 456688 - DNA, 201 bp, Homo sapiens
taaaatttttgtttattttgttcactaacctgtaaaatctagaacagcacataaaatgtcctcaataaatatttgttaaataaatgaatttgttctttactttttttttttttttgagatggagtctcgctctgtcgcccaaggtgggtgcagtggtgcgatctcggctcactgcaagctctgcctcccaggttcaggcca

SEQ ID NO: 456689 - DNA, 201 bp, Homo sapiens
aatagatatatattggagatatgtttcatcattaagtatctaattgacctctaattttaagagctgcaccttccatttattgtcttttggaaatggctggrgcacccaacagaaaaaccgaggacagtcagaagctgacttcaatcccacatagtccctctgtcttaggttgtatttctttgttatttgtatttatcattg

SEQ ID NO: 456690 - DNA, 201 bp, Homo sapiens
aaatggtttatgctctaaaaatgcacaatttatcaaataccttgtatagttaatttaaataagtctcgtagaactttcagtcttgatttgaaaaaatagcwtaggatgaatttatttataagaaccttaatagtttctctcaattccttttacattttagattaccttataattttctaaatctacatgaacaataatgat

SEQ ID NO: 456691 - DNA, 201 bp, Homo sapiens
aatggtttatgctctaaaaatgcacaatttatcaaataccttgtatagttaatttaaataagtctcgtagaactttcagtcttgatttgaaaaaatagcawaggatgaatttatttataagaaccttaatagtttctctcaattccttttacattttagattaccttataattttctaaatctacatgaacaataatgatc

SEQ ID NO: 456692 - DNA, 201 bp, Homo sapiens
tgactccatttcacgcttcagtgtgaaaggtagaaggaaggtattgttctatggaatacttctgtctccatgtcttccatcttgcccatccaattactagytgacatttaaagtatttggtagtggctttatgggacactattgtgatattctgtcaagatttcatagtccccaaagtggaaaaatacctctggtttcttg

SEQ ID NO: 456693 - DNA, 201 bp, Homo sapiens
tttactttttagctggtacaaattagccattatttgtttccaagaattgtcaggtagtattcagttttccaaatctggtattttagaaggtagtggaatcytctaaaatgtcatacttggaagactgcctacaattcagaataaataatttttatagttccagagagactagagacttcttggaaaattctgtgcctatct

SEQ ID NO: 456694 - DNA, 201 bp, Homo sapiens
gaagagatggtatagcacaatatagcatctctttgcccccaaatacctaatcaaataaactattgctcttctcttgagtgacgcttttcatcagaacaacrattttacatttcatagattcatctacataactatgttaacaacagcaacaggaaagtatatttgtgttttcatgttgctttgaaaaaactgtcaaattta

SEQ ID NO: 456695 - DNA, 201 bp, Homo sapiens
aaaaataagagaactgaccagatcccaagagctactcaatggaatcagctagttacctgtttttccgagtgtggccttatggcaaagatctcattcagcayaccaaaacctgaaggtgaatctcaaagctttttctgcgctatccttcagttacttcagtctctacacaacccgcccttctctatctgtgcttatctctta

SEQ ID NO: 456696 - DNA, 201 bp, Homo sapiens
aagtctttttctgaacatgcttttctttctattaaagtttgattgtgaatcatgtgggtctaaatgtgaaggtgtatttttccagctgaccatggtacatrtgacaagcagactgtctctagtgctctattagcctactgtggtgctaatgccttacgaggtgagcaccatgatcatgttcattgtacggagaggtaggca

SEQ ID NO: 456697 - DNA, 201 bp, Homo sapiens
tccggaattaaagtggaagagtgccttacctcttcagaggcagagtgaggtgcagcagagtgggccagatgttccaggtgaggccagcatgtgacattacrtaatactgaataggaaaatgtctctcttctattttttttttccttgatccttctcattatattgagggctcagtttaatgttagtctttaatactcttct

SEQ ID NO: 456698 - DNA, 201 bp, Homo sapiens
aatcacttaaattcctttttgggttgactctgatcttaattaaaatgcctagaaagagcaaattggactgtatacatttatactacagtttcattgtcctwcatttctatctctaaattagtgaataatttgtatttctaagaagggctcaaatacatagctaatattgagtacttattatatactagggacttttataag

SEQ ID NO: 456699 - DNA, 201 bp, Homo sapiens
gttgcaattagacgaaagggtggaagggtagaaggagggagaccatgagaaggcattttaggcaaagtgttggtaacttggaccaggttaatagtgagaaktcaattctagatatattgtaagagcaaagccaacgagatttagagtgaaaaggagagaggaaagtcaaggattttgacctaagcaactagaaaaatggag

SEQ ID NO: 456700 - DNA, 201 bp, Homo sapiens
ataagtaaaattactgcacactacaagaactgctatggagaaaaagcagggaaggaggaaagggaatgggaaagaggtactgcaattttaaatagggtgtrtgggtacgtacttaagggagaaggtagtatttaagaaaagacccacaggaatggaagaagcaagtcatacgcatatcaggagaaagatccttccagggca

SEQ ID NO: 456701 - DNA, 201 bp, Homo sapiens
acatttgctccctgtctgatcataggctctcttctgtttagcaggttcagggtcacatgcctccgctcatgatcccaatttttccacatgaccagcggacyctggcagcagctgctgctgcccaacagggattcctcttcccccctggaataacatacaaaccaggtaagtagagagggatttaacattcttttccaaatg

SEQ ID NO: 456702 - DNA, 201 bp, Homo sapiens
atagcaagaccccatctctacaaaaaattaaaaaaagtagctgggtgtggtgacatgtgcctgtagtcttagctactggagaagctgaggcaggcagatcrttttagcccaggggttcagggctacagtgagctatcatggtaccactgcatagtaacatgaaacaaatttttatgaaaaatagctgtaaccaaatagcta

SEQ ID NO: 456703 - DNA, 201 bp, Homo sapiens
acaaaaaattaaaaaaagtagctgggtgtggtgacatgtgcctgtagtcttagctactggagaagctgaggcaggcagatcgttttagcccaggggttcarggctacagtgagctatcatggtaccactgcatagtaacatgaaacaaatttttatgaaaaatagctgtaaccaaatagctaaacaaaaacaaattagtga

SEQ ID NO: 456704 - DNA, 201 bp, Homo sapiens
taaatcttatttttatatatggagaaactaaggctcagaaaaagcaataataatttgtcccaaactgaaaagcctagtaagtattggagctagttttccamctcagttctgatttaaaactcacatttttcatttattcaaaaatgtatttatttttccagaaaaaaaaatatatataattttttcttttttttgagacag

SEQ ID NO: 456705 - DNA, 201 bp, Homo sapiens
aggataaataggccctttcctaaatagagtagtgttaacagagagggttctttgggattagttctaagactagtcacttaaaaaaatgaatttgaagaggwagtatagggaaatctcttatttccttgaaatgagaagcatgttacaaactttttcaggtagaaaaatgctagttacgaatggataatataaaaagaatac

SEQ ID NO: 456706 - DNA, 201 bp, Homo sapiens
gccaaaaactcttacttgcaatatgaatcttcttgggagagtcttgtttgtttcattcatctccttgccatgtagaagagtgctgtaatgcttgagttactttttctccttccttttttttccctgccatgagtttgttaattcactctttgcttaaagaaaaatgtcagaaagctaaatttttataaaaatggtaacagt

SEQ ID NO: 456707 - DNA, 201 bp, Homo sapiens
ctgactgacaacttgcaattatattatgatgaatggttctgatgtgtgttcaagagaaaaccactttctagaaagtgaaagtcatgcatacggtttctataaaaaaaaaaaaagctcaaataaagtattataactttctattttatttaagcccaaatttggtgggctaaccaatttgagtcattcccttctcacaaaggt

SEQ ID NO: 456708 - DNA, 201 bp, Homo sapiens
ttgaaacatttgtttttaacttgaatgctctcaggtaggtaataattagatttcatttgggatcttttatttaaatgaaagttacccagaataaactgcattttttttggtttaaaaattaaaaaaacgttatttggcattttggaagtaagctaggctaaatagtagtagcaaaagaggaaagtcagtttttcctcttta

SEQ ID NO: 456709 - DNA, 201 bp, Homo sapiens
ctgtgacttttatcaagtactttctgtaataccaggcattggccaagtgcttttaatacatgatctcatttagtattcacaataactctatgatgtagatactattcttactttgtaaatgataaaattggcctaaccaaggccacaaagttaataataggcagaaccttactttgaaaccacgttgaataactccaaacc

SEQ ID NO: 456710 - DNA, 201 bp, Homo sapiens
aaaaactaagtgttaaattgtatggtattaataagtacacagataagcaaagatgcagagactaactgttggagtactgacttttagtaaccaagtagtcmttaaaaataaagttttaacctgtttttatcaaaattataaggtgttcctagaatagcactcagacagggcatggttcttagccctaccacctaccattgt

SEQ ID NO: 456711 - DNA, 201 bp, Homo sapiens
ggatctgagctgtctcctctgagattttgcaatttgaatggggatcagggtctatcattcattcagaagaatactttttggatcattgaccagatttattstatagactagattatttacatctgtcagacagaaatagccctgtggttcactttccctatattatttttcttcttatttttcttttctactacagattga

SEQ ID NO: 456712 - DNA, 201 bp, Homo sapiens
tgactcacgcacatcatctctatttctttccttggttgctagtttttgaggtttattacatttagttattttgcttttcctgtttggtagctgttggtaattttttttctgactttaattttgtattttaataagtaattgacggagtgaaatttgtgagctagttttgatttgccttcataatcagaaatcttgcatctt

SEQ ID NO: 456713 - DNA, 201 bp, Homo sapiens
gtgctggtgttataggcgtgagccatcatgcctggccccttgctcatatcttttaaaaacgaatttaatgtaactgcaattagatcatagatgtcattgcrtgttctttgtttcttacttaatgttaaataataaatatttcccaccacaaagagcctgtcatgacctacacaaacacttagggaagccctggtgtgtctt

SEQ ID NO: 456714 - DNA, 201 bp, Homo sapiens
tagcatgtgtcaaaactacactccttcttatggctgaataatattcctgtgtgtgtgtgtgtttgtgtgtgtgtgtgttattacattttgtttgttcattsatctattgatgggcacttggtttgtttttacattatggctattggtaataatggtgcaatgcacaacattggcatatatgtatctgaattcatattttca

SEQ ID NO: 456715 - DNA, 201 bp, Homo sapiens
taccctttaaccaacatctccctattcctccccatccccacccaacctctggtaaccacctactgctctccgcttctattgagttcagttgttttagattscacatataagggagaacatgtggtttttggttttctatatatttgggccttattttagatagtcttcctcttggccttgagttattctattgaaaattag

SEQ ID NO: 456716 - DNA, 201 bp, Homo sapiens
gtagggctcactcatttgtttactctctctcaagggatactgctctttgttgcttgatgagcaatcttgaaaccttatttctcaaagttttttaagcttctttttttttttttttttgcaggagggtaaattcagcctccgtcttggctagaagtgggtaatccaagtaatgcaaattaaaactatattgagatgacaatt

SEQ ID NO: 456717 - DNA, 201 bp, Homo sapiens
cacatataagggagaacatgtggtttttggttttctatatatttgggccttattttagatagtcttcctcttggccttgagttattctattgaaaattagmctgaagctttttttttttaaaccgaggaaagacattgtttctgtctgtgatggcaatgcatcctaaattttaccaataactatatagtttttggtaggtt

SEQ ID NO: 456718 - DNA, 201 bp, Homo sapiens
ctctaatgtgttaggaaatgtgatttaagccttcttcctgaactcccagaaggaccaatgatgtgatacttaacaataaatttagttgttttagctttctyacgttattggtgttcttaaaaggttttccttcaaatgcacactgaataaaatgaatgataaatatgaaagaaatttgtttcaccactctacgggatttta

SEQ ID NO: 456719 - DNA, 201 bp, Homo sapiens
tccttcttaggtaagcttaagctgatcctagagcagtggctctctaacttttaaggtatgtaagaatcacttgggtggttaggacttgtcaagtggggccyaggtgtctatattttttgcaagcatcccagattattctgatgcaagtgtttatagattgcatttgcagaaaattgccatgaagcctgggatgacatttat

SEQ ID NO: 456720 - DNA, 201 bp, Homo sapiens
tgaatttgaagaggacagcaagtccgtcccattcgggtccttaaccatttcagttttgccagggctagcttccaaagctaggtttaaaagcagctgggagwtgtaccgtcactttacaaaatgagtattctaattattaaccataaaatgtgggaaagatatctggcaagaaatctaaaaagataagcttcttcttttatg

SEQ ID NO: 456721 - DNA, 201 bp, Homo sapiens
ataatgtggtcttttttcaaaagagcaccatattttctttggaaatgagaatgcacaaagggtattttagttgggcttataagaagaccatttcccttgcytagttaaaagagctgttacgcagtagttttaatctccaccttgacagaacatgtgcccctgtgttccaaagggacaaaatgtattgaatttgaagaggac

SEQ ID NO: 456722 - DNA, 201 bp, Homo sapiens
tgttcaggattatcactgaagttccttgcaactctggcctctgattctagatgacaggaattgactctgttactttaaaaaaggagagcagtagatagtcktgcttaggaagctcaaaggcaaacgtcaagtttggccatagcataagacgtgtcctcttaggaggatgtttccatttcaaaccattgaagggtctggaat

SEQ ID NO: 456723 - DNA, 201 bp, Homo sapiens
gtcaattttaacccttggaacaaaatgatcattgctaatcaatgtattgtaacaaactacacaattaatgatggtagatactgagatcagtgtgttctgtrtaaaataaaataaaaatagaaaggaaggaaggaatttattgaaaattgaacagcattcatagtatccaaactccagcaatatgcttttgaaacacaaaat

SEQ ID NO: 456724 - DNA, 201 bp, Homo sapiens
tctcccatcctttcattatatattcattatttattcacaggaaagtgtttttattttccttgttctgtggaaaagggtaaaagcttttcagttaattattytgtttagacatttaaacaaactggaaatagttcaaaatttgcattatgggttttgatagagcttttcaatttttaagtattcattgtaatagtttggata

SEQ ID NO: 456725 - DNA, 201 bp, Homo sapiens
attttttaaataggtagatatacagttttccaagcaccatttgttgaaaagacattttttaattcttttattattattatgatttttgagacagggtctcrccctttcacttaggctggagtgcagtggtgagattgcggctcactgcagccttgacctcctgggcacaaatgattcacatgcctcagccttctgagtagc

SEQ ID NO: 456726 - DNA, 201 bp, Homo sapiens
ttatgattaaaaggagatgaatagctttaatttttagagaatgcctcttcatctaaacaaaacatacatatatacacacataacaacatatgtatacatayttaaatacacacatacatatgcttattaattccataatcatttattaagctttttcatgcagtattgtagtgggcctgggttggagagaagtaaaagtgg

SEQ ID NO: 456727 - DNA, 201 bp, Homo sapiens
gtagatatacagttttccaagcaccatttgttgaaaagacattttttaattcttttattattattatgatttttgagacagggtctcgccctttcacttargctggagtgcagtggtgagattgcggctcactgcagccttgacctcctgggcacaaatgattcacatgcctcagccttctgagtagctgggactacaggt

SEQ ID NO: 456728 - DNA, 201 bp, Homo sapiens
ctccagttattttccttttttctattattgataaaactgctatcatattcttatataagtctgtttttgacagaagctttaatttgtttgctgggtcatamgtaaatatgcattttaattagaagaaattgccagaaaatggttatgctgttttatactttcactaccagtatattagagttacagtatattagagttgct

SEQ ID NO: 456729 - DNA, 201 bp, Homo sapiens
tattaagataaatttggtaggataaatatggtgaaaaatcaaatctgtgtagtattagtactctcttttctaatttcaatccccttttaaaatttcacctkctacatttttgtttctaatgcattcggtatcatttttctctaataacccaagtaagggactatcaaatgtattgtgtgactcttcagaatctcacaggag

SEQ ID NO: 456730 - DNA, 201 bp, Homo sapiens
caatgaatgagcgttcctgctgatccacatcttcaccagcatttggtattatcagtattttctattttgttccttctaataggcatgtagtgatatgtcatttttttaaattcttttaattaaagagtgatatctctaataatatatgatattggacatcttttcatatgtttacttgcatctgtgtatcttctttggtgg

SEQ ID NO: 456731 - DNA, 201 bp, Homo sapiens
gatccacatcttcaccagcatttggtattatcagtattttctattttgttccttctaataggcatgtagtgatatgtcatttttttaaattcttttaattmaagagtgatatctctaataatatatgatattggacatcttttcatatgtttacttgcatctgtgtatcttctttggtggtgtctgttcaggtcttttacc

SEQ ID NO: 456732 - DNA, 201 bp, Homo sapiens
tgtctctgagtcttgctttcctcatccataaagtgggtgaaaagatatctgccttcctacacattttaaaagattgtaatgaggatgaagataatgtaatyagtgaaagcactttgtaaatattattttatgcaaagttacttagcacagctggtgttcctatcctagaaactgacctctggcctagtctatcaaaaaggt

SEQ ID NO: 456733 - DNA, 201 bp, Homo sapiens
tgaagatgggttagtgcccatttaaaagatattttaaaagagaaagtgaagagcaatgtgtatgtcacttatatatatatgtgcaggtaggtagagggatattttttttgaaaacaaatgccaggaagtatttttaatgattacccaaggaggctgttgcttcattaaggtaaaagccaaatcttgttgctttttttccaa

SEQ ID NO: 456734 - DNA, 201 bp, Homo sapiens
gtttgtggctatggagttgttaaaaagatttctaattgtccatgggaactgtaatgatattccctccctcatttctgatattaccaatttgcgtcgtctcttttttttttttcctttagtctggctagaagttcatctattttattggtctttccaaaaactagcttttggttttattggctttcttttttgatttcctgt

SEQ ID NO: 456735 - DNA, 201 bp, Homo sapiens
ggtaatctttaacatccatctcctgttagagttctctaattcaatgagcgtgttttatctattttataatgaatctgctatttaaggaaagtcccattgtrtgcttacttgaatacagtacatatatatgtatatatatacacacatatatatgtgtgtgtgtatatatatatgtattatatatatatttacacacaccct

SEQ ID NO: 456736 - DNA, 201 bp, Homo sapiens
gttcaccttgacaaaccttggcccaatcactaaaacggactaaacccatcactaaaatgagtttagttatctcagtttagtctctagtgagaattttaatrtatatattttaaacctatagatgaaataaaaaaatgttaatctcctctaagacatacaaggttcatagccccctggactatgtgttatgaaataaaattt

SEQ ID NO: 456737 - DNA, 201 bp, Homo sapiens
agctttttcctatagttttcattaaaaagcagaaaattttaattagaaatggaaactgtgaaagtgtttttaatcctttaaaccacagaaatattaggcasttttcaaatactttcaccagttctcggggtgaagaagtattggtgggcccatcagattggattgtctctaaaatccttgagtgatctcctttcagtactg

SEQ ID NO: 456738 - DNA, 201 bp, Homo sapiens
gctaggaaagatcagatcaacaattcaaacctagatctgtctatatggcatctgagccatactgcctcctgtttttctccaagatgagctgactaaattgkttgcctttgttggattagctttttcctatagttttcattaaaaagcagaaaattttaattagaaatggaaactgtgaaagtgtttttaatcctttaaacc

SEQ ID NO: 456739 - DNA, 201 bp, Homo sapiens
tttgttttgttcctgagttcagacgaaagcattcattgttttaccattaataatgatgttttctgaaggtactctcctagtcttacattgctgagagttctttttttttaaaagaaaattacaaatggatactgaatgttataaagtgttttatttgcatcttatataattatgtgattttttatgtttattatgttatat

SEQ ID NO: 456740 - DNA, 201 bp, Homo sapiens
tggctctgtatgagcagtatggtctgatttctgttcccatatatgggaactgcggagatgtgagatggtctttctcggttgagccttatgcctagtcattrtattttcgtctatatcgtagagaaccttttgaaatatatttttagcatttgggaagaagagaggctccattaaggagtaaattgcattcttccgttaact

SEQ ID NO: 456741 - DNA, 201 bp, Homo sapiens
gtcagggaaggttttcatggagtaggtgacagttgagatcaaacattaaaggcttactaacatttcattgaacagatcaaaggaaaggacagtggaggcaraggaatagaatgtgtaaaggcatgaaggagtgaaaaagcatggtatcatttaatatgtctttaaggcaatacaagaaatctttattatcagagagtagtt

SEQ ID NO: 456742 - DNA, 201 bp, Homo sapiens
gctgggactacaggcacctgccaccatgcctggctaattttttctgtatttttagtagagacggggtttcaccgtgttagccgggatggtctcgatccccygacttcgtgatccgcccacctcggcctcccaaagtgctgggattacaggcgtgagccaccgcacccggccgtaagcttcttaaactgcaatactatttag

SEQ ID NO: 456743 - DNA, 201 bp, Homo sapiens
tatttgttatttttcttagaaaattctgcgtcaggaatacacacaaaacacgattagtggggctgtagtattaaccttccctgcaaaattccttatcattmcacatttgaaagatttttaagtctttaatatttaaatatgtattttaggatgcaacaacaaaatccttatttacctaagaaagaatcataccagaatccc

SEQ ID NO: 456744 - DNA, 201 bp, Homo sapiens
gatgcaacaacaaaatccttatttacctaagaaagaatcataccagaatccccatgtagaaattaggtgtttctaaatccataattatatgagcatagaawttatttactgtcttatatatacataaatagagtatttggcaattagttcataacacagatttaggtttatttaagagagtcaatgtagagagtatcataa

SEQ ID NO: 456745 - DNA, 201 bp, Homo sapiens
ctgacaagtttgaaaccactgagcaatgatgatcaaagatacgaggacattaacccacatgtgtgagatacatgttaagttaatctgtgagggatgtttaygtgaagactaattttacaaatggtaagtttattaatgaatgccttttaccttttgtataattttagtgactcacataatgaatatttggataatgagaga

SEQ ID NO: 456746 - DNA, 201 bp, Homo sapiens
acgaggacattaacccacatgtgtgagatacatgttaagttaatctgtgagggatgtttacgtgaagactaattttacaaatggtaagtttattaatgaaygccttttaccttttgtataattttagtgactcacataatgaatatttggataatgagagaatctcctaaatccattgagtaccaagtatatatgggccag

SEQ ID NO: 456747 - DNA, 201 bp, Homo sapiens
tgtgatatccagagaacctttaataattaaagtaaaaataacattttgataagcaaaaactttgctttttaagacttttactcctcttttataatgattamacgtaagaaatggcctattttaatggtggtttattattctggttaataacattcacttagaaaaattaccagactttgattagaacatctattgtatgtg

SEQ ID NO: 456748 - DNA, 201 bp, Homo sapiens
gtaggataataaatactatgaaggaaaagggagacctaattcggtttgggatcaaggatggtgactatacattagtggtattaaagctgagacataaattrtaagtaggatatagtttggtgaagaggagacagaagagggaacagtatttatgagggccataaatagaaaagaagcttgcaagctctaagaacagatatc

SEQ ID NO: 456749 - DNA, 201 bp, Homo sapiens
aaagatattaagagatagaattgttaagagttaatgtttaagtgtagagaccaagacagaagaatggttcaaagagtgctcagaatttttaaactctgggyaaataggaacgtggtaatacaattaaaaaaaaaaaaaaggaggaacatgttttggacatgggagcaatgagaatttttttattctgagtttggtatcttg

SEQ ID NO: 456750 - DNA, 201 bp, Homo sapiens
ttcatgtatgtatctggctttgtatatttgtttgtatgtatctggcttctccaactacagaattctctgaaactcatgtgtacagaaataatgcctcattyactatactaatttaataaagtgttggacacatagctggtttcaaataggcccttaccaattctgagtgtggtgtccagaatattccctctactattaatg

SEQ ID NO: 456751 - DNA, 201 bp, Homo sapiens
aatagcataatgggagaacagaaataattatagaaagggtcattaaaaagtttaggatagatttctgcttctcaaataattatattctaggtctaaggagrtataacagctccaccaatatttgcctgacattgatcctttaaagttccaggtccatctcctcatttgggatgtattatctcattggacacctaaaagtct

SEQ ID NO: 456752 - DNA, 201 bp, Homo sapiens
ttctccaactacagaattctctgaaactcatgtgtacagaaataatgcctcatttactatactaatttaataaagtgttggacacatagctggtttcaaakaggcccttaccaattctgagtgtggtgtccagaatattccctctactattaatgtagagggaatattcattagggtacatgtagctacaatgacgtcttc

SEQ ID NO: 456753 - DNA, 201 bp, Homo sapiens
acattgatcctttaaagttccaggtccatctcctcatttgggatgtattatctcattggacacctaaaagtcttcaaatgcattacccacctctccctcayatctacttcatggtttgagggccatatttcatgattagctgagagacaagcctgtgtgattgacatgataaatgattacctttcttgcattattcttgtt

SEQ ID NO: 456754 - DNA, 201 bp, Homo sapiens
tttttaattgtttttgttcaatggatatttacacctgagacatgatgatgccaaagttaggtcatagtaccagaggggaaaagttatgtaagaatgcatcrtcatttgctgtatactataaactgctacatttgggaataggctatggcatgtaactctgaacaaaaatgtaatatcccaagtctcagacctggaaaaaag

SEQ ID NO: 456755 - DNA, 201 bp, Homo sapiens
ttcaaataggcccttaccaattctgagtgtggtgtccagaatattccctctactattaatgtagagggaatattcattagggtacatgtagctacaatgaygtcttcccaaagaactgtgaccgaatatacttccatttatttgaaacttatttggtaatttacctatgaactcatagagaattatgcaggtacattcagc

SEQ ID NO: 456756 - DNA, 201 bp, Homo sapiens
acaaagcttgtagttaggtagaaatattagaataaatgaactctctttgttagagccataaatgtaatggaaagtatgcaggctttgatacaattccatargacatacattggtcagaaattagagtatttgcccagtggaattgtgtgctttctgctatcatggtaataaaagtatgtggattcattttactgtgcatgt

SEQ ID NO: 456757 - DNA, 201 bp, Homo sapiens
atgttcaagtggatatctttccatgttataacatgagaaagcttagcaggtgttaggtgggttttcattcaaacgcatactagaaataattcctttcctcstctcctcctggatgcaagtaagtatgattttcactgtctactgtgactgatcgatgccttacagatcagtcttgtacttttgcctctcacttaggagtgc

SEQ ID NO: 456758 - DNA, 201 bp, Homo sapiens
ctgagtgtggtgtccagaatattccctctactattaatgtagagggaatattcattagggtacatgtagctacaatgacgtcttcccaaagaactgtgacmgaatatacttccatttatttgaaacttatttggtaatttacctatgaactcatagagaattatgcaggtacattcagccctctgtatctgtgtggattca

SEQ ID NO: 456759 - DNA, 201 bp, Homo sapiens
ataaaatgtgatgtcttcagagagtggctatttaggtagatttttgttggttggttgtaatttcacataaatttcccttgagactgtggaactgtgcttakacctgtaaaagtcacatctctattcttttcttttgtaatacaattctctaactccctctccccactcccacccctacttaaggatgtgttgccaaaagaa

SEQ ID NO: 456760 - DNA, 201 bp, Homo sapiens
ggggctacttttttagcaatgataaagatagattattgaatacttactgtgtgctgtgtactctgctgagtggattatacagattattgcaaatacaacaratttacaagatagggaatatcattctcactattaaattgaaaaatgcaatattcagagatgttaaataatttgtgtagggccacacagctagtaaatggc

SEQ ID NO: 456761 - DNA, 201 bp, Homo sapiens
ccaatatctttatatagcactatttctgttttctattttgatatgtatattttgcaggaagttttctgttttatttaaagtttcaaatttattagcataaycttcatactattctctttatcaatgtctgtaagaatacatatatatggaataatgtctcctttttcattattgatataaataatgtttttgctctttatt

SEQ ID NO: 456762 - DNA, 201 bp, Homo sapiens
gaagaaatgaagattcatggccctagaggaagacactttcttgatagtctgagagacagtacatctgggttgacttaactccattctgagggtagtaaccraaacaagtacagtgaatatggcagttgaaatggaaacatggaaatcattgcaggtgtaggaaatttcagattttttgctttattaatattatgcttgtta

SEQ ID NO: 456763 - DNA, 201 bp, Homo sapiens
aagtaaatattattattctagaaaaataatactgtgtgccaagtatatattctatgttatattacaataattattttagtgccttgtactataagtgattygaacatttgcattttaatcttaattttaaagaggtcgaatcaatcctatttaagacacctataaaatacaattacattagcatagattagccatgctttt

SEQ ID NO: 456764 - DNA, 201 bp, Homo sapiens
gaggcagctatgttaaaatctcaatcatgtggatatatcttatttttctttgtcagctttggtttatgttattggttttatgtaattttaggattgttggaattttcctgttattattatgtgatacttttctttattgatgcttcttgacttagaatattaattatctgatattaatacatctacatcagcttttttgga

SEQ ID NO: 456765 - DNA, 201 bp, Homo sapiens
taaataagaagagataagaaagtgtttagaccttaggacatgtgtttcattattactgaaaaatcattcaaaataccaagcagattaaatgagcacagtgrtaggcacatgggacaagaatttgaataaaatacagctttaccagaagaggctcacaagggaaatagtagcgggtgggtttggtatggacgtaggggtaga

SEQ ID NO: 456766 - DNA, 201 bp, Homo sapiens
tactccataaaaggaactcaacctgctgcttattgttgcttaagatagaaagcccaatcaaagacccagcctctctttagtgaggaatctagccctactgkatagctggtttctcattgggctgccttttctaaagaagtgtcaatggcagtgtgaataattaccacaaaaaaagatctgcttttctgactgaatgttctt

SEQ ID NO: 456767 - DNA, 201 bp, Homo sapiens
acatgaatagattagcatataatagtgtcttatacacacacatacacacacaagacatggcacagcactgcatataacatttaatgaactactaatcttcrttttgtagacaagagcaaataaagctcagaggaagagagattattatgcattatggccaagcatgggacattcttgaggaagggacttgaagtttgggta

SEQ ID NO: 456768 - DNA, 201 bp, Homo sapiens
gaataaaatacagctttaccagaagaggctcacaagggaaatagtagcgggtgggtttggtatggacgtaggggtagactgacatacgtgggtttctattrcacccacacttcctggatcatagctcttctaaaacacatttgcatttgcttggtgatgtacctgtattccctagtaaactgatgctcaaccagggaaggg

SEQ ID NO: 456769 - DNA, 201 bp, Homo sapiens
aagagcagcacataaaagtctcacattaaatcaacagctacgaatgacaactttgtgagaaaggcatgttgaaagctgagacaggtcaaaagctaggcctyttgtaccagttagccaagttgtgaatgcaaagggaaagttcttgagggaaatgcaaagtgctactccagttaattatgaatgataagaaagcaaaatagc

SEQ ID NO: 456770 - DNA, 201 bp, Homo sapiens
cgaaataacttttaatgttggtagaaaacaatttccattgaaccctccaagtgatgtatagtcctgatggggcaagatagtgaaatgtcaagattcttgtrtaactccatctcctaatactccataaaaggaactcaacctgctgcttattgttgcttaagatagaaagcccaatcaaagacccagcctctctttagtgag

SEQ ID NO: 456771 - DNA, 201 bp, Homo sapiens
tttaagtttagagttcatcaccatcattgttattattaatatttttattactgttgttatccttgataaaagccacttgacataaactccctaattatcaraatgcttactttacctgcagatgtttaagttttggattttgagaacatcttacagtgacaaagacaggtgaatttgagggagaaaaatcatctggcggtg

SEQ ID NO: 456772 - DNA, 201 bp, Homo sapiens; identical to SEQ ID NO: 29720

SEQ ID NO: 456773 - DNA, 201 bp, Homo sapiens
aatctatccttggtctttgcaaaaattaattttaaacatgaatagagaccagaatatagaccatgaagagtgcccacacccagaaagccacatagaagccrtgctgtggcatgtggctccctgggcaggggcctagtacatcagaaaaaggctttccatgtttccatttttaaagtgcttgcaattgtttgatttaaaata

SEQ ID NO: 456774 - DNA, 201 bp, Homo sapiens
acttcatgttacagttaatttgtccttcaaaggttgtcatttctaatattaatgagcctgggtaaatcttaacaacatttggtatatattaagtataccckgaaattttatcaagtagagaaaagttatttaaaattgaaagactctccttatattagcatatgccattactttctttctttaaaataaggaagattccgt

SEQ ID NO: 456775 - DNA, 201 bp, Homo sapiens
tgtgatataatttctaatgctaggttttaagcttatggtttcctattttcattctgttaaatctccagaagctcttttagccttgatattctattattctaaaaaaggcaaggccgtggcttgcaattatgttttataaaatttaatggcactcaaaattctttatcataaggagagcacagtatagatctcttgcatgta

SEQ ID NO: 456776 - DNA, 201 bp, Homo sapiens
aatttctaatgctaggttttaagcttatggtttcctattttcattctgttaaatctccagaagctcttttagccttgatattctattattctaaaaaaggsaaggccgtggcttgcaattatgttttataaaatttaatggcactcaaaattctttatcataaggagagcacagtatagatctcttgcatgtaccattcac

SEQ ID NO: 456777 - DNA, 201 bp, Homo sapiens
tccacattcaaccgacaatcttttagtaagtataatacatggaaagctatgagagggaaaagttgttgctttaatttatactttctgctaatatcacttgmattgggtcatactgatgagcattctgtagaagatggcatttagaaatattgatagaccctcgttgcctttgcttgttttttgtttgtttgtttgtttttg

SEQ ID NO: 456778 - DNA, 201 bp, Homo sapiens
cttccagcgtccctggctgcctgtaaattgctgtgaatggggctgtgggctgacaggctctattaagacaaactgcctttctcatcggagagataaaataratcaggtgtttagtcaaattaaaatacttcagctggagcaggccctggggagcactgatccacctgactaatctgagagaaactcaagacagatgtggtt

SEQ ID NO: 456779 - DNA, 201 bp, Homo sapiens
atataatagtgtcttatacacacacatacacacacaagacatggcacagcactgcatataacatttaatgaactactaatcttcattttgtagacaagagsaaataaagctcagaggaagagagattattatgcattatggccaagcatgggacattcttgaggaagggacttgaagtttgggtaggtcagacttatggga

SEQ ID NO: 456780 - DNA, 201 bp, Homo sapiens
tttctgttaactaagccataatcttccttcctcctactttgcagattggttctaatcttcttctttcgtgtctcctagaacaaatctcccctttatttatragaataaccattcaagcgtctaaagatggttattttcatacagctagtctcattacatcttttcttccctgaaatagattacttagaattttcatttgtt

SEQ ID NO: 456781 - DNA, 201 bp, Homo sapiens
ccatcattgttattattaatatttttattactgttgttatccttgataaaagccacttgacataaactccctaattatcagaatgcttactttacctgcaratgtttaagttttggattttgagaacatcttacagtgacaaagacaggtgaatttgagggagaaaaatcatctggcggtggataacttggcaagttttgt

SEQ ID NO: 456782 - DNA, 201 bp, Homo sapiens
aaacaaacaaataaataatagtgagaggtgccttagaacaaagtaaagtagggaaagggataggaagtttcagcttatagggtgcaattttaaatagggcrgtcatggaaaacctcactgagaaagcaacatttgagcaaaggcctcagtagggaagggagcaagctgtgcagatatctgggaaatgtgggcagagagaac

SEQ ID NO: 456783 - DNA, 201 bp, Homo sapiens
tattattaatatttttattactgttgttatccttgataaaagccacttgacataaactccctaattatcagaatgcttactttacctgcagatgtttaagwtttggattttgagaacatcttacagtgacaaagacaggtgaatttgagggagaaaaatcatctggcggtggataacttggcaagttttgtgatgtttgag

SEQ ID NO: 456784 - DNA, 201 bp, Homo sapiens
agctgtgcagatatctgggaaatgtgggcagagagaacagcaactgtaaaggttttgaggcgagattgtgcctagcttgttccaagaagaaataaataggycagaatgacaggagcaaagtgagtaggtaggaagaatagtagaaaagacttttaagccatagtcttcataataaggaaccaagttatgaaaagacttgta

SEQ ID NO: 456785 - DNA, 201 bp, Homo sapiens
tgctcatatagagccaaaactcatagatgtataacattagcctccaatttagtttatagatggattctctttgacactattaacagttgtcaaatttgaakagaggattaagaagaacatcaagttcatcatcaagctgtttagggagctgttgaaagagcctttgtgctttatgtaatcaaaagaactgctcagtgtttg

SEQ ID NO: 456786 - DNA, 201 bp, Homo sapiens
ttttgaggcgagattgtgcctagcttgttccaagaagaaataaataggccagaatgacaggagcaaagtgagtaggtaggaagaatagtagaaaagacttktaagccatagtcttcataataaggaaccaagttatgaaaagacttgtaagacattgtgaagactttgtatttgaccctgagtgagatggaaaggcattga

SEQ ID NO: 456787 - DNA, 201 bp, Homo sapiens
aatcaagaataagaaaatagagttttcttttattaatgctcttcctttttgtatgcacatctgagtttctaaactatataattttccttctccctgaagamcttcaacatctcctggcaacacatttcctcaatttttatttgtctgagaaagtcttcatttctactttacttttgaaggataattttacaggtacaaaat

SEQ ID NO: 456788 - DNA, 201 bp, Homo sapiens
gaagaatagtagaaaagacttttaagccatagtcttcataataaggaaccaagttatgaaaagacttgtaagacattgtgaagactttgtatttgaccctragtgagatggaaaggcattgatgagttttaagcagaggaatgctttcatatgacttaggttttgaaaggatcactctatatgctatgttgagaattttct

SEQ ID NO: 456789 - DNA, 201 bp, Homo sapiens
ggataaaatggggatagttgatgggtacaaaaatatatataatgaaaaagagctagtatttggtatcacaggagggtttctatagttaatgataatttgcyatgtatttaaaaataactagaagaatagaactggaatgtttctaacacaaagaaatggcaaatacttaaggtgatggatacccaagttaccttgatttga

SEQ ID NO: 456790 - DNA, 201 bp, Homo sapiens
tagatgtaaaaggagtcatgaaatttagagttaaattagttgattaatacatgagaagaatataaaaaatacagtgcctgacagatatgtgctcagcaagygttaattattttccttgaggggacgagaatttatgtttgaagtgatgaatcaaggcataattgaggagttggcatttgatgtaggcacagtagaatagga

SEQ ID NO: 456791 - DNA, 201 bp, Homo sapiens
gagggggagatgtgccgagagaggtttttggttgttttttatggtatgagtgattatagcatgtttggtgggaattctataaaaaattaatgattcagatrggagagacaattgctggagagatatctttagtaaacaaaaacagatagtttcagtgcacaagcagaggggttagccttatattggattatgaactgattc

SEQ ID NO: 456792 - DNA, 201 bp, Homo sapiens
tatccaaaacagttggtgcattccttaatgatcaagtgcttgagaagtccagctcctcctggcagagcatctgtgttgatgtttatatcattgccctgctrtatgggaaaggcatgctttctcttgctgcttggctaaaaataggacggaatatagtattgtatgagatattttaagatagcaaaaacatttaagaggtta

SEQ ID NO: 456793 - DNA, 201 bp, Homo sapiens
cattagcttggagtgagaaagggggagaagttggatatttgaggaaagttaagaaggtaggaagtaattgtctaggaggctaagagaaggagtaggctagracaatgtgcaatatgatggctgaacagcaccagaggcctatttgaagtacagcattgtaaatttagagactagtaagtatggcagtgtattttctccagc

SEQ ID NO: 456794 - DNA, 201 bp, Homo sapiens
taaaaaatagtaagaggctatttaagcaattaaatgcaacccgaacatatgcatctgcatgtaggctccattggaacatcactcagaatccaattttgaarcacagtagtagatcatttgttgaagactgagaaaataataggaaataatggaataaagaaagaaggaaggtaggaaggaaggaaaacgggagggaagaag

SEQ ID NO: 456795 - DNA, 201 bp, Homo sapiens
acatttaagttgtttttattgtttgttggtttaaagagcacctattttgaaaacagaaaacatttttattaagacttatcaacttattagtggttatttargttatattcttgaaagtgaaattcctgggccaaagagtttgttctttttaaaaagacttttgattcatattgccagttacccttcaggaagagtgtagta

SEQ ID NO: 456796 - DNA, 201 bp, Homo sapiens
gttaaatgccttaatagagttaaaaatactactctaggaggttcaaaaaatttaagatatatatccctttaagaggaagtacattaagaaatgactttttsatgttctctgagagttgggtgggattttgtcagtggaataggagatgaagaaaggagcatcctgctagtaaggggactagcacaagtgtggggaatatgg

SEQ ID NO: 456797 - DNA, 201 bp, Homo sapiens
ccatacttcactgtgtcaaacccatacgtctagagtggatgatagtaattgcactgtggtgttttggatgcatttctatgcagcactttatcatttaggarggaccatcaatattagatgcctagtggcatttcactggtttgctaagaagaaataaatattcagaggatccagcatctatacctagagctgcagaatgag

SEQ ID NO: 456798 - DNA, 201 bp, Homo sapiens
gggtttgtgtgatgttgaggaaataaatctatagaattcatgattaattggatttagctaagaagaaatttaagcaaactcccacatttctgcattggttsacagttgacacctctgttcaacaggataggtgtttatttaattacacaaatatttaccaatgataaatcactgctcattatcagtgagcagtgataatac

SEQ ID NO: 456799 - DNA, 201 bp, Homo sapiens
catggaaattaagaatgacaatcatagggatcaattcattttattttcagtggggcttaaacaaagtttatatgactttaccatctcattttagatttttstaattgtgtaaatataacatagaaatagaatttatttttggttcatgaatacttagtgagatataagttatgtatttcctttttgttctctatccataga

SEQ ID NO: 456800 - DNA, 201 bp, Homo sapiens
accagcataagtgagtgtgcataggagaactggcagttgaccactattggttttcattgcaatatgcaggattttttgcacccctctccaaagaattagagtgtcttacttcatatctgaagcaaataattagtaatttttttatttttcacttttggatactacattgtggggacaatcaaacctatgttcaaataatga

SEQ ID NO: 456801 - DNA, 201 bp, Homo sapiens
ccaggtgccgtccatcacccctttctttgactgggaaagggaactccctgaccccttgcgcttcccgagtgaggccatgcctcgccctgcttcggctcgcrcatgttgtgctgcacccactgtcctacgcccactgtctggcactccctagtgagatgaacctggtacctcagatggaaatgcagaaatcacctgtcttct

SEQ ID NO: 456802 - DNA, 201 bp, Homo sapiens
gtacctcagatggaaatgcagaaatcacctgtcttctacgtcgctaatgctgggagctgtagaccagagctgttcctatttggccatcttggctcggcccraggtttactttaagaagtttaacctggtgaatagaatttggaagacacggttaataaacaagttgatggctagccatatgcagaagatagaaacaacccc

SEQ ID NO: 456803 - DNA, 201 bp, Homo sapiens
gataatcacttcttgcttttctttatagtttcacccccagagcatgcatgcttatacaacacactgttggatctgtctgttctttactttatataaatggkctttatatatccttttgtttctggatcctttcatttcatataagatttgtgagatacatttttgttatttcgtgtagcagtaatttgctcattttcattg

SEQ ID NO: 456804 - DNA, 201 bp, Homo sapiens
tgacaagtttgagttatagcatctgttttcttatttttaaatcacattgtgtaccatctgttcttttgttatatttgagcataatttttagaatttaatasatgtaggtaaagactttaaccttcagtattactaattttacagttatgtatacacagtatattcagaatgctagaggtgagtaagtatacatgaagaata

SEQ ID NO: 456805 - DNA, 201 bp, Homo sapiens
tgttgagactattgattttactcacagtactcccagagtcattcccttcttctggaccctgattactcaggcagtggttataaaagtgcattttcagatasttttgttattttcctttacttatcaccagtgacttgcatttatttacttgagttttttacattcatgatcaagcaggctttaaggccctgtgccagaagt

SEQ ID NO: 456806 - DNA, 201 bp, Homo sapiens
actgagattagggaggagtgacagatgaaaatgacaaggtccactgtatgacaagagagcgagcaactaagatagggaggggcccagattatcacagtggyggggaggtcacactgagatagtcgggtgttggaatgaacatctacagagatagcaaagacatcaaggatcatggcagaggttatgttgaagaaacagcaa

SEQ ID NO: 456807 - DNA, 201 bp, Homo sapiens
tatgacaagagagcgagcaactaagatagggaggggcccagattatcacagtggcggggaggtcacactgagatagtcgggtgttggaatgaacatctacrgagatagcaaagacatcaaggatcatggcagaggttatgttgaagaaacagcaacagtgagccaggagctaacatctttaaggaatgagggggattgatc

SEQ ID NO: 456808 - DNA, 201 bp, Homo sapiens
aaaaaaaacattaaaaattcagaaataataaatatttgttgaacgaatgaatcaatgaattaaaggatgaattaataaaataaatgaaaattgggttctgraaaattttaagcagagatgttgtacagggtatccccatgctggtggaatgttatcttcatgatctcctaaggttcctttcaaattaatactacagttatt

SEQ ID NO: 456809 - DNA, 201 bp, Homo sapiens
tttaaacccaagccattctgactccaaaacctgagctcaccataccacataaccttcttcccagaaggcttggagaggcaaaaatcatctctcacagggakaagttctcactctagcatttatgtacaacctcgaacagttgtatgtgaatgtgagaaccttaccagagctggactcccttcatttcctcaaggtggggag

SEQ ID NO: 456810 - DNA, 201 bp, Homo sapiens
tcatattttatattcactgaaaaagaatctgaaacttattgtttgtagttaattattataattaaaagtgtaaaactaaaaatcatacctggtttcaaaawtttcaattataaaatgttcttatatgtgaaaatagtcaccaattataaaatatttctattgattttgtttttaaaaggctaattttaggaatagctacag

SEQ ID NO: 456811 - DNA, 201 bp, Homo sapiens
cagagctggactcccttcatttcctcaaggtggggagtaacccctgggtttttaccctcactggcttttagcactgtctgggggcttaaaacagccatatwtatctctccactcccaggactaggcttttgaatatcatgcatctcactctcactctagaaagtaaattgtacagatgttttatttgcttgtttatttatt

SEQ ID NO: 456812 - DNA, 201 bp, Homo sapiens
ttcagggacaccttgaatagttctctgggattcccagggatctaagaaccacattttgagaactgctggactagaaccttagattagcacataattacctygacaataagttaactactcagtaataactacaaagcaacttagtcacatttaagacttcagagattctatgaaactctgaatgaagttaatggcttaaag

SEQ ID NO: 456813 - DNA, 201 bp, Homo sapiens
atgttttatttgcttgtttatttatttttagcattccattaccagcttaaagtccaaatactctgaactatgtggagcccagtgtagaagattttgattcygatttaaattgctaagttttttctgatagtgtgagcttgcctttctcaccctgatcttgatatgtgctagggaatttgtgacacggggaaggttcaactc

SEQ ID NO: 456814 - DNA, 201 bp, Homo sapiens
ctgcgcctgtgacataataaacatgaactgtggagttgatcacatgtgggtttgattcatgataggtataaattgatctgtttatttaacctattttactstcaacttgctaacctgaaaagtggttaaaaaacaacaacaacaacaaccatgcatttcaggattaatgtgaagattagacaggtagttgtaaagtgactg

SEQ ID NO: 456815 - DNA, 201 bp, Homo sapiens
taaaatgggttaacattgcagtaaaagctttccctctacactcataatgtgattaaggcaaaaacattttattgcagttatccaaattcagtaaaaaaacyaatgaggcattataaggttagcataaaatttaatttgtgttaatttgcccaaaacttaggaagccagaagtatactgttttaaaatttgattcaataaga

SEQ ID NO: 456816 - DNA, 201 bp, Homo sapiens
cctcttgtatcacaaattatctcatgggaaacgattaaacatgtataatattgcaaggaagccccagaaattggtataatcataaatgtcaagtttacagygtagttcatgtcaccaacgtttgctcaaccaaaaatgatattcaatttattgataattaaaacatttttgaataatctaggcctggtaaatactagccta

SEQ ID NO: 456817 - DNA, 201 bp, Homo sapiens
catgtaaaaataaaaaactaaaacaatttaataacatctattatttattgactatctagtgtatactaggattttagatatataagtcacataattctctmaataagataaagaagttgagttttagagagtttctatggctacagaaaggtgataaagagcaaaggttcaaattcaggtattggcccccatcatgccaaa

SEQ ID NO: 456818 - DNA, 201 bp, Homo sapiens
tgctggttattgaatgcagggcttgaagcaaggtctgattttcttcatctggaaatggaaaaaataataacttatggggccatgatgttaattgggtgagytggtatacctgaaaatattttatatgttatgttagggatatgatgtgccttgtggtgattaaaagagattgctaaattcagcgtgaaccaatatctcaca

SEQ ID NO: 456819 - DNA, 201 bp, Homo sapiens
ttattgataattaaaacatttttgaataatctaggcctggtaaatactagcctattcagcttcattcccgtcttgtaacaggtagtttagctattatatgmctctcaaccccttgcagtattattaaatcatctggtttaagtacaggccaaattattttacctaaaatgttgttttctatataattttgcttctggtatt

SEQ ID NO: 456820 - DNA, 201 bp, Homo sapiens
ttttaaaatgttaagttctaatctcttattctgatgtgcagagagagttgcaattgtttgtagtatgtaagtagtagcttgtattgtaactagtttgatgyatttcatataattcaattgatattatgagacaaactactaggttatttcttctagtctaacattttaatctagcaataaagtggtagtatgtttcacatt

SEQ ID NO: 456821 - DNA, 201 bp, Homo sapiens
ttcatataattcaattgatattatgagacaaactactaggttatttcttctagtctaacattttaatctagcaataaagtggtagtatgtttcacattaawtcagtaaaaaaaagtggccctttccatttgaagactattctgtattcaatttaaaaaggcacatcagtttagaaaattaaaatccagtctgtgcttattt

SEQ ID NO: 456822 - DNA, 201 bp, Homo sapiens
ttatggtgacatttttcatgctgtaatgttgtgattctttatttccatttccaaaaagcatatattttctctcctgtttttcagatgatgacaacttaaaracattaaacttggaaaagtcaaagtcagataataaatttactgcatattgtttaattgttttgaggatggtggcagcattgtaactaattagttaattgt

SEQ ID NO: 456823 - DNA, 201 bp, Homo sapiens
ggatataggtatatagtcttacacttaaacaggtatgcccctgaggttcactgtgacctcaagtcttttgccagaattttcccctaattcagttcacaagyggtagggtctgcatcagtggcatttccccctgaattccattcagcagcaaggttcaacagtggtgactgccaggcaggagagtcctgcggccaaacctga

SEQ ID NO: 456824 - DNA, 201 bp, Homo sapiens
tcaccatgttttagaagtgctacagcagtgcagctgttataaaccaattacaggcaggtaactgtttattttcatagctgaatctgtttgtcaatcatggsaatgcaatgaatcaggagaggggacctcaaatacaaaccacagagtaaggcagagcatctggaatgggttcaagccacaagaattagggcaggagtatag

SEQ ID NO: 456825 - DNA, 201 bp, Homo sapiens
aagtgctacagcagtgcagctgttataaaccaattacaggcaggtaactgtttattttcatagctgaatctgtttgtcaatcatgggaatgcaatgaatcrggagaggggacctcaaatacaaaccacagagtaaggcagagcatctggaatgggttcaagccacaagaattagggcaggagtatagatcgacttgaaact

SEQ ID NO: 456826 - DNA, 201 bp, Homo sapiens
gaagagaagaagcaaggactcaatccatggggacttcggtgcttagatggcagggagatgggaaggaagcagcatgggaacttagaaggagcagccaattdggaagaagaccaggagggtgtggcatctgagaaaacaagtgaataaaatgtttcagcaaggagaaaatgatcagctatatcaaatgctgcccgtgttata

SEQ ID NO: 456827 - DNA, 201 bp, Homo sapiens
actttattattaaaactttaaatgaaatacagaataaaatgtttacacttttactttggcctgggtgcatctgaagtgttgtgtcccagttggggtctcattttttttttttcttttgagatggggtcttgttctgtcgcctaggcaggagtgcattggtgcagtctcggctcactgcaacctctgcctcccgggttcaag

SEQ ID NO: 456828 - DNA, 201 bp, Homo sapiens
ctttgaaatggaactttgtgtatctcacatctaggaattccatccatagtcttttctgtttcttcacctcacattgcttcatgttcttttgccacttaaarctatcttttctcttttttctcagaggaagaaatgttccatctctgttcagaaggtgacatcaccacttgtgcctttttacttccattccctctacagagg

SEQ ID NO: 456829 - DNA, 201 bp, Homo sapiens
aatgaatttgacataaatgaatattgtttttggtacctcagccattctttcctttaatcgctttccagtttccccaggcttcttttgcatttatgttctcmttccagtccctcatataaaaccctcctttcaggaaagaattgggtgagcatactcaacccaagatattaatggccaaaaaatgttagacttttgtggtat

SEQ ID NO: 456830 - DNA, 201 bp, Homo sapiens
tacttttattctcatttgtcttaagaattgctagattcgtgttttttgtcccccttttgggactactagaaacaatgcaaagaagtttttgctgtgcaackgctattaaatgaagtttgcaattgtttttatatttttcctctgaagttacctcactgtaataattactgtcaaaagaaactcttttgctgtttactgttt

SEQ ID NO: 456831 - DNA, 201 bp, Homo sapiens
ccccaaaatttgaaaaagaagaataaaataattaaattggaagctgttatttataggactgatatattaataaccaaaatataactataagtggcaagtgsatgatccattggttgataattgaaagctgattgcatttttataggtcatattccaaatctagctgacctaataaggtcttttaatagaccacatgttcta

SEQ ID NO: 456832 - DNA, 201 bp, Homo sapiens
agagggaagagttatgattttttttttttagtctgaaaagaagaatttgcttaagagtgcaggaagggttctgaagagactctctgtattatatttcatamagaaaactggaagtaggaccacaaaaaatgccctttcctctctgctgatgaactgattcttattgtggttgacactaagaaaagctttttggttggaaca

SEQ ID NO: 456833 - DNA, 201 bp, Homo sapiens
tttcgtaacttttgaatcttaatattttgaaagtcttaaaggagacactgcaaagtcttagacaatctttggcatcttaaaataaaatagcaaaccaacatttttttttccagaaaatggtaaggtactcaggaatctggagacaagatattgtaaggaatgaacaaggttgccacagtgcatggacccaattgtgtttgc

SEQ ID NO: 456834 - DNA, 201 bp, Homo sapiens
tgacatacacacaccagagcaaccgccacaccagatatcgacagagtggtcttctctgcctgagaccacctctcactacatccattatccctttgcctttaaccctgacattcagtcttaacacattttatcttaaataatttattcattccagaatgtcaagggtccacttgctatttattttttttcaattgttggtgg

SEQ ID NO: 456835 - DNA, 201 bp, Homo sapiens
tatcttttcttttgaaactataggtccctatgaccaatcctctttttgaatggactgagtaccccctcctagtagggcctaccactttctaaactgccgcrttgaccatcctaagacacttcaaatactctgtaacatatatgttatatttaagaatcaaggtcattcactggtgagagaaagtggtctatttttcatctt

SEQ ID NO: 456836 - DNA, 201 bp, Homo sapiens
taggagttgaacccaggtttgcctcatgacaataggtaaactcttactaatcattccatactgttttcctagtgaaggcagcagtggaaaaaggacagtakctgtagcagtgggggcatctatgtgttcaccatctaaacggatagatgatatgctatttgagtgggcagctgtaaagtcaaaggggctccctgcaggcaa

SEQ ID NO: 456837 - DNA, 201 bp, Homo sapiens
ttgggactactagaaacaatgcaaagaagtttttgctgtgcaactgctattaaatgaagtttgcaattgtttttatatttttcctctgaagttacctcackgtaataattactgtcaaaagaaactcttttgctgtttactgttttcactatgcagcatttgttctggttttcttttggggaacaacccttctttcacttt

SEQ ID NO: 456838 - DNA, 201 bp, Homo sapiens
ttttccaaatgctcagatctgcatgtttatgcttagtactcacaacaaacacaggagcatgccagggaactatgaataaaaatatcataaaagcttatttyaaagtaaaattagaattgggaagagtgggcattgtaataaactaattggttgctaaaaacttttactttctcttcttccacttgagtttgtcttgaattc

SEQ ID NO: 456839 - DNA, 201 bp, Homo sapiens
cctcataaaatgagttagggaggatttcctctttttctattgattggaatagtttcagaaggaatggtaccagttcctccttgtacctctggtagaattcrgctgtgaatccatctggtccctcttttggttggtaagctattgattattgccacaatttcagagcctgttatgggtctattcaaagattcaacttcttcc

SEQ ID NO: 456840 - DNA, 201 bp, Homo sapiens
tatatctagttgtgtttgcctagaatatgttgccttgaccacttgggtacttaaggctatttttatttctaggatctcgctggaaatcaatgtccaaccargagaagcaaccttattatgaagagcaggcccggctaagcaagatccacttagagaagtacccaaactataaatacaaaccccgaccgaaacgcacctgca

SEQ ID NO: 456841 - DNA, 201 bp, Homo sapiens
tctattttattttggaatcaaggatagatattctagccttataaaatgcattcagagtcatatatatcttagtgtggaaggaactcatgatattacctctsctagaggcatttgcaatcaatttatgttaaagctgttaactgggaggaaaaatatttttatctttaaagaattttgaaacataaacccaacatagctgtt

SEQ ID NO: 456842 - DNA, 201 bp, Homo sapiens
gcataatgaatctctagagaaggagaacatgaagaatacatatccacagacaccatgattctgaaacactctccaaaaaggggtgtgccccatttgtttargagagcactgaactattttgaaataattacatttaaattcactggataatgtccactatgtactaagcactttacatcattttctctttgcaataccctc

SEQ ID NO: 456843 - DNA, 201 bp, Homo sapiens
aacatggtttgatgattctcaagtcacatacacctaccaccccaaaatgtattccttgaaaagcaactgtagcagtggggtagggccaccctttccttcarggcataatgaatctctagagaaggagaacatgaagaatacatatccacagacaccatgattctgaaacactctccaaaaaggggtgtgccccatttgttt

SEQ ID NO: 456844 - DNA, 201 bp, Homo sapiens
atgttctcaggataaaaaatccttgatcttaaattctccaatctcttgcaatgcatttggatcctaggctgttttcctttttatagtgatagaaagcagargaaaatgaactaatgatgattaccatatcacttttaaaaaattagttattttacgaatttcaaaataccttgtacttcaggagtactttagatcaaggtc

SEQ ID NO: 456845 - DNA, 201 bp, Homo sapiens
aaataggaatttatggtctttaatgacctatcagactcctatttccctactttataatgaagcacatattctccctgtgttttcttcctggaatgtactgraaagggtcaagattaaagatcctgggcaaaagcttactgttttggaaatctgtttattgcatatttttttttctgctggttcagctgccaaggaaattac

SEQ ID NO: 456846 - DNA, 201 bp, Homo sapiens
aaggttcaagcatgagatatttattaagcatctataataagcattgcactgtgaatatgagtgcaataggtctcagaatgatgtggtgatagggctcttaraaatcatctatttaaacccaatcattttgtatttgagggaactgtgaccagaaggcaaagtgacatgctctaggccacacagtttcatagtgagagagat

SEQ ID NO: 456847 - DNA, 201 bp, Homo sapiens
gcatgttagggaactacaaataaattcatttctcagtaaggctggaatgaagtgaacaagtacaagtgtggcaaaatgaagctagagtatagctatgcacsagatattgaaggaccttttatgaccaattaagaacaatagtttaaaggatataagcaagagaatgggatgacatttgcctttcagaaagatcactctgat

SEQ ID NO: 456848 - DNA, 201 bp, Homo sapiens
tcaaagttattaatgttagagtcatggatttttacttgtacaaaataacagcaaataaatgatgcaaaaagtatagtatctcctgtaagaagctgaattamttttatccactgctcaatccattaagaaaatgttaaagttgtaatatcaaacaatgaaagttaaggaattcatagtcagaattaagggttgagtacatcc

SEQ ID NO: 456849 - DNA, 201 bp, Homo sapiens
atgttgcttcattttgaagttccattcttaaaagttgctaataggcatagtgttgcatcaagtttgactttcattttatgaatttggactgtagttgtctyctttttttaaaacagtgatagaaaatatagaaatgtcaataataacaaaaatgatcgtggagagaagtttgaagagtgagatgggaaagagagaatgtga

SEQ ID NO: 456850 - DNA, 201 bp, Homo sapiens
gttccattcttaaaagttgctaataggcatagtgttgcatcaagtttgactttcattttatgaatttggactgtagttgtctcctttttttaaaacagtgwtagaaaatatagaaatgtcaataataacaaaaatgatcgtggagagaagtttgaagagtgagatgggaaagagagaatgtgaatatgaaaggaataaaaa

SEQ ID NO: 456851 - DNA, 201 bp, Homo sapiens
ggaataaaaaccaacctgctctttcctatttaagtatttgtctggctttcaaacacaattttattttattgtttcttggattttatggagtatagaacatwgcctaagaatagagtggataaatttatcacaggcacataattctttttgccatgtgagtgtgtttgtttgttttttcattacaaagaaacctcaccacat

SEQ ID NO: 456852 - DNA, 201 bp, Homo sapiens
ggtgttgtctgtcacccctttctttgactaggaaagggaattccctgaccccttgcacttcccgggtgaggcgatgccttgccctgctttggctcatgctyggtgcattgcacccactgtcctgcacccactttccgaaactccccagtgagatgaacctggtacctcagttggaaatgcagaaatcacccatcttctgcg

SEQ ID NO: 456853 - DNA, 201 bp, Homo sapiens
agtatttgtctggctttcaaacacaattttattttattgtttcttggattttatggagtatagaacattgcctaagaatagagtggataaatttatcacargcacataattctttttgccatgtgagtgtgtttgtttgttttttcattacaaagaaacctcaccacatgtttttaacatttttattatttaaagtatttg

SEQ ID NO: 456854 - DNA, 201 bp, Homo sapiens
ctcagttggaaatgcagaaatcacccatcttctgcgtttctcacgctgggagctgtagactggagctgttcctattcagccatgttggctccaccctctgtttttttttttaatccatgttctcttgtgtctcattgatcttctgtaatatcattattttgaattatttttctgggatttcataagttttttttcattgaa

SEQ ID NO: 456855 - DNA, 201 bp, Homo sapiens
gactccaaagttttgatattcctgctatgtcacactgcctctgcccttttctaactggatttacaagatagcttcctggcctctgaaatacatagtcattstgcgtgataatactagcaattaattgctctaccttacatttgtatggtgttttatacttttcaaattgatgttatgaccatttgctcatgtgttctacct

SEQ ID NO: 456856 - DNA, 201 bp, Homo sapiens
tccaaagttttgatattcctgctatgtcacactgcctctgcccttttctaactggatttacaagatagcttcctggcctctgaaatacatagtcattgtgmgtgataatactagcaattaattgctctaccttacatttgtatggtgttttatacttttcaaattgatgttatgaccatttgctcatgtgttctaccttat

SEQ ID NO: 456857 - DNA, 201 bp, Homo sapiens
ataaataatgacaaatatttcatttggaaatgaacctagtgacagattagttttcagactcaatatgcattttgtagatatactttagaggattgggcaaycagttattcaggaatacttttaatgaactgttttaaataatctcatcatagtgacagttatattttcttgatctttgatgcccatgtatctgatgtggcc

SEQ ID NO: 456858 - DNA, 201 bp, Homo sapiens
tttatttactctgtggcacggaattctgcaggcataacagattctagatgggcttctctgctttttcatgtttcttccattttccagactctagctccccyactttttttttcaccacatacagcataccatgcaatgcttctgtatagtcatgctatattatattttcctctagagaattatcttgctgttctataaggg

SEQ ID NO: 456859 - DNA, 201 bp, Homo sapiens
tgttttctaaaattaaggagcctataatctcagcaccattaacaagtgctgtcattcagatacacagtgtctggctgatttaaataaaatgaaatgaagakagttgtttctggtcccttggcttcactcattgccataaacatatgctctgcgtcctgcttctttccatcttatttatgactttaatttgttgtgtgggct

SEQ ID NO: 456860 - DNA, 201 bp, Homo sapiens
ttactcacagtactcccagagtcattcccttcttctggaccctgattactcaggcagtggttataaaagtgcattttcagatacttttgttattttccttyacttatcaccagtgacttgcatttatttacttgagttttttacattcatgatcaagcaggctttaaggccctgtgccagaagttgtcaaattttcttggt

SEQ ID NO: 456861 - DNA, 201 bp, Homo sapiens
actctgtgcagacagactcttctttctatcttttccagtgtttatagcagaagtaatgtgtgagcttacaattttttttaagacgtgagagttgtttaatyttggaacaatgtctattgagtgaaggttttattacaacatctattgagtgaaggttttattgtaaagtagtcaaaagaatgctgaccctgaagtgagact

SEQ ID NO: 456862 - DNA, 201 bp, Homo sapiens
tccagtttttttttttttttttttttttgagacggagtctcgctctgtcgcccaggctggagtgcagtggcgggatctcggctcactgcaagctccgcctyccgggttcacgccattctcctgcctcagcctcccaagtagctgggactacaggcgcccgccactacgcccggctaattttttgtatttttagtagagacg

SEQ ID NO: 456863 - DNA, 201 bp, Homo sapiens
ctatgttaactttctcccaagactgttcctatcctagtagacccttactactctgccccacacccggtacgatgaataggacttgcttattcacatccagraatatgaaatgtataactagctaaaaggccagggaatggttatggttttagatggactactgcactcagctacagaaaaacaaggtggaatcttagctat

SEQ ID NO: 456864 - DNA, 201 bp, Homo sapiens
gtcctactttgttgagggctgactctttcagactgtagggatgatttaaattaatgacaattgtactgatctgctataactccagagtacattttgttttyaactaaaatggatttggtttctatcaatatgtagtatttatatgacaaaacgataattaaggcaaaggaatttattgaaatagtatgttatttatgttat

SEQ ID NO: 456865 - DNA, 201 bp, Homo sapiens
ctatcctagtagacccttactactctgccccacacccggtacgatgaataggacttgcttattcacatccaggaatatgaaatgtataactagctaaaagrccagggaatggttatggttttagatggactactgcactcagctacagaaaaacaaggtggaatcttagctattggaatgaagacaaaaggtcaaggtcaa

SEQ ID NO: 456866 - DNA, 201 bp, Homo sapiens
gctggactagaaccttagattagcacataattaccttgacaataagttaactactcagtaataactacaaagcaacttagtcacatttaagacttcagagrttctatgaaactctgaatgaagttaatggcttaaagaaattagttgctttcttcccctggatctgcgcctgtgacataataaacatgaactgtggagttg

SEQ ID NO: 456867 - DNA, 201 bp, Homo sapiens
tgttaggatttgcgacatgaatagacctcagttgatccaggaatagacttccttttgcagccaggaagaggggaagtaggagacttgagtgtgcctggtayaggagagtttgatcttaatttaggaaatacctgggtatttttgccttgttagtacactgtagattctaatgacattttaaaggtgaatatcaagaaggaa

SEQ ID NO: 456868 - DNA, 201 bp, Homo sapiens
aataaccctgtaaatttgatcaaatataattctgcttgtatagataaaacagctgaggtttggagaggttaagttatttaaccaaggctataaaatattcrttgagtcaaggttattgcccaggatttctaattctacgtactcagttttctcagaatgaagtaggggtgggtgcctgggcctggatgattgctttttcca

SEQ ID NO: 456869 - DNA, 201 bp, Homo sapiens
ttgtacctgttggaaactaattcagctccacaagtatatactaattactgacttttttcaaagcacagcattagatgctgcattggaaacaaacgcaaatrtattatacaaagtccctgccctcaagaaccttagagtctagacataattattaaactctcttattccttttatttgtgtcgctagtgtctaagtgaacca

SEQ ID NO: 456870 - DNA, 201 bp, Homo sapiens
tgcatgttagggaactacaaataaattcatttctcagtaaggctggaatgaagtgaacaagtacaagtgtggcaaaatgaagctagagtatagctatgcaycagatattgaaggaccttttatgaccaattaagaacaatagtttaaaggatataagcaagagaatgggatgacatttgcctttcagaaagatcactctga

SEQ ID NO: 456871 - DNA, 201 bp, Homo sapiens
tgaattttgaagtaggagaaggaatgtgaaccaggatggaaggtgtccaggcagagagaagagtctgaacaaagattcatagagatgaagaacattgcatrttagggaactacaaataaattcatttctcagtaaggctggaatgaagtgaacaagtacaagtgtggcaaaatgaagctagagtatagctatgcaccagat

SEQ ID NO: 456872 - DNA, 201 bp, Homo sapiens
tgcatagtactcatatggatgcttcagtgagttccatataagccttatatggcatagtcacttcgaaaagacagaaaagcagaaaccttcaatatgtattwgtggggcatttgtggtttatattactgtattttctgtacattacccaggtgttaattcagatattataaatctagggaaggatagactccctttctagga

SEQ ID NO: 456873 - DNA, 201 bp, Homo sapiens
ccagagcttttccttactgggaggtctttgatcattgattcattgtctttacttgttatgggtctgttgaggttttctatttcttcttgagttgggtaatwttcatgttttaaggaatttgtccatttctcctaggtgttgaattggttaatgtacaattgttatgactgcataattattcagggcttctttttaatttct

SEQ ID NO: 456874 - DNA, 201 bp, Homo sapiens
ggtaaagagaaagctgcttttgcaggggagtctttactttcagtttaggaaagagttttcctgggttggaaatacatcaaaatacacaaatggaaatcaarctttcataaaaattgaagctaagagctaggatgaaaacgacaagacttatttagcttccactcaataacctagacatagctgaaactctgaggataagat

SEQ ID NO: 456875 - DNA, 201 bp, Homo sapiens
acactttctaaatgttcttttgactttgtggcctctaatactttcttaaaattctgaatctaagtttaattcaaacttagattgtaaattcaggtaatagwtaagttgtcagctttaaatgaaaaaaaaagtaatattgggagatgttttctatcagaatattgaagaaatatttgttgaaaacatctatctttctgcata

SEQ ID NO: 456876 - DNA, 201 bp, Homo sapiens
gtcctttgacctcctccttatttactttttctctcaagttattgaatagcctctgggctaatatttagtatttgaagtttctaacatagctttctttgcaragtgtgatgaacagaaatgaatttacctaaattcttacagcttatcttaatatgaaacacctacagctctttggcattaaaaatgaacccgagagtttgg

SEQ ID NO: 456877 - DNA, 201 bp, Homo sapiens
tcagctggaaagccgtctccaggtacataactgtgggtctaggcttctaactgctttccatgaaaaatcatacgctgaactcacaaatgacccctctgctrttaaaaggagaagaagctgcctcatagaattatgagccattccaagttctggattctgatgcagactactggctatttaagaatgaaatacttggttttt

SEQ ID NO: 456878 - DNA, 201 bp, Homo sapiens
cagccccagcttcacctgggaactttttagaaatgtacactgtcagacccctacctcagatctactgattcaaagactcttgacggggagcagggggagasaaggaagcaatctgtgttttaacaagccctgtgaatgactgtgatccacactaaagtttgagatcactgtcctaaattaaattttagcctaaaatttaat

SEQ ID NO: 456879 - DNA, 201 bp, Homo sapiens
ttttcttacatttagcttttcttatatgtgctgccagcttttactattttcatgttatcctgagagttaggtaaaaagtagtttcttgaatttgcagatgrgttaaatgaaacgtttctgaagaatatgaagtgtattatttatcctgcgacctgaacaaaatctggagcttttggtgggggaaaacaaaaagaaggaatt

SEQ ID NO: 456880 - DNA, 201 bp, Homo sapiens
tcccagagaatgtaaggagaattagttggacatttaaaatacatagttttctttttaaatacaagttttttttttcattgaaaaacctaagcaagtagacrttgctaccaaatttacctgtattaagtttaaatatgttaatgcttttcccagtcaacaaatatttattagctgctgactgtatgtcaggtctcatgggga

SEQ ID NO: 456881 - DNA, 201 bp, Homo sapiens
gcctgccaccatgcccggccaactttttgtatttttagtagagacggggtttcaccatgttagccaggatggtctcgatctcctgaccttgtgatctgccygcctcagcctcccaaagtcctgggattacaggcgtgagccactgtgcctggccaaaaacttcttactattagagtatattggagtcattcaacgcattat

SEQ ID NO: 456882 - DNA, 201 bp, Homo sapiens
atgtgctgccagcttttactattttcatgttatcctgagagttaggtaaaaagtagtttcttgaatttgcagatgagttaaatgaaacgtttctgaagaayatgaagtgtattatttatcctgcgacctgaacaaaatctggagcttttggtgggggaaaacaaaaagaaggaattggcacatcactctcattatcactgc

SEQ ID NO: 456883 - DNA, 201 bp, Homo sapiens
cagtcagtatggtacttgacacagtgcaggtagtcagtaaatatttgtaggctaaataaaagaggtagtagacacagaactggcaacttctctggttcacmagccaattttagtatttctcctattaggattgccttagagtcataggctaataaaatttcagtgttagaaacatacctcattttacagataaagaattga

SEQ ID NO: 456884 - DNA, 201 bp, Homo sapiens
taagtagataaatatatttaattttgaatatttataaaaatacatgattagatttgtgattaagaacaaggaaatgggcatggagaaatgattactaaaaygaactaagtccaaacctcaaggaatataaactgaagaatcttcagtgacaaactctcttgtttttttcacaagaggaagttctgggttcttaggtattaa

SEQ ID NO: 456885 - DNA, 201 bp, Homo sapiens
agagagctaattatagatgcagtcaacccttcacaagaagctggtaaatgaatgttagagaaaaagtgtgtgtttatttatgtttgaaaattttgtgcatytaaataaaaggcttctgggaaatacgttcccagagaatgtaaggagaattagttggacatttaaaatacatagttttctttttaaatacaagtttttttt

SEQ ID NO: 456886 - DNA, 201 bp, Homo sapiens
ctaaatgctgctgagcttgaaagacataatgtccttggtctgttttgtctcttccactcttggatatctttgataaataaccccgatgtaaatgtgggatraatcaagcaatggtgtattctaagcagtgactggcccaaaggatgagttacatcttaataagcaatagacttttctcatattcaaaagaggttgaagaat

SEQ ID NO: 456887 - DNA, 201 bp, Homo sapiens
tgtatctgacagttattcatacagattaaattgcataggggggtaatattgctatatcctttaaatcattaagaacggttactctaaaataaaatgcctayggagctctgctgtattcctcttgccacttgttgaaagtgagatatttcaacttgtagttctgaagtggattcaaatatataaaaatgctttcacctttga

SEQ ID NO: 456888 - DNA, 201 bp, Homo sapiens
ttttttatgtttctgacaacataaattgattattttgggaggctttctttgccagggaatatgcagaacttttaaaatatgaggtgaatttattgtccagrgtgtgtgcaaagaggagacacccccagaaaccagtttattttaagtcctttttcatggctacttttttctggttgaagataacaccctaaatttatttct

SEQ ID NO: 456889 - DNA, 201 bp, Homo sapiens
tagaaatgaaatcaaggataaattgtccagcaatactgtaaaatctttttatttcattttttctatgagactcaaatatcaatatatagtcattgtgtttrtcttcaatcttttgagagttcagatatgttatcttgcttaacaatgatgtgctgatttcttctaagtattttattttggtgtattttggtgtacttataa

SEQ ID NO: 456890 - DNA, 201 bp, Homo sapiens
acttaaacgtgctttttaaaattttattttatttatttatttatttatttatttatttttagatagggtcttgctctgtcacccaaactggagtgcagtgrcatgaccatggcttgagtagctgagactccaggtgcataccaccatgtctggctaattaaaaaaatttttttttgaggtggggtttcactatgttgccag

SEQ ID NO: 456891 - DNA, 201 bp, Homo sapiens
gtattgtgcattttggcaactaaacatatctgttactcatgttccttaagatgagaggcactgtgatatatttttggaaaattagttgtttatttctcaayatcagctcaagtacagcattatattaacagtgaattatctgactgaaatgagtctaccttggtagcctggggctgagctgcaaaaataaatgggaatgtt

SEQ ID NO: 456892 - DNA, 201 bp, Homo sapiens
gagtcttactctgttgcccaggctagagtgcagtggtgtgatctcagctcactgcaacctccgcctcctgggctcaagcgattcttgtgcctcagcatccygagtagctgagactacaggcgcatgccaccatgtccagctaattttttgtattttagtagagaccatgttgcccagggtgatttcaaactcctgagctca

SEQ ID NO: 456893 - DNA, 201 bp, Homo sapiens
cctcttcagaagaaattaaatttgattacatttaaaatcatgtgatttaacacagaaataaatatacatatgcaaatttttgtaccctgaaaaattattgrtattcatatgcctttatttttaatcaatagttattttctttgctattgcaatcagactcggaagaattaatacctgcaatttcattggcagtgcagatga

SEQ ID NO: 456894 - DNA, 201 bp, Homo sapiens
tgggtgggtcacttgaggtcaggagtttgagaccagcctggccaacatggcgaaaccctgtctctagtaaaaatacaaaaaattagccagacgtggcagartgctcctgtaatcccagttactagggaggctgaggcaggagaattgcttgaacccgggaggcagagattgcagtgaggcgagatcgcactactgcactcc

SEQ ID NO: 456895 - DNA, 201 bp, Homo sapiens
gtatctgaaataggaaatcacccttgtttgtggcaagctcttgataaacttgcagaacaattataatttgcctggttttactaatagtagttatggggccrgtaaagtaagccatacagcaattctcttatactaagaagcatccattggctaccatttttcataattgtgtatatgtttgtccatttgttattattgata

SEQ ID NO: 456896 - DNA, 201 bp, Homo sapiens
ggattgtaagagagaaaatatgcagtaattactgggaagaggtttgctgagttaaaagcaaagagggaaagaaggacacataagccaggagttctttttcrggggtttagagtggaccacaaatatctctaaagttaaataactttccttctttcctgaactagccaaatgcaaggattggtttatggtttgttattgaca

SEQ ID NO: 456897 - DNA, 201 bp, Homo sapiens
tgaaatagtcacagctgagtcagctaaagtgacaattagacctggaaatgtcaacttttgggggaaattatagaaaaggtgaactgaatattaattgggaycagggaagcacataatctgaattctagttatgattctgccacagattaactgtgtgactgtttcatttagttcatctcaaatctgtactagccctgtact

SEQ ID NO: 456898 - DNA, 201 bp, Homo sapiens
gcatattactttgggaggaggaacccaggattgtgtctgcacaccttgagacctaccttctttaatttggaaagggttgctttccataaagccaactttamtataatgaatcctacttgcatcatttgtttgaagatgaggttgaaagggctgtctctcgttattcagtcaaaccacctgcatgaagcaggaaagacccta

SEQ ID NO: 456899 - DNA, 201 bp, Homo sapiens
tttctcatagcaacgatttgaagatataattatagctctatcctataaaaatgcagagtctaattcccattcccttgacttttggcaaggcttggtgactyactattgaatagaatgcagtgacagttatacagcgtgatttcccaggctaagttagaaacagtggtatagctttcatctggctgtctctgggacatgcac

SEQ ID NO: 456900 - DNA, 201 bp, Homo sapiens
ctttacatgcttttttcatttaaaattatggcttggagctctatgtcattttatatagctttatctcatttccttctacataatattttgtactatatatrtaccattgttgtattgctagacatctgagttatttccaatttaaatattctcaactgaaattttaggtatttaaatattgaggatggcaaaacctggtgt

SEQ ID NO: 456901 - DNA, 201 bp, Homo sapiens
ggggtttcaccatgttggccaggctggtcttgaactccctgacctctagtgatctgcccacctcggcctcccaaagtgctgggatacaggcatgagccacmgtgcctggcctctcatttcttgtaactgactacattatattccagtgtctgggtgtactataacatatttaacctgtcttcattaatggactttttgatt

SEQ ID NO: 456902 - DNA, 201 bp, Homo sapiens
aatttaccagtgaaaccattcggggcttcaattttctttgtggataagttcttcgttataaattcaattgatttattagctatcagtgtattcagattttytatttattcttgagtgaattttggtagtttgtgtctttcaacaaatatgttcattttatctaagttgtcaaatttattgaaattaagttatttataatat

SEQ ID NO: 456903 - DNA, 201 bp, Homo sapiens
aagaagttaactaacttgtctgagcttatatggatgagaggtggaaaagctgggatttaaactggaaaatcttgcccagggcgcctgtactttgttaactmttttattattccatcttctcttgcacagggaattcaagtgctagatgggattgaacaattggagttttaaagacctttgaatcttgagattctaattttg

SEQ ID NO: 456904 - DNA, 201 bp, Homo sapiens
gtgaggaatctagccctactggatagctggtttctcattgggctgccttttctaaagaagtgtcaatggcagtgtgaataattaccacaaaaaaagatctrcttttctgactgaatgttctttaccctggggaagaaataactgtctatgtcattactgaatcacatagaaatatagtctgccgtctgtatctgcaagttc

SEQ ID NO: 456905 - DNA, 201 bp, Homo sapiens
agcaaggattcttcggtgacaatgtttaacatatatagcttctcccactaaagtgttctttggtgctaggcatggtgagcatttatgtcttagattaaacwgtttttactagaatgctcactgcgtgtgaaaagctaagtgttttaaaaatgttacctcatttaatctttgcagcaaatgaagaaattgtggttcagttat

SEQ ID NO: 456906 - DNA, 201 bp, Homo sapiens
aaggcaagagagtgagatcctgagaccaagagacagaagctttgttgaaatagtagaagactaaatgtgactaatttgggtggaaattcttcacttctccrttcatttatcaatggtgttgataaagaggcatttcttaaatgcagaacaaaatagtcatctatcattcacctatatccaaccaaaccctcctgattttag

SEQ ID NO: 456907 - DNA, 201 bp, Homo sapiens
ttaccttctctagccacctgttttcctatgtgtaaattgtgagctttggattagattagtgattctcaaagaatgacccctggaccagcagccccagcttsacctgggaactttttagaaatgtacactgtcagacccctacctcagatctactgattcaaagactcttgacggggagcagggggagagaaggaagcaatc

SEQ ID NO: 456908 - DNA, 201 bp, Homo sapiens
tattttcacattaaaaaagaataatagaagattttaatgtatgtcacagcatataaagttgtgatgggaagtgggaaaaaaaagaggaagagaggcaattwtcagaaaataaaattttgtatcaattttgccagaagtgagatttgctttcatcctctttacatgatgtaggtttatgtttaagaaaacatatttaggcta

SEQ ID NO: 456909 - DNA, 201 bp, Homo sapiens
aataaacctcacttggtcatgatgtcttatcctttttacatactgttacattctatttagtctgctcacttgtatgctttttaaaactagtaccttaaccyttgggaaaataattcaatttatattttgttaaaagctatctttgtaaagctctgtatattttgaggaatatgagtggagaagttactattttcacattaa

SEQ ID NO: 456910 - DNA, 201 bp, Homo sapiens
ttctagagttcatctgcctaccaaaaccttcttgcacaacgtcttacatatcatatactcacaattgtatttgttactaaatgctatatttcatatttctrttgataaagtcagtgttcactctgtttttaaaaatctctggaagggcttcgtcatttttttcttcaaaagggagaagagaatggaaaaataacgaatgga

SEQ ID NO: 456911 - DNA, 201 bp, Homo sapiens
tcagaattaaagggaaaaaagtttagcactataaaaatctcagtctgccaagaaatcatgcataaggtctataaataagtagaaaggaattagaagtatgytttaaatagcagattggatcaattaaaataatttgtaggtgtgtcttccttatgctatggtagtaataaatggcattgtgctataatggaatagatcttc

SEQ ID NO: 456912 - DNA, 201 bp, Homo sapiens
acccgtaagtaaaaatttctaagttttcttgctaagtctttagagtctaagagatcagaattaaagggaaaaaagtttagcactataaaaatctcagtctrccaagaaatcatgcataaggtctataaataagtagaaaggaattagaagtatgttttaaatagcagattggatcaattaaaataatttgtaggtgtgtct

SEQ ID NO: 456913 - DNA, 201 bp, Homo sapiens
tcaaaaatcagtctgctgtaattcttatatatgtttctttatatgtaatatgccattttcctctggctgcttttttcccccccttatcactgtttttaagmaatttgattatcatgtgctttggtgtagttttcttaatgtttcttgagattgaggttatttgagatgcttggatctgtgggtttgtggttttcattgtat

SEQ ID NO: 456914 - DNA, 201 bp, Homo sapiens
tttcagggccatgactcagttacttcaccccccacctgccccccgcaaaaaaggtttttccaatgtgatattctcaacttagaatcaggaaagtaaacttytctttgttttgtgtttcctgcattaaggtaaaattattgaagttgaatagatttctccttcaattctcattattatcccactttccaagctaaatgcaaa

SEQ ID NO: 456915 - DNA, 201 bp, Homo sapiens
aggaatctgtatcttgtaggttatggggaaataatgaagggttttaagtaggatattgacatgattagattttatgtttcagggccatgactcagttactycaccccccacctgccccccgcaaaaaaggtttttccaatgtgatattctcaacttagaatcaggaaagtaaacttttctttgttttgtgtttcctgcatt

SEQ ID NO: 456916 - DNA, 201 bp, Homo sapiens
atagaaatatctatatgtgctttatgcttatcttttatttctttaacctatttattttaaaatagcttgctgataactccagtatctataatttcactacmgagagccatagctggtctctgctttttcttaagattcttgctcaaggcaccttattttctcttatgcttagctgttttgttttgtttttatttcaatgag

SEQ ID NO: 456917 - DNA, 201 bp, Homo sapiens
tttttcttttgaaactcaatttcagctgcatttaaagagatcaatgtttgtcttccctgttttgcagcagctctatgccgctcagctggccagcatgcagrtgtcacctggagcaaagatgccatcaactccacagccaccaaacacagcagggacggtctcacctactgggataaaaaatgaaaagagagggaccagccc

SEQ ID NO: 456918 - DNA, 201 bp, Homo sapiens
gcacatgccactttgcccggctaatttctgtatttttagtagagatggagtttcaccatgttggccaggctggtctcaaacttctgacctcaagtgatcckcccgccttggcctcccaaagtgctgggattacaggcctgagccactgtgcccggcccccttccactgttttactttatcccctgtgtccctctcttttga

SEQ ID NO: 456919 - DNA, 201 bp, Homo sapiens
ttcccacaataaacctcacttggtcatgatgtcttatcctttttacatactgttacattctatttagtctgctcacttgtatgctttttaaaactagtacyttaacccttgggaaaataattcaatttatattttgttaaaagctatctttgtaaagctctgtatattttgaggaatatgagtggagaagttactattttc

SEQ ID NO: 456920 - DNA, 201 bp, Homo sapiens
caccacatactactgccagttgacctcctgagtgtgaagttgcacatatgcttctttttgtctctatcactttctaacctaacaatgtgttgtagaaactrgaaactagaaagtgagtttttctttcagtatgtagagtgttactgatttacttttttcaggttgtctcattgcttcctttccatatgtttcctttctaga

SEQ ID NO: 456921 - DNA, 201 bp, Homo sapiens
tattattgagttgtaccagtttttcttaattattctgaatacaagtcctttatttttttttctttttggcagatattttctcttactttgtggcttagctktttaaccatgtcttctaaagagcaaagtttacgattttaatgacacccattctaccattttttttttctgttctggtttacgcttttgttctgtttttaa

SEQ ID NO: 456922 - DNA, 201 bp, Homo sapiens
tctctctttctgtttctctctctatatatactgaagtgaatacaacagagagagagagagacaaagaaagaaagaaagaaagagagagagagagagaaatmgaaggagagagagaaataattttctcacttaatcctcataattaccctgtaaggtaaaaactattactgtacccatttttataattggggctcagagtgg

SEQ ID NO: 456923 - DNA, 201 bp, Homo sapiens
ccttcttgcacaacgtcttacatatcatatactcacaattgtatttgttactaaatgctatatttcatatttctgttgataaagtcagtgttcactctgtytttaaaaatctctggaagggcttcgtcatttttttcttcaaaagggagaagagaatggaaaaataacgaatggatgtgttttgttatgagaaaactattt

SEQ ID NO: 456924 - DNA, 201 bp, Homo sapiens
ctggaggctgggaagttcaaaattaaggcactggctgatctgttgtctggtgagcgcccacttcctcacagatagccaatttctcactctgacctcacaargaggaaagggcaaggggtgtctcttgggagtttttatgagagcactaatcccattcaagagggctctgcctccatgatctaatcaactttgagaggtccc

SEQ ID NO: 456925 - DNA, 201 bp, Homo sapiens
aaaaaaaaaaaaaaaaaaaaaaaaaaaaaaagaaggagcattttataattttacactgattagccaaaggatggagaaacccaatacttctgctcgttcamcatgcctcacagtatattccaagtattttcattgtatatcttctacttactctaccaccctatgccccacaatttggactcttggtttttaaatggtagt

SEQ ID NO: 456926 - DNA, 201 bp, Homo sapiens
gaataatgctggaagcatgatgctcaccagtaggaaaaattggcatttcagtctacagggagcttggcaaaagtctttttctgaacatgcttttctttctrttaaagtttgattgtgaatcatgtgggtctaaatgtgaaggtgtatttttccagctgaccatggtacatgtgacaagcagactgtctctagtgctctatt

SEQ ID NO: 456927 - DNA, 201 bp, Homo sapiens
atagttgggacagccagtggtatgtgggaattggagccacccagcgcacagatgagtgaagtgatgggaaggtatatctagttgtgtttgcctagaatatrttgccttgaccacttgggtacttaaggctatttttatttctaggatctcgctggaaatcaatgtccaaccaggagaagcaaccttattatgaagagcagg

SEQ ID NO: 456928 - DNA, 201 bp, Homo sapiens
ttgaaaatctcagacttcatatatggtaagtgatggagtaatttataacttttatgttgaattcttgctactttaaaaaattgtgcttctccttttttaargcatatgacttacttaacagctgatagtcagttacctggatttttagtatttttttacatcacaaaaagatttctctgaagtttgcgcaggggtctattt

SEQ ID NO: 456929 - DNA, 201 bp, Homo sapiens
acagatctaaattaatgtgcagtttttaggaatctgacattattactggaattatcttttcagttaaatgtattttataggagtatatagagcaatatatrctctgttgattttaatgagttgtgatgtctggtattttatatgcttgaatatttgcccacatgtaggaatatggactcagcccctaatggaaaataacat

SEQ ID NO: 456930 - DNA, 201 bp, Homo sapiens
aactcccctttccttggaaaacctaaaataatttttccaaatatgtttattttctaatttcttgctgtgggtgcaaagaaagaacaaaggctgcctcccckaagcccaactcatatgtgagaggctgccctgttgtcctattaagtcccttcacacagacatggatttatttgataaaataccacatgttaactgtagctt

SEQ ID NO: 456931 - DNA, 201 bp, Homo sapiens
  misc_feature (1)...(201): n = A,T,C or G
tgtgagggtaaggatcagaaacttcctcaagtaacttttattaagcacctactatgtcttagatactgttagtcactgagcttagaggtgattatagaatnttaatataatctatagtttctgatctttcatattaaatatcatggatttcctagcttaatcagatagattgggggcaaaaaggagaaaatggggtaagtc

SEQ ID NO: 456932 - DNA, 201 bp, Homo sapiens
atcataatggcaagtatttattgagtgctcactatgtgaaggcaactgttctaagtgcttcacatgtattaacttgcgttaactcacttgatctatacaayactctatcactattccaattttacacaagataaaacgagaccaaagttactgttctaggaagtggcatagcaaagattttaaactggggaatctgactcc

SEQ ID NO: 456933 - DNA, 201 bp, Homo sapiens
tttcacagccttaaagcatatctgctctgtgtaagaagactgaaattagctatatgaagtcaatcaatacaggaaatatgagacatactgttgtctctctrtggactttcttttttctttctttctttctttttttttttttttgataccaagtctcgctctgttgctcaggctggagtgcagtggtgcgatctcggctca

SEQ ID NO: 456934 - DNA, 201 bp, Homo sapiens
tgaagaaaacttcaaacagtggaggcttcctcaaaatcaagcttaaaaaacatttcatttgaacttaactttcctgataagaatattcttctcattcttgyatagtctttgtgaataaattcatatagtttaatatgaagacttactgttagtttttttgaacatgaatcctcaagctttcttaactcccctttccttgga

SEQ ID NO: 456935 - DNA, 201 bp, Homo sapiens
actgctaactatctctgattaaaataacaattgagcttgtaatttttttctgaacagctgctgctacaggggtcattaccttggagagctaaaaaataatygtactcctggtacgtgagttatgtagtcttgtgttttacagcaaagcacaaagtttaaaacctatagaagaatgttatttgaaagctgtcaaaccatgtt

SEQ ID NO: 456936 - DNA, 201 bp, Homo sapiens
ataaggtttaagaatttttatatcacattatggctgatttggggtatttttagttgcccattcattaaaaagttcaggtgaagtacctattttgacatttyaggcaaacatgtaacttttttctttaagcaaccagtaatttatgtactctatgcaggtaaactatataaagaatttattagaaaaaataacacatgttaa

SEQ ID NO: 456937 - DNA, 201 bp, Homo sapiens
taactcccatgattgtagtataaggatctcaccaaacttcatcacctccttcaagtttttgcttaaatgtcttcttagtgagatctaccttgaacatcctrtttaaaattgcaacctgctaaacattcctgttctctctaatgctgttctatttgtttccagaaactttttcaatattgaacatactatataatttgtata

SEQ ID NO: 456938 - DNA, 201 bp, Homo sapiens
agtgtagaagtcagagcacaaagctcatcacttgtaacatgatactgaatgctctgcttcatttttcttacaacaggcaaagtaaaaccagaatcacaaawacatgttgatgaaaattggtttatggtttggagagactatatacttatgtaggcatacctcagggacatttcaggttctgttccagaccaccacaataaa

SEQ ID NO: 456939 - DNA, 201 bp, Homo sapiens
gttttaaactcagtgagccaatgtttcttaaatgaactaatgtatgatgttacaaagtcatgcatggctaaaagatccatttaaaggcgatttgattttabggtaatggaatacaaaaagtttattgatattcaatttttagattccatattgcaattaacttttgagaaatgattacttgtcaaattttgatataatata

SEQ ID NO: 456940 - DNA, 201 bp, Homo sapiens
tggaatacaaaaagtttattgatattcaatttttagattccatattgcaattaacttttgagaaatgattacttgtcaaattttgatataatataaaagartagccacaattatttgaaaaggctattaaaacattctgcctctttctaactacctatctgtgtgaaaatggatacttttcacatacttccaccaaaccaa

SEQ ID NO: 456941 - DNA, 201 bp, Homo sapiens
tataaaagaatagccacaattatttgaaaaggctattaaaacattctgcctctttctaactacctatctgtgtgaaaatggatacttttcacatacttccrccaaaccaacatatcacaacagattgaatgcagtagcacctatgataatctagctgtctttttctaaaccagacatttgagagatttgcaaagatgtaaa

SEQ ID NO: 456942 - DNA, 201 bp, Homo sapiens
tctaaaccagacatttgagagatttgcaaagatgtaaagcaatgttagttttctctctcttttttttattttggaaaatatgcttgtatttcataaaataytttataatactatgtaataggtttattattgttatttaaaataactctttaaaaactttaaagttttagtttctaatatagtaagtattgataaatgtaa

SEQ ID NO: 456943 - DNA, 201 bp, Homo sapiens
catcacagtattgaatttttgaaaagtcagagggaaatgattgtactaaatatctcttgtcagtgtgcaaatccatttccatctcataaattagatcctcwctgaaaattaacagttttttttcttcccacggaagactgggaaaaagacacagttttaaaggaatgaggatatccttgaaaatataattgccttgaggaa

SEQ ID NO: 456944 - DNA, 201 bp, Homo sapiens
tagtagagtggattagagggttaaaaaaaagagaagctacagaagcaacttgtgaggactactgcaaaatttcaggtaaaaggtaaaagatttaaacaagygatgaataagactggtaagggtatatgttatgggaagcaaaagggaaaggagtcaaaatgactcctattgctttcttcttgttcatcacagtattgaatt

SEQ ID NO: 456945 - DNA, 201 bp, Homo sapiens
gataaataagcctcagggtttcccctaacgaactcagaatttggtgggagaaaaaaatatgggaagaaaaaagaaattccataatttgcacagggtcaaargttgagctatgataggagcacaaaggaggcagtagtcagataacgcttcaaggaaaaagtggttcttgagtttagactgaaaagatgagtaggattgtga

SEQ ID NO: 456946 - DNA, 201 bp, Homo sapiens
tctagacataattattaaactctcttattccttttatttgtgtcgctagtgtctaagtgaaccaatgcatggctcaaagaaggaaaatgctaattaaattrcatttgttattgcagaggagatacacagaagagaggagatggaatttcctatgcagaatgttaaatgccttaatagagttaaaaatactactctaggagg

SEQ ID NO: 456947 - DNA, 201 bp, Homo sapiens
aacagttgatctgagtttggaaccaatttgttcccattccggtacaccagcagggttttatttcatttagaatattctcaattacaaatttatctgataawattttcacaggttgagctgtttcagagcacctcaaatatttggccctagaagtgttatatcttagtctgaggctgaatgccatgaaaaaggcctgcctag

SEQ ID NO: 456948 - DNA, 201 bp, Homo sapiens
ctgtttatactgactggttgtcttcactgatgttttcctgtggcactgagaactccaggtgaatagcaaccaaatcagttcagaatattttaatgaaatayttttagtgtgtattacttatatatgattgtgtagtataaattgactacatctttttcagaaaactacagaacatgatcttaaaatattcattggaatgaa

SEQ ID NO: 456949 - DNA, 201 bp, Homo sapiens
atgttccttcagtctttgaagctgctatcctttgaatgtttttcttttttttttttttaatcttcttagatgcccttgggggttggattatggtaaaaggkgggttcagttgactggctttgattctagtctgggtcttgaaggagcccctccaattactgtctccatgtctacatttcttttgttaggtgttctggtcta

SEQ ID NO: 456950 - DNA, 201 bp, Homo sapiens
tactacacaaaagataaaactcaaatatgcctgaaagaaggttgtggattggttgaagttatgattatatataagactgttagaatggccagctgtgaagyaatttgaaatatctagagggaacagcctgcacctctcccacaatagtacctaacagtgctccaacacttccaagtttctgtggtggggaaagaatgggag

SEQ ID NO: 456951 - DNA, 201 bp, Homo sapiens
ttgcgctggttctttctcatctgtgtgggctgatgttccttcagtctttgaagctgctatcctttgaatgtttttcttttttttttttttaatcttcttaratgcccttgggggttggattatggtaaaaggtgggttcagttgactggctttgattctagtctgggtcttgaaggagcccctccaattactgtctccatg

SEQ ID NO: 456952 - DNA, 201 bp, Homo sapiens
tgatatttggtatatttataatgttgtgcaaccactaccagtgtctagttccaaataatttcatcactccaaaaacaaaaccactttttggctgggtgtgrtggctcacctctgtaatcccagcactttgggaggctgaggtgaaaggattccttgagtccaggagtttgagaccagcctagtcaacatagtgagatgcct

SEQ ID NO: 456953 - DNA, 201 bp, Homo sapiens
cagcgagactccgtctcaaaaaaaaaaaaaaaaaaaaaaaaaaaaaaaagaaggagcattttataattttacactgattagccaaaggatggagaaacccratacttctgctcgttcaccatgcctcacagtatattccaagtattttcattgtatatcttctacttactctaccaccctatgccccacaatttggactct

SEQ ID NO: 456954 - DNA, 201 bp, Homo sapiens
acagctttataagtgtgcattactgttcacagctaactttaaaattgttttttgtaaagacaggatcttactatgttgatcagactggccttgaacccctrggttcaagggatcctcctgccttggtctcccagaatgcagggattacaggcataagccactgtacttgccctgtaatatattatttaataggtcttgtat

SEQ ID NO: 456955 - DNA, 201 bp, Homo sapiens
tattcacttctttcacttgaaatctggaaaattgcactttttttattgccaagggggaaagttgaataaaaggagggtaatggggaaaaaaaaatgagagkagtgatattgaaaaggctctaaagattagtcagtttcaagataacagtttgatgagttatgagtaaaatagaaagaatttagtttcccaaggaaacacat

SEQ ID NO: 456956 - DNA, 201 bp, Homo sapiens
gaaacacatgagctcaaagtgtaggggaaaggtgcttggcaatacaaatcatgtatttttattaacctggagcatttgaaaaaatatgcagaaacatttgrcaaactgaaaactcagctgacttcatgcccaccaaccaagtgaaaaatctgattcttcttcctctaagcacatagctgggttcctcataaacagagttat

SEQ ID NO: 456957 - DNA, 201 bp, Homo sapiens
tcagaggaactcaaacatgaatgaagagtggaattttcctttcattttctataataactatgtttattgaagagaaaatggaggaaaaaatgaccatcacrcctggttttgaagaaaaacttgtttatgtgcgtaatacattggagaaattgtttgggatcactttaactctgcagaaatatgaccactaaaattcctaac

SEQ ID NO: 456958 - DNA, 201 bp, Homo sapiens
tattcttttctaatatattttacttcttagtccagtgctgtttatactgactggttgtcttcactgatgttttcctgtggcactgagaactccaggtgaayagcaaccaaatcagttcagaatattttaatgaaatacttttagtgtgtattacttatatatgattgtgtagtataaattgactacatctttttcagaaaa

SEQ ID NO: 456959 - DNA, 201 bp, Homo sapiens
ataaagcagagaggtggcacttgtttaaaaatttttcctttcatccatctttctgatttggcctctctcattttataggaactctttcacatagaggtgcrgtaaaagattgttgtaataccaggagaaatacctgaggtaatggcagaggtgtaagcatttcattttaacttaatgaaactttatttctgatagattgcg

SEQ ID NO: 456960 - DNA, 201 bp, Homo sapiens
tcacactgtagtctacattaggggcagctttatcatggcttccagtaggaaccagttgtcatccaaaatcagaaagcaacatttagaagcagactgctatkttgtcatcttgtgctgaatgaaatataatttgggcactaccccctgcataggctaaaacattaaaaaggcttgggaagtatatagcttggaactgattta

SEQ ID NO: 456961 - DNA, 201 bp, Homo sapiens
gtgctctttagcaagaagtgacagccactccacaattagggtactttaacatagatttcccactaatcatgaaacaaatgtcatgttattgaaaataaagmcttcacaaataggcaatgagattgtacaattccatagactttcagagctagaaaggtcttcagaggctttgagggtcaagtcccaactctaccactggtt

SEQ ID NO: 456962 - DNA, 201 bp, Homo sapiens
gtcatttagccatccagagatgacacagtaattaactattgacacttgtgaataagctagcacaaattaatcttgacacatttgcagacgagtgatatctyacagtgaacactttgtaattatatttcaaaatgaaaattaaatgacacttaaaactaggttgtcatgctcaatgaagcgagcatgtagctcaacctattg

SEQ ID NO: 456963 - DNA, 201 bp, Homo sapiens
aagtggctagtatagaaacatattgtttcagcaattattcagttttagagtttgttcaagttgtgccatagaagattcagcatctagttaaaaaagaaaamatactaaaacttgaagcttgtggggaaagtgtctctaacttgaggagaaggaagacctttaggtaagagactgcctgaattatgtactggcttttactgt

SEQ ID NO: 456964 - DNA, 201 bp, Homo sapiens
catattggttcagctgttgtaaccaaagactgataagataatagaggtctttgtggtggttttgtactgaaatcctttatctttatgatgcactagggccrtttagtgtggaaagcttttaaaactgctattggattcagaactcaaattagctgctggtatgctgggacaggggttcctttctcaggcagtcaccacaaa

SEQ ID NO: 456965 - DNA, 201 bp, Homo sapiens
tgtctatattaacctagaccataatccttgatgccttgtcagcaattcccctagagctattgaccttgaatggtatgaactaaaacaaaagtaaataagtracagatatgtatgaaaaatttattgcttcaaatatatccgtgtatttgactatctcaaactatacaaagtgcaagcctacagtgctcatttgaagccagt

SEQ ID NO: 456966 - DNA, 201 bp, Homo sapiens
aactgagaaacctgatatctggaccaactaatagtgacacagggtcattcttccaacttttgagattcaactaaagaatggcttgttttttatctaaagtrtaacttctgaaaacattctcctacaaaagctttggtggcattatggaaggtgaattaatttatcaatcatctgtgactccatggacagtcatttctttgg

SEQ ID NO: 456967 - DNA, 201 bp, Homo sapiens
acttgcctttggatttttgtggtcctcagaattcctaattgatgctcactttagtatttcagatttttctcctttctttgaaaccctgattgtactacctyttctgtggcttttattagtatttactaacagttacaactttactcagagattcctataaagcagtgcttgaaacatccacgaatggcagaatcttttttt

SEQ ID NO: 456968 - DNA, 201 bp, Homo sapiens
ctagagctggcacatagctattactgttctgccagttcctcttttctgttttatttgtagaagagttcatatgctacaggtaaactcagggaaaatttatratgatttaaactcaatgtactgatttgaaaacatcttgctttattttagctgttctagattataaagattaggataataactggattctcttctgtatct

SEQ ID NO: 456969 - DNA, 201 bp, Homo sapiens
atcttctttgggagaactaccttgactatcttgcttaaaattagaacctcttccacctactcagctgttttcttctacagcgtttactatctcttactatscctttaattggtcatttcttgtatttattgtctgagttcctccactagaaagtaagttgcatgaaaacagtatgtgtcggttcactgcctgacccaggta

SEQ ID NO: 456970 - DNA, 201 bp, Homo sapiens
gaatcctaatggaggctaaagaaatataggtagattagggaaggatgccaaatataaaggcaattcctaatgcttagaaatctagcttgccattgtagtcwgtgaagcagaagtttatacccaccctcaaactaaaacattggataaactggattttcttttggaactttgctttttatttggttttaaagtaatacctga

SEQ ID NO: 456971 - DNA, 201 bp, Homo sapiens
attttttccttcttgtagctcatagaataaggggttgttattttcaaattacatgataattattttgtaaattgtaaatgcattgctccttaatatatgtrtcctcaccctttctagggtcaaaagtcagggcatggtgtctgataaattttgcattggtgtttcttatttataaagctaaacttggggggaaagtgtttt

SEQ ID NO: 456972 - DNA, 201 bp, Homo sapiens
gcatttccccttttcttattctgcttaggcaagagtgcaattcttattccaactctcctaatttcaaggttgcctacagactagacagagttctagcctgyttaatgggagatttgagttgaagttcctttgctaaatgactaaaaacaagaacctctgggcttaagtttctttatcttttaaaaaaggtatgttggattt

SEQ ID NO: 456973 - DNA, 201 bp, Homo sapiens
ttatgtttagattaactctcattggagattaccagcactatgttaattaagtcagaagaaactttacaaaagaaaggtaaattgataagctgggactatcyggggaggacatttcagaggatggtgtatagtccagaagaaagttgaatgtgggaatgagtttactggatccatttaatgtggagtacattttctagaggg

SEQ ID NO: 456974 - DNA, 201 bp, Homo sapiens
ttgttgaattttttaagtgtcattgaggccacagattctgtttgtttgtttatttatttttggctgtgaattttgcaaattgtcctgctggctagtatgtkattgagattgagatgttttccatttttagatatttctatgtgaaacatttagagaagtagtcttgtacatcttttaagtagtcaatgaccttatcttttg

SEQ ID NO: 456975 - DNA, 201 bp, Homo sapiens
taagtgtcattgaggccacagattctgtttgtttgtttatttatttttggctgtgaattttgcaaattgtcctgctggctagtatgtgattgagattgagwtgttttccatttttagatatttctatgtgaaacatttagagaagtagtcttgtacatcttttaagtagtcaatgaccttatcttttgccaaaatcaaatg

SEQ ID NO: 456976 - DNA, 201 bp, Homo sapiens
aaatgacattcaatactgatactatggagagaggaatcaaaataggtacctaattataattactttttcccctgtcattatatcactacatgcaaaacaaytgatttgtaagagatcacacaattgctgacttttggcaggtacaaaggttttttttctttgctcgtctctctctttcccctttcctgttttcatcacatg

SEQ ID NO: 456977 - DNA, 201 bp, Homo sapiens
caggcgtgagccaccgcgcccagccgaatttgttcttttcatcagtttgagggctgtctgcataatattcctagctatcaataaataatactttgtttatmcattcttctattgataagcatttggtttcttcttaatttctcacttttaaaatagtactaacagttggaaagatgggtagaagagtgttttgggcagtgt

SEQ ID NO: 456978 - DNA, 201 bp, Homo sapiens
tgtttttatgtatgcattcttcattgtgtttaatacagattttgagtgtttaactaggtgtcagagagatgcaaaaacatatacagggaaagacagggtgmggcagacagagagatttagacatgctaaggaaaatactaaagaagaagaaaaatattagatttatcctttcaaagtaaataaaactctaagagaaaaaga

SEQ ID NO: 456979 - DNA, 201 bp, Homo sapiens
ctcaaatttttgacaggagacatttgcactcttacatttttattgaggaccccacaaagcttggtttgtgtttgtttgtatctattctgtagaaattaaaygagaaaatttaaaagtacttactaattcatttagaagttatgatattaaaccttgtacgtagggccaactgcagtggctcagacctgtaatcccagcact

SEQ ID NO: 456980 - DNA, 201 bp, Homo sapiens
aatgactagaaatgaagtgctcaaatttttgacaggagacatttgcactcttacatttttattgaggaccccacaaagcttggtttgtgtttgtttgtatytattctgtagaaattaaacgagaaaatttaaaagtacttactaattcatttagaagttatgatattaaaccttgtacgtagggccaactgcagtggctca

SEQ ID NO: 456981 - DNA, 201 bp, Homo sapiens
aaactgttaacagaggttgactgtgcagtaggaaatgaatggtttagggtggggctgatttttaaattttgtgctgcatagttcgtactgtaggacttttwaaaacgatgcgttatgcattgctttttgaataaaaaatattattttaaaaaagactgaataataaaggtgaaagggattagttttcttatttgtacaaaa

SEQ ID NO: 456982 - DNA, 201 bp, Homo sapiens
ttactggaaggatatttagtaaactgttaacagaggttgactgtgcagtaggaaatgaatggtttagggtggggctgatttttaaattttgtgctgcatarttcgtactgtaggacttttaaaaacgatgcgttatgcattgctttttgaataaaaaatattattttaaaaaagactgaataataaaggtgaaagggatta

SEQ ID NO: 456983 - DNA, 201 bp, Homo sapiens
agaatgtcatatagttagaatcacagagtatgtagcctttttagactggcttctttcatttagtaatatgcatttaaggttcctacatatatttttgtggyttgatagctcatttctttttatcagtgaataatatcctatttcctggtagctcatttctttttatcactgaataatgtcctatttcctggatgtaccaca

SEQ ID NO: 456984 - DNA, 201 bp, Homo sapiens
tcttcagattttgccagccatcttgttgaggggtcctgccgaggggcttccccagaggcggttatgctcctaaatgcactggtcccaaactgctgcctcartgagccataggaaccttccctgggccccacccctccagcaaattcctctcccagagcccctcccttcccctcccctcccagcacttggtggcatctgttt

SEQ ID NO: 456985 - DNA, 201 bp, Homo sapiens
tgctgtattcctcctgaatggtgttccctgaagaaatgagttggccctagtggaaggccagtctgaataggtcagaaaatctcaagttttttgaaaaaatraagaaatgcccttttctcttaaccaagcatcagccaagtttttctgcaaagagccagagagtcaataggtaagactttgcaggctcttctgtcatggttg

SEQ ID NO: 456986 - DNA, 201 bp, Homo sapiens
catggtacagggtgctgtggagcccgaggagggacgccagtctggcctcatagggtcaaagaagacttttcagctgaaagccaaggaggcctgagctggtrtgggagcactcaggcagaggccgctgcatttagagagcaggcagtgtgtccagtgaaccaagtgctgagaggacacaggcagcaaacacaacacacagtg

SEQ ID NO: 456987 - DNA, 201 bp, Homo sapiens
agaggcggttatgctcctaaatgcactggtcccaaactgctgcctcaatgagccataggaaccttccctgggccccacccctccagcaaattcctctcccrgagcccctcccttcccctcccctcccagcacttggtggcatctgtttgctggtctgtccgtctagcaaggttccaagctgaaacccctttgccccctttc

SEQ ID NO: 456988 - DNA, 201 bp, Homo sapiens
atgcacatgacattcatttaaatgagtatggtaaaggtgtaaatttctcttctctaccttaccctccttgtaattgagggtacgctcatttaaacgagcarggctacgttcccattaaactttatttgcaaaaatagatggtgggccaagtcagtagtttgctaatccctgctctaaacaacccagaagtcacatttagta

SEQ ID NO: 456989 - DNA, 201 bp, Homo sapiens
cccaaccccacatacgggtggaaagggtccctgaggcaggggatggaggtcctgacttctggtttcaccgcctctttcctctctcaggggctacacacagyccctctcagggcaggctgactgtgtggctgtggtcctggagcctgactccatgacgcccctgccactgccaagcctccagctatggctcagcaccccaca

SEQ ID NO: 456990 - DNA, 201 bp, Homo sapiens
ggttgcagggtgataggtggactccttagtgagaggtaggccctgcacccttctgtggcccagcctcccctccagtacttactcacccatcagaggctgcraggtcagtctcgtcagcacatccaccctccctgcagcaccgcactactttctcaggaaggagagccatgagtcagtcttcaatctggttctgttggcact

SEQ ID NO: 456991 - DNA, 201 bp, Homo sapiens
agtgaacatctcactaaaagctgtcagacagacaacttaaatggggtattgaaaagcttctggcatgttcctggctcaggccagggctggtccacaggaaragaagggtaatcaacagccctttagggggacatcttcacgtgcagcatttgagaagggaaaatgtgaaatacgcataacattgactttcacctgagctgg

SEQ ID NO: 456992 - DNA, 201 bp, Homo sapiens
ctgtttccattttgcaggggagcacctggagagctctgaatcacataggtagcaagtggggctcagaggtgagaagccaggcctgctaatccccaaagctmggctccttcataccccatgctgactgtcaaatgagctgatggatgggaaattgctccataggcaacagagctctatcccagcctgagggctggactgttg

SEQ ID NO: 456993 - DNA, 201 bp, Homo sapiens
ggcatcttccatgggaagacacaggtagccatggcagccacagcctcatggcagcctgcaggcaaatcagggagcagactaaacctgcagacgaataaccstatcacttcagatcactgtcgactctgaaagcagtgagagggaaataaacagaacccagggcttgagaataacaggaaggacccatggaagcaattcacc

SEQ ID NO: 456994 - DNA, 201 bp, Homo sapiens
ggtgcaggcggtcctggggaaggtgtgtgaccttgaatgaggctgcctcctttattcaagggcaaatccggaatgagtgcctctgttctggcagtgcaccrtagtatctccatcagagggcccttaggaacaaaggagtttaagctaaagggccactcagactggagcacactaaaagggtgtctctcaaatctggtcgtg

SEQ ID NO: 456995 - DNA, 201 bp, Homo sapiens
gggaaggtggagaacaagcagaaaaaaatgaggaggacacagaatggagagaaagacaaaaataaggagagaacgtggaagtgtagagcaaggaggaggaragcagatgaagggagagtgtccaacagatttgtttgttttgttttgagatggagccttgctctgtcaagctggagtgcagggcgcgatctcggctcactg

SEQ ID NO: 456996 - DNA, 201 bp, Homo sapiens
ccagcctcacaggaacaggaacatcatcactcccaaaactatcccaacccctgccaccgtaacctctgacctgtgacagggagatggggctgcatgaggaygacattagtgaccagaacatttttgcagtttatttctggatcagcacctgaatatggggaaggtgggtgtgggagcagctcggccaccccaggaccactg

SEQ ID NO: 456997 - DNA, 201 bp, Homo sapiens
ccacggccggcatcttccatgggaagacacaggtagccatggcagccacagcctcatggcagcctgcaggcaaatcagggagcagactaaacctgcagacraataaccgtatcacttcagatcactgtcgactctgaaagcagtgagagggaaataaacagaacccagggcttgagaataacaggaaggacccatggaagc

SEQ ID NO: 456998 - DNA, 201 bp, Homo sapiens
atcagagggcccttaggaacaaaggagtttaagctaaagggccactcagactggagcacactaaaagggtgtctctcaaatctggtcgtgcaaccaagatytcacagcattttgtgcaaacacagattgctggcctccctcctgtaccagtgtctgaatcgctctgttggggcccaggaatctgtatttctacaaagctcc

SEQ ID NO: 456999 - DNA, 201 bp, Homo sapiens
gagaaaagggaactcaggccagattgggagtcagcagctggactgagtggcttccattgtgataaggagtcttaagaaaatgaccccaaacctgtacatartacaaagatgtgattctgtgaccctttaccctcatacttagagcattttccaacagtcctgcctaagggtcatctgactgcgggaatagaactttgctca

SEQ ID NO: 457000 - DNA, 201 bp, Homo sapiens
gtggcccatccctccctcccacttacctacttcagacaccctgtgtgctccggactctgagcacctgaggattccaggtatgggccttgtaatatggtacrcgtcctagcctttgctcatgctgtgtccccttccagaatcttctctgccaagtatatgacttcagtttcagcaccagtgttacctcctatggagaggtgt

SEQ ID NO: 457001 - DNA, 201 bp, Homo sapiens
atccactttgccatcctgcagatctccttattaatgagttaaataaaactttgacatgtgttcactatcgattttcatgagaattatgtttttaacctttygagagttatattgtgataggagtttgggttttaagtgcatggaaagcaggaagagtgagaagaattcattgatgtttgacaaaggaccctcagacagcta

SEQ ID NO: 457002 - DNA, 201 bp, Homo sapiens
cgaggcacagtggctcagtgtggagcccaacagtgggctagggaggctgaatggctgccgcctctattctagatgaaggtgggagctgagtatttacgagrggttcccaaggctccagctgtggtggggagacaccagcagtgccagagtcaacagactctggaagtggggatgcctgtcctactggaccgtttaaacaag

SEQ ID NO: 457003 - DNA, 201 bp, Homo sapiens
ttttccaggctggaaatattccactgcatggatacactactgttccattatccattcacctgttgatgggcattcatgttgtttccatctgttggctatcrtgaatgatactgctatgaacatgggtgtacaactatctcttcaagtccctgccttcggttgttttgggtatacgtctagaggtggaattgctagatcata

SEQ ID NO: 457004 - DNA, 201 bp, Homo sapiens
tagaagtgggactccagacagtcacaaccagaactggtaaggaggaaagacccgacactggctctgcccacgggccaagggggcaggaactgagtccactygagcagacaggctatttttggacggggggacatctggtcaccattcaccctgcaaggtaggcaacagaacagctgggtgggtcccaattcatcccaaggg

SEQ ID NO: 457005 - DNA, 201 bp, Homo sapiens
tcatcaattctctgccaagtctccctttcccactgagattctcttttgttatctacgactgcctttgtcctcggttaagtctttcctggtctccttgccarttattcactctttgccctggcagattttatacatcattgaatgctccaccaacatatatacagtctattgtaggtgagactttccagtgttagctgttat

SEQ ID NO: 457006 - DNA, 201 bp, Homo sapiens
tcttttgggacttagctttggaaattgcatactataagttctgctgaaatctgtggatcacacaaattagctcttatttagagaggaatagtaccaaggtrtagtgggaggtaagctcactgggtgctagcttggagactggatactatagtgactaatgtctggaggaaggcaggaactccagttgcccagcaaggggca

SEQ ID NO: 457007 - DNA, 201 bp, Homo sapiens
gtgccttggtccccatttcaaccttctggcccacctcctttgatcatcttgtctgatgacattggccaaaagagcacatttattgtcctgtgtcactttgrgcaaatcacttgacctctctgagcctcttgtacctgtaaaatgtggtatgtacaaccctccactgcttacctctctaggcaactgtgagacccaaatgag

SEQ ID NO: 457008 - DNA, 201 bp, Homo sapiens
ggattctctgggctgttgatcactgaagatcgtcccagttactccagagcagggccgagaaagcagggcctgggaggaagaagcaggggatgccagtgttsacaaggggtgagtgcatctcattggagaatccagaaggacttcatggaggaagggctatttaccatagggcttaaagggtaagcaggacttagacatagg

SEQ ID NO: 457009 - DNA, 201 bp, Homo sapiens
gtagtcagttccaccccccagccccaggaatagttttaccttttctggaaatttcatataaatggaattaaagaacacgcagtcttttgcgtctggcttckttcacttagcgcagtgtttgaggcacatcatgctgtggcatgtggcggtggtttgtttctttctactgctgagtggtaatcccttgtatggatggagcat

SEQ ID NO: 457010 - DNA, 201 bp, Homo sapiens
cagagggtgagagttaagctgggtttctgcaaagcaccagcagttcaccatatccttgaaaatctcagagcgggctttgccggtgccctgcccccaggtamagcggttttgctggatttaatctccttggcagtcactgagcccacactttcctcgtgttctttttacattcggtaacataaaggcccctcgggtttttat

SEQ ID NO: 457011 - DNA, 201 bp, Homo sapiens
cctgttttgcagaactcctgctcatccttcaaaaccccggataccacttcctctgtgatgccttccctgatctccttcttttccccctttccttcagtgcygcccattccccgctcaaaaagtaaattaattatttcttcctccgctacaccctgcattcccaatagggggtgatatcttctccaagggagtaaacattgg

SEQ ID NO: 457012 - DNA, 201 bp, Homo sapiens
gggcaagtttctattcttcttgggacttcagtttccccagctgtccaatgagggctggtgagttggtgtgtggcagcctggttctgatggtctgagctcakcctctctcagacatgaggagtgggcctgagagtgtcagcactcactctgcctgctggacagagggctccctttgcagaccttggggccaggaggtgaagg

SEQ ID NO: 457013 - DNA, 201 bp, Homo sapiens
aaactgagtcctagcaaagttaagcagcttgctcaagatcacgcttgacaagaattgggattagaatgaggtcttctacttccaaaacctgtgtcctttcytttatacctacttggagaataacacagaagccctcctgctctctccctccccctgcccctgcccattttacaaatgagaaatgcagaatgagagcaagga

SEQ ID NO: 457014 - DNA, 201 bp, Homo sapiens
gatatagatgtagtacacaaacagatctatgcatgcctgtggtattacaatttcaccagggggcaagagtaggaaaaaacagccagaaagacttcttaggmgactaacagtgaaacgaaggttgagaaacactgttctacatccttctatattgtgtacagtattctcttattaaataaatttcatgtcaatgaattgtac

SEQ ID NO: 457015 - DNA, 201 bp, Homo sapiens
gatcctgagatcaaaacaaaccaagtgcttccctcctggagctgacacgtccatggggaagaaaatgttacagcccccatactcatggtcatctctttgcragtcaactcaaagtcagtgatgcagactcctgagccctccactgaagctccatgaggccagcgcccctgtcccaggcacccacatttccacgatgcacag

SEQ ID NO: 457016 - DNA, 201 bp, Homo sapiens
tttattcttatactaactgtacaatttaaggatcactgaccacactttaaaaagaaggaaactgagtcctagcaaagttaagcagcttgctcaagatcacrcttgacaagaattgggattagaatgaggtcttctacttccaaaacctgtgtcctttcctttatacctacttggagaataacacagaagccctcctgctct

SEQ ID NO: 457017 - DNA, 201 bp, Homo sapiens
atctcatcttcccctacctagctcaggcgcccagccaatgttgaaccaatgtgccccacaaatgtggaatggaaaggagtggcgatggcttggtggcacaygtagttggagtttggtatctcttaagagggcgatccagcccccacccccggagaagggctgccaacatgtgatatttgcacaaacctgcagaaaagagca

SEQ ID NO: 457018 - DNA, 201 bp, Homo sapiens
gcaagtatcccagtgccgctaggatgaagctcacagtccatggtggggcacagtccatggagtgcaccatcaccttgccgttttcccagcccacctcctgycccttcatgctgccagcctcagtacaggctgctggcaggactatgctcattcttcctggtgcagcttgggtgtcccttctttgcaaagccccccatggcc

SEQ ID NO: 457019 - DNA, 201 bp, Homo sapiens
tccgctgctccagaaacagggagagttttcccctttgggtagccccagaggccctggcctttagggagcccagtccttccttacctcctttccagcagccsttggtgcctgctcacagcactcctcactccctgtcaatctgtgtctcctgccctcctggggctcccttccaggtgaggggcagccttctaacctcccctg

SEQ ID NO: 457020 - DNA, 201 bp, Homo sapiens
gtcagtagtttgctaatccctgctctaaacaacccagaagtcacatttagtaaaaatcgctggatctgttgaacagttattgtaagccaggctctggtaawctagtgtgggatgtgcaaatattatccccatgttctagatgaggaaactggttcagagtgggaagggaattacccaagatcacacaactagttagttcat

SEQ ID NO: 457021 - DNA, 201 bp, Homo sapiens
tggagtgcaccatcaccttgccgttttcccagcccacctcctgccccttcatgctgccagcctcagtacaggctgctggcaggactatgctcattcttccyggtgcagcttgggtgtcccttctttgcaaagccccccatggcctcccctgtgcttcctgacctgacctgcacatccctcccagggtgtttgctatgtctg

SEQ ID NO: 457022 - DNA, 201 bp, Homo sapiens
atttaaatgagtatggtaaaggtgtaaatttctcttctctaccttaccctccttgtaattgagggtacgctcatttaaacgagcaaggctacgttcccatwaaactttatttgcaaaaatagatggtgggccaagtcagtagtttgctaatccctgctctaaacaacccagaagtcacatttagtaaaaatcgctggatct

SEQ ID NO: 457023 - DNA, 201 bp, Homo sapiens
tctacaccacagtgtcatcattgtctccatttctgcccccccatttgactgtggtaccctaaagacagtggacatgtctgattagtctctccatgcctggkgccacttacagggacccaataatgtgtgtgagggatggagggggaggttcattccacagctttgagttggcctggggtatcactgcccttcatgatccaa

SEQ ID NO: 457024 - DNA, 201 bp, Homo sapiens
gtcagggacagaaagggcaatgacggcgataaacttcatgcacagaggggatcagggccacctctattgagttaatggcactgaactctccacttaaaaakggttaaaatggtaaagttgatgtgcattttaccacaataaaaacaaaactgtaacaataaaaaccaacttggttatgtaaaaaactggaactgtgaagaa

SEQ ID NO: 457025 - DNA, 201 bp, Homo sapiens
gggaggttcattccacagctttgagttggcctggggtatcactgcccttcatgatccaaacccccactcctttggtggaaggggtggagatgtggtccccscatccagcctggcttgcgtggatcctggcagcaccctccgatcttcaggggaagagaggttctgttcttactcattcatccatccatccaatcattcatt

SEQ ID NO: 457026 - DNA, 201 bp, Homo sapiens
agcacccttcagttctccaccctggggtcacctcacccctccagctagtcctggacagggccacacaaactctccctcacccatggcccacatctggggcrcagaaagcattccttcatcctttgcacctacaaactcaaggactgaaggttgatgtcactgtagtagctgcctctcttttgttccatcctcagagcagct

SEQ ID NO: 457027 - DNA, 201 bp, Homo sapiens
ctgccagcagaggttgtatgtccattttcatgttgatccccagaagggcagtgaaagcccttcaccctcccaggcatgcttcatgaaatcaatggagcaarcggctgagcagaattgttctgggcatagatttttccttccatttggagacttgctctcatttctttttcctttttcatagctgggactgagatgggcact

SEQ ID NO: 457028 - DNA, 201 bp, Homo sapiens
tcctttggtggaaggggtggagatgtggtccccgcatccagcctggcttgcgtggatcctggcagcaccctccgatcttcaggggaagagaggttctgttyttactcattcatccatccatccaatcattcattcattcactgactcatgctatatttattcattcattctctcactcaacaagtgcagcgcctgctgtat

SEQ ID NO: 457029 - DNA, 201 bp, Homo sapiens
tcccccaattggctatttgtggcttcttcctctgctcctgagcacccttcagttctccaccctggggtcacctcacccctccagctagtcctggacagggycacacaaactctccctcacccatggcccacatctggggcacagaaagcattccttcatcctttgcacctacaaactcaaggactgaaggttgatgtcact

SEQ ID NO: 457030 - DNA, 201 bp, Homo sapiens
gtcatcatggcccattctcgatggtcgctgtctcttcggagctgttgggtacacttcccagacggggcggcttggcagaggcactcctcacttcccagacrgggcggccgggcagaggcgccccccacctcccagacggggcggctgggcagaggcactcctcacttcccagatgggggcggccaggcagaggcgctcctc

SEQ ID NO: 457031 - DNA, 201 bp, Homo sapiens
ctctgatgcctctcactgacagagggaacttaggcgaattagcagccccctcagagcctcactgaactcacagtatcaaggaggtaatcccgtccaccctwctggggctattgagagcattagatgggacagggatgctggagcatgtgggagcactttgcagaccatcaggcccactaagatctcaggtggtgatgttac

SEQ ID NO: 457032 - DNA, 201 bp, Homo sapiens
gcattgggcttactgggcctggcaaggattgcagtggcccctttagactcctggggcgcttttctgagtccctcattactaggactttctctcctgccgtsctcttgatgcaggtgaaatgctcccccaattggctatttgtggcttcttcctctgctcctgagcacccttcagttctccaccctggggtcacctcacccc

SEQ ID NO: 457033 - DNA, 201 bp, Homo sapiens
ccctttcttctggataaaatttgtgaaagtcttgtgatcttgaaggtcctctggttagtaactattataatatgtagagtctattgttatattcaaaactkcaaacagcattgattggcacaacttctccctctcccagctcaggcctgcagcaggccggccacctgccttgggaaaaggagtataggctggccgcttctg

SEQ ID NO: 457034 - DNA, 201 bp, Homo sapiens
ttagatgggacagggatgctggagcatgtgggagcactttgcagaccatcaggcccactaagatctcaggtggtgatgttaccgcaactgtgatgccaacygggccctgaaaatgtataggtctccatttgtcttcagatctaaagttgtgtggatgaaattaactctcaccgaccatgaagatgattcagaacagtaaaa

SEQ ID NO: 457035 - DNA, 201 bp, Homo sapiens
gcacccccgacccctgacagatgtgatttcaacttgtggactgatcagaggtgccatattgacatgaggagacatgatttctgcagtgaggtaattaaaargcggttggcttcacagctgtgatcacacgagaacacttcttacccctaaagacatcagctgaaagccaagtgcaaaggagccgaggaaaccaaagaggct

SEQ ID NO: 457036 - DNA, 201 bp, Homo sapiens
gggactgggggatcctcaagtttttgtggggcggtctagttaataatgtaaaacaaaaccactcactttgcattgtcggtagagaaaatcgctttgcccarttgacttccccagggtgacccctcggaactggcccttcctgtggtccccagcacacccaccctctgctttctctttgctgacaggtgcggaatgacctga

SEQ ID NO: 457037 - DNA, 201 bp, Homo sapiens
aagaagccccaggcagctgttagagggcacacacactctttctggttttcagagaagcagaggtaggttaaagaagggctggatgctatcgagggcagggyggttcccaatctattcctgcaaggacataccccatgtctttcctgttggcctggtgaaagattcaatttaaggttctgacccctatttttaattcaagat

SEQ ID NO: 457038 - DNA, 201 bp, Homo sapiens
agggactcgtgtgggaaactatggtgatgaaacagtgcacagagaacagagcagaggagcagtgaattcagcatggcctgagaagcgcttttcaaatcttyctgacagatccacagtaagatgtgcatttcataatgtgttacagtgcattcacacctacacacacacgcgcacgcctaaaacagaattttcacaaaatga

SEQ ID NO: 457039 - DNA, 201 bp, Homo sapiens
gtggggcggtctagttaataatgtaaaacaaaaccactcactttgcattgtcggtagagaaaatcgctttgcccaattgacttccccagggtgacccctcrgaactggcccttcctgtggtccccagcacacccaccctctgctttctctttgctgacaggtgcggaatgacctgactggagttctgtatggcgaggacat

SEQ ID NO: 457040 - DNA, 201 bp, Homo sapiens
gttcacctcaagtctggacctcccacttttaaaggatcatagaaaccttgaaggctgctccagtgtcgtgttctggtcagggaggtgttgtagaaatgtcrtctgaatgtagtcattaggtcgaacaagggaattcaaaaatggacaccaccaaccctcgaatgccattgcgtgcattggagaaagctcataggagcaaaa

SEQ ID NO: 457041 - DNA, 201 bp, Homo sapiens
cagccttcacaccgtggaccgcattcgccacccgtgcggtttggtatagatatgatgttgccagaccttgactcttagtcatagagaaactttatccaccwctgtcctctttaactcttgcagtggtactggagctcccctttcttctggataaaatttgtgaaagtcttgtgatcttgaaggtcctctggttagtaacta

SEQ ID NO: 457042 - DNA, 201 bp, Homo sapiens
ttcaatttaaggttctgacccctatttttaattcaagatcatggtctctaaagtaatatcagttcccaatgtgtaagtccagtggcctcattgtttatgcrtctttcaccgccagccacttcaacccttttctgggaatatgtgggctgtaaataattcattctaaataaataaatcactcgcgctacttacggtacagct

SEQ ID NO: 457043 - DNA, 201 bp, Homo sapiens
taagacaaattttagctaaataaaagggactactcattgtgggtatgggatcagtttgtcagagccaggagggactttggagaacattctaggctgaactyctagggcccactccaagtctacagccagacagttggggcacaggactggcctgggcttccgaagccttaggcagtgcccgctggcccaggtcatggccag

SEQ ID NO: 457044 - DNA, 201 bp, Homo sapiens
cttaaaagagaggagtgaaacagggctggtacctgatttaatgattccattttcaaagaggcccctgtaggacaggagctcagccttcacaccgtggaccrcattcgccacccgtgcggtttggtatagatatgatgttgccagaccttgactcttagtcatagagaaactttatccaccactgtcctctttaactcttgc

SEQ ID NO: 457045 - DNA, 201 bp, Homo sapiens
cctcttcaaaggagcctgtgccattcgtggatgatgtgttcgtttcctttggctgtcataacaaattaccacaaaacagtggcttacaaaacaaacagaartgtattctttcctagttgtggaggccagaggtccaaaatccagacagacacttgtggtccctctgaaggctccaggagagaatccgtccttgcctcttcc

SEQ ID NO: 457046 - DNA, 201 bp, Homo sapiens
tagtcaacaaatattaaccatttattataggttgtagacagtgggggttgagggagggtacatcaatgaacaaaacgagagttccgtccagagagcttgcrtgctgataaaggagacagacaatgcaaaaataaatacatcttagatagctagctaggtaggtaacatgttaagtggtgatggcactaggaaaaaaaacaa

SEQ ID NO: 457047 - DNA, 201 bp, Homo sapiens
gttgagtctggaattacagattgcatctagaaagaactggagagggaatttgaaaatgagctccctctggggacaaacatgtaaaatgggattaacaccarcctaataaggttgggatgagagatagaaataataaatgtgtcacacagtgctgggcacccagcaggcatgtaatcttcttcttcttctttcttcttcttt

SEQ ID NO: 457048 - DNA, 201 bp, Homo sapiens
tgctggggcctggagggtgagtgggagttggctgagccaagggcatagggatgctggggaccttgtcaaaggaaccatccgtggcagcctggggatgggargagggtggtcaggggccgagagaggcttggtgtggctggggcatagggcttgtggggacagggtacaggaagaggctggaagggaagacaggagccacat

SEQ ID NO: 457049 - DNA, 201 bp, Homo sapiens
atacagagggcacctctccatgagggtcttctgacttgcttcaagagaaaagggcgggagaagctcaaagagtgacttccctaggttttatgacctgctccaggggagaagggtgtgaggaaggtgagaatggccttcctggtactgctgttttctcaaatgccaaggtgccagatttggggatagtgtgtcctgaaggct

SEQ ID NO: 457050 - DNA, 201 bp, Homo sapiens
tgggactacagacacatactaccacgcccagctaatttaaattttttttttctttttgagacggagtctcagtctgtcacccaggctggagtgcagtggcrcaatctcggctcactacaagctccacctcctgggttcaaatgattctcctgcctcggcctcccgagtagctgcaactacaggtgcccgccaccgtgcctg

SEQ ID NO: 457051 - DNA, 201 bp, Homo sapiens
tgccaccttcaccctactggggaaatcggacagttaacaaagcatttgtaatacacagttatcagggctggctggggacatgtggggggtgctggggtacraaacactcaagggaggcttcatggaggaagtgccacctatgctggggcctggagggtgagtgggagttggctgagccaagggcatagggatgctggggac

SEQ ID NO: 457052 - DNA, 201 bp, Homo sapiens
agagtgtgagactgggaagatgcctgctgagccgctgggcaggtgctctgcggacagacacacgggtgcatgtggtggcatggcactgactgccccgtccmgtgttgtgtttggtaaggtgtgtggtgctcacctgtgcagatgggcaaatggagggccagagagccaacataccaataataccgggtacgcgtctcaggc

SEQ ID NO: 457053 - DNA, 201 bp, Homo sapiens
gtttctgaacaagcgctgtgatactgttgtccttcccttgatttagtgggtcagccttgcaatctaaaaatagttcctatttttacaaataaaattgaaaygcaaaatgttctgtctctgaaaacctggagagtcaagttgccggaaaggcaggagcagaatgaatctgtaaggggaatgggctgggaacatttcttggaa

SEQ ID NO: 457054 - DNA, 201 bp, Homo sapiens
gcattatactgaccctgggtgctggtgcattgccttccttcttcctcctgtggccatccactcaaggacatagtcacccaggtgacatcttggcctatctstgcaggtagagacagagccctgggatctggggtcacctccatgggatgagctatgtggtcttgggatatctcttgctccttgtgggcccctgtgtaagag

SEQ ID NO: 457055 - DNA, 201 bp, Homo sapiens
cgaccacatgtgtgaaatgctgcctagggaagcacattagagatgacacgcccagggtttttagtcggaggatggatatgtcgacaccgtctgcctactaygtaacaaaattccagactcccagaaggaaggcagtgttcagcataaaccacgttgtttgcacaaccagttcaggcacagtgagctgctcttatcattgag

SEQ ID NO: 457056 - DNA, 201 bp, Homo sapiens
ctttgagagtacagtaagctatgatggtgccattgcactccagcctgggcaacagagtgagatcctgtctttaaaaataaaataagtaaaatcaaaaactrtagtttaatcaaggagacactgtttgtcatgggacgaagagatccaagaatgcagaaacagaagacctgcccatttggagctgataatctagtggggaga

SEQ ID NO: 457057 - DNA, 201 bp, Homo sapiens
tatgcaaagggagcatacagtctacactcttctgcaccttgcttttttttttacttaattttcccagatttcactgtattatcactgtagaaaggcattcsttattttttttttcacagatgcacagccctgctttgtatggatgtactgtagtttgtacagccagtcctctactgatggacatttggattatttccaatc

SEQ ID NO: 457058 - DNA, 201 bp, Homo sapiens
gaacaaggaatggcattttgggtggaggaaacagcgcgtgtcagacccggcagcatgagccagtgtgatgtgaggggaaagactgagcagggcaggatggyttgagaaatatcagaagaggtaaggtagagggggctgcaccctgcctgctaagaatttggagtttaacctgagggctctgtggggcagcgatgggtttaa

SEQ ID NO: 457059 - DNA, 201 bp, Homo sapiens
atgaggaggaagtagtcatgacctccctgcaaggtctcagtgggcttctcagaggaagtggctcacaagtttggatttcagaggatgcatgagaagttgtraagaacaaggaatggcattttgggtggaggaaacagcgcgtgtcagacccggcagcatgagccagtgtgatgtgaggggaaagactgagcagggcaggat

SEQ ID NO: 457060 - DNA, 201 bp, Homo sapiens
gtagaagttgtgttgatactaaactggctaatttgacagtatcctctccatatgggacatttttagggttagagactagaaaatactttgtttccccaaaratctggtatgttttctccttattgataatgagagttgtgtaaataaccttgttgcccttttctcttgggctgctgggaagttcatggtgaaatttgcagc

SEQ ID NO: 457061 - DNA, 201 bp, Homo sapiens
tcagtgaagtgggcctggctgcccatcacttctcagtgcctcaccacaaagggaagaaacagtgctgggagaactgagggagagcagggaaggctccctgkaggaggtgtctgtgagtaggcctggacaaatgagtaggaagtatgatcccagacgtaagaaatgctgcatcctctcccactcaaagactcgagctggggc

SEQ ID NO: 457062 - DNA, 201 bp, Homo sapiens
gcgggggatgaggatttgatcagatatcaagggtgaaggtttctagctaagacagcttcacacgggtcttggtaaaattggatgatgcaaagacatggaakcccaaaggtcaaggcctagttgggaagaggatcagaggagcctgactaaagtttagtcaaggctaggtgcagtggctcatacctgtaatcccgatacttt

SEQ ID NO: 457063 - DNA, 201 bp, Homo sapiens
catgaactcagcctcttttgctatcaaatgctccagttctctctgtggtcttcctttaatttgcttgctcaggctcaacttgcacatctgtggtgacaaakagttcatgacctcctaaactggcccatccagtctgattgtctcctcttggctccagagatttaaaggtgggcaaagcaggccctgcctcccagtagcttc

SEQ ID NO: 457064 - DNA, 201 bp, Homo sapiens
cttttccattgtttttcaccaaaacatcttaatttctgtagctttataataagtcttgataactactcatataggttctccatcttagttcgtcaaaactrtcttggctattcttgtctctttgcatttctatatacatttttaaaacagattgccagtttatacacacatacatacatactttctctggtttttattggg

SEQ ID NO: 457065 - DNA, 201 bp, Homo sapiens
ggacatttttagggttagagactagaaaatactttgtttccccaaagatctggtatgttttctccttattgataatgagagttgtgtaaataaccttgttrcccttttctcttgggctgctgggaagttcatggtgaaatttgcagctaatgatgaatatggttagaacctttggtctgtctacattctgttccttctatc

SEQ ID NO: 457066 - DNA, 201 bp, Homo sapiens
gtgggcctggctgcccatcacttctcagtgcctcaccacaaagggaagaaacagtgctgggagaactgagggagagcagggaaggctccctggaggaggtrtctgtgagtaggcctggacaaatgagtaggaagtatgatcccagacgtaagaaatgctgcatcctctcccactcaaagactcgagctggggccccagcac

SEQ ID NO: 457067 - DNA, 201 bp, Homo sapiens
ggttgggtttctcctttattccctgatgggctaagtcctgggtttggacagcagcactccgggggccactgtcattctggattctagggattaatcagccyctcttgagaggatcatggtcttggttcccagctgagatgcagaatggctttccttctgagacctgccaggttccagccccttgctacctgccaaacatga

SEQ ID NO: 457068 - DNA, 201 bp, Homo sapiens
gtgatggggagctcactacctgtcagacagcatgtggaaggggcagctgaggccatgaactcagcctcttttgctatcaaatgctccagttctctctgtgrtcttcctttaatttgcttgctcaggctcaacttgcacatctgtggtgacaaagagttcatgacctcctaaactggcccatccagtctgattgtctcctct

SEQ ID NO: 457069 - DNA, 201 bp, Homo sapiens
cccttcctttctctgatcccctcgtacttcacctggccctttatgcctggtagaagctcaataatccctgataacctctagtgaatgttgttggattaaaktcacaaatgattgagaaattcaatcacacttttctactctgttgccttccaggcatctataaactaaaaagactttttcaacccgataaataatcagaac

SEQ ID NO: 457070 - DNA, 201 bp, Homo sapiens
tatctttttcttttccattgtttttcaccaaaacatcttaatttctgtagctttataataagtcttgataactactcatataggttctccatcttagttcktcaaaactgtcttggctattcttgtctctttgcatttctatatacatttttaaaacagattgccagtttatacacacatacatacatactttctctggtt

SEQ ID NO: 457071 - DNA, 201 bp, Homo sapiens
agaaacagtgctgggagaactgagggagagcagggaaggctccctggaggaggtgtctgtgagtaggcctggacaaatgagtaggaagtatgatcccagamgtaagaaatgctgcatcctctcccactcaaagactcgagctggggccccagcacccccgacccctgacagatgtgatttcaacttgtggactgatcagag

SEQ ID NO: 457072 - DNA, 201 bp, Homo sapiens
ttcctctgtctgtccatgggaaaagtggggctccaggagttgtgtgcatgagttacctggcaggcatgtggcagaaaatctgctgtttgactgtattattkttttccccaaaaagtcagaagctaggttagaaaaagttttgtcttcatcaaaattgactaatgttctaaataaaatgtattatcattcaaatggaataag

SEQ ID NO: 457073 - DNA, 201 bp, Homo sapiens
gtgtaaaaggggaaagggtgcttgggtgttccaatagaagatttggtgcaaagctgatgtcattttcttcgtctctgacaaatatatgcaccatcctccarggtacatcaaaacctaggaaataaatactttccggcttctgagaagcattatggttttaggaggtcagtttattggagcaatacgctaaccagtggacgg

SEQ ID NO: 457074 - DNA, 201 bp, Homo sapiens
gtaagaaccaaaggggttcatggggctgaaccgtgtgaactcaggatggcccactctcatgcaatagtacccgtttgtcagtcataggtcctaagaccacmtttctaccagatgcagagaaaatggaggtgtggtggctcatgcctgtgatcccaacactttgggaggccaaggctggaagatagcctaagcccaagagtt

SEQ ID NO: 457075 - DNA, 201 bp, Homo sapiens
caggtggccatggatagttcaggggagccatcaggccctgtggtctggtcgtagattgggtagtacctggatgccatcattatcagaagcactcaggtcasttcctggggtgggagtgaaagaatgagatgctatttaaggatcttctgtgggccaggatgtgctcaagactccctgggcaactgctcaaaacaaagagaa

SEQ ID NO: 457076 - DNA, 201 bp, Homo sapiens
gtggcaccacctgcaaggctgggcctcactgtggagggcaggaagcggctgggatggggagcaggtgtttgggccagggcctggctggtctcctggtggcygccccacccgttctctttcagcctgttcttctccatgggacaggacccagctggatcccaatgccccagaaagcaacaaagaccccatttacctgaccca

SEQ ID NO: 457077 - DNA, 201 bp, Homo sapiens
caggattgcatttgccatttatatcctttcacttcaacatctgcatgacttttctcagttagctgttgctgcagattgagtgctgagctccagcagctcasacccagtggggtttgcatcctcaactgggaggcggtagataggagcgaggagtcaagcactcaggctctgggaccacacccacccggggcaaggccagtg

SEQ ID NO: 457078 - DNA, 201 bp, Homo sapiens
ccaacaatattagtggggatccttatgcctcacattaaggggacagctttgaccagaaaagctactcgactagtcagcaacaactgagtgtcctagaaccscagcagagagaggagggagacaggataagcccaaggtaaggcctttccagagagggaagtgtcttcatttcccattgctgctgtgaaaatctgaacagct

SEQ ID NO: 457079 - DNA, 201 bp, Homo sapiens
aggatgatctcatcccaagatccttcagttaattacgtctgcaaagaccctttttccaaatgaggtcacattcacaagttgtcagggttagaacttagacstatcttttttggaggtcacatttcaagccactggctctgcactgtgaacatgcatgggtcacacacgcacatgcacacacacacacacacacacacacac

SEQ ID NO: 457080 - DNA, 201 bp, Homo sapiens
tcgcatctggcccaatgtaggggttttaaacatcttcacatagctggatttatatctttgtggtttctgcttttggtgtcatgcttagaaagtcctgcaartactccatggctttataaataacccacttatatctccttttggttacagtaatggtttgatttttaaatatttaactctttttttttattgttttcttga

SEQ ID NO: 457081 - DNA, 201 bp, Homo sapiens
ccttctctccactgaggctccccatcactgttctactcccgcaaagtgacttgacatcggtgatttcaagtgtcagcttccatttttcaagtcctgttcgktttgtttcctttgtgagcatttataattctggcttgatttctccagcgatggctcagcctctccaatagggacattcttctcctgttattgtgcccctgc

SEQ ID NO: 457082 - DNA, 201 bp, Homo sapiens
aaaatcaaaaactatagtttaatcaaggagacactgtttgtcatgggacgaagagatccaagaatgcagaaacagaagacctgcccatttggagctgatawtctagtggggagatagacatctgaaagaaataattcataatttaaatcagaaggtgtgcactgagggcttgaagcatcattcatgcccttattcattcaa

SEQ ID NO: 457083 - DNA, 201 bp, Homo sapiens
ccatgttcccataaaagctattacatagtactgtcttagcctcttctaacatgacatgttggctttgcaagtatgagggaatgacttccttcacatccggrgtgtcttctgagactctgggcccattcctagaggattgggcacagggacctttggcacagcaaagctgttttggcccaatcctctggcccacgctaacaa

SEQ ID NO: 457084 - DNA, 201 bp, Homo sapiens
agcaacagagtgagagctcatctcttaaaaaaaaattagctggggatgatggtgtgtgtgtgtgtagtcccagctacttgggaggctgacgtaggaggatstcttgagattgggactttgagagtacagtaagctatgatggtgccattgcactccagcctgggcaacagagtgagatcctgtctttaaaaataaaataag

SEQ ID NO: 457085 - DNA, 201 bp, Homo sapiens
tgagagatagaaataataaatgtgtcacacagtgctgggcacccagcaggcatgtaatcttcttcttcttctttcttcttctttcttatttctttttcttygtcgcctttttttttttttttttttttttgacagtgtcttgcagccttgacctcccatgctcaagtgatcctcccacctcagcctccctgagcagctggg

SEQ ID NO: 457086 - DNA, 201 bp, Homo sapiens
tgacctcccaccctgccacttggctgtaaatccccacatgcccttattctgcttggaactgagcccatgtctagactgaggtctcttgcccccagttgcartaacatcctgaataaaatttgttttcactgctttaactagtgtctagatctggcttctttgacagccctcagcaggagagggccaagaggacaaggaagt

SEQ ID NO: 457087 - DNA, 201 bp, Homo sapiens
ggcctcagagccctgctctcaccgttcccttaaccagatgactcctcatcaattctctgccaagtctccctttcccactgagattctcttttgttatctamgactgcctttgtcctcggttaagtctttcctggtctccttgccagttattcactctttgccctggcagattttatacatcattgaatgctccaccaacat

SEQ ID NO: 457088 - DNA, 201 bp, Homo sapiens
gacttcagcaagaatcctgtccggttggttcagccagaattcccccttacacctgacatttcctcatagtaatgttccgtccgtgacctcccaccctgccmcttggctgtaaatccccacatgcccttattctgcttggaactgagcccatgtctagactgaggtctcttgcccccagttgcaataacatcctgaataaaa

SEQ ID NO: 457089 - DNA, 201 bp, Homo sapiens
gtggtcccaagcattgcccctgtcctgtggagccagtaagctttctacattgtgtgtgggtggtgccaaggacctgtggaatggtgccagaccgggttgtrggaaatccagtcattgcaaggtgggcagcctcagagtcaggagctggagaacacagcgggggctgggggatggggtagcagatcccagagcaggcaggaa

SEQ ID NO: 457090 - DNA, 201 bp, Homo sapiens
agagagtttcaataacctgcctaaagttacatgtctagtaagctgggattcaaactgaggcagtctggttccagggcccacatccctaaacgttatacacmactgtcttgtgtctggcttccaaagggacctcaagaaatcaactggtgcagttacctgccttcccatagataatctgatcattatctctattttacacat

SEQ ID NO: 457091 - DNA, 201 bp, Homo sapiens
gatctcggctcactgcaacctccacctcccaagttcaagcaattcttctgcctcagcctcctgagtagctgggattacaggtgcctgccactgcacccagmtaatttttgtgtacttttagtagagacggggtttcaccatgttggccaggctggtctcgaactcctgacctcaggtgatccacccacctcagcctcccaa

SEQ ID NO: 457092 - DNA, 201 bp, Homo sapiens
agcagggcggttccatcacagctggcagggtggggttcgagtcccgaagcaccccttcggcctcttcactctgctcagatggatggcagctaggcaggggkggggcaggggaggcccagacactggactggggagtgtgatgccctcttcctgccctcctagaggtactgggattttctaactctaactagaaaggtaaag

SEQ ID NO: 457093 - DNA, 201 bp, Homo sapiens
gtgggtgcgtgtgtgagtgcgtgcacacagattcacccacacacagtgctactcctagggatgcagtttctcttagttcccatcccccactccctctgacyctttccagaatcttcccagactgtcagtgccggtttctccaagtcttgagaacagctccagctataccccgtgctgtctccctggacactgtgcgggtag

SEQ ID NO: 457094 - DNA, 201 bp, Homo sapiens
atagatctaaaagcctggattccagctctccagttctaagaggattaatgggcagagttttaacaaatggagtaagtgctttgtatgccaagccatgtgasggtgagctttctgcttgctctttattcattctttcgggttcttattatttagtgctttcgggggctctgtagttgtggtgtaaaaggggaaagggtgctt

SEQ ID NO: 457095 - DNA, 201 bp, Homo sapiens
aagaaatacagtcctagctcaggctccctgttgagcagactggccaaccaccggatctggctcacccggtagatagatgtgccttgtgtagagtttgtgcrcagggcctggctggatgtcagggacactaaggcaaaggtgttctcggggaatgacttgcattgggtcccactgatgtcttctcttgatcctctaggatcc

SEQ ID NO: 457096 - DNA, 201 bp, Homo sapiens
tcctcttggactgctccctactccccactgcccttgtctaggccttctgaattcagctctgatgtcacttcttcaaggatgtctgcctcgccccttcagakcttcttgtcgttgcatgtcctctaaccctcggtgcttttccacagcacccatccgcttgtttgactatttgactaatatccatttcaccactagtatgta

SEQ ID NO: 457097 - DNA, 201 bp, Homo sapiens
aggttcaggtttacatcttctttgcagctgcacccccactgcccagcatgctgcctggcccttagtaagtgtgttgtttagtactcttgatgcaaatgacrgaaagccaactttaacaggttcatataactgaaaaaacctaaggtgtgctgtatgcaggcatggtcaaatccaggggctcaaatgatatctttaaaaata

SEQ ID NO: 457098 - DNA, 201 bp, Homo sapiens
ccgaccctccctccctgcagcccacctcctgagtaaccctccactccacagcttctcagagcagcctgtgtgtgccaccccttggtaacgatcatctctcycctttctgttcaccatttcagttgttcggttgtttcttagcttgggagacccgcaacgtcagcatccccgcactcaacgacagcaagtacatcgggatga

SEQ ID NO: 457099 - DNA, 201 bp, Homo sapiens
ctctctcagacatgaggagtgggcctgagagtgtcagcactcactctgcctgctggacagagggctccctttgcagaccttggggccaggaggtgaaggtrgagtgcatcctcagtgttcttgtctccttcttttattaccattctctgattgtgatgcccttgcttcctggatatgtccagttctgccatgcttctcttt

SEQ ID NO: 457100 - DNA, 201 bp, Homo sapiens
tattccagtaggaaagatgctgggtcacagctgtgaggctcatcagtaaaaagcgttgtctcttttgtgtttttcagctttcttttgctgcaaccacgccygttctagccgataagaaaaaatacccttatttctttcggaccgtcccatcagacaatgcggtgaatccagccattctgaagttgctcaagcactaccagt

SEQ ID NO: 457101 - DNA, 201 bp, Homo sapiens
taacatattttctcgaaaatagtccatttctttgggatcttcaaatttattagcatatatttcaggacaatttttaaagcctctgttttttttgttatagrccctttcttgtttttcccacttttccccttgattagatagtttgcttcttttattgatgtaattgttattaacatcttaaattctgtgggaaagaaatgg

SEQ ID NO: 457102 - DNA, 201 bp, Homo sapiens
aaccttttgtacatattgccaaattgtcctccagaaagatcatgccaatttagagtttcatagcagtatacgggagcattccctgccagtattgtgtattmttcttttctgatttttggcgattgctattttaatttgcatttttttcattactattgagattgaatttcttttttactaagaatatttctcatttctgtt

SEQ ID NO: 457103 - DNA, 201 bp, Homo sapiens
tgcagtaaactcatacttgtacttttgtgggaacatctctgattattttctgaagttaattcctagaaatagcatatgcacatttttgaaccttttgtacrtattgccaaattgtcctccagaaagatcatgccaatttagagtttcatagcagtatacgggagcattccctgccagtattgtgtattattcttttctgat

SEQ ID NO: 457104 - DNA, 201 bp, Homo sapiens
tccgcctacgattcccgtctcaagtgttccctcttccagagccctccctggctttccctgcagtgcccacagcctggatctgcctctgtcccacagcaccrgccaccatcccccacgggaggtgactgcgtgccccggcctcactgcctccaccatcggtgagctccccgaggcccaggaaccatgtcggactgagtcctc

SEQ ID NO: 457105 - DNA, 201 bp, Homo sapiens
agcaacatgtatggaatcttggtggggtggcctgaatcctaggctgacgggtgggggcctgcagatctcagataagctgcaccacttgggttcacaatgcrgtgcttggcccagacaacccctgggatcccttgttgacctaatatttcctaaaatatgagtatctggagactgagcacagcataggggtgggccttatca

SEQ ID NO: 457106 - DNA, 201 bp, Homo sapiens
cattattattatttctggctgctgttattgccaccctagtgggcactcagcccatgcatgttgtccctggcatgttgtccctggcatgttgtttgtgatcrcaaagttcccagcataagaataaaattctgtatgctctgttgtgcaggagaacacacacattttttgccatctattttagagcaacatgtatggaatctt

SEQ ID NO: 457107 - DNA, 201 bp, Homo sapiens
tcatctgtcacctgccctgtgtggacacttctgtgtgacagggcgatcactacttcacaacatagcctttctctgttctaccacttacactgttggtcagrttttcctaatgagactaacagacccgagtggggacagcttacaaagccctctggaatgcagtctttcacatgatgtcccgatgattcctgcattagccgg

SEQ ID NO: 457108 - DNA, 201 bp, Homo sapiens
aattagattcaaatgtcatagtgaagtgtttggttttatgatgtaatccaaagccatacataagtttaaagaacttttagctgagatttgtatttgggagrgagatgagttagaggactcgattactttaaaattgaaattacattctaactaattgagagtggactgagtctctattaaattcaagtatgaatcatagta

SEQ ID NO: 457109 - DNA, 201 bp, Homo sapiens
gttctctgagactcagtttcttcacctgtaaaatggggaaaggcacctgctccaacctctctcagggtgattttatgcttaaattagataatgacactggraagtccttgaccaaagttaagaaaggcatatctgggattgctgagtgtttccatgagagccctgctgtgataggtgtctgaacgtgtgaaggaggaaatc

SEQ ID NO: 457110 - DNA, 201 bp, Homo sapiens
gttctcaatccaggattatttcatctcaagatccttaactgattatatcagcaaagaccctatttccaaatgaagtcacattctggggttccaggtggacrtgaatttcacggggacactaggcaatccattacaaatagaatttaaaaattacacccatgcagcgggctcacatttagaagttccacattctttttggct

SEQ ID NO: 457111 - DNA, 201 bp, Homo sapiens
tgataaagaagctgatgtataaagatgaaattggatttataccaaaaataaatcagttttaggtgtttagcaaaagagagctgtaatggctttgggggagycctggggaaaggaaggatgtgttcagaatacggggttggatcttggaaggcttggtcctggttcctgaaatttgggttctctgagactcagtttcttcac

SEQ ID NO: 457112 - DNA, 201 bp, Homo sapiens
ctgtgggaggagggaattgtgcaagcaaagcttggaaggtaggactttgaggggataatgctgagccattcagatgtggccagcacataggtgactgaccrcaagagacactgtggacagagagctgaacggcctgggaaacagtcacctttgggcccgcagtgtctgaaagcacatttcttaatcaatcagtgctcacca

SEQ ID NO: 457113 - DNA, 201 bp, Homo sapiens
ggagtcagaaccgggtgcatggtggggtatgcaagggacactgcgtggcaaggctagagtctggttgtgaagcaggctccacaggtgacttctaatacaarctcaagtttgagaaccaccatcaatgcccagtctcatgggaaaacacagctaaagagaggaatcctgtacccagtctaagaccatgtttgacttcaactt

SEQ ID NO: 457114 - DNA, 201 bp, Homo sapiens
gggccaggcagtgtggaaatgatgaatctggcttgagagtttgggggcaacagttgctagctggctacctcctcctcaaaaggagagcagccaggctcctktggacactgggtttttaaccatcagatgggctttgacctggctgctcagaattctctgcatgctgtggcctggaaggccctaattccaaccttgtgtcca

SEQ ID NO: 457115 - DNA, 201 bp, Homo sapiens
agaaacttttagcatctcacgataaacttgacctcggaggatggtaattaatcagcattcggtgtcagctttacgatggaagaaattcttctgccttgaawaattggaggcctgctttaagaactttttctccaacaattgtgagtgcgtttcttcctgctgtcattgtcttgcccaagggagttggtgctggcatcgcct

SEQ ID NO: 457116 - DNA, 201 bp, Homo sapiens
ccatgccccaaagcccaggacagagcctgcaggtactccagaatatttgtgagtgaatgaaggtctctgtgtctggagcacccagcacagcccctggtgcmttgcaaatgtgtttcgcatgagtgatgctaaacacaaggtaaaacagaacaattttggataaaaatcagaactgggcccctaagtggaacagagaagatg

SEQ ID NO: 457117 - DNA, 201 bp, Homo sapiens
ccaaggctggaagatagcctaagcccaagagttagaccagcctgggcagcatggcaagacctcatctctacaaaaaatttaaaaattagctgggcgtggtrtcatctgcctgtattctcagctactcaggaggctgaggtgggaggattgctggagcccagaagttcgaggctgcagtgacccatggtcatgccacagcat

SEQ ID NO: 457118 - DNA, 201 bp, Homo sapiens
atgctgacactgcctgtcccctgagccccagagtccttgtccgtgagatggggatgatactctgtgagagagttattttgagggttgacctggaacattcrtgtaaagcattgagcacagggatccacactgactagattttatactaagttttactgttatcattttattataatgcatatgaaaatgtgaaatgctgtg

SEQ ID NO: 457119 - DNA, 201 bp, Homo sapiens
tttgagacagtaagcaaagctgaaagattgtgagcaattcatttagggtctctgggcccacagagcttccctattgcaggtgaatttaccagaggagtcargagccttgcttgcctgcgtcagcgctgtgccagcagccacctctttccagagggctcctcttctctctctccatcttatcacagcctcttcttctgacct

SEQ ID NO: 457120 - DNA, 201 bp, Homo sapiens
ctctatcccctggcacctggagaacttgtcgcttgcagaacttgtcaccttcggttgtgtttactcaggatggcagtgtttatgtctgagtgtgtctcctratagactcggatcatctcaagggtaatagtggtgcttcctttatgaatttaggctatacttgctaagcacctacttggtgccaggctctgggtttgttac

SEQ ID NO: 457121 - DNA, 201 bp, Homo sapiens
aacaacagtagctcacctttatccagtgcttactatatgtcggcacctatgtcagtgctttgcagcattcattcatttcgtcttcactacagtcctatgargtccttactctttttttttttttttgagacggagtgtcgctctgtcgcccaggctggagtgcagtggcgccatctccgctcactgcaaactccgcctccc

SEQ ID NO: 457122 - DNA, 201 bp, Homo sapiens
acaaggtggccatgtttgtgtccctgggtacagtatcaactcagactgtgtatttaacaatcctcaaaatgtctgggtatttctctttccccagtttatgrttacttgtataaatttgggatgtccctctggagaaagacagagggagtcattattatatatatttgttgtgatgatgttacagggtctttcctcatggga

SEQ ID NO: 457123 - DNA, 201 bp, Homo sapiens
gtattatccaaattgtcttgtttctagaactaccattcactgaagcctttctgaaaaatgcccagagttgtttcagggatgtaagtggcagatggggaccygcatgcccactctggggcagatgaccagagcccatgcgaatgcccccgcccagtccagctgagagtgccttggctttgatggaagggagagttggcttgg

SEQ ID NO: 457124 - DNA, 201 bp, Homo sapiens
ccgtgcagtctcatcagctgcagttgcagctgcgagagccaggggtgacataaaccacacagaggcatttgtcagaatccaacatgagcttattgcccacytcacccaggctcttggaggccagcaacacctgattcaagccatccccagacagaaaggaactcagggagatttgtgagcttctggattatcatagcttcc

SEQ ID NO: 457125 - DNA, 201 bp, Homo sapiens
ggggttttttttgttgttgttgttttttgtttgtttgtctgttttgttttgttttgagacaggatctcactctgttacccagactggagtgcaatggcaakatcacggctcactgcacctcccctggctcaggtgatcccccagcctcagccccccaagtagctgggactacaggcatgcgccaccacaccccattaattt

SEQ ID NO: 457126 - DNA, 201 bp, Homo sapiens
attctgattatataagtagtaagtggtcttattacagtagcaatattctataattaatattatataacatggttattgcaaaaacgtttaaattgagatarcaaggaaattacaagaataaaaattacttctaataactttcgtatctggtaaaagtgggcattttaaatttgtgggaaaaatgaattattcaataaattt

SEQ ID NO: 457127 - DNA, 201 bp, Homo sapiens
gcaaataccctgtccatgaacggtcttcttcttttttccaaaactgttgggatttttttttttcttaacatttttttggccggccatttcaaggattcggrgatgggacaggaggtagatgtgtgtttgctctcaccatctttatccaattcctgtttaaactattctaccctgtgcgtatgccatcagttactcaagaag

SEQ ID NO: 457128 - DNA, 201 bp, Homo sapiens
taataggtgtgtgcttgtatctcagtgttataatttgcaattccccagtgacatatgatgttgagcatcttttcatatgcttatttgccatctagtgagargactgttcagaacttttgtgcactttttaaataggttgttttcttattgttgaattttaagaggtccttgtatattttggatgcaagtcctttattagat

SEQ ID NO: 457129 - DNA, 201 bp, Homo sapiens
cttgcctctttgtgcctctgctttgtttgtttaagagactaattttagaggattttaaattcatagcaaaattgagagtaaggtacagagatttcccataygctccctgcccccacacaggcacagcctcctcattctcaccatccctgtcagagtggcccatttgttacaactgatgaatctacattgacagggcatcat

SEQ ID NO: 457130 - DNA, 201 bp, Homo sapiens
aaggagctgagaggccagagtgctgagtgatgtcacatgggcactgcgggcccaggagggagatagggcttggggtggagatgaaggcagtgggcaggggrtgcctagaaagacagcagagggaggcagagacatttgggtctctcccccttttcaagtcttatggtctacccaaccatcctcaccaagttattctttggg

SEQ ID NO: 457131 - DNA, 201 bp, Homo sapiens
tctgtaaggggaaggttccagagtgagcacctgggtgttggggaaaatctgactagaaatgtgggacttcctgctgatgtgtcccctgaggccccatggcrtatttctgtttctctctctcccctctagcctgagcaacaatatatatctagcaggcgtttagaaaatacctgttgaaggaataactaaattaaccattct

SEQ ID NO: 457132 - DNA, 201 bp, Homo sapiens
atgcacataagtcttttctgagttcagaagttaaattattcactcaacccccagggttcttacagaccaaattttatatcaagaaaaagctttataataargaaaaatatatgtatataattttatgtattatttaatctcaattggaaccaactctacatgaatgatttatcgatttgtcaagaaatggcaaatcattag

SEQ ID NO: 457133 - DNA, 201 bp, Homo sapiens
tgtctggctgtctgaaatttattttacctttaatattgagagatgtattgactagatagaggattttagatggcctataattttcttttggcactgaagakgtcattccattgtcttctggcttccattgtttctattgagtctgctgtctgacttattgctcttttgaagtaatgcatctttttttcctctagttatttt

SEQ ID NO: 457134 - DNA, 201 bp, Homo sapiens
cttcagggccctttagactctgtaaaagttcatcccgtgctccttttacctaagatgtcattctcagttgtgttgatgctctcctggaggagaggaaagaygccttaagtagactttgggaaacacatgctgtagagctgccagactgcgtcaaaccccaattttaccactaccacctgtgtgaccttgaacctgagttct

SEQ ID NO: 457135 - DNA, 201 bp, Homo sapiens
ggcaactgtgagacccaaatgaggtaaggatattgtgaagcacataacacagtacacatgttatgtatacatatatgaataatagagtcctggcatcaacwtcagggccctttagactctgtaaaagttcatcccgtgctccttttacctaagatgtcattctcagttgtgttgatgctctcctggaggagaggaaagacg

SEQ ID NO: 457136 - DNA, 201 bp, Homo sapiens
aacatctctctctcactcttggacagttcacccaggcaaaaaaaaaaaggcaagagcacagaggaacggaataatgaaattaataaggctgatttagcagrtgtgtatcgaaatttgtatcaagaaagtcaggaaataccatttctgtgtgatgaagtcgcgaggccctttaagctcattccaagcctgttctgaacaggg

SEQ ID NO: 457137 - DNA, 201 bp, Homo sapiens
atacaaaatttccattattctacagtttttgaactacaacaattttatatggaaatgtacagactatatgagcaaactagccagcttctgcattctagcakaactggtgaaaagagagtcatacttagacaggttttgccaaaattttgacatacttagtggagaaaatcttacaaatatctaggccaggaaaaaaacaaa

SEQ ID NO: 457138 - DNA, 201 bp, Homo sapiens
tctaattgtacacaattagacaagcaatacaatcataattatttgtttaattaacaaaccattttaaaataatagattaggatttggacatcctgctttaraatgatgtccctgcctggtggcagccacttgagtttgagcaaatcctttccttcgctgaggcttctcatctgtaaaatgggtatgctcctcccctgcctt

SEQ ID NO: 457139 - DNA, 201 bp, Homo sapiens
tgtggtagggaccttggtttcaaacaccagctgttcatcttccattttttagatgaagaaactgaggctcagacagggcacaggactggtatgaagtcacrcacacagagctggagcatctggaacctctgtctgctgaccacagttcagtgtccgctttgagccccaccctgcctgggcctgggtcttcgatttctcatc

SEQ ID NO: 457140 - DNA, 201 bp, Homo sapiens
ataactacacacttcttaagttacttccttccaaagggtacagtaggagaaggggggataaaaaagaataacttgacggtcgagaaacctgacaaacgttyccttagcgaggcaatcaaggtcaacatcagcagtgataagtcacattgaaagctcccttgacatgatatgatgggaataactttacctctgtggtcttct

SEQ ID NO: 457141 - DNA, 201 bp, Homo sapiens
atataaaaatcagtaaggtggagggcaaacttgagatactttcccagaattcagaggaaatcgccaaatagatcaatccagtgagataaaggataacagtkgtggatactggagaagggagttttcctaagggaaaaccaggacaaaagaaacagaatcaaaatccaaaacagtagaaacagtagcaatgagcacacctaa

SEQ ID NO: 457142 - DNA, 201 bp, Homo sapiens
ttttcacactcttcttatgatccacttgactttgttcagagaaaactgattttgaaagcaacagccatacttataataatcatcactgtattatccaaatygtcttgtttctagaactaccattcactgaagcctttctgaaaaatgcccagagttgtttcagggatgtaagtggcagatggggacctgcatgcccactct

SEQ ID NO: 457143 - DNA, 201 bp, Homo sapiens
tggccaggactaactcaggaactgggtatgctcagcttgaaagggaccgtctccctgatggtgacagaataggtctggaccccaaactagataaccaagaytgtgagtaaaggctgggtgcagtggctcatgcctgtaatcccagcactttgggaggccgaagcgggtggatcacgaggtcaggagttcgagaccagcctg

SEQ ID NO: 457144 - DNA, 201 bp, Homo sapiens
tgggcatagtgagaaaatatgttccctggaatcccctaatagcaaggcttcttccaggctccctgctcctgggtcagaagcttctgctctttattcttctrtggccaggactaactcaggaactgggtatgctcagcttgaaagggaccgtctccctgatggtgacagaataggtctggaccccaaactagataaccaaga

SEQ ID NO: 457145 - DNA, 201 bp, Homo sapiens
ttgagcgtccttgtctcagtgaacatttacacattccctgggacagtcagctgatgaatgcctcttgccctcactagacagagatccaggacagtgaacakttttggtctttagaggcccagtcctacctcagacggttcctgaaacagaagagatgtcaatatcagaaatgaatgagtgggtgaataagtgagtgaatga

SEQ ID NO: 457146 - DNA, 201 bp, Homo sapiens
ttaacaaatggagtaagtgctttgtatgccaagccatgtgagggtgagctttctgcttgctctttattcattctttcgggttcttattatttagtgctttygggggctctgtagttgtggtgtaaaaggggaaagggtgcttgggtgttccaatagaagatttggtgcaaagctgatgtcattttcttcgtctctgacaaa

SEQ ID NO: 457147 - DNA, 201 bp, Homo sapiens
tagatgactaatacagattattagttgtcctgaatgtacccccaagccgatcacttcttgccacctcccatatcatatcatctagcctccagaatccctckcccggaccattgctggagcccctccctgcccttcctcttcccctcatgtccctgcccctcagaggtcccacagaagcctgagcaactgtctcaaatcata

SEQ ID NO: 457148 - DNA, 201 bp, Homo sapiens
gtttgggagtaaaatgtaagtgacttcttatctctaacttttttgttacttattttggttttaggaaggtgaggaaattaaatggcatagtttgcccagtragcagctgcattctattactttcttttcttcttcttctctagcgttatgtaacagtgcacagtgaggctggtgaaatgccttcctgtctgtacctggctt

SEQ ID NO: 457149 - DNA, 201 bp, Homo sapiens
gccagcagcagagcatctttgaacaaatttcttccctgactctgacttttctacctccctccttcccttataaagacccttgggatcatgttgggccaccrggataatcccagatggttgctccatcttgacatccttaacttcatcctgtctgcaaagtcccctttgccacataaggtaacatattttagggatttggac

SEQ ID NO: 457150 - DNA, 201 bp, Homo sapiens
ctaggctctgggatacagagctggatgaaacacagatcctgcccttgaggagctcactgtccaacaggtgatcaagatagacaaaaacaattacacgtggyatagcccagccacaggaggggttagcagaggatgtgggggaagggaaggcattccccttctccaggcacctggttggtcatcctccatgttgtttgggag

SEQ ID NO: 457151 - DNA, 201 bp, Homo sapiens
aatgctctgtccgtgatgctgttctgacacctgtggaaggagacggggaaggaaggagagtcgggtaggaagagctccagagccaagattatccattacakgagtttcctatcagacccaatgagccaggctctagaatccccacccaactcagtgattggctgaggtctgccttgggagattttgctcttagcttgaagg

SEQ ID NO: 457152 - DNA, 201 bp, Homo sapiens
tccttcaggaaggagatgccaagatagacttgtaagcataagagatcttggaagccatccctgtgaaagataaaagaataggtagggaaatgctctgtccrtgatgctgttctgacacctgtggaaggagacggggaaggaaggagagtcgggtaggaagagctccagagccaagattatccattacaggagtttcctatc

SEQ ID NO: 457153 - DNA, 201 bp, Homo sapiens
aggctcttggaggccagcaacacctgattcaagccatccccagacagaaaggaactcagggagatttgtgagcttctggattatcatagcttcctacgtcmgtgtctctttatctgtgtctctctccctctcagtttttcactctcccagcacaacccagcaaccaccacatctatgtgatgtacaagagaagagaaagtg

SEQ ID NO: 457154 - DNA, 201 bp, Homo sapiens
tcctgaaatctcaattgcttaacacagtaagattatttattgcccacacaaagtccagtgtgtcagaggtcgtcctgggtggctctcctccaggtggtaaygcgaggagccaggccacttttgtattgtgagtctcccatcttaaggcttcaggaagatggggatagggaagaatccagagggaaggcacactggactttt

SEQ ID NO: 457155 - DNA, 201 bp, Homo sapiens
acttaaaaaaaatagacttcagatcatctgctgctgttacttgagtcccaccccccacaaccaattttttttttttttttttttttttttttttttaccgkggtaaaatgcattcttcttttttccttttactgtatatcttgaagagctttctggctctgccagagtctctacttcatatttttaagtggcttcccaaaa

SEQ ID NO: 457156 - DNA, 201 bp, Homo sapiens
aaagcagaatcaatcaatgcagcagactccgttattatcttaagaaattgctacagccaccccagccttcagcagaaaccacacgtgggtcagtcagctgmcatcaataaggaggtaaaaccctccgctaacgaaaagattaccactcactgaaggctcagatgatcattagcatttttaacaataaggtatttttaatta

SEQ ID NO: 457157 - DNA, 201 bp, Homo sapiens
gctcagaaagcttggtctccaagttagggccctaatgctaacagccctggtgatgccagatgctgggtgactgtgctaggggaagaaggcctggggagcaygtaggaggcaggtagatagtcatccatgggagaaagcgcactagtgttagggtcctatagacccgggttcaagtcctgcttctacctcttattagctgta

SEQ ID NO: 457158 - DNA, 201 bp, Homo sapiens
aactgtcctgttgtatttaggcttttaatgtgtgctgtcttgagccctctgggagaggaggcaaggtgtaaattctagattaagttattaaaacaagaacktcaggcgagatttaattggaatgatatgccagagagacattttaagggtgtccacagccacgtgccttctggcatggatcctggcccagcctcggctcgg

SEQ ID NO: 457159 - DNA, 201 bp, Homo sapiens
gctgtctgtgccaaggcgagtcccagcccttcagttcctcacctcattccacaccccaaatctgaagccctagaagaagggagccagtggaagccaagaargggggtttgcaaatgctaggggcttaggatgttagagcagaacataagttgaggacaaatcacccactttggaatccagaactggaaagaaagctgctaa

SEQ ID NO: 457160 - DNA, 201 bp, Homo sapiens
ccctctgacttactacttgtaaggctttgggcaagtgacttaatctttcaagtccctcatttgtgaaatggaaacaagaatgggatctgctttgtaagatkgttgaggatgaaattcactccagagtcaatcctggtgtgtcgcctgtggcccccttcctccctgagggcttggagtgagggatgggggtgggagaggggg

SEQ ID NO: 457161 - DNA, 201 bp, Homo sapiens
ttttgtgcaaacacagattgctggcctccctcctgtaccagtgtctgaatcgctctgttggggcccaggaatctgtatttctacaaagctcctgggaagaygcagatgcataagcatccttggaagctgctgccctaaactctgagcccaagggtggttgatatcggggagatttccaggtctgtttagcgctaccaggca

SEQ ID NO: 457162 - DNA, 201 bp, Homo sapiens
gggctcagcatacaggagatttgttagccagtgcccacaggaagggatgggaaaggtgggactgggtgaaggaagaagctgacacacaatgaggttgcaamaggaacctcagccaagcttgcccatggggagctatggagctaggatggcccttcagagaagtcccaaatagagaccagaaggctgggccagtcactgggt

SEQ ID NO: 457163 - DNA, 201 bp, Homo sapiens
tctagattaagttattaaaacaagaacttcaggcgagatttaattggaatgatatgccagagagacattttaagggtgtccacagccacgtgccttctggyatggatcctggcccagcctcggctcggctctgcagtcagcattgtgggcacagatgtgtctgggcccagtgtatggacagaatagctctgccagccaccg

SEQ ID NO: 457164 - DNA, 201 bp, Homo sapiens
caagctggaagcacaagataacgatccaacaggggtactaaatggatagtatctaggatatatgtcttttgttagttagggtgggtgaggctatgctgcaytaacaaacaaatcctgaaatctcaattgcttaacacagtaagattatttattgcccacacaaagtccagtgtgtcagaggtcgtcctgggtggctctcct

SEQ ID NO: 457165 - DNA, 201 bp, Homo sapiens
gggtggagggcgagcctgttcaaggtcagtttcgccaggagagggactctcttggggctcagcatacaggagatttgttagccagtgcccacaggaagggrtgggaaaggtgggactgggtgaaggaagaagctgacacacaatgaggttgcaacaggaacctcagccaagcttgcccatggggagctatggagctaggat

SEQ ID NO: 457166 - DNA, 201 bp, Homo sapiens
actggagacagaatgagcctggagtcggaggggctgggaagctactttaacagttgaagggagcggtgatggggcctgaatggagacagggaggcaggagrgggtgttgtgaagaacgggcagcactgagacccgacagggcaggaggggcaacagagagggaaccaatgtctggggagggggtgtgtcattggcagaaca

SEQ ID NO: 457167 - DNA, 201 bp, Homo sapiens
gtgctgggattataggcgtgagctaccgcccctggacaccacttgttgaaaagaatatcctttccccattgaatagtcttgtaacccatgttgaaaatcarctgaccatggatgtgtacttgtatttctggattctcaattctattccaccaatttatatgtctatccttatgccaacaccatgctgacttgattattgta

SEQ ID NO: 457168 - DNA, 201 bp, Homo sapiens
gctagcaatggctggagtcacgagcatcaactgctctggaggacaaggggaggggcagagctactggaattgggaggagcagccgcttcacacgggctctraccaagccaggaagcagccaagggaaaaaatacccggaactctttctcgccttctttctgactcctcctggggcctcccattggctctctttcactgagc

SEQ ID NO: 457169 - DNA, 201 bp, Homo sapiens
agcaaaaaagtgtgcagtgtgtttggaaatgcagggtttgtagagggaaaaggtagctggtgctgggcgtggacggccttgaatgctgtgtccggaaggtsggactttaatctggagctgcaaggagccgtgcgatgtctttgaacatgggtgtgatcctatcaaggctggtgagcatgtagaggctggactggagacaga

SEQ ID NO: 457170 - DNA, 201 bp, Homo sapiens
cttatatctacagtattagcgtcctggcaagaaacagacggcatcttcagagctgaagtccgatttagatgaagtactttaggcagaggcaatggaaccarccagggctactgcagctccaggggctagcaatggctggagtcacgagcatcaactgctctggaggacaaggggaggggcagagctactggaattgggagg

SEQ ID NO: 457171 - DNA, 201 bp, Homo sapiens
cattaagggttggtatgccagtgggtctgatcacaaatagccacaaaggcaggcagttgaggagtgctaaattgaagaaagaaacaatagaagccaggggmattaagagaaagggaagatcatataggaccagagagacctcctggagaagataagcctggaagagtgaatataaagttgacagagagaggcagaggctct

SEQ ID NO: 457172 - DNA, 201 bp, Homo sapiens
catctcattggagaatccagaaggacttcatggaggaagggctatttaccatagggcttaaagggtaagcaggacttagacataggagggctgaagtccgraacttaaggggattcgcgcatgcatggtcagtggtgaaatgaattacaaagtgtatcttataatcttaggtgaaaacatatggatataaaaaattatact

SEQ ID NO: 457173 - DNA, 201 bp, Homo sapiens
atcatttctaatgcaaggtagagaatgatagtggagatggttgcataattctgtgaatgtactaaaaaccatggaattatacactttatatatatatatawaaatcactcttttaaagtgtataagttaattaaatctcagtacagatttaactgtattaaatctcaatacagttaactaaatctcaatacaataaaatat

SEQ ID NO: 457174 - DNA, 201 bp, Homo sapiens
tctatccttatgccaacaccatgctgacttgattattgtagctttgtggcaattaaaattggaagtgtgagtcttctgatttttttcttctcttgcaagaytgttttagctatgcagggtcccttgagattccatatgatttatacgatcagttttttcatgtctgtaaaaaaggctgttgggattttcataagcgttgat

SEQ ID NO: 457175 - DNA, 201 bp, Homo sapiens
caaggagtgatatacgtttgagggctccacatatgacaggcactcagtaaatgagtccccactgttgctccggcctttcccgtctatcacggatgtgcagmcttctctaatttttctcttcccttctggagcattctggcagttctgcctaagaacccttgctcttctctgatcactggagcacagagaaagcacagatgc

SEQ ID NO: 457176 - DNA, 201 bp, Homo sapiens
gtctaggggtacaactgtcagaaagaccaccctgatgccaagatccaatgtagaaatcccagtgattggtgagcatgtcttttttcttgagtggctttgcsaaatatcttttcccttattcactatgctttaaaaaggatttaaaggactgttgaattgaggctgtgcttcctaaaaaggtctgagtacagctcagcaggt

SEQ ID NO: 457177 - DNA, 201 bp, Homo sapiens
tccactccctgccccagaatttcctgactccctaagaaaactgacataactaccctgccaacctcccaggtcctgaggtgcactgctgccaagagcaaacrtgcaggatagatttacaccttccagtgcacttccatggccatccactcatttaatcctgcagactctgctgcagagagtgttctgtttccattttgcagg

SEQ ID NO: 457178 - DNA, 201 bp, Homo sapiens
agtatttactatctgaccctttaccaaaaaaaaaaaaaaaaagttgccggctcctagtttccagcataggctattgtagaaagagatagactttgaagttraatcccaggctccctacatcctagctgtgtgaccttgggcagttgactcaacagctctgaatctcattttatttacccataaactggtcataattgtacc

SEQ ID NO: 457179 - DNA, 201 bp, Homo sapiens
cttagagaaagttcagggagccaaggagcccagtctaggggtacaactgtcagaaagaccaccctgatgccaagatccaatgtagaaatcccagtgattgktgagcatgtcttttttcttgagtggctttgcgaaatatcttttcccttattcactatgctttaaaaaggatttaaaggactgttgaattgaggctgtgct

SEQ ID NO: 457180 - DNA, 201 bp, Homo sapiens
aagatgatttttggtggctgtatactattctatcctgtgggtgaaccatacgtatttaatcattcccctattgttggacctatatgttttctcatgtgttrctatcttaaatcattcaataataaacttagagaaagttcagggagccaaggagcccagtctaggggtacaactgtcagaaagaccaccctgatgccaaga

SEQ ID NO: 457181 - DNA, 201 bp, Homo sapiens
cattcccttccagttgtcattttttactattttatgtacttgagatcatactccatgtgctcttttatgtttttttccttcagttaacattgtatcatggrtttttccccatgtcctcaaatcctccttgtaaagatgatttttggtggctgtatactattctatcctgtgggtgaaccatacgtatttaatcattcccct

SEQ ID NO: 457182 - DNA, 201 bp, Homo sapiens
ccttatctttaaagtagaggtgctttctccctgagccagagtgaaggaaggatcagtctaggtaatttgcagcaaaatctagagcgatctaaagaatgttygtggctagtgttagagtgtttagggtctagtttattcagattggctgtctttgtggacactgcctaattatttgcaggctgtgtcacattgtttgtagac

SEQ ID NO: 457183 - DNA, 201 bp, Homo sapiens
tgttacttgagtcccaccccccacaaccaattttttttttttttttttttttttttttttttaccggggtaaaatgcattcttcttttttccttttactgkatatcttgaagagctttctggctctgccagagtctctacttcatatttttaagtggcttcccaaaattccactaggccataatttatttagatttttttt

SEQ ID NO: 457184 - DNA, 201 bp, Homo sapiens
agccctaaagatggggcatcatggaaatgttgtagatgggagagccctccccctctgcaggggcaaaggctgctcagttccaattgattgttaccacaggkaaacgtggcccagtttgaccagatctactgagttttcaagagaagctgaaaatttggatttttaaaatgttggctcagtttttaaaaagtagcactgtat

SEQ ID NO: 457185 - DNA, 201 bp, Homo sapiens
ctcccacctcagcctcccaaagtgctgggactacaagcttgagtcactgcacctggcccaataattagttctttcctttggcgagaatatctcagacttcyggatccctaaatacttccctgatgtggtaggcacctgaatctttggagggtttgtctagttccctctgggtacatgtatctgactcggtgtccagcatac

SEQ ID NO: 457186 - DNA, 201 bp, Homo sapiens
ctctgtgcctcagcttccccatatagtacaaagaggaaataatacttttctcacaaaatagtttcaaaaattgaatgaggtgacatatacagagtgcctakcaaagtacctgactcgtgatgacataaaaataaatgtaattgcccttctgtattggccaggtccaataaggaacctctaaatctcagcagctcagtgcaa

SEQ ID NO: 457187 - DNA, 201 bp, Homo sapiens
tcctgagtagctgggactacaggtacatgccaccatgcctggctaattttttaaaatttcattttgcagagatgggggtctcactatgttgcccagtctgrtctcaaactcctgggctcaagcgatcctcccacctcagcctcccaaagtgctgggactacaagcttgagtcactgcacctggcccaataattagttcttt

SEQ ID NO: 457188 - DNA, 201 bp, Homo sapiens
gctaatcttgactcttgcaggaactccctgggcaatcttggaaagtcccttccctgtctggcctccttgtatccatgtgtcagttgcagggtgggactggkggatcctcaagtttttgtggggcggtctagttaataatgtaaaacaaaaccactcactttgcattgtcggtagagaaaatcgctttgcccaattgacttc

SEQ ID NO: 457189 - DNA, 201 bp, Homo sapiens
aacttctaatgatacatatttctccaaatggttaatccagtgctccaataccatttgttgaatgactcatttctctgcttacttgaaatgacacattatayatagttagtctgtttctgaacttctattccataggtatgtctgatgctttctgggtcagtgtcccggtatttaagtcaccttacgtttatattatacttt

SEQ ID NO: 457190 - DNA, 201 bp, Homo sapiens
tttgcttgcattccttgtttgtttcctttatgtttcagaaagttttcataggttccatatgcattttatgccttccatgacctggtattcgcttacagcaygggtgagttcttcttgagtcccctcattgttttatctagatgctgttagattcttcaccttggatattcatctggaagactggatgataacattttatat

SEQ ID NO: 457191 - DNA, 201 bp, Homo sapiens
gtagagaaaatcgctttgcccaattgacttccccagggtgacccctcggaactggcccttcctgtggtccccagcacacccaccctctgctttctctttgytgacaggtgcggaatgacctgactggagttctgtatggcgaggacattgagatttcagacaccgagagcttctccaacgatccctgtaccagtgtcaaaa

SEQ ID NO: 457192 - DNA, 201 bp, Homo sapiens
ttctttttagagatgatattctttctttgcttgcattccttgtttgtttcctttatgtttcagaaagttttcataggttccatatgcattttatgccttcyatgacctggtattcgcttacagcatgggtgagttcttcttgagtcccctcattgttttatctagatgctgttagattcttcaccttggatattcatctgg

SEQ ID NO: 457193 - DNA, 201 bp, Homo sapiens
cagattttatttaacctccatgaaatacaaaatgggtattacaatttacctttatttcctacagcaattctttttagagatgatattctttctttgcttgmattccttgtttgtttcctttatgtttcagaaagttttcataggttccatatgcattttatgccttccatgacctggtattcgcttacagcatgggtgagt

SEQ ID NO: 457194 - DNA, 201 bp, Homo sapiens
cccacaccaacatggtgcatgacacacagcaggcacatgacaaatcctcatggagtcgatttcgaatgaatgaatgtaggacaaatacagtcatgaaatgyaggacagatagagtcatctcccaatgactcagactcccattaactacactgtaaatcaacccatgggctcccttcacaaatgggaaactgaggtctagaa

SEQ ID NO: 457195 - DNA, 201 bp, Homo sapiens
tctggtctttcttctgattgcattagttttcttttattatatctttaattattactcttttgttctgatatcttttttagaaatatcaataattcatgagwgagcctttgtagtttattctccatatttttgttttctctctggtcattttaatcttagtccttttccttcacattgtgagagaacatctcaagactgtcc

SEQ ID NO: 457196 - DNA, 201 bp, Homo sapiens
gcagccggacagagcgggatatttgcagggggcactgacctacattgtgagtaattgcattatgcagagggactctcgggccagctgctctccttttgccrcacagatgggagaggctttccccggcagcttctgcgtgcctcctgctgagcagcagcctgaccagaagtcaggtgtgagcacttccatcttctggccgtc

SEQ ID NO: 457197 - DNA, 201 bp, Homo sapiens
ttggacttgacagcagggagtcaccatgaacagccaaccaggttgtgcactgagttctcagcagagccctgtgagaaggtgatgagagacacagcctctgyacggccatgccagggctgagtgggaacagctcagctgcctcaaggtctaggctgggaggtccaaggcctgggtgggagggatgccagcctggacgaggac

SEQ ID NO: 457198 - DNA, 201 bp, Homo sapiens
ataccttccctttatatgtaggtttctttcaccattcttcttctaatttcttaatttgcatatttattttttactcttgttttggttgctattaagcgtakttaagcatataaatgtctttgattacagctttgatgaaatcctatagtttcagctaaataatatctcatcctcattataataaaactatgctacaattgt

SEQ ID NO: 457199 - DNA, 201 bp, Homo sapiens
tcaccatgaacagccaaccaggttgtgcactgagttctcagcagagccctgtgagaaggtgatgagagacacagcctctgcacggccatgccagggctgartgggaacagctcagctgcctcaaggtctaggctgggaggtccaaggcctgggtgggagggatgccagcctggacgaggactggagctggacagcttgggc

SEQ ID NO: 457200 - DNA, 201 bp, Homo sapiens
tgagttcagctcgcagcaccaaagcgcagccttcaccctaaagctctgggggcttcaggggaagccactgttgaatatttaacgattaagttcttcctccytcaaataagcactttgcagtttatagagccggttacacccactgtctcctccgatttgacacaatgatgcacgtgagaggagggcacatcagggaaggct

SEQ ID NO: 457201 - DNA, 201 bp, Homo sapiens
tcatgcccctggggaaaagctgtttctaatttggacctttctttctatgtgttgcttcccagtgcgacaacgcaaaagggttgaaagccttctacgatgcrataaaatacgggccgaaccacttgatggtgtttggaggcgtctgtccatccgtcacatccatcattgcagagtccctccaaggctggaatctggtgcagg

SEQ ID NO: 457202 - DNA, 201 bp, Homo sapiens
tccgactggttactgctgctaatctaggttcccggttgcacttcctagcatcctcaagcccctcctgtagatctagaacttctgttggctttttcttttcrgatatccacatccccacaggtcagagagggttcctcttagagctctactcccaaatggtcctgttattccattttgctacgtaatagagctacacgttta

SEQ ID NO: 457203 - DNA, 201 bp, Homo sapiens
tgagttctcagcagagccctgtgagaaggtgatgagagacacagcctctgcacggccatgccagggctgagtgggaacagctcagctgcctcaaggtctargctgggaggtccaaggcctgggtgggagggatgccagcctggacgaggactggagctggacagcttgggcagggccctctgggagctctactcactttag

SEQ ID NO: 457204 - DNA, 201 bp, Homo sapiens
tacacccactgtctcctccgatttgacacaatgatgcacgtgagaggagggcacatcagggaaggctcatggtgaaggaggagggagtgctggtttgagartcacacacgcctgggtttaatctcagccccgagacttactagctggagatcttgggcaagttacttcacctctctgtgactctgtttcctcatctgtgaa

SEQ ID NO: 457205 - DNA, 201 bp, Homo sapiens
cttaggtttttaaaagtggtgcttttggcaccaccgagtagagggtggtggtgacttgaactagatagtgaaaatcaaccagattctagatatttttgacrgtagagctgacaagatttcctgatggaatgaatgagtgtgtgagcgataaacagtgaggcatcaaagatggcgccaaagtttttgatctgagcaactgga

SEQ ID NO: 457206 - DNA, 201 bp, Homo sapiens
gattgctgaatggttagatgattggatggacagatcttggattcagagaaaaatatgctcctgtcatcagcttttttagccaaagcaagtccaaggaactytctggtaagcgcccagctacccttcactaacactcctccctctccttctcttcagcatccagcgtcggctgtccctccagctccccatcctccaccacgc

SEQ ID NO: 457207 - DNA, 201 bp, Homo sapiens
tttgttgaaaagattattatttcttcattaaatggtcttggcacccttgttgaaatcgactgaccattgtagtatggatttctttctggactactggagarttttttttttaataagagggattttatctgacttaggtttttaaaagtggtgcttttggcaccaccgagtagagggtggtggtgacttgaactagatagt

SEQ ID NO: 457208 - DNA, 201 bp, Homo sapiens
gcctgtgcgtctgtaaccctttgtgactcctgagcgtgcgctgtcttctaggttaactcacgaagtacattctctgtcttactgatactgtaggttcaccsatttttttttaatttcctcgcaaataacaagacccacagaagtgactctagctacttaatggttctgttcttttatatgcagcaaacacaccgtccattt

SEQ ID NO: 457209 - DNA, 201 bp, Homo sapiens
atcatatcagataggtgacttgcaaatattttctcccattctaagggttctttttactttcttaatggtgtttttttgcacaaaagtttttaattttagtraggtcaaatctatctttttttcttttgctgcttttacttttgatgtcatatttaagagaccattgtctaattcaaggtcatgaacacttcagcccatgct

SEQ ID NO: 457210 - DNA, 201 bp, Homo sapiens
gacatttcagttgtttctacttttgactattatgaataatggtgccatgaacattgtgtacaagtttttgtggggatgtatgttttcatttctcttggatytacacctagaagttgaattgctgggtcatttggtaactctacgtttaacattttgagaaactgccaagccattttctggtttgcatcaatggatatacca

SEQ ID NO: 457211 - DNA, 201 bp, Homo sapiens
gcagagccctgtgagaaggtgatgagagacacagcctctgcacggccatgccagggctgagtgggaacagctcagctgcctcaaggtctaggctgggaggwccaaggcctgggtgggagggatgccagcctggacgaggactggagctggacagcttgggcagggccctctgggagctctactcactttaggggccacaga

SEQ ID NO: 457212 - DNA, 201 bp, Homo sapiens
gacacagcctctgcacggccatgccagggctgagtgggaacagctcagctgcctcaaggtctaggctgggaggtccaaggcctgggtgggagggatgccakcctggacgaggactggagctggacagcttgggcagggccctctgggagctctactcactttaggggccacagatctgaccccaagcccaaggccaaccac

SEQ ID NO: 457213 - DNA, 201 bp, Homo sapiens
tgcacggccatgccagggctgagtgggaacagctcagctgcctcaaggtctaggctgggaggtccaaggcctgggtgggagggatgccagcctggacgagractggagctggacagcttgggcagggccctctgggagctctactcactttaggggccacagatctgaccccaagcccaaggccaaccaccaccctctccc

SEQ ID NO: 457214 - DNA, 201 bp, Homo sapiens
atttagtttatccatgcctcagttttctcatatgtcaaaggggaataaaaacacctatccttaagtttttgttaaatggaatactacatgtacactatccrgtatatagtatgttactatatcatctggcctatagtaagtgcattagatttctcttgctgctgtaacaaatgaccataaatttagtggcttgaacaaaca

SEQ ID NO: 457215 - DNA, 201 bp, Homo sapiens
aggcagcctggctcaattattccacactgctgctcaggctagggcattattcagtgacaaggaggtgatgattttgattcctggggaaacaggactgaaamacatgaaaaattttttaaaaataatggagatagaaattctagttaaaagaggaaatattacaagaccacacctgataagtttccaaatgagtaacatatc

SEQ ID NO: 457216 - DNA, 201 bp, Homo sapiens
ttggtttcaaacaccagctgttcatcttccattttttagatgaagaaactgaggctcagacagggcacaggactggtatgaagtcacacacacagagctgragcatctggaacctctgtctgctgaccacagttcagtgtccgctttgagccccaccctgcctgggcctgggtcttcgatttctcatccctcggcttgcag

SEQ ID NO: 457217 - DNA, 201 bp, Homo sapiens
catcatgacaacagcatgagggaaatggctcccatgatccagttacctccacctggtcccgctcttgccatatgcagatttgggggatgataattcaagaygagattttgggtggaaacccagtcaaaccatatcatttcactgtcatcagaatcactatcattgagttacctgagttggccctcaccctggatcctggtt

SEQ ID NO: 457218 - DNA, 201 bp, Homo sapiens
gcacttactagctgtgttagttttgggcaagccactttatctccctgtgcctcagtgttcttctctgtacaatggggtgataataatagtacctgcttcayaggacggctaccaaaactgatagttatcagtgactgctgaagacttcagccactgcctgatacatagtaagtgtcataatagtgtcaaatacaaaaatgc

SEQ ID NO: 457219 - DNA, 201 bp, Homo sapiens
ttcttcggggtcacggtcagtcccatgcctctgggctgttttccttagtgttccttgtaaacatgcaaagcaaaagaggggctgttacaggctttctgttrtgtgatctgttatctctgatcattgaaataactaattgcaggccctaggattgcagggctgttcagacaaggggcaggggcagtgtgtgctctcagacac

SEQ ID NO: 457220 - DNA, 201 bp, Homo sapiens
cccctgcccactccctacgtgactttgatcaggtcactagtgtctctctgagcctcagtttcccctctgtaacttggggttgaactaaaacacctgtcctkcctacctcacaaggtcactctgaggattgaaacttgatcttgtccaggaaagctttgtaccaaacagtgaagccgccctgatccgtgaggtatgagtatg

SEQ ID NO: 457221 - DNA, 201 bp, Homo sapiens
gtgtgtaaataaatacatgctcttgctatcgaaatggcttcttagcaatgcagggggaatgttttcccaggtcagcaaatgttctccgtgactccgtcacygtgactcctaatggctacagtgcttcttgacttgaccccaatctgtgccatagccctgatgtgttttgaattgtatttgcctccagtcatatttatccta

SEQ ID NO: 457222 - DNA, 201 bp, Homo sapiens
tctaggctgatgtctttaccattttttcaatgcacataaatgaatgtgtgtaaataaatacatgctcttgctatcgaaatggcttcttagcaatgcagggrgaatgttttcccaggtcagcaaatgttctccgtgactccgtcaccgtgactcctaatggctacagtgcttcttgacttgaccccaatctgtgccatagcc

SEQ ID NO: 457223 - DNA, 201 bp, Homo sapiens
ggctgtgggcaagagggtctcctcagaagggtttggcaggccccaggcttgggcaggccagtatatcctatatctccagttgcacagaggtaaccccagaratacctgaagacctcctgacctaactttatacctcattctcacaacaaatattagcggtacctgcattgggccaggttttgtgttagatcctaggggcaa

SEQ ID NO: 457224 - DNA, 201 bp, Homo sapiens
gggaaggtgtgtggaaccttcaggaaacagcaaagagtctgttggggctcgatagctccatgaacagaatgagaagtggaaggatgagctaggaggcaagmaggatggcgaagatccctgcatgcctctaagttgagactttacctgtcagcagttgggagccatggatggtttttaaatgagaagtgagatagtagcagt

SEQ ID NO: 457225 - DNA, 201 bp, Homo sapiens
ctagggctggggtaaggctcccagaatctcagttccttgcatcttgcagcccccacatcatcattacacaggttccacgtcatagccttgtgatctaagayggatgctgaagctccacccatcacattccactccagctgttaggaaggaggaaaagcaacacctcttccctttaaagacacttcccagaacatgtgcaca

SEQ ID NO: 457226 - DNA, 201 bp, Homo sapiens
gccacagcacctggcgctgtctcccttttagagagcggactcactcagggagaattaagtaatgccagggtctcatagccacgaagtggcaggtatagacrtgaaccccggtttgtgcctgcccttgtgaagaagaggaagccaggagtctggggccaatatccccccaagtccctgtaccccacctaccacagaagcagg

SEQ ID NO: 457227 - DNA, 201 bp, Homo sapiens
ggctggccgcccccgacggccatggtctttcctacccagaaacacatggaggttctttcttccccaccaggaggcaccaagatcgtctgctctttaagagkaattctgggcccagctttagatcatatcaactttatctccttacaccctaggagacactgcaaccagtgtgactgggggatcccagagtagaacccagga

SEQ ID NO: 457228 - DNA, 201 bp, Homo sapiens
ttttgttgcccaggctggtctcgaacttctgggctccaatgaccctcccaccttggcctcccaaagtgctggtattacaggtgtgagccacagcacctggygctgtctcccttttagagagcggactcactcagggagaattaagtaatgccagggtctcatagccacgaagtggcaggtatagacatgaaccccggtttg

SEQ ID NO: 457229 - DNA, 201 bp, Homo sapiens
tcctgggctcaagcgatcttctggctcaggttcccaaatagctgagactacagacacacgccaccgcgcctggttatttttattttattttattttttgtygagacagagtctcattttgttgcccaggctggtctcgaacttctgggctccaatgaccctcccaccttggcctcccaaagtgctggtattacaggtgtga

SEQ ID NO: 457230 - DNA, 201 bp, Homo sapiens
ctctctcttcaggattgggcaatactgacttctacaccagtcgttctcaaagtgtggtccctggaccagcatcatcagcaggaccacttgggctctgtccyagccccagtgaatcagacactgtgggatgggctcagctttatgattttgatgcagctagagtgtgagaaccactgcactgaaggaatgggcagccttcag

SEQ ID NO: 457231 - DNA, 201 bp, Homo sapiens
tgagggattgccttttaagcagtaacaccaaaaattgtgcatattttggttctgccctagtcacatcaacaaaaactgacatgagcacacctagtgagagragaggctgggaaacgtcgtctctagctggacagctgcaaggaagaagtgagacatagggttgccagattagatatgggatgcccagttaaattcagactt

SEQ ID NO: 457232 - DNA, 201 bp, Homo sapiens
caccaaaaattgtgcatattttggttctgccctagtcacatcaacaaaaactgacatgagcacacctagtgagaggagaggctgggaaacgtcgtctctakctggacagctgcaaggaagaagtgagacatagggttgccagattagatatgggatgcccagttaaattcagacttcagatcaacaaccaatcatattttc

SEQ ID NO: 457233 - DNA, 201 bp, Homo sapiens
tagtcacatcaacaaaaactgacatgagcacacctagtgagaggagaggctgggaaacgtcgtctctagctggacagctgcaaggaagaagtgagacatakggttgccagattagatatgggatgcccagttaaattcagacttcagatcaacaaccaatcatattttcagtaaaagtttagcccaagtaatacttgaata

SEQ ID NO: 457234 - DNA, 201 bp, Homo sapiens
ggccatcccacctggggaccagctgctcctgtgagcacctccaacctctgagtttcaaggtaagcccatggtaacccagaggctgctcaggacttgggtcygaggtactgatctctaggcccactttggccaagcatggctgcgtgaccccaggcaattcactttcccatgctgaccctaggatgtatcagatctagagct

SEQ ID NO: 457235 - DNA, 201 bp, Homo sapiens
ctggattccttttatgaaactggtcgatcagcaacgtcaagcacttctgttccggactggtgcactggaaggaatgtcaagtgaaagaaatcctgaagtcrgagggggtggtggaggggctttactcccacggagcttattactgtggcattaggactatggaagcgggtagaaggctgagggccatcccacctggggacc

SEQ ID NO: 457236 - DNA, 201 bp, Homo sapiens
atacttgaatatacttatactaaaaaagaacccattatctgaaactcaaatttgactggacattctggatttttatttgctagatctggccgccctttggrgggctcacagaattctgccacagagagccaccatacagttgtctgtgcacctaaagatgactgctttaggatgaggtaacccaccatcagctgccagagc

SEQ ID NO: 457237 - DNA, 201 bp, Homo sapiens
ctattattaccccattctacagaaaaagaaattgagactgggttctcacaagccagaagaacatcactgcaagtaaggggcagccttgggtttgcataagkcctgtccagagccttagctcgtatgctctccctgcccttcctccctgagcttgcttgtctgcttcatcaaggcccaagcctacactgaacacataattgc

SEQ ID NO: 457238 - DNA, 201 bp, Homo sapiens
aagtgaggtgggtctacttgtgcagatatggaaagatctccaggtgaaaaaagcaagatgaaagccaacattatgattatgggacacacaaatgcatacaygtgtgtgtgaatgcattttttaaaaggtttagaaaaacaaacaccaaattgctaacagtattcactcgtgtgaaaagaaatggtattgtggaaagtgagt

SEQ ID NO: 457239 - DNA, 201 bp, Homo sapiens
tcaatggactttgtttcacatcttttgtgttattctagggcatttcagtgtagtcatgatgagacactggatcagctggagggtttgagtggctgtgggcrtcctggctgatgatgtgagtggtcatgtttgctcaggatagtctgaagttacataattgtggcactggaaggattctgtttagattctgagcaggcaatg

SEQ ID NO: 457240 - DNA, 201 bp, Homo sapiens
agtccaggacagtgagtgagagttacatggaatttgtcagcagtttgcctagcagttgcctccagtagagtgtaagcaccttgagagtaagttatgagtcyttcatgtgtcccctgcaccgaacacaggttctgccagtgaataggttcttgacaagcatttgttgaatgaatgaaaggtgaacaggatcctaacagacag

SEQ ID NO: 457241 - DNA, 201 bp, Homo sapiens
tgctttcttgatttcaccaaaaccaaatttaatttaaaggaccacattaatttttcaaagggaaagagacaattaattgtacataatgtatacacacacamaaaaaaaaatacctgtagaaatattattccagcatagcaggaaaacaaacaaaagtattggactgtcggaggtgagcctgtgcgtctgtaaccctttgtg

SEQ ID NO: 457242 - DNA, 201 bp, Homo sapiens
tgggtgcactggactcacagactccactggagggctagtcccagcctggagttttccgggacatgggatcctcaacgtggaggctcccaaggagcaggctstctgaatcctggcccaggagacccctgctctgtgcctgctgctccacaccactgctcatacagccatcctacgggatgtgggttgttcaaggatgggaaa

SEQ ID NO: 457243 - DNA, 201 bp, Homo sapiens
gcattttggcagggctgtttcaaaatgaattcaaagtatccaaagttgaaatggatgaatagagagctacagaatctagaaagcattttgccacccttcayaatcctagaactctgcattttgcctaggtgcctgatagatcttagttggagatcatttataaccacttctaaatgctccctttcatctaagccaaataat

SEQ ID NO: 457244 - DNA, 201 bp, Homo sapiens
cccctgctctgtgcctgctgctccacaccactgctcatacagccatcctacgggatgtgggttgttcaaggatgggaaacaggcccaacatgaagaatacrtacccaaggccacctaataaggctgtggcaaaggcaggaacaaccagaatcttagctggtcttccttctctacctgaccctgactcacagaaattagagc

SEQ ID NO: 457245 - DNA, 201 bp, Homo sapiens
tcattttaccttatgagaattgaacccatgcttttccaggagttccttagggcatgtacactgggtttggatgggggcttttaggtgtcaagagcatttgwccatagggaaattgaaagaggctcctggggaatgtctcggattatgagaagagggctccattcttgctaaagtttgctgtgactgtccctcattctcggt

SEQ ID NO: 457246 - DNA, 201 bp, Homo sapiens
gtggctcacgcctgtaatcccagcactttgggaggccgaggcgggtggatcacgaggtcaggagatcgagaccatcccggctaaaaaacggtgaaaccccrtctctactaaaaatacaaaaaattagccgggcgtagtggcgggcgcctgtagtcccagctacttgggaggctgaggcaggagaatggcgtgaacccggga

SEQ ID NO: 457247 - DNA, 201 bp, Homo sapiens
cctcatgtgtccccagcacatcccagacccaggtagttccagtgaaattgcatcacacataaacttaacataggagctgatttgagactctaatctctctmcctccattctctggctaaccagcccaccctcaaactcagatgaaatgtaccattgcccaggacatggcagtgatcaactataacaagaattacaaatttg

SEQ ID NO: 457248 - DNA, 201 bp, Homo sapiens
taaccgaacatgttgtggtattgttgttttgcattcagatggaggaaaggccattttaaaaaatcacctcgatcaaaatccccagctacagtggaacacarcagagccctctcgaacatgcaaagatcctatagaagatataaactctccagaacagtaagtaccttctccttgagaattataactgaagaagaaatacgt

SEQ ID NO: 457249 - DNA, 201 bp, Homo sapiens
taggagacacgggcatagaaccaggaagtttgagtgaggaaagaaaggggccatgagtcaaaaaatacaagtggcctctagaagctgaaaaaggcaaggarcttcctctcagagcctccagaaggaaccagccccgccaaaaccttgactttagccctgtaagactcattttggatttctgatttccagaacgataaaata

SEQ ID NO: 457250 - DNA, 201 bp, Homo sapiens
gcaatttctcagctaccacagactgagaaatctttacatagcctcactaaatatggagtcagccaagacaacatttggtctttcctcttagcacgtctgaragagagaaatgacccaagtgttgaagatgctccttgtcacatcactgaagtgatgccttgcttggccataagcaggaaaagcccagacagcaatggtgca

SEQ ID NO: 457251 - DNA, 201 bp, Homo sapiens
aaatttatgttgcccaggctggtcccgatcacctgggctcaagcagtcctcccacctcagcatcccaaagtgctggcattacaggcacgaaccactgtacscggcccagggcttagcactttaatttcatactggagcccacaaattatgtagccagtcctatacctagacctgaaaatgagtaaaagctagccagcaaaa

SEQ ID NO: 457252 - DNA, 201 bp, Homo sapiens
agtcctcccacctcagcatcccaaagtgctggcattacaggcacgaaccactgtacgcggcccagggcttagcactttaatttcatactggagcccacaarttatgtagccagtcctatacctagacctgaaaatgagtaaaagctagccagcaaaagagagaaagaagaggaggggagagggagagaactagcagcccaa

SEQ ID NO: 457253 - DNA, 201 bp, Homo sapiens
gagggagagaactagcagcccaattctgtagaatgcatgcacctgcaggggctgctgtggctgcaccaaggacaactaagttgttgtgtgttaatcacctrtcatggaatccatgtgacttcagactgctgcgtgatcagacagcacgcatcctgtctatgtgtgatgatgtgagttacatctgaaaaatcatcaggcctg

SEQ ID NO: 457254 - DNA, 201 bp, Homo sapiens
ccatgaacgagaccaacttcttcggggtcacggtcagtcccatgcctctgggctgttttccttagtgttccttgtaaacatgcaaagcaaaagaggggctrttacaggctttctgttatgtgatctgttatctctgatcattgaaataactaattgcaggccctaggattgcagggctgttcagacaaggggcaggggcag

SEQ ID NO: 457255 - DNA, 201 bp, Homo sapiens
gccttgcctggcaggtccagaccagctcaaggagagggtcacagggactggctgtcacagggcctgattgggccaactggagtcctggatggggtacagaygcccgcttgatgacagtggcctccccacccccaactcccttccagaggagggggctgagtggggaaccagggactccccagactcctgagccaataagca

SEQ ID NO: 457256 - DNA, 201 bp, Homo sapiens
catcctcaacctgggaaacttcactgagagcacaggtaagagagccagggccccagaatgtggtagggaccttggtttcaaacaccagctgttcatcttcyattttttagatgaagaaactgaggctcagacagggcacaggactggtatgaagtcacacacacagagctggagcatctggaacctctgtctgctgaccac

SEQ ID NO: 457257 - DNA, 201 bp, Homo sapiens
ctgcataagccagtggtatatgatagaaagtttccttggtgacctcagtcatcgaaaacacagatgcaaacccagaaatacatgaaaatacatgaacaggsagggaacaacccatttagtagttttcaactcaacagggaagaacggtgttactgtcaggccatcactgggtataaataccacctacaaagttaagataat

SEQ ID NO: 457258 - DNA, 201 bp, Homo sapiens
agcaagttgacccccctgaaaatggggggtctgtaaaatggggacaataacagtacccaccttatgaggttgttgtgagggttaaatgagataatgcacgyagaatctagcactgtacctggcaccctgtgggcattgaagaatagcagctcttctcggcatcaggcacctgatgtccctgccgagtataacttgggattc

SEQ ID NO: 457259 - DNA, 201 bp, Homo sapiens
gccgacacactggagatcatcaatgacaccatcaggttccaaggtaaggcaggtgggcttctcagaggagggggcctgcccagttgctcccaagcctggayattgtctaagggttagggacaagctcagcatccttggcttcagggggtcaagggaacatcctcaacacatgcactcaatcgttgagcacagggctccaat

SEQ ID NO: 457260 - DNA, 201 bp, Homo sapiens
ttaggcctctctaggggctacacctctgctcggacgagggtgggtgcgtgtgtgagtgcgtgcacacagattcacccacacacagtgctactcctagggaygcagtttctcttagttcccatcccccactccctctgaccctttccagaatcttcccagactgtcagtgccggtttctccaagtcttgagaacagctccag

SEQ ID NO: 457261 - DNA, 201 bp, Homo sapiens
agactttgaggatgtaagggctgtgccactggcacccaaggagcctggagcccagctctgccccaggccactcccagcagccccacccttctgagggggcygaaagctggaggccctgagcaccatctcccctgaaccatgccttgctcactgctaaaaacccaccttggagccctgcccttcaaccagttttgccactca

SEQ ID NO: 457262 - DNA, 201 bp, Homo sapiens
cctgcaggttgcatgctcaggtgcatctctccccatgtgtggctgcacagaccactgcgaactccaggcccaggtagaatctggatggattagacaacacstacagcttgtacagtctgctttgtggttcagtgcaggagtcacttgattttcttccagatgcccattgccagcctcacaggaacaggaacatcatcactc

SEQ ID NO: 457263 - DNA, 201 bp, Homo sapiens
tcaagcctgcagcctcatctccacttaccatgttgtggttttttcccccctgagaattttatttttgagtaatgctatgtctttaaattttctatttttgwatttcagctatcattgctgtgtgtttattacagcaaggaggaggagacctcaaaatgtgaatttaatttgcgataccaccttggctgggattcttttgtt

SEQ ID NO: 457264 - DNA, 201 bp, Homo sapiens
gccccaccatgttccctgttgtattagggttcactagagagacagaactaataggatagatgtctatataaaggtgagtttattaagaagtattgactcayatgatcaaaaggtgaggtcccacaataggccatctgcaagctgaggagcaaggaagccagtccaagtcccaaagctgaagagcttggagtccaatgttca

SEQ ID NO: 457265 - DNA, 201 bp, Homo sapiens
agcccaggagctcgaggtttcagtgagctatgatggtaccactactctctagcctgggcagcagagcaataccctgtctcaaaacaaaacaaaaaaaaaaatgggattttactaactcaaggcattacaataacagttaccctttacaataagttaccccttgctgtgccccatccctggctattctcatttcataattat

SEQ ID NO: 457266 - DNA, 201 bp, Homo sapiens
gattggtgaagaggctgacctcttgcccatcactgtctcatgcatgggacaccttgggactgttcacctcacagttttggaaaacccactcataagcccamcccctggaggggacaggaccattgaggtggcttccaaaagtccaggagacccaatccctgtccgcatggtctttgaagcaagaggaagcatttcttacat

SEQ ID NO: 457267 - DNA, 201 bp, Homo sapiens
ctttctctgggccccatttcctcacccctccagatcctcacctcctttggggagcagctgggtctggctttccttggtacccctgagcacccaacccagasccggcacccagtgcatgtttagtttgtggcatagtttaacatccattcacacgcacatctgacagaaacttgtgatcatccatcataaagagaatttatc

SEQ ID NO: 457268 - DNA, 201 bp, Homo sapiens
accctctgagccgtctggttatggtccctcagaaagatgcccctgcatccttattgtccacccgccgaaggctggcagtgggacagaccccacctcccatyctgctccttctttcagttccctgcaaacctactgctctaggctctatgagtgcatcaaacattcctgaaggcttgtgtctaacaaaagaatttttggtgt

SEQ ID NO: 457269 - DNA, 201 bp, Homo sapiens
atcagaagtaagccaccctggtcctcctctgtgatatcactttctaaattgacaagcctatggacacagtataggagtgccacatgacagattccccaggracacagaagtctgcagggcagagtttcccaaagtgttcctccgttgctaggatgttgtaggtgttacatgcatgtgagtatgtttgtgtgcgtgcacgca

SEQ ID NO: 457270 - DNA, 201 bp, Homo sapiens
accgaggcccagaaaggggaaggaaggaacagaaagactaagaaaaaaaaccaaattgagtccaattccatgcaatttaataaacagtaagtgaaagagcytctttgtaataaagcatgatgcttgttttcagtttctacgaagagtcaaacatagaactgtactattgagatccctggagataccctatcagcagcatgt

SEQ ID NO: 457271 - DNA, 201 bp, Homo sapiens
aactacctagaacagtcttcttcaggaaaccgaggcccagaaaggggaaggaaggaacagaaagactaagaaaaaaaaccaaattgagtccaattccatgyaatttaataaacagtaagtgaaagagcttctttgtaataaagcatgatgcttgttttcagtttctacgaagagtcaaacatagaactgtactattgagat

SEQ ID NO: 457272 - DNA, 201 bp, Homo sapiens
ccttcctttcatagcaagccaccatttacacctccacctgaccattccaaaatggtcttgaaatggagcgacatggcagacagcactcaaggtcactgaakattgaacacccaggtgagccacggaaccacagggcagccactgtggcaggatcctgaggctgcctgcacaccccgaagtcttctctcatcctggtcccca

SEQ ID NO: 457273 - DNA, 201 bp, Homo sapiens
acttcagcctgggcaacagagtgagaccctgtctcaataaataaaataaaaataaattagttaattaaacatataattactaaatcatgaaattttagagmtgaaataaaaactacctagaacagtcttcttcaggaaaccgaggcccagaaaggggaaggaaggaacagaaagactaagaaaaaaaaccaaattgagtcc

SEQ ID NO: 457274 - DNA, 201 bp, Homo sapiens
aagcagacaacctcatcctccagcgctgcctcctacatgaagccttcccggacctgccctgaatgagtaagctaagccagaggaggcctacagccaacccrgggtaggactactacagtgcttctcctgctctcctgctggggttggaggggaagtaactggcttcagagttccgcagacctgagctcggatcccagctct

SEQ ID NO: 457275 - DNA, 201 bp, Homo sapiens
ttttattttaaaaactatacacaacttttatatgattccatagtcaaatgtatagcagagaattcttggctccaatctaagctctctccattctgttccaygccatccttatataatgtgaccattgttattagtttttaatttatccttccagtttttcttattgaaaatatgagcaagtgtgtgtgtgtgagtgtgtgt

SEQ ID NO: 457276 - DNA, 201 bp, Homo sapiens
agtagctgggattacagacataggttaccacacccagctaactttttgtatttttagtagagactgagtttcaccatgttagccaggctgatcttgaactyctggcctcaagttgatctgcccacctcggcctccctcccaaagtgctagaattacagcatgagccaccactcctggcctgctaacacttttctcttaatg

SEQ ID NO: 457277 - DNA, 201 bp, Homo sapiens
aggaaagcagatgtggaaaatggtgaatctaagtgaaagtattcctcatgctattgtttcaacttctttgttttaaatatttttatttaaatatttttggrtttataggaatgctatacaatgttcctcgtactattctttcaacttctttaaatatttttcaaaataaaaagttgtgaatgcgcctgtgtgtgtgtatgt

SEQ ID NO: 457278 - DNA, 201 bp, Homo sapiens
agcaattctcgtgcctcagcctcccaagtagctgggattacagacataggttaccacacccagctaactttttgtatttttagtagagactgagtttcacyatgttagccaggctgatcttgaactcctggcctcaagttgatctgcccacctcggcctccctcccaaagtgctagaattacagcatgagccaccactcct

SEQ ID NO: 457279 - DNA, 201 bp, Homo sapiens
acattagttgtgaattatacagaaggcttttgctttgaatctgtttcctaagatgattacattatttattatttccatgatgaagagattgagccttatayagtgggaagggttcaacttgagaaaaacaatcctaggttagataacgatctagacattcataaatgctgatttaagcataattttctctattttccccat

SEQ ID NO: 457280 - DNA, 201 bp, Homo sapiens
ttgccaaaggattgcccttcttaaatggctccggagtccctgcttgcaaccgcaagtctacactgcctgtcacacagtatcatgtaaccctcactgcactrcttggggttgaagagcaggcgttgtcccagttaggcctgttctcagattggggaaaataagattcaaagaaagtagagtctggccctgcttcctgctgca

SEQ ID NO: 457281 - DNA, 201 bp, Homo sapiens
acatgtaactccacacagagtagaggagcagccttgcagctgtgccaggccttcagctttaatgtctcttgatctccgccagagctttccaggtgtaggayaccccttctgcaggaagtgaggcccagagagctgatgtggcctgtgtaaagtcatacctcaggtagggcagagagctgtggtgccagcctttctggtggc

SEQ ID NO: 457282 - DNA, 201 bp, Homo sapiens
taggctggggttcacatccaggctctggtgcttgttagctggtgcctggggcaggttgcttagcctcttccagcctcggttcctggtctggggcttggcaktggcattatactgaccctgggtgctggtgcattgccttccttcttcctcctgtggccatccactcaaggacatagtcacccaggtgacatcttggcctat

SEQ ID NO: 457283 - DNA, 201 bp, Homo sapiens
aacgctcttaatatttggatgtcttaaaatgtctctgttttcctctcacttttgaatactgctttagcagagttcagaattccaggcatgcagttacttcyctgcagaatttgtcttttgggtctcttgttactgaagagatgtctgctgtccatccagttattgactccttagaaactgtctttttctggtaactcttga

SEQ ID NO: 457284 - DNA, 201 bp, Homo sapiens
gagaactgtaaaatgaagacaggaatgaagtgagtacagagaaatatatgcaaaaggtcttgcatgattgccaaaagtgaataagaaatttggccctgagsttcctagtggaaaaagcaagaatatatacaggatctgtttcatgacccatgatatctaaaacaacccagtgcctcaagacgtataatagtttttcttggc

SEQ ID NO: 457285 - DNA, 201 bp, Homo sapiens
cacagagaaagtcccagagtccgggtgggctgtgagtatcatgtggacatctgacattgggggtcactgtcccaaatcggcccaccagtggctgaggctgrcctccgtgaagctgatcccacacccttatggctcaggtgcctcatcttgtttaggaagcaaatctcagagaccatgaaacacaggcagcatctgaaaagc

SEQ ID NO: 457286 - DNA, 201 bp, Homo sapiens
cgacagccaggaagcagctgcacagactttatgaaaccttgtcttagaggttccatagtgtcactctcaccatactcaatattgatcagagccatcacagyctgctcaggtccaggaggagggggcacagaacccaccactcaaggggaggaatgtttaagagttttggtgccatgttttaaaactgccacactgaataag

SEQ ID NO: 457287 - DNA, 201 bp, Homo sapiens
cttggaatcaccgtggccccatggtgatgcagaagtccaggctccactttgatgcatggagtcagaaccgggtgcatggtggggtatgcaagggacactgygtggcaaggctagagtctggttgtgaagcaggctccacaggtgacttctaatacaaactcaagtttgagaaccaccatcaatgcccagtctcatgggaaa

SEQ ID NO: 457288 - DNA, 201 bp, Homo sapiens
ccatggaggaaatgacttttgtctagaacctgtgtagccacccctgtcgctgccccatccatcgctcttgggcactctctatgccgttgcatgctgccctrgcaatttccctctgctaggatctcacagcagtggctggcagggttggtgggtgaatatctcagctccctctcccctccgagtgcccagtgggaactgcag

SEQ ID NO: 457289 - DNA, 201 bp, Homo sapiens
gtattgagcatggcagagcagaaaagcagattccatggaggaaatgacttttgtctagaacctgtgtagccacccctgtcgctgccccatccatcgctctygggcactctctatgccgttgcatgctgccctggcaatttccctctgctaggatctcacagcagtggctggcagggttggtgggtgaatatctcagctccc

SEQ ID NO: 457290 - DNA, 201 bp, Homo sapiens
catggaatgtctgttcccagcaaacacgataaagaaagattgtgcactttaacctctctcatcagggcccaagggctggctgggattttttttttttttttcccactaactttgtttctgaccaaagtgaattggaggcactctgctaaaagacatccccgtagacataggggagagagttgctggctgagggcttccctt

SEQ ID NO: 457291 - DNA, 201 bp, Homo sapiens
tcatggaatgtctgttcccagcaaacacgataaagaaagattgtgcactttaacctctctcatcagggcccaagggctggctgggattttttttttttttttcccactaactttgtttctgaccaaagtgaattggaggcactctgctaaaagacatccccgtagacataggggagagagttgctggctgagggcttccct

SEQ ID NO: 457292 - DNA, 201 bp, Homo sapiens
tcttcacaaagaagaggaacggaaatgggacgtcttccttaacatctgcaaacaaggaggcgctgggatatcaaacttgcaaaaaaaaaaaaaaacaaaamaaaaaaaaaaactagacaaggagagaggcactagaactccagctggaagtcacggagtggctcgagcagccttgggaagaggcaaggagcttctgaagaa

SEQ ID NO: 457293 - DNA, 201 bp, Homo sapiens
ttatttcttcacaaagaagaggaacggaaatgggacgtcttccttaacatctgcaaacaaggaggcgctgggatatcaaacttgcaaaaaaaaaaaaaaamaaaacaaaaaaaaaaactagacaaggagagaggcactagaactccagctggaagtcacggagtggctcgagcagccttgggaagaggcaaggagcttctg

SEQ ID NO: 457294 - DNA, 201 bp, Homo sapiens
caattctcctacctcagcctccttagtagctgggattacaggtgcccaccaccacacccagctaatttttttttttttttagtagagacagggtttcaccrtgttggccaggctggtctggaactcctgacctcaagtgattcgcctgcctcagcctcccaaagtgctgggattataggcatgagccaccacgcctggcca

SEQ ID NO: 457295 - DNA, 201 bp, Homo sapiens
acaccaaattgctaacagtattcactcgtgtgaaaagaaatggtattgtggaaagtgagtgagaagggactattttacattacttttttttttttttttttaagatggagtctcactctgtcacccaggctggagtgcagtggcatgattccagctcactgcaaccttctcactggagaattctcactggagaattgttca

SEQ ID NO: 457296 - DNA, 201 bp, Homo sapiens
tggaaagtaactcagatgcctagaaattggggaattatcaccaggtattagttcagtgaggtcatcccaaaggtagaatatcaatactggaagaaacttartagtattctagtccagctggtctgtggctggacaccagactgagtcctctggggaaggggtcttgctaaacatccagatttccaggccccattctcgaaa

SEQ ID NO: 457297 - DNA, 201 bp, Homo sapiens
atcattgatgggcgtttgggttggtttcaagtccttgctattgtgaatagtgctgcaataaacatgtgtgcatgtgaaagaccaaaatctttaacatcackcttaaggtcccacatggattgattcccacacacatcaccactcttatctcttcctttggtctccttgttctctgagccctagcttctgtaccttttcttt

SEQ ID NO: 457298 - DNA, 201 bp, Homo sapiens
cttgattggaaaccatttggaagtagcagtacgatgaggcacagctggaaactgttgctgctgctctctaagaaagagaatagaggccagtaatccagcaygggttggagccatttctttgcactggtctccaggggggccatttagcacattaataatctatgagatgcttccaccttctggattcattaaaaacaagaa

SEQ ID NO: 457299 - DNA, 201 bp, Homo sapiens
cctttactagaagcagatctctgattacggccattggagtttaaagctttgcatggacaacagggttttttactttgacactgcagactctgaaaataagragtcagggatggaatgggggctcttcagcaagatgctcaaagtacacacaacgtctgcctctcagcccccaacagtcaaaacccacccaggccagaatcc

SEQ ID NO: 457300 - DNA, 201 bp, Homo sapiens
catggggctgtctccttggagaagttcatgtgagggagtggaggcaaggaggactttcagatgggaggatgttgactctatgtgtgtagaggtattggcartggagtcccaatacgtttaggacttgatttctgaaaactcgaaagcatgcctggttttgacatttaaaaaacaaatcagtgagaacccccaaatcaggcc

SEQ ID NO: 457301 - DNA, 201 bp, Homo sapiens
gtccccagccgcccctcgacagcccaccctgccttgtggcccaccttggcactccccacgaggaccttcctgggaaggaacatttcggcttgtgtcatggrgctgtctccttggagaagttcatgtgagggagtggaggcaaggaggactttcagatgggaggatgttgactctatgtgtgtagaggtattggcaatggag

SEQ ID NO: 457302 - DNA, 201 bp, Homo sapiens
aaaacgcaaacactatttcctcaagaactgcatcccacagagcttgtcctttaaaaggcagccgtggcagattattaaattgtagatgcatttctcccagmgctgtccccagccgcccctcgacagcccaccctgccttgtggcccaccttggcactccccacgaggaccttcctgggaaggaacatttcggcttgtgtca

SEQ ID NO: 457303 - DNA, 201 bp, Homo sapiens
gatgctagcaagagggagttagacatcctcagagaccaggaccacactccttcctgcttgggagtgagattatcgcagcttcagcttgcagacagaaatcrtcttgctgatgaaaataaagtcagattcctaaagggataaagggctgctcgtaggaaaacgcaaacactatttcctcaagaactgcatcccacagagctt

SEQ ID NO: 457304 - DNA, 201 bp, Homo sapiens
tatcttctctgatctagaaaattcatttctaggactttatcctaaggtaatggtggaagtattatctattatagtgaaaagtggaaacatcctaaatgttygaggagaaagaattgattgaataaatattgatatagctgtgcaatatttatacagtgttttctgtatccagttttgacatagaaaaatatgagggaatta

SEQ ID NO: 457305 - DNA, 201 bp, Homo sapiens
tttctgtttccttgtgtcacaaaaatagggattcacacaccagaggggtgaaaattcaccctggtgctgaaacgggttaaatttaacttttgccttttgcygggcctcttgattcatagctgctgcatagagaggctaatattgttttagtcgtgatgtgagtcacttagccactgggaacctgtttctccctctatatgc

SEQ ID NO: 457306 - DNA, 201 bp, Homo sapiens
gtgcagccaggcaaggaagatataagaacaaagatcaggatcttgatctgggagtagcctgggagcctggattcctgcctccttctcactctcaggaaacmtagacccatttattataagccagactctgtggacctcccaagccaccccaaccccaacacagggaggctaagcttgtttccagagatggtgaaggggtgg

SEQ ID NO: 457307 - DNA, 201 bp, Homo sapiens
agacacactgaatggcttgtgtttgctccatggtgtttggggcccagctggaggatttgaaggctgggggctggcatcatctgaaggcttgattagggcckaaggatctgcttccagtgtggctcctctccatgtggaggtctccatagggctgcctgagtgtcctcatgacaaggcagctggcatcccccaaagtgagtc

SEQ ID NO: 457308 - DNA, 201 bp, Homo sapiens
ctgtctttttgtttgtctgtgccctgcccccagaggtggagcctacagaggcaggcaggcctccttgagctgtggtgggctccacccagttggagcttccctgccgctttgtttacctaatcaaacaactaactcagcagtggcgggcgcccctcccccagcctcgctgttgccttgcagcttgatctcggactgctgtgc

SEQ ID NO: 457309 - DNA, 201 bp, Homo sapiens
tactgctgtctttttgtttgtctgtgccctgcccccagaggtggagcctacagaggcaggcaggcctccttgagctgtggtgggctccacccagttggagyttccctgccgctttgtttacctaatcaaacaactaactcagcagtggcgggcgcccctcccccagcctcgctgttgccttgcagcttgatctcggactgc

SEQ ID NO: 457310 - DNA, 201 bp, Homo sapiens
aggttactgctgtctttttgtttgtctgtgccctgcccccagaggtggagcctacagaggcaggcaggcctccttgagctgtggtgggctccacccagttsgagcttccctgccgctttgtttacctaatcaaacaactaactcagcagtggcgggcgcccctcccccagcctcgctgttgccttgcagcttgatctcgga

SEQ ID NO: 457311 - DNA, 201 bp, Homo sapiens
cttttatggttttccatagaagtcttttgagctcccatgcaagcaacaggaccactgggctgcaatctgagcacaaggtaatgaccctgggggtgtccacrggaggtacccaatatagaaataggaacttgaggactggccaaaggtcctgggtttggacaaggacacactcatagtcaccagaaacttggaagagctctc

SEQ ID NO: 457312 - DNA, 201 bp, Homo sapiens
tgccctttacatttttttcacttactttcaaatctggttacagatgattaagagcgaacttatttgtagaaatctaaaaagtaggtggctccatttctcaraaggaatgctctcttaatgaatgcacatcaggttggacaggcagaaatacaccacatggataagtttttaagcatatgccccaattctttgaaagacctc

SEQ ID NO: 457313 - DNA, 201 bp, Homo sapiens
cactctcttctggcttgtagagtttctgctgagagatcagctgttagtctgatggacttccctttgtgggtaacccgacctttctctctggctgctcttartatttcttccttcatttcaactttggtgaatctgacaattatgtgtcttggagttgctcttctcgaggagtatctttgtggcattctctgtatttcctga

SEQ ID NO: 457314 - DNA, 201 bp, Homo sapiens
agaggcatgaattatgcagagaactggagtgcagggttgaattgctaccaacaaacagaaggcagtcaacgctagttgaggcctgggctccacaccttaggaacacagagatggggtccaaatggcctgctgaacagtggcattggctatggctcacaggagggaaaagggctctcagataaggacccagttgctggaaga

SEQ ID NO: 457315 - DNA, 201 bp, Homo sapiens
atccaatttgccagtctgtgtcttttaattggagcatttagcccatttacatttaaaattaatattgttatgtgtgaatttgatcctgtcattatgatgtyagttgtttattttgctcgttagttgatgcagtttcttcctagccttgatggtctttacaatttggcatgtttttgcagtggctggtaccagttgttcctt

SEQ ID NO: 457316 - DNA, 201 bp, Homo sapiens
ctgcttcaaaggtcacacctggagagcaagaccaaaaaactagtttctaaacgctacccgtctaagacctgccttctacccctgggtcccatcaaagtaccttcttcctagtgattgaccctggggatgcccatgccttaccctcaggagtgtggctttaccctgggcctcaacagcacaactccatcagaatataacatc

SEQ ID NO: 457317 - DNA, 201 bp, Homo sapiens
cctttgcctttctcttataagaatccttaacattggatttatccaggatgatctcatcccaagatccttcagttaattacgtctgcaaagaccctttttcyaaatgaggtcacattcacaagttgtcagggttagaacttagacctatcttttttggaggtcacatttcaagccactggctctgcactgtgaacatgcatg

SEQ ID NO: 457318 - DNA, 201 bp, Homo sapiens
ctgggtgctcctgtattgggtgcatatatatttaggatagttagcttttcttgttgaattgatccctttaccattatgtaatggccttctttgtctcttttgatctttgttggtttacagtctgttttatcagagactaggattgcaacccctgcctttttttgttttccgtttgcttggtagatcttcctccatcccttt

SEQ ID NO: 457319 - DNA, 201 bp, Homo sapiens
gcttgaacccaggaggcagaggttgcagtgagctgagattgcgccattgcactccagcctgggcaacaagagtgaaactctgtctcgaaaaaaaaaaaaaagccagttgaaaattttgcaggccagctatccagagcaagaaaaacattctaagggcaatgcaaatgctgtcctgtacagaagagaagaggccgaagcccg

SEQ ID NO: 457320 - DNA, 201 bp, Homo sapiens
tgacatgtgatgtgagcatctagattggataggaagcccaggcttctccatgggaacctgccccaggtgtattagtttcctgtggctgccgaaacaaatcrccacaaactaggtggcttaaaacaacagaaatgtattgtctcatagttctggaggccagaggtcctaaatgaaggtgtcagcaggcttgccctggagtct

SEQ ID NO: 457321 - DNA, 201 bp, Homo sapiens
tctgggtgctcctgtattgggtgcatatatatttaggatagttagcttttcttgttgaattgatccctttaccattatgtaatggccttctttgtctcttttgatctttgttggtttacagtctgttttatcagagactaggattgcaacccctgcctttttttgttttccgtttgcttggtagatcttcctccatccctt

SEQ ID NO: 457322 - DNA, 201 bp, Homo sapiens
cgcttgaacccaggaggcagaggttgcagtgagctgagattgcgccattgcactccagcctgggcaacaagagtgaaactctgtctcgaaaaaaaaaaaaaagccagttgaaaattttgcaggccagctatccagagcaagaaaaacattctaagggcaatgcaaatgctgtcctgtacagaagagaagaggccgaagccc

SEQ ID NO: 457323 - DNA, 201 bp, Homo sapiens
cttggtgcagagctgagttcaagtcctgggtatcctcgttgatctttctaatgttgacagtggggtgttaaagtctcccattattattgtgtgggagtctwactctctttgtaggtcactaaggacttgctttatgaatctgggtgctcctgtattgggtgcatatatatttaggatagttagcttttcttgttgaattga

SEQ ID NO: 457324 - DNA, 201 bp, Homo sapiens
atccccaaagaaaagtggctggaagtgcccatgttgagaaaccctggtgggtgatcttacatgtcctttccagatctctgattctggaaaaaaaaaaaaaatcacccaaacttgtaatcataacattctacaaaaaaaatgcttacttgaaatgacagcttctagctttgttgcctcagaggtgcggggctgctgctgtgg

SEQ ID NO: 457325 - DNA, 201 bp, Homo sapiens
ggcagtttgttataacttctgttcttttacatttgctgaggagtgctttacttccaactatgtggtcaattttggaataggtgtggtgtggtgctgaaaasaatgtatattctgttgatttggggtggagagttctgtagatgtctattaggtctgcttggtgcagagctgagttcaagtcctgggtatcctcgttgatct

SEQ ID NO: 457326 - DNA, 201 bp, Homo sapiens
ctagaatagctccgcccggggccctgtggaaacgcagaggaggtggctgctcatcctgccttgagaaatgtttcacaaaaaaaaaaaaaaaaaaaaaaaaagaagagggacttttcccccaagtcttcaaagaacaaataggatttggataaagaaaacagaagctgtgcaaaatagttcatcctttcctgaaaacgttaa

SEQ ID NO: 457327 - DNA, 201 bp, Homo sapiens
atgtgtcccagagattctggtatgttgtgtctttgttctcgttggtttcaaagaacatctttatttctgccttcatttcattatgtacccagtagtcattsaggtgcaggttgttcagtttccatgtagttgtgcagttttgagtgagtttcttaatcctgagttctagtttgattgcactgtggtctgagaggcagtttg

SEQ ID NO: 457328 - DNA, 201 bp, Homo sapiens
gctagaatagctccgcccggggccctgtggaaacgcagaggaggtggctgctcatcctgccttgagaaatgtttcacaaaaaaaaaaaaaaaaaaaaaaaaagaagagggacttttcccccaagtcttcaaagaacaaataggatttggataaagaaaacagaagctgtgcaaaatagttcatcctttcctgaaaacgtta

SEQ ID NO: 457329 - DNA, 201 bp, Homo sapiens
ctagactgtgggcttcctgagggcagggactaagtcttggggattgttgtatctccagtacctggcctagtctgatgcacagccagtactcaacaaaaaaagtgtaaattcccggccacacactctttgcatgaacccagcgcttcactcttctaaaagccctgcacatgcctttgctcctcctaccagcctggcagcagg

SEQ ID NO: 457330 - DNA, 201 bp, Homo sapiens
tgctagaatagctccgcccggggccctgtggaaacgcagaggaggtggctgctcatcctgccttgagaaatgtttcacaaaaaaaaaaaaaaaaaaaaaaaaagaagagggacttttcccccaagtcttcaaagaacaaataggatttggataaagaaaacagaagctgtgcaaaatagttcatcctttcctgaaaacgtt

SEQ ID NO: 457331 - DNA, 201 bp, Homo sapiens
gtgctagaatagctccgcccggggccctgtggaaacgcagaggaggtggctgctcatcctgccttgagaaatgtttcacaaaaaaaaaaaaaaaaaaaaaaaaagaagagggacttttcccccaagtcttcaaagaacaaataggatttggataaagaaaacagaagctgtgcaaaatagttcatcctttcctgaaaacgt

SEQ ID NO: 457332 - DNA, 201 bp, Homo sapiens
atgcaggtggcatcagggtcaggagactagactcttagtgaccaggaaggacatggaggcttggtgaggggaaggggcctgccccaggtcacacacaagcragtagcagagtctggcctgagcctaggtctcctgactcccagcctgtggctttcctggggcctcttgtcgcctccagagcaggatctgctgggagagtct

SEQ ID NO: 457333 - DNA, 201 bp, Homo sapiens
tgcaacaggaagaggagaccagaaaagcagccatgtgctctggtgcaaacctaaccacaaacctaaccacacacctgaaagccagcatggctcagtgtgcygtgggagcctggcctcatgccctcagggtgcccaggacagctgtggagaccttggaccagtcacttagattctctgggcttgagcttgctttcctgaaca

SEQ ID NO: 457334 - DNA, 201 bp, Homo sapiens
taaccttcatgacatctacaaagtcccttttgccatgtaacataaaatattcatggaggtaattccaaggggtgaaggtcaatggggccaaaactttgccygccacacccactctggtgaaaattcagtcagataaatatttgggaacgttgtaagattctccagctccaatactggttgtcaaatagtctcagatatttt

SEQ ID NO: 457335 - DNA, 201 bp, Homo sapiens
ctgattagtaaccttcatgacatctacaaagtcccttttgccatgtaacataaaatattcatggaggtaattccaaggggtgaaggtcaatggggccaaarctttgcctgccacacccactctggtgaaaattcagtcagataaatatttgggaacgttgtaagattctccagctccaatactggttgtcaaatagtctca

SEQ ID NO: 457336 - DNA, 201 bp, Homo sapiens
cttcatatgaccaaaatcaaagtgtcatctgggctgggttcgtatctggaggctcaactggggaagatttgcttccaggctcattctggttattggcagarttcagtttcttgcaattgtagaacagaggtccctgctttcttgacacgtggacctcttcatcttcaaaccaacaatggcatatcaaatccatctcatgct

SEQ ID NO: 457337 - DNA, 201 bp, Homo sapiens
gacagttctatgccagaagtctggacacagtgtggctcccctgggtcccttgctcagggcttcatatgaccaaaatcaaagtgtcatctgggctgggttcrtatctggaggctcaactggggaagatttgcttccaggctcattctggttattggcagagttcagtttcttgcaattgtagaacagaggtccctgctttct

SEQ ID NO: 457338 - DNA, 201 bp, Homo sapiens
acctttggtgagctggaaagtccatctatttgggacgcgaatcatgtcaggtaagaagacacagcattagaaattaggataagggaaaatagcatcgaaawtgggacagatatatccatgtgatttattttgttattcactgcaaagttgctccctttaggggagccagggaagcatgcttggtgcccagtacgttgtttc

SEQ ID NO: 457339 - DNA, 201 bp, Homo sapiens
acccttcctgaggccagagacaaacactatactctgtaaggacctccagggtcatattggtggttttcaaacatttttgctgctagcaatgaagcctgctytaaaattaagtgttctgtggagctctgatgctgcagctgaggcagttgggagaggagctgctggttgaagtgaaggtgaggagctcagtgcttctttcac

SEQ ID NO: 457340 - DNA, 201 bp, Homo sapiens
tctagaagtgagtggggtttccggtgggggaggtgtggtggggggaaaggagagcatgataaagcccatagctttcttccaggacacagacccccacttasagtggctctgagagcaattcatcaaaaaccaaatcacagaaagacaacttgctgtaaataacttctcagaatgatggttttgcccagtgaacatctcact

SEQ ID NO: 457341 - DNA, 201 bp, Homo sapiens
cttacagggaaggagaagcccttggcagtggaacagcagacaggagatgtgaggtggtgaccatgagctacagtagaggaggagtcaaaggaaggtaatawcaaataccagagagaagagggagggagggaaggcagcatttattgagcacctactatgtgctagagccaatctccaggtggcaagactgaagacagaggc

SEQ ID NO: 457342 - DNA, 201 bp, Homo sapiens
aaaattgattttcatggcttttggatctgttcccatgtttaagtgctgaattttaagagcctatatgtgccaatggtgatttctctgtgacaagtccttayagggaaggagaagcccttggcagtggaacagcagacaggagatgtgaggtggtgaccatgagctacagtagaggaggagtcaaaggaaggtaataacaaa

SEQ ID NO: 457343 - DNA, 201 bp, Homo sapiens
gaatgtgtcccagagattctggtatgttgtgtctttgttctcgttggtttcaaagaacatctttatttctgccttcatttcattatgtacccagtagtcaytcaggtgcaggttgttcagtttccatgtagttgtgcagttttgagtgagtttcttaatcctgagttctagtttgattgcactgtggtctgagaggcagtt

SEQ ID NO: 457344 - DNA, 201 bp, Homo sapiens
ttgcttttctagttcttttaattgtgatgttagggtgtcaattttagatctttcctgctttctcttgtgggcatttagtgctataaatttccctctacacrctgctttgaatgtgtcccagagattctggtatgttgtgtctttgttctcgttggtttcaaagaacatctttatttctgccttcatttcattatgtaccca

SEQ ID NO: 457345 - DNA, 201 bp, Homo sapiens
tctgatcttagttatttcttgccttctgctagcttttgaatgtgtttgctcttgcttttctagttcttttaattgtgatgttagggtgtcaattttagatmtttcctgctttctcttgtgggcatttagtgctataaatttccctctacacactgctttgaatgtgtcccagagattctggtatgttgtgtctttgttctc

SEQ ID NO: 457346 - DNA, 201 bp, Homo sapiens
atccactagaatgtgagccccatgaaacagggcccttaactatcttactcagagctctttctccatggccttgcacagggccagacagacacacagctcartatatgttggttgaatggatgagtgaatgaatgaacaaaggaatgcgtgcatgaatgaatggatgatggacaagcttccctggcatgattcttgtcagca

SEQ ID NO: 457347 - DNA, 201 bp, Homo sapiens
attcttctctcttttcttctttattagtcttgctagcggtctatcaattttgttgatcttttcaaaaaaccagctcctggattcattaattttttgaaggrttttttgtgtctctatctccttcagttctgctctgatcttagttatttcttgccttctgctagcttttgaatgtgtttgctcttgcttttctagttcttt

SEQ ID NO: 457348 - DNA, 201 bp, Homo sapiens
ctctctttcactgagctcccataggctccctaactcctactgggctcccattggccctctgactcctgctaggctctcactggtcctctgactcctgctaggctctcactggtcctctgactccctctggactctcactggtcttctgactcccgctgggctcccattggccctctgactcccactgggttctcattggtc

SEQ ID NO: 457349 - DNA, 201 bp, Homo sapiens
aaatgtcccccaacattctttctcacctcccctgtttctccatcacattgcttattcctcgttctctcatctatattctatcatccactagaatgtgagcyccatgaaacagggcccttaactatcttactcagagctctttctccatggccttgcacagggccagacagacacacagctcaatatatgttggttgaatgg

SEQ ID NO: 457350 - DNA, 201 bp, Homo sapiens
cctggtttagtcttgggaggatgtatgtgtcgaggtatttatccatttcttctagattttctagtttatttgcatagaggtgtttatagtattctctgatkgtagtttgtatttctatgggatcggtggtgatatcccctttatcattttttattgtgtctatttgattcttctctcttttcttctttattagtcttgcta

SEQ ID NO: 457351 - DNA, 201 bp, Homo sapiens
tggctctctttcactgagctcccataggctccctaactcctactgggctcccattggccctctgactcctgctaggctctcactggtcctctgactcctgctaggctctcactggtcctctgactccctctggactctcactggtcttctgactcccgctgggctcccattggccctctgactcccactgggttctcattg

SEQ ID NO: 457352 - DNA, 201 bp, Homo sapiens
tctattccaccaatttatatgtctatccttatgccaacaccatgctgacttgattattgtagctttgtggcaattaaaattggaagtgtgagtcttctgayttttttcttctcttgcaagattgttttagctatgcagggtcccttgagattccatatgatttatacgatcagttttttcatgtctgtaaaaaaggctgtt

SEQ ID NO: 457353 - DNA, 201 bp, Homo sapiens
tgttgaattttgtcaaaggccttttctgcatctattgagataatcatgtggtttttgtctttggttctgtttatatgctggattacatttattgattttcrtatgttgaaccagccttgcatcccagggatgaagcccacttgatcatggtggataagctttttgatgtgctgctggatttggtttgccagtattttattg

SEQ ID NO: 457354 - DNA, 201 bp, Homo sapiens
ttggctctctttcactgagctcccataggctccctaactcctactgggctcccattggccctctgactcctgctaggctctcactggtcctctgactcctkctaggctctcactggtcctctgactccctctggactctcactggtcttctgactcccgctgggctcccattggccctctgactcccactgggttctcatt

SEQ ID NO: 457355 - DNA, 201 bp, Homo sapiens
agttagtttttgtacatggtatgaggtagtgatccaaattaattattttgcacgtggatatatagctgtgcaagcaccacttgtttgttttggttttttcragacggagtttcactctgtcgcccaggctggagtacagtggcacaatctcagctcactgcaaactcctcctcccaggttcaagcaattctcctgcctcag

SEQ ID NO: 457356 - DNA, 201 bp, Homo sapiens
tcaatatgatattggctgtgggtttgtcatagatagctcttattattttgagatacgtcccatcaatacctaatttattgagagtttttagcatgaagggytgttgaattttgtcaaaggccttttctgcatctattgagataatcatgtggtttttgtctttggttctgtttatatgctggattacatttattgattttc

SEQ ID NO: 457357 - DNA, 201 bp, Homo sapiens
gaatctgggttaatgtctctcagagggcaaagaagtgagagagaacatgcattagtcagggtctgctaggttttgctgtagtaacaaaaaaaaaaaaaaaacccctcactggattaaagcaataaatgttcttttttcatcacagcacttgtccactgagaaccagctgcagctttcccccaccatggtgtcctaccccgg

SEQ ID NO: 457358 - DNA, 201 bp, Homo sapiens
attcaatatgatattggctgtgggtttgtcatagatagctcttattattttgagatacgtcccatcaatacctaatttattgagagtttttagcatgaagrgctgttgaattttgtcaaaggccttttctgcatctattgagataatcatgtggtttttgtctttggttctgtttatatgctggattacatttattgattt

SEQ ID NO: 457359 - DNA, 201 bp, Homo sapiens
tgaatctgggttaatgtctctcagagggcaaagaagtgagagagaacatgcattagtcagggtctgctaggttttgctgtagtaacaaaaaaaaaaaaaaaacccctcactggattaaagcaataaatgttcttttttcatcacagcacttgtccactgagaaccagctgcagctttcccccaccatggtgtcctaccccg

SEQ ID NO: 457360 - DNA, 201 bp, Homo sapiens
tcttgtgcccgttttcaaagggaatgcttccagtttttgcccattcaatatgatattggctgtgggtttgtcatagatagctcttattattttgagatacrtcccatcaatacctaatttattgagagtttttagcatgaagggctgttgaattttgtcaaaggccttttctgcatctattgagataatcatgtggttttt

SEQ ID NO: 457361 - DNA, 201 bp, Homo sapiens
gggaaaaaatacccggaactctttctcgccttctttctgactcctcctggggcctcccattggctctctttcactgagctcccataggctccctaactccyactgggctcccattggccctctgactcctgctaggctctcactggtcctctgactcctgctaggctctcactggtcctctgactccctctggactctcac

SEQ ID NO: 457362 - DNA, 201 bp, Homo sapiens
agttgataaagcagcagggtttgagaggattgattccaattttgaaagttctactgtgggtaaaatgctatcaaacagcattgcatgatacaaagaaatcrtttacgaaaagcagaatcaatcaatgcagcagactccgttattatcttaagaaattgctacagccaccccagccttcagcagaaaccacacgtgggtcag

SEQ ID NO: 457363 - DNA, 201 bp, Homo sapiens
gccagcacttccaacactatgttgaataggagtggtgagagagggcatccctgtcttgtgcccgttttcaaagggaatgcttccagtttttgcccattcartatgatattggctgtgggtttgtcatagatagctcttattattttgagatacgtcccatcaatacctaatttattgagagtttttagcatgaagggctgt

SEQ ID NO: 457364 - DNA, 201 bp, Homo sapiens
aagtccggaacttaaggggattcgcgcatgcatggtcagtggtgaaatgaattacaaagtgtatcttataatcttaggtgaaaacatatggatataaaaaattatactttgataatttctacctgaaaaacttatatctacagtattagcgtcctggcaagaaacagacggcatcttcagagctgaagtccgatttagatg

SEQ ID NO: 457365 - DNA, 201 bp, Homo sapiens
acacaccaaaatagtctgtatcccataaatatgtacaattattacatgtcaactaaaaataaaaggaaaaaataactttcatgagtgaggagttgcttctyatggaaaagcaaagaaagtggtttcttgagatggaaactactcctgatgaagatgctgtgaacattgttgaaatgacaacaaagaacttagaatattcca

SEQ ID NO: 457366 - DNA, 201 bp, Homo sapiens
tggaaagagtagaaggtaggggagtatggggagaggttggttaacaaatacaaagttacagctagactggaggaatgaattcccgtgttctgcagcactgyaggatgaatacggttaactataatttattatatattttcacaaagctagaagagaggattttgaatgttcacaatataaagaaatgataaatgttcaagg

SEQ ID NO: 457367 - DNA, 201 bp, Homo sapiens
atagataaattggactatatgaaacgaaaagacctctgcatagcaaaggaaacaatcaacagagtgaagagacaacctgtaaaatgagagaaaatacttgkaaactatttatccaacaagggactaatgtccagaatatacaaggaactcaacaggaaaaaaatgaaataatttgattaaaatgaagacaaaggatcagaa

SEQ ID NO: 457368 - DNA, 201 bp, Homo sapiens
atcctgagtggagccattccgacctctagcccttggttcccagacccatgtattctacctgttgggccacagcaccatgtaatgatcgttcatttagattrttcctttgggttcgttaggttccttcctggaacatggtaccctgtcctgcaggggatcatctccaggctggccccctcacctgagccttcagaaggccat

SEQ ID NO: 457369 - DNA, 201 bp, Homo sapiens
tgcccagctcctgaaggggaagggaggacctggacagtggatggcagccccaccccacccagtgctcctgctgctggcattcactttctctgtttagtaarttcacccctctggcatgtcttccctagaattctatggtttgttttcctaggaagcttacaagaggaagttagagggacaaactacaacccccactgctac

SEQ ID NO: 457370 - DNA, 201 bp, Homo sapiens
tcctggcttttaaactacagttttcaattttagatggtattgattaaagcccttctatggaagaagaggaaattaacaatcttacaacttctcttccctcytctgcctcctgcattttatgttccattattatcttcacattgccagttgtttcatgttaaatgggtctggctctcactatcactccttttttaccacaag

SEQ ID NO: 457371 - DNA, 201 bp, Homo sapiens
acatggtgagtgcacttaatgccactgagttgtacacttaaaaataattagaatggccaggcatggtggctcacgcctgtaatcccagagctttaggagayctaggtgggaggctcgcttgaggccaaggaggtcaaagctgcagtgagccgtgattgtaccactgcactccagcctgggcaacagagtgagaccctgtct

SEQ ID NO: 457372 - DNA, 201 bp, Homo sapiens
tttggaaatagggttgttacagatgtgattagttaagatgaggtcgtactgaagtaaggtaatccaatataaccagtgtttctataaaaaggggagatttraagacagccaggcacacagggagaatgccatgtgatgatgaagcagagatacggatgaggtttctatatcatcagcagtgtcagtgattgccagccaacc

SEQ ID NO: 457373 - DNA, 201 bp, Homo sapiens
cacctgaggaatgagtgtggccacggtgacggggtgaggacccaccctacagccccccttcatctgtgagcaggcggccagtgggtgtttgcacatggggkagctgtcgggatagctctggcccgtgtgctaggaaggactgtcagattcggggacatggctcccaagggaaagtcggtagcgtgggcagctggccagtgc

SEQ ID NO: 457374 - DNA, 201 bp, Homo sapiens
gcgaggcacataattaactccagctgagtcgctgcagagggagcatgggcacctgaggaatgagtgtggccacggtgacggggtgaggacccaccctacarccccccttcatctgtgagcaggcggccagtgggtgtttgcacatgggggagctgtcgggatagctctggcccgtgtgctaggaaggactgtcagattcgg

SEQ ID NO: 457375 - DNA, 201 bp, Homo sapiens
aggacaagcgaggcacataattaactccagctgagtcgctgcagagggagcatgggcacctgaggaatgagtgtggccacggtgacggggtgaggacccaycctacagccccccttcatctgtgagcaggcggccagtgggtgtttgcacatgggggagctgtcgggatagctctggcccgtgtgctaggaaggactgtca

SEQ ID NO: 457376 - DNA, 201 bp, Homo sapiens
atgtgggctgcccctggggaggggacataaatgtgggtaacgcagctcacttggccgagggtggcttctggtcagcagccagcactccctgcagctggggkagcggtgcccagctcctgaaggggaagggaggacctggacagtggatggcagccccaccccacccagtgctcctgctgctggcattcactttctctgttt

SEQ ID NO: 457377 - DNA, 201 bp, Homo sapiens
tgggggagtgaccaccatgtccccagctggaggacaagcgaggcacataattaactccagctgagtcgctgcagagggagcatgggcacctgaggaatgastgtggccacggtgacggggtgaggacccaccctacagccccccttcatctgtgagcaggcggccagtgggtgtttgcacatgggggagctgtcgggatag

SEQ ID NO: 457378 - DNA, 201 bp, Homo sapiens
gatgatgtctgtttattggtgtcttttaaaaaataggtctgggtatatttaggttgcattttccatttttttaatcatggtaaaatacacataacatcaarcttaccttcttagccattttaagtgtatgtacagttcagtggtattaaatacattcataatgttgtacagtcatcaccaccacccatgtccataactctt

SEQ ID NO: 457379 - DNA, 201 bp, Homo sapiens
tcgtgatgggcttggggaccccttagcaggctctcagccacggggtgggaggcgggccagaattgagtcctggggctagacactgggaaggtgcattaggrcttcagatgtagaggagctgggacctgggagcaggatgttgagatgggaacacagctgtgcccaaggctgcttgtgcagcctggaccccagaaccccctt

SEQ ID NO: 457380 - DNA, 201 bp, Homo sapiens
aggggcagcaccaggcgtcaccccctgcgcaggcagtgtcgtgatgggcttggggaccccttagcaggctctcagccacggggtgggaggcgggccagaawtgagtcctggggctagacactgggaaggtgcattaggacttcagatgtagaggagctgggacctgggagcaggatgttgagatgggaacacagctgtgcc

SEQ ID NO: 457381 - DNA, 201 bp, Homo sapiens
gcacttggtggcatctgtttgctggtctgtccgtctagcaaggttccaagctgaaacccctttgccccctttcctaggcagggagaggcctcacattcttycgtgaatccaggggcagcaccaggcgtcaccccctgcgcaggcagtgtcgtgatgggcttggggaccccttagcaggctctcagccacggggtgggaggc

SEQ ID NO: 457382 - DNA, 201 bp, Homo sapiens
tatgagtatctggagactgagcacagcataggggtgggccttatcagctcctgctagggaaggcgagtcagccctggggtttcatgcaaagcttcgaggtrgtcgcctggcctccctcagtgcttgcctaaggcttgcaggctttggggaggggagctgccaattcccatgcatattgggagtagggatgctggtgggagg

SEQ ID NO: 457383 - DNA, 201 bp, Homo sapiens
aagaatgcttgtgatttttgtacattgattttgtatcctgagactttgctgaagttgctgatcagcttgagattttgggctgagacgatggggttttctaratatacaatcatgtcatctgcaaacagggacaatttgacttcctcttttcctaattgaataccctttatttccttctcctgcctaattgccctggccagc

SEQ ID NO: 457384 - DNA, 201 bp, Homo sapiens
tggtgatgcgggctcttttttggttccatatgaactttaaagtagttttctccaattctgtgaagaaagtcattggtagcttgatgaggatggcattgaayctataaattaccttgggcagtgtggccatttgcacgatattgattcttcctacccatgagcatggaatgttcttccatttgtttgtatcctgttttattt

SEQ ID NO: 457385 - DNA, 201 bp, Homo sapiens
ttcttttggcttaggattgacttggtgatgcgggctcttttttggttccatatgaactttaaagtagttttctccaattctgtgaagaaagtcattggtarcttgatgaggatggcattgaatctataaattaccttgggcagtgtggccatttgcacgatattgattcttcctacccatgagcatggaatgttcttccat

SEQ ID NO: 457386 - DNA, 201 bp, Homo sapiens
ctatttctcaccatacacaaaaatcaactcaaaatggattaaagacttaaatgtaagccctgaatatatagaactactagaataaaatataggggaaatgyttcaaaacattggtttaagcaaagattttatggctacaactttaaaagcacagacaacaaaaacaaaaatagataaattggactatatgaaacgaaaaga

SEQ ID NO: 457387 - DNA, 201 bp, Homo sapiens
cctttccccattgattgtttttgtcaggtttgtcaaagatcagatagttgtagatgtgtggcattatttctgagggctctgttctgttccattggtctatrtctctgttttggtaccagtaccatgctgttttggttactgtagccttgtagtatagtttgaagtcaggtagcgtgatgcctccagctttgttcttttggc

SEQ ID NO: 457388 - DNA, 201 bp, Homo sapiens
atattgcattaagagaatgaaggacaaaaaccatattgttatctaaataaatacagaaaagcattttataaaattcaacatcccttcatgataaaaaaaaattcaacaaattaggcatagaagaaacatatttcaacatactaaaggccatctatgacaaacctacagctaatatcatactgaatggagaaaggctgaaag

SEQ ID NO: 457389 - DNA, 201 bp, Homo sapiens
agctgcatagtattccatggtgtatatgtgccacattttcttaatccagtctatcgttggatatttaggttggttccaagtctttgctattgtgaatagtsccgcaataaacacatgtgtgcatgtgtctttatagcagcatgatttatagtcctgtgggtatatacccagtaataggatggctgggtcaaatggtatttc

SEQ ID NO: 457390 - DNA, 201 bp, Homo sapiens
acagtctgttccctttcttcctatattccaacaattctgcaaataccctgtccatgaacggtcttcttcttttttccaaaactgttgggatttttttttttcttaacatttttttggccggccatttcaaggattcggggatgggacaggaggtagatgtgtgtttgctctcaccatctttatccaattcctgtttaaact

SEQ ID NO: 457391 - DNA, 201 bp, Homo sapiens
aaaatattggcaaaccaaatccaacaacacatcaaaaagataatacaccacgaccaagtgggatttatcctagggttgcaagaatgattcaacgtaaacaratcaataaatgtaatatattgcattaagagaatgaaggacaaaaaccatattgttatctaaataaatacagaaaagcattttataaaattcaacatccct

SEQ ID NO: 457392 - DNA, 201 bp, Homo sapiens
cgatagtttactgagaatgatgatttccaatttcatccatgtccctacaaaggacatgaactcatcattttttatagctgcatagtattccatggtgtatrtgtgccacattttcttaatccagtctatcgttggatatttaggttggttccaagtctttgctattgtgaatagtcccgcaataaacacatgtgtgcatgt

SEQ ID NO: 457393 - DNA, 201 bp, Homo sapiens
ataattcttctcaaactattccaaaaatttgaagaggaggaaattctttcttattcattctaccagaccagaattaccctgataccaaaaccagacaaggrcacaataaaaaaagaaaactgcagaccaatattcctgatgaacatagatttaaaaatctagatgaaaaaatattctccgggcacagtggctcacgcctgt

SEQ ID NO: 457394 - DNA, 201 bp, Homo sapiens
tccccagagtgtgatattccccttcctgtgtccatgtgatctcattgttcaattcccacctatgagtgagaatatgcggtgtttggttttttgttcttgcratagtttactgagaatgatgatttccaatttcatccatgtccctacaaaggacatgaactcatcattttttatagctgcatagtattccatggtgtatat

SEQ ID NO: 457395 - DNA, 201 bp, Homo sapiens
cccttctggttaaatggtggtggggactcagagccttgcccagtagggtcatgccatgtcagtctttcttcaagaggcctcctgaggaactgagtttgaarcccctaggttggagtcctcaccttcaaggccaccaaagatcccacccaggaatgaggccttctctgccattccccacagatacagcagctgggggtgccc

SEQ ID NO: 457396 - DNA, 201 bp, Homo sapiens
acatcaaaaaagtagggaaatttcaaataacctaatgatgcacctcaagggaccagaaaatcaagaacaaaataaattcaaaattaatagaaggaaagaartaaatatcagagcaggattaaatgaaatagaggctaaaaaaatacaaaggatgaagaaaatgagaacttgtggggttttttttttgagaagataaaatca

SEQ ID NO: 457397 - DNA, 201 bp, Homo sapiens
ccctgcaaaggacatgaactcatcattttttatggctgcatagtattccatggtgtgtatgtgccacattttcttttttattattattattattattatatactttaagttttagggtacatgtgcacattgtgcaggttagttacatatgtatacatgtgccgtgctggtgtgctgcacccactaactcgtcatctagca

SEQ ID NO: 457398 - DNA, 201 bp, Homo sapiens
tccctgcaaaggacatgaactcatcattttttatggctgcatagtattccatggtgtgtatgtgccacattttcttttttattattattattattattatatactttaagttttagggtacatgtgcacattgtgcaggttagttacatatgtatacatgtgccgtgctggtgtgctgcacccactaactcgtcatctagc

SEQ ID NO: 457399 - DNA, 201 bp, Homo sapiens
tgcaggaaagggctttgtaaattaaaaggccctgtgtgattgtaagaaataccatctaattctcctaacttagttcttgtaacttttaagtctagaaattrtggtctactgtaagccatcattaattgggcacttgtgctattccaaccctcacgacagccctgaaatgggaatgtgcctgtctgaccccagtccatttac

SEQ ID NO: 457400 - DNA, 201 bp, Homo sapiens
aatgacaggagtaaatctgcacttatcaataacaacattgaatgtaaatggtttaaatacctcaattaaaagacatagactggatgaatggatttttttttaaaaagccaactataagctgcctacaagaatctcacttttcctgaaaaagatataaatagactgaaagtgaaggaatggataacaaaattccacacaaat

SEQ ID NO: 457401 - DNA, 201 bp, Homo sapiens
gtccctgcaaaggacatgaactcatcattttttatggctgcatagtattccatggtgtgtatgtgccacattttcttttttattattattattattattatatactttaagttttagggtacatgtgcacattgtgcaggttagttacatatgtatacatgtgccgtgctggtgtgctgcacccactaactcgtcatctag

SEQ ID NO: 457402 - DNA, 201 bp, Homo sapiens
actgctatgaacatgggtgtacaactatctcttcaagtccctgccttcggttgttttgggtatacgtctagaggtggaattgctagatcatatggcaattytgtgtttaacttctccaggaaccactatactgtttccacagcagctgcaccatcttacattcccactaatagggcacagcagttccagtttctccacacc

SEQ ID NO: 457403 - DNA, 201 bp, Homo sapiens
caagaaatggttaagggattcctacatctgggagtgaaaggatggtatctgccttcatgaaaacacacaaaagtataactcactggtagagaagagacacraataagaaagagaaagaaatgaaatgttagcaccattgaaaaccaccaaaagacaaaggtaaataataaaagaggaataaaggaacaaaggatatacaac

SEQ ID NO: 457404 - DNA, 201 bp, Homo sapiens
tcatcatcactagaccatccctacaagaaatggttaagggattcctacatctgggagtgaaaggatggtatctgccttcatgaaaacacacaaaagtataactcactggtagagaagagacacaaataagaaagagaaagaaatgaaatgttagcaccattgaaaaccaccaaaagacaaaggtaaataataaaagaggaa

SEQ ID NO: 457405 - DNA, 201 bp, Homo sapiens
agcagctgttataccagatgcacagatatcaatgtaaggatacaagaaatttgaaaaagcaaagaaacatgatacctccaaaggaacacaataattctccrataacatattccaaagaaaggaaatctatgaaatgccagaaaagaaattcaaaatgatgatcttaaggaaattcagtgagatacaagacaacacagatgg

SEQ ID NO: 457406 - DNA, 201 bp, Homo sapiens
tcagtagccaatattctcaggagctggggaatgatggtgctttggccctaaagaggccaaaatactgggcaagccccccagttacccctatagataacaacggggcctaccttaaagggctgtgacgattaaagaggtttatacatgttgagtgcctgggacacagtatgtgctgaattagtgcaaggatgacaaggaaga

SEQ ID NO: 457407 - DNA, 201 bp, Homo sapiens
agtgaggcccagccactatggcaaggccctcagggggctgctctagtctcctggtgttcattgttctgcttgtctacagaaccttccattccaacaaaatktgctagaagcccacatataaaatctccagaagggaacccttctggttaaatggtggtggggactcagagccttgcccagtagggtcatgccatgtcagtc

SEQ ID NO: 457408 - DNA, 201 bp, Homo sapiens
cctgtgttgaaactttaagattcccctggtttcttgagaggttttgttttgttttctctgttcatttgctaaacaggcctggtatgtccattgcaggtccyaggttgagaggacccaaggtgatggagtgaggcccagccactatggcaaggccctcagggggctgctctagtctcctggtgttcattgttctgcttgtct

SEQ ID NO: 457409 - DNA, 201 bp, Homo sapiens
gtggccccctcagcctgggattgaaggtcatgtgtaattcaacctccatcaggtcaggagaaaacactggcccctcaccctgtgttgaaactttaagattmccctggtttcttgagaggttttgttttgttttctctgttcatttgctaaacaggcctggtatgtccattgcaggtcccaggttgagaggacccaaggtga

SEQ ID NO: 457410 - DNA, 201 bp, Homo sapiens
gaatgcaaataacaatagtcatggtgacagctgatgtttactgagcccttctttgtactgggcacttgctgagcaccatgcctatgcagaaggcttatgcrgagaaagcaggtttctcagagtcagaatctagagcccctctctcacccagtcacatctgtattctgccttctgggacactgaccacattttaggggaaga

SEQ ID NO: 457411 - DNA, 201 bp, Homo sapiens
ctgcagaggtgaacgttgatactaacatgaatgcaaataacaatagtcatggtgacagctgatgtttactgagcccttctttgtactgggcacttgctgakcaccatgcctatgcagaaggcttatgcagagaaagcaggtttctcagagtcagaatctagagcccctctctcacccagtcacatctgtattctgccttct

SEQ ID NO: 457412 - DNA, 201 bp, Homo sapiens
aacgtacgggacttgagactggctaggtgtgaggggccacgcaacgatggagtcttggacggctcccagttttctgccttggggaacctgcagaggtgaaygttgatactaacatgaatgcaaataacaatagtcatggtgacagctgatgtttactgagcccttctttgtactgggcacttgctgagcaccatgcctatg

SEQ ID NO: 457413 - DNA, 201 bp, Homo sapiens
gcaacggtagtgcagttgggctccaaatagtgcagtagtcttcttggctatgtgaaaagattatttcatctttagtgctaccactgttgttttatgggccwgtaaggcaggggaagttgaggctgagggcatagcttgagtggatggccatctgaggtcccaggtcccaatctggaattctttcagttgcatcacaagaga

SEQ ID NO: 457414 - DNA, 201 bp, Homo sapiens
gaagcagagtcacctgccacagtgaggccagacacacgcatgtggcggtgcggtgcagaggctggcacggttccgtggatactcagtgagtagaacgtacrggacttgagactggctaggtgtgaggggccacgcaacgatggagtcttggacggctcccagttttctgccttggggaacctgcagaggtgaacgttgata

SEQ ID NO: 457415 - DNA, 201 bp, Homo sapiens
ctcatgggcacaccctgacttgttctgccttttggccttgccatgtacgtatcttgtctcctggctgatggcagcttccatgtcattaggggtgatgtggrtgggagaccaggagggcagggaccacgtcagccttggctcttggtccttagctctggtgtggtgaatggcatatcatgagggctcagtcattatttactg

SEQ ID NO: 457416 - DNA, 201 bp, Homo sapiens
ttctgtatacttggtttgggagattggcaaatcccacatagccttcaggggtcttctgttgagctaccgagcgacatggggcgagcagcggtttggatgcmggcggagccgcgggcaagcaggaagaagatgattcttaggtctgaatgcctaggaattcatgtggatcaatcagacctcccatggtgctgctgtggacgc

SEQ ID NO: 457417 - DNA, 201 bp, Homo sapiens
ggctttgggcaagtgacttaatctttcaagtccctcatttgtgaaatggaaacaagaatgggatctgctttgtaagattgttgaggatgaaattcactccagagtcaatcctggtgtgtcgcctgtggcccccttcctccctgagggcttggagtgagggatgggggtgggagagggggagtggagggaagggaaggagga

SEQ ID NO: 457418 - DNA, 201 bp, Homo sapiens
tgatttttgtacaatcttaatatctctgtatttgtgttattatacactaggaaaaagtaaaatgatgactagcacatcaaaactgtacttcatggatgttwttgcttaagatggaatccctgtttaaaaagtgacaccattcaattgaaaatactaattaatgcttacacgggtggtgcacagacatggtgaaatggcctc

SEQ ID NO: 457419 - DNA, 201 bp, Homo sapiens
aggctttgggcaagtgacttaatctttcaagtccctcatttgtgaaatggaaacaagaatgggatctgctttgtaagattgttgaggatgaaattcactccagagtcaatcctggtgtgtcgcctgtggcccccttcctccctgagggcttggagtgagggatgggggtgggagagggggagtggagggaagggaaggagg

SEQ ID NO: 457420 - DNA, 201 bp, Homo sapiens
ctaactcctactgggctcccattggccctctgactcctgctaggctctcactggtcctctgactcctgctaggctctcactggtcctctgactccctctggactctcactggtcttctgactcccgctgggctcccattggccctctgactcccactgggttctcattggtcttctgactcctgccgggctcccattggcc

SEQ ID NO: 457421 - DNA, 201 bp, Homo sapiens
caccatgatccaattacctccacctggtcccacccttgacatgtggggattatcgggattaccattcaaggtgagatttgggtggagacacagccaaaccrtatcacctgattacccaagagctctgatggagatgtaaaagaagatgaatgttgttttcatgcctgttaacacaatatccattctgcagtccatggatca

SEQ ID NO: 457422 - DNA, 201 bp, Homo sapiens
taaaggagaaccccaggggaaaaaaatcttaaataacgcacacaaatgtttcagcaaagctaaaagtagcttgcacaatatcatctctgcacgttttgccragggaagcctgagcacagagatgaaaaggcgcttgccccagcttcccttcccagaaaatggccaagttcagcctgaatctgaacttgttcattgctctct

SEQ ID NO: 457423 - DNA, 201 bp, Homo sapiens
cctaactcctactgggctcccattggccctctgactcctgctaggctctcactggtcctctgactcctgctaggctctcactggtcctctgactccctctggactctcactggtcttctgactcccgctgggctcccattggccctctgactcccactgggttctcattggtcttctgactcctgccgggctcccattggc

SEQ ID NO: 457424 - DNA, 201 bp, Homo sapiens
aataaattaattaattaaaatactcttttcaaaatattattgctcattgacaatgtacctggtgtattagtctgttcccacactgctatgaagaaataccygagactgggtaatttataaaagaaagaggtttaattgactcacagttctgcattgctgggaaggcctcaggaaactttcaatcatagcagaaggcaaaag

SEQ ID NO: 457425 - DNA, 201 bp, Homo sapiens
tagatcaagctccttgtaaatagagatgggacatctttgcagaaggtttgtcagagagcatgctctggatacacctgtagggaagtgaaggggacagaacmagagcaagaagctgatggcagtgtggctgcaactgaggctccagctgattctggtagctctggagctgtgatggagcagaggctgggcccaggtgtcctc

SEQ ID NO: 457426 - DNA, 201 bp, Homo sapiens
ccctaactcctactgggctcccattggccctctgactcctgctaggctctcactggtcctctgactcctgctaggctctcactggtcctctgactccctctggactctcactggtcttctgactcccgctgggctcccattggccctctgactcccactgggttctcattggtcttctgactcctgccgggctcccattgg

SEQ ID NO: 457427 - DNA, 201 bp, Homo sapiens
gctgctacaaactttcatgtgtgagtttttgtgtggacataaattttcaattcatttggataaatacccaggagtgcaagttatgattatatggtaagagratgtttagttttgtaagaaactaccaaaccgtcttccaaagtgactataccgttttgcaaacccacgagcaatgaatgggagttcctgttgctccacatc

SEQ ID NO: 457428 - DNA, 201 bp, Homo sapiens
gctccctaactcctactgggctcccattggccctctgactcctgctaggctctcactggtcctctgactcctgctaggctctcactggtcctctgactccctctggactctcactggtcttctgactcccgctgggctcccattggccctctgactcccactgggttctcattggtcttctgactcctgccgggctcccat

SEQ ID NO: 457429 - DNA, 201 bp, Homo sapiens
cccagcctcagccccccaagtagctgggactacaggcatgcgccaccacaccccattaatttttgtattttttgtaaagacggagtttcctcatgttgtcwagactggtctccaattcctgggctcaaatattccacctgccctggcctcccaaagtgccgcgatgacaggaatgagccaccatgcccagcagatgtattt

SEQ ID NO: 457430 - DNA, 201 bp, Homo sapiens
ggctccctaactcctactgggctcccattggccctctgactcctgctaggctctcactggtcctctgactcctgctaggctctcactggtcctctgactccctctggactctcactggtcttctgactcccgctgggctcccattggccctctgactcccactgggttctcattggtcttctgactcctgccgggctccca

SEQ ID NO: 457431 - DNA, 201 bp, Homo sapiens
tgagaacacccatatgaccatctggcttggcatcgtctatgcctacaagggacttctcatggtaggtgcagagcaggagacagtgttgaggggggacactwctttgttgggcctctgtctcccaggggcctccatcaatgtaaaaataaacagagcctccatgactaagcagttactctctgtggactcagtgcctgccac

SEQ ID NO: 457432 - DNA, 201 bp, Homo sapiens
caggcacacaggtcctgtaaggctctggcaattctgttcttcaaattgtacatatacattatatctcctcttcagaaactatgatgtgggggttttttttkttgttgttgttttttgtttgtttgtctgttttgttttgttttgagacaggatctcactctgttacccagactggagtgcaatggcaatatcacggctcac

SEQ ID NO: 457433 - DNA, 201 bp, Homo sapiens
tgacggatgattctaacaagggtgactcctaggttagatgcaagcccagggtctccctgtcctcccctgcaggagtgtctcccaggatactgctctggaaragtaagcagtaactttaaaggagttgacccgaggcccctttggtgggacagatggcaacttggcaaggggggatcgttgcaaagggccaggcagttctgg

SEQ ID NO: 457434 - DNA, 201 bp, Homo sapiens
tgattgagacaggcacacaggtcctgtaaggctctggcaattctgttcttcaaattgtacatatacattatatctcctcttcagaaactatgatgtgggggttttttttgttgttgttgttttttgtttgtttgtctgttttgttttgttttgagacaggatctcactctgttacccagactggagtgcaatggcaatatc

SEQ ID NO: 457435 - DNA, 201 bp, Homo sapiens
tccagacaggatgtcaacaccaggaagagctatcattggctaactgggcccctgagctagggagagactgtggcggtgataataaaaagcaacgatgatawgagcgatgatgatgatgacagctggtatcatgcgttaactcatttaatcctcacagcaattctgggaggtagatgctgtccttaacctcattttactgat

SEQ ID NO: 457436 - DNA, 201 bp, Homo sapiens
tttttttgcaattattaataaagctgctctaaacatccatgcgcaggattttttgtggacatcagatttcagctctttgggtaaataccaagaagctccaytgctggatcatatggtaagggtatgtttcatgttgtaagaaaacgccaaactgtcttccaaagtggctgtaccattttgcattcccaccagcaatgaatg

SEQ ID NO: 457437 - DNA, 201 bp, Homo sapiens
agcaaggaagtgattggctcatggtcacacaggtatcaaggaacagagccagaattctaactcaggtccacttaattttaaatactttagaaatccactgycccagccaggtgtggtggctcacacctgtaaccacagcactttgggaggctgaggcaggtggatcacttgaggtcaggagttcaagaccagcctggtcaa

SEQ ID NO: 457438 - DNA, 201 bp, Homo sapiens
acctcctttctgtagcatttccttaccccgtcaggcaggactgcactctgctccctgctcgctctcaggcctcctgtctgatgttatcacatcacctggamcccagcgtcacgggcagcagtttgtgtagtagttagaccataagcttcagggttaggcagatctgagttcaaatcctgccacttactagctgtaagagcc

SEQ ID NO: 457439 - DNA, 201 bp, Homo sapiens
cacacagctggctagtggcagagcagggactggacctcagcttgctcttctgcacattcccacggacacccaggcacaagtgtgctcccctcaccctctctgcatttgtgtccagcttttcttgagggtcacagctgggccttcaataaaggccagatgctcctgtttacatgattttttttttttttttttttttttgag

SEQ ID NO: 457440 - DNA, 201 bp, Homo sapiens
tgaagttaggttagtgtactgggctgaattgtcattccccctaaacgatatatgcatccttacccctggacctgtgaaatgtggccttatttgctaaaggrgtctttgcagatgtcattatgttaagggtcttcagaagaaatcattttggattacccggatgggccctaaactcgatgacaggtgtccttataaaaaata

SEQ ID NO: 457441 - DNA, 201 bp, Homo sapiens
gtatttgcttcctgtggctgccagaacaaattgccacaaacagggtggctgaaaacagcacacgttttttttttttctcacagtcctagaggccagaagtytgaaatcaaggtcttggcagggccagggtctctctggaggccctgggggaaaaccaatccttttgtgcctctccctgcttttggtgactgttggcattcc

SEQ ID NO: 457442 - DNA, 201 bp, Homo sapiens
ggaatgggttgggaagagacaggagaccaggtcctgaccgagggcaagagcctggggcaggagggaaggcaaaggggagagaacttcacacaggtgcattyacctgcatgtgacaggcggctggatgttggagccagggtgggcattgaagaatgagaaaggctggagagacgccaggttctggtctcacctgggcagaca

SEQ ID NO: 457443 - DNA, 201 bp, Homo sapiens
atgcaggttccctggccccaccccataacttctgattctgtggtcttacagtaaagctcaggaattcacatattaaacagcagtctgagagattcttaaayagcaacctgagaattgcttggggccacacacacacgtttgtggtttaaacctgtcagcaatggatttgctcctacattcattcactcctctagcaagccc

SEQ ID NO: 457444 - DNA, 201 bp, Homo sapiens
aggttccaaggtaaggcaggtgggcttctcagaggagggggcctgcccagttgctcccaagcctggacattgtctaagggttagggacaagctcagcatcyttggcttcagggggtcaagggaacatcctcaacacatgcactcaatcgttgagcacagggctccaatcacttgtatgggctccagcacctggcatgggtc

SEQ ID NO: 457445 - DNA, 201 bp, Homo sapiens
ggatttcaccatgttgaccaggctggtctcgaacttctgacttcaggtgatccacctgccttggcctcccaaagtgctgggattacaggcgtgagccaccrcgcccagcctagtttatcttttaataggtggttttaattggtttatatttattgtgattagtgatatatttctactctcttattttgagtgttccttctg

SEQ ID NO: 457446 - DNA, 201 bp, Homo sapiens
tctccatttgtgatcaagttctgcagggttgatcttcatgcatgtctgtctctctccctccctccctccccaaagcatctttttatccttctccattctcmtttcccccttcttccctccacagaaacaacagctatctagaagttagttctatgtttctcatctctattgttatatcttactgcagatgtacatgtccat

SEQ ID NO: 457447 - DNA, 201 bp, Homo sapiens
agcccctggcacatgaggacagtgaggctgcacagctcccagactgcccagtaccccactgggaacacttcatcagttccatttccttccatttgagacaygtaattccagggaggccaaatataaggtgttgtgaaagaagttgattttaatattaatacacgcagaatgaatgggaaatgttgggctttttaagagtat

SEQ ID NO: 457448 - DNA, 201 bp, Homo sapiens
ttataccttcagaatgtgaatggaggagagtggttagaactgacatgcagtacctggggaagcctggaatgtagatatttaaagtgaaatacactgtccargggattgcaattcatggttctgcattttgagggcagagaaattaacaaatgcctaaatcagaaactttagttttaaaatgtagaaaatatattcatacat

SEQ ID NO: 457449 - DNA, 201 bp, Homo sapiens
caccagtgtgaaccaagccagcacatcccgcctggagggcctacagtcagaaaaccatcgcctgcgaatgaagatcacagaggtacctccctctgcatctrgtagctgggccctgtctgccactgaagcccctctaaccctgtgcggggactctcaggctcctctagaccatccctgcagcatgaccgtgcagtctcatca

SEQ ID NO: 457450 - DNA, 201 bp, Homo sapiens
ggacctaggaaaattctaggtctcatttataccttcagaatgtgaatggaggagagtggttagaactgacatgcagtacctggggaagcctggaatgtagrtatttaaagtgaaatacactgtccaagggattgcaattcatggttctgcattttgagggcagagaaattaacaaatgcctaaatcagaaactttagtttt

SEQ ID NO: 457451 - DNA, 201 bp, Homo sapiens
tgaaaggagagagttgcctaaatgcattccctccagactgtgactggcctgtggggacaggagaatatggatttgattcatcttaggtctgtcttaaagayggagggaacctctgacatcatagctgtgtgtgagtccttgatgaagagtgatcctaaccacactacctctgtgtagagtcttccagtttgtaggggacgg

SEQ ID NO: 457452 - DNA, 201 bp, Homo sapiens
agtagagaatgcgaactatctggtttgcagcaaagccctgatagaaaggcaaagctttgtccttagtaatacagacagtccccaacttaccatttttcaamtttacaatggtgtgaaagtgatacacattcagtacagtattcagtaaattgcatgagatatttaacacttttttataaaataggccttgtgttagatgat

SEQ ID NO: 457453 - DNA, 201 bp, Homo sapiens
ccgttgtacagaaactgaggcatggagttaagtgacttgcccaggatcacacagagagcaagcagtagatcaggatttgacccaggctcttcactacctckctacgatttcacctttagctaaacaagaggtccaactcattttcttatcctttttaaaaaaataacagcttttctgaaatcttaatttaattcacctaac

SEQ ID NO: 457454 - DNA, 201 bp, Homo sapiens
gaacatgcaaagatcctatagaagatataaactctccagaacagtaagtaccttctccttgagaattataactgaagaagaaatacgtcactcctgcacamgagtttgcaatttgcacgatgttttcacatccattattttatttgctttccacagccatcccatgatgcagtccaattacagtgctctttttacagatga

SEQ ID NO: 457455 - DNA, 201 bp, Homo sapiens
aggtcaggagttcgagaccagcctggccaacatggtgaaaccctgtctctactaaaaatacaaaaaaaattaactgggcatggtagcgggcgcctgtaatyccagctacttgggaggctgaggcaggagaatcacttgaacctgagaggtggaggttgcagtgagctgagatggcactactgtccttcagcctggcaacag

SEQ ID NO: 457456 - DNA, 201 bp, Homo sapiens
gttattttttgttgctctgttgttatttatttatttatttatttttaaaatatcctccatccgggctgagtgtggtggctcatgcctgtaatcccagcackctgggagactgaggtgggcagatcacctgaggtcaggagttcgagaccagcctggccaacatggtgaaaccctgtctctactaaaaatacaaaaaaaatt

SEQ ID NO: 457457 - DNA, 201 bp, Homo sapiens
ctaacagtggatattaacaaatatttgaaacattagcctcactcagatgagtacaaaatggcctcctgtcttttttcccatttgctttgtgcctcctcctytcctttctattcccatgtgtgcttttgatacttggagcctccaaaaacacaagacaaaccaagtgttcttagcagcccaagagaaacaaactttagccgt

SEQ ID NO: 457458 - DNA, 201 bp, Homo sapiens
tacagagttttgtttgttctaagtgacttacaaacacaccttaatatatggtaggcaatttttttgttttgtgtatgtgttttgttgtgggggaaaaaaaagccaaaatatgggtagtaaaaaatgtaaaagtgttgctttgtcctaagccacctgaatcatgctttctctctgaaagttaactcctgctttcacttaggg

SEQ ID NO: 457459 - DNA, 201 bp, Homo sapiens
acacacagctggctagtggcagagcagggactggacctcagcttgctcttctgcacattcccacggacacccaggcacaagtgtgctcccctcaccctctctgcatttgtgtccagcttttcttgagggtcacagctgggccttcaataaaggccagatgctcctgtttacatgattttttttttttttttttttttttga

SEQ ID NO: 457460 - DNA, 201 bp, Homo sapiens
ggatggggtacagagttttgtttgttctaagtgacttacaaacacaccttaatatatggtaggcaatttttttgttttgtgtatgtgttttgttgtggggraaaaaaaagccaaaatatgggtagtaaaaaatgtaaaagtgttgctttgtcctaagccacctgaatcatgctttctctctgaaagttaactcctgctttc

SEQ ID NO: 457461 - DNA, 201 bp, Homo sapiens
ttaaaaaatgatgagttcatgtcctttgtagggacatggatgaaattggaaatcatcattctcagtaaactatcgcaaggacaaaaaaccaaacaccgcawgttctcactcatagatgggaattgaacagtgagaacacatggacacaggaaggggaacatcacactctggggactgttgtggggtagggggaggggggag

SEQ ID NO: 457462 - DNA, 201 bp, Homo sapiens
gataatcctgtggcccagaggagagacaagaatatataggaatataatataaatatatatatgataaacatactacatatgctatatttattatgtataayatatacaatattataaatgtatatgtaataaatatgttaaatatattataaaaatataaatataaaacaatatacacaatataaatatagcatagtcatt

SEQ ID NO: 457463 - DNA, 201 bp, Homo sapiens
caaaagaaactaccatcagagtgaacaggcaacctacagaatgggagaaaatttttgcaacctactcatctgacaaagggctaatatccagaatctacaawgaactcaaacaaatttacaagaaaaaaacaaccccatcaaaaagtgggcaaaggttatgaacagacacttctcaaaagaagacatttatgcagccaaaga

SEQ ID NO: 457464 - DNA, 201 bp, Homo sapiens
gactagtggcctaagtttgcacagctgggaaaagacagcgttgaggtccaaatccaaggtctttggagtccaggggtctgaatcacactcagctgctgccygtctttgccaggatgtctctgggattcagactgaggggcttgtatcatttctgaggggctgtggtggtgaggatggaggcagtatgacttaacagtactg

SEQ ID NO: 457465 - DNA, 201 bp, Homo sapiens
actgggttgctctgaagatgaagcaaggaaggtgcacaacgaactgtaaagtgttgtggatgattgaaggatctgtggtagtagaagaaagaacgccatamtatatatatatatatatatatatatatatatatatatatatatatatatatatatatatatatatggtgtgtgtgtgtgtgtatatatatatatatggta

SEQ ID NO: 457466 - DNA, 201 bp, Homo sapiens
atgttgcccaggctggtcttgaactcctggcctcaggcaatcctcctgcctcggcctcccaaagtgctgggattacaggtgttagccaccgcacctggctrctttgcctcttactagctatggggccccaggcaagtcactatacctccctgagactcagtttctcccacaggaaacaaaggcactaatgtctcccttaca

SEQ ID NO: 457467 - DNA, 201 bp, Homo sapiens
gatttcttgaatctgctaatagtgattaccaaattcttgctgtgatacctggtagcggtaattcacacaaggtcacgtgcgtgtgtgtgtgtgtgtgtgtgcgcgcgcgcgcatgtgcatatgcatgtgcacgtgcacgcatgcgttggaggaatcccttcctgaggcagcataaaaactcatcccttactcccctctcaa

SEQ ID NO: 457468 - DNA, 201 bp, Homo sapiens
agatttcttgaatctgctaatagtgattaccaaattcttgctgtgatacctggtagcggtaattcacacaaggtcacgtgcgtgtgtgtgtgtgtgtgtgtgcgcgcgcgcgcatgtgcatatgcatgtgcacgtgcacgcatgcgttggaggaatcccttcctgaggcagcataaaaactcatcccttactcccctctca

SEQ ID NO: 457469 - DNA, 201 bp, Homo sapiens
aatatttcttctttcaaagtgtggctgtgggaaataataatgtttagtacctaagaactacatcatcattattgctattattattactactgctattaaaatggctactttacaaagagcagagtttgtgtgggtctaatcaagacccagcaaacaatcattgcatacctatgagataccattctgtttcatatatataat

SEQ ID NO: 457470 - DNA, 201 bp, Homo sapiens
catgatatttgtaagctaatttcaaatgcttcaaaaacatcattaagtgtatgtgtgtgcatatatgtatatgtgtgtctatgtatatatatatatatatacactactatatagtatatatataatactaaatataatatatactatatatttaaaaagagagagaggaaagcagatgtggaaaatggtgaatctaagtga

SEQ ID NO: 457471 - DNA, 201 bp, Homo sapiens
taccctcatgtcatatgatgtggagcatcttttcgtaggcttctttgccatctttttttcatcttgagcatgaggataataatagcacctacctcttagggttgttgggaggattcaatgtgttaggatacttaaactactaagaaaagtgcctggcttatcctcagcaccatgcaaggggcagctgttatttttattaac

SEQ ID NO: 457472 - DNA, 201 bp, Homo sapiens
tcatgatatttgtaagctaatttcaaatgcttcaaaaacatcattaagtgtatgtgtgtgcatatatgtatatgtgtgtctatgtatatatatatatatatacactactatatagtatatatataatactaaatataatatatactatatatttaaaaagagagagaggaaagcagatgtggaaaatggtgaatctaagtg

SEQ ID NO: 457473 - DNA, 201 bp, Homo sapiens
tagatttcttgaatctgctaatagtgattaccaaattcttgctgtgatacctggtagcggtaattcacacaaggtcacgtgcgtgtgtgtgtgtgtgtgtgtgcgcgcgcgcgcatgtgcatatgcatgtgcacgtgcacgcatgcgttggaggaatcccttcctgaggcagcataaaaactcatcccttactcccctctc

SEQ ID NO: 457474 - DNA, 201 bp, Homo sapiens
ttagatttcttgaatctgctaatagtgattaccaaattcttgctgtgatacctggtagcggtaattcacacaaggtcacgtgcgtgtgtgtgtgtgtgtgtgtgcgcgcgcgcgcatgtgcatatgcatgtgcacgtgcacgcatgcgttggaggaatcccttcctgaggcagcataaaaactcatcccttactcccctct

SEQ ID NO: 457475 - DNA, 201 bp, Homo sapiens
acctggggagttcatgtgtgcagaccccaaagagctacgcaggccctctggtctcatatttttctgaaaatctttgtgttagcatttgaacaattgtttcyccagtggaagagagagagcaaggaagaggaaaaaagggaggtttctatgaggtttctatttctgcagcattgttcattgcaatgggaagacagagggtga

SEQ ID NO: 457476 - DNA, 201 bp, Homo sapiens
cccactgttgcctcgccctactgtgatcctggagtttgtgcacttggtttttttaagtcaaaatataattttacacacacacacacacacacacacacacmtacatactagttacatatcatcttgttagagttgtcccatctctcctgcctgtttgatcttttggggtcctggttttactttccaatgtagagactaaac

SEQ ID NO: 457477 - DNA, 201 bp, Homo sapiens
cagacagggcagcagggcagaggcgctcctcacttcccagagggggcggccaggcagaggcgctcctcacttcccattcggggcagctgggctgaggtacycctcacttcctcccagacggggcggccgggaagaggcgctcctcacttcccagacggggcggccaggcagaggcgctcctcacatcccagatgatgggtg

SEQ ID NO: 457478 - DNA, 201 bp, Homo sapiens
tttaaaataaaacccacacttcttaccttgctacaggtcctacacaatccagtcccactccatatctgacttcatctagttcctctccctgtgctcacccyagtctttagccatgtgggccttctgtctggagctctaacactccaactttattcccaactttgtgcctttgcattcatgattcttctgcctggaacgctc

SEQ ID NO: 457479 - DNA, 201 bp, Homo sapiens
cccacatgggcccattaaatcagaacctctcggggtggggcccagccatctgtgttttaacaaaccctgcaggtggttctaatgcacaccagggtttgagaccactgctggggggcagtggggaggcacttgggtggcactgaggtttgctcaaatgaagtcgatttccaaaatccccaagcagagccattctggactaaa

SEQ ID NO: 457480 - DNA, 201 bp, Homo sapiens
ggtctcaaactcctgactttgtgatccacccgccttggcctcccaaagtgctgggattataggcatgagccactgcgcccagccagatatcttttttaaaygcacgacgtatcttactattttgcacttaaaattctccaatttaaaataaaacccacacttcttaccttgctacaggtcctacacaatccagtcccactc

SEQ ID NO: 457481 - DNA, 201 bp, Homo sapiens
taacctttcccagtttgtctctcatctgtaaaatggggataataatatctctctcgcagatttgtaaggattagatgaggttatacagtagaaagtatcttaccaagtgcaaacacatagtaggtgctcaacaaatattaattctcttccttttcaggataggaaccttaggggtaggaggaaggagtagtgagatcgatg

SEQ ID NO: 457482 - DNA, 201 bp, Homo sapiens
agtctccctctgtcgctcaggctggagtcagtggcgtgatcttggctcactgcaacctctgcctcctgggttcaagcgattctcctgcctcagcctcccgmgtagctgggactacaggcacatgccaccatgcctggctaatttttgtattttttagtagagacggggtttcaccatattggccaggctggtctcaaactc

SEQ ID NO: 457483 - DNA, 201 bp, Homo sapiens
tgtttttgagacagagtctccctctgtcgctcaggctggagtcagtggcgtgatcttggctcactgcaacctctgcctcctgggttcaagcgattctcctrcctcagcctcccgagtagctgggactacaggcacatgccaccatgcctggctaatttttgtattttttagtagagacggggtttcaccatattggccagg

SEQ ID NO: 457484 - DNA, 201 bp, Homo sapiens
gcacttgtccactgagaaccagctgcagctttcccccaccatggtgtcctaccccgggacacagctggtggcaaagggaaagagtgtgcggcaaagtgtgygccagctttgagcttccaccccagagtgtcacatgtcacttctacccatatctcattgcccagaatgcatcatatgtccatgcccgagttcagtgagcca

SEQ ID NO: 457485 - DNA, 201 bp, Homo sapiens
ctgcaggccctgaggctagtgtacttgaggagtttgagaacaataagagggcccgtaggactggagcagagtgatggagtggggcagggtcaagtgtgagrcagagaagggatgatcccatagggatttctggccatgggacatttgaggactttgagcagggaaatgacatgatttgacttatctaagggccattttcca

SEQ ID NO: 457486 - DNA, 201 bp, Homo sapiens
aaaaaaacccctcactggattaaagcaataaatgttcttttttcatcacagcacttgtccactgagaaccagctgcagctttcccccaccatggtgtcctmccccgggacacagctggtggcaaagggaaagagtgtgcggcaaagtgtgtgccagctttgagcttccaccccagagtgtcacatgtcacttctacccata

SEQ ID NO: 457487 - DNA, 201 bp, Homo sapiens
ttcatttagtcaacaaatattaaccatttattataggttgtagacagtgggggttgagggagggtacatcaatgaacaaaacgagagttccgtccagagarcttgcgtgctgataaaggagacagacaatgcaaaaataaatacatcttagatagctagctaggtaggtaacatgttaagtggtgatggcactaggaaaaa

SEQ ID NO: 457488 - DNA, 201 bp, Homo sapiens
taataaaaataacagcaagcactcatctagaacttataatgagccaagccttttcaagtacggctatttacataatctaactccaacttcatagtcctaakagatataagtattgttatccccgttgtacagaaactgaggcatggagttaagtgacttgcccaggatcacacagagagcaagcagtagatcaggatttga

SEQ ID NO: 457489 - DNA, 201 bp, Homo sapiens
ggctgcaccaaggacaactaagttgttgtgtgttaatcacctgtcatggaatccatgtgacttcagactgctgcgtgatcagacagcacgcatcctgtctrtgtgtgatgatgtgagttacatctgaaaaatcatcaggcctgggtgcacatttgtacaccttcacttacctggctgcatggctttgaatgattccacctc

SEQ ID NO: 457490 - DNA, 201 bp, Homo sapiens
aatctgggttaatgtctctcagagggcaaagaagtgagagagaacatgcattagtcagggtctgctaggttttgctgtagtaacaaaaaaaaaaaaaaaacccctcactggattaaagcaataaatgttcttttttcatcacagcacttgtccactgagaaccagctgcagctttcccccaccatggtgtcctaccccggg

SEQ ID NO: 457491 - DNA, 201 bp, Homo sapiens
atttttgagacaatgtctcactctgttgtccaggctggagtacagtggcatgatcacagctcactgcagccttgacctcctgggctcgagcaatcctcccmactcagcctacgagtagctggtactacaggcatgcaacaccatgcctggctaattttttattgtttagagagatgagatctctctaaaaaataaaatatt

SEQ ID NO: 457492 - DNA, 201 bp, Homo sapiens
ttgtttatttttgagacaatgtctcactctgttgtccaggctggagtacagtggcatgatcacagctcactgcagccttgacctcctgggctcgagcaatyctccccactcagcctacgagtagctggtactacaggcatgcaacaccatgcctggctaattttttattgtttagagagatgagatctctctaaaaaataa

SEQ ID NO: 457493 - DNA, 201 bp, Homo sapiens
tgtgggtaaactccaaccaacctacctcttggtaaatggttcatcatcagggtgctccttcagcatttatggggtacccattgtctgccatgctcccttaygtactgcatgtctgatgagcaagattaggtatgtccataaagggtggtgttaccagcttgctgctggtaggtctgtggttgatgctatcagagaaacaca

SEQ ID NO: 457494 - DNA, 201 bp, Homo sapiens
agaggcagatatttatgtcagtataagggaggggctttgtgggagttgccggaaacagaagtggcctcacctaaatgtagttaagttctcctgcactggargtgtgtgagcaggaggcgtgacagagggggagaggcatgggtcgcatgcgttccagttccaaggatcactcgttaggttgttgctttccttcctccaacc

SEQ ID NO: 457495 - DNA, 201 bp, Homo sapiens
ccctgccgtttttaagaagtttgaaatcttgccctccacgtggagagcaatgaaaagagggaaactgagctctcattgcatcatttaggctcaaggaccastgatacctaaaaatacatccatccttgagcttgtaggttttaaactaatacatacccttttctgcttacatagagttgggtttctgtcacttagaaccaa

SEQ ID NO: 457496 - DNA, 201 bp, Homo sapiens
atgttgttatgccacccacatcatttttcataatggagaaggtaagaagcccaggactacttcccaggtgagatctgcgactcctgtcttggaatcaccgkggccccatggtgatgcagaagtccaggctccactttgatgcatggagtcagaaccgggtgcatggtggggtatgcaagggacactgcgtggcaaggctag

SEQ ID NO: 457497 - DNA, 201 bp, Homo sapiens
cagcaatttcttctctacaaggatcaggatccacaggcctagaagccagtgccagggagaggaggtggtactgggtagattgcaaaaagcagactggcggmcatcagcacctctgcctgtccagcaaccacatctgccttcctgcagctcctctgaaagcactgccctacttttgggggaaagcagaagagagaaaatctg

SEQ ID NO: 457498 - DNA, 201 bp, Homo sapiens
tgtgcactttaacctctctcatcagggcccaagggctggctgggattttttttttttttttcccactaactttgtttctgaccaaagtgaattggaggcaytctgctaaaagacatccccgtagacataggggagagagttgctggctgagggcttcccttggcttccagaaggcagccttccatccagacaagccagtga

SEQ ID NO: 457499 - DNA, 201 bp, Homo sapiens
attaatgccattattctctcctttctcttaggaaacaggagggcaggaacacaagaaagggcttggggagggggatgttaaaggttcccaaagtagccaamtgtgtctcccttttcgcatgcagcacgtgcagtcagtaggtaagtcctgtgtgtagactttcgtaccaggcagcctgtcacagaaggattagattttact

SEQ ID NO: 457500 - DNA, 201 bp, Homo sapiens
tctttggatcttattctccccagctttaacctgatgggtttgacctagactgtcttcaagcacgctcacaactctgatgatttgagtctgtggtttcagayttggaccataggcatttcttaggaatcctaggacaaccttggggtaactgtattgtgattatgtattttgttctgggtctttccttccagatattttcat

SEQ ID NO: 457501 - DNA, 201 bp, Homo sapiens
acctcaggtgatccacccacctcagcctcccgaagtgctgggattacaggcatgagccaccacgcccagcccattcccagtatcttctgcagttattcttragaactacaagtgagaaagccaggagaaccgggttggcccaaggccacctggagaactgtcctgcactagaggcctctctggggctgaatctgggttaac

SEQ ID NO: 457502 - DNA, 201 bp, Homo sapiens
agcggcactcacttccgggtgctcttgcccatgcgcaaccccagccccgccccagccactgatcctggatgaccccctgccccatggaataaaacttctcrttctgggaaagcatctttgaatctttgatcttgactcagctaagtttcctctggactgaccatgaagcacatttcagaggtgtggagtctcgtgctccac

SEQ ID NO: 457503 - DNA, 201 bp, Homo sapiens
ttttccatagagatggggttttgccaatttgcccagactggtctccacttcctaggctcaagcgatccgcccacctcagcctcccaaagtgctgggattcmggcgtcagccaccgcacccggtctcagtttatctttaacagagccctggagagttagtcagggcaggacttattctccccattttacagttaaggaaact

SEQ ID NO: 457504 - DNA, 201 bp, Homo sapiens
gatgatgtgagtggtcatgtttgctcaggatagtctgaagttacataattgtggcactggaaggattctgtttagattctgagcaggcaatgtggagaagmgaatgggtttagccctgccagccatgaacttggggggcaagactgggcaaatcccttctttctggtcctctgtgtataaaatgaagagttggacaagccc

SEQ ID NO: 457505 - DNA, 201 bp, Homo sapiens
aaagactaagaaaaaaaaccaaattgagtccaattccatgcaatttaataaacagtaagtgaaagagcttctttgtaataaagcatgatgcttgttttcartttctacgaagagtcaaacatagaactgtactattgagatccctggagataccctatcagcagcatgtggttcagatccctgagtgctttgctgtcacag

SEQ ID NO: 457506 - DNA, 201 bp, Homo sapiens
taaaaagggcctaagcaggtattgtttgagattctggtggtacctcagtgatcaagacagatcacatctccgacctcatggagcttaattctaggtgggtrggaagggaggagtgaaaccacagaccataagcaagtaaacacataaggaggaaaattgcagggagtgacaagtgcaataaagaagataaaaacccctggc

SEQ ID NO: 457507 - DNA, 201 bp, Homo sapiens
ggcctcccaaagtgctgagattataggcgtgggacaccgtgcccagccgtggcatctgcatttttaacaagcttcccaagtgatttacaaacggcagcacrggaaccagcaaactaaatattctctcgtgtacttccaaatgagactctgtgattcaaacctcccacagggatgccagcgagaaagtctgccagtttcacc

SEQ ID NO: 457508 - DNA, 201 bp, Homo sapiens
gatggatggatggatggttgggtggatgcctggatgggtgtgtgaatgggcagatggatggatagatggataggtatgtgggtgggtgggtgagtggatasatggacaggtagatgggtggacagatggatggctgggtagatggatagatgaattgatcaagtggatggatagatggatggatggatggatggatggatg

SEQ ID NO: 457509 - DNA, 201 bp, Homo sapiens
gaattttatttatttgcatataacagaagaaaatgaggaaaagtaaaatagaaggaattgctcaccattaaacaattttgcctttgctacagaaaatattkgtttccaaaatgtctctccaagggtaataaaagattatgaaaagcagtgaggttaaaatcctggcttttaaactacagttttcaattttagatggtattg

SEQ ID NO: 457510 - DNA, 201 bp, Homo sapiens
ttagattctggatatgaattatttgacagttatatgtattatttatatcttctcctattctgtggcttatcttttcactctcgatgtattttgatgaataratattcctaatcttaatgtaatccaatgtattagtcttctttgtgattagtatatttatgccttgtttaagcattttcaggatggggagaaaaaagtcag

SEQ ID NO: 457511 - DNA, 201 bp, Homo sapiens
atcacttgaggtcaggagttcaagaccagcctggccaacatagtgaaaccccatctctattaaaaatacaaaaattagccgggcatgatggcacatgcctrtagtctcagctacttgggaggctgaggcaggaggatcgcttgaacccaggaggcggaggttatagtgagccaagattacatcactgcattccagcctgag

SEQ ID NO: 457512 - DNA, 201 bp, Homo sapiens
attccatcactttgggaagccaaagtggaaggattgcttgagcccagaagtttgagaccagcctggagaacatgacaaagccctgtctctacaaaaaaaaatacaaaaattaactgggcatgatggtgcacacctatagtcccagctacctgagaggcttgagcccaggagttcaaggctgcagtgagctatgattgccct

SEQ ID NO: 457513 - DNA, 201 bp, Homo sapiens
tgcttagggaaaatcacatctttgtgtctttgtttctctagtgcactggtggagcctgacttgtgtgccaggcccagggtgggaggcaaaaatcagagagrtgatccttgcccttgagggaggacaaaaaaagcaaacgtagagctggagcatgaaggagaataaaagaagtgttgttggaaggttcagtaaggatcttga

SEQ ID NO: 457514 - DNA, 201 bp, Homo sapiens
ccccacatgggcccattaaatcagaacctctcggggtggggcccagccatctgtgttttaacaaaccctgcaggtggttctaatgcacaccagggtttgagaccactgctggggggcagtggggaggcacttgggtggcactgaggtttgctcaaatgaagtcgatttccaaaatccccaagcagagccattctggactaa

SEQ ID NO: 457515 - DNA, 201 bp, Homo sapiens
ggggaaggggcctgccccaggtcacacacaagcgagtagcagagtctggcctgagcctaggtctcctgactcccagcctgtggctttcctggggcctcttrtcgcctccagagcaggatctgctgggagagtctgccatgtgggatgggaggaaggactcaaggctctctcttcaaccccgccccaacctttgtcctttca

SEQ ID NO: 457516 - DNA, 201 bp, Homo sapiens
gactggcagggcaggtgcagttggaaacctgacctggggatggctactccgctgttgcactgtacatccctgtggaggcctcaacagaaggagaggggcaytgctgccctggtttcgtctcatgggcacaccctgacttgttctgccttttggccttgccatgtacgtatcttgtctcctggctgatggcagcttccatgt

SEQ ID NO: 457517 - DNA, 201 bp, Homo sapiens
gggaggctgaggcaggagaatcgcttgaacccgggaagcagaggttgcagtgagctgagatcgcgtcattgcactccagcctgggccacaagagcaaaacyccatctcaaaagaaaaaaaaagggcatagaaagttgactgcgcacacagtgcaggcacagtttaccagatggtgggctggggtgggccaggagaagctct

SEQ ID NO: 457518 - DNA, 201 bp, Homo sapiens
caggatggcatggctgtgggccctgatggacactggctccgcctgtgtgtgctcatgcagaggttactcacacacactcgatgtgacactctgtgctcacstggatgagaaccagacctgcgtgatggagagaaggacacttggaagtgtccactttctcatgaaatttcatgccactttctcatgaaattctaaccacca

SEQ ID NO: 457519 - DNA, 201 bp, Homo sapiens
tccccactctccagggtgttctcttcattcatagcgggagagctgggtggacagcatgtcctgttcacagtgtcaggaggggaagagatagaaagtccacrtgagggattgccttttaagcagtaacaccaaaaattgtgcatattttggttctgccctagtcacatcaacaaaaactgacatgagcacacctagtgagag

SEQ ID NO: 457520 - DNA, 201 bp, Homo sapiens
ttcagcagggccaatatgtgaacactatctaaattaaatgttattacaaaaatgaagtagtaatgagattctggctaaagagtgcactaaatgagaataakatatatttaaagaatccaaaacaaacaaaaagaagttgttataaaaaagctctaggtgcactgtaagcatatagggttttttttccatgtgtatttttaa

SEQ ID NO: 457521 - DNA, 201 bp, Homo sapiens
attgtcttgcccaagggagttggtgctggcatcgcctgggaacaatgatgaatggcctgggatatcatgtggcagcaacgacttctttaacctggtgcttscaaagacagcaagaactgaggtcacctttcagggcttagctacacctgtgtctgattccaaggactctacccacagaaatctggtaaagagccgtgtttc

SEQ ID NO: 457522 - DNA, 201 bp, Homo sapiens
cagcacttcccaccaccccagtttccagggggagctctgtggctctccctaacctgctgagtaagaggcaaggctgaagccaggccccagccccttggttstgggccagcctcactgaaagctctggccacagcactggaagagactctttatattgtacccacctttcccctgatcgggaggagggagggcattttataa

SEQ ID NO: 457523 - DNA, 201 bp, Homo sapiens
ttggacaaaaatgcatgatctaaacccagcaaggcctttctgctcagaattttcttggcctctctgtagcattccttcctccagggtatggggcaagactytctctctgtgataaaggtcttttgacctacatcagattacagtcctgccttgagcaggtgagaaaggacaggagaaggtcagagagagtgattctgtttc

SEQ ID NO: 457524 - DNA, 201 bp, Homo sapiens
cagaaatgcaatatatgattacagctaaatgcagaatggtgacttttttctcttcaagaggccgtgattcccatttctagtaaaattaagagactgcatawaggtagaaacaggttggtcattagcttcacaattttgcctagaaatgatctataaatgcattttccccctgctacttaccataaagtgtaaaaaggagtt

SEQ ID NO: 457525 - DNA, 201 bp, Homo sapiens
tttctgaaaatcaccctgtcttgatgatttggtttggatgttcgtcccctccaaatctcatgtcaaaatgtaattcccaatgttggaggtagggcctggtragaagtgatgggatcatgggagtggatcccccctgaatggtttagcaccatccctttggtagcaagtgagttctcacgctgagttcatgtgagatctggc

SEQ ID NO: 457526 - DNA, 201 bp, Homo sapiens
attatttgtgtgtctatctgcctcctcctgctggactctgagccccttgacagtggggcctgtaattctctctgtacccctggtgtctacaagacccagcwcttagtccatgaaatatatttgctgattgaatgaattacaaaattatagctcagaaaggcaaagtggctatgttggggtcccacagtgcataactggtga

SEQ ID NO: 457527 - DNA, 201 bp, Homo sapiens
agcggggaggaatgacctccctggacagagggagacttgagaaagcagtggaaggtggggagagcgatgtcaaggaggcaccttgttttttttgtttgttygtttttgtttgagacagagcctcattctttcacccaggctggagtgcaatggtgcaatctctgctcactcaacctttgcctcccgggctcaagcaattct

SEQ ID NO: 457528 - DNA, 201 bp, Homo sapiens
taatcttagcactttgggaggccaaggcaggtggctgggaggtggaggttgtagcgagccaagatcacgccactgcactccagcttgggcaacattgagcrttgagtgagcgagactccatctgcaatcccagcaccttgggaggccgaggcgggcagatcacccgaggccaggagctggacaccagcccggtcaacacag

SEQ ID NO: 457529 - DNA, 201 bp, Homo sapiens
ttcacagaaaagtcaggactaaattttggggtcctgaacccctcagttcagacttcccatttctccttcttttcttctctagcttcctggaattgcatagsaactacctgcatatagcctaagaggtttgaaattcccaccagactggttctaaagggggtaaattgtgagccctgacattggttgtgtgccttatagatt

SEQ ID NO: 457530 - DNA, 201 bp, Homo sapiens
gtagactccacccttttttttttttttcttcccctgagacagtgtcttgctccgtcaccaaggctggagtgcagtggtacaatcatggctcactgtaacckcaatctactgggctcacgcgattcttgtgcctcagcctcctgattagctgggactacaggtgtgtaccaccatgcctggctaaattttaaaaatgtttat

SEQ ID NO: 457531 - DNA, 201 bp, Homo sapiens
ggcggccgggcagaggcgccccccacctcccagacggggcggctgggcagaggcactcctcacttcccagatgggggcggccaggcagaggcgctcctcarttcccatttggggcagccggccagaggcgctcctcacttcctcccagacagggcagcagggcagaggcgctcctcacttcccagagggggcggccaggca

SEQ ID NO: 457532 - DNA, 201 bp, Homo sapiens
ttcaaaaggtagaaagtagactccacccttttttttttttttcttcccctgagacagtgtcttgctccgtcaccaaggctggagtgcagtggtacaatcayggctcactgtaaccgcaatctactgggctcacgcgattcttgtgcctcagcctcctgattagctgggactacaggtgtgtaccaccatgcctggctaaat

SEQ ID NO: 457533 - DNA, 201 bp, Homo sapiens
acaatttaccatgaaggaagtactacttattagcactaagcagttgaggcacaaacaggtgcaaacttgcacaagctcacctagttcatagatgacagaaytgggattgagaggcaggcagccaggctctggagtcacattctggactgtggcttttgttctgggagcaatgaccctccctcccacacagagctgtttaga

SEQ ID NO: 457534 - DNA, 201 bp, Homo sapiens
ctctttgctttataaattaccctgtctcaggtggttctttatagcagtgtgagaatggaccaatataactggcaatgcctgaatttcagccttctggcctycagaactgtgagagaataaactgctgttgttttaagccacccagtgtgtgggaacttgttggcagccccacaaatctaatacaatcatccagcaggtaga

SEQ ID NO: 457535 - DNA, 201 bp, Homo sapiens
cctcaacttcctgggctcaagcaatcctcccacctcagcctcccaagtaactgggactacaggcatgcaccaccatactcagcctatatatatatatatawttgtagagacagggtttctccacgtttcccagactggtcttgaactcctgagctcaagtgattctcctgccttggcctcctaatgtgctgggattacagg

SEQ ID NO: 457536 - DNA, 201 bp, Homo sapiens
aaaacttccaaaaatccttttgttttgttttactaagagcggaacttcaagaatggactttgagtcttgtccctttgacttaccagctatatgtgttgagraaatttcatctataaaatttagataatagtgcatacctcatagggtagttgtgagaataaaataatatataaaaatagcaacacacataatgggacctca

SEQ ID NO: 457537 - DNA, 201 bp, Homo sapiens
ctggcatggatcctggcccagcctcggctcggctctgcagtcagcattgtgggcacagatgtgtctgggcccagtgtatggacagaatagctctgccagcyaccgccgcgattctggaacatcttgtgtggaaaggtgtgttggattcacgagagattgcagttgatttcatcttccttgttggcttcccttatgtctgtg

SEQ ID NO: 457538 - DNA, 201 bp, Homo sapiens
accaccattctactctctgtctctataaatgtgactaacctgagtatctcatatgaatagagtcatacaatatttgtccttttgtgtctgccttatttcaygtagcatgatgtcttcaaggctcatccatgttgtagcatgtgtcagaattttattccttttgaaggctgaatagtatttcactgtctgtatacaccacaa

SEQ ID NO: 457539 - DNA, 201 bp, Homo sapiens
aaatgacagtgtagaactgacagctagaaaggagacaaaaagccatgaaaagtggatccaaagtctaagtacaactgtctggggccatctggtgtttgggrcagtcttctctaagcccaagaacatagcccagaacagtgacttatgttcagaatgaaactatgggttaccaagaggagaagagaatgagaaggggcagct

SEQ ID NO: 457540 - DNA, 201 bp, Homo sapiens
aggggcctgtggaccacatgggctgcctggatggacacctgtgtcctgtgcttccatctcacactgttcaccctcattctggtcacagaactgatcattgyctgtctgtgtgccggtcccctcttgtctgtgacctcctcaaaggccatggccatctgtgtgtccccagcacccaccaccagtgcctggctcaaagtaagt

SEQ ID NO: 457541 - DNA, 201 bp, Homo sapiens
gaggtcacaagcaagtcagtgatagagcaggacctggaagctggatcccctaaccccagcctagttcttgctactaaaacccaaaatccagtttccattgytatatgtcagagggtgcacagccatggccacaggccagatacagactttaagtttatttggtttgatccttactttcttttttttttaattcaaaatagt

SEQ ID NO: 457542 - DNA, 201 bp, Homo sapiens
ccaaaagtaaactcagtacatacagatggtgtgatcctaggtggagggttgttcattttttcccaagccttcctttcatagcaagccaccatttacacctmcacctgaccattccaaaatggtcttgaaatggagcgacatggcagacagcactcaaggtcactgaatattgaacacccaggtgagccacggaaccacagg

SEQ ID NO: 457543 - DNA, 201 bp, Homo sapiens
gggcagcttatggatggcaatgacaatcttggatgagggcaccaagagcagtcagagcgatggagaagagaaggggaccaaggactcaccctggatcctgygcatgtttggagactggaaaggtgggggaaattgacaaagaagacctagcagaagctcagcaataggaagaaaatcagatgagtttggtgtcttggaaac

SEQ ID NO: 457544 - DNA, 201 bp, Homo sapiens
gtcatttgcaaacagagacaattttatttcttccttcccaatctgtatacttcttatttcctttcttgacttactgcattaactagaacttctagtacaawgttgaataggagtggtgggaggggacatacttgctttgttctcagtcttcaggaaaagcatctagtttttcaccattaagtaggttaatgtatcttttct

SEQ ID NO: 457545 - DNA, 201 bp, Homo sapiens
ttagaatggctattttcaaaaagacaaaaagtaacaaatgttggcaaggatgcagaaaaaagagaattcttatacactgttggtgggaatgtaaattagtrcaacaattatggaaaataatgtgggggtttctcaggaaactaaaaatagaactaccatatgattcagcaatcccactactgggtgtttatccaaaggaaa

SEQ ID NO: 457546 - DNA, 201 bp, Homo sapiens
ggttagatgattggatggacagatcttggattcagagaaaaatatgctcctgtcatcagcttttttagccaaagcaagtccaaggaactttctggtaagcscccagctacccttcactaacactcctccctctccttctcttcagcatccagcgtcggctgtccctccagctccccatcctccaccacgcctacctcccat

SEQ ID NO: 457547 - DNA, 201 bp, Homo sapiens
tttataccttggggtaacatatattgctgggctaaagtgctgaaggatatcctctttgtagcagggacaggagcaggacctagttgttctggccagtccawccttatatcagaatgttacattcccagtatcttcttttgttttttattttttcatttttgagatagtgtcttgctctgtcacccaggttggagtgcagtg

SEQ ID NO: 457548 - DNA, 201 bp, Homo sapiens
agctggtacatatgggccctcattaaatacctgctggattgctgaatggttagatgattggatggacagatcttggattcagagaaaaatatgctcctgtyatcagcttttttagccaaagcaagtccaaggaactttctggtaagcgcccagctacccttcactaacactcctccctctccttctcttcagcatccagcg

SEQ ID NO: 457549 - DNA, 201 bp, Homo sapiens
agttgtactcacagctatgatttattacagcaaaaggatacaaagcagaatccgcaaagggaataggctggtggggagaagtccagaggaaaccaggtgcragcttccaggagtcctctcccggtggagtcacataggacacactcaactcccccagcaaccaatggtaacagcactgtgaagtgtttctaccaggaaagc

SEQ ID NO: 457550 - DNA, 201 bp, Homo sapiens
gaaccccaagggcacacccagttgggataaggctgcccccatgagttgattcgcctccaccacaaaacaatgtggttgaacagaagcagcaagaattccarcttccccagttctggttttgtttccatggggaagttacctgaactctgtactcttccctcttctttataatgggaatagcagtatttcttttgcctattg

SEQ ID NO: 457551 - DNA, 201 bp, Homo sapiens
cacgtggcctgtaggtgggcttggaggctgggttgctgtgtgatgccgcctcctaggtagccaggttcatgctcgctggatgagcttttaggtccaagtgwctgccagccatgtggaagcccgttccagatgcttgatctgctgtgtgcgcacccctggttgggtgctgctgtgacagctgaagacgaaagtcccacccca

SEQ ID NO: 457552 - DNA, 201 bp, Homo sapiens
atattgcaaacagatatcctccctgcctcttctcattgtgcctggtactgccctctgagacagatcatgggggacccctggataggaagtcaaaagagacytaggttctagtccttgaagatgtcacacaaccattctgagcctcgctttctctgtaagtaaaaccacattgctggcattgctcatcactgaaggcctact

SEQ ID NO: 457553 - DNA, 201 bp, Homo sapiens
acagaaaaaaaaaaaaaagatgccgaggttgaacatcttgtatatatctttgcacagatccttaattatttccttaggataatttcgagaagtggaaattscgggtaaaaaataggtccttttatggtgtttgacacagatcagcagtgcccccagtaagattatgtccatttattctcccaccagcagtttactgactat

SEQ ID NO: 457554 - DNA, 201 bp, Homo sapiens
ggcacgatctgagtgacagaaaaaaaaaaaaaagatgccgaggttgaacatcttgtatatatctttgcacagatccttaattatttccttaggataatttygagaagtggaaattccgggtaaaaaataggtccttttatggtgtttgacacagatcagcagtgcccccagtaagattatgtccatttattctcccaccag

SEQ ID NO: 457555 - DNA, 201 bp, Homo sapiens
ttggatcacctgaggtcaggagttcgagaccaccctgaccaatatggtgaaaccccatctctactacaaatacaaaaaattagctgggcatggtggcatgygcctgtagtcctagctgcttggagctgacacaggagaattgcttgaacctgggaggtggaagttgcagtgagccaagataatgccactggtggcacgatc

SEQ ID NO: 457556 - DNA, 201 bp, Homo sapiens
gttctgggatacatgggcagaacatgcaggtttgttacataggtatacacctgccatggtggtttgctgcacccatcaacccgtgatctacattaggtatwtctcctaatgctatccctcctgtagccccccatccccaaaaggccccagtgtgtgatgttcccctccctgtgtccatgtgttctcattgttcaactccca

SEQ ID NO: 457557 - DNA, 201 bp, Homo sapiens
cccttaatgctgcccagagctcttgtctatttcctttctgtttctcattcgttccagataagggtcttctgggtgagttgggggtctcacgactagtactwacgtggcttgtgatccctgtgagccacaactattaccacgggacattcatgaggtcacatgttgcccccaagccagggcttttttccttctgcattactt

SEQ ID NO: 457558 - DNA, 201 bp, Homo sapiens
tatttttattgaaggagagcacccatgtaactaccacccaggtcaagaaaaaaactatttgtagcaattcagaaactgcctttatgtgttacagttaatayccactgccagatgtaaccattcttctgacttcctttgccattcagatgcctgcttttgaacttttgaactccacagctttttttagtatcttcagattta

SEQ ID NO: 457559 - DNA, 201 bp, Homo sapiens
aaataactcctggggtcctcagctttttctgcccttcatctacatgagatgtgagtttctttatatgctactaagaagtgtcttcgattttcacactcctstgaaattggtgattaatcattctcagcctctcttcatctttccccagcacattgattgtacccagcaacagccatctgattccaagttccttatgatcat

SEQ ID NO: 457560 - DNA, 201 bp, Homo sapiens
tggctggatttctagtagccattttggaccattaggtacaaggtgaccttgacaaggaagcatcattctaggattgtggagcataaagataggaccctggrtcccttattaccctggggagctgtcatagctgtattactcagcctccccacagacatcttttatatgagaaagaaataacctatctcatttaagtcactg

SEQ ID NO: 457561 - DNA, 201 bp, Homo sapiens
tgacctacatcagattacagtcctgccttgagcaggtgagaaaggacaggagaaggtcagagagagtgattctgtttcatgaggcccgctcctgaggcctraaatgccccaacattataacaaaagactcttacaagagatatagcagccaggaatcatggatgaaagccattctattatacagatatggtaatatcacag

SEQ ID NO: 457562 - DNA, 201 bp, Homo sapiens
accagagttcataacgcaactctggtttttaaccgggtatgttgccacctcactggaaaatgtattatacacttcccagccttccatgctagatatggccrggattgcaagtctggccaatgagatataagtagaagtgttatgtgggacttctagaaaggctctattaaagggggatatggcctttctttttcattctct

SEQ ID NO: 457563 - DNA, 201 bp, Homo sapiens
tctacagaaaaagaaattgagactgggttctcacaagccagaagaacatcactgcaagtaaggggcagccttgggtttgcataaggcctgtccagagcctkagctcgtatgctctccctgcccttcctccctgagcttgcttgtctgcttcatcaaggcccaagcctacactgaacacataattgcaaagcccaggtccct

SEQ ID NO: 457564 - DNA, 201 bp, Homo sapiens
gaggaaggaaaggtgctgcggaaaaatagaactccccagagagcccagcttcacagcgctgctctctcccctaccccccacaaagctcccattccttgctrctcccattccttgctactcccctaggcactcatgacactgggagaaggcactatgtcagaggggcatgggctcagaaggaaaaggctgactggcccatgg

SEQ ID NO: 457565 - DNA, 201 bp, Homo sapiens
cccctctgattctcagggcactcctgaatacaggtaaaggcccagccctgtgagctaccttttggccctagtggcctagctgccagggctgggccagggasctgactcaactggaacctttgtcttgtagctggataaagacttggaagaggtcaccatgcagctgcaggacacaccagaaaagaccacctacattaaaca

SEQ ID NO: 457566 - DNA, 201 bp, Homo sapiens
agatatatccacattgtaacccttggaacttgggagtgtgaccttgtttggaaaaggggggttttgcaggtgtaattaacttaaggctctcaggataagayttcctggattacccaggtaggccctaaaccaacgacaggtgtcctgtatgagagaaaggcagagggagagtttaggagagaggcatggagtggagggatc

SEQ ID NO: 457567 - DNA, 201 bp, Homo sapiens
aatacaggtaaaggcccagccctgtgagctaccttttggccctagtggcctagctgccagggctgggccagggacctgactcaactggaacctttgtcttstagctggataaagacttggaagaggtcaccatgcagctgcaggacacaccagaaaagaccacctacattaaacagaaccactaccaagagctcaatgaca

SEQ ID NO: 457568 - DNA, 201 bp, Homo sapiens
tgcacctgaaagtagtgctttattcacctagtacagccctgcacaggttgtatttatcaaacccctccccatgctcagcctgttcctttgttgcacttgcytttgttgaacattctctctagagggtgtggggcccagagttgaataaagtattcctatttatggtctgaccacaagccaacttctccgaacagccttcag

SEQ ID NO: 457569 - DNA, 201 bp, Homo sapiens
atcctccgacctcagcctcccaagtagttgggattgattacaggcatgggccaccacccccagctaatttttgtattttttgtagagacagggttttaccrtgttgcccaggctggtcttgaactcctgcattcaagcaatcaaactgcctcggcctcccaaagtgctgggattacaggcatgagccaccgcgccccgcct

SEQ ID NO: 457570 - DNA, 201 bp, Homo sapiens
ctaagcctgaaatttaaaagggtgccagatacatcggtaatcaagattaaacaaaatatgttaatgcaattaaaataatgccaaaaaaaaaaccccatgawgaacaaattgtcaaaattttaaataaagaccagattcacaggacagggattagggtgaggaaagtgaggtgagtcatgccagtgcaaggttggattctat

SEQ ID NO: 457571 - DNA, 201 bp, Homo sapiens
tatctgtccctgtgtgtttatgctctaagttgaagctaacagtctctattccagtaggaaagatgctgggtcacagctgtgaggctcatcagtaaaaagcrttgtctcttttgtgtttttcagctttcttttgctgcaaccacgcctgttctagccgataagaaaaaatacccttatttctttcggaccgtcccatcagac

SEQ ID NO: 457572 - DNA, 201 bp, Homo sapiens
tggctttgaaaatggaggaaggggccatgagccaaggattacaggtggcctctagaaggtaggaaatgcgagagaatgggttcttccttagtggctgtagraggaatgctgccctgctgacaactggattttagcccagtgagatccattttggattctggccttcaaaactgtaagacaattatgcgtttttgtatgttt

SEQ ID NO: 457573 - DNA, 201 bp, Homo sapiens
ctcagatcttccagtagcaaaggaattctctcctttaattctgccacccctaggtcccactggagctactcagatcctattgacccatctgtcccacatartccttcagtgaccacagagtcactgcttctccaaactaaacagcgctagtccttccaattgttagctcacaggtccagggctgggactaagcctgaaatt

SEQ ID NO: 457574 - DNA, 201 bp, Homo sapiens
tgaggcgggagaattgcttgaacccaggaggtgggggttgcagtgagctgagatcacgccactgcactccagcctgggtgacagagtgagactccatctcmaaaaaaaaaaaaaaaaaaaaaaaagaaaggaaagaaaaataaaatgcaatgtctgtgtcaatcctggtagcccctttgtgaagaaatgacctgtctccaa

SEQ ID NO: 457575 - DNA, 201 bp, Homo sapiens
ataatgacaaattagaaataatcgaaataaccccaaattagaaacgattcagtaaatttatggtatattcatatgctggaatattgtgcagctattataargtttacgaagagtttttaaggataccgttaaatggggaaaaacagttcaattgtgcatgtagaatgatttcaggatcttttttaaaaaattcaatcactg

SEQ ID NO: 457576 - DNA, 201 bp, Homo sapiens
ctaactgtttccaaacgttcctcccctcaagaattccttggctctactatagacccaccaaaccagagtcttccaaggagggcccgggactctgcatttakgggcaattcggagtgaggtatttggagacattttagtgtgggttgggagattggcccaaaggaacatctgcttctgagatgctttgcttcccaaattctt

SEQ ID NO: 457577 - DNA, 201 bp, Homo sapiens
cagagaaaaatatgctcctgtcatcagcttttttagccaaagcaagtccaaggaactttctggtaagcgcccagctacccttcactaacactcctccctcyccttctcttcagcatccagcgtcggctgtccctccagctccccatcctccaccacgcctacctcccatccatcggaggcgtggacgccagctgtgtcagc

SEQ ID NO: 457578 - DNA, 201 bp, Homo sapiens
cccagatcatgctgctgcattccagcctgggtgaaagagtgagactttgtctcaaaaaaaaattaattaattaaaaaaaaaaggagcagggggcggggaakgggggggggcagtggttcctagtcttaatcaccctttgttaattgccttgctcagttaatacattctggtctcctaaccgaggggaaaatatccaagcca

SEQ ID NO: 457579 - DNA, 201 bp, Homo sapiens
tgattatgactggtcagtgatcatgtgtctatgtttgccagtggtcagggctgcaagtgtgtttgggtggcgtctgcaccacaactatctgtgtagacacyatctttccctgctgtgtgttgggcaatgtgaagatccggatgggtcatcgctccgctttccaggtgacagtgcagtgagggagagacaacaggtggcact

SEQ ID NO: 457580 - DNA, 201 bp, Homo sapiens
ctctactaaaaatacaaaaattagctgggtgtggtggcgggcacctgtaatctcagctatttgggaggctgaggcaggagaatcgcttgaagctgagaggyggagattgcagtgagcccagatcatgctgctgcattccagcctgggtgaaagagtgagactttgtctcaaaaaaaaattaattaattaaaaaaaaaagga

SEQ ID NO: 457581 - DNA, 201 bp, Homo sapiens
ctggtgcattttgcatgcacccctgccagttgcagtagcctgtaggagagccatattcgtctcctccagcgaattactatctcccagatttgcagggaccrcagcccttcctttctctgatcccctcgtacttcacctggccctttatgcctggtagaagctcaataatccctgataacctctagtgaatgttgttggatt

SEQ ID NO: 457582 - DNA, 201 bp, Homo sapiens
aggttttaaaatgagttttgaaactagtgacatataaattaaatgttgaagtacttgcccacttattactgaaaatatcagctcaactgttgtttttttttcctttttataataagacagcaacacaaggctgggattagcctgtcagatgtgaggcctgtcagatgtgactgcagcaccttccatttagttctgctccat

SEQ ID NO: 457583 - DNA, 201 bp, Homo sapiens
atcttttttggaggtcacatttcaagccactggctctgcactgtgaacatgcatgggtcacacacgcacatgcacacacacacacacacacacacacacacacacacctggatacagctggatatatacccacaggcattccccaagtacagctattccccttgtgcagcagatctaatacatattcagttacacacttgc

SEQ ID NO: 457584 - DNA, 201 bp, Homo sapiens
tgggcttgagtccctgttctgctacttattattgaagttgggtatgttgtttacactctctgagccccagtttctcatctgtaaaatggggattgtaacayctgtctgataagattgttgagcaaaaaccctctgcatagtacctcatgtacagtgaaccctcagcagataccagccatctttttttggttgtttatatag

SEQ ID NO: 457585 - DNA, 201 bp, Homo sapiens
tgactatcgagtgtaaattaaaatacacacacataaaatgtaaaggcaaactgagatatttgcagcaactataatagcctgagtttgaacgctatatatawaaaatatcttcattaaattcaatctgaaaagcattagaataccactcaaaaaataaacaaaggacatgaaaaagtaactcctaaaataggatatgctact

SEQ ID NO: 457586 - DNA, 201 bp, Homo sapiens
ttcgagaccagcctggccaaatggcgaaagcccatctctactaaaaacacaaaaagaattatctgggtgtaatggcgcatgcctgtagtcccagctactcmggaggctgaagcaggagaattgcttgaacccaggaggaggaggttgcagtgagctgagattgtgccattgcactccagcctaggcaacagagcgagactc

SEQ ID NO: 457587 - DNA, 201 bp, Homo sapiens
tatcttttttggaggtcacatttcaagccactggctctgcactgtgaacatgcatgggtcacacacgcacatgcacacacacacacacacacacacacacacacacacctggatacagctggatatatacccacaggcattccccaagtacagctattccccttgtgcagcagatctaatacatattcagttacacacttg

SEQ ID NO: 457588 - DNA, 201 bp, Homo sapiens
gagtggatcacttgaggtcaggagttcgagaccagcctggccaaatggcgaaagcccatctctactaaaaacacaaaaagaattatctgggtgtaatggcrcatgcctgtagtcccagctactcaggaggctgaagcaggagaattgcttgaacccaggaggaggaggttgcagtgagctgagattgtgccattgcactcc

SEQ ID NO: 457589 - DNA, 201 bp, Homo sapiens
ctatcttttttggaggtcacatttcaagccactggctctgcactgtgaacatgcatgggtcacacacgcacatgcacacacacacacacacacacacacacacacacacctggatacagctggatatatacccacaggcattccccaagtacagctattccccttgtgcagcagatctaatacatattcagttacacactt

SEQ ID NO: 457590 - DNA, 201 bp, Homo sapiens
gtgcagtggctcactcttgtaatcctagcactatgggaggcggaggtgagtggatcacttgaggtcaggagttcgagaccagcctggccaaatggcgaaascccatctctactaaaaacacaaaaagaattatctgggtgtaatggcgcatgcctgtagtcccagctactcaggaggctgaagcaggagaattgcttgaac

SEQ ID NO: 457591 - DNA, 201 bp, Homo sapiens
cctatcttttttggaggtcacatttcaagccactggctctgcactgtgaacatgcatgggtcacacacgcacatgcacacacacacacacacacacacacacacacacacctggatacagctggatatatacccacaggcattccccaagtacagctattccccttgtgcagcagatctaatacatattcagttacacact

SEQ ID NO: 457592 - DNA, 201 bp, Homo sapiens
ggcgcaaagggcccacggtgtaggcttaataatgcctcgcctcaagatgtccacatcctcattcttggatcctgtgaatgttgccttccatggcaaaaggragtttgaagatgtaatgagttaagaatcttgtggctgggtgcagtggctcactcttgtaatcctagcactatgggaggcggaggtgagtggatcacttga

SEQ ID NO: 457593 - DNA, 201 bp, Homo sapiens
agttgtcagggttagaacttagacctatcttttttggaggtcacatttcaagccactggctctgcactgtgaacatgcatgggtcacacacgcacatgcayacacacacacacacacacacacacacacacacctggatacagctggatatatacccacaggcattccccaagtacagctattccccttgtgcagcagatc

SEQ ID NO: 457594 - DNA, 201 bp, Homo sapiens
tagcaatgagcgagacttcatgggcgtaggaccctccgagccatgcgcgggatataatctcctggtgcgccgttttttaagcccgttggaaaagcgcagtrttagggtgggagtgacccaattttccaggtgccgtctgttacccctttctttgactaggaaagggaattccctgactccttgcgcttccctggtgaggcg

SEQ ID NO: 457595 - DNA, 201 bp, Homo sapiens
ctatttgagatctgaatgtgaaattcagcacagagatagatatcattaagaaaggaaccagacagaaatcctagaactgaagaattcaatgaatgaaattwaaaaacacaattgagagcttcaaaaatagactagatcaagcaaaagaaagaatttctaaatttgaataaagccatttcccagataagcaaaaacaggaaa

SEQ ID NO: 457596 - DNA, 201 bp, Homo sapiens
ccttgcagcttgatctcggactgctgtgctagcaatgagcgagacttcatgggcgtaggaccctccgagccatgcgcgggatataatctcctggtgcgccrttttttaagcccgttggaaaagcgcagtattagggtgggagtgacccaattttccaggtgccgtctgttacccctttctttgactaggaaagggaattcc

SEQ ID NO: 457597 - DNA, 201 bp, Homo sapiens
gccttcccagccctccagcaccacccacccaaccattatcactacctggtggccttaggactgaccagccacctcttctgccaccagaggtggctatgcawgctgcctaagggcccaaggaccattccacctaggcccaccattgacacttctgatgtccacacacaatacctggggacctgaggactggcacacccagta

SEQ ID NO: 457598 - DNA, 201 bp, Homo sapiens
tgacagctggtatcatgcgttaactcatttaatcctcacagcaattctgggaggtagatgctgtccttaacctcattttactgatgaggaaacagaaaccyagagaggctgtgtaacttacccaaggttacctagcaggttagtgacaataccactaactaccctctcacctactgcctaaccctgcctttcaacacctgg

SEQ ID NO: 457599 - DNA, 201 bp, Homo sapiens
atgaaaacatgaaagtactagaagaaaccaaagtaaaatttttaaaaaataatctcagagagtggaggacctgtctcagtttgatgcaaaacagaaatcayaaaaggaaaggttgataaatttaggtacaaaaagaatttctttcataatgcaaaagccatgataagtacagtcaaaaaaatcaaacaaagccaaaaatta

SEQ ID NO: 457600 - DNA, 201 bp, Homo sapiens
ccctgcccagcaccagaatttagaaatccagacaggatgtcaacaccaggaagagctatcattggctaactgggcccctgagctagggagagactgtggcrgtgataataaaaagcaacgatgataagagcgatgatgatgatgacagctggtatcatgcgttaactcatttaatcctcacagcaattctgggaggtagat

SEQ ID NO: 457601 - DNA, 201 bp, Homo sapiens
ttgatcctactcctgccatttaagtcacatagaaaagagtatctctttccctcctcctccacatgaaaacgtgttaaacaatttcatggctgtgttcctgwcatcagaacagcctctgatagtttatcaggtctcctcccttatactacagcaggatgctgtttggaaaaatcctctaaccatgtttttcctgtgctcttg

SEQ ID NO: 457602 - DNA, 201 bp, Homo sapiens
tcactgctttgttagagagatcttttgtgggaatttagtgtgaattcttacactaaaccagaaatggtcattctatgcactgagggcagagccttttatcyttctagacaagaaggttttatagaaaataagatgctcagcctcatttatctcgagacagtgtttactcagcttggtaagaagttatgcatgcattcagag

SEQ ID NO: 457603 - DNA, 201 bp, Homo sapiens
gacgctgtagttttgttgactttcatttagaatagttagactgtctttgcgggctacagctgagctgcagtggggtgtgctatttggtaggatttcggtasagtgtaacaaactctaagaaaataagaatctctgtttctctcactgctttgttagagagatcttttgtgggaatttagtgtgaattcttacactaaacca

SEQ ID NO: 457604 - DNA, 201 bp, Homo sapiens
ttccaggcatgccttggcttgtgaccgcatgactctagtttctgcctctgtctccacatggccttctcttcttctccccaagggtctcctttgtgtgtccyttataaggacacttatcattggatttggggtccttccagataatccaggatgatctcatctcaagatccttcattatatctgcaaataccctttttccaa

SEQ ID NO: 457605 - DNA, 201 bp, Homo sapiens
agggaggccaaatataaggtgttgtgaaagaagttgattttaatattaatacacgcagaatgaatgggaaatgttgggctttttaagagtatattcttatrcattgtagaagccttcatttataagatccatcacttgagaaatgacattgcatatttatcccaattttaaagtaaatctcctaaaaagtgctactagtgt

SEQ ID NO: 457606 - DNA, 201 bp, Homo sapiens
ctctgaaggctccaggagagaatccgtccttgcctcttccggcacctgatggttccaggcatgccttggcttgtgaccgcatgactctagtttctgcctcygtctccacatggccttctcttcttctccccaagggtctcctttgtgtgtcctttataaggacacttatcattggatttggggtccttccagataatccag

SEQ ID NO: 457607 - DNA, 201 bp, Homo sapiens
ggggaatcgcaggagactctccggctggggggttcatgatgcaggttccccctatgacctgggcccccagttgctgcgtgggaagctgtctctcacatcgrctcccctctgctccttcccgctctgtagatcatcaaggaccagaaactgcttgtgatcgtggggggcatgctgctgatcgacctgtgtatcctgatctgc

SEQ ID NO: 457608 - DNA, 201 bp, Homo sapiens
acgatgaatcatattgacatctttaaactggatttatttgtaatgttttgatcattcattgtcttctcccacctacttccaaagtggttggagatgagaartgactgtatgtcttcccgtgaagctaacagcttcagccagctcatgtcaacaaaagctatatttaatagcacaaatgcttcaccatttagaacatgcaag

SEQ ID NO: 457609 - DNA, 201 bp, Homo sapiens
agtgatctccagaccttgtaggttttatctgctagttctccaactctctgctttttaccatctctttgatcatagtccaagctaccatcatctcgagacaacagcggtggcctcttaaccacaacctcatggacttcttgctgtcctcaaattctttatccagagtgaactgttcaaaagtctgattgtattgggccccca

SEQ ID NO: 457610 - DNA, 201 bp, Homo sapiens
atgttccttgattctgagactcattccgtgaaaatagattacgatgaatcatattgacatctttaaactggatttatttgtaatgttttgatcattcattrtcttctcccacctacttccaaagtggttggagatgagaaatgactgtatgtcttcccgtgaagctaacagcttcagccagctcatgtcaacaaaagctat

SEQ ID NO: 457611 - DNA, 201 bp, Homo sapiens
gaatagagagaatctagactgtctccgtgatccttccatccttaatgttccttgattctgagactcattccgtgaaaatagattacgatgaatcatattgrcatctttaaactggatttatttgtaatgttttgatcattcattgtcttctcccacctacttccaaagtggttggagatgagaaatgactgtatgtcttcc

SEQ ID NO: 457612 - DNA, 201 bp, Homo sapiens
tccatgtaaagatggattcttgtaacaggcagccctgtccatagatgccatggagcccctaagaaggacaagctccctgtcatgggaaagcatgtcatgtyaatgacctgtgcctccctgaccctggttgaatagagagaatctagactgtctccgtgatccttccatccttaatgttccttgattctgagactcattccg

SEQ ID NO: 457613 - DNA, 201 bp, Homo sapiens
cgtgcagcgtggctgggcgcctggtgcgcgccagcagctctgagcccgctccgcgcgggcaggtgtggggccaccggctctgcagcgcttctgcctggacrtgcccggcgctgcctgtggccagagcgatttcaggagacccctgcctcgggttagttgctcagaaagtgccctggcagttctcgtcccggacgtgcagtg

SEQ ID NO: 457614 - DNA, 201 bp, Homo sapiens
cacagcattccagcctgagtgacagagacagaccctgtctcaagaaaaaagaaaacaaaaatcaaggtgaccaagtaaattagaaatgcattcattcggtyggtccacaaccgttgattgagtagcccctgtataccaggcactgtagaaagccctggggctccaggagagaactggcatggccccaccctcccaaaactc

SEQ ID NO: 457615 - DNA, 201 bp, Homo sapiens
tgcctcgcctcaagatgtccacatcctcattcttggatcctgtgaatgttgccttccatggcaaaagggagtttgaagatgtaatgagttaagaatcttgyggctgggtgcagtggctcactcttgtaatcctagcactatgggaggcggaggtgagtggatcacttgaggtcaggagttcgagaccagcctggccaaatg

SEQ ID NO: 457616 - DNA, 201 bp, Homo sapiens
gacttctctgctacagcctctcccaggagcctgcccctgaacttgagcgtccttgtctcagtgaacatttacacattccctgggacagtcagctgatgaawgcctcttgccctcactagacagagatccaggacagtgaacagttttggtctttagaggcccagtcctacctcagacggttcctgaaacagaagagatgtc

SEQ ID NO: 457617 - DNA, 201 bp, Homo sapiens
tataacaatattctgcttctctcttctccctttcttgctttctgtctcatgtcttcctgcctcctttccttctctccattttctcctctgccatagtcagkttctgctcggggtgctaagggccaggagtagaagggcctgaggattaaagatgagatgtacctactagagggggcaggagagagcaggggagcaatcctg

SEQ ID NO: 457618 - DNA, 201 bp, Homo sapiens
atcttacctgttggtgctccagcaccacgggggtgcgcagaacctggtgccccccctctacatgacagctctcctgtgtttgaagtcggctttggtctacrcctctccaggctaattttttaattagcttaaattaatggcagttcctggggagctccagccccagtaaaagtggcctgaattattcaaagatttgagtgt

SEQ ID NO: 457619 - DNA, 201 bp, Homo sapiens
tgccccaattctttgaaagacctcactatctatcaaagccaccttctccgtcattagaaagctatggggttttttggcattgggccaaaatctaatttccygaaccatcttacctgttggtgctccagcaccacgggggtgcgcagaacctggtgccccccctctacatgacagctctcctgtgtttgaagtcggctttgg

SEQ ID NO: 457620 - DNA, 201 bp, Homo sapiens
aatagctgaaaggggactcaacctaagtgttcattgacagatgaaaggataaacaaaatttagtgtacacacacacacacacacacacacacacacacacaaaatggaatataatttatcctgaaagaggaaggaaattcagacatatgctacaacatggatgaggcttgaggacatactgctaagtgtaatacagaagac

SEQ ID NO: 457621 - DNA, 201 bp, Homo sapiens
caatagctgaaaggggactcaacctaagtgttcattgacagatgaaaggataaacaaaatttagtgtacacacacacacacacacacacacacacacacacaaaatggaatataatttatcctgaaagaggaaggaaattcagacatatgctacaacatggatgaggcttgaggacatactgctaagtgtaatacagaaga

SEQ ID NO: 457622 - DNA, 201 bp, Homo sapiens
gaaagatgccaatgaaactcaactatatgcagaggggagtatttgtccccatcataaagagtccccttgcagggtggactcatacctgatgaagtctgtcyacctaaggaaggtcaatgcctctgttttctcatggcctctaggtcaggacctggattctcaccgtgggctacacgaccgcttttggggccatgtttgcaa

SEQ ID NO: 457623 - DNA, 201 bp, Homo sapiens
gttggcatttcaagatgtatgggatctcagggtgaaagcttattgtatcagtttcctgttctgctgcaacaaatcatcataaatttagtggctttaaacarcacaaattattatcttatagttctgaagatcagaagttcaaaatcattgggtcaatatcaaggtgttcttgattttgactggttccttctggaggcttta

SEQ ID NO: 457624 - DNA, 201 bp, Homo sapiens
tccaatttctctatgtcctcatcaacacttgttattttctggacttttttggtagtggccattataatggatgttacatagtatttgggttttttttttttgaggtgacgaaaatgttctataattgactgtggtgattgtgcatatgtgtgaatacactggaaagcattgaattgtacactttgaaggggtaatttgtat

SEQ ID NO: 457625 - DNA, 201 bp, Homo sapiens
ttggggatgcccaacaggaaatttttgtgcattatccaagaaaggtgcttggacctggtcctgcttcctcaggcagcccctgtgctaggcatctggagggscaagaggtgtcccagatggaaggtgtgtgagatatcaggacattcattctgtttagccgagaagagggatcttgagcccaggactgtggagttcagagga

SEQ ID NO: 457626 - DNA, 201 bp, Homo sapiens
attttataaaaaataatttttaggttgtaattattcatttagttgtcatggtaaaatattttatagtagtcttaattatgtcttcacaaatatttttttaattttttttttattatactttaagttttagggtacatgtgcacattgtgcaggttagttacatatgtatacatgtgccatgctggtacgctgcaccaactc

SEQ ID NO: 457627 - DNA, 201 bp, Homo sapiens
tgagctgattttataaaaaataatttttaggttgtaattattcatttagttgtcatggtaaaatattttatagtagtcttaattatgtcttcacaaatatytttttaattttttttttattatactttaagttttagggtacatgtgcacattgtgcaggttagttacatatgtatacatgtgccatgctggtacgctgca

SEQ ID NO: 457628 - DNA, 201 bp, Homo sapiens
gaaagtcctgcaaatactccatggctttataaataacccacttatatctccttttggttacagtaatggtttgatttttaaatatttaactctttttttttattgttttcttgaatttatttgatcaaaaagaggaattggtgacataaggagatggaaaaatatgagctgattttataaaaaataatttttaggttgtaa

SEQ ID NO: 457629 - DNA, 201 bp, Homo sapiens
ttaagtggcttcccaaaattccactaggccataatttatttagatttttttttttttttttttttgagattgagtctcgctctgtcgcccaggctggagtkcagtggcgagatcttggctcactgcaagctccgcctcctgggttcatgtcattctcctgcctcagcctcccgagtagctgggactacaggcgcccgccac

SEQ ID NO: 457630 - DNA, 201 bp, Homo sapiens
tggctctgccagagtctctacttcatatttttaagtggcttcccaaaattccactaggccataatttatttagatttttttttttttttttttttgagatkgagtctcgctctgtcgcccaggctggagtgcagtggcgagatcttggctcactgcaagctccgcctcctgggttcatgtcattctcctgcctcagcctcc

SEQ ID NO: 457631 - DNA, 201 bp, Homo sapiens
gccctgattcttcctggtaggaaattgtgttaagaaaccaacatttgggtactaggtatacttgttgctactggggttcattccttcacggttttttttttcagtggaatgagcttgaaaatataatttttaatatctttaaagtgtttaaactgtaatctatgaggagataatcagacaaatatgggtcattctataatt

SEQ ID NO: 457632 - DNA, 201 bp, Homo sapiens
gctctgagcttcctggcagtcaaggtaaaaaggtaaatgtaccatattacttaatgtttgatctaaaaaatctgagagacaatgactttttttttttttttgaaagagttgggggtctcattctcttgctcaagccagactgcagtggtacatcatagctcactgcagccttgaactcctgggctcaagtgatcttcctgt

SEQ ID NO: 457633 - DNA, 201 bp, Homo sapiens
caccaccatgcctggctaatttttgtatttttagtagagacagggtttcactatgttgtccaggctggtcttcaactcctgacctcaggtaatccacctgycttggcctcccaaagtgctgggattacaggtgtgagccactgaacccagccttcttggtggattctttagaattttctacccataagattatataatttg

SEQ ID NO: 457634 - DNA, 201 bp, Homo sapiens
ttttaagtagctactgcataccaggccccggtaggtgctgagggaacacaaataaaatgggctttctttctgtctaggcctccccagtttactgaggaggraagacatgtatacaactttatatagcttctgattgttgctgtaaatgtttgaggatgtgaattctggagaaaacagatctcggtccaaatccaggcttca

SEQ ID NO: 457635 - DNA, 201 bp, Homo sapiens
gggtgagagttaagctgggtttctgcaaagcaccagcagttcaccatatccttgaaaatctcagagcgggctttgccggtgccctgcccccaggtacagcrgttttgctggatttaatctccttggcagtcactgagcccacactttcctcgtgttctttttacattcggtaacataaaggcccctcgggtttttatttct

SEQ ID NO: 457636 - DNA, 201 bp, Homo sapiens
tatctcagacttccggatccctaaatacttccctgatgtggtaggcacctgaatctttggagggtttgtctagttccctctgggtacatgtatctgactcrgtgtccagcatacttgcctctcttgctcagctgacccagtgaacgagattggtcttttgagataaaagaccaatatggtgtcctgcacaatgtccagagg

SEQ ID NO: 457637 - DNA, 201 bp, Homo sapiens
tgaggctccttccaacccatcccctaactgctaagctccttaggcattttgccccagtttctcaagactggcagggagttgcctagttccccagagggtgmgagttaagctgggtttctgcaaagcaccagcagttcaccatatccttgaaaatctcagagcgggctttgccggtgccctgcccccaggtacagcggtttt

SEQ ID NO: 457638 - DNA, 201 bp, Homo sapiens
ctttcagagatgagaaaaacagacatctaaaaggggggaaatgacttacccttgttctctcagtcacagggacagggttaagcctaaatgtcccggctccstaaagaggcctcgtagctgcatgagctcaccacttctctctgcattcaggtgctgcttgttaaagtgactcatggttcagtatgcaggccctgaacgctc

SEQ ID NO: 457639 - DNA, 201 bp, Homo sapiens
agcatcacgtagatatgaggctccttccaacccatcccctaactgctaagctccttaggcattttgccccagtttctcaagactggcagggagttgcctakttccccagagggtgagagttaagctgggtttctgcaaagcaccagcagttcaccatatccttgaaaatctcagagcgggctttgccggtgccctgccccc

SEQ ID NO: 457640 - DNA, 201 bp, Homo sapiens
ttgagaggccgaggtgggtgggtcacctgaggtcaggagttcgagaccagcctgaccaacgtggcaaaaccccatctctactaaaaatacaaaattagctrggtgtggttgtgggcgcctgtaatcccaattactttggaggctgaggcaggagaatcgcttgaacccgggaggcagaggttgcggtgggccgagatcagg

SEQ ID NO: 457641 - DNA, 201 bp, Homo sapiens
atgaaaccttctcgtttacttggcatcatagagccacatagaagggaggcacctgggatgtcattaaatgaaacctccctcagtgcaggaaatgcccctgsagcattctgatggagggggagaagggggggagtcttccaagctttgcttgaatatgtggagtgatggggagctcactacctgtcagacagcatgtggaag

SEQ ID NO: 457642 - DNA, 201 bp, Homo sapiens
cccaggaagagcagtctgccgacatccagtgcatgttcatgtccagcatttcagcggaccctctcttaagtccatgggaggtgggcaggatcatccccatwtaatagatgaggagggtaagcctcagagaggttaaatgatttgccaaaagctgcctagtaacctccaaactgcaaacccagcactctttccactttactc

SEQ ID NO: 457643 - DNA, 201 bp, Homo sapiens
agaaaaataaacacacgtaagactttaggagaaaaagtgaagtagctatttggtgttgacgaaccagtagagacttgtattggtggtaacatattggaaamcagaatcattagaacccttcagatgaaaccttctcgtttacttggcatcatagagccacatagaagggaggcacctgggatgtcattaaatgaaacctcc

SEQ ID NO: 457644 - DNA, 201 bp, Homo sapiens
cctgagcaagacggggtcttctggggctgtttctagaggctgctcttcagagtcttataacttgaggatttatctgtcgcccttgccctagaagacaagaygggccctggagacctcaggcctctcagcttccccacctcatacctcacagtgctctggggcttgctttggggcgctctgggagtttcttccctccttctc

SEQ ID NO: 457645 - DNA, 201 bp, Homo sapiens
gccaacgcgtccccctgatgtgactcttacttatgtaggattcctgacaagaatacataaaatctgaatataaaacattcaggctaatccaaattgagggrcttctacaaaataactgaactagatttttcagaaacaatgacatgaaagaccaaagtaggctgaagaattgtttgagattaaaggaaaccaaagacacgt

SEQ ID NO: 457646 - DNA, 201 bp, Homo sapiens
acactcctggagcttacagcgtggactcagggctggcttaaggagactccccaccatgggagaactgaaacccagaaggtttccacgaggaaagatttgtytgttgggctcatgcccctggggaaaagctgtttctaatttggacctttctttctatgtgttgcttcccagtgcgacaacgcaaaagggttgaaagccttc

SEQ ID NO: 457647 - DNA, 201 bp, Homo sapiens
gggttccaaagtactcctgtgggtcctgagtcacctttgccccctgcaccgttcccccagaaaggctctgctgtactctaagctccagagaagattttctrtacaggtcttacccagaagaccctgagcaagacggggtcttctggggctgtttctagaggctgctcttcagagtcttataacttgaggatttatctgtcg

SEQ ID NO: 457648 - DNA, 201 bp, Homo sapiens
aatagaatggtagagttagaaaatcaccattttgcagctaccaaagtaataaatgactcaggtaagaattatcaatggttgctgaaaccactgcgtgaacrtttgtgggggaacaggatacttacacagtctcaaagtagctcccacagattatttattaattacaaatggggaaatgatacctttgaaatggatgtctga

SEQ ID NO: 457649 - DNA, 201 bp, Homo sapiens
gctaattttaaaatttttttgtagagacggagtctcgccatgttgctcaggctggattcaaactcctaggctcaatcgagcctcctgcctcggccttcccraagtgctggggttataggtgtgagccactgcacccaacctcattttctaattatattccttctacatttaagcctgcattcttctctccagaacagcttt

SEQ ID NO: 457650 - DNA, 201 bp, Homo sapiens
aagctgaggcgggtggatcacctaaggtcaggagttcgaggccaacctggccaacatagtaaaatcccatctctactaaaaatacaaagattagccaggcrtggtggcagacgcctatagtcccagctactcaggaggctgaggcaggagaatcacttgaacctgggaagcagaggttgcagtgagccaagatcgtgccac

SEQ ID NO: 457651 - DNA, 201 bp, Homo sapiens
actaggccagacatggtggcccatgcctgtaatcccagccctttgggaggcggagacgggcagatcacctaaggtcagcagctcaagaccggcctggccarcatggtgaaaccccatctctaataaaaatacaaaaattagccaggcatggtggcggccgcctataatcccagctactcaagaggctgagacatgagaatt

SEQ ID NO: 457652 - DNA, 201 bp, Homo sapiens
acaaaaggacctccaaggacccagcgtcatctcagcttcatgtgtgtccaaggcaacaggatcagttatacaggtgaggaaattcagccaggctaagtgayttgtcaaggtgtcacttttatggagtggccgagtctaagccctggaccccctgctcccaacttgaaagccggggtgcagttcacagaggaagagcagcag

SEQ ID NO: 457653 - DNA, 201 bp, Homo sapiens
agacattgaattaaaaaggaacatactaggccagacatggtggcccatgcctgtaatcccagccctttgggaggcggagacgggcagatcacctaaggtcrgcagctcaagaccggcctggccaacatggtgaaaccccatctctaataaaaatacaaaaattagccaggcatggtggcggccgcctataatcccagctac

SEQ ID NO: 457654 - DNA, 201 bp, Homo sapiens
taagaaagggcatagagccaggtacttgctgaaggtaggctttcactctgctacaaaaatggttgaaaagcgttctatccttttggctatttacattttasagcagtggctctgtgctccctggcacagtacctggcttcaagctgctaaactacctcctgttatgaagatgtgaaaagtttttttgtcattgaatataaa

SEQ ID NO: 457655 - DNA, 201 bp, Homo sapiens
ggatgtatcaattttgcaactatttagtgtctaatgtaggactgaacaaatcagtaaatattttgatgttgttcgaaggcagggattccactgttggagargagtgatgaaaatatggaatggggaaggcaagcaagaactcggcagtgttggatcttatctagacagacagacagacagatttatttttaaaagagctta

SEQ ID NO: 457656 - DNA, 201 bp, Homo sapiens
acacacagcaggatgatctggtcaaaaaatggcctgaacccccaggtcccacccctcctagctcctcctgctttcacgtgggagcaccatctttcccccasctcacagaagcccaggtccattgcctgcttcaaaggtcacacctggagagcaagaccaaaaaactagtttctaaacgctacccgtctaagacctgccttc

SEQ ID NO: 457657 - DNA, 201 bp, Homo sapiens
gagcagaacataagttgaggacaaatcacccactttggaatccagaactggaaagaaagctgctaataaaaagtgcagtgatttcccagggtctcagaaargagtcctttaaactccaccttgaagtgcaaaggtggacaatttgatcgcactgctcgtccagcttatggagcggcctgaagctgtcctatttctgcaggg

SEQ ID NO: 457658 - DNA, 201 bp, Homo sapiens
ggtcaggaatggggctgggtactgcgtgggagcagcgcctgtcttggattttggaaagggtcctgaaaggtctgcaactggtggctctcttgggggcttastgttctgttgctgccgttaaataaatggctttgggcaatattggtctagaggcaagaaactgggtttgagtcccagctccgtgcctagaaagttgtgtga

SEQ ID NO: 457659 - DNA, 201 bp, Homo sapiens
ccttcccagaaaatggccaagttcagcctgaatctgaacttgttcattgctctctttgttattcgactttgagagggaaacgggcttacgtttgcacagayaaaacagtaaataaattaatctgtaaaattattagtaaaatagtaaaaaaattaatctatttcaagagggagtattagtttattgctgatgatattgcta

SEQ ID NO: 457660 - DNA, 201 bp, Homo sapiens
taatttctacctgaaaaacttatatctacagtattagcgtcctggcaagaaacagacggcatcttcagagctgaagtccgatttagatgaagtactttagscagaggcaatggaaccaaccagggctactgcagctccaggggctagcaatggctggagtcacgagcatcaactgctctggaggacaaggggaggggcaga

SEQ ID NO: 457661 - DNA, 201 bp, Homo sapiens
aggaggtggccaagggcagcatcgggcgcggtgtgctccccgccgtggaactggccatcgagcagatccgcaacgagtcactcctgcgcccctacttcctygacctgcggctctatgacacggaggtgagtgtccggctgcccctgccgtcggggcttcggggggcattggggtgggtggtttggacacaggcaacctccg

SEQ ID NO: 457662 - DNA, 201 bp, Homo sapiens
gggttgcagggtgataggtggactccttagtgagaggtaggccctgcacccttctgtggcccagcctcccctccagtacttactcacccatcagaggctgygaggtcagtctcgtcagcacatccaccctccctgcagcaccgcactactttctcaggaaggagagccatgagtcagtcttcaatctggttctgttggcac

SEQ ID NO: 457663 - DNA, 201 bp, Homo sapiens
ccaacaactctggtgggttttctaatagaaagctgggagagccagcattctgcagcccttgcttcctgctgccacttgagtgtgctgtggacactggtccsactggttactgctgctaatctaggttcccggttgcacttcctagcatcctcaagcccctcctgtagatctagaacttctgttggctttttcttttcggat

SEQ ID NO: 457664 - DNA, 201 bp, Homo sapiens
ttttcagtctgccctttttacaagttatctttgtagcttcttccatgcttattgattttggctttatactccttaaatggatttagtaacatattttctcraaaatagtccatttctttgggatcttcaaatttattagcatatatttcaggacaatttttaaagcctctgttttttttgttataggccctttcttgtttt

SEQ ID NO: 457665 - DNA, 201 bp, Homo sapiens
gggcggtggaccatgcagaatctcagcctccacctccacagaatcgctctgcattttcccaggctccttgtgggggaagatgctcacacccagacaatacygccctagcattcactactagacactggggctggatcaacggctgcaactggacgtggatggggcatgctgggggggcttggaactggagggtactcaaca

SEQ ID NO: 457666 - DNA, 201 bp, Homo sapiens
ttctgtcttcctaaatccatcctataaggcccacctcctctgggaagcctgccccaacccccaggctctcccctcccctgactgctgtagtaataagaatkgaggcacctaagtagttcacggtttacaaaaggacctccaaggacccagcgtcatctcagcttcatgtgtgtccaaggcaacaggatcagttatacaggt

SEQ ID NO: 457667 - DNA, 201 bp, Homo sapiens
ctgaggaaaataagggtaagtttttaacagagctgactttgttgttttaaagaacacccttcactttgagatggtgccttcccttccctcctcctccttcyttcttatgtcctttaaaaaattaaattgtggtgatagcagacattaggatttgtttattgatttatttatttcatttattattttctttttttaagagac

SEQ ID NO: 457668 - DNA, 201 bp, Homo sapiens
gggagttgattattaattgtgattaatcatcattaatgatgaatgaatgagtgaatggcaatgaatggatgaataatgaatgaatggaccagatgaaaagygagaaagaaaactcaggacttctgctgttactaatactcatgataaaccaagcatttggtttccacaaagtcttaataccccttgtggagccatcatttt

SEQ ID NO: 457669 - DNA, 201 bp, Homo sapiens
gtgtagtagttagaccataagcttcagggttaggcagatctgagttcaaatcctgccacttactagctgtaagagccacttaacacctagaaaaccattgycccctctgtcaaatgataataatcttaactacccctgaggctgttgggtggatcaagtgggaaaatctctgtatcttgcttagcttgtcataggcattca

SEQ ID NO: 457670 - DNA, 201 bp, Homo sapiens
tcctgtcttctagctcagagctcttttctatgcctgagtttggggggtgggtcctagaattgagtacatttatagaatcttttatttttgttgagccaagrtcatcttttgtttcataccccagagttatacattgtgtctcagtgtgcgtgttttcaacaacaatcaaattctaaaggacacattctggctcccccaatt

SEQ ID NO: 457671 - DNA, 201 bp, Homo sapiens
acgtgccaccgtgcctggctaattttagtatttttagtagagacggggtttcaccatgttggccaggctggtcttcaactcctgacctcatgatctgcccrcctcggcctcccaaagtgctgggattacaggcatgagccactacacccggccccaagatgaattctgaaggacctgagggaggttgccaagaagaagaga

SEQ ID NO: 457672 - DNA, 201 bp, Homo sapiens
gggaacaggccgagtgcagtgcccaagtatagcctgagtacttccccaacagctgctccagaagtgggggagtcccccatggtgcttggaaatctggcctyatgtaaggccagtgggtgccttccagagtagcacaagatgctgctgacagcttcaccgtttccggccccaccgatctatagtagttggtagttctgtgtc

SEQ ID NO: 457673 - DNA, 201 bp, Homo sapiens
tgatgtctgcaggggtcagtgccctgtgctcgctggccctggcctgcgtggacagtccacactgggaacaggccgagtgcagtgcccaagtatagcctgartacttccccaacagctgctccagaagtgggggagtcccccatggtgcttggaaatctggccttatgtaaggccagtgggtgccttccagagtagcacaag

SEQ ID NO: 457674 - DNA, 201 bp, Homo sapiens
ctttccagcaccccagaagacgtcgtccccattatagcacggacacgtgggtgtttaattaatagtcatggtgatcatgatgatgcttatcttggcttcarttcacatgtgttagttccattattgattttgttctcctcaaattaaccagataaagtcacaaccaatttaaaaacaattagtttgattttcatctgtggt

SEQ ID NO: 457675 - DNA, 201 bp, Homo sapiens
caattgccaaagagagcaacaagtaaggaagaaaaataacaaaagtggccgggtgcagcggctcacgtctgtaatcccagcactttgggaggctgaggcasgcagaccatctgaggttgggagttcgagaccagtctgaccaacatggagaaaccccgtctctaataaaaatacaaaaattagctgggcgtggtggcgcat

SEQ ID NO: 457676 - DNA, 201 bp, Homo sapiens
aaaaaaagcttttccctcatgcatgcttatgcgttctttctaatctcccatgaccgcttccctaaatggaaaccagctggcaggcgattctgggaaatgtrgtttcagggcttccagtccctgccacaaggaggagagtgtagaagagtgagtgtgaactgtgagccaccagacagttatcagcccccaccccggccagag

SEQ ID NO: 457677 - DNA, 201 bp, Homo sapiens
atacaggaactggttccaactttgttggaagggatggtggaggaaaacaggtagagactgttgtggcagatacagttcttcagaaaattgccatgcccctygggcaggaagaatgaaagggaaagtgatgttgccattgcccctgaaatgcctgaagtggtttttgttttcttgactggatgttgattgataccagatctt

SEQ ID NO: 457678 - DNA, 201 bp, Homo sapiens
agcaagtctgtagcaggaccaaggcttttgacctttcaggcctcaacacctccacttatgctccaactccctgcctgtcagtttgtgcagccggacagagmgggatatttgcagggggcactgacctacattgtgagtaattgcattatgcagagggactctcgggccagctgctctccttttgccgcacagatgggagag

SEQ ID NO: 457679 - DNA, 201 bp, Homo sapiens
agatttcatacaggaactggttccaactttgttggaagggatggtggaggaaaacaggtagagactgttgtggcagatacagttcttcagaaaattgccaygccccttgggcaggaagaatgaaagggaaagtgatgttgccattgcccctgaaatgcctgaagtggtttttgttttcttgactggatgttgattgatacc

SEQ ID NO: 457680 - DNA, 201 bp, Homo sapiens
tggtctcattcatcctgtacccccacaccaacatggtgcatgacacacagcaggcacatgacaaatcctcatggagtcgatttcgaatgaatgaatgtagracaaatacagtcatgaaatgtaggacagatagagtcatctcccaatgactcagactcccattaactacactgtaaatcaacccatgggctcccttcacaa

SEQ ID NO: 457681 - DNA, 201 bp, Homo sapiens
gggagagtacaacgctgtggccgacacactggagatcatcaatgacaccatcaggttccaaggtaaggcaggtgggcttctcagaggagggggcctgcccmgttgctcccaagcctggacattgtctaagggttagggacaagctcagcatccttggcttcagggggtcaagggaacatcctcaacacatgcactcaatcg

SEQ ID NO: 457682 - DNA, 201 bp, Homo sapiens
cgtggccctcctcatgtgcaccatctggactccccatcctccctgcctgggcctgttgcctcgcccacccctaaccgccctggccagccctgcacaggacrcacagaagcacatgattgtcaaggtctggtccagggtcagaaacatacagaggagccctgtcaagtctggccttgcgctaagtcatcactctgtgtcaga

SEQ ID NO: 457683 - DNA, 201 bp, Homo sapiens
cccagcagaaaaacctaccaattttaccatatactttaaaaatcaactttggaatttgaaaaaagaaaagaggcaggtatggcccagggagaaagttctgyatgccaacttctgggagctggtcagaaggtggaaagcaccccctccctcaaaggagcactggccgggccgggctgggctgggcctaggaaccctttccac

SEQ ID NO: 457684 - DNA, 201 bp, Homo sapiens
caaaggcctggttagggtgtattatcccctctctctagtcttgccaaaagacagtttaaatctcagtcttgtcactcactagctttgtggaactaagcaarttgacccccctgaaaatggggggtctgtaaaatggggacaataacagtacccaccttatgaggttgttgtgagggttaaatgagataatgcacgtagaat

SEQ ID NO: 457685 - DNA, 201 bp, Homo sapiens
ttctacttttgactattatgaataatggtgccatgaacattgtgtacaagtttttgtggggatgtatgttttcatttctcttggatttacacctagaagtkgaattgctgggtcatttggtaactctacgtttaacattttgagaaactgccaagccattttctggtttgcatcaatggatataccatttacattcccacc

SEQ ID NO: 457686 - DNA, 201 bp, Homo sapiens
aattcttggcatttttgtttgaattttagttactttaattaatttgtagaagagttgacatctttataataccatgtcttcccactcatgcatatggaacrtttcttgttggatcctcagcaaagttttgtcattttcttcatacaggtcctttccatgaacggttaggtttattatcaggtattttacatttattattgc

SEQ ID NO: 457687 - DNA, 201 bp, Homo sapiens
caggttggagtacagtggtgcagtcgtagctcactgcagcctcaaactcctgggctcaagcgatcttctggctcaggttcccaaatagctgagactacagrcacacgccaccgcgcctggttatttttattttattttattttttgttgagacagagtctcattttgttgcccaggctggtctcgaacttctgggctccaa

SEQ ID NO: 457688 - DNA, 201 bp, Homo sapiens
attgagaacctactgtgtgccaggtagttatgttcaattattcagcatggtgtggtctccctattttttttttgagatggggttaccctccatcatccagrttggagtacagtggtgcagtcgtagctcactgcagcctcaaactcctgggctcaagcgatcttctggctcaggttcccaaatagctgagactacagacac

SEQ ID NO: 457689 - DNA, 201 bp, Homo sapiens
tgacccaagtgggaggcatctgcctcagagcaggggagaggaaagatcatctgggtccatttcagcaaacaggctacccatggtgcctccatcctcctggrcatgcagtcagcccccaggcactgtgagctctgcactggaatacctctggtgtacacaccttagtcgtccacacctgcccagcctaaagggcaacaccgt

SEQ ID NO: 457690 - DNA, 201 bp, Homo sapiens
tgaggatcctggaacatagcgttgactgagtgtgccttcttcaaaacagtccacaggagatccttcaggtctctgggggaaaaggaccatccacagtgacytcagcaccctcaccagggacacttcctggtgccacctgcccagccccgggccaggctcccagggcaggactcaagccttgcgaagcaacccttccccctc

SEQ ID NO: 457691 - DNA, 201 bp, Homo sapiens
cctgaagggctgggtgagtgttgtactctttgctcaagagggcatgtgatattagataaatatatcctccactcaagctgtgaggatcctggaacatagcrttgactgagtgtgccttcttcaaaacagtccacaggagatccttcaggtctctgggggaaaaggaccatccacagtgacctcagcaccctcaccagggac

SEQ ID NO: 457692 - DNA, 201 bp, Homo sapiens
aggcttctttgccatctttttttcatcttgagcatgaggataataatagcacctacctcttagggttgttgggaggattcaatgtgttaggatacttaaastactaagaaaagtgcctggcttatcctcagcaccatgcaaggggcagctgttatttttattaacatccagaatcaggttccttagcccgtggctggcccc

SEQ ID NO: 457693 - DNA, 201 bp, Homo sapiens
atagaactaaatgcctattgaatggaaatttgattgaaagatgccaatgaaactcaactatatgcagaggggagtatttgtccccatcataaagagtcccyttgcagggtggactcatacctgatgaagtctgtctacctaaggaaggtcaatgcctctgttttctcatggcctctaggtcaggacctggattctcaccgt

SEQ ID NO: 457694 - DNA, 201 bp, Homo sapiens
tccataatgtcgtttagttggaatcatacggaatgtagccttttcagattggcttatttcccttctttaatacgcatttaactttccgccatgtcttttcrttgcttgatagcttgtttagttttagtgctgaattaacacagctgtcccttagtaaccatgggggattggttcccagacccccatgggtaccaaaatctg

SEQ ID NO: 457695 - DNA, 201 bp, Homo sapiens
acaatgaaaacagagaattagtttttctaagaggaggctgttaaatcctactggcttctagaatccttagtgtccattttactccccactaacttttctgrggattctgaactgacatcagatgggattttgcagccgggtgcagtggttcacaactataatcccagcacttttcaggggagccgaggtgggatgatcatt

SEQ ID NO: 457696 - DNA, 201 bp, Homo sapiens
tggaaggaaagagagggagttgctccacccttcctgggccatccacccagccatcttctctaggtccccgcttccctccaccgcacacagccccaccttargccaccacatgctttgtggagggtcactacttgcaccctctgagccgtctggttatggtccctcagaaagatgcccctgcatccttattgtccacccgcc

SEQ ID NO: 457697 - DNA, 201 bp, Homo sapiens
actctcttattataataagtggaaggaaagagagggagttgctccacccttcctgggccatccacccagccatcttctctaggtccccgcttccctccacygcacacagccccaccttaggccaccacatgctttgtggagggtcactacttgcaccctctgagccgtctggttatggtccctcagaaagatgcccctgca

SEQ ID NO: 457698 - DNA, 201 bp, Homo sapiens
ttgggaagagacaggagaccaggtcctgaccgagggcaagagcctggggcaggagggaaggcaaaggggagagaacttcacacaggtgcattcacctgcaygtgacaggcggctggatgttggagccagggtgggcattgaagaatgagaaaggctggagagacgccaggttctggtctcacctgggcagacagtgggctg

SEQ ID NO: 457699 - DNA, 201 bp, Homo sapiens
ggccctagcatcacagagcaggatagagagggcaggcttgggagctgagaaacagtaggtaaatatttggcacaagccccttctctccagctagtcccatkctgatttgtggcctcctcgcttgtttctgggaagagattatcacccagttgtgcaggtaaaaacagggcattttgcattcacaatcttaatttggaagcc

SEQ ID NO: 457700 - DNA, 201 bp, Homo sapiens
acgggtatgggggggtcagatcatggagggggatgggagccaggatcatggggcccggatgtctttactgcagtctggggagtcactgaaggtcttggagsatggaattagcacggcgcggatgatcacttggaggcaacatagaggaggaatgggttgggaagagacaggagaccaggtcctgaccgagggcaagagcct

SEQ ID NO: 457701 - DNA, 201 bp, Homo sapiens
ccagtgtccattctctctccttcgtagctcttcctgagagatcctgctccttggcccaccaacactggggaacccagtccattcaactcaactcaactcartgcaacgtaaccaatagtcctgcatcctgctgcttcccagcccttgaagaggaaagagcactttcctgccctcggaagcttcatccagcaggaggcaatt

SEQ ID NO: 457702 - DNA, 201 bp, Homo sapiens
gggagctaactgagcaaatgctcttggccagtgtccattctctctccttcgtagctcttcctgagagatcctgctccttggcccaccaacactggggaacmcagtccattcaactcaactcaactcaatgcaacgtaaccaatagtcctgcatcctgctgcttcccagcccttgaagaggaaagagcactttcctgccctc

SEQ ID NO: 457703 - DNA, 201 bp, Homo sapiens
gaaggaacacaattatgaatacacatggagttggggacagaactgggactagaaccccgaactactcactgtaagccccaagccctttctggtttaattgyaaagaaatagtgttagccaacatcatttggcccatgggatgcaggtcccgagggcccagcagcctccagggcatcttgatctcccaacctgtgatcacct

SEQ ID NO: 457704 - DNA, 201 bp, Homo sapiens
ttgctcctcctaccagcctggcagcagggatgagcacagccactggggctctggcgggagagtcagtcgaggccggctgaggctggcattccagttaggcraggctccaggtgggctggggctgagccaggcatgggacaacggaggggctcctctgctggctggagctcaccgaggacttgtatatccagaggggcaagg

SEQ ID NO: 457705 - DNA, 201 bp, Homo sapiens
agtctgatgcacagccagtactcaacaaaaaaagtgtaaattcccggccacacactctttgcatgaacccagcgcttcactcttctaaaagccctgcacakgcctttgctcctcctaccagcctggcagcagggatgagcacagccactggggctctggcgggagagtcagtcgaggccggctgaggctggcattccagtt

SEQ ID NO: 457706 - DNA, 201 bp, Homo sapiens
tctcggcctcccaaagtgctaggattacaggcgtgagccaccgcacccggcctggattaattttctgttgtcgaacatgcaggttgtttctagttgttggktttttttttctcttctaaacaagggtgccgcattcagcccggaaacaaaatagatgcgcatctccatgattagtttcttagaatctagcattggctgggc

SEQ ID NO: 457707 - DNA, 201 bp, Homo sapiens
aagattcttttttcaggattcactgcatcattggacacttggtttcaaaaaaccaactgcttaaggacaagacaaagtcaatgagccttagagggagtagrtgtgaaaagaggcagaggctcttgttgactgtgactcattatgatctctggagggcaggggagctgaggtctgctgctcagtgtgtgtgttcctgtaaat

SEQ ID NO: 457708 - DNA, 201 bp, Homo sapiens
caggtttctgatgttgggctggctctcaggacccttgggtctcctctagtctccccagagaaccctgtccaccacccagcctgcccttccccttccatttmccccaggcctccctgcgttgccagacaccagttcttcccttggagttcccttccccccaccatccctccagaccgccctcaaagcccagcaggccatggc

SEQ ID NO: 457709 - DNA, 201 bp, Homo sapiens
cccactgcagagcacagaaggagggatgcacactctctggtggcctgctgctacccaggtatccccacacaccgccagcagtggccacagcagccattacrcatcctgttttggaaaagtctttgcaacattgcacttttgtggctcccagtgcactcgcctctctgaatgacaacaggaaaatgaaatgagtatattgtt

SEQ ID NO: 457710 - DNA, 201 bp, Homo sapiens
agaaccctgtccaccacccagcctgcccttccccttccatttaccccaggcctccctgcgttgccagacaccagttcttcccttggagttcccttcccccsaccatccctccagaccgccctcaaagcccagcaggccatggcactgtggtaggctgtccctgatacccgctggcctggtgaagattgagtccttccttca

SEQ ID NO: 457711 - DNA, 201 bp, Homo sapiens
gtatgcaaagaaagactggacagtgggccgttggcagagactgtaccctaaggaagagatatgagagaagacacttgagtctcttcaagcccgaaagttgygtaaccctataaactagaataatgtaacctcagaagacttatatgtgtgtgcgtgtgtgtgtatatgtgtgtgtacaaagtttataggttcatttctata

SEQ ID NO: 457712 - DNA, 201 bp, Homo sapiens
gcaggggatgcctagaaagacagcagagggaggcagagacatttgggtctctcccccttttcaagtcttatggtctacccaaccatcctcaccaagttatyctttgggctctcaattctatgttgcagctaaccaactaagtgcttaagtacccgtaagccaatcacttgctgtctctgggtctcagtttccctttctgta

SEQ ID NO: 457713 - DNA, 201 bp, Homo sapiens
ggctcagagtcaggagctcagggtggaagtgacgccctctggtggtgggagaccttgagctcaaagtagccccattctacctggtggcctcggtctacttktggccctcagcaggcctggggactgaggagcaggatggagaaggtggagggaggccttggtccagtgctgggggccctgccagatggaagacaacagtag

SEQ ID NO: 457714 - DNA, 201 bp, Homo sapiens
ctttgttactgatgctgtcgtgaccatctaagatcacaaagttctaccagggggtgtgttcatctgtgaggagagttttggggaagggctggcttggaccraagatgccaatgtcaccttggatggggtacagagttttgtttgttctaagtgacttacaaacacaccttaatatatggtaggcaatttttttgttttgtg

SEQ ID NO: 457715 - DNA, 201 bp, Homo sapiens
tactattgtaattgttttggggtaccacaaaccatgcccagataagagggcagactttatttgttaagtgttctgtgcgttctgactgctctacccactgytcctccatctctcttcctctccttgccctattctctaagacacaatattgaagttaggtcagttaataaccctgcagttgtctctaagtgttcaagtaag

SEQ ID NO: 457716 - DNA, 201 bp, Homo sapiens
ggctgactctcttgttaagagctaatgcaggtagtaactttaagttgaagccagtgcccatttcccatttcaaaaatcctagggccctgaagaattgtgckaaatctactctgcctgtgctctataaatggaacaacaaagcctggatgacagcacatctgttacagcatggtttcctgaataattttaaatctacttttg

SEQ ID NO: 457717 - DNA, 201 bp, Homo sapiens
tggttctagggtgacagaagaagcggtaaagcaactttagctggaggctgagggtaccaggatgttatttccctggatgcttaaattggaacctaggatgkatcaaatccagagctgctgctgggacaagcaagggtttggggagatggctggtggcagcaaagattgagcttgcttcatccatgccctctctggatcaaa

SEQ ID NO: 457718 - DNA, 201 bp, Homo sapiens
gtggacctggaactaatgggacaataatggtaaagtagcaaccagagtgtgattaagaaatcacatcagaaagccaatattttccaaattgtattagatamggatttttggggatgtgatggtatatataatgtccctgtcctgaaatagttcctcccaggtttttctaatagctccttctcccactggtgagcataggag

SEQ ID NO: 457719 - DNA, 201 bp, Homo sapiens
gcacttggccttgcagtaggaccagagccatggaatgcctgtttgctctgcgtgttatacctagagcccagcacagtgcgtggcccagaagagactgatcmcaaaaatgtgatgaaagaatgagtgcacaaatgactaattgaatgaacaaacacatgtgtaccaagcacagacctcctcaactctggttggtttcccctg

SEQ ID NO: 457720 - DNA, 201 bp, Homo sapiens
caccactcctggcctgctaacacttttctcttaatggaagatattttagctgatggaagatttttaggcttagtccatgaaaccaatagtcccccaactcycttgtggagccatctgggtttctagttggggagttgagccaaaagggagaatgggttctcaatcaggcatgccagggacacctgtctgccagcccagccc

SEQ ID NO: 457721 - DNA, 201 bp, Homo sapiens
ttccttttttgctaacacctgtctcttttgtttgtttgttttcgagacagattcttgttctgtcacgcaggctggagtacagtggcacaatctctgctcastgcaacctccacctccccggctcaagcaattctcgtgcctcagcctcccaagtagctgggattacagacataggttaccacacccagctaactttttgta

SEQ ID NO: 457722 - DNA, 201 bp, Homo sapiens
gacaactgtcttgccctactcagatccccttggaaacctatagttggctcagagggcacaactgctgtctctaacctcagaattgctgtgctaggccaggygcagtggctcatgcctgtaatcccagcactttggaagaccgagatgggtagatcacctgaggtcaggagttcaagaccagcctgaccaacatggggaaac

SEQ ID NO: 457723 - DNA, 201 bp, Homo sapiens
ttccacctaggcccaccattgacacttctgatgtccacacacaatacctggggacctgaggactggcacacccagtagacaactgccaccaccagtgcccytacatgccacccaggggccagccccaggaccagcttgcctggtgtccttatctccagtaaagcctcaacatagcctccactaataattacagcctaagct

SEQ ID NO: 457724 - DNA, 201 bp, Homo sapiens
tcctccttccgttctgaggtatggtagcaactcctgccattgctggtccatgggcacatcaccttcccttgtctactccctcaatctgccccctaccctgygagtagtttttaataaagtctcttcttttgagccatccaggatgaattatgtttcctcctgtggccctgtattagttatctgttaagtcgtaacaaatga

SEQ ID NO: 457725 - DNA, 201 bp, Homo sapiens
cagcagaggaaaatattgggggttctgaatcataggatgcatgggcccttaggtctttgaagaacaccaaagaggtgtgtgtttgtgcttgtgcatgtatrtgtgtgagaacatcatgtgcatgtgtgtgtgtgactattgcaagccccaaaattccataaatgtggacattaaccatgcaatctgccaagctccatgctg

SEQ ID NO: 457726 - DNA, 201 bp, Homo sapiens
tagggccaagtgggtctctctgtgttgtctctctacttttcttcttccttacacgcattttctcccctgctctggtgctctaggaggctgatcccatgatracatcccctgtcttctggtttctggttcaatataggcaagagattggagtccaggaggaaggagattggtcaggtgcagcctttgccttcctccctgctt

SEQ ID NO: 457727 - DNA, 201 bp, Homo sapiens
atttggctcttcccaattacttgtcgtgagatcattaaggtcacttatcagtagcctttggtagcctatttttggaatttcgcacaaggctgcatatcctmaaaggtcatgagggacgagatgacaaggaggtcactagagtatttctcctgggcagcagaggaaaatattgggggttctgaatcataggatgcatgggcc

SEQ ID NO: 457728 - DNA, 201 bp, Homo sapiens
aggaagggggaacccaaacagagcctggcagtcttgctgagttgcagagacagagatgagaattcagagacaaaggaggcagaagtttgcaagcagagcaytggagaagagagagctgcatggagagggagaactatgcaggtctgctcacaccctcagctgagtacttactggcacatgtacagaggaaagcacttgaga

SEQ ID NO: 457729 - DNA, 201 bp, Homo sapiens
aggttcctcctctgtaaattagggctaatacttcctgtcctaccttgcatgggattattacaggagcacatgagattatatatgtgacaaatgctaaattrtagttagaggcagttatatgctcactgttttgctgtgccaaagctacctcacattctttggttcatagaaaaaaatgtacaacttcaactttccttaaat

SEQ ID NO: 457730 - DNA, 201 bp, Homo sapiens
ttccagcacaggaagggggaacccaaacagagcctggcagtcttgctgagttgcagagacagagatgagaattcagagacaaaggaggcagaagtttgcargcagagcactggagaagagagagctgcatggagagggagaactatgcaggtctgctcacaccctcagctgagtacttactggcacatgtacagaggaaag

SEQ ID NO: 457731 - DNA, 201 bp, Homo sapiens
cagatgggatgttggtggcatcagcctctaccactctctcttttctttggtcagttccttgagcctccctgagcctcaggttcctcctctgtaaattaggkctaatacttcctgtcctaccttgcatgggattattacaggagcacatgagattatatatgtgacaaatgctaaattatagttagaggcagttatatgctc

SEQ ID NO: 457732 - DNA, 201 bp, Homo sapiens
ctgctcctgccattgtccctggaccactgcactggtctctcacccctccccacgccctgcccttcctcacttgaataacgaccttcaagtggctgccaggrtcgtcgtccctgtcctcagctctggcgatgtcatgatcaggtcgaagcactcttgagaagccccagggtttaatgggtgcagagcttttctgtttgggat

SEQ ID NO: 457733 - DNA, 201 bp, Homo sapiens
tttatctgacatgtcctgggttggacagtcagtgggcctcacgtggggctgagttctgtgcctcaattcatctgtaggatagaggagatggtgcctggcayggtcaaagagaccctcagagtgctcaggactcgggactccaaaataatggaaaagaaaaggtttatgatgagaaccaacatttactaagctcctgaagta

SEQ ID NO: 457734 - DNA, 201 bp, Homo sapiens
tatttgttaaaaatgtttaaatttgcatttccaaaacttctttggctatgggaccattagccaaagaagttttagaaatggccaatttaaaattttagcayaaaattaaaatatatagcatatttatacctacctattctaaggagttgaattcaggaagtgctgctggaggggccaaggagccgctgtgggttttgagca

SEQ ID NO: 457735 - DNA, 201 bp, Homo sapiens
aatgagtgtggccacggtgacggggtgaggacccaccctacagccccccttcatctgtgagcaggcggccagtgggtgtttgcacatgggggagctgtcgrgatagctctggcccgtgtgctaggaaggactgtcagattcggggacatggctcccaagggaaagtcggtagcgtgggcagctggccagtgcctcaccagc

SEQ ID NO: 457736 - DNA, 201 bp, Homo sapiens
gatcctttgtctctgaaaagacctttgaaacactttgcaccgtaagtcattctgcataagccagtggtatatgatagaaagtttccttggtgacctcagtyatcgaaaacacagatgcaaacccagaaatacatgaaaatacatgaacaggcagggaacaacccatttagtagttttcaactcaacagggaagaacggtgt

SEQ ID NO: 457737 - DNA, 201 bp, Homo sapiens
ctctctcaagcatgcaggatctttataagccatacgtagtgacagtttaatccacataatcactgtcaattccccttcactaatttggcagagtccctgcrgcatatgcagctctgcaatgctttacacagcgtacacaaaattccctgttcatcctccaatctagtaattccatcaactagcttatgaagagctgcttca

SEQ ID NO: 457738 - DNA, 201 bp, Homo sapiens
tgagggggcaagagagaatgagccccgaagggcagggccgagatgccccattggtgagatgcctcaggggcccaagccacagggctcagggtgggtgaacrtggctagggacgtgtataggcacagtagcccaatgactctgcagcttccagcccaagggtccaagaggacccttgtgcctggaatagagcttgaaggcag

SEQ ID NO: 457739 - DNA, 201 bp, Homo sapiens
gatggggagggaagggagagaggagcagatatggcaaaatgttagccatcattgactcctggaggagaatacacaagggtgtgttgtactgttcagctttkctgtatgagaaaaagaaaaaaatgagagtgggagagacaaagcactctgatagagggacaggctcaggaggtggtacagtgagggggcaagagagaatga

SEQ ID NO: 457740 - DNA, 201 bp, Homo sapiens
gactttaacctggaggcactggagagccatacaggaaattcagcagtggagaatgtgatgagctcttgataacgcctactctggttgtcagataattttaygaaattatttttacttttaatagatatgataatattgtggttatgtacattcatgctgaagtgtcatggagtctgcaattgactttcaaacagtttagga

SEQ ID NO: 457741 - DNA, 201 bp, Homo sapiens
ccttggaagaacccgcttttaagatgccacattgaataaggactggtctttgtgtgagagtgctggttccgcctctggagggttgacagagcggtggatgsgagcaggcatttgtcttcatgtggagactgctatagggcatgtccaggtgacatcatctagtgggaaaagctagtcggttacttgagttagccgggtcac

SEQ ID NO: 457742 - DNA, 201 bp, Homo sapiens
tttaaatccgctctatgctttaggtaccttatccccattttatagataatggaactgaggcacagaaaagctatctaacttgcacaaggactcacagctartaagtagtagggccaggattttaactcaagcagtctggcccttaagataagactgtagtaaggaaacttggcgatgacagaaggaaacagggtgatgaga

SEQ ID NO: 457743 - DNA, 201 bp, Homo sapiens
attctaggaggaagacaggcaagaagcaagtaagtaattaaataataatattattaaggttgtatatggagggtctgccatgtgctagacactgttcttartatttttctgcgtgaactcttttaatttttaaatccgctctatgctttaggtaccttatccccattttatagataatggaactgaggcacagaaaagcta

SEQ ID NO: 457744 - DNA, 201 bp, Homo sapiens
ccatccatccatccatccaacaaatattttaggcaacttactctgtgcctggattttggtaggcacactggggatacaatgctgaacaggataggtatggktcacattattctggagcttacattctaggaggaagacaggcaagaagcaagtaagtaattaaataataatattattaaggttgtatatggagggtctgcc

SEQ ID NO: 457745 - DNA, 201 bp, Homo sapiens
ccatacatccatccatccatacatccacccacccattcacctatccatccatccatccatccatccatccatccatccatccatccatccaacaaatattwtaggcaacttactctgtgcctggattttggtaggcacactggggatacaatgctgaacaggataggtatggttcacattattctggagcttacattctag

SEQ ID NO: 457746 - DNA, 201 bp, Homo sapiens
ccctcagtcttttgcaggaattattccttgtacaatgtggtttctatgttgcctgggtcaggcctcctggactttctcctgggtgatagcacagcctttcwctgctggcctgacttggcatggcccccacagtaggtctctaaagggcagccctgatgctatcaccgtgtatttgaaggcttcagggctcaccactgactc

SEQ ID NO: 457747 - DNA, 201 bp, Homo sapiens
aggaacatacaaattgaaatgtgatatcaaatacccacaagactggcaaaaattaaagctggcaaggatatggagcagtgagatctctaaaacactgctgktgggagtgtaaatggatcaaaccacttagagaacatgcagcaaacgctatgattcaacaattcaatttccaggtttataccctagagaaactcttcatat

SEQ ID NO: 457748 - DNA, 201 bp, Homo sapiens
catgaagcatctgccatctaaagacgacaggagagctcagccccaggggcaccatccatgctgtattcctcctgaatggtgttccctgaagaaatgagttrgccctagtggaaggccagtctgaataggtcagaaaatctcaagttttttgaaaaaatgaagaaatgcccttttctcttaaccaagcatcagccaagtttt

SEQ ID NO: 457749 - DNA, 201 bp, Homo sapiens
tgtagataaggaaacagagcctggaaaggtgctatccagggcccagggtcacccagattgtccaaggcaaggcccagataggctgttcctgtgtctccctscagggtgtgctgagatttctctcagaaccttttctggcaggtgcctacttttcttcttttattttagggttggcctgtccctctgttgctatggtaacag

SEQ ID NO: 457750 - DNA, 201 bp, Homo sapiens
gcccgggtcacaccccccaaaatatctgatttaactggcttagaaagggccctgtgcatcaggaattttttaaagttgccatgggttctggtgtgcagccrgagttgagattctctggtccagactctcacgaatctctaggaagggcccaagactgtaccttggataccagggtgataaatagactcaggacaataaatt

SEQ ID NO: 457751 - DNA, 201 bp, Homo sapiens
attgtgtgttttatgacagtctgagcagcactgttattgttgtagaagtttgtatgaggtcagtggggcacagggtggaagtggtcagtcctgtttactgrgatcagggaggatttggagcagaaagtgacatgtgagctgagccttggaaagcacagtaatagggtgctcaccgggggaccagagggccatgaaagcctt

SEQ ID NO: 457752 - DNA, 201 bp, Homo sapiens
ctcataggctcaagtgatcctcccgccttagcctcccaagtagctgggactacagatgtgcaccgccatgcacggctaatttcaaatttttctgtagagaygaggtcttgctgtgttgcccaggctggtcccaaactcctggcctcaaatgatcttccctttttggcctcccgaagtgttgggattacaggtgtgaaccac

SEQ ID NO: 457753 - DNA, 201 bp, Homo sapiens
aatgaatcaggcagggaaggaaagaaaggttgaagtagacatcaaagaggccttgaacatgtcctgtcccacatggacctcagttttctgggcctagaggwcatgatgtcccagtcttctttctcctcaatgccccaagcttgagggaatagtatgtaacttaatcttgaatatgtagaaaaaaacatataggatattgcc

SEQ ID NO: 457754 - DNA, 201 bp, Homo sapiens
ctggtccctgagatcaggaccacattgtcttctgagcccccaccttccacagaaacatgcccaggtatcaatacattaaacatctctttgtctgggggctstggccccaggaatcatcagacagaaatgaatcaggcagggaaggaaagaaaggttgaagtagacatcaaagaggccttgaacatgtcctgtcccacatgg

SEQ ID NO: 457755 - DNA, 201 bp, Homo sapiens
gcttgtgccctgagccccaccatgttccctgttgtattagggttcactagagagacagaactaataggatagatgtctatataaaggtgagtttattaagragtattgactcatatgatcaaaaggtgaggtcccacaataggccatctgcaagctgaggagcaaggaagccagtccaagtcccaaagctgaagagcttgg

SEQ ID NO: 457756 - DNA, 201 bp, Homo sapiens
ttcacttttaatagagacatggatacagagaaatatttctttaccataagaaaaacaacactttgcaaccgcaatgataaatgtcagctgacacttaaagytgggtaaagccctaaagatggggcatcatggaaatgttgtagatgggagagccctccccctctgcaggggcaaaggctgctcagttccaattgattgtta

SEQ ID NO: 457757 - DNA, 201 bp, Homo sapiens
atttacaaccacctatagtatgaggaggataggggtggcggctgctgggggtacaactgtgagcagggcagatgtgatccctgtacccaggaggaaacagrtgaaaactgataatcatccgaataaccatttaaatataaatggtgaaaagtgctttgaaagaaagttacaggggtgcccataacgtggagacctgaagat

SEQ ID NO: 457758 - DNA, 201 bp, Homo sapiens
catttcactgtcatcagaatcactatcattgagttacctgagttggccctcaccctggatcctggttctcataactgaatgttgatcttttttgtggccaygtgtttttcatattcccttccgctaaaacagggtcccttccttacatctgagtccctggccagggttccacaggggctggccagataaatgtaaatgaat

SEQ ID NO: 457759 - DNA, 201 bp, Homo sapiens
gggaccacaggtaaaaacttggtacaaccacagagacatgactgtttccctttgttcattcatttattctacagacatttacaaccacctatagtatgagraggataggggtggcggctgctgggggtacaactgtgagcagggcagatgtgatccctgtacccaggaggaaacagatgaaaactgataatcatccgaata

SEQ ID NO: 457760 - DNA, 201 bp, Homo sapiens
tggatgggagcaggcatttgtcttcatgtggagactgctatagggcatgtccaggtgacatcatctagtgggaaaagctagtcggttacttgagttagccrggtcacaccagcatacattcattcattcattcattcattcattcattcaacacagtggctctccactgaagctgtacccatggagcacctggggagcttt

SEQ ID NO: 457761 - DNA, 201 bp, Homo sapiens
ttgaataaggactggtctttgtgtgagagtgctggttccgcctctggagggttgacagagcggtggatgggagcaggcatttgtcttcatgtggagactgmtatagggcatgtccaggtgacatcatctagtgggaaaagctagtcggttacttgagttagccgggtcacaccagcatacattcattcattcattcattca

SEQ ID NO: 457762 - DNA, 201 bp, Homo sapiens
catatcgggggggtgggggaaaagtcaacacgtctcaatacacaaaaggaaaaataagaaagagatgaacactccaaggaacgaggcgcaaagggcccacrgtgtaggcttaataatgcctcgcctcaagatgtccacatcctcattcttggatcctgtgaatgttgccttccatggcaaaagggagtttgaagatgtaat

SEQ ID NO: 457763 - DNA, 201 bp, Homo sapiens
ctgggcaacagagtgagactccatatcgggggggtgggggaaaagtcaacacgtctcaatacacaaaaggaaaaataagaaagagatgaacactccaaggmacgaggcgcaaagggcccacggtgtaggcttaataatgcctcgcctcaagatgtccacatcctcattcttggatcctgtgaatgttgccttccatggcaa

SEQ ID NO: 457764 - DNA, 201 bp, Homo sapiens
ggcctgggatatcatgtggcagcaacgacttctttaacctggtgcttccaaagacagcaagaactgaggtcacctttcagggcttagctacacctgtgtcygattccaaggactctacccacagaaatctggtaaagagccgtgtttccagtgttcttggccctcctcctgatccttgtacccgggaaggacagttttttg

SEQ ID NO: 457765 - DNA, 201 bp, Homo sapiens
cttcttctttctcaatgggattcaggcttcctagaattactgcctaaaccagtaattttaaagtaaagacctggagtctggttggggcattgtaaattgtrgaaggggggaagtgggggactataagggactggaagggggtgtccacctttgtcttcctaagaggtatgaaatggttaagagtgtggaacctggagacag

SEQ ID NO: 457766 - DNA, 201 bp, Homo sapiens
atcataattttttttttttttttttttagtggggcagctgctttcagcctcctgatcattcatttttgatttttcagtttttggctccataaatgaaggamtacctttgttggctgcccatctatctttccctgaggaacaccattctgttaaacgtcttcctagatctctgtggaccaggcccctgactgctattctgac

SEQ ID NO: 457767 - DNA, 201 bp, Homo sapiens
gcatagtgagcttcccaatactggaggagtataagaagaaactcagcaaacacctggaagttgctactgaaaagatccaataattatccaataatcagatygcaggagggacttcatcagtggttaccaatttttgtatgcttgaaatctgagaaggtttttaaaaatacagattcctaagttaactcactcactgatata

SEQ ID NO: 457768 - DNA, 201 bp, Homo sapiens
tttagtcatttttaagtgtacaaattcaatggcattaagcacattgaccatgttatacaagcatcaccactatttatctccagaactttctcatcatcctraactgaaactgcatacccattaaataactcccagctgggcgcagtggctcatgcctgtaatcccagcactttgggaggccaaggcaggtggataacctga

SEQ ID NO: 457769 - DNA, 201 bp, Homo sapiens
cttttctttggcaagtgctgttaggaataacacctgtaagagtgtgggaagcaggactggaagggggaagagttgaagtgaagcagaagttgaactgaagygggagaagttgagctgcgatgtggttgcaataggagcctcgaccaattctccagggagctctggagctgcctgaatcaaggcaagggatcaggcttttgt

SEQ ID NO: 457770 - DNA, 201 bp, Homo sapiens
tccctagaggattgatgtggggtatgtggacaggatttgcagtgactgatgggcctcaaacgaggctttgcccttaaaaaaaaccattatcatttatctcstcctcaacagggctcctcatgaccttcagaggcagcagctgaagtattagcagtgagcgtaggtcagacaagggcttgtgtgtcgaacagtgctttatag

SEQ ID NO: 457771 - DNA, 201 bp, Homo sapiens
tgtggatggatttagtgaagtcacttgtaagaacaagcaactggacatgggaatcctgtggaagcttggatttccatgtcatttaactactctatcttagrctccttttgtgttccaggcaccatcctgggcagtggagtggagaactgccaagggaagtttataaaaaccccctgttccctctctagatgatgatggaga

SEQ ID NO: 457772 - DNA, 201 bp, Homo sapiens
ctcattctgcctttaccacaaaaccttgcatcagggcatgggtgaggcaaacgcagaagtgaaatgtgttaatttttctcttcttattcagtcatctgtaragttttgatgttctctgtcttccattatagatgtggtatcattttgtatagaatgtttgtagctacaaagctagctagtatagtttgcggagacttggga

SEQ ID NO: 457773 - DNA, 201 bp, Homo sapiens
aattaaccattctgttaaatctattgtctctttctcttgtcaggctcataaagatgtcgagtccatacatgaacaaccttatcatccttggagggatgctytcctatgcttccatatttctctttggccttgatggatcctttgtctctgaaaagacctttgaaacactttgcaccgtaagtcattctgcataagccagtg

SEQ ID NO: 457774 - DNA, 201 bp, Homo sapiens
cccccgacccctgacagatgtgatttcaacttgtggactgatcagaggtgccatattgacatgaggagacatgatttctgcagtgaggtaattaaaaggcrgttggcttcacagctgtgatcacacgagaacacttcttacccctaaagacatcagctgaaagccaagtgcaaaggagccgaggaaaccaaagaggcttct

SEQ ID NO: 457775 - DNA, 201 bp, Homo sapiens
gcgattcctgggctgtgtggatggatttagtgaagtcacttgtaagaacaagcaactggacatgggaatcctgtggaagcttggatttccatgtcatttarctactctatcttagactccttttgtgttccaggcaccatcctgggcagtggagtggagaactgccaagggaagtttataaaaaccccctgttccctctct

SEQ ID NO: 457776 - DNA, 201 bp, Homo sapiens
gagatggtgccttcccttccctcctcctccttccttcttatgtcctttaaaaaattaaattgtggtgatagcagacattaggatttgtttattgatttatktatttcatttattattttctttttttaagagacagggtctcgcttcatcctccaggttggagtgcagtggcattttcatagcttactgcaggctccaact

SEQ ID NO: 457777 - DNA, 201 bp, Homo sapiens
ggataaatacttgaggtgagcatagactccttggtgctgagattatgggcggtgagtggctgacctcactgaccatctgttctggcctgttctggttcatygggcctccgaaactgtccacatctggcagaatccagaagagccagccaggactgggaatcacacttcagtttcctcatctgtgaaatgaggggagggatg

SEQ ID NO: 457778 - DNA, 201 bp, Homo sapiens
caggaactccctgggcaatcttggaaagtcccttccctgtctggcctccttgtatccatgtgtcagttgcagggtgggactgggggatcctcaagtttttrtggggcggtctagttaataatgtaaaacaaaaccactcactttgcattgtcggtagagaaaatcgctttgcccaattgacttccccagggtgacccctcg

SEQ ID NO: 457779 - DNA, 201 bp, Homo sapiens
aattccacagaggcagaagtacctggagtggggtagaagggaggctgaaacagaagtcagttcccaggagccttgaatgccaagcttagaagtttgatatkttatcctggggacttcctggaggtttgtaagcaggtgccagtgtcatcagagctatcaaattcctctttccctctcctccattccttcaggccctcactt

SEQ ID NO: 457780 - DNA, 201 bp, Homo sapiens
ttttatcatctgtctcctcccattagaatgtaagctccaggaagcagaaatttctgtctgtcttggtcactcttctgtttcccatcacctaaaacccaacstaatttgctcaacaatttgttgagtgtgtgtgaatgaaataccaagtctggacaaagtgcaacagaggctacaaggacataatactcaggaacaacggga

SEQ ID NO: 457781 - DNA, 201 bp, Homo sapiens
agaaagtcaggaaataccatttctgtgtgatgaagtcgcgaggccctttaagctcattccaagcctgttctgaacagggggtggctaaagtttagctgttyccaggcggggctgggaagctgctctgcacagagaccacgtcctgggcactcatagggagagttccaggtgtcacatttccctttctggacatttcagttg

SEQ ID NO: 457782 - DNA, 201 bp, Homo sapiens
actgaaaatacaaaaaaattagccaggcctggtggtgcatgcctgtaatcccagctacttgggaggctgagacaggagaatcgcttgcaacccaggaggcrgaggttgcaatgagccgagatcatgccattgcactccagcctgggcaactctgtcccgaaaaaaaaaaaaaaaaaaacttcaacaaaatattggcaaacc

SEQ ID NO: 457783 - DNA, 201 bp, Homo sapiens
atatatatatatttgtagagacagggtttctccacgtttcccagactggtcttgaactcctgagctcaagtgattctcctgccttggcctcctaatgtgcygggattacaggcatgagccactgagcccagccaggatgtggctattattctgcctggcataagacaactacaaaggtaggctttgagaggactgcccttc

SEQ ID NO: 457784 - DNA, 201 bp, Homo sapiens
ccctctctgtgtgtgtgtcaaggtatgttagcccaggagcttgctaagcaggaaggaagttttctaaaatcaggagaagacagctgacataaattttagcygacaggatggcatggctgtgggccctgatggacactggctccgcctgtgtgtgctcatgcagaggttactcacacacactcgatgtgacactctgtgctc

SEQ ID NO: 457785 - DNA, 201 bp, Homo sapiens
gagcagaggctgggcccaggtgtcctcttatcagctagtcactggccctaggagcaggtgtatccttagccaaggcagttcctcatggtggagggtaattmgcagtaaggaagtaggctgggaccttcagtagccaatattctcaggagctggggaatgatggtgctttggccctaaagaggccaaaatactgggcaagcc

SEQ ID NO: 457786 - DNA, 201 bp, Homo sapiens
ggggaatgatggtgctttggccctaaagaggccaaaatactgggcaagccccccagttacccctatagataacaacggggcctaccttaaagggctgtgasgattaaagaggtttatacatgttgagtgcctgggacacagtatgtgctgaattagtgcaaggatgacaaggaagaatgtatttggataccaacttcacag

SEQ ID NO: 457787 - DNA, 201 bp, Homo sapiens
gcaaaggtgctaatcttgactcttgcaggaactccctgggcaatcttggaaagtcccttccctgtctggcctccttgtatccatgtgtcagttgcagggtrggactgggggatcctcaagtttttgtggggcggtctagttaataatgtaaaacaaaaccactcactttgcattgtcggtagagaaaatcgctttgcccaa

SEQ ID NO: 457788 - DNA, 201 bp, Homo sapiens
atggtgctttggccctaaagaggccaaaatactgggcaagccccccagttacccctatagataacaacggggcctaccttaaagggctgtgacgattaaaraggtttatacatgttgagtgcctgggacacagtatgtgctgaattagtgcaaggatgacaaggaagaatgtatttggataccaacttcacagtcttctag

SEQ ID NO: 457789 - DNA, 201 bp, Homo sapiens
acttattcatgtgtttcaaaataacatatattaatacatatttattttggattataaaaattatccatgtcccttgtagaaaatgtgaaaagtacaggcaygcaccaaagagaaatcagtctcctgaaacctcatcattcagacagactcatgggacacttcacattcagatgtgatcctttttattttaatttctttatc

SEQ ID NO: 457790 - DNA, 201 bp, Homo sapiens
ttccatgacgttccactgggcagcagttcctccctgtagctcagaatgggcttcaacgaggcttttcataattgaacattttgacagaggcttgtccacaytggttgctgggtctagaaggcagagtaaaagcagaggtggccacagcaggctggggaggcccgaggttcatgtgactgggtgcagtcctagaaatgggtg

SEQ ID NO: 457791 - DNA, 201 bp, Homo sapiens
cgaattactatctcccagatttgcagggaccgcagcccttcctttctctgatcccctcgtacttcacctggccctttatgcctggtagaagctcaataatycctgataacctctagtgaatgttgttggattaaattcacaaatgattgagaaattcaatcacacttttctactctgttgccttccaggcatctataaact

SEQ ID NO: 457792 - DNA, 201 bp, Homo sapiens
gccccaccatgctgggccgccaccttgtagcctctcttcttgtctcatctgtcatggactctcctgtgtgggcatctcacctctttcatccatcacacccragtcctgtactgtaggtgtgtgagatccaggtgccgccctgccctctgctacactggactcctgcagtgcctggaacacaaaaggtcctgcggtggggat

SEQ ID NO: 457793 - DNA, 201 bp, Homo sapiens
caccaccacgcctggctaatttttaaattttttatagagacggggtctccctatgttgcccaagctggtcttggactcctgggctcaagcgatcctccggycttggcctcccaaagtgctgagattacaggcatgagccacctcgcccagcctatggtgatactttttaagatatggccataactatagcacacattttgt

SEQ ID NO: 457794 - DNA, 201 bp, Homo sapiens
tccagggcttccaaccagaacaggctgaggctcaccttcatcttaaaccacatctgagcatggcctcttcctttttcttctctcccttacaggtttcttcygagaacacgtcgttaacaaattactgacatgtgattccctgtcctaggctttgtttctggaggaccccatctaagacacccatgtgtatttatgggaaat

SEQ ID NO: 457795 - DNA, 201 bp, Homo sapiens
ccatggccttgaaccctccagtctcagggtctcccttatcctccttgagccctgttcatagcaggagtactgacatctcttcagctctgagacccagctargggctggcagtttggccccaccatgctgggccgccaccttgtagcctctcttcttgtctcatctgtcatggactctcctgtgtgggcatctcacctcttt

SEQ ID NO: 457796 - DNA, 201 bp, Homo sapiens
agtagctgaggttacaggcacccaccaccatgcctggctaatttttgtatttttagtagagacagggtttcactatgttgtccaggctggtcttcaactcstgacctcaggtaatccacctgtcttggcctcccaaagtgctgggattacaggtgtgagccactgaacccagccttcttggtggattctttagaattttct

SEQ ID NO: 457797 - DNA, 201 bp, Homo sapiens
gtgagagaaaagcaggatacctttaaaaccatttcttttcctaatttcacaataatgaaaagacaggaagaaacttatttctcgatcaagagcaacatgcyacagtgaagtagcatggacattaaaattaaacctgcatttgaatcccagcagcctcacttacagtgaccttgtgtgaagtccataacctctctcagtttc

SEQ ID NO: 457798 - DNA, 201 bp, Homo sapiens
agagagctgagagccagttgttaaattatcaggaatttgtgagccagctgttaaatcattgatagcttgaaatctaccatggtgggtgtatttacaccacrgaaattggcaaacactacacatcagagctcttttttcttctccccaaaaagccagctgttaaacattaaccaacacatccctgactacctatctttcctc

SEQ ID NO: 457799 - DNA, 201 bp, Homo sapiens
gtccaagtcccaaagctgaagagcttggagtccaatgttcaagggcaggaagtatccagcatgggagaaagatgtaggctgagaagctaagccagtctagkcttttcacgttcttctgcctgcttttattctggctgcattggcagctgattagattgtgcccactcagattgagggtggacccacctttcccagccctca

SEQ ID NO: 457800 - DNA, 201 bp, Homo sapiens
gatggtcgctgtctcttcggagctgttgggtacacttcccagacggggcggcttggcagaggcactcctcacttcccagacagggcggccgggcagaggckccccccacctcccagacggggcggctgggcagaggcactcctcacttcccagatgggggcggccaggcagaggcgctcctcagttcccatttggggcagc

SEQ ID NO: 457801 - DNA, 201 bp, Homo sapiens
gtgtgatgttccccttcctgtgtccatgtgttctcattgttcaattcccacctatgagtgagaacatgtggtgtttggttttttgtccttgcgatagtttrctgagaatgatggtttccagcttcatccatgtccctacaaaggacatgaactcatcattttttatggctgcatagtattccatggtgtatatgtgccaca

SEQ ID NO: 457802 - DNA, 201 bp, Homo sapiens
cctctcttcatctttccccagcacattgattgtacccagcaacagccatctgattccaagttccttatgatcattgcttcactcaaacctctcaaatgccygtgatagtgccctacccatcttccattccagctggccatggtgaaagtttgaacaatttcactgcttcagcatgccacaggctatgagtgtcccaccgac

SEQ ID NO: 457803 - DNA, 201 bp, Homo sapiens
tcctttctctgggccccatttcctcacccctccagatcctcacctcctttggggagcagctgggtctggctttccttggtacccctgagcacccaacccaragccggcacccagtgcatgtttagtttgtggcatagtttaacatccattcacacgcacatctgacagaaacttgtgatcatccatcataaagagaattta

SEQ ID NO: 457804 - DNA, 201 bp, Homo sapiens
tgcagctgaacctaagagtaatacagtgatgttgtgcaagtcatttaacctttcccagtttgtctctcatctgtaaaatggggataataatatctctctcrcagatttgtaaggattagatgaggttatacagtagaaagtatcttaccaagtgcaaacacatagtaggtgctcaacaaatattaattctcttccttttca

SEQ ID NO: 457805 - DNA, 201 bp, Homo sapiens
ccaggcactgagctatttgctggggatccaagctaaacacaatccctacctcctgccaccttcaccctactggggaaatcggacagttaacaaagcatttrtaatacacagttatcagggctggctggggacatgtggggggtgctggggtacgaaacactcaagggaggcttcatggaggaagtgccacctatgctgggg

SEQ ID NO: 457806 - DNA, 201 bp, Homo sapiens
ccaccatgtgaggacccagccagaaggcgctgtccataaaccaggaaaccagccttcactagacaccaaatctgctggcgccttgatctcaaactttctgrcctccagaacggtgggaaataagtttctgttgtttctaatctgtccagtttgtggtattttgtgatagaagcccaagcagactaagacaccattctctgc

SEQ ID NO: 457807 - DNA, 201 bp, Homo sapiens
gctgggatggggagcaggtgtttgggccagggcctggctggtctcctggtggccgccccacccgttctctttcagcctgttcttctccatgggacaggacscagctggatcccaatgccccagaaagcaacaaagaccccatttacctgacccatgagagcctctggctgatgctcagtaattgtctgttgaatgaatgaa

SEQ ID NO: 457808 - DNA, 201 bp, Homo sapiens
cccaaggggacgcaaagctgcagaatacacatggtgcatctttctcacaggccaggtttgctcagagacatggagacgaaaaggtattatttttaacttaygacatagatatattattagagtgttaaatatacatgaattttcaagatacaagaataaactttaaagaaatgccatgctttccactgggctgctgtgggc

SEQ ID NO: 457809 - DNA, 201 bp, Homo sapiens
agaacattctaggctgaacttctagggcccactccaagtctacagccagacagttggggcacaggactggcctgggcttccgaagccttaggcagtgcccsctggcccaggtcatggccagcctctaacagctcagctgccttaggggtttatagcatctcctctctttatatagcattgtgacatttgaattttcagcag

SEQ ID NO: 457810 - DNA, 201 bp, Homo sapiens
ggggcatggagtggctcccatggccaggaagctccccttagctgagggcagttctccagagaagggagtgagctgtcagcagcccaccctcactgcagccrggcgggtgtaccagccccaaggaggggactgcacctgggaagtttgcttaattctttggaccttgctttgctcatgaatctttccaaagtgagcataata

SEQ ID NO: 457811 - DNA, 201 bp, Homo sapiens
tctctgtgactctgtttcctcatctgtgaaataagtataacaccttgttggatttttgtgacttcaacaagatgacgggtgtagagttcccaacccagcartgagcacatcattgtcactcatgataaggcagctcttggtgtccttatggctgatgttatctggtgaagtcagccctctctctctgaggctgcctctcat

SEQ ID NO: 457812 - DNA, 201 bp, Homo sapiens
caaactgggggtacatgctagttctttgaattgggttatccttgctaagtgtcatgtgcgtgcgtgagtgtgtgtgcgtgcctgtgtgtgtgtgtgcctgygtgtgtgtatgtgtgtttagctctctttaagcatcccagagacaaagtggttctagatgagggatgagacagggtcaagaaaaagaaaaggaaagctacc

SEQ ID NO: 457813 - DNA, 201 bp, Homo sapiens
gagtgatgggagcaaagagctaaggacagaacaccagcatttagggatgggcagaaaggtcaggagctgatgatgaggagtatgagcaggagtggccaggsaggcacgaggggagccagcagagagcagcatggaagccaccgggtgagtttcattatgatgaattgacaaccactgggcaaggtagataggattatccct

SEQ ID NO: 457814 - DNA, 201 bp, Homo sapiens
aagatggtttctacgggggctctgtagcttcaggtaatggctgaattactgttgtgtggtcagctccaatagataggagatccagcaattctagagagtgrctgtctaccctctgaaacagacatggaaagggacaaatctctactgccccccacaaacttttgtaaggggaacgtggttctagggtgacagaagaagcgg

SEQ ID NO: 457815 - DNA, 201 bp, Homo sapiens
ctgcaaggctgggcctcactgtggagggcaggaagcggctgggatggggagcaggtgtttgggccagggcctggctggtctcctggtggccgccccacccrttctctttcagcctgttcttctccatgggacaggacccagctggatcccaatgccccagaaagcaacaaagaccccatttacctgacccatgagagcctc

SEQ ID NO: 457816 - DNA, 201 bp, Homo sapiens
ggcaggaagcggctgggatggggagcaggtgtttgggccagggcctggctggtctcctggtggccgccccacccgttctctttcagcctgttcttctccaygggacaggacccagctggatcccaatgccccagaaagcaacaaagaccccatttacctgacccatgagagcctctggctgatgctcagtaattgtctgtt

SEQ ID NO: 457817 - DNA, 201 bp, Homo sapiens
cattttgcagatgaggaaactggggctgagatggaaaaggagcgaccagaggccacccatggtttgttggtagagctgagatgcgaacaaagctcaaagcragtctgaaacctcttaattgggaagctctgtaggctccaggaatttcttgagggattaactatcaggaaggtagaaagggctagaacactgtgcagggca

SEQ ID NO: 457818 - DNA, 201 bp, Homo sapiens
cctggagagggctagagaatccaggctgggctggggttgggggtgaggttctgccctgcccaccttcccaggcagagctctgggctaagagccagaggtgmaggaatgttgtctgccacagccttgaaccctttatggggtgctgaacatctactcaccttcatgatgtgtccttccatccacaggggaatgatgtgcgga

SEQ ID NO: 457819 - DNA, 201 bp, Homo sapiens
gcttctaaactccagtgtaatggaaacacgtcccatttctcccacacacccccaaagtgatgggatttggagcagacatccagcctggggtcctctcctcrggctcacactgcccactctagcctttatgagtggtggtgaccagactggaggccatgggatttatctgacatgtcctgggttggacagtcagtgggcctc

SEQ ID NO: 457820 - DNA, 201 bp, Homo sapiens
tttaatagaaaaaagactggagtgaatttctaaaaacacagcccatttttgctaccatattgctgtgcggccttgggcagacctcttcacccttctggatmttagtattccctagagagtgagggagaaagctgagatcttatctgaagttcccttccactgtagccttgggcaggtctgtgcatgaaccagtcatagggg

SEQ ID NO: 457821 - DNA, 201 bp, Homo sapiens
atcacaggactggagcctgggttcctggaagcagaagagttgcgttcactgttctttcctctttccagggagctaaaaccccagggctcagaacaataccrtcatcgaggaaccagggacctcagtctaacccatagtctaagccttgttggctaattctaagtctgctcaacttagccagggagataccagaaatcaggg

SEQ ID NO: 457822 - DNA, 201 bp, Homo sapiens
tccagcacaggggcattgctggcttttctccattctctaaaaggtttacccattcctttttttttttatgatgaagacaattcacattatagaaaattcaraaaatgcacagtagtaaaggccaggtttttcagaaatttcccatagtcccaccacccaaaaatcatcactggtcatgttttgttggggtgttctttactg

SEQ ID NO: 457823 - DNA, 201 bp, Homo sapiens
gtggctctgaaagcatctagtggcagcattgccccatctgttcccaccatgccctgttgctcagctccttcaggtggcaagaaagagccagccccagcgayctttgatgacagggtgtctgagacagggttacccagaaaacaggctctgagacaaagatttgcatacaggaagtttatcaggatatgttttcaggaacag

SEQ ID NO: 457824 - DNA, 201 bp, Homo sapiens
gagtgaggcctcgggggccctggttgggatgcaggtggcatcagggtcaggagactagactcttagtgaccaggaaggacatggaggcttggtgaggggarggggcctgccccaggtcacacacaagcgagtagcagagtctggcctgagcctaggtctcctgactcccagcctgtggctttcctggggcctcttgtcgcc

SEQ ID NO: 457825 - DNA, 201 bp, Homo sapiens
gtgtgccaccccttggtaacgatcatctctcccctttctgttcaccatttcagttgttcggttgtttcttagcttgggagacccgcaacgtcagcatcccygcactcaacgacagcaagtacatcgggatgagtgtctacaacgtggggatcatgtgcatcatcggggccgctgtctccttcctgacccgggaccagccca

SEQ ID NO: 457826 - DNA, 201 bp, Homo sapiens
tggctctgagtgggtacttaacctatttgaggctcctcctgcctctttagaccaggatgaattatgcccaattcatggtttgccatgagcattaaatgcargaacttgtgaagcgcctgtgagcctccaacattgcccccagggagagattatggtgattacggtcggtgggaagctgagtattatttcagtgccatggga

SEQ ID NO: 457827 - DNA, 201 bp, Homo sapiens
ctggacattgtctaagggttagggacaagctcagcatccttggcttcagggggtcaagggaacatcctcaacacatgcactcaatcgttgagcacagggcwccaatcacttgtatgggctccagcacctggcatgggtcactagagtttgtatgaagtgcacactgaggtgtttaaaccattggatggccaggagtaattc

SEQ ID NO: 457828 - DNA, 201 bp, Homo sapiens
aagagcacatttattgtcctgtgtcactttgagcaaatcacttgacctctctgagcctcttgtacctgtaaaatgtggtatgtacaaccctccactgcttwcctctctaggcaactgtgagacccaaatgaggtaaggatattgtgaagcacataacacagtacacatgttatgtatacatatatgaataatagagtcctg

SEQ ID NO: 457829 - DNA, 201 bp, Homo sapiens
tacaacaggtgcatgccaccacactgggctaatttttaaaaattttatgtagaaacagagtctcattctgttgcctagtctggtcttgaactctgaggctsaagtggtcctcccacctcagcctcctgagtagctgggactacaggtacatgccaccatgcctggctaattttttaaaatttcattttgcagagatggggg

SEQ ID NO: 457830 - DNA, 201 bp, Homo sapiens
ggctgccccgtgggatgaggcagctccctgacactgagggcaagttccagtaaaggactcagttgttcactgtcagcagctgatattcctagcagctgggrggacaggcatatcagcccagcaaaagggattgaggtggagccccacagtatccactatatctataaacaataaccaaggcagatatttacaacacaggtc

SEQ ID NO: 457831 - DNA, 201 bp, Homo sapiens
aaagccttccttgatcaggcaaatgcagatcaaaaccacatgacatgtcacttcacacccaccaggatggctaaaatccaaagtcagataataacaagtgytggtgaggatgtagagagactggaaccgttgttcattccatgtgggaatgtaaatggtctttggaaaacagtctggcagtcgcttaaatgattaaacata

SEQ ID NO: 457832 - DNA, 201 bp, Homo sapiens
tggcccaggacttgtcactgtggttagggcacctgccacagccgttcacctggcctgccttcctctggttcctcctccttcaagcctcttccatccatggyggctcctgctttggccactgaccaaagcaccattgccatcctgccgtgcttgctgggaagtcaccacttggttcccacttcatggcaggtgaaaacatat

SEQ ID NO: 457833 - DNA, 201 bp, Homo sapiens
cccctgatatctgatcaaattcctcgtccttcacaagcctcaggtgatgtctgatctccctggcctgacttcagcaagaatcctgtccggttggttcagcmagaattcccccttacacctgacatttcctcatagtaatgttccgtccgtgacctcccaccctgccacttggctgtaaatccccacatgcccttattctgc

SEQ ID NO: 457834 - DNA, 201 bp, Homo sapiens
actgaatgggaatgggacccatccttgtttgacatcacttagatttgggagtgagtctgccctcagatcattctaattttaacaatcaaaaaatgactcasggtcttgaagagggcccaggagggattttaaagcttactctaagttgagtctgtaggtggacataatagatgcaatcaactttatgtttctcttaatggc

SEQ ID NO: 457835 - DNA, 201 bp, Homo sapiens
ttccccagtgcccagataaaagtctaactcattctgtaattgtttaaattcacattatgacctaatttaattgaaggtgatagagatttgggtaggagacrtttatttctaaggaccatatattctggtaaaaaactctttgatgaacctgtaatcccatgtatccctgacgttatcattttcatatcactttcttgactc

SEQ ID NO: 457836 - DNA, 201 bp, Homo sapiens
tctggttaaatggtggtggggactcagagccttgcccagtagggtcatgccatgtcagtctttcttcaagaggcctcctgaggaactgagtttgaagcccctaggttggagtcctcaccttcaaggccaccaaagatcccacccaggaatgaggccttctctgccattccccacagatacagcagctgggggtgcccgtct

SEQ ID NO: 457837 - DNA, 201 bp, Homo sapiens
gatgttccagccaggtccccttcttgaagctaatcctgaagtctgatgtcaaccagccaaaagcgatggcatactttacagctgaggtcatgacagaaacrgctgagcagggatcattggaacccatggaaggaaagcaaagtctaaataattgttataaaagtgtatgcagatgcaaaaattacatataattttatacat

SEQ ID NO: 457838 - DNA, 201 bp, Homo sapiens
tggctcttagctttatgaaaaatgtgggacttcctagaacttgaagtctgagttgaaatattaacattcttgcatttggctgtttgcttcccaaagctgcrtgggagcctgaggagtcattggtctcaccctttgtgacctttacactctccatcagcccgtgcctgtggtctccctaaagggttcttggtccctgtccta

SEQ ID NO: 457839 - DNA, 201 bp, Homo sapiens
gtatatgtgtgtgtgtgtgcatgtatatatgtgtgtgtgtgtatgtgtgtgtgtgtgtatgtgtatatgtgtgtgtgtgtgtatgtgtgtatgcgcacacrcacgtgtgctgggtggtgggatagtggagaggaagaatatgtcctccttggctggacagtgaaaatgtgtccaaaagtctctttacacatttttctccat

SEQ ID NO: 457840 - DNA, 201 bp, Homo sapiens
tgcatgcatggggtgctggggtggagcccaagcttgcagccacgaggggtggtgggcacaagctatggcaggtgtgatgaaagagaggtggggcccgggcragggcccctcacttagccccgggtcaaggaagccccagggcaggtgctatggtaggtgcatgaagctggctgctgaaggaggagagggcgttggacagct

SEQ ID NO: 457841 - DNA, 201 bp, Homo sapiens
gaggaggtgacattcaagctgagacccaaagggtgagaaggagaccactgggtgaagcgcattccatgtcagtgaatggaatagtaaacggaggaaggcascttgtgataggaaaggacctggtgtattcgtggaacagaaaacagggaaatggggctggagcatgatgggtggggagccagggtgaagagagtgagtgac

SEQ ID NO: 457842 - DNA, 201 bp, Homo sapiens
gccagctgtgtcagcccctgcgtcagccccaccgccagcccccgccacagacatgtgccaccctccttccgagtcatggtctcgggcctgtaagggtgggrggcctgggcccggggcctcccccgtgacagaaccacactgggcagaggggtctgctgcagaaacactgtcggctctggctgcggagaagctgggcaccat

SEQ ID NO: 457843 - DNA, 201 bp, Homo sapiens
ctggactttctcctgggtgatagcacagcctttctctgctggcctgacttggcatggcccccacagtaggtctctaaagggcagccctgatgctatcaccrtgtatttgaaggcttcagggctcaccactgactccctagcccagctttcagagccattgatgccagtccaacctgcctgcccagtgttatctcctgctcc

SEQ ID NO: 457844 - DNA, 201 bp, Homo sapiens
attgggaaaattcagcaaacaggtaggagcactcagtgtgtgcaggtgcaggggtcctgaggcagtacatggaacagctaacatctcccaagtgttcaccrgtgccagcactctttccagccctttgaatgaatgaattcatctgaccttcaccataacagcataatgtaaacactattatcatcctcgtttatgggggag

SEQ ID NO: 457845 - DNA, 201 bp, Homo sapiens
gccctctggagtctgccctgcccactcccagcattgctgctgagcactctccctctcttcttcaggcccagccacatggtcctctctgtgtcttggatgagtgtgctcctccctgcacagggcctttgcacaagctgttactgtggcctggaatgttcttgccacctttcttcatcttttaaatcctagatcaagtgtgca

SEQ ID NO: 457846 - DNA, 201 bp, Homo sapiens
ggaaaacatcctgacatgctgtgttaggggcaaggtgagattctaaagacaaggctaaaagagagacagcagaacaattctgttagaaaaagaactagaartttggggttagaaggagagaaaaatgaaaggagtgggtgataaataacaggacagtgtggctaaaaagcttttaagaatagggatgtcagccaggtgcgg

SEQ ID NO: 457847 - DNA, 201 bp, Homo sapiens
ggaagcagagtcacctgccacagtgaggccagacacacgcatgtggcggtgcggtgcagaggctggcacggttccgtggatactcagtgagtagaacgtaygggacttgagactggctaggtgtgaggggccacgcaacgatggagtcttggacggctcccagttttctgccttggggaacctgcagaggtgaacgttgat

SEQ ID NO: 457848 - DNA, 201 bp, Homo sapiens
atacaaaaaattagccaggcatggtggcacacgcctgtaaccccagctactcaggaggctgaggtatgagaatcacttgaacctgggaggtggaggttgcmgtgagtcgagattgcaccattgcactccagcctgggcaacaagagcaaaattccttttcaaaaaaaaaagaatagggatgttgaatatttgattttaagt

SEQ ID NO: 457849 - DNA, 201 bp, Homo sapiens
ggctccatgctgaaggagacatgcagctacaagggactgtgagtgaagcctaagacaccagggtgagcaagggacaaggtaggcagtggaaatggcagcgrccatgccacagagggccttacagggcaggaggcagggggtggcattgatctttatcccaatctttatctccggggggctgaggagcccattgttgggtgg

SEQ ID NO: 457850 - DNA, 201 bp, Homo sapiens
ttgtcacattctccaggaaacagatgaggctgtgacagcacattagaatgtacataactgtgatagtgagaacaaaagtgcagactctctgggttagaagsggccctctagtgcttgaatccctcctcagcctgtcacacaggtgagcatctaacacctggacagctccagggctggctgaccggccacgtttctgttgca

SEQ ID NO: 457851 - DNA, 201 bp, Homo sapiens
tctcaaaaaaaaagatactgggggcaagtttggcaactccagtttctcagtggcatccctgagaggcaaggggcttgccttgttccccaggttgagaaccrgtggagcaaaaccctaccctcattctgccatggccccagtccttcccgggggccactctgcccatctcctcatcacttgctgttggacacctgggaatgc

SEQ ID NO: 457852 - DNA, 201 bp, Homo sapiens
gaaagggaagaaatgtcaaagaccctgaggatttgaaaagcatgttggaaaattaggatggagggcagtgtaacaccccataccctgtatcttccctgggraccacatgtgtttctggcaggtccatggcttgaaattcttaaccgttgtttggatttgctaagtcatttaacctctctgaatctcagtttccttatctat

SEQ ID NO: 457853 - DNA, 201 bp, Homo sapiens
ataagctgcctacaagaatctcacttttcctgaaaaagatataaatagactgaaagtgaaggaatggataacaaaattccacacaaatggaaaccaaaagygtgcagaattagctatacaaatatcaaacaaaatatactttaagtcagaaacataaaaagggacaaaggagaacatgacataatgataaagggatcgatt

SEQ ID NO: 457854 - DNA, 201 bp, Homo sapiens
tgcagaattagctatacaaatatcaaacaaaatatactttaagtcagaaacataaaaagggacaaaggagaacatgacataatgataaagggatcgattcmtcaagcagatataacaattgtgaatatgcacccaatgccagagcacccagatatataaaaaaaattattaaagctaaagaaagaggtagaccccaatata

SEQ ID NO: 457855 - DNA, 201 bp, Homo sapiens
actttaaggtcagctgattagcaaccttaattttatcttcaatctaattccccattgccatctaacctcatgcaagttctgggaattaggatgtgggcatycttggggggccattattctgcctactacagtaagcattcaataaataatttttattaatgccattattctctcctttctcttaggaaacaggagggcagg

SEQ ID NO: 457856 - DNA, 201 bp, Homo sapiens
gctgagctaaggaaaagcacatgaaaggaggtgaaaattaagtctgtcctgcctcagtaggtctttgggccactgctcaagctcctgtagtcctcacaatrcctgtgtcagtcacctgatgccaggtatccacagccacttctcagtcataatgatgaaagcaagatcatgacattaagtaccatcatgtagtgaataaca

SEQ ID NO: 457857 - DNA, 201 bp, Homo sapiens
tgaaaattaaggcccagaaagactagtgccagggggatttaagtcagggtttgactgatttcagatttgggcttggctgccttctctggatgcttctcacscagtgatcctttgtgtctgttgttccagggtatctggatacccttggctgtcagtaatagaagagccatgcagagtgacataaaccatacagaaattcat

SEQ ID NO: 457858 - DNA, 201 bp, Homo sapiens
caagcagatcaagaccatctcaggaaaggtcagtgccttggtccccatttcaaccttctggcccacctcctttgatcatcttgtctgatgacattggccaraagagcacatttattgtcctgtgtcactttgagcaaatcacttgacctctctgagcctcttgtacctgtaaaatgtggtatgtacaaccctccactgctt

SEQ ID NO: 457859 - DNA, 201 bp, Homo sapiens
agctgttcaacctctctgagccttgagtcccctctctaaggtggggataattgtccccacgtggcccacttccctggactgccatgccttcaacaggagawaatggagaaagtgcttcataaattgtgaagggctctttataagccaagggtaattgctgcgcagataagagctttgactgtagagtctataattcctgca

SEQ ID NO: 457860 - DNA, 201 bp, Homo sapiens
ttaaataataatattattaaggttgtatatggagggtctgccatgtgctagacactgttcttagtatttttctgcgtgaactcttttaatttttaaatccrctctatgctttaggtaccttatccccattttatagataatggaactgaggcacagaaaagctatctaacttgcacaaggactcacagctaataagtagta

SEQ ID NO: 457861 - DNA, 201 bp, Homo sapiens
cctttgtcctcggttaagtctttcctggtctccttgccagttattcactctttgccctggcagattttatacatcattgaatgctccaccaacatatatayagtctattgtaggtgagactttccagtgttagctgttatttgggatgggaaagaagagtgtagaactatatgaccaccaggggtgagtggtggcccatac

SEQ ID NO: 457862 - DNA, 201 bp, Homo sapiens
ttcagagccattgatgccagtccaacctgcctgcccagtgttatctcctgctccttccacttgctccacagcacagccttgccagacaccctgcctttccrcacatgcgccctggacctttgggcctcagagccctgctctcaccgttcccttaaccagatgactcctcatcaattctctgccaagtctccctttcccact

SEQ ID NO: 457863 - DNA, 201 bp, Homo sapiens
tcaggcccaattgaacacgccaatttaagactccaggctctgccctgaagagctgcgtgaccttgggcaagttaacttctcatctgtaaaatcagtttttyccttggtcaaatagaggcgctagactagatggcctctggggccccttccagctcatttggtttctgccttttgtcattgactgagcttcaggcttggggg

SEQ ID NO: 457864 - DNA, 201 bp, Homo sapiens
ccagatggttgctccatcttgacatccttaacttcatcctgtctgcaaagtcccctttgccacataaggtaacatattttagggatttggacatggacatygttgggggaagggcatgactctatccatcactgatgattctttggaatttctaaaactgagaaatcagttttccatcagcctggctgatcgaaagaggga

SEQ ID NO: 457865 - DNA, 201 bp, Homo sapiens
gtaacctccacctccgggttcaagcgattctcctacctcagcctcccaagtagctgggattacaggtgcacgccaccatgcccagctattttttttgtatytttagtagagacggggtttcaccacgttggccaggctgctcttgaactcctgacctcaggtgatcctcctgccttggcctctcgaagtgctgggattacg

SEQ ID NO: 457866 - DNA, 201 bp, Homo sapiens
cacctggggaagggtccatccttccttggctcattctcttgttagaaagttctgtctctgagggagctgaaatctacttcctggtggcctcccccactggwactggccctttccctgaggcccaggtgccacgccagtcccctgggtttggtggcagttcttcagggatgcacgaagtgatatctcacaagcctagacttc

SEQ ID NO: 457867 - DNA, 201 bp, Homo sapiens
tttatttctgtaactggttatagggaaaaggcctggaaaatatcaccagaccaactcaaaattacaaagtcttccagagcttatatacctcctaactacakgtctatgtgtaagtgtgcattcatctaaagacagaagtgattaactttttaatctataactaagatctgagttcggaagaccttcctctggagcctcagt

SEQ ID NO: 457868 - DNA, 201 bp, Homo sapiens
gggggtgggagagggggagtggagggaagggaaggaggagaggtgggctctgggagcagtttgcacctatgccttttgctgtctgtgccaaggcgagtccmagcccttcagttcctcacctcattccacaccccaaatctgaagccctagaagaagggagccagtggaagccaagaaggggggtttgcaaatgctaggggc

SEQ ID NO: 457869 - DNA, 201 bp, Homo sapiens
ggttccatctcccttgtcattccttctgctgaatcttggtatttttgtgtggtccacagcaatgtctctaatgcgtatgctttcattatgattccaacaarcacaaaaatgtgactatgagaataaaatcagaaaccttagaggtacttggggctcccagtcattcagtgtccctgctctcccaggctgcatttgcgtctc

SEQ ID NO: 457870 - DNA, 201 bp, Homo sapiens
gcatccgacctagcagccggagcacagacttggagagcagtccggagcggagccagagagccaagggctttccatcccaagacccctccccacgccctcgrtttgggttctgcctgaagccccagagcggaccttcaccgccaggccggggctggagcgcgcggagcgggtctggaggagcgatcgctggccgcgcaaggt

SEQ ID NO: 457871 - DNA, 201 bp, Homo sapiens
ctaacatgctttcatctgcctaattaaataccgcgcacaaacccccaactattgtgatcgaacaatccccacaaagtcaagattacaaaaagggcacaagwctagtaattatgccaagtgtggttccccttccgagggtgcctatgattaagccatttagagggatcttgtggaataaaggtggatgcccttcatgaagtc

SEQ ID NO: 457872 - DNA, 201 bp, Homo sapiens
agttgctcagaaagtgccctggcagttctcgtcccggacgtgcagtggtgtccggccgcgccgctgctgttggccgggcggctgcaggcagtttctcacgsctcaggcttgaagcatccgacctagcagccggagcacagacttggagagcagtccggagcggagccagagagccaagggctttccatcccaagacccctc

SEQ ID NO: 457873 - DNA, 201 bp, Homo sapiens
tttgaggtccggaaggctccggaacccaaggggcttgagcgtgcagcgtggctgggcgcctggtgcgcgccagcagctctgagcccgctccgcgcgggcargtgtggggccaccggctctgcagcgcttctgcctggacgtgcccggcgctgcctgtggccagagcgatttcaggagacccctgcctcgggttagttgctc

SEQ ID NO: 457874 - DNA, 201 bp, Homo sapiens
gcctcatcttgtttaggaagcaaatctcagagaccatgaaacacaggcagcatctgaaaagcatccaaggttctccttgcagtcctcactcaagaaaggcrgtttcaaacctaggcatttcatgttctcacttattcctgaagcaggatgatgtcaatggtgtcttagaaatcacttccttgtaacttctgtgctggttca

SEQ ID NO: 457875 - DNA, 201 bp, Homo sapiens
taacggtgcttaagggaaagctacatttttctaaaattttctgtgctttttgagatgtgtccttatctgattaaaagccatttagctacaattggaacatraagtcttgaaactgtttttttcagcagaaagtctggctgcctatgtccaacttcaggcccaattgaacacgccaatttaagactccaggctctgccctga

SEQ ID NO: 457876 - DNA, 201 bp, Homo sapiens
aaaacctaattcccagagttccttcttacctcttctgctacccagttatcagctattcttttgtcccctgcttgctttggaggaataccatttaaaaaatmaagggtgggttggcaaagagacattgacaaccaaatgtaatgtgtgaatttctttttaaatctaggatttaaaacaacccataaatacatttttggaaca

SEQ ID NO: 457877 - DNA, 201 bp, Homo sapiens
cattcacacgcacatctgacagaaacttgtgatcatccatcataaagagaatttatcgtggtggattgggaagttatttaaatgcaatgcagcagggaccyaggaaaattctaggtctcatttataccttcagaatgtgaatggaggagagtggttagaactgacatgcagtacctggggaagcctggaatgtagatattt

SEQ ID NO: 457878 - DNA, 201 bp, Homo sapiens
ggaaatgatacctttgaaatggatgtctgacagaaatcatgtcaaccaagtgatcacagagtgccaacgcgtccccctgatgtgactcttacttatgtagkattcctgacaagaatacataaaatctgaatataaaacattcaggctaatccaaattgaggggcttctacaaaataactgaactagatttttcagaaacaa

SEQ ID NO: 457879 - DNA, 201 bp, Homo sapiens
aaatgggcccactgtcacgccaccaggaagccaccaactgggagttgagtccaggcagcagtttctggagcgcttggcaggctgcactgccctcctaggcrgggcggatggaggatgggtgctgttcactgaaatgaggcatctgggagaggggcgcagggaggacaggagtttggtttggggcatggtgagccacagccc

SEQ ID NO: 457880 - DNA, 201 bp, Homo sapiens
tgactccatagagctgcatggatgtcctgtcctgcagaaactgttgctcaataaagccgatgaaatggatgtgtgtgggaggttgggtgggggaataagcraagctccttggcaggaaaatgagctggcgtctcaaactttagtgtgtacccggatcatcagggatgtgtattaaaaatggagcagccctagagattccgg

SEQ ID NO: 457881 - DNA, 201 bp, Homo sapiens
gacaatggcagtgtaggtggcaagtgctagaatagctccgcccggggccctgtggaaacgcagaggaggtggctgctcatcctgccttgagaaatgtttcmcaaaaaaaaaaaaaaaaaaaaaaaaagaagagggacttttcccccaagtcttcaaagaacaaataggatttggataaagaaaacagaagctgtgcaaaat

SEQ ID NO: 457882 - DNA, 201 bp, Homo sapiens
taccctggaaggtctgttttgcaaaattaatcagctttgggccagtttcttatcttgaaccgtttgagatttctgagctgcagttgcagaaagcatgcttwgggaaaatcacatctttgtgtctttgtttctctagtgcactggtggagcctgacttgtgtgccaggcccagggtgggaggcaaaaatcagagaggtgatc

SEQ ID NO: 457883 - DNA, 201 bp, Homo sapiens
cccaatgccacacatccatgttggcagaaatacaggctgcagtccccatgaagaccttccctcttttctgtgggtaaactccaaccaacctacctcttggyaaatggttcatcatcagggtgctccttcagcatttatggggtacccattgtctgccatgctcccttacgtactgcatgtctgatgagcaagattaggtat

SEQ ID NO: 457884 - DNA, 201 bp, Homo sapiens
atcgattcctcaagcagatataacaattgtgaatatgcacccaatgccagagcacccagatatataaaaaaaattattaaagctaaagaaagaggtagacyccaatataataatagttggagatgttaacaccccactttttagcattggacagataatctagacagaaactcaacaaagaagtgtcagaattaatgtaca

SEQ ID NO: 457885 - DNA, 201 bp, Homo sapiens
cttgacatccactaccccacacttgcatctccaggctcagcctggcagtgcccacctgaaagtcactcacagcttccagtgggagatgggaacaaaccagkaaacattcacaatgaccagcccttggcccatactggccttaacagagcttcaagagaccatggtgccctgaggaaaataagggtaagtttttaacagagc

SEQ ID NO: 457886 - DNA, 201 bp, Homo sapiens
acctgttagttccaagagtttttgtgttgattctttgggactttctatatagacgatcatgtcatttgcaaacagagacaattttatttcttccttcccartctgtatacttcttatttcctttcttgacttactgcattaactagaacttctagtacaatgttgaataggagtggtgggaggggacatacttgctttgtt

SEQ ID NO: 457887 - DNA, 201 bp, Homo sapiens
aacattcacaatgaccagcccttggcccatactggccttaacagagcttcaagagaccatggtgccctgaggaaaataagggtaagtttttaacagagctractttgttgttttaaagaacacccttcactttgagatggtgccttcccttccctcctcctccttccttcttatgtcctttaaaaaattaaattgtggtga

SEQ ID NO: 457888 - DNA, 201 bp, Homo sapiens
aatagaaagctgggagagccagcattctgcagcccttgcttcctgctgccacttgagtgtgctgtggacactggtccgactggttactgctgctaatctargttcccggttgcacttcctagcatcctcaagcccctcctgtagatctagaacttctgttggctttttcttttcggatatccacatccccacaggtcagag

SEQ ID NO: 457889 - DNA, 201 bp, Homo sapiens
gttgttccagcactgtttgctgaaaagacgatcttttctccattgtattacctttgcatctttgtgatagatcagttgactgtgtttgtgtgggtgtattkctgagctccctgttccattacattgatctattatttcatcaatcccaccctatgttggttagcatagctttatagtaagtcttaaagtcagggaatgtca

SEQ ID NO: 457890 - DNA, 201 bp, Homo sapiens
aggtagcaggcctggaagcagagtcacctgccacagtgaggccagacacacgcatgtggcggtgcggtgcagaggctggcacggttccgtggatactcagygagtagaacgtacgggacttgagactggctaggtgtgaggggccacgcaacgatggagtcttggacggctcccagttttctgccttggggaacctgcaga

SEQ ID NO: 457891 - DNA, 201 bp, Homo sapiens
caatgaatgggagttcctgttgctccacatccttgcctgcatttggtgtcgtcagtgttttggattttagccattctaataggtgtgtgcttgtatctcaktgttataatttgcaattccccagtgacatatgatgttgagcatcttttcatatgcttatttgccatctagtgagaggactgttcagaacttttgtgcact

SEQ ID NO: 457892 - DNA, 201 bp, Homo sapiens
tgcccaaggtccttcagctagtaagtgggatacttgaagtcagacacctggctcaagccagacccttgaccattaagctacagagatgtaggagacagggkctccatgggccttccccaacagagggtgctggctcagcccatggaaggggcatctcacctggcaaagacttccagaagaaagcaagatgcatggacttgg

SEQ ID NO: 457893 - DNA, 201 bp, Homo sapiens
tcttgtttaaatggtttcttcatgagtttgtcaaacagctgctccagatgtgcagagatccccctggcctctgactttgtttacttgcctgctgtgtctgsaaggtgcctaggcctgtcctggggaaactggacttcaataggctttgcttgttcgtagatctaatgacccagccactcctgaaggctgttgggttgcagg

SEQ ID NO: 457894 - DNA, 201 bp, Homo sapiens
ggacacaggtgtcatggcagaagccatataccctcttaagggtttggggacctgtggctggggaaagaggacttatggctgtgggaggagacccagattgrctcatctccattgctgtgtactctgggcaacctccttctctcacgcaactcatttccttataaatacaacctccagcctcctgtctatccaggaattggc

SEQ ID NO: 457895 - DNA, 201 bp, Homo sapiens
gcctgctgtgtctgcaaggtgcctaggcctgtcctggggaaactggacttcaataggctttgcttgttcgtagatctaatgacccagccactcctgaaggmtgttgggttgcagggtgataggtggactccttagtgagaggtaggccctgcacccttctgtggcccagcctcccctccagtacttactcacccatcagag

SEQ ID NO: 457896 - DNA, 201 bp, Homo sapiens
gtggtattgttgttttgcattcagatggaggaaaggccattttaaaaaatcacctcgatcaaaatccccagctacagtggaacacaacagagccctctcgracatgcaaagatcctatagaagatataaactctccagaacagtaagtaccttctccttgagaattataactgaagaagaaatacgtcactcctgcacaag

SEQ ID NO: 457897 - DNA, 201 bp, Homo sapiens
cgggcgcttctgctggagtccaggtgcagaacccttttgggaggagggtcgcgctactgctctggtggtgcaatctgggcttcccctcctccttggtcggrccctctttatgtccccagagaaagagcagaatctagattgtatcttattccctgcctcccccgcttcaccggtgaaccagcttgctctgcgctgtaaata

SEQ ID NO: 457898 - DNA, 201 bp, Homo sapiens
cccccacagtaggtctctaaagggcagccctgatgctatcaccgtgtatttgaaggcttcagggctcaccactgactccctagcccagctttcagagccaytgatgccagtccaacctgcctgcccagtgttatctcctgctccttccacttgctccacagcacagccttgccagacaccctgcctttccgcacatgcgcc

SEQ ID NO: 457899 - DNA, 201 bp, Homo sapiens
cagacacattgggaaaatgcttctctgtgactcatggataagaaagggcatagagccaggtacttgctgaaggtaggctttcactctgctacaaaaatggytgaaaagcgttctatccttttggctatttacattttagagcagtggctctgtgctccctggcacagtacctggcttcaagctgctaaactacctcctgtt

SEQ ID NO: 457900 - DNA, 201 bp, Homo sapiens
aaagctgtttctaatttggacctttctttctatgtgttgcttcccagtgcgacaacgcaaaagggttgaaagccttctacgatgcaataaaatacgggcckaaccacttgatggtgtttggaggcgtctgtccatccgtcacatccatcattgcagagtccctccaaggctggaatctggtgcaggtaaggtctgagctac

SEQ ID NO: 457901 - DNA, 201 bp, Homo sapiens
gtgggtgccaagaccacactcctggagcttacagcgtggactcagggctggcttaaggagactccccaccatgggagaactgaaacccagaaggtttccaygaggaaagatttgtttgttgggctcatgcccctggggaaaagctgtttctaatttggacctttctttctatgtgttgcttcccagtgcgacaacgcaaaa

SEQ ID NO: 457902 - DNA, 201 bp, Homo sapiens
catcaactgctctggaggacaaggggaggggcagagctactggaattgggaggagcagccgcttcacacgggctctaaccaagccaggaagcagccaaggkaaaaaatacccggaactctttctcgccttctttctgactcctcctggggcctcccattggctctctttcactgagctcccataggctccctaactcctac

SEQ ID NO: 457903 - DNA, 201 bp, Homo sapiens
atcacttgaaactgggaagtggaggttgcagtgagccaagattgtgccattgcactccagcctgggcaacagagtgagactccatatcgggggggtgggggaaaagtcaacacgtctcaatacacaaaaggaaaaataagaaagagatgaacactccaaggaacgaggcgcaaagggcccacggtgtaggcttaataatgc

SEQ ID NO: 457904 - DNA, 201 bp, Homo sapiens
caacccagggctaggcgtcagggcacaccttggtcctggggaataggtgagagccagacagggcctcagtcctgagcagggaccaaggtctaagtgtgggmtcagtggccagtctggcccatgctgactaactgaccttctgaggtgacactggacagtagtagccacatggcctgaccatgtggggagagggctgggcag

SEQ ID NO: 457905 - DNA, 201 bp, Homo sapiens
gatgtgccttgtgtagagtttgtgcgcagggcctggctggatgtcagggacactaaggcaaaggtgttctcggggaatgacttgcattgggtcccactgawgtcttctcttgatcctctaggatccgaaccaccaaaagacaagaccatcatcctggagcagctgcggaagatctccctacctctctacagcatcctctct

SEQ ID NO: 457906 - DNA, 201 bp, Homo sapiens
atcactgaataatgtcctatttcctggatgtaccacagattgtttattcattcacccaccgaagggcatcttagttgcttccaagttttggcaattatacmtaaggctgctacaaactttcatgtgtgagtttttgtgtggacataaattttcaattcatttggataaatacccaggagtgcaagttatgattatatggta

SEQ ID NO: 457907 - DNA, 201 bp, Homo sapiens
gtaaacgcctagcacatcaaactgaataaattcagcattcatggttagcaaagggctcgagcttctgccccatgcagctccctcgagtgccatggttaggscttcccagcattacttccctgttatacaaagggaggaccaggcttgtgagctcccctatcagatgtggactttgactttcacctctggggatgggctgcc

SEQ ID NO: 457908 - DNA, 201 bp, Homo sapiens
gacactgtgcgggtagtggagtcaccatagcaacgtggcccctgtggacgtggagctgtctgcaaggacagtgctgggcgtggccagggccccagtgccarggggaagggatggaccccggcagctgagctgacccggctctgggatcccagcccctgtctgcccagacaaggagtccagcaggtggggatgagaaaaagc

SEQ ID NO: 457909 - DNA, 201 bp, Homo sapiens
gatacaaaataaacataccaaaatctatggcatttctgtacaccaataacaatcacattaagaaccaaatcaagaaggcaattccatttacaatagctacaaaaaaaaaaaaaccctaggaatacatttaaccaaataagtgaaaaatttctacaaggaaaactacaaaacactaatgaaagaaatcatagatgatgcaaa

SEQ ID NO: 457910 - DNA, 201 bp, Homo sapiens
cccattactaggtatctacctagaggaaaagaagtaattatatgaaaaagatgcacatgcatgtttatagcagcacaatttgcaattgcaaaaatatggarccagcccaaatgtccatcgatcaatgagtggataaagaaaatgtgatacacatacacatgtggtacacacaccacggaatactattcagccataaaaagg

SEQ ID NO: 457911 - DNA, 201 bp, Homo sapiens
gaatgtaataaacactcagcaaaataaaaccagtagaggaaaggaggaacatttccattagcaactaccgtttgaaggtaagaaaaaaatcattaaataaraataaataatatgctttaacattttgacatttggaggcatgaatccttattaaaaatgaggaaatttaggggcaaaggtaggacaagatgtcctggctga

SEQ ID NO: 457912 - DNA, 201 bp, Homo sapiens
cccagcgtggtggcaccacctgtagtcccagctactcaggaggctgaggcaggagaatcacttgaaccagggaagtggaggttgtagtgagccaagatcaygccactctactccagcttgtgtggcagagtgagacactgtctcaaaaaaaaaagaaaaaggaaaaagaaatttcgcatttttaaataggcaattctgtaa

SEQ ID NO: 457913 - DNA, 201 bp, Homo sapiens
aaaaagatacctgcacttttatgtttattgcagcactattcacaacagcaaagatatggaaccaacctaagtgtccgtcaaaggacgattggataacagtmcacacacacacacacacacacacacaatggaatactattcaaccacaaaaaaagaataaaatcatgaattttgcagcaacatagaaagaactggaggcca

SEQ ID NO: 457914 - DNA, 201 bp, Homo sapiens
caaagacattcataggtatccaatgacagaactcttaagacatttagaattacggtttagaaatgtaaaggataaagagacgaaaaaaaagcagggctgayagaatggcaacgtaacacctacccaaaacagggcaatggattttccaggaactggtgaggcctgtactccctctgcaacaatccatttctagaattccag

SEQ ID NO: 457915 - DNA, 201 bp, Homo sapiens
atctgagccatttattagtcttggagagaaaaatgatagtcaaggcagcaaaggaaagacagaagagtctgtgaaaacactcgtcagcctgtagccctaarccatgtccattagagcgcataaaacactttttagtgacaggttgcacaagtgttgtggagaaccctgttatgacggcagctataaactcaattctcctga

SEQ ID NO: 457916 - DNA, 201 bp, Homo sapiens
cagggcctgtgaagtgtcccaaagaaataatcccctgcacttcaggccatacatttcaatccctgtatctttaacctccttgttaagtttgtctcttccaraattgaagctctaaaactacaaattgttcttcaaatggagccccagacgcagtccatgactaagatctaccgcagacccctggaccggcctgctagccca

SEQ ID NO: 457917 - DNA, 201 bp, Homo sapiens
agcttcacagtacactctagatgttgccactattcccaccactgttccctttacttatatcacccaaagaatatgggggctacaagatcaaagagccatcyggttgggttctcacaacaaagtaaataagaccaacagtgaaatattgttttctttctgtctaattgcagtaccattattcaaataatattgtcctttatt

SEQ ID NO: 457918 - DNA, 201 bp, Homo sapiens
taccttgaaaaagtgactgcaggatatcctcaagaagtgaggaccaggagaaagcaggaatctccagtaacaccaaacacaacttctctctgcttttccaycttcaaatctggggtaggacacctccttccacagtcatatttacggactcagatttccaagtatggctcttccctggaagcctcactacattaaaaatga

SEQ ID NO: 457919 - DNA, 201 bp, Homo sapiens
gatgggtgatttctgcatttccaactgaggtaccgggttcatctcactggggcttgctggacagtgggtgcagcccacagagcgtgagctgaagcagggcrgggcatcacctcacctgggaagtgcaaggggtcagggaattccctttcctagtcaagggaagccgtgacagatggtacctggaaagttgggacactccca

SEQ ID NO: 457920 - DNA, 201 bp, Homo sapiens
aactctgtaccatgaaacaataactccccattacttccttcccccaagaccctgacaaccacagttctactttctgtctctatgattttggctgctatacrtagctcattaaagcagaattatgcaatatttgtccccttgtgtctggcttattgcatgtagcataatgtcttcaaggttcattacatggtggcatgtatc

SEQ ID NO: 457921 - DNA, 201 bp, Homo sapiens
cttaacattcccaccagcagtgcataagggttccaatttcaccacatgctggccaacatttgttattttgttttttgatagttgccattctaatgggtgtraagtcgtatctcattgtgatttttaattgcattttcctagtgattagtgatatggagcatcattttatgtgcttattggccatctgtatatcttctttgg

SEQ ID NO: 457922 - DNA, 201 bp, Homo sapiens
cccctgggatgaagtggagaatgttaaggcaaaccaaaatctcagccttccttacataatattactggtataatagcgttctccaagggctgagatgccasgaggaagcacaaatcagaatgctctggagttagaccaaggtgggctggctcagcttggcatctggagggttgaaggacttgtggcaagtaggtcaaatcc

SEQ ID NO: 457923 - DNA, 201 bp, Homo sapiens
gggttccaatttcaccacatgctggccaacatttgttattttgttttttgatagttgccattctaatgggtgtgaagtcgtatctcattgtgatttttaaytgcattttcctagtgattagtgatatggagcatcattttatgtgcttattggccatctgtatatcttctttggagaaatttctattcaaatcttttgtcc

SEQ ID NO: 457924 - DNA, 201 bp, Homo sapiens
atatcatgtccagagaaagggatacccctgggatgaagtggagaatgttaaggcaaaccaaaatctcagccttccttacataatattactggtataatagygttctccaagggctgagatgccacgaggaagcacaaatcagaatgctctggagttagaccaaggtgggctggctcagcttggcatctggagggttgaagg

SEQ ID NO: 457925 - DNA, 201 bp, Homo sapiens
atactgttctttgatacataaaaatttctcattttgatgaaatccatgtttatgttttcttttgttgctggtacttttggtgtcatatcaataaattactstcatatccaatgtcatgagctttcttctatgtgtttttatagttttaggtttttgatctattttaattttaatttttggtatgaggtaagggtctagctt

SEQ ID NO: 457926 - DNA, 201 bp, Homo sapiens
gattttagcccagtgagaccaatcttggacttttaatctccagagctgtaagagagtccatttgcattgcttaagccactaagtttgtgattatttgttayagcggcaatgagaaatcaatacagtattattttttctaggtattaaatgtattttttgaaattatcaaagaaaaaactgaaactgagtagttgctgaact

SEQ ID NO: 457927 - DNA, 201 bp, Homo sapiens
gcctttcacaggtgtcagacctgcatcatagtctgaaggttctctgcctactcccaatctttctatcagttttctttcaacagactttaccctattacagmtcttatacttctaactctgtcctattatctgctttccagaggatccagtcaacacaaccactaaaaaaatattttcacgtaatggccctactaggcctgt

SEQ ID NO: 457928 - DNA, 201 bp, Homo sapiens
tcactgcagccttgaccacctcaggtgctaaggcaatcctcccacctcagccttccgagtagctgggacagactgcaggcatgcgccaccatgcccactawttattactatttgtaaagacagagtctcccaatgttgcccagtctggtctggaattcctgggttcaagcgatcctcctgcctcagcctcccaaagtgttg

SEQ ID NO: 457929 - DNA, 201 bp, Homo sapiens
atgaataattgatcactaggtaataaattattcaggtaggcacacagtttccaaggaatcctggagtgagtctggttaatggcaaagcaggagcttgaggmagctgctgaggggacacccccccattaacctcacactgcaaaggcatgggtagttagtgcctctcagtgtgggcttttcaataggggccatattaatgcc

SEQ ID NO: 457930 - DNA, 201 bp, Homo sapiens
gtctcacaggggtccttggagagggctgccagaggaactgggaaaagaccacagggagaaggaaacttccagctgaactttgtaaccattttgaccaaacrcagtttcctggacagaacctgggggagggggcgaatagggagtgcagacacagcacagaagctgcggcaggtggggaaacacagaacctgaaagtcctgc

SEQ ID NO: 457931 - DNA, 201 bp, Homo sapiens
ttacattatgtaatgcccctctttgtctcttctaatctttgttggtttaaagtctgttttatcagagactagagactaggattccaaccccccccccaccttttttttttttttttttttttgctttccatttgcttggtaaatagtcctccatcctttgttttgagcctatgtttgtctttgcacgtgagatgggtctcc

SEQ ID NO: 457932 - DNA, 201 bp, Homo sapiens
attatgatgctagctggttattttgtccatttgttgatgcagtttctccatagtgttgatggtctttacattttggtttgtttttgcagtggctggtaccrgtttctcctttccatatttagtgcttccttcaggacctcttgtaaggcaaaatcctcagtatttgcttgtctgtaaagggtttcatttctccttcatttt

SEQ ID NO: 457933 - DNA, 201 bp, Homo sapiens
aaaaacaaaaaacaaaaacctgcagctagctgggtgtctgcccaaacggttgcccagttttgtgcttgaaacccagggcgcttgtggtgtaggcccctgayggaatctcctggtctgtgaagactgtgggaaaggtatagtggctgagctggaatgcactgttcctcatggcacagtccctcacagcttcccttcgctagg

SEQ ID NO: 457934 - DNA, 201 bp, Homo sapiens
aaatcacccaccttctgcattgatctcgctgggagctgcagaccagagctgttcttattcggccatcttgccctggaatcgccttttgaatttttataaartagaagtctccactgagtacttccaagtactcaatactgagttcatgtccaagtatagttatgaaatattgagcccttgcctcttcatccatcagaacgg

SEQ ID NO: 457935 - DNA, 201 bp, Homo sapiens
aaaggaatagagaacagagccccaatgagattagcaagaaattaaatcataaacatgtatatgggcaagggggaggaaagcactcaaagatgggagcagtytcctcttcctcttctccttatcacatttttctttagcctcttgcatctgattaatctaatttctttcctatatttatttcatctttttcagctcaatgaa

SEQ ID NO: 457936 - DNA, 201 bp, Homo sapiens
attctggatttggttattgaggttcctctggactctattaaaaatcagctcactttttattataaaacatctcgatgaaaaaagcccttttaggggaaggaaaaaaaacctacaaggtagactacacccatcaaattttgctcttgcattttttgcactcatcctaaaatactttatttattgaataaatgagatacaata

SEQ ID NO: 457937 - DNA, 201 bp, Homo sapiens
tttggttattgaggttcctctggactctattaaaaatcagctcactttttattataaaacatctcgatgaaaaaagcccttttaggggaaggaaaaaaaayctacaaggtagactacacccatcaaattttgctcttgcattttttgcactcatcctaaaatactttatttattgaataaatgagatacaataacttaata

SEQ ID NO: 457938 - DNA, 201 bp, Homo sapiens
gagaatctgaactgtttttaatattaattttagtattaaaatttttaatattttaatatgctttcatgttatactttctcttaaaagataagcaggaagattttttttttaactgtgagaaactgaaagaaactgtgttttgaggtctggcaaggcaaaatagaaagaaatcattagtttcttccaaattgttttcataac

SEQ ID NO: 457939 - DNA, 201 bp, Homo sapiens
gtcccgagcatgagtgcctaaaggaaaagcagcttacttcagcttcctggctttctcatcagccgcctggagcttcctcagccgcatcctttctcttggcrtcattttctgtacttctgacagtgccctcagagtctgcaggtggatccttttttgcctataaataacaaagattcccctcatatagcccatcccaaacat

SEQ ID NO: 457940 - DNA, 201 bp, Homo sapiens
atttgttttccatgtatgagaaaagcacctagtaggtattccctggtactttcacaaaaccttgcactgatctgtccaggagcccacctcatgacaaggaycatattctaaatgagtctcaatatccaactctttatgcaatgccttgaaccttcatgagctctctaaatgcctgatgtggatgctgaggatcaggcagaa

SEQ ID NO: 457941 - DNA, 201 bp, Homo sapiens
ccgagcatgagtgcctaaaggaaaagcagcttacttcagcttcctggctttctcatcagccgcctggagcttcctcagccgcatcctttctcttggcgtcrttttctgtacttctgacagtgccctcagagtctgcaggtggatccttttttgcctataaataacaaagattcccctcatatagcccatcccaaacatgtt

SEQ ID NO: 457942 - DNA, 201 bp, Homo sapiens
ctgattgtaatccacaggtcacactttgagtaacaaagaactagtttattgactctaagttgctgtggtatgatacattcctatactgtgagtacttcctytgacatttttgaatcaatgaatattgccaatataatggaaaatacatgtttttaccatgatgcctgctggatggaattttgagctgagagagcaatgatt

SEQ ID NO: 457943 - DNA, 201 bp, Homo sapiens
ttttagtagagatagcgtttcaccgtgttagccaggatggtctcgatctcctgacctcgtgatccacccgcctcagcctcccaaagtgctgggattacagrcatgggccaccgtgcccagccaggaacacttttacactgttggtgggactgtaaactagttcaaccgttgtggaagacagtgtggcgattcctcaaggat

SEQ ID NO: 457944 - DNA, 201 bp, Homo sapiens
tccttgaaatctgcataggaaactgtcagtacaagttctgtccttttcttagcctatctgtgctattgtcacaaaataccacggactgggtaatttataargaacataaatttatttctcacagtcctggaggctgggaagtccaagatcaaggcaacagcaggttcggttgtgtggtaagggctgctccctgctgccaac

SEQ ID NO: 457945 - DNA, 201 bp, Homo sapiens
tttagggattgtcaaacatcattttagtccaaatacttcatttacaggttgttttgcccaagattgaattggcagttggggacaaataggggactagagtccaggtttcaggactctcaggacagtgctcgttgggctggataatggtcccttgacacaggagtcctgaaggaaggttccctaatgttccaaaatttgaac

SEQ ID NO: 457946 - DNA, 201 bp, Homo sapiens
tattttatagtatactccttctacttatttaaaaaatgttaactgtaaaaccttcaggagatattccagaggaaggcattgttatcataggaggtgacagstccctgcatgttattgtccatggagatctcccagtgggacgagatatggaggtgaaaggcagaaggcctaggctaatatgtgtgttcgtgacttcgtttt

SEQ ID NO: 457947 - DNA, 201 bp, Homo sapiens
gttaagatgcaaaggaagaacatttataggcaatgagacaatccaaaagaaattacttctaatgaaacaatatgaggtcaactgattcacttctaatgcaytttttatttccttacagtgcaatgtgcaaatatttgcttagcattttctctcctacacagggccgtaacaaatcaaaagtatagcaaacattcactagca

SEQ ID NO: 457948 - DNA, 201 bp, Homo sapiens
gataactgacctgtttttgttccttcagttttgccttttccagaatgtcatatgaatggaatcattcagaatgcagcttttaaagaactggtgcctttcamttaacatagcatctttgagattcatctaaactgctgtgtgtattataatttgttccttttattgctgatcagtgtttcactgtacggatgtgctgcagtt

SEQ ID NO: 457949 - DNA, 201 bp, Homo sapiens
aaatccctataaaaacaaaatatatgttatactctcttaagaaaaacgggtcagagaaatgaaataatttgctgaaggaaatggacaaagatttgaatagragatgccaaagtctacacacttcccactatttaaaaccttatctagtcttccattgagagaaaataatcatatcatcacattaaaatttgcatttgtgta

SEQ ID NO: 457950 - DNA, 201 bp, Homo sapiens
cactactggattcccttttctcagcagaatggatgcctgataaatatttgttgaagattgactgttgatgaaagataaaagtggtgctcagggaatgcttyttctaaaggatatgaaaggcaattgcctaggagcaggaaaatcaattaggattgaaaagtgcaaggatataatggtacttacaaagtacaaggataacag

SEQ ID NO: 457951 - DNA, 201 bp, Homo sapiens
cataacaatgttctccaagtggtaagcacataagtatggagcacaactgtgaaacctgcatgcatggaaaataaattcatcaactaaaggaaaaccatacsgtggtatatgcagagcactgtctgaaacacacattctataaggttttactctattacatttgtttctatccaaccttaaagctatgattgatacttattt

SEQ ID NO: 457952 - DNA, 201 bp, Homo sapiens
ggacatatattttcacttgacttggataaatacctaggagtggaatttctgggttgtatggtaagtgtatatttaactttataagaaactgcttattgctkctcagccgtttggtgaagatcaagtgtgaagaaaccactcaactgttttccaaagcagatgttccattttgcattcccaccagcagtgtatgacagtctt

SEQ ID NO: 457953 - DNA, 201 bp, Homo sapiens
gtgaactagactataggaaaaaatactttagaacaccaattatgtttgcagacacagtctgatgattataagcaagcattggcagttcattagggcaagtkctgcaggacctgtactagaaaacattttacaaaaatcttctttaggagttgctacttatgcatatcaataaaaatgtattatagtagaaaatttctttag

SEQ ID NO: 457954 - DNA, 201 bp, Homo sapiens
tcttgcagtgtcattttatgcctagaatagaagttctcaaacagtggtccaggaacccctggaagtctctgagactcaggaagtccaaactctaacaataycaatatgttatttgcctttttcactcttgtcctatcattaatagacagttttccaaaggctatatggcatgtaatatcacaatagactaaatacaaagca

SEQ ID NO: 457955 - DNA, 201 bp, Homo sapiens
gctttcaggaggcccattttctattcattattaatcaaggtatacataggaaacagaccagcagcataggaattagcagagggattataagaaatgcaacrtcggccgggcgcggtggctcacgcctgtaatcccagcactttgggaggccgaggcgggcggatcacgaggtcaggagatcgagaccatcctggctaaaac

SEQ ID NO: 457956 - DNA, 201 bp, Homo sapiens
aaccactcaactgttttccaaagcagatgttccattttgcattcccaccagcagtgtatgacagtcttagttgctccatatccttgccagacttagtattaaaaaaaaaaaaaaaaaaaaaaaaaacagctgggcgccgtggctcatgcctgtaatcccaacactttgggaggccgaggccagtggatcacgagggcagga

SEQ ID NO: 457957 - DNA, 201 bp, Homo sapiens
ggcattggctgtgaggcacaaacatacaatcagtagttgacttaaaactgcagtttcatacagtttttttccatttaaatacatgtttaccaaaaaaaaamccaaaaaagtgaaagaataaagcacaaaagtaagtctgaatgacagcttttttatcaaagaataagcagatcaagagttaacagtatgcctgcacatagt

SEQ ID NO: 457958 - DNA, 201 bp, Homo sapiens
caccgcgcccagctaattttttgtatttttagtagagatagcgtttcaccgtgttagccaggatggtctcgatctcctgacctcgtgatccacccgcctcrgcctcccaaagtgctgggattacaggcatgggccaccgtgcccagccaggaacacttttacactgttggtgggactgtaaactagttcaaccgttgtgga

SEQ ID NO: 457959 - DNA, 201 bp, Homo sapiens
tacactactgagagcaaaagcatcttgagacaggccaggcaaaaactaataagctttgggtatgtaatgagccaaccaggactgtagttaataagcaacayttttcaaattagatttttgtttaaaggaaattatttactttccaaattcctgctcatttcatcgccaatgactagttttcataatgtaaaacaaattagg

SEQ ID NO: 457960 - DNA, 201 bp, Homo sapiens
ctgctcacaatgtactttcatggaaatctttctctaccaatttattaaagaaagcaaatgttacgggaaaatagactcatagattcttacttggcttatcrtgatattcattctaagtacaaggacacctctaaatcattttttggataaattaacaagggaacaaaatgcgtagatttgtgttcaggttctttctgtctc

SEQ ID NO: 457961 - DNA, 201 bp, Homo sapiens
atggctgtactgatttacattctcaccactactgcacaagggttcccttttctctacatcctggctaacacctgaaatttcactttttcatgtaaatactstaattactagtgatatctcccaccagcaacatcgccctgagcatagacttttctaaatgcttcacttgacagaacagagctctgtttccagtctacttct

SEQ ID NO: 457962 - DNA, 201 bp, Homo sapiens
ctcctaatgctatccctccccactccccccaccccacaacagtccccagagtgtgatgttccccttcctgtgtccatgtgttctcattgttcaattcccasctatgagtgagaacatgcggtgtttggtgttttgtcgttgcgatagtttactgagaatgatgatttccaatttcatccatgtccctacaaaggacatgaa

SEQ ID NO: 457963 - DNA, 201 bp, Homo sapiens; identical to SEQ ID NO: 106620

SEQ ID NO: 457964 - DNA, 201 bp, Homo sapiens
atttgactcccaggtcttaaatctgctgatacaaaagcagattgggggtgggggagagctgaaataaacaagtgagatgtgtattttacttagaagtctayaatttgcatttctttctttttccaaaatacagacaactgtgaagagataagcaaataaatccctgagggagtatgaatacaagcaatgaaaaagaaggct

SEQ ID NO: 457965 - DNA, 201 bp, Homo sapiens
ataaccagctaacatcataatgacaggatcaaattcacacataacaatattaatcttaaatgtaaatgggctaaatgccccaattaaaagacacagactgscaaattggataaagagtcaagacccatcagtgtgctgtattcaggggacccatttcacattcagagacacacataggctcaaaataaagggatggaggaa

SEQ ID NO: 457966 - DNA, 201 bp, Homo sapiens
tgaactcagctctgcaccaagcagacctaatagacatctacagaactctccaccccaaatcaacagaatatacattcttctcagcaccacgttgcacttaytccaaaattgaccacatagttggaagtaaagcactcctcagcaaacgtaaaagaacagaaattataacaaactgtctctcagaccacagtgcaatcaaac

SEQ ID NO: 457967 - DNA, 201 bp, Homo sapiens
cttaacatcacaattaaaagaactagagaaacaagagcaaatacattcaaaagctagcagaaggcaagaaataactaagatcagagcagatctgaaggagmtagagacacaaaaaaaccttcaaaaaatcaatgaatccaagagctggttttttgaagagatcaacaaaatagatagatgctagcaagactaacaaagaag

SEQ ID NO: 457968 - DNA, 201 bp, Homo sapiens
taaactagagaatataaaagaaatagataaattcctgtacatttacaccctcccaagactaaaccaggaagaagttgaatccctgaatagatcaataacaraccctgaaattgaggcaacagttaatagcctaccaaccaaaaaagtccaggaccagatggattcacagccaaattctaccagaggtacaaagaggagctg

SEQ ID NO: 457969 - DNA, 201 bp, Homo sapiens
aataacagaccctgaaattgaggcaacagttaatagcctaccaaccaaaaaagtccaggaccagatggattcacagccaaattctaccagaggtacaaagmggagctggtaccattccttctgaaactattccaatcaatagatcaatagaaaaagagggaatcctccctaactcattttacaaggccaacatcatcctga

SEQ ID NO: 457970 - DNA, 201 bp, Homo sapiens
tctgtaaaatgggctcatgtctacaatgattatcccaccctcactcccccattgccccaaggtcatggctttccatgagtccattatgctaatcacttaasgtgttatctaattatttcaaccctggaaagcaggcattgttatccacattttatagatgactaaattaaaccttgaagaggtaaagcaacctgcccaaga

SEQ ID NO: 457971 - DNA, 201 bp, Homo sapiens
gatggccagtgatgatgagcatttttacatgtgtcttttggctgcataaatgtcttcttttgagaagtgtctgttcatgtccttcacccactttttgatgyggttgtttttttcttgtaaatttgtttgagttcattgtagattctggatattagccctttgtcaaatgagtaagttgcgaaaattttctcctattttgta

SEQ ID NO: 457972 - DNA, 201 bp, Homo sapiens
gcagttaggggaaggagcaggcctccctactggatctctcctccagtcaggcatgattcctcagcagtacgggagctatgatgtagacccccaagacaccygtggctgcactgcaagcaggcatggccaggctgggcctcaggagaggccagaagatcaaggggtgctcaggtcagatcagccccctctgatgggtaagac

SEQ ID NO: 457973 - DNA, 201 bp, Homo sapiens
ttgatgcggttgtttttttcttgtaaatttgtttgagttcattgtagattctggatattagccctttgtcaaatgagtaagttgcgaaaattttctcctaktttgtaggttgcctgttcactctgatagtagtttcttttgctgtgcagaagctctttagtttaatgagatcccatttgtcaattttggcttttgttgcca

SEQ ID NO: 457974 - DNA, 201 bp, Homo sapiens
tttgctgtgcagaagctctttagtttaatgagatcccatttgtcaattttggcttttgttgccattgcttttggtgttttagacatgaagtccttgcccaygcctatgtcctgaatggtaatacctaggttttcttctagggtttttatggtttcaggtctaatgtttaagtctttaaaccatcttgaattaatttttgta

SEQ ID NO: 457975 - DNA, 201 bp, Homo sapiens
tcaattttgttgatcctttcaaaaaaaccagctcctggattcattaattttttgaagggttttttgtgtctctatttccttcagttctgctctgattttasttatttcttgccttctgctagcttttgaatgtgtttgctcttgcttttctagttcttttaattgtgatgttagggtgtcaattttggatctttcctgctt

SEQ ID NO: 457976 - DNA, 201 bp, Homo sapiens
aagtgaatgaataaacacataaatacataatcgtatgcattggggtttcctgttttggtttttgcttttctctgtaaattccctgagagccctgagaagtrgtcccgagcatgagtgcctaaaggaaaagcagcttacttcagcttcctggctttctcatcagccgcctggagcttcctcagccgcatcctttctcttggc

SEQ ID NO: 457977 - DNA, 201 bp, Homo sapiens
cagagactaggattgcaacccctgccttcttttgttctccatttgcttgctagatcttcctccatccttttattttgagcctatgtgtgtctcagcacatragatgggtttcctgaatacagcacactgatgggtcttgactctttatccaatttgccagtctgtgtcttttaattggagcatttagtccatttacattta

SEQ ID NO: 457978 - DNA, 201 bp, Homo sapiens
tctggtagtaacaattccctcagtatttgcttgtctgaaaaggatcttatttctccttcgcttatgaagcttattttggcaagatatgaaattctgggttrgaatttcttttctttaagaatgttgaatgttggcccccaatctcttctggcttgtaaggtttcagctgagacatctgctgttagtttgatgggcttccct

SEQ ID NO: 457979 - DNA, 201 bp, Homo sapiens
tttggtcttttcacatagtcccatatttcttggaggctttgttcatttctttttattcttttttctctaaacttcccttctcgcttcgtttcattcatttmgtcttccatcactgataccctttcttccagtcgattgcatcggctcctgaggcttctgcattcttcacgcagttctcgagccttggctttcagctccatc

SEQ ID NO: 457980 - DNA, 201 bp, Homo sapiens
ttttattcattcctttttctctattcttccctgactgtcttatttcagaaaaccagtcttcaagctctgagattctttcctcagctaggtccattctgatrctaatacttgagattgcattcttttttttttggagatggagtctcattccatcatccaggctggagtgcaatggtgctgtctcagctcactgcaacctcc

SEQ ID NO: 457981 - DNA, 201 bp, Homo sapiens
acagtactctctgttttggaaatcctctcagctacactgtagtatgcagtgcaattacctgtttcactttgatgactagtatttgcttgcactctagcacrtagagaagacttcatttatcagccagtaacttgtggaaacggacctgctatagtggtcccagtgcacctacctggaatgggcgccagtaactgaaacttg

SEQ ID NO: 457982 - DNA, 201 bp, Homo sapiens
tcatttctttttattcttttttctctaaacttcccttctcgcttcgtttcattcatttagtcttccatcactgataccctttcttccagtcgattgcatcrgctcctgaggcttctgcattcttcacgcagttctcgagccttggctttcagctccatcagctcctttaagcacttctctgtattggttattctagttata

SEQ ID NO: 457983 - DNA, 201 bp, Homo sapiens
agctcctgggctgtgtgctctaactctgggagacttgtactgggccccaattttgctctctggctcctcaaggtcgtcaactcattgcgctgggggggccwatgtgctcctggacagctggtcactacactctgatggatggtgccagccataccattttgtaggatggtggcagcagatccatccttgcttgcatgtgcc

SEQ ID NO: 457984 - DNA, 201 bp, Homo sapiens
ctttctgtttgttagttttccttctaacagacaggaccctcagctgcaggtctgttggagtttgctagaggtccactccagaccctgtttgcctgggtaasagcagcggtggctgcagaacagcggattttcgtgaaccacgaatgctgctgtctgatcgttcctctggaagttttgtctcagaggagtacctggccatgt

SEQ ID NO: 457985 - DNA, 201 bp, Homo sapiens
aatgtatgattaatgttaagcatatttccttaactgaaaaagaggctaaataatcacattggctaacattttagcaggtaataaccccatgcttgtaagcmctttacatgaattaactcacttaaatgcagagcaactctatgaagtaggtacttttttttatagtcatagagaggttaagtaacttgtccaaagtaatac

SEQ ID NO: 457986 - DNA, 201 bp, Homo sapiens
atttggtcttgagggctctgccttatgaatggattaatgctgttattatgggagtggttagttattgtaggagtgggttcctgataaaaggatgattttgccccccccccttccttctctcttttcccctctctcttgcccttccgacttctgccatgggatgatgtagcaagatggcccttaccagatgctggcaccttg

SEQ ID NO: 457987 - DNA, 201 bp, Homo sapiens
atgagacattattgtagcagacacttgtcatttgtggctgcccactttagacagcttccttacactgtggcagatccctgggctgtgagtcttgcctcccmtggagagataaaaacagacaaaccaaccctatgactcccagcctctcttgagcttgggtgctgatgtgtgacctaggttctgtcagtcagctgcatccac

SEQ ID NO: 457988 - DNA, 201 bp, Homo sapiens
accaagttcctgaagctccttaatttcttggcaagacttaagtgaattctaggatactcgatgcagtcagtttagtgctaatagatttttaaagacaaatrcatttaacatttacactcgatgggctttttaaaaacaaagcaattacttacatggcattaattatatgagcagcctccttctgacaatccaaatttttgt

SEQ ID NO: 457989 - DNA, 201 bp, Homo sapiens
gagagataaaaacagacaaaccaaccctatgactcccagcctctcttgagcttgggtgctgatgtgtgacctaggttctgtcagtcagctgcatccacccracactttgatgtgagtgtgagctgcatcaagaaacaaggtggcacggcgtctccattttgcaaatatatgtgtcatcagaaacagcatggccctgagctc

SEQ ID NO: 457990 - DNA, 201 bp, Homo sapiens
gaataaattaccaagaatcttttcagatttggggtgcttttgaccatggcagggagcctgagaacaaagcatgctagttttccctgggttatgtaaaattmcatgtagcttttccaagaagatcttgcagggtcaggctcctgcctgtctctccagcttcatcttgcactgcttgctctctcactcccttttgccaatcat

SEQ ID NO: 457991 - DNA, 201 bp, Homo sapiens
gacatcatacagaagagggaggcagtgtttctcaggacttactctcctaacaaggtggtgaagtctacattttgaggttgttccaagtaccacaaccctgmaggtataattttgtgtgtttgagggccagtctttttaaaagttcaactgagcaaaattcattgatttaaaattgttaaacaatggaaaagtagtaatatg

SEQ ID NO: 457992 - DNA, 201 bp, Homo sapiens
gccccagagtcaagggcctcacttgcctcatcttggtcccagcagatccctgtgaataccttttgacccattttttttttgaatgctcaaagcctcttcartgtgtttttgatccccacaaccagcatatgaggctctttccagaggaccacctgcaggttctactggatcccatttggcctgcacagaaggagagctgga

SEQ ID NO: 457993 - DNA, 201 bp, Homo sapiens
attttatgtaacttttaacaatgtccttaatacaacaaaggatagacagaaataaatacatgaataataccattgaactattttgtgggtactcatgaaamtgtgcatttgtaagagaattttggatatgtacactgagaatatttctgttccagtaaataataacactaaatatttccaactgagctgactggtacttta

SEQ ID NO: 457994 - DNA, 201 bp, Homo sapiens
cagactaccaaaatatggataaaattaattaaaacttctataaagcaataagaaaaatgagagaatccaatagaaaaatgggcaaaagacttgaacggacrctaaatggccaaaagtcatgagaagacgctcaacatttttagtcatcagaaaagtgcgaattacaaccactgtgtactaccactacatgctacacactca

SEQ ID NO: 457995 - DNA, 201 bp, Homo sapiens
aacactttttttttttcttgagatagagtctcactctttcacccaggctggagtgcacccaggctcggctcactgcaagctcagcctcctgggttcatgcyattctcctgcctcagcctcccgagtagctgggactacaggtgcctgccaccgcgcccagctaattttttgtatttttagtagagatagcgtttcaccgtg

SEQ ID NO: 457996 - DNA, 201 bp, Homo sapiens
gatagagtctcactctttcacccaggctggagtgcacccaggctcggctcactgcaagctcagcctcctgggttcatgccattctcctgcctcagcctccygagtagctgggactacaggtgcctgccaccgcgcccagctaattttttgtatttttagtagagatagcgtttcaccgtgttagccaggatggtctcgatc

SEQ ID NO: 457997 - DNA, 201 bp, Homo sapiens
ggtcacacacttggtcaatatgctttaacactgcaccttcctagggggcaggcaacatgctacttactccctcatgcgtttcatcttggtcctggccatcrcactgttgaaaattggtggtcctggggacatgtcttcagccatggtggtgatggtctttgtgtctgaaaatcaatgcacagcccttattgacttcatcag

SEQ ID NO: 457998 - DNA, 201 bp, Homo sapiens
atgtcctaagttattcaaatttctaccaaaatagtttttgtaatggctatagaatatgccattggatataaatattataaattatcaactgttttataaawatatatatatatatatacacatgtacacacgcatactaaacaatgacatatggatgagatcatatatgcctattgttctgcatcttccttttctcggtta

SEQ ID NO: 457999 - DNA, 201 bp, Homo sapiens
gcacatcctgcacatgtaccccggaacttaaaagttgaagaaaaaaaaaaaagaagcatggcaagatatagaaacaacctgtgtttactgatggatgaatmcacacacacacacacacacacacacacaggaatattattcagctttaaaaagaggagatcctgccacttgtgacagcgtggatgaacttagaggacattg

SEQ ID NO: 458000 - DNA, 201 bp, Homo sapiens
ccccggaacttaaaagttgaagaaaaaaaaaaaagaagcatggcaagatatagaaacaacctgtgtttactgatggatgaatacacacacacacacacacacacacacacaggaatattattcagctttaaaaagaggagatcctgccacttgtgacagcgtggatgaacttagaggacattgtgctaagtgaaataagcc

SEQ ID NO: 458001 - DNA, 201 bp, Homo sapiens
taaatcattctatcataaagatacatgcatgtgtatattcactgcagcaccatttacaatagcagacatggaatcaacctcaatgctgatcaatggtagartggataaagaaaatgtggtacatatacaccatggaatactatgcagctgtaaaaagtgagatcatgtcctttgcagcaatatagatggagctggaggcca

SEQ ID NO: 458002 - DNA, 201 bp, Homo sapiens
acaccatggaatactatgcagctgtaaaaagtgagatcatgtcctttgcagcaatatagatggagctggaggccataatccttagtgaactaacacagtartagaaaaccaaatgtcacatgttctcacttgtaagtggaagctaaatgatgagaacacatggacccaaagaggggaacaacagacgctggggcctactag

SEQ ID NO: 458003 - DNA, 201 bp, Homo sapiens
ccttctatggaaaaaggaaggcagacaagtttggcttttgtcttttcattgcttggaaggaaagagggcttagtggtctattaacagtgaattgatcaccwttctggtttgatggagatataactctactttgatgaatttattaaggttataaaaagatgtggtaggccaggcacagtggctcacacctgtaatctcagt

SEQ ID NO: 458004 - DNA, 201 bp, Homo sapiens
tgagtaggtcataaagctgggattgtagcccaggctatctggctctagagacacagactctctatgctatcctgcctctggatcttgcaccaatcagagcmttttggatcacgaaagtctctcttgagttggaaatcagggctagccctgacagagccttttaagcaggggctgatttcccaaggtaatttcaggttctat

SEQ ID NO: 458005 - DNA, 201 bp, Homo sapiens
aataagttttttaaattacatgcctggtttcagattggtttatttgggaaatttttctcatttaaaagtaatccagaaaaaccttccatttattagaagtytccaattgcagtcattgggtggtaattagctaaagttttcttaggcttcctttaattattcttttaacttggattgtttataattaaggtgaatctgtgc

SEQ ID NO: 458006 - DNA, 201 bp, Homo sapiens
aagcaattgtctacaaaggtcggcacgtagtggaaaggtgtgatgcagctgtatgccagagacagtaaggagaggtaggaatgtggctaactggagaatayggaatttgtctaagggagtagctgctgcctagctttagcagtccattgtggctacacaggaactgatgttagcaaacgttcccaaatcttttttttctag

SEQ ID NO: 458007 - DNA, 201 bp, Homo sapiens
cactcattcactccattacgctttgagaagttctgagcttacagcaaagatcctacttatgcaggcgaggaaattaaggagcataacaatgttaataaggrtataaaaaaatttaccacagataatttggttagcttctgttacaattattatatgctccaaatttaaaattagtgttaggttaatattcaaaatgcaata

SEQ ID NO: 458008 - DNA, 201 bp, Homo sapiens
actcattcattcagtccactcatctgtgatgtaagaaagaaaaatatcactgtccctgttccaagtagaattcaaactaaattggggtcaggaatggggtcaagccactacacacagcattttcagggtttcgaagttaaaaatttcttggttgaaattaccagaaaggacatgtgtatgtctgtttttctttcttctctg

SEQ ID NO: 458009 - DNA, 201 bp, Homo sapiens
acccttataaaagatgcagtgagaagtcatcatctatgaaccagaaaataggcccttgccagacactgaatctgccaatgcattgatgttggatttcccagtctccagaatggtaataaataaatttctgttgtttataagccacctagtctatggtattttgttacaacagcctgaacagactaagacaagaagtgtttt

SEQ ID NO: 458010 - DNA, 201 bp, Homo sapiens
tacctgttggtttgttctgtaagcaggctgggatccctcattcctgatttctttctctggtctttctaacgctatttcttcttcctcctcatcactctctwcacaataggaatcaaatgcatcagcgtagtactcttcagccacaagtgggtcttctgggatctctgaaataatgaacaaacagtcagatactaccagtta

SEQ ID NO: 458011 - DNA, 201 bp, Homo sapiens
aaatagaaataaacaatagaaacaaaatcagtgaagactaatacatttaatagatttctagcaaggctgatcaagaaaatcagaaaaaaacacagattaaygataacaaatagaaaaaagtgcaacactgtagattccacagatattagaaagtattaagatgacattataaacatgttttttccaataaatttgataata

SEQ ID NO: 458012 - DNA, 201 bp, Homo sapiens
aatggcaaaaattgaaattgcttttgcaccaatctaataataaatcttttagaggaaaaagaaataccactgactattttcttatcaccttaaaatcatamaatttaatcacaaaggagccaaaataaatggacattgtttaggccacacaagcactttggagacatgaactcacaaaatgcacttctatgtaccaggcta

SEQ ID NO: 458013 - DNA, 201 bp, Homo sapiens
tgaacatgggaggcggaggttgcagtgagccaggatcgcgccactgtactccagcctgggcaacaagagtgagactctgtctcaaaaaaaaaaaaaaaaaraaagaaagaaagaaagaaaaagaaaacatagaaaagagtataagagacatctgaaatacaggcttaaagttctaatatatatataaatggattcctagaa

SEQ ID NO: 458014 - DNA, 201 bp, Homo sapiens
gacaacaggtttaggatttgcaatagtgagctaaggagcccaccagaagacttggtgctgtaactttggagtaagtaaaacattccaaagaaactcacctratgacacctagactagacaagcagaagatgaattacaaataatacattgataggcctctataaatatataaattagtaactcatcagtagatactttaag

SEQ ID NO: 458015 - DNA, 201 bp, Homo sapiens
agggagataaaaccacaaagatggggagaaaccagagaagaaatgctgaaaattctaaaaatcagagcacctcttctcctccaaaggaactcagctcctcrctagcaacggaacaaagctggacgaagaatgactttgacgagttgagagaagaagggttcagccgataggtaataacaaacttccccgagctaaaggagg

SEQ ID NO: 458016 - DNA, 201 bp, Homo sapiens
gaccttaaatgacctgatggaactgaaaaccatggcacgagaactatgtgacgcatgcacaagcttcagtagctgacttgatcaagtggacgaaagggtaycagtaattgaagatcagatgaatgaaatgaagcgagaagagaagtttagagaaaaaagagtaaaaaggaacgaacaaagactccaagaaatataggagta

SEQ ID NO: 458017 - DNA, 201 bp, Homo sapiens
gaagatcagatgaatgaaatgaagcgagaagagaagtttagagaaaaaagagtaaaaaggaacgaacaaagactccaagaaatataggagtatgtgaaaasaccaaatctacatctgattagtgtacctgaaagcgacagggagaatagaaccaacttggaaaacactcttcaggatattatccagaagaacttccccaat

SEQ ID NO: 458018 - DNA, 201 bp, Homo sapiens
ccttctgaaattattctaatcaacagaaaaagagggatcctccctaactcattttatgaggccagcaacatcctgataccaaagcccacagacacacaacraaaaaagagaattttagaccaatatccctgaggaacatcgatgcaaaaatcctcaataaaatactggcaaactgaatccaacagcacatcaagaagctta

SEQ ID NO: 458019 - DNA, 201 bp, Homo sapiens
gggaaaggattccctctttaataaatggtgctgggaaaactggctagccataagtagaaagctgaaactgggtcccttccttacaccttatattaaatttmttcaagatggattaaagacttaactgttagacctaaaaccataaaaaccctagaagaaaacctaggcaataccattcaggacataggcatgtgcaaggac

SEQ ID NO: 458020 - DNA, 201 bp, Homo sapiens
aaatggtgctgggaaaactggctagccataagtagaaagctgaaactgggtcccttccttacaccttatattaaatttattcaagatggattaaagacttaactgttagacctaaaaccataaaaaccctagaagaaaacctaggcaataccattcaggacataggcatgtgcaaggacttcatgactaaaacaccaaaag

SEQ ID NO: 458021 - DNA, 201 bp, Homo sapiens
aaaacaccaaaagcaatggcaacaaaagccaaaattggcaaatgggatctaattaaactaaagagcttctgcacagcaaaagaaactaccatcagagtgarcaggcaacctacagaatgggagaaaatttttgcaatctacccatctgacaaagggctaatatccagaatctacaaagaacttaaacaaatttacaagaaa

SEQ ID NO: 458022 - DNA, 201 bp, Homo sapiens
ttctggaggctgggaagtccaaggtccaggtcaaggtgctagcagatttgctgtctggtgggagctgctccctctgcttccaagatggcacttttttgctstgtcctctggaggggaagaaagcttagacgggcaaaagggggcaattatctctctgagacctcttttgtaaaggtattaatccattcctgagggctctgc

SEQ ID NO: 458023 - DNA, 201 bp, Homo sapiens
ggtaaactaaaatataagtacaactttaaattatttctgtgacaacatgtttatttctatacctttccatgatggcatttagttcttttggatatctctcmgggagagaaggtgtgtcaccttcaacaatttttaaaacaatggataagaaattggagccagcgaatgcatgattcatgcagcacatctcatacaaaatgc

SEQ ID NO: 458024 - DNA, 201 bp, Homo sapiens
ctctgaaataatgaacaaacagtcagatactaccagttattaaaattataatgaggtaagaatactgtatcttttcacagggatgtatattttgcttgcgytgacaaagcttccatggagtgtagagctgaatctcagcttcctggaagtatttggttgaatgtaataaacactcagcaaaataaaaccagtagaggaaag

SEQ ID NO: 458025 - DNA, 201 bp, Homo sapiens
atatttcatactcatgattaggaagaaccaatattgttaaaacagtcatactgcccaaagcaatttacatattcaatgctattcctatcaaactaataatracattcttcacagtattacaaaaaactattttaaaattcatatgaaccttaaatagagccctaatagccaaggcaatcttaagcaaaagaacaaagttag

SEQ ID NO: 458026 - DNA, 201 bp, Homo sapiens
atattcttgtccttgcagggatatagttacaaagtgttcaggtaagatctgtcaacagagctccaagggtggatgttgagttttggcataaaatcagaaayctaacttcttattttcagtggcactggggaatgggagttcacacacaccttattttggaaagagattgtcctgactactatttttctcagctttaaaaaa

SEQ ID NO: 458027 - DNA, 201 bp, Homo sapiens
atattgtactttacagaatcaaagacaccatcaattttgaaatgaatcattatattatatatcattaataaaactactgtccatgaaattatgatatgccrtctattttaagatgcatctccatttcagaggtgttcaaatgtgcaaaactgtgtattttagactggatgaaatatggtatatgtctaattgtaaggaaac

SEQ ID NO: 458028 - DNA, 201 bp, Homo sapiens
gtctctgtgcccgccaaggctctgattgcaatggcaggggaggtgaggtgggatacactcctgtcagcagcagtagcagggcagtgtgcatgcacatgcasgctggcagggcaggaaagtcaaaatctgcccatgtatatagatgccagaaaagcaacatggggagggtggtggctgtgagcctgaggaagctgcagttag

SEQ ID NO: 458029 - DNA, 201 bp, Homo sapiens
taaggtggggtttgctgagtgatttttgagcaatggtttgtttgtttgtcctagctacttccacgtatttgaaaacatttgcaagaggcccttattctgcmaagctttcttaggtctgatggaatgagatgagaataacaactgcacactcagtgagtaggatctcaggcatgggctttcagacataagatgtgatgcagg

SEQ ID NO: 458030 - DNA, 201 bp, Homo sapiens
atgttgagcagtgattacatttatagtagcaagactctagaaagtagttacaactatgaactagctttttaaaaatataattgcaactttattttagattygggggcatgcatacatgtgcaggtttgttacatgggtatactgtatattgtgtgatgctgaggtttgggatatgaatggcccgatcacccagatagcaag

SEQ ID NO: 458031 - DNA, 201 bp, Homo sapiens
aataaaaatctgaatttacatttctcatgtgctgtaggatttcatgagaaattaacattaaattggtctggagtagttatacaggatgcctgccagaaagaaaaaaaaaatgactggagggacattcctacaacctgctgtttagcatttgctcagagaaaaatctccactcatgataaactctcaacctaaatttactta

SEQ ID NO: 458032 - DNA, 201 bp, Homo sapiens
attgcaactttattttagatttgggggcatgcatacatgtgcaggtttgttacatgggtatactgtatattgtgtgatgctgaggtttgggatatgaatgrcccgatcacccagatagcaagcatagtactcaacagtttttcaacactttccccttctcttcctccctcctctagtggtcttcattgcctataagtgaca

SEQ ID NO: 458033 - DNA, 201 bp, Homo sapiens
tctgagtaagcaaattctttttaagggctttcaatcatgagtaattctttctcagggaaaggaggggaaaatagaagaaaacttgtttttcaaagagtctkttaagtcccaggaatgttttgtttttatttcatctttgggattccctcttttattttttatatattttttaaattgataaaaaaatatatataacaaaat

SEQ ID NO: 458034 - DNA, 201 bp, Homo sapiens
tccccctcctcactccaaattcccagaaatacaagaaatttttcaagaggaaattcacaatagtgctagaaaacaatagttatatttaagcaagattgcctttttttttttttttttttgagagggagtcttgcactgtcacccaggctagaatacgatggtgcaatctcggctcactgcaacctccacctcccaggttca

SEQ ID NO: 458035 - DNA, 201 bp, Homo sapiens
tgaggcctttctccttggcttccctcttgctgcttcttcacaaggtcatcctctgtgcatgcataccctggtgtccctgtgtcctaatctcttattcctcttttttttttttgtatactttaagtttggggatacatgtgcagaacatgcaggtttgttccatggatacacacgcgtcctgatggtttgctacacccaggt

SEQ ID NO: 458036 - DNA, 201 bp, Homo sapiens
tggtatatctcatttagtttctctgaacacgataaaacatctccagtggcagaaagactattgcctacatgttgccatcttcttcctgaataccttcagargaggagtgaaaggagagagaagaggatgaagacaatgataaagaaaaaggaaaagaaaaatttgccttaaagaaatatcagtgaagctacctgctagctt

SEQ ID NO: 458037 - DNA, 201 bp, Homo sapiens
gtcccagaacctgtgcatttttttaaaatgtgttaaccttactaaggacaagctagaattacagtggccacagtgaagttttaacccagataaaattggtyacttgtgaggcacattagagaagaaaggatccaacataccacaaaagcaatgggacacactctttaatggatacacagaagtattaaatatctaagatat

SEQ ID NO: 458038 - DNA, 201 bp, Homo sapiens
aaacaaatgatgtacagaatggaataaaatattgactaatgatgcatccaacaaacgtttaatatccagaatctataaggaagttaaatcaacaaggaagaaaaaaaaaaacatttaaaagtaggcaaaggtcaggagttagagatcagcctgaccaacatggtgaaacctcatctctatgaaaaatacaaaaattagctg

SEQ ID NO: 458039 - DNA, 201 bp, Homo sapiens
gaaaccatcttctcagtaaactatcgcaaggacaaaacaccaaacaccgcatgttctcactcataggtgggaattgaacaatgagaacacatggacacagraaggggaacatcacattctggggaccgttgtggggtggggggaggggggagggatagcattaggagatatacctaatgctaaatgacgagttaatgggta

SEQ ID NO: 458040 - DNA, 201 bp, Homo sapiens
tccctattatcatcaactatcattatcattatcatcaataactctgactcagtaaatgcagattgggtgcagtggctcatgcccgtaatcccagcactttyggaggccaaggcaggcagatcacttgaggtcaggagttcgagaccagcctggccaacatgatgaaaccccgtctctactaaaaacacaaaaattagccag

SEQ ID NO: 458041 - DNA, 201 bp, Homo sapiens
tgctggggtggcccttcctccacctctctagatgtttcagtgtctcttggtttctcttatagttatctatttctgtctgtctctttctatgtgtgttcatmcacacacacacacacacacacacacacaaacacacacacacatatatatatgtaatccatcactctgtctccctgtatcttattctttctttgcctatct

SEQ ID NO: 458042 - DNA, 201 bp, Homo sapiens
aagtcaatatccagtagaagagtgtctgcatttgcattacctgaataggctatgaaagttaatcagcatatgactcttttaaaaaatgactttatacattrtattatatattacaatattttatatatgctgtatatttccttagagtaaacacatacatacacatacacaaaatcacactatacattatggaatgtggaa

SEQ ID NO: 458043 - DNA, 201 bp, Homo sapiens
gcaaccttgaaatctcatttgaaaacaaagaactgggaacagctgctagtccagcttcatcatcttacagatgagaacactggaactcagagaggccgcargagtggactacatgccctcctgagaagattccacagccaacactgatatgaccccaaaaccgtccgttttaaaatactatgaagaaaatcttccttacat

SEQ ID NO: 458044 - DNA, 201 bp, Homo sapiens
aataatggagcgttttaaagaaaagatctgagactatttaagaacatgactataaaaatttgaatctatcagctttttaatacttgcctaactagttgcayacttttattccttccttccttccttccccaagtacaccctatatgatgattagatgatccagtagctgttatgaggagaggtacagttctgaagaactaa

SEQ ID NO: 458045 - DNA, 201 bp, Homo sapiens
gctgaatctcagcttcctggaagtatttggttgaatgtaataaacactcagcaaaataaaaccagtagaggaaaggaggaacatttccattagcaactacmgtttgaaggtaagaaaaaaatcattaaataagaataaataatatgctttaacattttgacatttggaggcatgaatccttattaaaaatgaggaaattta

SEQ ID NO: 458046 - DNA, 201 bp, Homo sapiens
taaaaatttgagaaatttaaacaaaccaatgattactctaatacttccacgtaccatttacttcaatttgatatgataatatctagaatatactgttctgygtttttggaattcatactttttaaaatcttaccaattttaaggagattatttttcagaaatacattctttgactttaagtctcgatgaagtatcctccta

SEQ ID NO: 458047 - DNA, 201 bp, Homo sapiens
tctatagcccagctggcatcataataagactgactcccctggtagattgattgctctttgcgaatattctttttcccttcccccacagggggaattggcayaggacttgcttcagccagtggaatatgggtggatatgaagtgtgtcacaactaactgagtggaggatctaaaggcagacacatgctctttctctctagca

SEQ ID NO: 458048 - DNA, 201 bp, Homo sapiens
cacagcttcccttcgctaggggagggagctccccaaccccttgcacttccggggtgaggtgacgccccaccctccttctgctcgccctccgtgggctgtayccacatctaaccagtcccaatgagatgaaccaggtacctcagttggaaatgcagaaatcacccaccttctgcattgatctcgctgggagctgcagaccag

SEQ ID NO: 458049 - DNA, 201 bp, Homo sapiens
tctctgcaacctcacaagcatctattttttgactttttttttctttttttttttttttgagatggagtcttgctctgttgccaggctgcagtgcggtggcrcgatttcggctcactccaacctcagcctcctgagtagctgggactacaggcacacgctaccacgcccagctaatttttgtctttttagtagagacggggt

SEQ ID NO: 458050 - DNA, 201 bp, Homo sapiens
aaagaatcaatatatgaagtacctgagattttttggagttctttgttaccgcagcaaagctgactgatacatcattcctctgcttaacagcctttagcagwttctcatactccagaagatgaaagtacaagcttcttttcataattacatgggtcattcaccatctgacccctgcccgcccttcagtcaaatgtaccaaca

SEQ ID NO: 458051 - DNA, 201 bp, Homo sapiens
taagacacagagagattaagacacagagtctgttaagtgacaaaccacactcaataataatgaaactgagatcccacttgtaaatcctctttttcttttcttttttttttttttttttgagacaagtctggctctgtcgcccaggctggagtgtggtggtgtcatcttggcttactgcaacctccgcctcccaagttcaag

SEQ ID NO: 458052 - DNA, 201 bp, Homo sapiens
aatcaacccaaatgtccatcagtgatagactggataaagaaaatgtgatacatatacaccatggaatactatgcagccataaaaaggaatgaggtcatgtmctttgcagggacatagatggagctggaagccattatcctcagcaaactaacacaggaacagaaaaccaaacaccacatgttctcacttataagctggagc

SEQ ID NO: 458053 - DNA, 201 bp, Homo sapiens
gacacagagagattaagacacagagtctgttaagtgacaaaccacactcaataataatgaaactgagatcccacttgtaaatcctctttttcttttctttyttttttttttttttgagacaagtctggctctgtcgcccaggctggagtgtggtggtgtcatcttggcttactgcaacctccgcctcccaagttcaagtga

SEQ ID NO: 458054 - DNA, 201 bp, Homo sapiens
atacgtgtgccatgttggtgtgctgcacccattaactcgtcatttacattaggtatatctcctaatgctatcccttccccctccccccgccccacaacagkccccggtgtgtgatgttccccttcctgtgaccaagtgttctcattgttcaattcccacctatgagtgagaacatgcggtgtttggttttttgtccttgta

SEQ ID NO: 458055 - DNA, 201 bp, Homo sapiens
ccacatttcttccagacaatgaagaaaagatagaatgtaactgtcaacaagtaattgctcaaacctatgccacttgaagggaccttttagagggtcccttractgatcccgacctcagcttgtatactgatggaagttcctttgtagaaaaaggactttgaaaagcagggtatgcagtggtcagtgataatggaatacttg

SEQ ID NO: 458056 - DNA, 201 bp, Homo sapiens
gtggaggatgcagtgagccgagatcgtgccactgcactccagactgggtaacagagtgagaccacacctcaaaaaaaaaaagtatagtaaatacataaagyagtaacagtcatttgtcatcactatactgtacataaatatatgcattacacttttatatgactggcagtgtagtaggtttatttacccagcatcaccaca

SEQ ID NO: 458057 - DNA, 201 bp, Homo sapiens
ggaaaaattgtatttcctgacctaggagctgtttgccatatagtattttattcatgtggttctaaatctgttttattttcttaaaaaacatttctaagtgwatattagtagctaaaattttaccgcttgatgctttgaccaaaaattgagcactgtatgtattttgcatatcatgtgttttgcaaccataggcccagaatg

SEQ ID NO: 458058 - DNA, 201 bp, Homo sapiens
gtgataatggaatacttgaaagtaaacccctcactccaggaactagtgctcagctggcaaaactaacagccctcactcgggcactagaattaggagaaggraaaaagggtaaatatatatacagactctaagtatgcttacctagtcctccatgcccatgcagcaatatggagagaaagggaattcctaatttcgagggaa

SEQ ID NO: 458059 - DNA, 201 bp, Homo sapiens
cagtactgttttttatatataggacagcaggttctgctgtaagtgcctctctaagtgacatctctatatttgactgagtgtactaaaagctctccactccmtgctacacacacacacacacacacacacacacatgcacgcacattcacgtgacagaaataagctccatgatccttttggaaataggtctccctcaagctc

SEQ ID NO: 458060 - DNA, 201 bp, Homo sapiens
atgcccatgcagcaatatggagagaaagggaattcctaatttcgagggaacacctatcaaacatcaggaagccattaggagattattattggctgtacagraacctgaagaggtggcagtcttacactgccatcatcatcagaaaggaaaggaaagggaaatagaagggaaccgccaagcagatattgaagtcaaaagagc

SEQ ID NO: 458061 - DNA, 201 bp, Homo sapiens
aattagctgggtgtggtggcgcacacctgtggtcccggctaactgggaggctgaagtgggaggatcacttgagcctggaaggtggaggatgcagtgagccragatcgtgccactgcactccagactgggtaacagagtgagaccacacctcaaaaaaaaaaagtatagtaaatacataaagcagtaacagtcatttgtcat

SEQ ID NO: 458062 - DNA, 201 bp, Homo sapiens
tttttcaaaagaaaaagttacactattgttaatacggaaaatggaaattttctggaatagaagtattattagctttatgaaattttacttccatttgggcyagttgcctcttctcagttacctcagttgtaaccagggataattcctgttacccagacagacttgtctgtgaggatgggagagctaataggtatgactatc

SEQ ID NO: 458063 - DNA, 201 bp, Homo sapiens
accaaaaccaatggcaacaaaagccaaaattgacaaatgggatctcattaaactaaagagtttctgcacagcaaaagaaactgccatcagagtgaacaggmaacctacaaaatgggagaaaatttttgcaacctactcatctgacaaagggctaatatccagaatctacaatgaactcaaacaaatttacaagaaaaaaac

SEQ ID NO: 458064 - DNA, 201 bp, Homo sapiens
gtacattcatttatttatttatttatttatttatttatttatttatttatttatttagaggcaggctgtcacccaggctggagtgcaatggcgcaatctargctcactgcaacctctgcatcccaggctcaaacaatcctcccacctcagcctcccaagcagctgggactacaggcatgtgccaccatgcctggctaattt

SEQ ID NO: 458065 - DNA, 201 bp, Homo sapiens
tggaacatgctattgagctgtttaaaaaaaaaagaatggggaaatgttctacacactaacatggaaatatctccaagatattgtgtcatatgaaaaaagcaaaaaaaaaaaaaaacaaaaaaaaccagaagtgtataatatgctagcttttatcagaaaggggaaaaataagactctgtattcttaagttgctaatgtgtg

SEQ ID NO: 458066 - DNA, 201 bp, Homo sapiens
ggaacatgctattgagctgtttaaaaaaaaaagaatggggaaatgttctacacactaacatggaaatatctccaagatattgtgtcatatgaaaaaagcaaaaaaaaaaaaaaacaaaaaaaaccagaagtgtataatatgctagcttttatcagaaaggggaaaaataagactctgtattcttaagttgctaatgtgtgc

SEQ ID NO: 458067 - DNA, 201 bp, Homo sapiens
gctcttttatgatggacagaacatcaaaagtagtagaatgtgccaggttaatagaagacctacctatctccctcctttagtctccaccaatcttctccctmctgtcagttttctatagcccagctggcatcataataagactgactcccctggtagattgattgctctttgcgaatattctttttcccttcccccacaggg

SEQ ID NO: 458068 - DNA, 201 bp, Homo sapiens
ctaacttcttattttcagtggcactggggaatgggagttcacacacaccttattttggaaagagattgtcctgactactatttttctcagctttaaaaaawttttatttatttatttttgagacagagtctcactctgttgccaggctggagtgcagcggcgcaatctcggctcactgcaacctccacctcctgggttcga

SEQ ID NO: 458069 - DNA, 201 bp, Homo sapiens
tactactcttacatctctagttaataaaatacaattggaaatttcgacgtttcttgaaatagcaggtaataaaccataaaaacaaggttattaagaacacrtctaaaaatttaccccctgtggtatatagtgtatcttaactggagatcatgcaaatttcctcagtttgaaagtgaggatggaaagcaaacatggtagcgt

SEQ ID NO: 458070 - DNA, 201 bp, Homo sapiens
attttggctgctatacgtagctcattaaagcagaattatgcaatatttgtccccttgtgtctggcttattgcatgtagcataatgtcttcaaggttcattrcatggtggcatgtatcagaattttcttccttttcaaggctgaataatattccattgtatgtatgttatactttgtttatccattcatccatcaatggaca

SEQ ID NO: 458071 - DNA, 201 bp, Homo sapiens
gaagagaggggcttagtgaggtgatgatgatgaagtactgaaaagcctttctttgctttgaatgagacgggagggttagtaggagaccagtaagaagctaygacaaggtgatgatggctttcgcagtaggaatgcaggtagtaagtagtggtcaaattccaagtatactttaaaggtcaagccaataggttttgcttatgg

SEQ ID NO: 458072 - DNA, 201 bp, Homo sapiens
gaaagctatttcatataaggtggtcagagtcctccctgataagatgacatataaacagagacttgaagacagggagggagcaaatcatttgtgtatctggygggaagagcattcaaggctcccaaagccagggacatgcttggtgtgttccagaaactggaagggtggagtgagtgaggacaattctcatgttgatggaag

SEQ ID NO: 458073 - DNA, 201 bp, Homo sapiens
acatgaatattgcaactctgttgtagtttttttgtagtttttctttttttgatgtaattattaatgatgcattatttttattgagataaaatttgcacatmgtgaaatgcaagatcttaagggtacaattctatgagttttcaaaaatgtatacacctgtgtatatgccacctaaagcaaggtaaagaatatctctatcat

SEQ ID NO: 458074 - DNA, 201 bp, Homo sapiens
gaatgactttgacgagttgagagaagaagggttcagccgataggtaataacaaacttccccgagctaaaggaggatgttcaaacccatctcaaagaagatraaaaccttgaaataagattagatgaatggctaactagaataaacagcatagagaagaccttaaatgacctgatggaactgaaaaccatggcacgagaact

SEQ ID NO: 458075 - DNA, 201 bp, Homo sapiens
tgggagtccaaggtgggcagatcacctgaggtcagaagttcaagaccagactggccaacatggtcaaaccccgacttgactaaaaatacaaaaatcagccrggcgtagcaaagattcagtcaaagaaaacatctttcaggagcatattatggccagtgtgattgagaattatgctgctgattggaacttttgcatttcttc

SEQ ID NO: 458076 - DNA, 201 bp, Homo sapiens
gatttattgctctatctgtcatggcaaaaacatacaaaaaaatgttagcagtggttttgactaaaagattaaattatgagtgatctttattgtctccttcstgtgcttatgtcttttccaaattatctataataaatacatattaaatctataaacatagtaaatgctattagaataaaagaaatattttattcaatttac

SEQ ID NO: 458077 - DNA, 201 bp, Homo sapiens
cctaaatctcttgggctcaaggaatctcctagtttcagcatcccatggagttaggactccaggcacaggctatcatgcctggctgaattttaaaaaatttkgttagagacggggtcttgctatgttgcccagactggtctcaaactcctgacctcgagtgatcctcccacctcagcctcccaaaacgttgggattacaggt

SEQ ID NO: 458078 - DNA, 201 bp, Homo sapiens
tctccctgaccagtctgcttccttcctcctcctttctacaggtgttggtctccagaagattccctcacaaacctcctcctacacattaatctccatctctsagtatgcttcctgggaatccagctgtggcaattaatatgaccattttatagataaagaaactgaatcttagaaaatcacttgtcaaaggttagacagcca

SEQ ID NO: 458079 - DNA, 201 bp, Homo sapiens
atgctggattttaatataccttgctcagttattgataagtgaagcattcaaaatattagtaatgatagaaaatatctgaataacatacttaataagctgarcttaatagatacacatagagcaagacattcttcccaggctctcatgtaacatttgcgaaaactgaccatgtgctagacaatttaaccctcaataaatgct

SEQ ID NO: 458080 - DNA, 201 bp, Homo sapiens
agtctcgatgaagtatcctcctacaaaaggcaaaaaagatatacaacttcatgcagaatataacatttttaaatccccatgtaaataatatatgttgttgyacatgatttacacataaatatatactcccatagatatatctttcaatgtttaaaagctacaaagccacaatactttccagtttccctgaggaaacaaaag

SEQ ID NO: 458081 - DNA, 201 bp, Homo sapiens
acttaataaatgcctcacatatattgcacatttgaacacctctgaaatggagatgcatcttaaaatagacggcatatcataatttcatggacagtagtttyattaatgatatataatataatgattcatctcaaaattgatggtgtctttgattctgtaaagtacaatatgatatttctcaattgtattggtcaggctagg

SEQ ID NO: 458082 - DNA, 201 bp, Homo sapiens
tacaatatgatatttctcaattgtattggtcaggctaggctacacttgctgctgtaacaaatacgcctgctgacctaggtaacaagggatttatagctcaytccttttttaattatattttgctttttaggtttaatcaggaaatttaaaactaaataaaatattgtttttgtcatcagttttatgatagaatatgaagaa

SEQ ID NO: 458083 - DNA, 201 bp, Homo sapiens
acacacacacacacacacacacacacacatgcacgcacattcacgtgacagaaataagctccatgatccttttggaaataggtctccctcaagctctagartctgcacttttatcctatatgtcaagatgattttccctcaggaaaaactgtaatgtttccctgaaacttttctttcctgctttagagagtaaaagcgaaa

SEQ ID NO: 458084 - DNA, 201 bp, Homo sapiens
aggagaaataaaacccttctcagaaaagcagatgctgagggaattcattttaactagaccagcctcacgagtggtccttaagggagtgctaaatgtggaaytgaaagaatggcacctgctaccacaaaaacacacataggcacatagcccacaggcactgcaaagcaatcttaactctacataacaaccggctaacaacat

SEQ ID NO: 458085 - DNA, 201 bp, Homo sapiens
tccttaagggagtgctaaatgtggaattgaaagaatggcacctgctaccacaaaaacacacataggcacatagcccacaggcactgcaaagcaatcttaaytctacataacaaccggctaacaacatgatgacaggatcaatatctcacatattaataataaccctgaatgtaaatgagctaaacatcccatataaaagca

SEQ ID NO: 458086 - DNA, 201 bp, Homo sapiens
caaaaaagagcaggagtcactattcccatataaaataacccagattttaaaccaacaaaaattaaggagaacacagaaggacattacataatgataaaggyttaattgaacaagaaggcttaactataccaaacatatatgcacctagtactatagtatccagattcataaaacaagttcttcttggcctatgaaaagact

SEQ ID NO: 458087 - DNA, 201 bp, Homo sapiens
caatcctactaaaactattccaaaaaatcaaggaggaggggctcctccctaattcactctatgaagccagcaactgcctaataccaaaatctggcaaagaygcaacgaaaaaggagaacttcaggccaatatccatgatgaacattgatgcaaaaatcctcaataaaacatagcaaactgaatccagtagcacagcaaaaa

SEQ ID NO: 458088 - DNA, 201 bp, Homo sapiens
cagactagctgcaactcctgacctcgtgatctgcccacctcagcctcccaaagtgctgggattacaggcatgagccatcatgcctggcccaagtaggcctyatttttgggatgcaaggttggcttaacatacacaaatcaataaatgtgattcacccaccacataaacaaaattaaaagcgaaaaccatatgatcatctta

SEQ ID NO: 458089 - DNA, 201 bp, Homo sapiens
tggacagccctcagaaccacaagaggtttggagaactctattctgcaggcaagcagcatttatcgatagaaaatggaagtgaggtatagaaccagctttaytggttacagctgggcatttgccttatttggacatggtctaatcagttggcaacccaaggaaagctttacagagaagtagaaggtttgtaattctggtgtt

SEQ ID NO: 458090 - DNA, 201 bp, Homo sapiens
cctttcacatctctagttattcctaaaattctatccttacaacagtggagctcattaatatagtaaatatttgttatttttggccttacattctcatttcycttgtaaggggaatcttttactttgtgagacagagcctggctcccattaaagccatgaatgccgaagactaacttaccagtctcccatgtaattagggtg

SEQ ID NO: 458091 - DNA, 201 bp, Homo sapiens
atctataaggaagttaaatcaacaaggaagaaaaaaaaaaacatttaaaagtaggcaaaggtcaggagttagagatcagcctgaccaacatggtgaaaccycatctctatgaaaaatacaaaaattagctgggtgtggtggtgcgcacctgtaatcccagctactcaggaggctgaggcaggaaaatcgcttgaacccagg

SEQ ID NO: 458092 - DNA, 201 bp, Homo sapiens
tcctttcacatctctagttattcctaaaattctatccttacaacagtggagctcattaatatagtaaatatttgttatttttggccttacattctcatttyccttgtaaggggaatcttttactttgtgagacagagcctggctcccattaaagccatgaatgccgaagactaacttaccagtctcccatgtaattagggt

SEQ ID NO: 458093 - DNA, 201 bp, Homo sapiens
gaggctgaggcaggaaaatcgcttgaacccaggaggcagaggtttcagtgagcggagattgcgccactacactccagcctgggcaacagagtgagactccrtctaaaaaaaaaaaaaaaaagtgggcaaaggacatgaacaggcactcctcaaaagaagatatacaagtggccaagaaacatatgaaaaaatgctcatcat

SEQ ID NO: 458094 - DNA, 201 bp, Homo sapiens
tgtgaatcctgacaattgcgggggaagcatgtagctctcactatcgtcagcagaacagaagataaattgaaaaatgattacctggtatcatgtactccttwgcttctatgaaagccaaaagaggagatgtttccacaagacaccgcaagggccatctctcctttcacatctctagttattcctaaaattctatccttacaa

SEQ ID NO: 458095 - DNA, 201 bp, Homo sapiens
ttccatagtggttgtactagtttacattaccaccaggatgcgttctcacttttcattagaatgtgaatcctgacaattgcgggggaagcatgtagctctcwctatcgtcagcagaacagaagataaattgaaaaatgattacctggtatcatgtactccttagcttctatgaaagccaaaagaggagatgtttccacaaga

SEQ ID NO: 458096 - DNA, 201 bp, Homo sapiens
tgattcatgcagcacatctcatacaaaatgcatgccagtgacctgaagacaaagtcaaagaatttaaataaggaacaaatatcctattttaaattttttcmtcatacaaaacctcagatgtgttggggcattggctgtgaggcacaaacatacaatcagtagttgacttaaaactgcagtttcatacagtttttttccatt

SEQ ID NO: 458097 - DNA, 201 bp, Homo sapiens
ttctctttttttaagtttttaaaatttttgttttattttatttcaatagtttttggggaacaggtggtttttggctatatggataagttctttagtgatgrtttctgagatttgggtgcacccatcactagagcagtgtgtactgtgccccatgtgtagtcttttattcctcaccccctcccacccttccccctgagtccc

SEQ ID NO: 458098 - DNA, 201 bp, Homo sapiens
aaaatctgtgactcagttgcctcattgatacaaaaaaaagaatcctatcttctatggctctagtaaagcttaaatgtatattaaacttatatataaaggtrcattattgctacaaaagacccaaggcaaatttacactacctccccatgatgtccaccacaatgctttgcatggagcagcttctcagtgtatcaataggac

SEQ ID NO: 458099 - DNA, 201 bp, Homo sapiens
attaggacaagtatgtgagctggcttagaggacttgggtttgaatcttgattctgtgatgtttggaaaggtaaaaatctgtgactcagttgcctcattgayacaaaaaaaagaatcctatcttctatggctctagtaaagcttaaatgtatattaaacttatatataaaggtgcattattgctacaaaagacccaaggcaa

SEQ ID NO: 458100 - DNA, 201 bp, Homo sapiens
aacttggtgaagatttttccttgagcttctcctgtgacaatagtggacatcagaatggcaacaaaactgtcgaagaatctgcaaaacagggtagtctctgyactgcctcacctcaacacctcaacaccccagaaatggagatgcactatgcagatcctccttgaaggaagaacttgctaccccagctgttgggagtagaca

SEQ ID NO: 458101 - DNA, 201 bp, Homo sapiens
gtgaatcagcagggcactgtgaaagctgctctactctgctgagaggcttagctgacacaaacttggtgaagatttttccttgagcttctcctgtgacaatrgtggacatcagaatggcaacaaaactgtcgaagaatctgcaaaacagggtagtctctgtactgcctcacctcaacacctcaacaccccagaaatggagat

SEQ ID NO: 458102 - DNA, 201 bp, Homo sapiens
agaatggcgtgaacccgggaggcggagcttgcagtgagccgagatcccgccactgcactccagcctgggcgacagagcgagactccgtctcaaaaaaaaawaaataaataaaaataaaaaaaaaaagaaatgcaacatctcaggctgcaccctggactaattgaatcagaatctgcatcttaacaagattcataggcaatc

SEQ ID NO: 458103 - DNA, 201 bp, Homo sapiens
ccacactgttttccacaatggttgaactaatttacacttccaccaatggtgtatgagtgttcctttttctctgcaacctcacaagcatctattttttgactttttttttctttttttttttttttgagatggagtcttgctctgttgccaggctgcagtgcggtggcacgatttcggctcactccaacctcagcctcctga

SEQ ID NO: 458104 - DNA, 201 bp, Homo sapiens
ttccacaatggttgaactaatttacacttccaccaatggtgtatgagtgttcctttttctctgcaacctcacaagcatctattttttgactttttttttctttttttttttttttgagatggagtcttgctctgttgccaggctgcagtgcggtggcacgatttcggctcactccaacctcagcctcctgagtagctggga

SEQ ID NO: 458105 - DNA, 201 bp, Homo sapiens
ttggagatggagtctcattccatcatccaggctggagtgcaatggtgctgtctcagctcactgcaacctccgcctcccaggttcaagcgattctcctgccrcagcctccttggtaactgggattacaggcacataccactacacctggctaacttttgtatttttgtagagatggggtttccccatgttggccaggctggt

SEQ ID NO: 458106 - DNA, 201 bp, Homo sapiens
tcctgactactatttttctcagctttaaaaaaattttatttatttatttttgagacagagtctcactctgttgccaggctggagtgcagcggcgcaatctyggctcactgcaacctccacctcctgggttcgagtgatcctcctgcctcagcctcctgagtagctgggactaaagacacgcaccaccacgcccagctaatt

SEQ ID NO: 458107 - DNA, 201 bp, Homo sapiens
actaacagaggaacagaaaaccaaatactgcattttctcacttataagtgggagctaaacattgactacacatgaatgcaaagaagggaacaacaaacacyggggcctacttgagggtagagggagaggaggaggttgaggaactcaaaaataaaaataaagaaggcggttgctgtaacaaactataagcaaacaaataaa

SEQ ID NO: 458108 - DNA, 201 bp, Homo sapiens
aaaatatagttaacaataatttattatatatttcaaaatagttagaagacttggaatgttcccaacacaaagaaatgataaatgtttgaggcaatgaatayctcaataacctagatttgatcattatgcattgtaagcttgtatcaatatatcacatgtgccccataaatacgtacgactattatgtatgcataaaattta

SEQ ID NO: 458109 - DNA, 201 bp, Homo sapiens
catgtcaaagggataaagtgaatgtatgcagtaagtaaatgagctgaaagacaaaatgtaccattcttttagggaagcagatgaagagtctagcccactascccactcaccagatgtccgactttgtgtcatagccttggtgtttcagagcctcaggactcatataatggggagttccagttaaagttgtggccaggtcac

SEQ ID NO: 458110 - DNA, 201 bp, Homo sapiens
tggaatttctcaaaggaattttttcctctcttcttataaaaaagagagatgttaaactaattaggcttatttgatgtgttaaattgcatgggaagcattgkcaaataataagtgttgctgaaccatctttaagttatattgcatgagtatgttattaatatgttttccagaaattatatgaaattcccagaaacttgatag

SEQ ID NO: 458111 - DNA, 201 bp, Homo sapiens
agcctgggcaacatagcaagatcccatctctaaaaaacaattttaaaattagcccagcctggtgtcatgcctatattctcagctgcttgcgagcgtggagygggaagagcatttgagtccaggagattgaggctgcagtgagctatgattgcaccactgcactccagcctggtgacagaatgaaaccccaatctcaaaaaa

SEQ ID NO: 458112 - DNA, 201 bp, Homo sapiens
ctctgagaactagtaagcctggtggctgcacgtcattgccaaatttacttctaatagtctattgacacgcactagagattcaagattgcaaaactcaaccygcttacttggtttgtttaaatacttttgcataaaaaagaaacatatgaggaaatttcaaatgttccgttttatagtacaatcagttcggaaagtacttgc

SEQ ID NO: 458113 - DNA, 201 bp, Homo sapiens
atgatgtactgagaagaatacaatactactattgtagtagtcttgccaagaatatgtaacctcaatctaatcgtgataaaacattagacaaacccaaactragagacattctacaaaatagcttgccagttacccatcaaaagtgtcaaattcataaaaaacaaggcaggaaagggaaattgtcacagattagaggagact

SEQ ID NO: 458114 - DNA, 201 bp, Homo sapiens
ccccacccccagaatttctgattcaatgcagctggctggggtagaggcaaagaatttgtatttctagcaagttcccaagtgatgctgatgatactggtctsgggtcacactttgagaaccactgggtttcatactagcattgtatcactgttgatttcctgattttgattactgtactatggttacataaaagaatgtcct

SEQ ID NO: 458115 - DNA, 201 bp, Homo sapiens
ggggtcacactttgagaaccactgggtttcatactagcattgtatcactgttgatttcctgattttgattactgtactatggttacataaaagaatgtccytggtcttagaaaatactcacagctgtattatatttaggacaaaggagcatcatgtctgaaacttattctcaaatggttcattaaaaaatgtaggtagaaa

SEQ ID NO: 458116 - DNA, 201 bp, Homo sapiens
ggaagctaagaatgttgataaaaggttagacgaattgctaactagaataaccagtttagagaagaacataaatgacctgatggagttgaaaaacacagcaygagaactttgtgaaacatacacaagtatcaatagctgaactgatcaagtggaagaaaggatatcagagactatgaacttaatgaaataaagcatgaagac

SEQ ID NO: 458117 - DNA, 201 bp, Homo sapiens
cacttcacagatgagaaatctgaggcccaaagagtttggttaacttgtccaaggacacatattagtcagtggcaaggagggatataaatcccagcagcttkccccctgcatcttcccttctgaccactgtgctagggtctactctatgcctgacatcgcatatattaatacttacaaagccccagggcccccagtttagag

SEQ ID NO: 458118 - DNA, 201 bp, Homo sapiens
ctgtctgtctctttctatgtgtgttcatacacacacacacacacacacacacacacaaacacacacacacatatatatatgtaatccatcactctgtctcyctgtatcttattctttctttgcctatctttccttctgtgtctctgcctctttctgtgtctctctttgcctctgtgtatgtatttacatgtatttacacac

SEQ ID NO: 458119 - DNA, 201 bp, Homo sapiens
taacatttactgagcacttactatgtgccataaactattcttagtgcatttcatacattatctcaactcaccctaacaacaactctatgaggcaaaaatcrttattagtcccacttcacagatgagaaatctgaggcccaaagagtttggttaacttgtccaaggacacatattagtcagtggcaaggagggatataaatc

SEQ ID NO: 458120 - DNA, 201 bp, Homo sapiens
caaattctgactaacaacattttaaagaaaagtcactcataaagatcatatagtttactttataggacacaaatgggcagaaactcaaccgggcctataamatcagcatataaagtgaagaattggatatgatagtgagaatttcccctaattcaaataatctttagcctctttaaccctttagtggattagagaggaata

SEQ ID NO: 458121 - DNA, 201 bp, Homo sapiens
caggcgtggtggcgcatgcctgtaatcccagctactcaggaggctgaggtgggaggattgcttgaacccaggaggcggaggttgcagtgagctgagatcayaccactgcaccccagcccggatgacagagtgagaccttgtctgaaaacaaacaaacaaacaaagaaacatctttggaccatccttgaaacagataaagtg

SEQ ID NO: 458122 - DNA, 201 bp, Homo sapiens
tcttttgaaggctcctgatagaactactataaaaccaaatgaaaagatgcttttgaagtacttaattttttcaaaagaaaaagttacactattgttaatamggaaaatggaaattttctggaatagaagtattattagctttatgaaattttacttccatttgggccagttgcctcttctcagttacctcagttgtaacca

SEQ ID NO: 458123 - DNA, 201 bp, Homo sapiens
ttcccacatagatgtacaaattactcttaattaaatttacaaattactctttccaaaaaccaagcttaggaataactgaccaagaaactattactaacatragggttgcttgtctctcatgttgacttgtaagtcatgcacatcactcaaagtgcactatttaaacatggatgttatggcaactaagcttttttccccagg

SEQ ID NO: 458124 - DNA, 201 bp, Homo sapiens
aagaacatatattatactatacaaaacattaaactaattagttgaaatcagggtagaggaaaaataaagtcaggaaagtcataatctaagagtaagattarcacagaaatgcataccatataggcggggcgcggtggctcatgcctgtaatcccagcactttgggaggccaaggcgggtggatcacctgaggtcgggagtt

SEQ ID NO: 458125 - DNA, 201 bp, Homo sapiens
attctgccttcttttctcttacgagctgatacaacagcagaggcactcctgctatgtctgaaattcctcttgcctctcatttttgacctgacactggtgarggtgcacacattttgatgtaagtcaggaccacacattagctcagtttcctacccatgctgccaggcatcaagggtaagtctatgaccaagaactgtaaca

SEQ ID NO: 458126 - DNA, 201 bp, Homo sapiens
gaaatgataaatgtttgaggcaatgaatacctcaataacctagatttgatcattatgcattgtaagcttgtatcaatatatcacatgtgccccataaataygtacgactattatgtatgcataaaatttatttttaatgaaaaaaaactacctattttgtactatgcttaacacctaggtaatgacataatctgtacacca

SEQ ID NO: 458127 - DNA, 201 bp, Homo sapiens
agggtgagaaactcaaagcttttccaactaatgtcagttacaaggcaaaaatgttctctctcaccacactttttcaacattgtactggaagttctagctamtgcaacaagataaaaaaggaaataaatatataaagattgggaaagaagaaataatgttctccttcagtgatgacacgattgtctatgtagaaaatttaaa

SEQ ID NO: 458128 - DNA, 201 bp, Homo sapiens
tgcataaaatttatttttaatgaaaaaaaactacctattttgtactatgcttaacacctaggtaatgacataatctgtacaccaagcccttgtgacatattatatatatatatatatatctgtaacaaacctgcacatgtacccctgaacctaaaataaaagttaaaaataataataactgagatagacaacagaagtatc

SEQ ID NO: 458129 - DNA, 201 bp, Homo sapiens
cttctttcctatatacatcttaggcacttagctttcagctttctctgttttctaaatcagttatcactcatctatctgctttatatctttctcaagttcaytaaagctctcatctgcttccatctcctcttatgttctcttttttttctgtaggtttatattagcttttttccttttttgtcatgttagtgggacttcaag

SEQ ID NO: 458130 - DNA, 201 bp, Homo sapiens
gcataaaatttatttttaatgaaaaaaaactacctattttgtactatgcttaacacctaggtaatgacataatctgtacaccaagcccttgtgacatattatatatatatatatatatctgtaacaaacctgcacatgtacccctgaacctaaaataaaagttaaaaataataataactgagatagacaacagaagtatcc

SEQ ID NO: 458131 - DNA, 201 bp, Homo sapiens
acctggggtctatttctccttacgcacactgtcaaccaatcttcccattttaatcttcacctataccatgccttcagcggtagttgaggcctccaaatctygagcatttatgagattctgtaggttcagttgccttgcttctcctagcctacaccttaccttcccttctttcctatatacatcttaggcacttagctttca

SEQ ID NO: 458132 - DNA, 201 bp, Homo sapiens
cataaaatttatttttaatgaaaaaaaactacctattttgtactatgcttaacacctaggtaatgacataatctgtacaccaagcccttgtgacatattawatatatatatatatatctgtaacaaacctgcacatgtacccctgaacctaaaataaaagttaaaaataataataactgagatagacaacagaagtatccc

SEQ ID NO: 458133 - DNA, 201 bp, Homo sapiens
ggtcagggcacctcagctctgatgatagctagggaaacagggattaatgtagggtagtggagggagaagattgttggagagaaaagcactagagggtccaytgcaactactcttatcagctgtgtctcaccactctcaccccaaagttccaggagcagcacagcggagcacagggcatctcacagtgaaggtcaccgtccc

SEQ ID NO: 458134 - DNA, 201 bp, Homo sapiens
ttatctgatataaatctgaattccttctctgtgttatcttgaattttgttgagtttcttcaaaacagctattatgaattctctgtctgaaaggttgcatttctctgtttctccaggattggtccctagtgccttatttagtttgttaggtaaagtcatgttttcctggttggtcttgacacttgtgaatgttcatcagtgc

SEQ ID NO: 458135 - DNA, 201 bp, Homo sapiens
tatctgatataaatctgaattccttctctgtgttatcttgaattttgttgagtttcttcaaaacagctattatgaattctctgtctgaaaggttgcatttctctgtttctccaggattggtccctagtgccttatttagtttgttaggtaaagtcatgttttcctggttggtcttgacacttgtgaatgttcatcagtgcc

SEQ ID NO: 458136 - DNA, 201 bp, Homo sapiens
ttttattatgcaatggttcatagcattttaacaggaaagaaaagtaatatatcttaaattatacaacgctggtaaatagttttaaaaacataagttttataggagaaggaagactttgagccaggaaagtgaattatgtaagctaaaattctttatttctggaattatgggaaactagacaatttgatataaaaagctatt

SEQ ID NO: 458137 - DNA, 201 bp, Homo sapiens
tttattatgcaatggttcatagcattttaacaggaaagaaaagtaatatatcttaaattatacaacgctggtaaatagttttaaaaacataagttttataggagaaggaagactttgagccaggaaagtgaattatgtaagctaaaattctttatttctggaattatgggaaactagacaatttgatataaaaagctattt

SEQ ID NO: 458138 - DNA, 201 bp, Homo sapiens
ttattatgcaatggttcatagcattttaacaggaaagaaaagtaatatatcttaaattatacaacgctggtaaatagttttaaaaacataagttttataggagaaggaagactttgagccaggaaagtgaattatgtaagctaaaattctttatttctggaattatgggaaactagacaatttgatataaaaagctatttc

SEQ ID NO: 458139 - DNA, 201 bp, Homo sapiens
aatccttttgacaaagagttcgggaacaaatatattttcaaatgaaatagactttcagtctctcaaaggcaaagactattctatttctctctccactttayagcagtaagcactattctctgcaaacgcagtggctcagtaaaggatactgaaggcaacaagagttaacacttgtttattgagggtttggtttatatttct

SEQ ID NO: 458140 - DNA, 201 bp, Homo sapiens
cagaaggtgtcttagcacactccctggcacaaaggaggcatgcattgaaagttagtttccctccatataaacattgctatggctttggtccagttcaaaawctgagctggtacgattataaacttcatgttactaccctatcttaggaacatttttagcaagtgcttaatgtctcaccatcatttttacaagtgattgcta

SEQ ID NO: 458141 - DNA, 201 bp, Homo sapiens
aaatattcatgtcaaagggataaagtgaatgtatgcagtaagtaaatgagctgaaagacaaaatgtaccattcttttagggaagcagatgaagagtctagyccactagcccactcaccagatgtccgactttgtgtcatagccttggtgtttcagagcctcaggactcatataatggggagttccagttaaagttgtggcc

SEQ ID NO: 458142 - DNA, 201 bp, Homo sapiens
gcttcaggatacttatttttccttgcaaacaccaactattgtgcagcagagcatgagcaattttacatataaaatgtaaatacctgagccccgtctggcamcttgatgataaagcataaaatctcatttgtccacagtttagcagatgaaggtagggctattaagacaggtgatatctattataatctctctagctgatgc

SEQ ID NO: 458143 - DNA, 201 bp, Homo sapiens
agcttgtgcatttgtgccctcacaacatgacagccatttcccccccatttctaagtcacagcctccataaaagctgctggggctgtctcgtagaagagtgragaaaaaattgcccttccctcttcttttacctacaatatgagtggattcccttcatggaggagacagctttctggaacttctttctatttacttctctaa

SEQ ID NO: 458144 - DNA, 201 bp, Homo sapiens
tgaatcataattggtctggaaaagatgttcctcactgataaaaagagaagcatgagaggaaactcttctttaatccacctctgcatgtgatcatctgcatktgactccttgaactatggcagccagctggagccatgaagtaagccaccctaacatgagtggcagaaacatggagaggtaagagagaaggccccaacgtcc

SEQ ID NO: 458145 - DNA, 201 bp, Homo sapiens
aatatttggttttcactctctcctgccaaaaaagaaaagaaaaagaaaatacactttacaaacagtaataaatatacctttttctatagttctctagtgayaggagataaaaaagtactaaaaatgcaagtttataaaaatttgcttgctaacatacttgctggaatagctttgatctggaagctgaattacccgtgggag

SEQ ID NO: 458146 - DNA, 201 bp, Homo sapiens
cggtgcgctgcacccactgtcctgcgcccactgtctggcactccctagtgagatgaacctggtacctcagatggaaatgcagaaatcacccgtattctgcrtcgctcacgctgggaggtgtagaccagagctgttcctattcggccatcttggctgccctccttctgatttttaatatctattaattcttaacaaactgga

SEQ ID NO: 458147 - DNA, 201 bp, Homo sapiens
gaggtgtagaccagagctgttcctattcggccatcttggctgccctccttctgatttttaatatctattaattcttaacaaactggagacattgctaatgrtttaatggatacccggaaggtcattatcatctaatattcattactcaagcccccaaatttacaaggatttttaaagcatcagaacttaaaaatatctact

SEQ ID NO: 458148 - DNA, 201 bp, Homo sapiens
tggtgttctgttacagcaacacaaaatggactatgtgaagaaaaccatgttggaatcttgtgctgtcattgataagaaaggatctgagcattaggtcaatyaccaaaaaactgaaaaatcagtaacaatgatgacagactcttcaaataggatgatttaaattttaggaaattggaagaagactccaagaaacttaacaag

SEQ ID NO: 458149 - DNA, 201 bp, Homo sapiens
acaatacagacaaagggaaccaaggcagaggctcacagactgtagaaatgggcttggggccatctgggcagagacttgtggaatcccaggtaagcagggcmtcttagtttgcttgtgctgcttaaatactatggaagaggtaatttataaatattagaatttatttctcagagttctggaggctgggaagtccaaggtcca

SEQ ID NO: 458150 - DNA, 201 bp, Homo sapiens
agtctgacagggaaaccagcagttcagcctcaaaattttctgggtagcaagtttctctaacagcagactcttactggggacagaaaccttcgggaccgctrctagtgaggtgcctgtgactttaatgccagacctgagtctccttgtgacagttctgtggagaatgaagttattcaaaattgcaaggctctagcatatgac

SEQ ID NO: 458151 - DNA, 201 bp, Homo sapiens
gtctagaccacctgaaagctcatagctgagtttgcacttatttgcagagtaaactgctcatttatcaatctggcatccaatcacaactttttagctaactrtatgttttcataaacacttttctcacacagtataaattttaaataaataacaatagcaattaagtagtaacaactcgagactggtatctgactagtggtt

SEQ ID NO: 458152 - DNA, 201 bp, Homo sapiens
taggcaaaactcaatgatagagaaataaaaacaaaacttcctgcttagcctgtagtacctggtggtgtttagggttttcaacaatgaataatataatatakatatttcaaaatactataggaacagctgtatccatttatttaattttatcataaaacatgcttaattgtttaaaaatatctagccctcagctgggaaaag

SEQ ID NO: 458153 - DNA, 201 bp, Homo sapiens
ccactctagttggaaggtgggagagtatttgaatatttcaaagcaaagtagtccctttttggttaattattacaatcatactataagcatgctgagtctcyatggcactctgggcataattctatgacagcctgaactgcatcacagtgtaattgtgtgtttcaatgtctgtttttcccataccagcccaatatcacactt

SEQ ID NO: 458154 - DNA, 201 bp, Homo sapiens
caatctgattacagaaactacctagatattcaaaggtaaaagatgtttggttacctaccatatctcagaaccactgtcagtgtttcccaaactttaacatrcatgcaaatcacttagaggttttgttaaatacatacggtaggtaaccaaaatacatatggtgactatatttctatgtaccagtgtttcttttttctagtt

SEQ ID NO: 458155 - DNA, 201 bp, Homo sapiens
ttccatgagtccattatgctaatcacttaacgtgttatctaattatttcaaccctggaaagcaggcattgttatccacattttatagatgactaaattaawccttgaagaggtaaagcaacctgcccaagatcataaaattgtttagtggcaagaaaaatcggagtccaagtctccctgacttaaagaaccgtgctcctaa

SEQ ID NO: 458156 - DNA, 201 bp, Homo sapiens
aaggtaccaaaaacaaagcctatgatttttctctgagctaaaaacaataaaattggctggtatgaacccaagattaaaaagcagcactcagctgaaagtaycaagtttcataatgattatcattagtaactgcaaattcagccagtttaacaatcttaagggttttcatatatcatggtacagggtttttgctttttctaa

SEQ ID NO: 458157 - DNA, 201 bp, Homo sapiens
tttaaaatgactcaaaattgaaagtaaagatatgttaaaatgattaaataaatcagacagaaatatccataaataggtattagtaggtacaatatataaayattagctttgctaaaggcgatcagctattaaatggcagaaattacagtcacaatctgaattattgaaagtgtatttttaatattacaaaaacccacacat

SEQ ID NO: 458158 - DNA, 201 bp, Homo sapiens
tgaatcagttaagttgtacctaataccagtgagattagttaccagctttttcttttcccttccaaagacacgttagtaaaatctgctggaaaaacaactasagagcaggcctctaaatataccttttgtttttacttccccttcactgtcataaaagtgatgccgtctggccatactaagctgttcaaataaatatatgga

SEQ ID NO: 458159 - DNA, 201 bp, Homo sapiens
ttatttccactctgatttttgtaattttctcccttcaatttgctttggctttaatttgctcatctttttccagttttttaagccatatattttatatgctyaataggtgggagttaaatcaaaagcaatataaatagtagctgtgattcttaacctataaaaatcttgcagtcaattaagaagataggctatctatacaga

SEQ ID NO: 458160 - DNA, 201 bp, Homo sapiens
actgttttccatagtggttgtactagtttacattaccaccaggatgcgttctcacttttcattagaatgtgaatcctgacaattgcgggggaagcatgtarctctcactatcgtcagcagaacagaagataaattgaaaaatgattacctggtatcatgtactccttagcttctatgaaagccaaaagaggagatgtttcc

SEQ ID NO: 458161 - DNA, 201 bp, Homo sapiens
tctggtcttgcttcttgtatcccatgggaaattttggtgggaatttagcgttttgtaaatgaggggccttcatgtaagacaatttgttttccatgtatgaraaaagcacctagtaggtattccctggtactttcacaaaaccttgcactgatctgtccaggagcccacctcatgacaaggaccatattctaaatgagtctc

SEQ ID NO: 458162 - DNA, 201 bp, Homo sapiens
tgagaaaataaatttctgttattcaaaccacctagtctgtggcatttcattatggcagccctggaaaactaacacagtccccaaagaaatcccttatccawcagcaatcactacccatccccactctccatagcccctggcaaccacttttctttctgtgggtttgcctgcttgatatttcatataagttgaatcatagaa

SEQ ID NO: 458163 - DNA, 201 bp, Homo sapiens
ttattcaaaccacctagtctgtggcatttcattatggcagccctggaaaactaacacagtccccaaagaaatcccttatccatcagcaatcactacccatycccactctccatagcccctggcaaccacttttctttctgtgggtttgcctgcttgatatttcatataagttgaatcatagaatatgtagtcttttgtgac

SEQ ID NO: 458164 - DNA, 201 bp, Homo sapiens
acctagtctgtggcatttcattatggcagccctggaaaactaacacagtccccaaagaaatcccttatccatcagcaatcactacccatccccactctccmtagcccctggcaaccacttttctttctgtgggtttgcctgcttgatatttcatataagttgaatcatagaatatgtagtcttttgtgactgtcttcttcc

SEQ ID NO: 458165 - DNA, 201 bp, Homo sapiens
gtcttttgggtatgtacctaggaatggaattgctaggtcatacgggtaattttacacttgtagtaaatttcctggctggtgagttactctatgatttcctyaagctcaaggataatcatttttcaaatactacttttatgtcactctcttgctaaagatcttctcttgtattccccatcagacaaaacttattaagcctcc

SEQ ID NO: 458166 - DNA, 201 bp, Homo sapiens
agctgccatgtacatctattcccaagttacacaacaatatgaaaattactccacaacactgtagttatactgctacacacatgttctgtcaccctaaatcrtgttccttggtatagggaatgttgttgcctaacaagttttgtgtgcctcagctcttcccctaaaatgtaagctcctagaggagggttttgggttttattt

SEQ ID NO: 458167 - DNA, 201 bp, Homo sapiens
aggctaaaggtatgagctattctggtacactgcctttctgaggtaggaggagaagccctaatttacaaatttccatggtataaataccatggttgttttcmagttactaatgtgacatcagtgaacattgacttgagaagaaatgtggataattgggtcttatgagctggtatgagctccagcataccactgaatcatggg

SEQ ID NO: 458168 - DNA, 201 bp, Homo sapiens
tctattcccaagttacacaacaatatgaaaattactccacaacactgtagttatactgctacacacatgttctgtcaccctaaatcgtgttccttggtatrgggaatgttgttgcctaacaagttttgtgtgcctcagctcttcccctaaaatgtaagctcctagaggagggttttgggttttatttgttgtttgtttttt

SEQ ID NO: 458169 - DNA, 201 bp, Homo sapiens
aagtagagtgccagattgcttttctggcacaagccacttctcttaagcaatttattgagccttttgacataaagaaaacaaacactgccagattgtcatayggaggcctagattagaggctacttctcaactcctgcttgccgttctcctgatgaagtcctgctccagtcaccactgctgcataaaaaaccaccccaaacc

SEQ ID NO: 458170 - DNA, 201 bp, Homo sapiens
ggcctctccctcctctcttttacttttttctcgttgtattttctcattaacaaagtttctgtcatgtacattggaatgcacttagcaacttgtataattgytggcagacagaacaccttgtaagccaaatgagagtttctcttcaataaaatcctaacatcataatttctcttttccacctctggtctcctggaaaacatt

SEQ ID NO: 458171 - DNA, 201 bp, Homo sapiens
cctaaaatgtaagctcctagaggagggttttgggttttatttgttgtttgttttttacttgttttacttgctctttggtgcctactgttactagtgcccaytgaattcattcgttatcaactcagttatcttttgattgaacatggtgtacgctacagtctgatgccctggactcagaattgggtgctgatgacatcaaga

SEQ ID NO: 458172 - DNA, 201 bp, Homo sapiens
ccaatcctggaatttgaaagattcaatcccaatttgacttcctatagaaagactagtctcaactagggattccaagacttaaaacaaatttaaaaagcaaygtaaacaatgaagtgtggtgataagatttaatacttgccaaataaatttgcgtgtttgaaataagaacttgttaacacaactaaatttttctttagtaag

SEQ ID NO: 458173 - DNA, 201 bp, Homo sapiens
gacaccacttaatgaggcaatgtgctcctgcctgtgattcttgtctgctagtcccacttctgcagtctagaacagcatagatcatgtttacctctgaatayactgaagctcttcagatgtttaaaaaatctttagttaaggcaatgctactcaaacttcagagtgaaacaggacccccaggatcttgtttaaatgtagatc

SEQ ID NO: 458174 - DNA, 201 bp, Homo sapiens
aatcatgtaatcatatctacaggttgttttttttttttttttttttttttttttttttttttaaacatggtctcattctctcacccaggctggagtgcagkggcatgatcatagcttactgcagcttcactctctcaagctcaaccgatcctcctgcctcagcctcctgagtagctgggactacaggcatgtgccaccaag

SEQ ID NO: 458175 - DNA, 201 bp, Homo sapiens
cttaaatacatagaccgttgacactataaaacaactacacaatcaagtctatataataaccccagctaataacatgacgacaggatcaagtccacacataycaatattaaccttgaatgtaaacagaccaaatgccacaattaaaaggcactgtgtcgagttggataaagaagcaaggcccaactatatgctgtcttcaaa

SEQ ID NO: 458176 - DNA, 201 bp, Homo sapiens
gttcttccatgaggatactttcttggtcctggcaggtcaggcaggtgctggttcttctctgttttcttctactcacagctaatccttgcatgacacttctrccccaagatcatgaaagcctgagtccaatgttgggcatgaactagattccttctctgtcccccacccaaccaacctccacaccaaatttctgagaaagac

SEQ ID NO: 458177 - DNA, 201 bp, Homo sapiens
cttaatttggcttcttgaaagggctatatggaataattaaatgcacatatctgtacatttaaagggcatcaatgaatggtgtgcctctgatgggacttttrttacatgttcaaaaccaggttttatttgttatgggttacatttctaaagttcaggaaaatatgaatattaagtcataatagttttacagtaacatcaaaa

SEQ ID NO: 458178 - DNA, 201 bp, Homo sapiens
acagtatcagacagagcaccgaggcagaaaacagatattcaggacttgaacttgacatttgaccaaaaggacccgacagacatctacagaactctccaccycaaacaacagaatatacattcttctcattgccacatggcacatactctaaaatcaaacatacaatcagccacaacacaaattctcagcaaactgaaaaaa

SEQ ID NO: 458179 - DNA, 201 bp, Homo sapiens
ctcacagctaatccttgcatgacacttctgccccaagatcatgaaagcctgagtccaatgttgggcatgaactagattccttctctgtcccccacccaacyaacctccacaccaaatttctgagaaagaccctgagagcttcacagtacactctagatgttgccactattcccaccactgttccctttacttatatcaccc

SEQ ID NO: 458180 - DNA, 201 bp, Homo sapiens
gtatttacataaaatacaatgacatgcagtatctagatattacacccacagctttcttttagtcctcagcctaaaggggagattcctcaatgtccaagcarctctaatctggggctggtatcgctctctctaaaactagattcaatgccatccccatcaagctaccaatgactttcttcacagaattggaaaaaactactt

SEQ ID NO: 458181 - DNA, 201 bp, Homo sapiens
ctgtactgaatgctataaataaatgaagccagaaaagtttaacagattgcagaatgaagataatgttacatatgggcaaacattacagatgaaaacataaytagtattaggccaattctcctttaagcaaattctcctttaagcattataaatataatatgtacagctattagtgctaaaacaaaacacctgtcaattatt

SEQ ID NO: 458182 - DNA, 201 bp, Homo sapiens
agttacaggaatagtataaagaactattttgtccctgagtcttttgagaataagttgctaccccaatgtcccccactcatactttgtgtgtattttgtacraataaaaacacttctacataaccacaaaactgccaccagaatcaggaaattcacattaatagatctgattctgttatcttgtatatggaaacattcagat

SEQ ID NO: 458183 - DNA, 201 bp, Homo sapiens
attcatggggaattgccatacccagacctaatcttgacaatgttctctcccatttggtaggcacgagaacaaggaacagataatgacccttgtgaaaatcmtaagcaatatcccctgttgtgattcacttttccctaaccagagaaaatgtaattttctactttgtcttctttagaagagtgaagtaagcacatcttttac

SEQ ID NO: 458184 - DNA, 201 bp, Homo sapiens
cactgaaaatccagaaattttaaaatttagtttatcctagtctgggcgcggtggctcacacctgtaatcccagcactttgggaggctgaggcaggcagatsatgaggtcaggagattgagaccattccggctaacacagtgaaacccgtccctactaaaaatacaaaaaattagccaggcgtggtggtgggagcctgtagt

SEQ ID NO: 458185 - DNA, 201 bp, Homo sapiens
taatttgcattttcctaatgattagtgaccctgagcaccttttcatatccgttggccatttttatgtcatctttggagagatatctgttcagatcctctgsccattttaaaaattgagttatttggttttttgcagttaagttgtaagagtttttataaattttggatattaaccacttattagatatgtggtttgcaaat

SEQ ID NO: 458186 - DNA, 201 bp, Homo sapiens
tctaagtgcaatgaagaaaaagcagggtgaggcggacaggaaaatccttctgaggaagtgtcatttgagcaaaagctctcaggaagtaagacaaatactargggcaaaagaattttggccctaaggctaaaacatattggaaaaataacaagaaagctattgtggctggagttagtagaacaaagggaaacaggatggtgg

SEQ ID NO: 458187 - DNA, 201 bp, Homo sapiens
gagaaggaagactttgagccaggaaagtgaattatgtaagctaaaattctttatttctggaattatgggaaactagacaatttgatataaaaagctatttmaagtctgaataatggcaaacagaatgattttggaaaaactgaataagatgatatacaatttcacctgaggggagaagaatttgttcttaaatttacaata

SEQ ID NO: 458188 - DNA, 201 bp, Homo sapiens
gttcttttcccatcgtgatcagcaactgctcttcaaagtacaggagctggtccacttcaaaacagtcgctggcttgaggcaccactttttccaaacactcrcggatctctgcttcgctagcattctgatgccttgctctcttgaggtaattatagacctcttcaaatacttctgtccccagcttctgcatggctgatctgt

SEQ ID NO: 458189 - DNA, 201 bp, Homo sapiens
ctagctcttgcagtgtcattttatgcctagaatagaagttctcaaacagtggtccaggaacccctggaagtctctgagactcaggaagtccaaactctaayaataccaatatgttatttgcctttttcactcttgtcctatcattaatagacagttttccaaaggctatatggcatgtaatatcacaatagactaaataca

SEQ ID NO: 458190 - DNA, 201 bp, Homo sapiens
tctggagagtaggttcttttcccatcgtgatcagcaactgctcttcaaagtacaggagctggtccacttcaaaacagtcgctggcttgaggcaccactttytccaaacactcgcggatctctgcttcgctagcattctgatgccttgctctcttgaggtaattatagacctcttcaaatacttctgtccccagcttctgca

SEQ ID NO: 458191 - DNA, 201 bp, Homo sapiens
gttctatattttatttctggtggtggctaccacagtgtgcaaatttgtcaaaactattagaaatgtgtatttcaaatgggtatcttttattgtctataaaytattcttcaacaaagttggtttcttaaaaagtcaggctacagtaatgagagggcagcagaggagagaaagtctgcaaaggcatttttagcctttaacctg

SEQ ID NO: 458192 - DNA, 201 bp, Homo sapiens
ggtaatgtgatacaattcttgcctattacgaggggtatttcaatctttggatcctgagtgtcataagccagttttaattttagtcacataacagtgaagaygtttcccaaggagaacatcagtggttctattgaatagaattcattcagaaacagaattccaacttacatatgaaataatgcactttgatgtctaacttaa

SEQ ID NO: 458193 - DNA, 201 bp, Homo sapiens
agtattgttctgtttgaattataaattggggtgagtgtgcacgataatcctttcaaggcttaaagattataaagccatagttcttaaagtgcagtctggayccagagcatcagcatcatgtaggaagttgtcagaaatacaaattcttggacacataccaaacctgtattttaagccctctaggtaattcagatgcatgcc

SEQ ID NO: 458194 - DNA, 201 bp, Homo sapiens
atagtgcacagagattcacactataatcttttattcaagaaagaacagaggaattcactggaaaaggaaagatcccagtgaagagaggatgggtagacagyctgcatgccaacaactgactgagaactgtgagtaaagccctaatatgggagagtgagagagactgtttctctgtgatccagctttccacggggggaccat

SEQ ID NO: 458195 - DNA, 201 bp, Homo sapiens
aaaaagctaatgtttttgatgaaatgtaatgcgttggtctaagaaattcttattacaatatctgtaagtatattctgttttcttaactttgtccttgagaratatttaatagtgacttttattgctaaaataactttcatgaaaaatgtattgactttaactgacccaaaattaatattgccctaagtctatacagctatc

SEQ ID NO: 458196 - DNA, 201 bp, Homo sapiens
catttgatcacaagggaccactgaatttcaattatttcatccttggagactaagagttacttacaataataataagcaatttttctttgagtttcctggcytttgggtcagacattcaacttctattggcctcagtttcttcatctgttatactaagatatcagacttaaacacctgtaagatttcttccaagttattcca

SEQ ID NO: 458197 - DNA, 201 bp, Homo sapiens
ccatcacatcatttgtgttcttatctaaaccggttattctagttagcaactcctctaatttttatcaaggttcctaacttctttgcattgggttagaacaygctcctttagctcggaggagttcattattatccaccttctgaagcatacttctgtcaatttgtcaaactcattctccatccagttttgttctcttgctgg

SEQ ID NO: 458198 - DNA, 201 bp, Homo sapiens
tgactatttttaaattctgttttactttctaatacggtatatatctatagatataaccatgtaaacaaaagctcttcagtgtcccaagcaatttttaagcrtgttaaggtgtcctggtgccaaaaagtttgaaagctgctaacctagagtttattcagtagctggggacaccagccgattaccacaccatcacactgttgt

SEQ ID NO: 458199 - DNA, 201 bp, Homo sapiens
acacctaactcctaacataggcaaggagaccatgtctacaaggggagagatggggcaaccatctagatctctctattccaattccatagcgcccattcatyccagtgtgaaatctcttcagcagagcagaaacacacaatgaggcagagacagacagaaccagcccagagacctgaaagtgaaagtcttcactgatctcaa

SEQ ID NO: 458200 - DNA, 201 bp, Homo sapiens
tggacactggagagttaagtttggttaaattgatgcctttttcttttaaaaaagaaagaatacacatatacctttgtgtacacacaagctaggaaacatcwatctaatacatggatggcaagaaaaaccagatctggctcatgccagttacaatggtctgtgaagataaaaagatttcttcagatttatttctcagccaat

SEQ ID NO: 458201 - DNA, 201 bp, Homo sapiens
ccaaattctttaaactatagtttgcactggtttcttcttgttctgttcccagtaatgataaagtacagctgcccaatgaccctttgaacatctcttattayataatttattaccttaatgtatttatactcagcctcatttcacagacaatttgacataacttacataatacaacaaaaaattaagaccagcaagaataga

SEQ ID NO: 458202 - DNA, 201 bp, Homo sapiens
gtgccctcctgccctccctgtccccaaggcacatgtacatgttccaatttttatgagcagtatttttcaaaaattttacagcaataatcctgacacaaatygctggcaatattgaagaactgatgattaaacagatggcttgtgagaatttaaaatataaagcagcggccagcaggagctcacatgggcttatggagaata

SEQ ID NO: 458203 - DNA, 201 bp, Homo sapiens
caggaggtcaattattagctaatcgagaaggcatcagagaaaggtgaagtctaacttaatgaaatcaaaaaatgatacaagatatgaaaagaaaaaacttyggtgaaatagaatacataataaagtgatacttctggaaatggacacacttagagaaatgcaaaatgcactgaaaagtctcagcaatagaatcgacaagta

SEQ ID NO: 458204 - DNA, 201 bp, Homo sapiens
ataatggagcgttttaaagaaaagatctgagactatttaagaacatgactataaaaatttgaatctatcagctttttaatacttgcctaactagttgcacrcttttattccttccttccttccttccccaagtacaccctatatgatgattagatgatccagtagctgttatgaggagaggtacagttctgaagaactaaa

SEQ ID NO: 458205 - DNA, 201 bp, Homo sapiens
atagtactatatccagtaaccatatcctcaattgatagaccagtttgtaatctattattacccaaatgtccaagttttatatacttgtgaaaataataacrttgttgatgatatttaagaataggtaacatttattaaatctgactataagtcagtaatgtaaattatgtcagttaagacctttattttatggaattataa

SEQ ID NO: 458206 - DNA, 201 bp, Homo sapiens
ttttccccatgaatacctgacgttctgggactaattttccccctatttatattacgtttgcttaggatgccatgtcaaagtggcttgttgggcaggtgttrgacagcacccagcttaatttttcaaattggatataatctttgaaattttagttagtgacttgtcgtacagaaggaacactctaaattattaaatatgcct

SEQ ID NO: 458207 - DNA, 201 bp, Homo sapiens
tgtgccttttaattggggcatttagcccatttacatttgaggttaatattgttatgtgtgaatttgatcctatcattatgatgctagctggttattttgtscatttgttgatgcagtttctccatagtgttgatggtctttacattttggtttgtttttgcagtggctggtaccggtttctcctttccatatttagtgctt

SEQ ID NO: 458208 - DNA, 201 bp, Homo sapiens
ggaaagtacttgcctcaaagttactagcaggcctattagtggttaagaatttgcggccgggcacggtggctcacgcctgtcatcccagcactttgggaggytgacgtgggcggatcacaaggtcaggagatggagaacatcctggccaacatggagaaaccccatctttactaaaaatacaaaaattagctgggcgtggtg

SEQ ID NO: 458209 - DNA, 201 bp, Homo sapiens
ataacgttgttgatgatatttaagaataggtaacatttattaaatctgactataagtcagtaatgtaaattatgtcagttaagacctttattttatggaaytataaagaactagaaaacttgaaaatctttgcataaaaaaactaaaatgccgaataaagtatacaaatatcttcatatatgcacagttgagctcacataa

SEQ ID NO: 458210 - DNA, 201 bp, Homo sapiens
cattcactcatgtattcatccactcattaattcactcaagaaatatttattgagtgcttagcatgttcctggaaatttgctctaggcactggggagactgrtgaacaagactgagaagacacctatattgataaccctcctctgctcaaagtgtcataactgcttccccttctttagcacttactgtgtgctgggcactga

SEQ ID NO: 458211 - DNA, 201 bp, Homo sapiens
tctggtttttggaattttcagcctttttgcgctggtttttcctcatcttcgtggatttacctacctttgttctttgctgttggtgacctttggatgaagtytttgcgtggtcatcctttttgttgatgttgatgctattgctttctgtttgttagttttccttctaacagtcaggcccctcttctgcaggtctgctggtat

SEQ ID NO: 458212 - DNA, 201 bp, Homo sapiens
gtgtccagcagatcaactgccgcccaaaggagagaaaaaaggttagttaagaaagctagatgggaacttggagaaagttactaccttgtgcaaactacccsttctcggtgaaacagatctggctgggggcaaaagacaacggaaggagtatttatcacaagttgaaaaccagtagttatcttcccaggtaataagaggaag

SEQ ID NO: 458213 - DNA, 201 bp, Homo sapiens
aaatactccctaactcattttaagatgtcagcatcatcctaacattaaaaccaaacaaagacattacaagaaaagaaaactaaaaaccagtatctctgatraatgtagatgaaaaaatcctcactgaaatattagcaaatcaaatccaacattgtaggccaggcgtggcagctcattcctgtggtccaagcactttgggaa

SEQ ID NO: 458214 - DNA, 201 bp, Homo sapiens
gcaggtctggtagtaacaattccctcagtatttgcttgtctgaaaaggatcttatttctccttcgcttatgaagcttattttggcaagatatgaaattctkggttggaatttcttttctttaagaatgttgaatgttggcccccaatctcttctggcttgtaaggtttcagctgagacatctgctgttagtttgatgggct

SEQ ID NO: 458215 - DNA, 201 bp, Homo sapiens
aatccaatacccattcatgacaataactctgataaactagaaacaggaatatttataacaaacctacagctaacatcacactttacaatgagaaccctgamgtttttctgctgatatcaggaacaagggaaaaatgtcccctctaatcatttattttcaacattatactgaaagtcctacctaattaagtaaaacaagaaa

SEQ ID NO: 458216 - DNA, 201 bp, Homo sapiens
tttacaatgagaaccctgaagtttttctgctgatatcaggaacaagggaaaaatgtcccctctaatcatttattttcaacattatactgaaagtcctaccwaattaagtaaaacaagaaaaggaagtgtaaaaggaatagagatgggaaaggaaaaaacaaactctctgtttacagatgacatgatcagctaagtagaaaa

SEQ ID NO: 458217 - DNA, 201 bp, Homo sapiens
cccaaggcacatgtacatgttccaatttttatgagcagtatttttcaaaaattttacagcaataatcctgacacaaatcgctggcaatattgaagaactgmtgattaaacagatggcttgtgagaatttaaaatataaagcagcggccagcaggagctcacatgggcttatggagaatatgccaaattaacctaatttctt

SEQ ID NO: 458218 - DNA, 201 bp, Homo sapiens
acaaagcttccatggagtgtagagctgaatctcagcttcctggaagtatttggttgaatgtaataaacactcagcaaaataaaaccagtagaggaaaggargaacatttccattagcaactaccgtttgaaggtaagaaaaaaatcattaaataagaataaataatatgctttaacattttgacatttggaggcatgaatc

SEQ ID NO: 458219 - DNA, 201 bp, Homo sapiens
gttagatcttcttgttgaattgaaccctttactattatgtaatgctcttctttgtttttgattattgttggtataaagtctgtttggtttgaaattagaayagcaacccctgctttttcctattttccatttgcttggtagatttttctccatccttcactttgagcctatgtgtgccattgtatgtgagatgggtctcaa

SEQ ID NO: 458220 - DNA, 201 bp, Homo sapiens
tttgtggttacagtaagccaaaatgagccagcataattttatcctatgtttggctaatatccattcctttgaagtatatgaaaatgaaatccaacaaatamtaaggtaacaggcaataaagtttatatgaaatctttcttctaaaaagctcaacacagttctccatctattatctcaagtgcaccataccatatctgttca

SEQ ID NO: 458221 - DNA, 201 bp, Homo sapiens
aaggtagaactgtggagaaggtatggacaattcctctcacctcccctcaagccctaatatgaacagtttatgatatgaaaccctccctggaggtctatccytcatctagcaggttctcagggtggatcacaaactcttcttgccaaaggtgctggcacagccaatggctcctttgtgatgcacaacccaggcaactcctgt

SEQ ID NO: 458222 - DNA, 201 bp, Homo sapiens
caagctcgcccttggatcagaaaaaaggaaaaagcagggtgaaaaaactgcccaactgtaccttagaagggtaatttcaagccttggtttcaccaactaargtacaaccatcaacctaaatgataaaacccctcccttagccatcttcagcaattccatatctaccgggtacattcatttatttatttatttatttattta

SEQ ID NO: 458223 - DNA, 201 bp, Homo sapiens
ttcaagccttggtttcaccaactaaggtacaaccatcaacctaaatgataaaacccctcccttagccatcttcagcaattccatatctaccgggtacattyatttatttatttatttatttatttatttatttatttatttatttatttagaggcaggctgtcacccaggctggagtgcaatggcgcaatctaggctcact

SEQ ID NO: 458224 - DNA, 201 bp, Homo sapiens
agccttggtttcaccaactaaggtacaaccatcaacctaaatgataaaacccctcccttagccatcttcagcaattccatatctaccgggtacattcattyatttatttatttatttatttatttatttatttatttatttatttagaggcaggctgtcacccaggctggagtgcaatggcgcaatctaggctcactgcaa

SEQ ID NO: 458225 - DNA, 201 bp, Homo sapiens
atttttctttagcctcttgcatctgattaatctaatttctttcctatatttatttcatctttttcagctcaatgaagctttttcctgctacatttaaaacmcttcaggctcctctgcaaagtgttcggcttcccattttctttcccctttgttctctggatatcattaaacctgcctcacttttgtgcttgtgaatatgat

SEQ ID NO: 458226 - DNA, 201 bp, Homo sapiens
gtatgactcaagcatctgtactttctaaatattgtgattccactgtttggccaaggttaagaatcactgtaccagactcaagctccagatgaccagtaaayggtgaccagtatttgttgaatgaatatgtgggttttttcactttattttataggttttgttttgtttcagtcttgcacatgatacaaaattccaaatgca

SEQ ID NO: 458227 - DNA, 201 bp, Homo sapiens
caatgactaggaccaatgccatgtttcgttaaaagactgaatatttgtcagtgcatacagaaaagaccacaggttggatggcaggattatagattattttrctgcttctttatgcacatctgaactttttataaagtgtatacacattactttcaatattgggaaaggaggtaccctatgaatatttgtatgggggtgcat

SEQ ID NO: 458228 - DNA, 201 bp, Homo sapiens
attgtattaaatacttcatagttgacagactaaaacagacaacagcataaaatcaactctgcatagtaagatcactatatcttaaatgtgataaatttttwaaaaatcattataaccaacattctatgctgataagatgaatgttgaaattcactgtagctgtggccatgattaattacaagtttaatcatgtattttagg

SEQ ID NO: 458229 - DNA, 201 bp, Homo sapiens
gggattacaggcatgagccaccatacctggcctgctccatgttcctaatcagctaagacctgcaaacaaaaagcagcctactcaagattcataggaagcayttttacttacaattcctctcctcgtttggctttcttgtctgaaaccagatagacagttccaaaacttccactgccaagtttttgttgaagcacgtatctt

SEQ ID NO: 458230 - DNA, 201 bp, Homo sapiens
caacatttgccattctgcaatgtttgctgttctgcagcctctgctggtgatacccaggcaaacagggtctgcaatggacctccagcaaactccagcagacytgcagctgagggtcctgactattagaaggaaaactaacagacagaaaggacatccacaccaaaaccccatctgtacgtcaccatcatcaaagaccaaagg

SEQ ID NO: 458231 - DNA, 201 bp, Homo sapiens
cgttgacaaagcttccatggagtgtagagctgaatctcagcttcctggaagtatttggttgaatgtaataaacactcagcaaaataaaaccagtagaggaraggaggaacatttccattagcaactaccgtttgaaggtaagaaaaaaatcattaaataagaataaataatatgctttaacattttgacatttggaggcat

SEQ ID NO: 458232 - DNA, 201 bp, Homo sapiens
tattgttagcttgatattggccacagtggaagtatttatatcacagaaatcagcaaacaaataagcagtccccttcaaacccagagctggttgttaaatayttaccagcacaccactgctcacaatgtactttcatggaaatctttctctaccaatttattaaagaaagcaaatgttacgggaaaatagactcatagattc

SEQ ID NO: 458233 - DNA, 201 bp, Homo sapiens
cttgtgaccactaatttgaatatggggcccatggtatccaacatgggtagtatttcccaattagggctccttggtacattaatgctaataagagtgtcccrgggggcgggaaagaggagttcagtagtcaaacttgttttggaaatgctgcttgctacatccaggcttaaaaagttacaatttaccccagcaaatttaagg

SEQ ID NO: 458234 - DNA, 201 bp, Homo sapiens
gctgttgacctacattctagaatccttcctggaattgggtgaagttaatctggatgttcttgttttctcccttgtcccttttcctacccaatcatcgccawgaatctaaagcaagaaaaatttttatgtaaaatttaaaataagagggtacttacatggagtacatcaacactcagctgctgaaagttccgagatctcaat

SEQ ID NO: 458235 - DNA, 201 bp, Homo sapiens
  misc_feature (1)...(201): n = A,T,C or G
ctgtaaatttaaagtgaatgtagaaaaataactgcgaattgctaaaaccatgtctatattatacagatgagtgtgatccttatttcaacagactgactggnggattagaaagccaggccatcaggtctcttcctcatcaaggtgaatgtggtgcagcacccggctgattctcttttaaagcacacacaagatactctggtt

SEQ ID NO: 458236 - DNA, 201 bp, Homo sapiens
aatttttcaagaggaaattcacaatagtgctagaaaacaatagttatatttaagcaagattgcctttttttttttttttttttgagagggagtcttgcacygtcacccaggctagaatacgatggtgcaatctcggctcactgcaacctccacctcccaggttcaagccattctcctgcctcagcctccaagtagctggga

SEQ ID NO: 458237 - DNA, 201 bp, Homo sapiens
catgtgccagcagcggcagtggtggtggagtggcagtgtggaggggtgcagacttgtcagctgtggaagggtgctagcaggtgtcagggtgcctgtctccytgtgggcattcacagcagcagcagagacagaatggctcagggagccggggccctccactggcaactgtgcatgtggtcctgctggtggtggtgttagcac

SEQ ID NO: 458238 - DNA, 201 bp, Homo sapiens
cagcttttctggcttctccttctcactcttcccacttattggcttctgatttctaagattacctcctaaaactctatttgtaccctagtctttgtttcagrgctctgatattgtaggaacccaaacaaagtcaagccctgatggttccctaagatccagagcctcacttctaacttccttctctcattctcattctctctc

SEQ ID NO: 458239 - DNA, 201 bp, Homo sapiens
ggttccctaagatccagagcctcacttctaacttccttctctcattctcattctctctctctcctccctctccttcttctctctccatattctacccagcrtattcataattaaactcatcaccattgtttcaaacctgtctttccaatttctcattcatccaggcacaaaacctcaggttcatctttgaccttctatcac

SEQ ID NO: 458240 - DNA, 201 bp, Homo sapiens
ctctaaaatatttaacttctaaaacttcttacttttgacctataaaaattcattaaaagttttaaaatacatttttgaggcagagattgtaaatgtaaatyacagataatcaaaataattgaccttcattatcagatacttcatatcaaaactgactttctatctgaatacttatccctctgaggtgaaagaatacattct

SEQ ID NO: 458241 - DNA, 201 bp, Homo sapiens
aattgcttggacaatgagtagtgctaataatgtgctttgctcacaaactaatggttcagtatcaacacaaaaaaaaaagagtttagtttcctgcctcatayatgcattaaacataacaatcactgatgaattgatatcttagctaaaaggttcacattctgagaaccaatttattttggacagccacagagatataaaaga

SEQ ID NO: 458242 - DNA, 201 bp, Homo sapiens
gtttaattttagccatataccttttgaacttgttttctttcaattatagaaaaaaaattcacttttcaagttcaaacatgactgttaaaaatatatcatgytcccccagtagcaaatgaacatacctctcatgcatgtagtcaactcccagcagcagctggataaaccattctattatttgattttctggaaagatttttc

SEQ ID NO: 458243 - DNA, 201 bp, Homo sapiens
gaaaggtatttttattattactattagtactattgctgttgttgatggtaatgtgatacaattcttgcctattacgaggggtatttcaatctttggatccygagtgtcataagccagttttaattttagtcacataacagtgaagatgtttcccaaggagaacatcagtggttctattgaatagaattcattcagaaacag

SEQ ID NO: 458244 - DNA, 201 bp, Homo sapiens
aaatatttacaaactatacatctgacaaggtctaatattcacaatctataaggaacttaaacaaatcagcaagcaaaaaaccaacaaccccattaaaaagwgtacaaaggatatgaacagacacttcttaaaagaagacatacacatgtggccaacaaacatatgaaatatgctcaatatcactaatcttcagagaaatgc

SEQ ID NO: 458245 - DNA, 201 bp, Homo sapiens
ctatacttactccaaattcctaatagttggtacaacgaatatttgctggtttaaaccccagctctgtcattggatggggtaacttaggtcaaattagttawtctgtctgtttcatagtcttctcatttgtaaatggtgagagatgttaattgcattgagtgctgtgagtatgaatgggataaggcatgtaaagggtttggc

SEQ ID NO: 458246 - DNA, 201 bp, Homo sapiens
tcacaacctcagtactgtaaggcagcataggatatgttctaagaaaggagaaaaatgatcagggagattagtcaaagagtcctggtaggagacatcttctsacgtcgaatcaaggaggacgtctttgagctgggtcttaaaagataagtccgattctaacaagtagacaagaggtgataagcaccatctaaccattctata

SEQ ID NO: 458247 - DNA, 201 bp, Homo sapiens
ctacgtagctatagcaaaaccctaaggaatataataactgtggatctatgtggggatccaagcacatcgtttaagcatttagttaagctctatcctatcaytcactggcaataagtaaaataataatacttattattaaggccaaaaactaactatgatcaaaaatgacaaacatctaaaatagcctggcagtgtctgaca

SEQ ID NO: 458248 - DNA, 201 bp, Homo sapiens
tcaaactatactacaaggctacagtaaccaagacagcatggtactggtaccaaaacagagatatagatcaatggaacagaacagagccctcagaaataacrccgcatatctacaactatctgatctttgacaaacccgagaaaaacaagcaatggggaaaggattccctatttaataaatggtgctgggaaaactggctag

SEQ ID NO: 458249 - DNA, 201 bp, Homo sapiens
caatcagatccaagggtcctcagcagaatctcaggccttgcctatcgcatatccagttctctgccccgggacaatgttccaagaagaaaatcaattgtttwtcctaagaatttcaaaacctctgaatgatttggggaaaaagcattgagaacttcagaattaactggaatagtggaactctgccgcctttcatcttaggaa

SEQ ID NO: 458250 - DNA, 201 bp, Homo sapiens
ttctaatgaaacaatatgaggtcaactgattcacttctaatgcattttttatttccttacagtgcaatgtgcaaatatttgcttagcattttctctcctayacagggccgtaacaaatcaaaagtatagcaaacattcactagcagcctagctcaagtacggtttcctgatagtttttctgggccaaggagagtgttccaa

SEQ ID NO: 458251 - DNA, 201 bp, Homo sapiens
tgataatattcatctcatggaattgttgtgaacattacatagtataatggatgcaaagtatgtatcaaataaggcaaacactcagtagtttttcctgtaayacccaacaccaggaagaaataagtcatgcatcacttaacaacgaggatatgttctgaggaatatgtcattcaggtgatttcatcattgtgtgaacatcat

SEQ ID NO: 458252 - DNA, 201 bp, Homo sapiens
ctaacctttctttgagcaggaagaaaaggcaaaatccacggactagagcttcaggatgttcacttttgcaaatgcaaaccgctttatacttgctgcattgmcttttccctgggtggagctcaagcagcaaaataaatgaatgtatcattctttaccatttgccctgtataagtcaatatccagtagaagagtgtctgcatt

SEQ ID NO: 458253 - DNA, 201 bp, Homo sapiens
cctagaaggggaagaaggaaagaagtggccagggaaaagtgccattctgccacctaagttatgaaacaaactggaatgaatctgtctccagtatttcttargtaagcaccactaatttggtgctgcccacaaaaggactcattttcattttcaaagggaaaagtcaaaaaaaacgtaagtccgttcaaactgtgtttgtca

SEQ ID NO: 458254 - DNA, 201 bp, Homo sapiens
cagccctctcaagtataccactaaaatttttcatttgggatgtcaaaaacacacaaaggttggtcctgttcaaaatgtataatctcacaaataaaaggagkctaaatttatttgactagacaccatatgctcataagcaactgcttatgcaaattgtcaaattattatatcttaaaatggatttgtgggaggtagagggtg

SEQ ID NO: 458255 - DNA, 201 bp, Homo sapiens
aataaaatctaaaagattttatactatttctacatatttcaacctttgtatgttaaagacaaaacataaacgtaagaaaaactttaccttagaagagctcragttactgtgctattagttgtctaaattacttaaaatctccatagaggtataagtaattcaactactcccattttgttgatagaaaagaacaaagctaag

SEQ ID NO: 458256 - DNA, 201 bp, Homo sapiens
atagttggacaacttcatgataaatgctaaaatagagctgggggtgggcagtaggattcctaacctttctttgagcaggaagaaaaggcaaaatccacggwctagagcttcaggatgttcacttttgcaaatgcaaaccgctttatacttgctgcattgccttttccctgggtggagctcaagcagcaaaataaatgaatg

SEQ ID NO: 458257 - DNA, 201 bp, Homo sapiens
atagctatgcatttctttggggtggcaccccctgaggtaactggcaggctgtatgccattgctgccactgcagccccacctctgctgcccccaaggtgggsaaggaacaaaaaccctgatctctccccagggctgcagtgcatagcctaggagtactaaggcacttgagtgggaatggagcccacattctcagagcactaa

SEQ ID NO: 458258 - DNA, 201 bp, Homo sapiens
aagacacatcttgaataagttttttaaattacatgcctggtttcagattggtttatttgggaaatttttctcatttaaaagtaatccagaaaaaccttccrtttattagaagtttccaattgcagtcattgggtggtaattagctaaagttttcttaggcttcctttaattattcttttaacttggattgtttataattaa

SEQ ID NO: 458259 - DNA, 201 bp, Homo sapiens
aaccaagtcctccctccaccccttggtgataactgacctgtttttgttccttcagttttgccttttccagaatgtcatatgaatggaatcattcagaatgyagcttttaaagaactggtgcctttcaattaacatagcatctttgagattcatctaaactgctgtgtgtattataatttgttccttttattgctgatcagt

SEQ ID NO: 458260 - DNA, 201 bp, Homo sapiens
ttaaaaagtcaggaaacaacagatgctggagaggatttggagaaataggaacacttttacactgttggtgggactgtaaactagttcaaccattgtggaaktcagtgtggcgattcctcagggatctagaactagaaataccatttgacccagccatcccattactgggtatatacccaaaggactataaatcatgctgct

SEQ ID NO: 458261 - DNA, 201 bp, Homo sapiens
tatagcaaacattcactagcagcctagctcaagtacggtttcctgatagtttttctgggccaaggagagtgttccaaagcttggtggaattcaaaaatatrgcgaattgaatacttaactccttgtctaaaagactatcatttctttctcattcttcaaacctgcctttatttcttctctctttttactccttgagtttat

SEQ ID NO: 458262 - DNA, 201 bp, Homo sapiens
aaaaagtcaggaaacaacagatgctggagaggatttggagaaataggaacacttttacactgttggtgggactgtaaactagttcaaccattgtggaagtmagtgtggcgattcctcagggatctagaactagaaataccatttgacccagccatcccattactgggtatatacccaaaggactataaatcatgctgctat

SEQ ID NO: 458263 - DNA, 201 bp, Homo sapiens
tcctgtgtagcagacatgaaagtccttcagatgaaaggtgacctgtaaacatacagttgacccttgaataacatgggtttgaactgcgtaggtctgcttartatatcagtttacaagcttataatatcagcttctaaactgatatttttcaaccaaacacatattggaaatacaatatttgcaggaatggaaatctgcata

SEQ ID NO: 458264 - DNA, 201 bp, Homo sapiens
gtaaactagttcaaccattgtggaagtcagtgtggcgattcctcagggatctagaactagaaataccatttgacccagccatcccattactgggtatatayccaaaggactataaatcatgctgctataaagacacatgtatacgtatgtttattgtggcactattcacaatagcaaagacttggaaacaacccaaatgtc

SEQ ID NO: 458265 - DNA, 201 bp, Homo sapiens
ggggtttcatcgtgttagccaggatggtctccatctcctgaccttgtgatctgcccgccttggcctcccaaagtgctgggattacaggcgtgagccattgygcccagccaacacaaagttatcttttagttctgtagatcagaagtctgacatggatctcaccaagctaagatacacttgttggcagggtgccttcctttc

SEQ ID NO: 458266 - DNA, 201 bp, Homo sapiens
tctttttctttatggtattgccaaaattaagttgtaaaagagaactatttaattggtttaaagaaaaataagtgcttatataaaataggtattccttaaamccttagaaacaaacctaaaatatttttcaagttgacataatcttggataatcttcggtaaatagtagctaataaaagtatattggcttgattaatgcagg

SEQ ID NO: 458267 - DNA, 201 bp, Homo sapiens
tttctccattaaagggttacttcaatcagtgaaacagaatgagctttgttcataaagcacttggaaatcttgaaatagtaaaatagtacattctagtgatmcacacacacacacacacacacacacacacacagtaatagcctgagctcagagaatgagatgctgtcaaaatacaaataccaatacctgccaattcagaaa

SEQ ID NO: 458268 - DNA, 201 bp, Homo sapiens
tgtttcctctacagtttcttactacagagagactaaagacagttgggactgttaataaatgttctgtgccacattgaaaaaaatgtattataaaaaagtayatgctcctagaattataattcacaggttttccaatctatagactgctggcatgatattcacacttgcttgcttcctagtgttcactagaaattaaggtca

SEQ ID NO: 458269 - DNA, 201 bp, Homo sapiens
agctgtaatgagaagataccacagattgggtgatttaaacaatagaaatttatttcccagagttctggaggttggagattaaggggccagcagggttggawtcctctgaggcctttctccttggcttccctcttgctgcttcttcacaaggtcatcctctgtgcatgcataccctggtgtccctgtgtcctaatctcttat

SEQ ID NO: 458270 - DNA, 201 bp, Homo sapiens
ccctgagggagtatgaatacaagcaatgaaaaagaaggctgggatcaggtgtctgtgaagcaaattacacctgaactccataaacttgccatctgtccaarttgaacaacttgtccggaactactgagaaaatttctgaagcacaggttgattgataataaatcacaaatgtaactcagactttgcttgtcttaaggtaac

SEQ ID NO: 458271 - DNA, 201 bp, Homo sapiens
aaaatgtattataaaaaagtacatgctcctagaattataattcacaggttttccaatctatagactgctggcatgatattcacacttgcttgcttcctagwgttcactagaaattaaggtcataaagggctaagaattctaattaaaatatgtaactaaaattactagaaataataaggaaaacaactttatatgcaagta

SEQ ID NO: 458272 - DNA, 201 bp, Homo sapiens
catatccagctaaactaagcttcataagcgagggagaaataaaatcctttacagacaaacaaatgttgagcgattttatcgccacctggcctgccttacargagctcctgaaggaagcactaaacatggaaaggaacgaccagtaccagccactgcaaaaacatgctaaattgtaaagaccatttaaactatgaagaaact

SEQ ID NO: 458273 - DNA, 201 bp, Homo sapiens
ggactgcaactggagcagaaactcagttaatctgtagtcctcaggtaaggcaaagaatcaatatatgaagtacctgagattttttggagttctttgttacygcagcaaagctgactgatacatcattcctctgcttaacagcctttagcagtttctcatactccagaagatgaaagtacaagcttcttttcataattacat

SEQ ID NO: 458274 - DNA, 201 bp, Homo sapiens
ctcccctgggcttccagatcgacacagagagcttgtggagtctgtgcagagctaccactgaagcccacattgagctccatgagccttggatctctgagcaygttggtgccagctgccatagccctacaaacaaaggagctcaggctctctcgtgcacctctaggataggtaccacacgcacggtgctgaggagaggatgaa

SEQ ID NO: 458275 - DNA, 201 bp, Homo sapiens
actaagatcagagcaaaactgaaggagttagagacaggaaaaacccttcaaaaaatcaatgaatccaggagttggtttactgacaacaaaatagatatacygctagccagactaataaagaagaaaagagagaagaatcaaatagacacaataaaaaatgataaaggggatatcaccactgattccacagaaatacaaact

SEQ ID NO: 458276 - DNA, 201 bp, Homo sapiens
gtaatgctacattaattagagatgaattcaattataacacgcacattaagaagatttattccaaatgacaagattatttacagttttaatatgcacaaggyattccaggagaaagcctctctcacaaaggattgtttaaacaaaacaccattatttaaaagatgagctttttatcctagaaaactcagggggaaatgtatc

SEQ ID NO: 458277 - DNA, 201 bp, Homo sapiens
ttgttgttgcaggcctatagcacaccacagccatcctatggagaagaggccaaactatcttcttttgtcttccctaggcagagcccccaccccacctactyccaagcttgggcccacagcacagctgccccatccctagctgatcactcaaattagccatagctatgcatttctttggggtggcaccccctgaggtaactg

SEQ ID NO: 458278 - DNA, 201 bp, Homo sapiens
ggccatactgcccaaggtaatttatagattcaatgccatccccatcaagctaccaatgactttcttcacagaattggaaaaaaactactttaaagttcatrtggaaccaaaaaagagcccacattgccaagacaatcctaagccaaaagaacaaagctggaggtatcacgctacctgacttcaaactatactacaaggcta

SEQ ID NO: 458279 - DNA, 201 bp, Homo sapiens
tctgataccatccagacaacagactccagaggacatgcaattttcaggaatatacatctcttattttgtcagaccaatggatctccttgaaacatagtcayagatctcgaaaatagcagtgaccatctgaagtcaatatttcataatgtaaaataccctccaaacaactggattctagaacactgttaattgtaaacagtg

SEQ ID NO: 458280 - DNA, 201 bp, Homo sapiens
acatagcaagatcccatctctaaaaaacaattttaaaattagcccagcctggtgtcatgcctatattctcagctgcttgcgagcgtggagtgggaagagcrtttgagtccaggagattgaggctgcagtgagctatgattgcaccactgcactccagcctggtgacagaatgaaaccccaatctcaaaaaacacaaaaaat

SEQ ID NO: 458281 - DNA, 201 bp, Homo sapiens
ccaaatctatgactcaatggtattcctgagagagagagaataaacaactcagataatatatttgaggatatagtccatgaaaatttccctaatgttgctaragaggatgacatgcaaaacgaataaatacagagaaccttggttagacaccatataagtcaaccatccccaaggcacatagtcatcagattcaccaaggtc

SEQ ID NO: 458282 - DNA, 201 bp, Homo sapiens
gtctactgatataaaaatattaattgcatcttaaaaacaccttcacagcaacatctagactggtgatggaccaaactaccatggcctagccaaatagacayataaaattaactatcacaggatctaacaggagaattattttgcaacttgaaatctgacagagaataaagttgccaaacagaactcagatcttccatgcag

SEQ ID NO: 458283 - DNA, 201 bp, Homo sapiens
gtaataggaggttgatctggcttcaagactgattcaaatacttaaggaaagtgtatcagcagtacttccttctctttttttaagtttttaaaatttttgtyttattttatttcaatagtttttggggaacaggtggtttttggctatatggataagttctttagtgatggtttctgagatttgggtgcacccatcactaga

SEQ ID NO: 458284 - DNA, 201 bp, Homo sapiens
tcccagcactttgggaggctgagtcaggtgaaccacttgagcccaggggttcaagaccagcctgagcaacatggcaaaaccccatctctacaaaaaatacaaaaaaaaaaaaaaattagccaggcatagtggcacatgcctgtagtccctgctgcatgagaggctgaagcgggaggattaccctgagcccaggaggtcaag

SEQ ID NO: 458285 - DNA, 201 bp, Homo sapiens
ccgcctcagcctcccaaagtgctgggattacaggcatgggccaccgtgcccagccaggaacacttttacactgttggtgggactgtaaactagttcaaccrttgtggaagacagtgtggcgattcctcaaggatctagaactagaaataccatttgacccagccatcccattactgggtatatactcaaaggattataaat

SEQ ID NO: 458286 - DNA, 201 bp, Homo sapiens
tggaaagtcccttgattacaattgccattgtgaacttcaagttcataaggcatcaataaataatccagattgccaacgtattcatacacaatgagagctaraactgccaaggcaatagggaactcatctcaggttagccagcatattttttcctattagaggagacatatatggaaagctaaattaggatcagaaggttgc

SEQ ID NO: 458287 - DNA, 201 bp, Homo sapiens
atgcatatttttattgtttcttactttaatttttgcttgtgtgatagataaatgtgttattgtattcattttaattgaattttaaaaattaagagtgaacyctaacgattctaatatttttattagctgttttactttttgctctgtgacttgttaatatttggcttaggaccaaggtatttgtgcataaattttttaaat

SEQ ID NO: 458288 - DNA, 201 bp, Homo sapiens
tcccatggtcagaagtcatttctctctcctattacccccacagcactttaaccatacccttcccataacacataccacactcccccttgtattttagcaaytgatataaatgactcattaatcctacctgaaaattcattaaatattatcatattatctctgttatgccacacaatgactataattgtatctgacacagat

SEQ ID NO: 458289 - DNA, 201 bp, Homo sapiens
ggatggtgagtcttaccttcatccctatcgccagtccacttggcctcctgatctggactgggccttttatatatcatcttaaattgctcagccatggtgtytattgaactataactcatgtttagctgatcactttcccaaaaaattagcaccctcaatggagaaaatcttgaagtcacaaggttcaatgccctctcccca

SEQ ID NO: 458290 - DNA, 201 bp, Homo sapiens
actccggaagtgtcctgcactgccagaatcgcccagcttcccggcacacctatcaaccagtcgttcccagcactgcccagtatgcagcctccaggcagagrgcctggatgtcttggcaggtagggttcccctagcagcctgggggtggtcagatagaaacattaactggaacgtagaggccagttcttggctcagggagcc

SEQ ID NO: 458291 - DNA, 201 bp, Homo sapiens
tttcctcacactccggaagtgtcctgcactgccagaatcgcccagcttcccggcacacctatcaaccagtcgttcccagcactgcccagtatgcagcctcyaggcagagggcctggatgtcttggcaggtagggttcccctagcagcctgggggtggtcagatagaaacattaactggaacgtagaggccagttcttggct

SEQ ID NO: 458292 - DNA, 201 bp, Homo sapiens
ccaaactcctgcccgcatgctgggaaggtgagcccttgcctggagagcccagcaggggaaatagaaggagggaaggaggcctgctccttccccggagctcygctctgcggctgcaggaagacccgcagaggccctgggcagcagaactgtggacagcaaggctggagttgtgaaacccaaccactcagctggattccagaa

SEQ ID NO: 458293 - DNA, 201 bp, Homo sapiens
ccaaagcccaaactcctgcccgcatgctgggaaggtgagcccttgcctggagagcccagcaggggaaatagaaggagggaaggaggcctgctccttccccrgagctctgctctgcggctgcaggaagacccgcagaggccctgggcagcagaactgtggacagcaaggctggagttgtgaaacccaaccactcagctggat

SEQ ID NO: 458294 - DNA, 201 bp, Homo sapiens
gatgcaaacctgccccctgtcttccttccagagcacctggctggagtttaaggccaaggctttctccaaaagtgagcccggatcctcctgggagtgagtgktgggcctcaggacaaggggtgggtcgtgtgcccaggggactgttccctgggaggccacatctcctccaccactgcccttcatttatcagcaaaataattt

SEQ ID NO: 458295 - DNA, 201 bp, Homo sapiens
gtaatgccctcctctctcgtgctcaggctgctccaggcatgtgggaagctgaagcggcagctctgcgccatctaccggctgaactttctgaccacagcccscagcaggggaggcccacacctgccccagcacctgcaggaccaagtgcagaggctcatgcggtaagtgcagtgcggccccctgggtggccagggcagggtc

SEQ ID NO: 458296 - DNA, 201 bp, Homo sapiens
ggaaagaggcagtcctggccctcctgccaccatgactgggcacagctagaagcccaggacagaggcaggccgtccctagctcctggcttgtaagcaccttractcagaccttcacctacctagaagacttcccaggcttggtgcacttcatctatgtggaccgcaccactgggcagatggtggcgccttccctcaactgca

SEQ ID NO: 458297 - DNA, 201 bp, Homo sapiens
  misc_feature (1)...(201): n = A,T,C or G
aacagagcagagaatggaactcacttgcctggggtcatctagctggttggtggccacatccaaactggatatttgagctcaggactctcagtccagtgctntttccatcctcccaacatcatcacccgtcattacaaatctggtctgagctagtcctctctggcttctcaagcttcagactctctctccagaaaaacacaa

SEQ ID NO: 458298 - DNA, 201 bp, Homo sapiens
ttccttgtcattgagtagtaatctattgtatcaggatgccaccatttgttcattcatttacttgttgatggacatctgtgttattttcagtttttgactawtacaaataaagcaactatgaacatgcacgtacaagtctatgtatacatggatgctttcatgtccaaggacagatacttaggatagactggctaggtcatg

SEQ ID NO: 458299 - DNA, 201 bp, Homo sapiens
cccgtctcctgctgggcatgtgctgatgggtggccatgctcctgtgtctgcagccacagtgccagctccctgcgcccggccgacctgcttgccctcatccycctggttcaggacctctaccccagcgagagcacagcagaggacgacattcaggtctcagggcagctttctgggcagagggaggccattagggaggtagtt

SEQ ID NO: 458300 - DNA, 201 bp, Homo sapiens
tgcctcctaaggcttgagtgcaggtacccgtgttcctagagcacaggacgctgtctgcggctccccatcttccctgccagctccagcctgaactcaaggaytgttaagaccactccactgatccctaaagctgttgatgacaagttgattcatttaaaacttctgtacatgcattctcagactcatcttttttgtaattaa

SEQ ID NO: 458301 - DNA, 201 bp, Homo sapiens
ttaaaatcagatttggatactaacgtgtttcattatacttttttatttaaacatttttccatttcctaagcactcccacagtgtggtttgtaatgattggkagtccatcacatgcatatgttatttatctagcaaatccccaggaaaatcgcgtcatgtgtccagtgtttgctgttaggtatgacactgaagaggaatttt

SEQ ID NO: 458302 - DNA, 201 bp, Homo sapiens
acaggagattcaggtgagacccaagttccagtcctccccacctggggaagaggcagggctggcagcagggtacatccggtccacagcagctgaggggccartgggcctgggttcctgtccgggctccacctcccccgggcctacgatccttgttttccctattatgaaatgatattgaaaacttagctgctttttggtttt

SEQ ID NO: 458303 - DNA, 201 bp, Homo sapiens; identical to SEQ ID NO: 318625

SEQ ID NO: 458304 - DNA, 201 bp, Homo sapiens
taagtcagatgggaggaatgtttttaagattattgatggatgttgtcaaattactttcctgaaaagtacagtcaatccatggcagatttaatgagtaatcrcacggcgatgcagtttggagcagatcgcctgtccctcccgttaagggtagaggagagggctcctcgagtctcttcccagccctgagaggtggcagagagc

SEQ ID NO: 458305 - DNA, 201 bp, Homo sapiens
ttgtacggatggagacacaatgatccggagatcagacgccatggccagggccaccgaggctgtaagtgaggaagccggagcccaagctctgctcccccggsctgcaggctcccagctttcctccgtgccctcagaagtgcccaggacgtgtgtacaacagaagtgctagaaaattcctgtgacctttaccttcacttctag

SEQ ID NO: 458306 - DNA, 201 bp, Homo sapiens
gtactgagcaaggccccagatccttctctctggaggaagagggaagcccaggggtcctgtttgtaaaacaacggtggcaacagctcctcttccagagctgyctctgcctttatcctgggagatggggaggaagccccatctctgctgttccctgcgtggaggaagcccacccagcaagctctctcctaccccaggtaaaag

SEQ ID NO: 458307 - DNA, 201 bp, Homo sapiens; identical to SEQ ID NO: 318629

SEQ ID NO: 458308 - DNA, 201 bp, Homo sapiens
gccccttcatgcttggctggcgtctgccctagggctggggttctcaagcccctggccctggcccagagatttggattcccttggcggccgtggagcccagsctttgatgtctttcaaagcttctgtggtgcgccctggattgagaaccaccacccgaggggtacagcccctctcttccaaccgagaagttcctgtcccaga

SEQ ID NO: 458309 - DNA, 201 bp, Homo sapiens
tgctcctctgaggccaggaggccggtgctgggccagagaggacggcgtggcgaaagtcagcgtccactgcagcacaggatcagatggccgtgtgctgtgcrtgcaggagcctcgccttctgtgtctttagtcttgagccaaaatttgctcaaagactgatctcttccttgcagggaacagctttggggctgggggaactag

SEQ ID NO: 458310 - DNA, 201 bp, Homo sapiens
ctgggccagagaggacggcgtggcgaaagtcagcgtccactgcagcacaggatcagatggccgtgtgctgtgcatgcaggagcctcgccttctgtgtcttyagtcttgagccaaaatttgctcaaagactgatctcttccttgcagggaacagctttggggctgggggaactagaacccacatgttggtctaaaccctgag

SEQ ID NO: 458311 - DNA, 201 bp, Homo sapiens
accccccccatggatgcccttcaggtgagtttctcctgtgcctgcctgggcgccagctgatctgagatgccgcagtgagtattgggggctctgagggtttygcctccagggtgactctacccgtgccagccctcctcctgcccaccccagggctggtcagtgcaggtgcctgtcctggtgccagagctcagcccagaggca

SEQ ID NO: 458312 - DNA, 201 bp, Homo sapiens; identical to SEQ ID NO: 318636

SEQ ID NO: 458313 - DNA, 201 bp, Homo sapiens
tggatgtcacaagtcaagcctccttcccagggtggccgtgaggttcgggggtggggggaggtggggatttggggtgaaactggacagaaactggcgtgctrggcaaacgggagccccgcggcggcgaactgctgactcgctctctccagagactcaggggcagggccgggctccgaaggtgtgggaccccagaaggagctg

SEQ ID NO: 458314 - DNA, 201 bp, Homo sapiens
ccatgtcaggtactgagcaaggccccagatccttctctctggaggaagagggaagcccaggggtcctgtttgtaaaacaacggtggcaacagctcctcttmcagagctgcctctgcctttatcctgggagatggggaggaagccccatctctgctgttccctgcgtggaggaagcccacccagcaagctctctcctacccc

SEQ ID NO: 458315 - DNA, 201 bp, Homo sapiens; identical to SEQ ID NO: 318638

SEQ ID NO: 458316 - DNA, 201 bp, Homo sapiens
agctcctcccagcccccaccaaggggtgagcactcattacctgacacccgcacctagatgaccgccttcatgaccttgacctgcccatctccagccagccrgtcacttctccgctcacaaccacagcctccattccatagcccactgctccctaacccatacactctggtcagctttgtcacatgtacctgggagtcccag

SEQ ID NO: 458317 - DNA, 201 bp, Homo sapiens
atggaggtgcaccagtgccctccgatccacaccaggcactaactggctgccgtgagcatggcctccctgggcattcggctccatgtctaggccaagacctsggtcccttcctgtgccagtctggttccagtaggccccgtggtgggtctgttgctgtgctgagagggaccagataccacagaggaaagggccccagccttg

SEQ ID NO: 458318 - DNA, 201 bp, Homo sapiens
gtcatacagtatgtgcttggatttagtttggttttggtttgactgctttcactcagcataattattttgtgattcatctgtgttgtggcatgtatcaatcrttcattccttgtcattgagtagtaatctattgtatcaggatgccaccatttgttcattcatttacttgttgatggacatctgtgttattttcagtttttg

SEQ ID NO: 458319 - DNA, 201 bp, Homo sapiens
agaccagggaccacgcagcccttctccagcttgtcctttctcaacgggcagcagtcaagaccagggcatctgcctgccctcatattctctctgttttaagyatttgcaggaccagggatgctgtgctgctctcccatgagccagtcaccgagtcggtctgctgcagccctttctgaacctctggccgtctggatgctccac

SEQ ID NO: 458320 - DNA, 201 bp, Homo sapiens
tatcaggatgccaccatttgttcattcatttacttgttgatggacatctgtgttattttcagtttttgactattacaaataaagcaactatgaacatgcaygtacaagtctatgtatacatggatgctttcatgtccaaggacagatacttaggatagactggctaggtcatgtaggtgtatgtgtaactttttaataaac

SEQ ID NO: 458321 - DNA, 201 bp, Homo sapiens
ttagaactcgagtttatccattttgcatttatggattatgcttttagtgttatatctaagaaatctttgcccaacttacaaagagttttctctacatattmttttgaaagttttatagttttaggttttatatcaggtctgatgatctactttgaatttttgtgtgtggtatgagctatggattgaagataattttttttt

SEQ ID NO: 458322 - DNA, 201 bp, Homo sapiens
gtgctcctttgcctgggtttgaattccagcgctgccacttcctctctgcacctcctggcaagtttcttctattccccacgtttaaagcgatggcacctccrtcccagggtggtgtgaggattacccagtgtggtaggtgctcaataaatgttggtcattgttatcactgaagcccaacatgctagtgcttctagacccttc

SEQ ID NO: 458323 - DNA, 201 bp, Homo sapiens
tgcagggcacagtcctcttcccagctgttttcacaggctggtgttgagtgtctgcggcttttccaggtgcatggtgcaagctgtcggtggatctaccattstgggggctagaggatgatggccctattcttacagctccactaggcaatgccccagtggggactctgtgtggaggtgtctgaccccacattcccttaatca

SEQ ID NO: 458324 - DNA, 201 bp, Homo sapiens
tttcttctgagccctccatactgttccaacctctgcctgttacccagtttcaaagtcactttcacatttttgggtatctttatagtagcacctcactctcygtggtaccaatttactgtgtcagtccgttttcgtaccactataaagaactgcctgagactgggtaatttataaagaaaaaaggtttaattgactcacagt

SEQ ID NO: 458325 - DNA, 201 bp, Homo sapiens
tatcccattttattcacacatttgcaacaaacttgtccagttcctttttgtttttgtttatttgttttgttccttcttttggagagctgagagaatggatggaggaagagcttatcaaagtcaatgcaggcttgttatggaaaataggaaaagtacagaaacatacttaaaaatagagggaaaaaaatcactcctaattcc

SEQ ID NO: 458326 - DNA, 201 bp, Homo sapiens
ccactctacattttaaaggagtaatttattttgaaaatgttttccagattaattttgggttaaaaatatttttactggggatgcagtggaaggtgttcttacatttctgcagcatgggctgattgcctctctgtccctttctgctctaaggggtctcatcatccagccaatgagtgagctgactccacctcagggagtcca

SEQ ID NO: 458327 - DNA, 201 bp, Homo sapiens
gcaggtgaagggagtgcccttggggctggctgacactggcctgcctgtgcctgcagtttggagaatgcctgttcattgccatcaatggtgaccacaccgasagcgagggggacctgcggcggaagctgtatgtgctcaagtacctgtttgaagtgcactttgggctggtgactgtggacggtcatcttatccgaaaggagt

SEQ ID NO: 458328 - DNA, 201 bp, Homo sapiens
cagccgcctgcgggagcaggagcagtgcttcgccgtggaggtgactactgggcgcgggagtcctcaggacttgaagctgtcaggtcagagggggcgtccasctttaagaccatgttttaaccctaatgaatgaaggcacaagcagcccctgaaactcgtgtattcagagagagttgttctttctggccatatggagggttg

SEQ ID NO: 458329 - DNA, 201 bp, Homo sapiens
tttcagatatgtggtgggttcagtaggtttttgtgcgttatattaggaaggaaatccacctcaattcccagcacacagcaggtgctcagtaagagcttgcyggttgaataaatgaatgggcaaacgtggactgtgtgtgctgactcctgaggggcgggttgaggcctgaaggaatacaggggacagaacaaggaggggatt

SEQ ID NO: 458330 - DNA, 201 bp, Homo sapiens
tggtctaaaccctgagaaggtggcagtgaggaagtatcccctcaggtgactggatctgtgttcctccttaacatcatctgatggaatggcaatgaaaagcrtggattgtggaaaatacagaaaaacataaaggaaaaaactccaatcccctgagcccaccactgttcaggacccctgcttttgtcacctactatttccctt

SEQ ID NO: 458331 - DNA, 201 bp, Homo sapiens
actggatctgtgttcctccttaacatcatctgatggaatggcaatgaaaagcgtggattgtggaaaatacagaaaaacataaaggaaaaaactccaatccyctgagcccaccactgttcaggacccctgcttttgtcacctactatttccctttagtttttagcagcggctggatgtgatatgtctagtttaaccagtccc

SEQ ID NO: 458332 - DNA, 201 bp, Homo sapiens
tggatctgtgttcctccttaacatcatctgatggaatggcaatgaaaagcgtggattgtggaaaatacagaaaaacataaaggaaaaaactccaatccccygagcccaccactgttcaggacccctgcttttgtcacctactatttccctttagtttttagcagcggctggatgtgatatgtctagtttaaccagtcccct

SEQ ID NO: 458333 - DNA, 201 bp, Homo sapiens
ctctcctaccccaggtaaaaggtgctcctttgcctgggtttgaattccagcgctgccacttcctctctgcacctcctggcaagtttcttctattccccacrtttaaagcgatggcacctccgtcccagggtggtgtgaggattacccagtgtggtaggtgctcaataaatgttggtcattgttatcactgaagcccaacat

SEQ ID NO: 458334 - DNA, 201 bp, Homo sapiens
ggtcctgtttgtaaaacaacggtggcaacagctcctcttccagagctgcctctgcctttatcctgggagatggggaggaagccccatctctgctgttcccygcgtggaggaagcccacccagcaagctctctcctaccccaggtaaaaggtgctcctttgcctgggtttgaattccagcgctgccacttcctctctgcacc

SEQ ID NO: 458335 - DNA, 201 bp, Homo sapiens
ggcctccgggctgtcccctctgggggcggcgatcctccctccggagccccccttcaaccctcccggaagtgaggtagggtccctaggggtcccggagcggrcccactcctagcctcacccactccgggcgtgtggccgtgggccggtcgcttcctcgctcggggccaaagttcctcagccgtgaagaggggtggatgtcac

SEQ ID NO: 458336 - DNA, 201 bp, Homo sapiens
tatttttttaaatagtctcagaagcataattcttaatggaaacattgtactccagtacatgaatcagtgtatcatcctttatttaaccattttcctcatayggacataaatattgctcctaatttgctatatcactcttgctttaagaaacatttgtgcttaaattttatctcatgtcagataaattcctaggataaattt

SEQ ID NO: 458337 - DNA, 201 bp, Homo sapiens
taaatagtctcagaagcataattcttaatggaaacattgtactccagtacatgaatcagtgtatcatcctttatttaaccattttcctcatatggacatawatattgctcctaatttgctatatcactcttgctttaagaaacatttgtgcttaaattttatctcatgtcagataaattcctaggataaatttaggataaa

SEQ ID NO: 458338 - DNA, 201 bp, Homo sapiens
accattttcctcatatggacataaatattgctcctaatttgctatatcactcttgctttaagaaacatttgtgcttaaattttatctcatgtcagataaaktcctaggataaatttaggataaattcctaaaaataaaaatgttgagtcaaaagccattcaaagatattgtactactttataattccgccaagtaatatat

SEQ ID NO: 458339 - DNA, 201 bp, Homo sapiens
gattacaggcgtgagccaccgcgcccagccctggaactgtttttatctgagggagagatatctctggactgcccagagatggaggtgcaccagtgccctcygatccacaccaggcactaactggctgccgtgagcatggcctccctgggcattcggctccatgtctaggccaagacctgggtcccttcctgtgccagtctg

SEQ ID NO: 458340 - DNA, 201 bp, Homo sapiens
agctttgaaatgatctcctttgactctatccacgtccaggtcacactgatacaagaggtgggctcccaaggccttgggcagccctacccctgtgcttctgyagggcacagtcctcttcccagctgttttcacaggctggtgttgagtgtctgcggcttttccaggtgcatggtgcaagctgtcggtggatctaccattctg

SEQ ID NO: 458341 - DNA, 201 bp, Homo sapiens
agctccaagttaggactgtgccttccccatatttcattcacgtctcctgaaatcttcttgggaagtctgctgttttcttcctttctttttattccactacrgagaatttgagttgtaactgttccactggctttatcccattttattcacacatttgcaacaaacttgtccagttcctttttgtttttgtttatttgtttt

SEQ ID NO: 458342 - DNA, 201 bp, Homo sapiens
tctctttttgctcccctccctaccaggacagtgataccctcccaggagggtctaacactatggaacccttgatatcaaggcctgatcttgtcccttccttwgttcttggtgtctggcccactctaagctgtgaaattttcccccatttttgcagctccctgccctggaggaccagctcagcaccctcctagccccggtcat

SEQ ID NO: 458343 - DNA, 201 bp, Homo sapiens
atcccattttattcacacatttgcaacaaacttgtccagttcctttttgtttttgtttatttgttttgttccttcttttggagagctgagagaatggatggaggaagagcttatcaaagtcaatgcaggcttgttatggaaaataggaaaagtacagaaacatacttaaaaatagagggaaaaaaatcactcctaattcct

SEQ ID NO: 458344 - DNA, 201 bp, Homo sapiens
aacattgtatcagaggaattttccatgtcattgaaacactctaatattttaagtggctatagacccttccataattttgatgtgctgctatttatttaacwatttccctgatactagatgttaacattttttttccagttgtttgctattataaattaggcagtagtgaacatctttgtgcatgtatctttgtcccaatct

SEQ ID NO: 458345 - DNA, 201 bp, Homo sapiens
ctaccccagcgagagcacagcagaggacgacattcaggtctcagggcagctttctgggcagagggaggccattagggaggtagttcagaaaacctgcctgragatggtgggcaggctccccctggggactccatgttttctaagtcacaattctgggtgtgtggttgggcgtgacttctttcccactgctttcagatgtaa

SEQ ID NO: 458346 - DNA, 201 bp, Homo sapiens
tcccattttattcacacatttgcaacaaacttgtccagttcctttttgtttttgtttatttgttttgttccttcttttggagagctgagagaatggatggaggaagagcttatcaaagtcaatgcaggcttgttatggaaaataggaaaagtacagaaacatacttaaaaatagagggaaaaaaatcactcctaattcctc

SEQ ID NO: 458347 - DNA, 201 bp, Homo sapiens
atgtcattgaaacactctaatattttaagtggctatagacccttccataattttgatgtgctgctatttatttaactatttccctgatactagatgttaayattttttttccagttgtttgctattataaattaggcagtagtgaacatctttgtgcatgtatctttgtcccaatctctgatcattttccttaggacaaat

SEQ ID NO: 458348 - DNA, 201 bp, Homo sapiens
ggatgcaaacctgccccctgtcttccttccagagcacctggctggagtttaaggccaaggctttctccaaaagtgagcccggatcctcctgggagtgagtsgtgggcctcaggacaaggggtgggtcgtgtgcccaggggactgttccctgggaggccacatctcctccaccactgcccttcatttatcagcaaaataatt

SEQ ID NO: 458349 - DNA, 201 bp, Homo sapiens
cccattttattcacacatttgcaacaaacttgtccagttcctttttgtttttgtttatttgttttgttccttcttttggagagctgagagaatggatggaggaagagcttatcaaagtcaatgcaggcttgttatggaaaataggaaaagtacagaaacatacttaaaaatagagggaaaaaaatcactcctaattcctct

SEQ ID NO: 458350 - DNA, 201 bp, Homo sapiens
tttaagtggctatagacccttccataattttgatgtgctgctatttatttaactatttccctgatactagatgttaacattttttttccagttgtttgctrttataaattaggcagtagtgaacatctttgtgcatgtatctttgtcccaatctctgatcattttccttaggacaaattttccaaagtagacttattgcaa

SEQ ID NO: 458351 - DNA, 201 bp, Homo sapiens
atagacccttccataattttgatgtgctgctatttatttaactatttccctgatactagatgttaacattttttttccagttgtttgctattataaattakgcagtagtgaacatctttgtgcatgtatctttgtcccaatctctgatcattttccttaggacaaattttccaaagtagacttattgcaaaaaacagcata

SEQ ID NO: 458352 - DNA, 201 bp, Homo sapiens
ctaatgaatgaaggcacaagcagcccctgaaactcgtgtattcagagagagttgttctttctggccatatggagggttgggtaccctgatgggctttcccrtggtaaaacagctcgatcctggataacacatacttttaatgcaatttttgggttcactgtaaattacaggaatctttgaagacagttccttcaaccctcc

SEQ ID NO: 458353 - DNA, 201 bp, Homo sapiens
ggagggttgggtaccctgatgggctttcccatggtaaaacagctcgatcctggataacacatacttttaatgcaatttttgggttcactgtaaattacagraatctttgaagacagttccttcaaccctcccctccttttcccacaaaattatattgagctggaactggaggggaaagcagtggagaaaaacacagcgcta

SEQ ID NO: 458354 - DNA, 201 bp, Homo sapiens
actcgtgtattcagagagagttgttctttctggccatatggagggttgggtaccctgatgggctttcccatggtaaaacagctcgatcctggataacacakacttttaatgcaatttttgggttcactgtaaattacaggaatctttgaagacagttccttcaaccctcccctccttttcccacaaaattatattgagctg

SEQ ID NO: 458355 - DNA, 201 bp, Homo sapiens
cagagagagttgttctttctggccatatggagggttgggtaccctgatgggctttcccatggtaaaacagctcgatcctggataacacatacttttaatgyaatttttgggttcactgtaaattacaggaatctttgaagacagttccttcaaccctcccctccttttcccacaaaattatattgagctggaactggaggg

SEQ ID NO: 458356 - DNA, 201 bp, Homo sapiens
cgtgtcaaatgtgcaagtgttgaggatcttacagcttttcaaggcctggggagcttggaggtagtgggggatctgaggaagcaaggatacagggggcttarctgaaatggaagctgctggaaagaggcagtcctggccctcctgccaccatgactgggcacagctagaagcccaggacagaggcaggccgtccctagctcc

SEQ ID NO: 458357 - DNA, 201 bp, Homo sapiens
ttcccctggcgatcagagctcaggtgaggaccggaggaaagcaggaggaaacaatagctagctgcgagcgacaggcagcccaggacatctgtcttaggctycagtggacccccgtgcctcctaaggcttgagtgcaggtacccgtgttcctagagcacaggacgctgtctgcggctccccatcttccctgccagctccagc

SEQ ID NO: 458358 - DNA, 201 bp, Homo sapiens
tctgtgagctgtgcatagaggcgctggagcggcacgtcatccaggctgtcaacaccagccccgagcggggaggcgaggaggccctgcatgccttcctgctygtgcactccaagctgctggcattctactctaggtgagctcaaggtctggcatgtggtggctaaaggctccctggccttctcactcccctatggcctctgc

SEQ ID NO: 458359 - DNA, 201 bp, Homo sapiens
ccagttgtttgctattataaattaggcagtagtgaacatctttgtgcatgtatctttgtcccaatctctgatcattttccttaggacaaattttccaaagkagacttattgcaaaaaacagcatagactttggtacatgctacaaacttccttccagctccccgttcagtgctccccacattccactgttgtaatgaggcc

SEQ ID NO: 458360 - DNA, 201 bp, Homo sapiens
cttaagcatcaccctggctctctctagctggctttgtatgacatgtgtttgtgtgacagaggctgaggagtgaggtgatttgctcagctgcctgccttcckgctccgtgcctatcccaccccactccacagttagagctcggccggaaacctggccccctttcccagctgtgtgggcaggtcacatgggctcaccaagctc

SEQ ID NO: 458361 - DNA, 201 bp, Homo sapiens
ggggcaaggttgttggtgatatggcttcctctcccttcctgccctggctaggccctggagcgactgattcacccccagctctgtgagctgtgcatagaggygctggagcggcacgtcatccaggctgtcaacaccagccccgagcggggaggcgaggaggccctgcatgccttcctgctcgtgcactccaagctgctggca

SEQ ID NO: 458362 - DNA, 201 bp, Homo sapiens
tcagctgcctgccttccggctccgtgcctatcccaccccactccacagttagagctcggccggaaacctggccccctttcccagctgtgtgggcaggtcayatgggctcaccaagctctgatgctgagctgagactgtggtcctttggttgggtgtgggggagaccagctttcttgtgatctctcccgccctctctggctc

SEQ ID NO: 458363 - DNA, 201 bp, Homo sapiens
ctttcccagctgtgtgggcaggtcacatgggctcaccaagctctgatgctgagctgagactgtggtcctttggttgggtgtgggggagaccagctttcttrtgatctctcccgccctctctggctctgcccccaggctgcggcccccagacctggcgcagcgtgtccagctgtgggagcacttccagagcctgctgtggac

SEQ ID NO: 458364 - DNA, 201 bp, Homo sapiens
gcctctcccctgccctgcacagccttccccgcggagggcccggagcagccagaacatccccgtgcagcaggcctggagccctcactccacgggcccaactdgggggagctctgcagagacggtgtgtgctgtgcacttcgtggagtcaggggcaggaggggatcggcctctgcaggcgaccaggcctttcccatccctcct

SEQ ID NO: 458365 - DNA, 201 bp, Homo sapiens
gatcagagctcaggtgaggaccggaggaaagcaggaggaaacaatagctagctgcgagcgacaggcagcccaggacatctgtcttaggctccagtggaccyccgtgcctcctaaggcttgagtgcaggtacccgtgttcctagagcacaggacgctgtctgcggctccccatcttccctgccagctccagcctgaactcaa

SEQ ID NO: 458366 - DNA, 201 bp, Homo sapiens
gtttttcatcaaaagctatggtggcacaagagatggagtggtaaactctttctgggacattaggaaagacttcttttaggaggtgacctaatgccattagyataaaatccaaactcttcccaagcctaccaggccctgtgtgatctatcgctgcctatttcactctagcttcatcttatgcctctcttgtccacgcttact

SEQ ID NO: 458367 - DNA, 201 bp, Homo sapiens
cattagcataaaatccaaactcttcccaagcctaccaggccctgtgtgatctatcgctgcctatttcactctagcttcatcttatgcctctcttgtccacrcttactgagtgctagtcacatgaaacttctttaagtttcaggaaaactctatatttagatctgtccaatatgatagtcattagctgcatgtggctgttga

SEQ ID NO: 458368 - DNA, 201 bp, Homo sapiens
ccacactttgaaaaccactgctagagcaggaaaggtaaagatcaaacaaacgtgaactcacaactgaagaaaatcagatatggaagaaaataagccaccaygagtgagagtcaggaaaatcaatcaccaacagatttagatcccaaggcacttgatacattggaactattaggtatagaatataaaataactatgaaatat

SEQ ID NO: 458369 - DNA, 201 bp, Homo sapiens
aaggaatttattatgtggctgcttttaacccaaccctggcacattggaatcaccaggcagcttcagccagcccaattaagttacagtctgtgggcctgggwcccaggtgtgaatacttctaggaaattttcccaggtgagttcagtgtgcctcgggtgcaaaccactgctgtgcacagatttaggttacagcatgctttgc

SEQ ID NO: 458370 - DNA, 201 bp, Homo sapiens
ggtacttacatcgttatgttattacctgtggcctgcaggtagcaccatctggctggaggggggcaccccccccatggatgcccttcaggtgagtttctccygtgcctgcctgggcgccagctgatctgagatgccgcagtgagtattgggggctctgagggtttcgcctccagggtgactctacccgtgccagccctcctc

SEQ ID NO: 458371 - DNA, 201 bp, Homo sapiens
catctggctggaggggggcaccccccccatggatgcccttcaggtgagtttctcctgtgcctgcctgggcgccagctgatctgagatgccgcagtgagtaytgggggctctgagggtttcgcctccagggtgactctacccgtgccagccctcctcctgcccaccccagggctggtcagtgcaggtgcctgtcctggtgcc

SEQ ID NO: 458372 - DNA, 201 bp, Homo sapiens
ttctttaggcaatagtatatagcctgtgggctagggaatagggaatggggactctcaaattcaaaccaacgaataaaaacatgaaaagaaggagaatggcrtgaacccgggaggcggagcttgcagtgagcagagattgcgccactgcactctggcctgggtgacagagcgagactctgtctcaaaaaacaaacaaacaaa

SEQ ID NO: 458373 - DNA, 201 bp, Homo sapiens
aactcatctcatttatttgctcctactctgataaactaggagtgattgaatttatagccaatgaacacatatatgcaattaaaaatacaatactttgagawtgagaacctctgcttcaccagggcactgagatacttcagtgcaactcagatttgtccaatttgttgataagtacatttaggaatagtaaagagaaatatg

SEQ ID NO: 458374 - DNA, 201 bp, Homo sapiens
gaaattcttctcaaagattttgagaaatgaccagattgggtaaggttgtgagaaaaataatggaagatatctggtctggttttaggcctaggtttattaaraaaaatgtagtatcactaataagaattaagaagtcagggaaaagtggttttacttctggaagacaaagagacataaaaagggctggaataaaagtctgat

SEQ ID NO: 458375 - DNA, 201 bp, Homo sapiens
ccccaattatgtacaagacactttgggaggaaagaagactaccttttccccctgccattggtatagctggtgccccaaaacttccacctccctccctggcyacctctaaaatgactggtataggtgctgccccaccccttagctcccctatcctgggctaggaggccacaggggctgtcctctagaattcttccttccctc

SEQ ID NO: 458376 - DNA, 201 bp, Homo sapiens
ggttagaagaaactgaaaatagatgtgttttaagtgaacagatttataaggagataaacaacattggcaaaggaaacaaacactcgttttgcttttttgtrtgggatagctacatttacacttggttaaaaacaaaacatttgaaacatctttctgtttcaacttgagtcttcaattcttcttattaaaggcctaaaagga

SEQ ID NO: 458377 - DNA, 201 bp, Homo sapiens
gacttgccctgggttactgggcactcactgggcacacgtctttgtctgttgagggttgggggtgtctagaaccagggccaagtgcagacagtctgcactgygagtgtggcagggggtaagggggcgagacagattttccctactttttatttagcaaacatctctttcgctgctgttatgtgccaggtactgggctgctgg

SEQ ID NO: 458378 - DNA, 201 bp, Homo sapiens
gggaggaaagaagactaccttttccccctgccattggtatagctggtgccccaaaacttccacctccctccctggccacctctaaaatgactggtataggkgctgccccaccccttagctcccctatcctgggctaggaggccacaggggctgtcctctagaattcttccttccctcccccacaccattcattcaattcat

SEQ ID NO: 458379 - DNA, 201 bp, Homo sapiens
ttcccctttgcctttctccaccgctgccataaatgccacagcctctcaagaaaccagtcctcactctaccgtcactcgctgtgtgacctggagagccttcctgtggaagatggaggttggactcgatctccaagggccctttcgtcttgctagtctgagtctatatattgattgaaaaaacaataatagcggctgtcacaa

SEQ ID NO: 458380 - DNA, 201 bp, Homo sapiens
atatagtatatattttaggctttgcaggccctatggtccctgttgcaactattcagctctgctactgtagtgtgaaagcagctatataaataagtgggcayggtttcaataaaaacttacacaaacagccagagggtaggatttagcccatggactgtaatttgcagacccctgctctaaagtatatatatatcttaaaag

SEQ ID NO: 458381 - DNA, 201 bp, Homo sapiens
cttggagacggcaccacagctcacgctggtgctggccatcatgctgcagagtggccgggctgagtactaccagtgtgagtgaaggcctgtggctggccccsctgtcgtggcttggtggggggtctctcaaatgttggaactgtttttagtcttttataaaggctgcttagaaaacaggagaacaggctttagtcaggcaga

SEQ ID NO: 458382 - DNA, 201 bp, Homo sapiens
ctgagctagtggtgaaaagcatgatgagtgcaatgaccacagggatgtcgaggaacagggtacagatgttcaagcacttggtggtggaggcacaggcctgygccccggtcacatcacccaccatcttcctgtccctagacttcatgcagtacactaatgctatgaagcccaggaagcactagtttatgaagagcattttga

SEQ ID NO: 458383 - DNA, 201 bp, Homo sapiens
cagacacagactggtgcatttatttcccagtctaagcttcacgttgaaatctccttaatctgcttaatgtaccctttttcttttgaatcttgccttctttwgtgggtttggatacatttcttggagcttcctgtacctaggacattgtaataacatctcctccatgtattctttgacgtcaccaggtccaacttatggaca

SEQ ID NO: 458384 - DNA, 201 bp, Homo sapiens
cacagcaacaacttagttcttgccttctttcccctctgaccattctagtcacaagtacttgataaataccaccaacccatgtcactgatagcatattttagaaaacaaacaacaaaaagctctgagctgtactctttcatctgaatgcaagtcagtccataaatgagatatgatttgtgttcgctttgctcttcacacaat

SEQ ID NO: 458385 - DNA, 201 bp, Homo sapiens
cttcaaagtcaggagttagaagaggtcatctaaatcaatctcctcatgttttaaaagtgaggtgaaatgattttctcaaagtcatacaattagtgagtggmagaaagagactagaaataacccaggttttctgcttctttttttcccccgcttctaatccaaggttctttccaccaagcccatgctactactgacataaaa

SEQ ID NO: 458386 - DNA, 201 bp, Homo sapiens
tctaaataatagaattttaggcttagtggcatctggcatttgaaatatttctggtcagaaagaatttccaagattctttaaatcacaacacattgatactrccaacctacaatcctggacctagatttctgtccacgaaaagttactagctagttctacttaacttgtcctgatagttatataaaccagccaaaaaaaaaa

SEQ ID NO: 458387 - DNA, 201 bp, Homo sapiens
aaagcagggaaggagcaatgaagcacactgcatttacacacatagaaaaataagcacagatattaagtgcccaaagaaccttaaagtgacttctgataaaycattttaatttatagttcatgtccaagacacctaaaaccaatgaaaataactccctaggcacataaggttataagaaaattggggatttccggtattcta

SEQ ID NO: 458388 - DNA, 201 bp, Homo sapiens
atgtcctttttcatgcagagtctttgtagcccaaagctcaaatgtgttttcacatttagtatctaatttcttcataataatctcagagaataggttcagtyatttcacagaagaaagtcacatgaaaatgattagcccaaggacaccattagtgttaataccagattaaaaattagaagaactcattgggttgacttttta

SEQ ID NO: 458389 - DNA, 201 bp, Homo sapiens
cacactgttctgcacctacccactttggagatgaaaaacctggctgatattaatgctgatcttaccccatgaaggcccaaaacataacctcttagtgacttaacccaccaaacctgtctaacttcaagcccggttctactctgaggacattcctcaatcaagaaactgaacacaggctgggcgtgatggctcacgactgta

SEQ ID NO: 458390 - DNA, 201 bp, Homo sapiens
acacactgttctgcacctacccactttggagatgaaaaacctggctgatattaatgctgatcttaccccatgaaggcccaaaacataacctcttagtgacttaacccaccaaacctgtctaacttcaagcccggttctactctgaggacattcctcaatcaagaaactgaacacaggctgggcgtgatggctcacgactgt

SEQ ID NO: 458391 - DNA, 201 bp, Homo sapiens
gtattgagtctgtccagggtaagcagtttccgaaacaggaactgagagaatatgtgcataaggtctggaaaatttcatgaaaacaaaaacttttgtgtgayttactttagtaacgaaaaataggtaaaatagctaccaccactaacagcaaagaatctgcaacaaggagactaatcttccacataaaatggctcttttcaa

SEQ ID NO: 458392 - DNA, 201 bp, Homo sapiens
tatagctggtgccccaaaacttccacctccctccctggccacctctaaaatgactggtataggtgctgccccaccccttagctcccctatcctgggctagraggccacaggggctgtcctctagaattcttccttccctcccccacaccattcattcaattcatgaaacaaatctttgccaagagcagtttatgtgccagg

SEQ ID NO: 458393 - DNA, 201 bp, Homo sapiens
gccaccacgcccagcctcatgactcttaaagcaatgggtcctaacagaccccaaagaggtgattcctcttgttttacaagggagaaataagcacagctatsacattcctcaaattctagacataactacagaggaatggtggttttacattttggtagagcattaagagaacccttggtcttctttcacaacctaggtgta

SEQ ID NO: 458394 - DNA, 201 bp, Homo sapiens
atggttgataataggacttgaataagtaatatacaagatgagcctggagcatcttgtagtgccaggaagtaagaaagtgctgggtggggggggaaaaaaaaccaaaaactaaaaaaatgggagtatgtcaaaaggcataggagccaactgaaagagctcccagtggccaaactggaacaaaataaataaagtagtattgga

SEQ ID NO: 458395 - DNA, 201 bp, Homo sapiens
cccaaaacttccacctccctccctggccacctctaaaatgactggtataggtgctgccccaccccttagctcccctatcctgggctaggaggccacagggrctgtcctctagaattcttccttccctcccccacaccattcattcaattcatgaaacaaatctttgccaagagcagtttatgtgccaggaacatcattctg

SEQ ID NO: 458396 - DNA, 201 bp, Homo sapiens
gtagtaggacagtaatacaagctgccaggaagtaagaaagcaataaagctgaaaaagctccgttagggttaaaagtgaaaaaatcagaatctctttttgcrtgacataattttgtatacagaaatcctaacgaatccattaagaaaccactagaactgataaacaagttcagcaaggcagcaaaatacaagacaaacatac

SEQ ID NO: 458397 - DNA, 201 bp, Homo sapiens
aaaaaaaatggttgataataggacttgaataagtaatatacaagatgagcctggagcatcttgtagtgccaggaagtaagaaagtgctgggtggggggggraaaaaaaccaaaaactaaaaaaatgggagtatgtcaaaaggcataggagccaactgaaagagctcccagtggccaaactggaacaaaataaataaagtag

SEQ ID NO: 458398 - DNA, 201 bp, Homo sapiens
tgtttttggacagccttcactcctgttttgacaatggagctgcaaaaacttgaaagacaccacttttgagaaccaggccccactagatgtccgcttaaaayagacaatatacagataaagctttgaacagaagaccacggttacagaatggtaagtggcacagctgcaccaagtgatagtgctacaaagttaaaagtttaa

SEQ ID NO: 458399 - DNA, 201 bp, Homo sapiens
tagtctgtgtcatcaaacgaaatcccctatggagttcagagcctgaactggaagagatcagggacataaaatctacctctcaaaatcagtcaaggtccacraacagagagagggctggcttaggtggggtttctcaacctcgtgtttgaagtttcaggagctggtgagccagcgtggggtagacagctcagctggagatca

SEQ ID NO: 458400 - DNA, 201 bp, Homo sapiens
aacattgctctgccactttttattatatgtttatggggtacaatgtgatgttttgatatataaaacaccttttgcttttttgtgaaaaaaaaaaaaaaaamgtgaaaacacttaagttctatgcttttagcaattctgaaatatacaatgctatattatttattacagtcaccattctgtgcaacagtgctctgttacctt

SEQ ID NO: 458401 - DNA, 201 bp, Homo sapiens
gtaatttttttaggctcttataaccaccatagaacccaaggcaaactcgcctaaaaatgtatacaaccactgcctgccctaccccacatacagctatgackaaaaagccaggcacttttaaaaaaatacagatcatcgtgtgtgtgtgtgtgtgtgtgtgtgtgtgtgtgtgtgtgtgtgtgaataaaaataatattcaat

SEQ ID NO: 458402 - DNA, 201 bp, Homo sapiens
ctccctgcttctgccaccttcttcagttaaacaaggtcctaactttggctttcttcttcatcctgctctattaaccttcttgttctttccccttgcccaayagagtgacttagcaccagggttcctgtgtaaataagataaagctgcctcttcctcaagacatttgactgccatctgctggaaaatcactgtaatatataa

SEQ ID NO: 458403 - DNA, 201 bp, Homo sapiens
atcgcttgaatctgggagacagaggttgcagtgagctgagatcataccactgcattccagactgggcaacagagcaagactctgtctcaaaaaaaaaaaaaggtttcttaaaatattgggataaaacttttggtttcataggcacatatatggcaaaacttactaaactgtacaatttaaatctgtgtagtttactgtatg

SEQ ID NO: 458404 - DNA, 201 bp, Homo sapiens
ggagcttagtaaatcaaaataataaaaatctcctaataaaagattattattttttgagacagagtctcgctctgtcgcccaggctggagtgcagtggcgcratctcgactcactgcaagctccgcctcctgggttcacaccattctcctgcctcagcctcccaagtagctgggactacaagcacccaccaccacacccaga

SEQ ID NO: 458405 - DNA, 201 bp, Homo sapiens
ggtggatcacaaggtcaggagatagagaccatcctcgctaacatggtgaaaccccatctctactaaaaacacaaaaaattaaccgggtgtggtggcacgckcctgtaatcccagctactcaggagtccgaggcaggagaatcgcttgaacctgggaagcggaggttgcagtgagctgagatcatgccactgcactccagac

SEQ ID NO: 458406 - DNA, 201 bp, Homo sapiens
tggatggaatcccggaacagaacaaggacatcatataaaaacacaggaaatctgaataaacaacggacttagttaataataacatactaatactggttcaytaattgtaacaagtgtaatatactaacgtaagatgttaataatgggaaactgtgcaggaggagggatatatgggaactctctgtactgtctgctcaactt

SEQ ID NO: 458407 - DNA, 201 bp, Homo sapiens
tggataatccagttatcttagcaccactgatcgaaggtaagttccatgaggacagaggacttttgtcactgctgtattcctagtgccttggcgttgcctakcacacaataagcaccgttattatttttcctcatctagtggatcgtttccatctgcatataaaatagatataatttctcttatgaatcttataaatcctct

SEQ ID NO: 458408 - DNA, 201 bp, Homo sapiens
cacatgaaaatgattagcccaaggacaccattagtgttaataccagattaaaaattagaagaactcattgggttgactttttaattagtttattttttaaytaatgaaaattcaaaaggtaaaaacagatataaccagggaaaagaaagacagtttcctttttataacagccccataaagtatctcttgcttttgttacca

SEQ ID NO: 458409 - DNA, 201 bp, Homo sapiens
agttttatagaaataaggattacaagagaatactatgcacagttgtataccaagagattggataacccaggtgaaatggtcaaattcctagaaatacatascataaagtaccaaaactgtctcaagaaggaatacaaaatccggtaagagctataactagagtaaggagattgaatgcataattaaaaacatcccaacaaa

SEQ ID NO: 458410 - DNA, 201 bp, Homo sapiens
tgggaggtgaaaaagcaagtgagggcaactcttgcagaagttctgatatgtcacagaacaaagagaaggtccataactagtaagagatgtggagccaaggscggaggggcaggggggggtcgggggagcagtgtttatgttttaaaatggtaagatgtttctttactgacaggaaggataaaaagggaagaccgtgatgac

SEQ ID NO: 458411 - DNA, 201 bp, Homo sapiens
cagaattttcctgacatcaataactagtttgacttctacatgtacctggttaagtatgaggttcactgttatacccactgttgaagactatttgtagatcytatattttagaagttggtgatattgctatgatccagtatccactggaccagttcctaaaacccaatggtcctagaatattatgttatagcaacatcccct

SEQ ID NO: 458412 - DNA, 201 bp, Homo sapiens
gaaggcttgtgttcttcccagaaagaaagggttatggggccctggaagatgcccaggatgcagccaaggcccaggggtgctgagtgctgggtgggccacargtcacatcctctcatctttgacaaataccacccggatagcacctacgcagcaaagcgctgtggtgaggggcaggctctatattaggagtcatagctttgt

SEQ ID NO: 458413 - DNA, 201 bp, Homo sapiens
gtctcactcttgttgctcaggctggagtacaatggcacagtctcggctcactgcaacctccgcctcacaggttcaagcgattctcatacctcggcctcccragtagctgggatacaggcatgcgccaccacacccggctacttttgtatttttagtagagacggggtttctccatgttggtcaggctggtctccaactccc

SEQ ID NO: 458414 - DNA, 201 bp, Homo sapiens
cctcacaggttcaagcgattctcatacctcggcctcccgagtagctgggatacaggcatgcgccaccacacccggctacttttgtatttttagtagagackgggtttctccatgttggtcaggctggtctccaactcccaacctcaggtgatccgcctgcctcggcctcccaaagtgctaggattacaggcgtgagccacc

SEQ ID NO: 458415 - DNA, 201 bp, Homo sapiens
ggcgtgagccaccacgcccagcctcatgactcttaaagcaatgggtcctaacagaccccaaagaggtgattcctcttgttttacaagggagaaataagcayagctatcacattcctcaaattctagacataactacagaggaatggtggttttacattttggtagagcattaagagaacccttggtcttctttcacaacct

SEQ ID NO: 458416 - DNA, 201 bp, Homo sapiens
gctcccctatcctgggctaggaggccacaggggctgtcctctagaattcttccttccctcccccacaccattcattcaattcatgaaacaaatctttgccragagcagtttatgtgccaggaacatcattctgtccttgcaacctggaacaagaccagctaccagcctagcttcatccgctacttgcaccaaccagtcccg

SEQ ID NO: 458417 - DNA, 201 bp, Homo sapiens
tataaaatttttttttgccaggcgcagtggctcacgcctgtaatcgcagcactttgggaggccaaggcaggtggatcatgaggtcaggggatcaagaccawcctggctaacgtggtgaatccccatctctactaaaaattagctgggcatggtgacgggcacctgtagtcccagccactcaggggactgaggcaggagaat

SEQ ID NO: 458418 - DNA, 201 bp, Homo sapiens
ttgcccatactctttcctcaacacacctctccccaaggtacatggtaaccctatctatccctgcctcatagggctgttataatgatcaaataatcatatgyataaggaccttgtacattgcacactttagaaatgtgagaaattttaaataggtttcagtggtactttgtgcttttgagagattacctgttctagctatta

SEQ ID NO: 458419 - DNA, 201 bp, Homo sapiens
ctcagtgaagcacagaaacaatttaaaatgcttacctctaagtcattgaaaaatagatgagtatcagccacttcaaaaatcatttcttccattgttaaacytgagccaatcactactgttgggtcctagaagacaataagaaaaaatcagcttgacttggtagtcacagtcctggttctaatcttcaaatttcaaaattat

SEQ ID NO: 458420 - DNA, 201 bp, Homo sapiens
aagtagctgggactacaggcgcctgccatcatacccagctaattttttggtcaatacctgttattttatttaagacatagggtctcattctgtcacctagrttatagcacagtggcaagatcacatagctcactgcagcattgaacttctggctcaagtgaccctcccaccttaaccttccaagtagttaggactacagct

SEQ ID NO: 458421 - DNA, 201 bp, Homo sapiens
gagtctttctctgttgcccagactggagtgcagtggcgtgatcttggctcactgcaacctccgcctcccaggcgcaagcaattctcgtgcctcagcctccyaagtagccaggactacaggtgcccgccaccatgcccagctaattttagtagagactgggtttcaccgtgatgcccagggtggtcttgaactcctgagctc

SEQ ID NO: 458422 - DNA, 201 bp, Homo sapiens
gggcggctgaggcaggagaattgcttgaacccgggaggcggaggttgcggtgagccaagatcgtgccattgcactccagcctgggcaacaaaagcaaaacyccgcctcaaacaaaacaaaacaaaacaaaacaaaaaactaccaccatttattttcatcatctcataaaaggatgtaccaatcttagaacaaagaccattc

SEQ ID NO: 458423 - DNA, 201 bp, Homo sapiens
ggcgggtggatcacctgaggtcgggagatcgcgaccagcctgaccaacatggagaaaccccatctctactaaaaatacaaaattagccaggcgtggtggcrcatgcctgtaatcccagctacttgggcggctgaggcaggagaattgcttgaacccgggaggcggaggttgcggtgagccaagatcgtgccattgcactcc

SEQ ID NO: 458424 - DNA, 201 bp, Homo sapiens
aagagcagtttatgtgccaggaacatcattctgtccttgcaacctggaacaagaccagctaccagcctagcttcatccgctacttgcaccaaccagtcccrggttagatcccaaatgctagaagccagggatgcccaactctgggtggccccagtcagaacctctgggatctcagtgaagctggcctggcctctgctcctg

SEQ ID NO: 458425 - DNA, 201 bp, Homo sapiens
gatgcccaaattgctcttggagggatggggcatccaacaatcatggctgggctggaaggctgtgactagtgcctgggcacccaccaatctgcccagaggtygagagatgctcctgcatttggcccaggattaagttttgggccatgaagtagggaatgatgcagtactctcatttaaatcaggaaagtctggctgggtgca

SEQ ID NO: 458426 - DNA, 201 bp, Homo sapiens
tctccctcctcccaaccccacaggaaacaaggccaaagaggcagctaagtaaaggagcactgacttcagctactcagcaaaaacttactccttaaaatcaygagttatgagcgcttttcaatgagttctgaaggaatgtgtataccagcctctctctcttgctatctgggtggcctggcattggaaggagtcttgcctctt

SEQ ID NO: 458427 - DNA, 201 bp, Homo sapiens
tctcaagagccaagaagctgaaattcataagacactttagttccttctctccagtttggaagctaagcctcctgtgatacagtctgaatgacagtcaagcwgaaggagtttttagggttgtgccatttgactaaagggaaaagggactggaaagaagactaaggcttctagatgggaaatgccaaagtttaagttactcag

SEQ ID NO: 458428 - DNA, 201 bp, Homo sapiens
actacagaagtcagatctactcattcaaaacatttttatgagcaaacaaaggcagtctcttctcattatggtaccactgaagtacaaactaaagaaaaggytctgcttagagttaatcaagccagaagcagattaggtttttgagataatttccctaactcccccagggaggatgggctgctgtcaactgcagaatgcttg

SEQ ID NO: 458429 - DNA, 201 bp, Homo sapiens
tggagtcagaatgcccagctaatgtcctgccttaattatttgctaatactgtgactatggataagctacttagcttttctgtgcctcaggctctccctctstaaaatgaggtttgggttgttgtgaggattacgtgtgcaacatctatccactgcttagaaaaatgtcaagagcacagtaagcacttcataaatacctgca

SEQ ID NO: 458430 - DNA, 201 bp, Homo sapiens
taagtcctattacaatgcaggtctcttggggcaggagccacatctcacatctcctttgcatctctctgatctagtccagtatccttacgtaggttgtgcccaataaatttttatagacaaaacagacgctggtagtgtggtatcaaaaccgagaatgactgaaatttctaacttcaaagtcaggagttagaagaggtcatc

SEQ ID NO: 458431 - DNA, 201 bp, Homo sapiens
atcaatgatatggttgatcactaacactattttgcatgttcagtgcctactcattttagagtaagcttttgtgtaaaatgatccattgcagacaccatctrctttttaaaaggatactacatagactatatttagagggaattaaaaattggaatgacgatagaataagagaggtaaaaataatttaaatatctattattt

SEQ ID NO: 458432 - DNA, 201 bp, Homo sapiens
gccagcagagatggagagtgactctgttggcagaaggcaggcgaggataagctaacgatgctgctgtggcctctatgcactcagcaagagcgggacgcctstgctgggccgggcaccagggatggtgctgagtcgggcagaggcctcctttcaaggagttcacagtgaacaagatgagaagggctgggccctggagggtca

SEQ ID NO: 458433 - DNA, 201 bp, Homo sapiens
aaggcaggcgaggataagctaacgatgctgctgtggcctctatgcactcagcaagagcgggacgcctgtgctgggccgggcaccagggatggtgctgagtsgggcagaggcctcctttcaaggagttcacagtgaacaagatgagaagggctgggccctggagggtcaagagccccaattatgtacaagacactttgggag

SEQ ID NO: 458434 - DNA, 201 bp, Homo sapiens
accagggatggtgctgagtcgggcagaggcctcctttcaaggagttcacagtgaacaagatgagaagggctgggccctggagggtcaagagccccaattaygtacaagacactttgggaggaaagaagactaccttttccccctgccattggtatagctggtgccccaaaacttccacctccctccctggccacctctaaa

SEQ ID NO: 458435 - DNA, 201 bp, Homo sapiens
ggaaagaagactaccttttccccctgccattggtatagctggtgccccaaaacttccacctccctccctggccacctctaaaatgactggtataggtgctkccccaccccttagctcccctatcctgggctaggaggccacaggggctgtcctctagaattcttccttccctcccccacaccattcattcaattcatgaaa

SEQ ID NO: 458436 - DNA, 201 bp, Homo sapiens
cagtgaacaagatgagaagggctgggccctggagggtcaagagccccaattatgtacaagacactttgggaggaaagaagactaccttttccccctgccaytggtatagctggtgccccaaaacttccacctccctccctggccacctctaaaatgactggtataggtgctgccccaccccttagctcccctatcctgggc

SEQ ID NO: 458437 - DNA, 201 bp, Homo sapiens
actctcactctgtcaccccggctggagtgcagtggtatgatcttggctcactgcaacctctgcctccctggttcaggcgattctcgtgcctcagcctcccsgagtagctgggattacaggtgcctgacactactcccaactaatttttgtatttttagtagaaacggggtttcaccatgttggtcaggctggtctcaaact

SEQ ID NO: 458438 - DNA, 201 bp, Homo sapiens; identical to SEQ ID NO: 269456

SEQ ID NO: 458439 - DNA, 201 bp, Homo sapiens
gcgtcctttgaagcaggatcagacccagccagcagagatggagagtgactctgttggcagaaggcaggcgaggataagctaacgatgctgctgtggcctcyatgcactcagcaagagcgggacgcctgtgctgggccgggcaccagggatggtgctgagtcgggcagaggcctcctttcaaggagttcacagtgaacaaga

SEQ ID NO: 458440 - DNA, 201 bp, Homo sapiens
atcagacccagccagcagagatggagagtgactctgttggcagaaggcaggcgaggataagctaacgatgctgctgtggcctctatgcactcagcaagagygggacgcctgtgctgggccgggcaccagggatggtgctgagtcgggcagaggcctcctttcaaggagttcacagtgaacaagatgagaagggctgggccc

SEQ ID NO: 458441 - DNA, 201 bp, Homo sapiens
acccagccagcagagatggagagtgactctgttggcagaaggcaggcgaggataagctaacgatgctgctgtggcctctatgcactcagcaagagcgggaygcctgtgctgggccgggcaccagggatggtgctgagtcgggcagaggcctcctttcaaggagttcacagtgaacaagatgagaagggctgggccctggag

SEQ ID NO: 458442 - DNA, 201 bp, Homo sapiens
ctcaattatgggagagttgatattgatactatgacctcaatactgaaaagcataaatattgtactcatgctctggagtcagaatgcccagctaatgtcctrccttaattatttgctaatactgtgactatggataagctacttagcttttctgtgcctcaggctctccctctgtaaaatgaggtttgggttgttgtgagga

SEQ ID NO: 458443 - DNA, 201 bp, Homo sapiens
aaatggcaaaaattgataacttaatggttaacttctgccttaatttctaccctgtgctaatgaacaataaaatgggccaatagattaaccacaaaaagggrggagaagtgaatttagatatttgttagcaaaggttctcaattatgggagagttgatattgatactatgacctcaatactgaaaagcataaatattgtact

SEQ ID NO: 458444 - DNA, 201 bp, Homo sapiens
aatataaaattttgtgagtacacttacacacacagtgattgcaactatgtaaaaaggagaaacatgaaaaaataatgaaaggaaataggctaaaatgctawcaatggtaagataatggcagatatttccttaagtgatctgctggctggtttatgttcataggtcactgtggtagcttcaaaatatatctacaaattcttt

SEQ ID NO: 458445 - DNA, 201 bp, Homo sapiens
attttggtacttgataatacaaaattaagacattattaatattgaacttttaaagatgggataatgccattgtggttatgttaataagtaccatacttatmttttagagaacaatgcctggaatctggggagggagctagatgatgtatagctgaaacaaaattgtctataagttgataactgttgaagatgaatgatgga

SEQ ID NO: 458446 - DNA, 201 bp, Homo sapiens
gggtgacaaagcgagaccctgtctcaaaacaaaacaaacaaaaaacaacctgattatctacctaaaacaatcaagttttctttaaaaatagtttcctggcmgggaacagtggcttacgcctgtaatcccagcactttgggaggacgaggtgggaggatcgcatgagctcaggagtttgagaccagcctagccaaaatagtg

SEQ ID NO: 458447 - DNA, 201 bp, Homo sapiens
aaaaaaaaaggtttcttaaaatattgggataaaacttttggtttcataggcacatatatggcaaaacttactaaactgtacaatttaaatctgtgtagttyactgtatgtcaattactccctaataaagctgtaaaaaaactaggtatgacagttcaaatacgcagctaaaaaaattccattgacactgataatgatggca

SEQ ID NO: 458448 - DNA, 201 bp, Homo sapiens
gtccataaagtggcacaacaaatacctccttctcattcaacagaactattaacaacacaaacaacagatgaatggataaagaaaatgcggaacagacatamaatggagtattattgagccttaaaaagaggaaattctgacacatgctacaaatggatagaccttaaagacatcatgatgaatcacaaaaggacaaatact

SEQ ID NO: 458449 - DNA, 201 bp, Homo sapiens
ctttaagtttggcaaatcacagacagacgtgaggaactgatgtgatactctgatgaactctcaaagacttttccagctattgtcctcttgacccccatgayttcatctggaatagctgctatgaaggcttgactctcatgattactacttctggtatgaacgctgtaaatatctgattaaaagtgaaccaattaactttat

SEQ ID NO: 458450 - DNA, 201 bp, Homo sapiens
aaaaaacccaacaacatccaagtccataaagtggcacaacaaatacctccttctcattcaacagaactattaacaacacaaacaacagatgaatggataamgaaaatgcggaacagacatacaatggagtattattgagccttaaaaagaggaaattctgacacatgctacaaatggatagaccttaaagacatcatgatg

SEQ ID NO: 458451 - DNA, 201 bp, Homo sapiens
ttgagagactgaagcaggtggatcacaaggtcaggagatagagaccatcctcgctaacatggtgaaaccccatctctactaaaaacacaaaaaattaaccrggtgtggtggcacgcgcctgtaatcccagctactcaggagtccgaggcaggagaatcgcttgaacctgggaagcggaggttgcagtgagctgagatcatg

SEQ ID NO: 458452 - DNA, 201 bp, Homo sapiens
aggtaagttccatgaggacagaggacttttgtcactgctgtattcctagtgccttggcgttgcctagcacacaataagcaccgttattatttttcctcatytagtggatcgtttccatctgcatataaaatagatataatttctcttatgaatcttataaatcctctgaagtccatataactctagagccactacttcatt

SEQ ID NO: 458453 - DNA, 201 bp, Homo sapiens
accaaaaaggagaaaataaagaaacaaaggcaatttaaaaaaacatttctaaatttgaaacaaaaattacattaaagcatttgaagcaaaaacaaaaaacraaaccttgaggtgggcaaatcctgattaagcatgacattaaatccaaaagccataaaggagaaaatagatatgattacacaaaaattttaaacttctata

SEQ ID NO: 458454 - DNA, 201 bp, Homo sapiens
gcgcaagactaaaactggagtcctccaacttttacaaaatattataacatgctgaagctccctgtggcaagtgggttaaagctacagggagggtagagtaygagtcagaaagagtcttttagttcttgatacttttctgttccgttctcagcatcaggtatacattcagcctaccaatgactcacagcctgcttccaatac

SEQ ID NO: 458455 - DNA, 201 bp, Homo sapiens
tccgtccaccttggtctcccaaagtgctgggattacaggcgtgagccactgcgcctggccaaaaatttatttactttcaaggaagaattatgcttctttaygctccttcatttttaatttattaccgtgccaacccagtgcagagtatatattcataaatagaaagggagaaaatgtatctaaagtcatatctaccaagca

SEQ ID NO: 458456 - DNA, 201 bp, Homo sapiens
gtatcaccatgctggctaatttttctttctttttttttttttttttgtagagacgaggtcccactttgttacccaggctggtcttgaactcctgagctcargtaacctcctacctcagcctcctaaggtgctgggattacaggtgtcgcccactgtgcctggcccacaagtcttaattgtaatttttataattttgaagat

SEQ ID NO: 458457 - DNA, 201 bp, Homo sapiens
taatttgtcgggaggccagtgttggcgtgagtgaacaaggatttggaagtgtggttcttggtgtcaagataagaccagttgtcctttttttttttttttttctgagatggagtcttgctctgtcgcccaggctgtagtgtagtggtgcaatctcagcttactgcaacctccgcctcccaggttcaagcaattctctgcttc

SEQ ID NO: 458458 - DNA, 201 bp, Homo sapiens
agcctaaggagacataactaaatgtaatttggtatcctggatggaatcccggaacagaacaaggacatcatataaaaacacaggaaatctgaataaacaayggacttagttaataataacatactaatactggttcactaattgtaacaagtgtaatatactaacgtaagatgttaataatgggaaactgtgcaggaggag

SEQ ID NO: 458459 - DNA, 201 bp, Homo sapiens
tagctgagactatgggtgtgtgccaccatacttgactaattttttgtagaggtggggtcttgctatgtcgcccaggccagtcttgaactcctggcctcaakcaatcctccaccttggctttttaaagtgttgggattacaggcatgagccactgccagccaaggactgtgttatacatagtgtacataatttgcttttcca

SEQ ID NO: 458460 - DNA, 201 bp, Homo sapiens
ctttcgtcttgctagtctgagtctatatattgattgaaaaaacaataatagcggctgtcacaatcgagtgccagctattagccaggccctgtgggaagcasttacagtcatcattgctcatgttcacagcagccctgtaggtttgtgctatattgatcttcatttttaaagaggtgcagaaaggtgagtgacttgccctgg

SEQ ID NO: 458461 - DNA, 201 bp, Homo sapiens
tctgtctcccgggttcaagcagttcttgtgcctcagcctctcgagtagcagggaccacaggtgcacaccaccatgcccagctaattttgctattttttctrtttttaggagagaccgggtttcaccacattggccaggatggtttcgaactcctggcctcaagtgatccgtccaccttggtctcccaaagtgctgggatta

SEQ ID NO: 458462 - DNA, 201 bp, Homo sapiens
agttaatcaactccaaaagaaaaaaggatttaaaaaaaaggtcctggagcaacatttttaaatttactttttatttattattattattattattattattwttttttttgagacagggtcttgttctgtcacccaggctggagtgccatggcgtaatctcggctcactgaaacctctgtctcccgggttcaagcagttctt

SEQ ID NO: 458463 - DNA, 201 bp, Homo sapiens
aatacctctaggccagcagtcctcaaccttttcagcaccagggaccagtttcgtagaggacaatttttccatggacctgggtggggggcgagaggtttcgrgatgaaattgttccacctcagatcatcaggcattagttagattttcataaggaacatgcaactagatcccttgcatgtgcagttcacaatagggtttgta

SEQ ID NO: 458464 - DNA, 201 bp, Homo sapiens
aatacattagcccctgattgatttgctgcattgctaaaaagtgatgagttcaaacccatttcctcctaggctatataagtaagaggcaaagtaaatcttcrtgatatccttattgttgatttttaacaactacttgaagagagctcgggccagggctagtaccctcagcattctaccgctctttcttttttttttgagatg

SEQ ID NO: 458465 - DNA, 201 bp, Homo sapiens
aaaagcaagtgagggcaactcttgcagaagttctgatatgtcacagaacaaagagaaggtccataactagtaagagatgtggagccaagggcggaggggcaggggggggtcgggggagcagtgtttatgttttaaaatggtaagatgtttctttactgacaggaaggataaaaagggaagaccgtgatgacacacaagtgg

SEQ ID NO: 458466 - DNA, 201 bp, Homo sapiens
atggcggcaggcacctgtagtcccagctactccggaggctgagacaggagaatggcttgaacccgggacgcggaagttgcggtgagccgagatcacgccaytgcactccagcctgggtgacagagcgagattctgtctccaaaaaataaaaaatattataaaagaataaattcagatacatgctacaacgtgatggacctt

SEQ ID NO: 458467 - DNA, 201 bp, Homo sapiens
gtgctcctggcatgtggtcggtcgaagccaaggacactgctcagcattctgcagtgcacaggacggccccgcccaggcggagaatgatccggtgacacatrtaggtgggaaggatgcacgaatgatggcgtttaggaagaatattatcacttctttcccgtaagagcaacttagagcaagaaaatggtattcttagggcct

SEQ ID NO: 458468 - DNA, 201 bp, Homo sapiens
gtgatttggcctcccaaagtgctgggaatacaggcatgagccaccgcgcccggccagtgccgttgacttgtatgtgcacttacaggtggttaaaatgagamctatcagggtgttgatatctaaaaacctccctgccatcatcttccctacatctctcattcagtgaccatggttgaatgcctgccacctttcaaatattat

SEQ ID NO: 458469 - DNA, 201 bp, Homo sapiens
tagggccttctctcttatggaggctccaagccagggttgccatggcagaagatgctgggcttgctttttccttgagagaactgtactcaagatgatgtaamtgtcaccccgggtgccacttgggtgctttggagaagcgctcagacgcgacacgccgtgacgactccgcggcaggcagccggacctgtcctctggcgtgcg

SEQ ID NO: 458470 - DNA, 201 bp, Homo sapiens
caaagtctgggggatccatagtggtgatggttacacaacactgtaaatgtatttatatttaatgccattgactgttttttgttttttggttttttgagacrgagtctcactctgtcgccgaggctggagtgcagtggcgcgatcttggctcaccgcaacctccgcctcccgggttcaagcgattctcctgcctcagcctcc

SEQ ID NO: 458471 - DNA, 201 bp, Homo sapiens
cccagtaagaaatacctactacacacacacagtctccggtcggcatgcttagggtagtcttccaattccccctcctggtatttacaccctggagtggtccrctcctcttgggctgaacctgtaacttgctcccaagcaagagcacacagcaagctcacgcacgtggttgttggtgtgattctgtttctccagattgtctcc

SEQ ID NO: 458472 - DNA, 201 bp, Homo sapiens
ggagtgcagtggcgcgatcttggctcaccgcaacctccgcctcccgggttcaagcgattctcctgcctcagcctcctgagtagctgggactacaggtgcgygccaccatgcctagttgattttttgtatttttagtagagacggggtttcaccgtgttagccaggatggtctcgatctcctgaccttgtgatttggcctcc

SEQ ID NO: 458473 - DNA, 201 bp, Homo sapiens
taaaaaccacttcctttgctcatttatcaaactcaaacgctaggagggccacctaacatcctccgtcccacgcaatggggtgtttctggagcactccggtktatcagggaccctgtcagttgccatcgcacatgtatatggggccagcccctgtgccaccgaagaggggggatattgaaaacatgttacagccaggagcgg

SEQ ID NO: 458474 - DNA, 201 bp, Homo sapiens
tcctctggcgtgcggttcacgggctgtgtttatccccctggttccttcacagccaccttgggaaatacgttgcctctgaatcacgccaggcaggctctcastgtgtgtgctgcggggctggaaatcagggtgacactccgctaccgaacagcctgactaggaagccagaaagacgctgccggctttagtttgtcctttgac

SEQ ID NO: 458475 - DNA, 201 bp, Homo sapiens
atagtggtgatggttacacaacactgtaaatgtatttatatttaatgccattgactgttttttgttttttggttttttgagacggagtctcactctgtcgmcgaggctggagtgcagtggcgcgatcttggctcaccgcaacctccgcctcccgggttcaagcgattctcctgcctcagcctcctgagtagctgggactac

SEQ ID NO: 458476 - DNA, 201 bp, Homo sapiens
aggcaggcagattgcctgagctcagcagttcaagaccagcctgggcaacacagtaaaacccccaaaaaatacaaaaaaaaaatagccgggcatggcggcasgcacctgtagtcccagctactccggaggctgagacaggagaatggcttgaacccgggacgcggaagttgcggtgagccgagatcacgccactgcactcca

SEQ ID NO: 458477 - DNA, 201 bp, Homo sapiens
ttataaatctttaatacataagctggctttaaaattattggtaaaataagattagaaatgtcttaagaattgttggcgtttttgtttgcacttattgaacragtggtttcatgcttatccctgcagaatactatgagatttgtcataagggttataaaactataaacccggctaggcgtggtggctcacgcctgtaatccc

SEQ ID NO: 458478 - DNA, 201 bp, Homo sapiens
tacaaataattagccaagtgtggtggcatgcacctgtagtcccagatactcaggaggctgaggcaggagaatcacaggtcgaggttgtagtgagctgtgayggcactgcactccagccttggcaacacagtaagacctcgtctctaaaaaagcaaaaagggctgggtgcactggctcacacctataatcccagcactttgg

SEQ ID NO: 458479 - DNA, 201 bp, Homo sapiens
tccggtgacacatgtaggtgggaaggatgcacgaatgatggcgtttaggaagaatattatcacttctttcccgtaagagcaacttagagcaagaaaatggwattcttagggccttctctcttatggaggctccaagccagggttgccatggcagaagatgctgggcttgctttttccttgagagaactgtactcaagatga

SEQ ID NO: 458480 - DNA, 201 bp, Homo sapiens
tgggattacaggcgtgcaccatcacgcctggccactgttatgtagtttttaccacaatttaaaaaaggaaagagtgcctgggtgagtcctacgcacctatwcggagaaccaaaggctttgaggttatcctcggcccacccatctgatgggagtgtttctcaaacttgcttttccgtgatctcccagtaagaaatacctact

SEQ ID NO: 458481 - DNA, 201 bp, Homo sapiens
tatttttagtagagacggggtttcaccgtgttagccaggatggtctcgatctcctgaccttgtgatttggcctcccaaagtgctgggaatacaggcatgasccaccgcgcccggccagtgccgttgacttgtatgtgcacttacaggtggttaaaatgagaactatcagggtgttgatatctaaaaacctccctgccatca

SEQ ID NO: 458482 - DNA, 201 bp, Homo sapiens
tttgtatttttagtagagacggggtttcaccgtgttagccaggatggtctcgatctcctgaccttgtgatttggcctcccaaagtgctgggaatacaggcrtgagccaccgcgcccggccagtgccgttgacttgtatgtgcacttacaggtggttaaaatgagaactatcagggtgttgatatctaaaaacctccctgcc

SEQ ID NO: 458483 - DNA, 201 bp, Homo sapiens
cctctagccatttggtgtggcatcggaaagaaaactaaggccaggtacggtggctcatgcctgtaatcccaacaatttgggaggccatggcggaagggtcmcttgagcccaggagtttgagaccagcctgggcaacatagcaaatgttatgttgccacctctacaaataattagccaagtgtggtggcatgcacctgtagt

SEQ ID NO: 458484 - DNA, 201 bp, Homo sapiens
taacctaaccacaagactaacctactgtcacttctgccctatcctactgctagaagccagtcgctacatctcccccacactcaaagggaggtggtcgcacygtggggtccactggaagttgcctaccagactcaggtcatcccaaacacaccctctagccatttggtgtggcatcggaaagaaaactaaggccaggtacgg

SEQ ID NO: 458485 - DNA, 201 bp, Homo sapiens
acgcacgtggttgttggtgtgattctgtttctccagattgtctccattcctccctggcttctccacagggccgctcaccatggcagccggctccatcaccrccagccagcgagagggcaagacaagagggctgacgagggacgctaccatcacagaggtcagttttgtaacctaaccacaagactaacctactgtcacttc

SEQ ID NO: 458486 - DNA, 201 bp, Homo sapiens
ccgggcatggcggcaggcacctgtagtcccagctactccggaggctgagacaggagaatggcttgaacccgggacgcggaagttgcggtgagccgagatcrcgccactgcactccagcctgggtgacagagcgagattctgtctccaaaaaataaaaaatattataaaagaataaattcagatacatgctacaacgtgatg

SEQ ID NO: 458487 - DNA, 201 bp, Homo sapiens
gttcctgtttggggtttgctggctggaaaaaaaaaaaaaaaaaaaggaaagctggctttctagtaaaaaccacttcctttgctcatttatcaaactcaaaygctaggagggccacctaacatcctccgtcccacgcaatggggtgtttctggagcactccggtgtatcagggaccctgtcagttgccatcgcacatgtata

SEQ ID NO: 458488 - DNA, 201 bp, Homo sapiens
gacctgtcctctggcgtgcggttcacgggctgtgtttatccccctggttccttcacagccaccttgggaaatacgttgcctctgaatcacgccaggcaggvtctcactgtgtgtgctgcggggctggaaatcagggtgacactccgctaccgaacagcctgactaggaagccagaaagacgctgccggctttagtttgtcc

SEQ ID NO: 458489 - DNA, 201 bp, Homo sapiens
ttgagacggagtctcactctgtcgccgaggctggagtgcagtggcgcgatcttggctcaccgcaacctccgcctcccgggttcaagcgattctcctgcctyagcctcctgagtagctgggactacaggtgcgtgccaccatgcctagttgattttttgtatttttagtagagacggggtttcaccgtgttagccaggatgg

SEQ ID NO: 458490 - DNA, 201 bp, Homo sapiens
tgtcgccgaggctggagtgcagtggcgcgatcttggctcaccgcaacctccgcctcccgggttcaagcgattctcctgcctcagcctcctgagtagctggractacaggtgcgtgccaccatgcctagttgattttttgtatttttagtagagacggggtttcaccgtgttagccaggatggtctcgatctcctgaccttg

SEQ ID NO: 458491 - DNA, 201 bp, Homo sapiens
gtagagacggggtttcaccgtgttagccaggatggtctcgatctcctgaccttgtgatttggcctcccaaagtgctgggaatacaggcatgagccaccgckcccggccagtgccgttgacttgtatgtgcacttacaggtggttaaaatgagaactatcagggtgttgatatctaaaaacctccctgccatcatcttccct

SEQ ID NO: 458492 - DNA, 201 bp, Homo sapiens
tggctgatgaccccctcacctctgactccccctccctccctgctttctgaacgcacatccatcaccaaccataggttcctgtttggggtttgctggctggaaaaaaaaaaaaaaaaaaaggaaagctggctttctagtaaaaaccacttcctttgctcatttatcaaactcaaacgctaggagggccacctaacatcctcc

SEQ ID NO: 458493 - DNA, 201 bp, Homo sapiens
caattccccctcctggtatttacaccctggagtggtccgctcctcttgggctgaacctgtaacttgctcccaagcaagagcacacagcaagctcacgcacrtggttgttggtgtgattctgtttctccagattgtctccattcctccctggcttctccacagggccgctcaccatggcagccggctccatcaccgccagcc

SEQ ID NO: 458494 - DNA, 201 bp, Homo sapiens
actgttttttgttttttggttttttgagacggagtctcactctgtcgccgaggctggagtgcagtggcgcgatcttggctcaccgcaacctccgcctcccrggttcaagcgattctcctgcctcagcctcctgagtagctgggactacaggtgcgtgccaccatgcctagttgattttttgtatttttagtagagacgggg

SEQ ID NO: 458495 - DNA, 201 bp, Homo sapiens
ggctgatgaccccctcacctctgactccccctccctccctgctttctgaacgcacatccatcaccaaccataggttcctgtttggggtttgctggctggaaaaaaaaaaaaaaaaaaaggaaagctggctttctagtaaaaaccacttcctttgctcatttatcaaactcaaacgctaggagggccacctaacatcctccg

SEQ ID NO: 458496 - DNA, 201 bp, Homo sapiens
gtggcgcgatcttggctcaccgcaacctccgcctcccgggttcaagcgattctcctgcctcagcctcctgagtagctgggactacaggtgcgtgccaccaygcctagttgattttttgtatttttagtagagacggggtttcaccgtgttagccaggatggtctcgatctcctgaccttgtgatttggcctcccaaagtgc

SEQ ID NO: 458497 - DNA, 201 bp, Homo sapiens
tggagtgcagtggcgcgatcttggctcaccgcaacctccgcctcccgggttcaagcgattctcctgcctcagcctcctgagtagctgggactacaggtgcstgccaccatgcctagttgattttttgtatttttagtagagacggggtttcaccgtgttagccaggatggtctcgatctcctgaccttgtgatttggcctc

SEQ ID NO: 458498 - DNA, 201 bp, Homo sapiens
tgagactgtctcaaaaataaaaataaggccgggcgtggtggcccatgcctgtaatcctagtactttaggaggctgaggcaggcagattgcctgagctcagsagttcaagaccagcctgggcaacacagtaaaacccccaaaaaatacaaaaaaaaaatagccgggcatggcggcaggcacctgtagtcccagctactccgg

SEQ ID NO: 458499 - DNA, 201 bp, Homo sapiens
cctcccgcctcggcctcccaaggtgctggattacaggcatgagccactgtgcctggcgacgatttctaaaaataattaaaatacacatcgcatttttgctrtagatgtcctccatgatctagctgctgcctgcatctcttacgtcatcccttcccactctccccttgctccctgtgctctacccacacagcctttctgtct

SEQ ID NO: 458500 - DNA, 201 bp, Homo sapiens
tcttgaaaagcgttctttttgaattcgcacttgaattaacagcgatccatagagcttaaaataccgactttatctcggtgagcactgtgccagcttgagtggtgtgtttccgattcggttgaaagcgtatttcctttccgtggaggggcggcggtggtagtgcctgcaagaacactgcagcttgagaaactggcaggctca

SEQ ID NO: 458501 - DNA, 201 bp, Homo sapiens
ttaatgaccttgagaagagcagtttcagtggaattggattgaggaaagaatgggattgaaatgagtcagttgtgtagatgtgtgcttctcacaccttaagmggtatattaatcacctggaaatcttgtcaaaaagtaaattctattttagggcccaagatctcctttcctttccttttcctttcttttcttttttcctttc

SEQ ID NO: 458502 - DNA, 201 bp, Homo sapiens
tttgggatgtgtgaagtttgttaagcattgttcatttgcattttataaggttgaaaccgcctgtatttgcgttctcatggcgctcctaaaggaacatgcgrtgggagagcgccctctgctggcgactctccctcatagtgcctgctatagccagtgtgagaggcgaggcttccctttccagagggtgtgctccagtggtca

SEQ ID NO: 458503 - DNA, 201 bp, Homo sapiens
ctcgcgagaactgctcctcccatcctcttctctcacgaagccccgcccgcggagaggttccatattgggtaaaatctcggctctcggagagtcccgggagmtgttctcgcgagagtactgcgggaggctcccgtttgctggctcttggaaccgcgaccactggagccttagcgggcgcagcagctggaacgggagtactgc

SEQ ID NO: 458504 - DNA, 201 bp, Homo sapiens
ttgtatttttaatacagacagggtttcaccatgttggccaggctgatctctaactcctgacctcaggtgatccacttgccttggcctcccaaagtgctgarattacaggggtgagccaccgtctctggccatccatcttcatttttttgagagcagatttgattttagggaataacagttcatttgaatccaaataattta

SEQ ID NO: 458505 - DNA, 201 bp, Homo sapiens
tctgtgctatccaatgtggtggttataggcaccagctgcctgtggctaattattaagcaactgaaatgcagctagtggtgagcagtaacgttgtggagaaraaaaaaaagaaatgtagctagtttaacttggaaattgaattgaaaatatttttgtggttaaatgtatttaacataaaatttaccattttaaccttttttt

SEQ ID NO: 458506 - DNA, 201 bp, Homo sapiens
actcccattttgaaagtagttctactgtgggtaaaatgctatcaaacaccattgcaggctacagagaaatctatcacgaaaggaagaataaatcaatgcarcaattcaccgttgtcttatttttagaaattgccatagtcattccagtcttcagcagttatcaccctgagtagtcagcagccatcaccctgagtaggcagc

SEQ ID NO: 458507 - DNA, 201 bp, Homo sapiens
gtgataactagattaaatacatttctaagaggagaaatggcagaaacccactcactcaaaataattcaaataaaaaataagtgaattaattgtttctaaakagcaagcagctctagaacttttgttccatttcatttttttaacttgaaaaaatgtctgtacattagaatgcaccatttcatttggcaaaattatatatcc

SEQ ID NO: 458508 - DNA, 201 bp, Homo sapiens
gagccaccgtctctggccatccatcttcatttttttgagagcagatttgattttagggaataacagttcatttgaatccaaataatttagggaatttggastcaagtctgataagaaagataaggcaatcaggttggtgatactactgttttaggtcagataggagttataactataaagtaacaacacataattttttgt

SEQ ID NO: 458509 - DNA, 201 bp, Homo sapiens
cctcctgcctcggcctcccaaagtgctgagagtaataggtatgagccactgtgcccggctaataaaatatttttaaattaaggtatgtgcatatatatatwtttttgacatactgctagtgcatacttaatagactacagtatcatgtaaatataacttttatatgcactgggaaaccaaaaaatttatgtcactcatttt

SEQ ID NO: 458510 - DNA, 201 bp, Homo sapiens
tcacaattgggggaaaaacttgttaaacagtatgtcctgaattttagtttggagaacctgtttatcataaagataatttcattttatgatgttgttcatgraaacaaggttttacttgtagctctacttttacagatgtgattgagaggcgtatttgagctttgccatggaccaagctccttgccaaacctactataaaag

SEQ ID NO: 458511 - DNA, 201 bp, Homo sapiens
cttgagttgtgaactgtggaggaaaattgttttaaaattggtcttggtggagtgtaaagaatggattagaggaaacaaatgtattgctttgtcaaagtctsgtaaatttatgtgtgcctctgttcattttgactcctcggctagatttcttagttccttgaggtcataaacaatcagcttttaaagcttcagtgaaggaat

SEQ ID NO: 458512 - DNA, 201 bp, Homo sapiens
tactcaacctgtataacccagggtaattcaacctattgacactttaggtgggataatgttttgttgtgggggactgacctgtgcagtgtagtatgtttagyagcatccctgtctccaactcactgtatactaatagcaattcccagttgtgacaaccaaaaatgtctagacattgccacatatctcttgacgggtagggag

SEQ ID NO: 458513 - DNA, 201 bp, Homo sapiens
ggaatgggcaggtacagtggagaaatgagagaaagtaatgggaatgttgagagaaaagattggtgaggcaggaagaagcagatacagaagaaagctgtaasttgctcacaactgctgtggatttatggtgtctctgagtggaggacagaaaccactgaagtgcaggtgggtgtttagaggagccacccaggagctccctgc

SEQ ID NO: 458514 - DNA, 201 bp, Homo sapiens
gacactttaggtgggataatgttttgttgtgggggactgacctgtgcagtgtagtatgtttagcagcatccctgtctccaactcactgtatactaatagcwattcccagttgtgacaaccaaaaatgtctagacattgccacatatctcttgacgggtagggagggcaaaatcacctttagttgagaaccacttatataac

SEQ ID NO: 458515 - DNA, 201 bp, Homo sapiens
tatggttttatggagcagaaaggatttgaagattatttagaaagatgggtatttggagagaagaaaaggaaacattttcagacaagagaaaacataaaccatagaatagatatgaaaaggactgttctgacaggaggaacatctcaggtagggtgaacccagttgtggttctcattcttgttgtgcttcagactcacttgt

SEQ ID NO: 458516 - DNA, 201 bp, Homo sapiens
atgccctacgtgaagtgatcatcctgcaggagccttgacctagagggattcaccgtgttggctaggtttggggtgtttcatttttgttctcggtgtgttckgtttgtttgtttttgttttgtttgtcattgtttgtttttcatttttattttgtcccaacattttcctttatggtccaccattagatattgatcagttgaa

SEQ ID NO: 458517 - DNA, 201 bp, Homo sapiens
ccctctcacccgggactctccccctttcaaggaaagtgaacctttaaagtaaaggcctcatctcctttattgcagttcaaatcctcaccatccacagcaakatgaattttatcagccatgtttggttgtaaatgctcgtgtgatttcctacagaaatactgctctgaatattttgtaataaaggtctttgcacatgtgacc

SEQ ID NO: 458518 - DNA, 201 bp, Homo sapiens
ttatttgagctgtattatctagttcaagggtctgtgagaagctctctttgagccttaagtactacaggatgttgggaaaagatgttgtgttctttctttcyttttttttttgagacagagtctcgctctgtcgtccaggttggagtgcagtggtgcgatctcggctcattgcaagctccacctcccggctttaagtgattc

SEQ ID NO: 458519 - DNA, 201 bp, Homo sapiens
ggtgtcaggcaggtttgccagtgaagacttcttgggtagtttagatcccatgtcacctcagctgatattatggcaagtgatatcacctctcttcagccccyagtgctattctgtgttgaacacaattgatacttcaggtgcttttgatgtgaaaatcatgaaaagaggaacaggtggatgtatagcatttttattcatgcc

SEQ ID NO: 458520 - DNA, 201 bp, Homo sapiens
ccagttgtgacaaccaaaaatgtctagacattgccacatatctcttgacgggtagggagggcaaaatcacctttagttgagaaccacttatataaccctayatatttggattgataaccctgtatatttgattgagtaaaaactagatgggataacatgaaccttccacctgcaaaaaggcagaaatgctatactttctgc

SEQ ID NO: 458521 - DNA, 201 bp, Homo sapiens
ccagggcagcctccaccttgctcttctttctgagagttggctcaggcagacaagagctgctgtccttttaggaatatgttcaatgcaaagtaaaaaaataygaattgtccccaatcccggtcatgcttttgccactttggcttctcctgtgaccccaccttgacggtggggcgtagacttgacaacatcccacagtggcac

SEQ ID NO: 458522 - DNA, 201 bp, Homo sapiens
ttctaacttcttgacagaaaggggatataataacctctttgactaaaggagacaaagacagaaaatgtgcaggccaggtatcattcacagaaagaaagggraagtggaggatttttacattttaagacccaactggtattctgctattgctggtttactttgtggcccctttttgttatttcccttggcatgaaaagtatc

SEQ ID NO: 458523 - DNA, 201 bp, Homo sapiens
cgctgttcttctaatttgcagaactcctctttaaaaaacctttggagaatgtattggcctcataccctcttccttcagcctgaaagacatgcacctgtcayttatttatgatatttaaatgcaacctctagaacaggggtgtccaatcttctggcttccctgggccacattggaagaagaaatgtcctgggccacacataa

SEQ ID NO: 458524 - DNA, 201 bp, Homo sapiens
atggttttatggagcagaaaggatttgaagattatttagaaagatgggtatttggagagaagaaaaggaaacattttcagacaagagaaaacataaaccakagaatagatatgaaaaggactgttctgacaggaggaacatctcaggtagggtgaacccagttgtggttctcattcttgttgtgcttcagactcacttgtg

SEQ ID NO: 458525 - DNA, 201 bp, Homo sapiens
agagcaggctataatttgaacacaaatttttaaatgctaattagcaaaatctctataattactttcagatttatagttttttttttttctttttcttttcttttttttttttttgaggtggagtctcgctctgtcacccaggctggagtgcagtggcacgatcttagctcactgcaacctccgcctcccaggttcaagcga

SEQ ID NO: 458526 - DNA, 201 bp, Homo sapiens
cgaggtgggcagatcacttgagcccaagagctggagaccagcctgagcaacatagggaaaccccttctctacaaaaaaatttaaaaaattagccgagcatrgtggtgcatgcctgtagtcccagctactggggagtctaaggtgagaggatcatttgagcccaggggcagcggttatattgaaccatgattgcgccactgc

SEQ ID NO: 458527 - DNA, 201 bp, Homo sapiens
atagttacttatgctgatttctaatcttactattaacactagcagttcttactgattcatgaaaatgtgcagcaaatatgttatataatatgacaatagarggttggaggtaactttgacttttttctcttttgcagtatatacattcagctgacataattcacagggtatgtattgtgactttgattacattattttggg

SEQ ID NO: 458528 - DNA, 201 bp, Homo sapiens
cagatattaccagtagaaatgcaaaaatcttaaatagccaatatttgaacctaacaccagagcaagctgtaattcagtattactataatattgccttttckttgtgtgtgtgtgtgtgtgtgtgtgtgtgtttgttttctttttgtagttggggctacaggctcacaccactagactcagctgtttttatttttttgtaaa

SEQ ID NO: 458529 - DNA, 201 bp, Homo sapiens
tgtaatgtttcatgcttttccttgattactttcctacacacttcttgaagataccagagatgtagcactaacttccgttggaatgggattcatgttacaarcttgaatggttcagtttagatatgtgaagcggatgtcatcattagcactgatgactgacagtagttataaaaattacaatcaggaatgaaccaatttacc

SEQ ID NO: 458530 - DNA, 201 bp, Homo sapiens
atattaccagtagaaatgcaaaaatcttaaatagccaatatttgaacctaacaccagagcaagctgtaattcagtattactataatattgccttttctttgtgtgtgtgtgtgtgtgtgtgtgtgtgtttgttttctttttgtagttggggctacaggctcacaccactagactcagctgtttttatttttttgtaaagac

SEQ ID NO: 458531 - DNA, 201 bp, Homo sapiens
cagcctgagaactttgttaagattaactttgatagtaaatacagtattgagaattattaaggaaattattcagacatattgcttccctagttattgtgacrtttaaagagttttaaaaaggtcattcccttgatgtaaattttgtatcagctgaaagaattgttggaagaatatgtgctgtgattaagatcatggtctgtg

SEQ ID NO: 458532 - DNA, 201 bp, Homo sapiens
gtggatctcaggtagcagtaactcaggaagatcagccttctttgatttagaatgtcatttaggcacattatgtattctggtaccttagaagatacaatgcmttttcctgaattatcattgctactgctttaattactttaagggtgtgaggcagtaactaactttagtgtcacaatgtatacatcttaacatttattgtgc

SEQ ID NO: 458533 - DNA, 201 bp, Homo sapiens
ccttgctatgttgccttggttggtcttgaactcctggactcaagcaatcccccaaccttggcctcccaaaatgctgggattacagatatgagccaccatgcccccccccccacccctttttcttaactgtagtggttctttgcgcaagcatagtagacaagaattttttgattcctcctgggaactatttcctcaaatttc

SEQ ID NO: 458534 - DNA, 201 bp, Homo sapiens
aatacagtaactgtgattaggacagaatactgctatgttcttgccagcctgagaactttgttaagattaactttgatagtaaatacagtattgagaattaytaaggaaattattcagacatattgcttccctagttattgtgacatttaaagagttttaaaaaggtcattcccttgatgtaaattttgtatcagctgaaag

SEQ ID NO: 458535 - DNA, 201 bp, Homo sapiens
agctagagctaaatgaaccaggggccaaatatagggagaaaagtggggtgaggagagggttgcagatatgcagggatcatgtagggtcttatttgcctttrtacagactgtgacttttcctttaagtgagaggggaagccttggagggttatgaccagaggaaggacatgacctaaatcttgttttaacagattactgtgc

SEQ ID NO: 458536 - DNA, 201 bp, Homo sapiens
agactgatggcgattccctctcacccgggactctccccctttcaaggaaagtgaacctttaaagtaaaggcctcatctcctttattgcagttcaaatcctyaccatccacagcaagatgaattttatcagccatgtttggttgtaaatgctcgtgtgatttcctacagaaatactgctctgaatattttgtaataaaggtc

SEQ ID NO: 458537 - DNA, 201 bp, Homo sapiens
cttgctatgttgccttggttggtcttgaactcctggactcaagcaatcccccaaccttggcctcccaaaatgctgggattacagatatgagccaccatgcccccccccccacccctttttcttaactgtagtggttctttgcgcaagcatagtagacaagaattttttgattcctcctgggaactatttcctcaaatttca

SEQ ID NO: 458538 - DNA, 201 bp, Homo sapiens
ctcatatatttaagccttttgtgtaataagaaagtataaagtcacttccagtgttggctgtgtgacagaatcttgtatttgggccaaggtgtttccatttytcaatcagtgcagtgatacatgtactccagagggacagggtggaccccctgagtcaactggagcaagaaggaaggaggcagactgatggcgattccctct

SEQ ID NO: 458539 - DNA, 201 bp, Homo sapiens
taggggcagtgtactggattaggtagggctttatctgccattgaaaggaattttgtgttttactcttagtaaaatagggagccttttgaggaaaggagtgccctgatctgagttttatttctaaagaaacactcttcccctgtgttgagaatagactgtagtaagtcccaaggatcaataggtgagttgcagaagcttgtg

SEQ ID NO: 458540 - DNA, 201 bp, Homo sapiens
agttcaaagctaggtaaagtcatgaagatgagaaagaatcaatgaaaaaacgctgaaaactcaaaaagccagagtgcttcttttcctccaaatgatcacarcacctctctggcaagggcatagatgtgggctgaggctgagatggatgaattgacagaagtagacttccgaaggtggataataatgaatttcactgagcta

SEQ ID NO: 458541 - DNA, 201 bp, Homo sapiens
aactgcaaaagaactgaaaatataacacacagcctctcacaccacagcacaatcaaattagaactaagattaagaaactcactcaaaaccacacaattacrtggaaattggacaacctgctcctgaatgactcctggataaataatgaaattaaggcggaaatcagaagttctttgaaaccaatgagaacaaagagaacat

SEQ ID NO: 458542 - DNA, 201 bp, Homo sapiens
ctgctctaacggtagctgccgttgctacagatcctgtcgtcttccacactcatgaacttttcccctctcctcttctttctctgccctcagaggcataaccrtcctctcctgtttgtggagcttatttgctacctaaacttaaaggaatggcttcctatgccttcaagatccttggcagagggaagtgatggtggcagctga

SEQ ID NO: 458543 - DNA, 201 bp, Homo sapiens
ctttggcttctcctgtgaccccaccttgacggtggggcgtagacttgacaacatcccacagtggcacggagagaaggcccataccttctggttgcttcagrcctgacaccgtccctcagtgatacgtacagccaaaaaggaccaactggcttctgtgcactagcctgtgattaacttgcttagtatggttctcagatcttg

SEQ ID NO: 458544 - DNA, 201 bp, Homo sapiens
taaaaggagagaagaaagtgtagatagttaaaagactgcagctgctgaagttctgagccgggcaagtcgagagggctgttggacagctgcttgtgggcccrgagtaatcaggcagccttcataggcggtcatgtgtgcatgtgagcacatgcgtatatgtgcgtctctctttctccctcacccccaggtgttgccatttct

SEQ ID NO: 458545 - DNA, 201 bp, Homo sapiens
ggcctaattgggcattctggaaccggattaagaacctatttttcctatgtgaaaagaccttaattaaggccagtgtctatttagaaggttaagtgttactsatagtggtgcctttgtttggctccttcatccatgtaaggacccagcaactacaaatctacctttgaactaaggtttcattcattcattcaaccattcatt

SEQ ID NO: 458546 - DNA, 201 bp, Homo sapiens
taacttgctgaatttcaggcattttgttctacatgaggactcatatatttaagccttttgtgtaataagaaagtataaagtcacttccagtgttggctgtrtgacagaatcttgtatttgggccaaggtgtttccatttctcaatcagtgcagtgatacatgtactccagagggacagggtggaccccctgagtcaactgg

SEQ ID NO: 458547 - DNA, 201 bp, Homo sapiens
ttatctacagacatgtgatcctataaaaacccatattatttattgtcctccctgcctttacagatgtaaacccctctcctcttttcatcagagctccccckcttttactgctctatcatcaggttgcagaaaataagttttcctgcaaacatagattcccatggcaacataacaaaaaggtaatagaacaaatgtttattt

SEQ ID NO: 458548 - DNA, 201 bp, Homo sapiens
ttccacaaaacacaagttcagaactctagttaaatcccaagagccaagaccatctgttgctgtagcttgtgagagtgctctttcattcttgagcacctccrtagagagcttaaaagaagaggcactcagcgatgaaaaacatgagaaaaaaaatggttcttttctatgtcccttgaacttctgtgtgataacgtgttccag

SEQ ID NO: 458549 - DNA, 201 bp, Homo sapiens
ggaggagagttctttgtttggatatgaagggtcaaaactatgtttgctcaataaggcatacttttttgtaacatgttaaaaactcttttccttcctgtctmtggtactgatagctgtcgacttgctggagaagatgcttgtattggactcagataagagaattacagcggcccaagcccttgcacatgcctactttgctca

SEQ ID NO: 458550 - DNA, 201 bp, Homo sapiens
ataatcagaaacagtcgcccttccttttgatgaaagtgtctggttgggggaaacgaattcaaagcacttttgtatccaagctaccaattggccatatgacmttggacaagtcactttaccactgtaggcccagtcatttcactgtaaaatgatgagaattgaggtcgttgacttctgaagtgttttaaattacagaaagtc

SEQ ID NO: 458551 - DNA, 201 bp, Homo sapiens
agtaaacaacttttctaatggaaaattcaaacacataaaatcacaggtaaaggtcatatagtacagtaaactgccatgttcactcagtgacaacagttacygacatatggccaatcatgtttcttttgtatttcccaagccctggattattttaaagcaagtctagacattatataataccatccatagatacttcagttt

SEQ ID NO: 458552 - DNA, 201 bp, Homo sapiens
atttgtgttgtcagatttttttttaatcacatgagatgattgtatgtttaaatgatcacagaacttgggattgggggaatgggcaggtacagtggagaaakgagagaaagtaatgggaatgttgagagaaaagattggtgaggcaggaagaagcagatacagaagaaagctgtaacttgctcacaactgctgtggatttat

SEQ ID NO: 458553 - DNA, 201 bp, Homo sapiens
aatgcccttgactaggcatctaagatattaaccagcttcagcagattatgcgtctgacaggaacaccccccgcttatctcattaacaggatgccaagccaygaggtgagaacaaagagactgtacagggatgtcgcactgagaagccacattctcattttattgccaccgtataaccaacagttcttaacatcactggatg

SEQ ID NO: 458554 - DNA, 201 bp, Homo sapiens
cagaatggaaaaataaggccaggtgagtaaaattgttcagagattttaaaaattaaaaaaagaaaaaagacattagtgaaggagtgcagtaaatagccaasagctgttttcattctcctgaaaagtagtgaagtagtgatggcaataattatgaagaaattgaatgccgagtaagagaatgcagtaatggatttagaacct

SEQ ID NO: 458555 - DNA, 201 bp, Homo sapiens
tttttggaacttcttttagaatccactttggagcctgtgatattcttcttcttttttattttgagacagagtctcattctgttgtccaagttggagtgcartggcaccatctctgctcactataacctccacctcatgggttcaagcgattctcctgccttaggctcccaagtagctgggatacaagtgcgcaacaccatg

SEQ ID NO: 458556 - DNA, 201 bp, Homo sapiens
atgtcctttcttcaaaaaacagggtcttatgcttatgagtgaaactgacaaaacatgtgggtgagcagttctataaaaactctttttttttcagtaacatyttggagggtacaaagggctttcacataatcttatttgacacaacaatcctgtgaaacagatggtattatctctaattttcagatgagggaactgaggttg

SEQ ID NO: 458557 - DNA, 201 bp, Homo sapiens
gatagaagggaagacctacaacaaggctattcagcagcctttgttttagtgaaagccaatgagaagagatcacttcttccacttactaacaatgattgctyaactaataagtttagcttttttatttcaatgtaaaagttgctgaaaacactgaattggtaaaggaaatttctggatttacattttaacctgatgttgttc

SEQ ID NO: 458558 - DNA, 201 bp, Homo sapiens
tcttcaggaggccctggtgtcaggcaggtttgccagtgaagacttcttgggtagtttagatcccatgtcacctcagctgatattatggcaagtgatatcayctctcttcagcccctagtgctattctgtgttgaacacaattgatacttcaggtgcttttgatgtgaaaatcatgaaaagaggaacaggtggatgtatagc

SEQ ID NO: 458559 - DNA, 201 bp, Homo sapiens
caccgttactttgttagcaaggtttaatattgatatcctttgatgtactaagagcacctactgaagtcagcactgtcaaaagactgctggtccaagacttkctttgggaataccaacccctctaccaatttagctgtttgagaaggctgtctcagggctacttcttacatatcttggcctcagtttttaaacttctcatcc

SEQ ID NO: 458560 - DNA, 201 bp, Homo sapiens
cctaaaatatttaacagtaaagatgatgctaaaaccaaagaaaagtaatttttcttatctgcatggccagtcactggctacgtgcctagttactcatgtcwttcacagaagtgtactgtagcatgcagctgtgggctctcgggtagggggaatggagggtaggtttttttgtctgtttgggggtggctttttgaccttttt

SEQ ID NO: 458561 - DNA, 201 bp, Homo sapiens
taaacacctctatgcaaataaactagaaaatctagaagaaatggatgaattcctggacacatatgacctcccaagactgaaccaggaaaacgttgaatctrccaataacaagttctcaaattgaggcagtaataaatagcctaccaagcaagaaaagcccaggaccagacagattacagccaaattctaccagaggtacaa

SEQ ID NO: 458562 - DNA, 201 bp, Homo sapiens
ctactcctattcaacatagtattggaaattctggccagggcaatcaggcaaaagaaagaaagaaagggtattcaaataggaagagaggaagtaaaactctrtttgcaggtgacatgatcctatatctagaaaaccttgttgtctcagcccaaaagcttcttaagctgataagcaacttcagcaaagtctcaggatacaaaa

SEQ ID NO: 458563 - DNA, 201 bp, Homo sapiens
gtaaaactctatttgcaggtgacatgatcctatatctagaaaaccttgttgtctcagcccaaaagcttcttaagctgataagcaacttcagcaaagtctcrggatacaaaatcaaagtgcaaaaatcacaactattcctatacaccaacagtaggcaagcagagagccaaatcatgaatgaactcttattcacaactgcta

SEQ ID NO: 458564 - DNA, 201 bp, Homo sapiens
atgaggcacattatacatttcaacagctctactgaaattgagtaccagaatacagaacttaactcaaataatattatattgagtataagaataagaaaggttttttttttttggtttgtttcctacataattggggtgagtggataaaagtagtttaaacatcctaaggggtagacaagattaatttgatgttcgtgacac

SEQ ID NO: 458565 - DNA, 201 bp, Homo sapiens
caagcgatcctgttacctcagtctcccaagtagctgggaccacaggcatgcgtcaccacacctggctaattttttgtatttttggagacaagttttcaccrtgttacccaggctggtctcaaagtcctgggctcaagcgatctgcccaccttggcctcccaaagtgctgggattacaggcgtgagtcaccgtgcctgggca

SEQ ID NO: 458566 - DNA, 201 bp, Homo sapiens
acttaaaggaatggcttcctatgccttcaagatccttggcagagggaagtgatggtggcagctgaagatatgtgttgccttggctaaaaaaggagttgctttattattattatttatttatttatttatttatttatttattttggtagtgtcagggtctcgctcttttacccaggctagagtacagtggcacaatcatag

SEQ ID NO: 458567 - DNA, 201 bp, Homo sapiens
cttaaaggaatggcttcctatgccttcaagatccttggcagagggaagtgatggtggcagctgaagatatgtgttgccttggctaaaaaaggagttgctttattattattatttatttatttatttatttatttatttattttggtagtgtcagggtctcgctcttttacccaggctagagtacagtggcacaatcatagc

SEQ ID NO: 458568 - DNA, 201 bp, Homo sapiens
ttaaaggaatggcttcctatgccttcaagatccttggcagagggaagtgatggtggcagctgaagatatgtgttgccttggctaaaaaaggagttgctttattattattatttatttatttatttatttatttatttattttggtagtgtcagggtctcgctcttttacccaggctagagtacagtggcacaatcatagct

SEQ ID NO: 458569 - DNA, 201 bp, Homo sapiens
ggcttcctatgccttcaagatccttggcagagggaagtgatggtggcagctgaagatatgtgttgccttggctaaaaaaggagttgctttattattattatttatttatttatttatttatttatttattttggtagtgtcagggtctcgctcttttacccaggctagagtacagtggcacaatcatagctcactgcaagc

SEQ ID NO: 458570 - DNA, 201 bp, Homo sapiens
attcttagacagtaaataaaacttacacttatttttaaaaattcagcctcttagccaggcacggtagctcactcctgtaatcccagcactttgggaggccrtggtgggtggatcacttgagatcaggagttcgagaccagcctggccaacatgatgaaaccccgcctctactaaaaatacaaaaattagccaggcatggtg

SEQ ID NO: 458571 - DNA, 201 bp, Homo sapiens
taataatggaggtctctctgtgaaatgaggcacattatacatttcaacagctctactgaaattgagtaccagaatacagaacttaactcaaataatattayattgagtataagaataagaaaggttttttttttttggtttgtttcctacataattggggtgagtggataaaagtagtttaaacatcctaaggggtagaca

SEQ ID NO: 458572 - DNA, 201 bp, Homo sapiens
cacacatgccctttgtgtgctgacttcccggatgagtgaggtataagacagtgtgagtgtgtgtgtgcgtgcacgcatgtgtgcctgcttgcatgcacaartgtgttttattctctatctgggtacacactaagatcacgggagcctccattagacaatagtatcccagtaaagcaatgagatttgagattctaattcatt

SEQ ID NO: 458573 - DNA, 201 bp, Homo sapiens
tgcagggaactctatgcagtagccacccattggtggtcaggactgtttcaccagaacgatacactcgtagtgaagcgttctctgcagcacagggatgaccrctacatcatcaccagtctgttctttcctggttgtatgtttcactgagtcccaagttccagttttaccaataggagccatgtatgttgttttttcaagttt

SEQ ID NO: 458574 - DNA, 201 bp, Homo sapiens
ttactccaagacttactgtctagtttatggtttattatagcccctttattttagctcctttcctatctgcggtatgcttgtttcatggtttagtattaatrtcatgaaaaatgtggtctgttggaactctcatcagttctacttatggaagatgtttaggtgagaaagattgttaaaatatatgtctagaattagttttgg

SEQ ID NO: 458575 - DNA, 201 bp, Homo sapiens
gctgtcactgtttataactggttgatgatttggttgtctgaaagcatgctcagtgctctctcctttgactagcttttttgttttcatcctgtaatgtagaytgtgtggtaaaatattgagtctagtttcactgatgcaggtaatgtagagggcatcttttagtaatctttgcttcaagtgagaataatttgttgtgaaata

SEQ ID NO: 458576 - DNA, 201 bp, Homo sapiens
agcaactacaaatctacctttgaactaaggtttcattcattcattcaaccattcattcattcatttattcaataaatactatggctgttgagcaggaatcygttctttctatttaactctagctggatactgttttttataaacaataactgagtttacctcttggaagcaaatctcattactacttgttgactacttact

SEQ ID NO: 458577 - DNA, 201 bp, Homo sapiens
ttaaaacttgtgaacattttaggtgttggtaacaaatacaattttcaggtgccagagggcacatgtgatcttttacacaaaaatgcctctgacccacaatyggtagttcatcttgaattgtctcttctgttagtgatcatgaataatagataaacatttattaggtgagtgactgaagctaggggatgtcctctgtgactg

SEQ ID NO: 458578 - DNA, 201 bp, Homo sapiens
agactttaaaaatgtcagttttgaagcatatacagttaatatggaaatttttcgtggaatacatttttaaaaaacacaatattacggtaacaaccatggaygtgtgacctttttcacctgttggattaattcattagaccattagtacatacgtaaggcaaggaccctaaatctttttgccttctgataaactactgacta

SEQ ID NO: 458579 - DNA, 201 bp, Homo sapiens
gggtaagatctgaaagtgattctatttcctttggaacaattttcaaggacttgaaacctattcttgaattccaagtatgtgtcccaccacctccttttcargttcagactgtaaaattaaagttgcttttaaaaagtgacatttggagtcgggcgtggtggtgcatgcctgttatcccagctactcgggaggctgaggcag

SEQ ID NO: 458580 - DNA, 201 bp, Homo sapiens
tatgtcagaggcattgtttaagttaaatataactttttcttttttaccaatttgttgattcagttgccattctgcaaagatgcttacaaattctaatacgrtaaataagtggatataattggaatactaactgaaagtaaaaagacagttgactgaagacacttattttactgaatttcaaaatcaagttatgaatttctg

SEQ ID NO: 458581 - DNA, 201 bp, Homo sapiens
tggaagagctcttcggtttctgagcataatgctcccatctcctgatttctctgaacagaaaacaaaagagagaatgagggaaattgctattttatttgtawtcatgaacttggctgtaatcagttatgccgtataggatgtcagacaataccactggttaaaataaagcctatttttcaaatttagtgagtttctcaagtt

SEQ ID NO: 458582 - DNA, 201 bp, Homo sapiens
tgatagctgtcgacttgctggagaagatgcttgtattggactcagataagagaattacagcggcccaagcccttgcacatgcctactttgctcagtaccaygatcctgatgatgaaccagtggccgatccttatgatcagtcctttgaaagcagggacctccttatagatgagtggaaaagtaagtcctaagggtaggatt

SEQ ID NO: 458583 - DNA, 201 bp, Homo sapiens
cgtccctcagtgatacgtacagccaaaaaggaccaactggcttctgtgcactagcctgtgattaacttgcttagtatggttctcagatcttgacagtatatttgaaactgtaaatatgtttgtgccttaaaaggagagaagaaagtgtagatagttaaaagactgcagctgctgaagttctgagccgggcaagtcgagagg

SEQ ID NO: 458584 - DNA, 201 bp, Homo sapiens
ctagagtaggtattttggaggagagttctttgtttggatatgaagggtcaaaactatgtttgctcaataaggcatacttttttgtaacatgttaaaaactmttttccttcctgtctctggtactgatagctgtcgacttgctggagaagatgcttgtattggactcagataagagaattacagcggcccaagcccttgcac

SEQ ID NO: 458585 - DNA, 201 bp, Homo sapiens
aaccaactatttttgaggaattatcatgggaaaagaccagggcttttcccaggaatatcccaaacttcggaaacaagttattctcttcactcccaataacyaatgctaagaaatgctgaaaatcaaagtaaaaaattaaagcccataaggccagaaactccttttgctgtctttctctaaatatgattactttaaaataaa

SEQ ID NO: 458586 - DNA, 201 bp, Homo sapiens
ttgaacagccctttagtcaggtgaagatcttagtaagctatttatttctgtaaaaatgagtatgattgttgagcctcagatgtcttaaatagtaatttgartatttcacccctagttacggtttcatttgttgccaagaattgtaacagtgacattgcatatacttttacttctttttaattttgccagttgatatttggt

SEQ ID NO: 458587 - DNA, 201 bp, Homo sapiens
attgcaactttactgtaggtttaagctgattaaagaaagaagatgtgtagtttttttctatgtaaggctaacttggactggatattgactgtaggatggakattgtcttttgatagctggatgaagtcttttatgtctggatcctcattattacctgtagggggagaattgatcatgcatcataaagttgatcctgtcttc

SEQ ID NO: 458588 - DNA, 201 bp, Homo sapiens
gtcacacaaagaacataaatgaggttcagtgttacacaattgggagtggtggggtctgtggcaaaatacatctgcacctcctaaaagtattcaaattcacwttgaaacaaaacaagtaaacaaacgaaaacctacacttctggccaaaccagacataatttaggctagagtggttctacaagctgcctgtttagagcaggc

SEQ ID NO: 458589 - DNA, 201 bp, Homo sapiens
ctgataacatgatccaaactataatcccatgtgattacacactattttgaaagtcattgtcagtgttaccacaatgtcaacctaaagaggtatttttttcycctttatgatatgtagaagctgaattagagtgaatcaaagatatcagatgatgcttagaaagagcagtactttttttttaatgtttttgcttagaaacac

SEQ ID NO: 458590 - DNA, 201 bp, Homo sapiens
gctcactgcaacttctgcctcctgggttcaagcgattctttttttttttttttttttttgagacggagtctccctctgtcgccaggttcactgcaagctcyggctcccgggttcacgccattctcctgcctcagcctcccaagtagctgggactacagatgcccaccagcatgcctggctaattttttgtatttttagtag

SEQ ID NO: 458591 - DNA, 201 bp, Homo sapiens
atctcactttcatccaggcccgaatgcagtgacatgatctcagctcactgcaacttctgcctcctgggttcaagcgattctttttttttttttttttttttgagacggagtctccctctgtcgccaggttcactgcaagctctggctcccgggttcacgccattctcctgcctcagcctcccaagtagctgggactacaga

SEQ ID NO: 458592 - DNA, 201 bp, Homo sapiens
tctttaattcttgggttcaagtggtcctcctgcctcggcctcccaaagtgttgggattacaggtgtgagccactgtgccgagccaggttgtgtgtgtgtgtatgtatgtatgtatgtatgtatgtatgtatgtatgtatgtttgtatatatttatatttatttttttggaactgcatctcactttcatccaggcccgaatg

SEQ ID NO: 458593 - DNA, 201 bp, Homo sapiens
aactgaggtccaaaaataggtgagtatagtgcaatgcagttattttggggcagagagggagagagagcacattcacgtaagttttattatagtatattgakaacattggcctttttttctttttcttttcttttttttttttttgagttagagtcttactctgtcacccaggatggagggcagtggcatgatcttgactta

SEQ ID NO: 458594 - DNA, 201 bp, Homo sapiens
gtctttaattcttgggttcaagtggtcctcctgcctcggcctcccaaagtgttgggattacaggtgtgagccactgtgccgagccaggttgtgtgtgtgtgtatgtatgtatgtatgtatgtatgtatgtatgtatgtatgtttgtatatatttatatttatttttttggaactgcatctcactttcatccaggcccgaat

SEQ ID NO: 458595 - DNA, 201 bp, Homo sapiens
gcctttttttctttttcttttcttttttttttttttgagttagagtcttactctgtcacccaggatggagggcagtggcatgatcttgacttatgagctaytagctgcaactacagacatgcaccaccacgctaagcagatttttgtatttttagtagggacgggattttgccatgttggctaggctggtcttgaactcct

SEQ ID NO: 458596 - DNA, 201 bp, Homo sapiens
agtctttaattcttgggttcaagtggtcctcctgcctcggcctcccaaagtgttgggattacaggtgtgagccactgtgccgagccaggttgtgtgtgtgtgtatgtatgtatgtatgtatgtatgtatgtatgtatgtatgtttgtatatatttatatttatttttttggaactgcatctcactttcatccaggcccgaa

SEQ ID NO: 458597 - DNA, 201 bp, Homo sapiens
atcgaatactatttgcaaatttaatgtgttatgcaaccatctctgtaaatccatttcggagcatttctaccatcccagtaaagatccttctaatctgtatrtagttaatccctcttcctaccactagtcctagagaaccaatagttgactgtctctgtagatttgccttttccctggacatttaatattaatggaatcatg

SEQ ID NO: 458598 - DNA, 201 bp, Homo sapiens
tagtctttaattcttgggttcaagtggtcctcctgcctcggcctcccaaagtgttgggattacaggtgtgagccactgtgccgagccaggttgtgtgtgtgtgtatgtatgtatgtatgtatgtatgtatgtatgtatgtatgtttgtatatatttatatttatttttttggaactgcatctcactttcatccaggcccga

SEQ ID NO: 458599 - DNA, 201 bp, Homo sapiens
ccccgtctcaaaaaataaagaaatgaataaaatgagatccttctagacaatactcgttgttaatgagacagatgactttagaggaaacattttaaaaagcyatcccacagaatgcctcttcattcctagaggacttcctggttcctaattgcttctgatgatgtttcttcttaccttataaaataaaacagtatacagtaa

SEQ ID NO: 458600 - DNA, 201 bp, Homo sapiens
gtgatgccatctcggttcactgcaacctccacctgctgagttcaagcaattctcgtgcgtcagcctctggagtagctgggattataggtgtgcatcaccaygcctggctaatttttgtattttttagtagacatggggtttcaccacgttggccaggctgttcttgaactcctgacctcaggtgagctgcccacctcggcc

SEQ ID NO: 458601 - DNA, 201 bp, Homo sapiens
tagaacctatcagtttgatagattgaaagttgaacatttttagctagactatatcagagatgataatgtggaatatattgtacattagagggttaaaaaaygttttattcccatcagccattccctgacagtttgttctttcttttttaaaattgagacagtgtcttgcccaagctggagtgcagagatgcacgaacacgg

SEQ ID NO: 458602 - DNA, 201 bp, Homo sapiens
gagagacctccctgcttctggtaaaagtcgttcagactgtgttactaggcgcaactgtggacgatcaaagccttcatccaaattgcgagatgctttttcascccaaatggtaaagaacacagtgaaccgtaaagccttaaagaccgagcgcaaaagaaaactgaatcagcttccaagtgtgactcttgatgctgtactgca

SEQ ID NO: 458603 - DNA, 201 bp, Homo sapiens
atgcatcctcaccagcatttggtgtggtcactattttaattttagccattcgtgtagatatgtagtaatgtctcatctcattatgttttgtttttttttttgagacggaatgttgctcttgttgcccagactggagtgcagtgatgccatctcggttcactgcaacctccacctgctgagttcaagcaattctcgtgcgtc

SEQ ID NO: 458604 - DNA, 201 bp, Homo sapiens
ttaagcaatgtttccgtctcagcctcctgagtagttgggaccaaaggtgcacactaccacacctggctaatttttgacaacattttttttgtagaggcggkgtcccactatgttgccctggctggtctcgaattcctgggctccagtgatctttctgcctcagcctcccagagtgttgggattacaggtgtgggccaccat

SEQ ID NO: 458605 - DNA, 201 bp, Homo sapiens
atggggttttgtgtgactgtaagttttcacttctctgggataaataccagtagaacaattgcagtattatatggtaatggcatgttaagttttttttttttcctgagagggagtttcgatcttgttgcccaggctggagtgcaattgcgcgatcttggctcgctgcaacctctgcctcctgggttcaagcgattgtccttt

SEQ ID NO: 458606 - DNA, 201 bp, Homo sapiens
caatagttgttttttttgtttgttttttttttgagacggagtttcactcttgtggaccaggctggagtgcaatggcatgatcttggctcactgcaacctcygcctcccaggttcaagcgattctcctgcctcagcctcctgagcagttgggattataggcccctgccaccacacccagctaatttttgtatttttagtaga

SEQ ID NO: 458607 - DNA, 201 bp, Homo sapiens
tcctcttgtctgtttgggagtctgtcctgccatctgacctggcctacttcattgttgaagtcctggttactctgaggtatattttgtcataaggctaaagycatgattcagttccattttagtttaccaggcacaccaccaccctgtctgcaggtggattaatcagtatgtcaaacagaatgagagattgatctgttctgg

SEQ ID NO: 458608 - DNA, 201 bp, Homo sapiens
aatggctcactgtattcttgacctttgaggatgaagtgatcctcccttctcagcctcccaaatagatgggactacaggcacatgccaccatcctcagccartatttttatttttagtagagatagggtcttgctatgtttcccaggctggtctcgaactcctgggctcaagcagtcctcccacttctgcctcccaaagtat

SEQ ID NO: 458609 - DNA, 201 bp, Homo sapiens
ggtaaaacttcctggttagggaatgggagtaatgtcgatagggaacaagtttaacaaaggttctgtttgccacatgttattttagtagctcctcacttacyctgtttgtcttgtggtttctgtacatagatatgggctgtctatcagttctactgctaatacaaaaatacatagtactgtgctgttagtactaatacttca

SEQ ID NO: 458610 - DNA, 201 bp, Homo sapiens
gtgtggtgctcgtctatgagtagctacactataaatgttaacagatcatacatgttgctttgctgaaacatttcttcttctttatattagcctagtgtttytcacgttttcttgggtttttttttgtatatatatttttgttgctgtgggcttactatatacatcttctgtatttttggaacaatgaaattatagactgat

SEQ ID NO: 458611 - DNA, 201 bp, Homo sapiens
ctttagtatccagtgtatcctaatctttctgctgctgacagtggtaggagtaaggaggtgtttctcattatcaaatagttggggatcgtaaagtaattatrtgtgcctaaaattatactcatgtaatctgctttgtagaatgtgatgttttcattaattttttaaaaaaatgtatacatttggataccagtgtcctttttt

SEQ ID NO: 458612 - DNA, 201 bp, Homo sapiens
tcctgtaattcgccaaaatgacaaacacaaagggaaagaggagaggcacccagtacatgttctgtaggccttttagaaaacatggagttgttcctttggcygcatatatgcgaatctataagaaaggtgatattgtagacatcaaaggaatgggtactcttcaaaaaggaatgccccacaagtgttatcatggcaaaactg

SEQ ID NO: 458613 - DNA, 201 bp, Homo sapiens
ggcatgtgccactatgcccagctaattttttgtatttttagtagagatgaggcaatatttttaatatagctaatgcatgatgttaaaaactttgcatatgkaaaagatgcattcaaaatagaagacagatcaatgaattttagtgtagtcattttaagtttagtgacatagtttcagtttccacattgcaactatacactg

SEQ ID NO: 458614 - DNA, 201 bp, Homo sapiens
ctctggcagggacttgtcagaggccactgctacctgaaagacctcttgagagaactgactccaggccccagcctttagataaggtcagagacctcgctggstcagggaccaaatcccaatccttggtttccagccagaggccactggacaggccaccagcagtggcaggaccaagaccccagctaagcgacaaaccctctc

SEQ ID NO: 458615 - DNA, 201 bp, Homo sapiens
ccattagctcttttttttttttttgaggtggagtctcactctgttgccaggctggagtgcagtggttgatcactgcaacctctgcctcttgggttcaagcrattctcctgcctcaccctcccgagtagctgggattactggtacccatcaccacgcccggctaatttttgtatcaccattagctcttgaagtttttctagt

SEQ ID NO: 458616 - DNA, 201 bp, Homo sapiens
aacatttgtttttatttgagcttatgaagaatttcttgactttctagctaaatgatcagttcacttctcttagcctcaattttattgcgtctaaattccaraagttcttgattgctataagattccttcagctttaaatattaatatttgatattgattttgtttctgcccaaacacattgtttggtcaccgccggtaatg

SEQ ID NO: 458617 - DNA, 201 bp, Homo sapiens
ggctgctcaggcacccaaaatgtcagataaacctcctgctgacaccaaccagatgctgtcgctctccaaaaaagctctggcagggacttgtcagaggccaytgctacctgaaagacctcttgagagaactgactccaggccccagcctttagataaggtcagagacctcgctgggtcagggaccaaatcccaatccttggt

SEQ ID NO: 458618 - DNA, 201 bp, Homo sapiens
ctcctgggttcaagcgattctcccacctcagcctcccgagtagctgggactacaggtgtgcaccaccatgcctgactactttttgtatttttattagagaygaggtttcaccatgtgggccaggctggtcttgaactcctgacctcaggtgatccgcccaccttggcctcccaaagtgctgggattacaggcgtgagccac

SEQ ID NO: 458619 - DNA, 201 bp, Homo sapiens
ctcaatctgaccaagcgaccagcaggttggtgccaaaatccatttgtaccgctactcgttctctccatcatactcagggtctcatgccatttgcatcagccttgaagaaagtgccatttggtctttccatgcataattttgaggggtatggtctattttcttattttggaaataatgaaagcaaaggcttagaattcttag

SEQ ID NO: 458620 - DNA, 201 bp, Homo sapiens
gcttcccaaagtgctgggattacaggcatgagccactgcgcccagcctattattttcattttgaacccatctcttttattgccaaacacgcatttacttcygtgttcatgatgacatcattatcctattcatctcaaagctggaaaccttgcagtcaatcatttaaatgattaaaatacatttgagtacctcttgagccag

SEQ ID NO: 458621 - DNA, 201 bp, Homo sapiens
ctggccaacgtagtgaaaccctgtctctactgaaaatacaaaaaaaaattagctgggtgtggtggcacgtgcctgtagtcccagctactcaggaggctgakgcaggaggatcgcttgaacccaggaggcagaggttgcagtaagctgggattgtgccactgcactccagcctgggtgacagagtgagactttgtctcaaaa

SEQ ID NO: 458622 - DNA, 201 bp, Homo sapiens
ttgggaggctgaggtggatcacctgaggttgggagtccaagaccagcctgaccaacatggagaaaccccgtctctactaaaaatacaaaattagccaggcrtgatggtgcgtgcttgtaatcccagctacttgggaggctgaggcagaagaatcacttgaacccgggaggcggaggttgtagtgagccaagatcgtgccat

SEQ ID NO: 458623 - DNA, 201 bp, Homo sapiens
agatccgtgagtatgtgcctcccccagtaccgctgcctccagggccaagcactcacctggcagagcaatcaacaggaatggctgctcaggcacccaaaatrtcagataaacctcctgctgacaccaaccagatgctgtcgctctccaaaaaagctctggcagggacttgtcagaggccactgctacctgaaagacctcttg

SEQ ID NO: 458624 - DNA, 201 bp, Homo sapiens
ttattggatgaaaatgcagtcatgtcttcaacttaaaacttggcaggatctctaagtttctaataaataaataatattgtatagtctttttttttttttttaataaaataagccttattctggttacattttctgaagaattttattggtttccaggaaatgtagtgtatatgggttggcgtttagtcatttgctaagtag

SEQ ID NO: 458625 - DNA, 201 bp, Homo sapiens
atatgtagtaatgtctcatctcattatgttttgtttttttttttgagacggaatgttgctcttgttgcccagactggagtgcagtgatgccatctcggttsactgcaacctccacctgctgagttcaagcaattctcgtgcgtcagcctctggagtagctgggattataggtgtgcatcaccacgcctggctaatttttgt

SEQ ID NO: 458626 - DNA, 201 bp, Homo sapiens
ttttattttttatttttttttgagatggagtttcgctcttgttacccaggctggagtgcggtggcatgatctcggctcactgcaacctctacctcctggtwtcaagtgattctcctgcctcaacctcctgagtagctgggattacaggcatgcaccaccatgcctggctaattttgtatttttagtagagacaggatttca

SEQ ID NO: 458627 - DNA, 201 bp, Homo sapiens
agtcaacatatgatctgaaggaacatagatactgtcctataaaagttgagactggccaggtgctgtggctcacgcctgtaatcccaacactttgggaggcygaggcgggaagataacttgaggttgagagttcgagaccagcctcgccaacatggtgaaacctcatctctactaacaatacagaaattacctgagtgtggt

SEQ ID NO: 458628 - DNA, 201 bp, Homo sapiens
gattgcttgaggccaggagttctagaccagtctgggcagcacagcgagacccctgtctctatttttaaaaaatttgtcttttttttaaattagccagctgyagtggctcatacctgtagcccaacaggtcaagattacagacttgtcttttaaataaacaaaaaacttgaggatgttagtttttcttttttcttttttatt

SEQ ID NO: 458629 - DNA, 201 bp, Homo sapiens
gctcctggctgggcccaagtgatccaccgccctcagccttccaacgtattgggattacgggaatgagccactgcatttggctaagtttttgttttttttttctctatttttccaaacttatttgattagtaagataaagacattaactgctgttgacagtttccatttttaattagtaatcaggagcatttgttgtatttt

SEQ ID NO: 458630 - DNA, 201 bp, Homo sapiens
gtgtgcagtaagtgatgcctactgctgcatgccaagagtcaaatgtatatttgaaagagttgtgaatttcaagaaagatatttttgagtttttttttttttctttctgagacagggtcttgtactgtttcccaggctagagtgcagtggcctgatcttggctcctggctgggcccaagtgatccaccgccctcagccttcc

SEQ ID NO: 458631 - DNA, 201 bp, Homo sapiens
ttcattgagagtaggctaatgcttttaaaggcatttgattgagttcaggtttaatttctcaagttggaggtatacatatatgattaaaaaaaaaaaaaaaagatgggttttggcctgccagcaccatgagtgcaggtgaaccaatttagtacttggagtcctgttgctatatgtggcagattatttttttacttgatgact

SEQ ID NO: 458632 - DNA, 201 bp, Homo sapiens
ctctaaggcccatttcctcagttctaaattacggctagtaccttcattggagggttgttaagtctatgatacaagataactttttttttttttttttttttgagacagagtctctatcgcccaggctggagtgcaaaatggcacgatcttggctcactgcaacctccacctcatgggttcaagttgattctcctgcctcag

SEQ ID NO: 458633 - DNA, 201 bp, Homo sapiens
tctctaaggcccatttcctcagttctaaattacggctagtaccttcattggagggttgttaagtctatgatacaagataactttttttttttttttttttttgagacagagtctctatcgcccaggctggagtgcaaaatggcacgatcttggctcactgcaacctccacctcatgggttcaagttgattctcctgcctca

SEQ ID NO: 458634 - DNA, 201 bp, Homo sapiens
gtctctaaggcccatttcctcagttctaaattacggctagtaccttcattggagggttgttaagtctatgatacaagataactttttttttttttttttttttgagacagagtctctatcgcccaggctggagtgcaaaatggcacgatcttggctcactgcaacctccacctcatgggttcaagttgattctcctgcctc

SEQ ID NO: 458635 - DNA, 201 bp, Homo sapiens
atcacttgaggccagaagtttgagactgcagtgagccatgatcatgccactgcattccagcctaggcaacagagcaagatcctgtcaaaaaaaaaaaaaaaggagaaaattctcttggcagtgggtaagagtagttattagggttgtagatttcctgtctggaattagagaaagaagggtcatattttctgttattttgtg

SEQ ID NO: 458636 - DNA, 201 bp, Homo sapiens
cacttgaacccgggtggcagaggtggcagtgagccaagattgcgccattgtactccatcctgggcgacagagcaagacttcctctcaaaaaaaaaaaaaaattgataaatcttacaatgttttatagtgacagatgcccattgttatttcctaagcgcctgtcttaagtgaggccctatcttagctgagattatttcagaa

SEQ ID NO: 458637 - DNA, 201 bp, Homo sapiens
gtgagccaagattgcgccattgcactccatactgggaaataagagtgaaactctgtctcaaaaaaaaaaacaacaaaaaaacaaacaaacaaacaaacaaaaaactgaaaatattggagcctttagatagtaggttacatgtctaaaatgggagttagcaaatgtataaatgtagaagtttttttttcagggagaaattga

SEQ ID NO: 458638 - DNA, 201 bp, Homo sapiens
agtgagccaagattgcgccattgcactccatactgggaaataagagtgaaactctgtctcaaaaaaaaaaacaacaaaaaaacaaacaaacaaacaaacaaaaaactgaaaatattggagcctttagatagtaggttacatgtctaaaatgggagttagcaaatgtataaatgtagaagtttttttttcagggagaaattg

SEQ ID NO: 458639 - DNA, 201 bp, Homo sapiens
cagtgagccaagattgcgccattgcactccatactgggaaataagagtgaaactctgtctcaaaaaaaaaaacaacaaaaaaacaaacaaacaaacaaacaaaaaactgaaaatattggagcctttagatagtaggttacatgtctaaaatgggagttagcaaatgtataaatgtagaagtttttttttcagggagaaatt

SEQ ID NO: 458640 - DNA, 201 bp, Homo sapiens
gcagtgagccaagattgcgccattgcactccatactgggaaataagagtgaaactctgtctcaaaaaaaaaaacaacaaaaaaacaaacaaacaaacaaacaaaaaactgaaaatattggagcctttagatagtaggttacatgtctaaaatgggagttagcaaatgtataaatgtagaagtttttttttcagggagaaat

SEQ ID NO: 458641 - DNA, 201 bp, Homo sapiens
gtatataccaaaggcatttctttaacgttatagttggttcaactgaaaatacgttaagtctgtttttataattagtatattgaggaacagcacttccatcrtgtcacaatatattaagaattgccagcagggcacggtggctcacgcctataatcccagcactttgggaggcctaggcgggaggatcacctgaagccagga

SEQ ID NO: 458642 - DNA, 201 bp, Homo sapiens
ccgcctctcgggttcaagcaattctctgcctcagcctcccaagtagcttggactacaggcgcccgccaccacgcctggctaatgtttgtatttttggtagygacagggtttcaccacattggccaggttggtcttgaactcctgacctcaggtgattcacccacctcggcctcccaaagtgccgagattacaggcatgagc

SEQ ID NO: 458643 - DNA, 201 bp, Homo sapiens
ctctattacattcgaaaagcaaacagcccaagttccgaagtataaagtgcaaacacaaagaaaatccagttatggcagaacccccagttataaatgaggartgcagtttgaaatgctgctcttctgataccaaaggctctcctttggccagcatttctaaaagtgggaaagtggatggtctaaaactactgaacaatatgc

SEQ ID NO: 458644 - DNA, 201 bp, Homo sapiens
ctcctgagtacctgggaccacaggtgtgcaccaccatgcctgaataatttttttgtgtttttgtagagatggagtttcaccatgttggccaggctgatctygaactactgacctcaggtgatgtgcctgcctccgccttcccaagtgctgggattacaggcatgagctactgtacccggctaagtgtacagtgttcttgtg

SEQ ID NO: 458645 - DNA, 201 bp, Homo sapiens
atcccagattcaagcgatcctctcacctctgcctcatgagtagttggaaccacaggcatgtgtcaccatgcttttgtagagacagggtttctttcgccctrttggctaggctggtctcaaacttgtgagctcaagcgatccgcccaccttggcctcccaaagtgctgggattacaggcatgagttaccttgccttgcccat

SEQ ID NO: 458646 - DNA, 201 bp, Homo sapiens
tctgtccaccttggcctcccaaagtgctgggattacaggcatgagccaccctgcccagcctcaaccctccatcttaatccttttattttttttattttttwtttttttttgagatggagtttcgctcttgttacccaggctggagtgcggtggcatgatctcggctcactgcaacctctacctcctggtatcaagtgattc

SEQ ID NO: 458647 - DNA, 201 bp, Homo sapiens
catatgaatttgaggttagctttttcatttctctaaataggccattggaattttcatcgggattccactgaatctgtaaatgattttagggagtattgccrttttaacaacacagtattaaaaattccaagtaatgaacttgggatgtcttcccatttctttaggtctttaatttcctttcaataatgttttgtaattttc

SEQ ID NO: 458648 - DNA, 201 bp, Homo sapiens
tgacctcgtgatctgtccaccttggcctcccaaagtgctgggattacaggcatgagccaccctgcccagcctcaaccctccatcttaatccttttattttwtttattttttatttttttttgagatggagtttcgctcttgttacccaggctggagtgcggtggcatgatctcggctcactgcaacctctacctcctggta

SEQ ID NO: 458649 - DNA, 201 bp, Homo sapiens
tttcaccatgttgggtcaggctggtctcgaactcctgacctcaggtgatccacccacctcggcctcccgaagtgctgggattacaggtgtgagccaccacrcctggcccaatgttcagttttataagaaactaccaagctgttttccctagtgtctgtaccatttacattctcactagcagtatatgagtgatccagtttc

SEQ ID NO: 458650 - DNA, 201 bp, Homo sapiens
cttggctcactgcaacctctgcctcctgggttcaagtgattctcgtgcttcagcctcagtatgttactttattttttatttagggaaagagttggtagacktttctaccaaagtagaaaagtgccagatagtaaatattttaggttttatgagccataagttctctgtcacctaatagatgtatccagtacagaatttctc

SEQ ID NO: 458651 - DNA, 201 bp, Homo sapiens
aggcatgcttcttcatttacatattacatatggctgcttttatattacagtggcagagtcgagctacatgtggagatctatggcctgcaaagcctgaagtrtttactttctgaccctttacagaaaaagttacttaactcctgatctatagtgagatttacttagaattacatatccatgtctttgttcttaaccatgtgg

SEQ ID NO: 458652 - DNA, 201 bp, Homo sapiens
tgtctgtacaaaaaaattagcctggcatggtggtgcatgcctgtagtcacagctacttgggaggctgaggtgggaggatcacttgagcccataaggtcgargctgcagtgagctgtgattgctccattgcactccaaccagagtgttagagtgagaccctgtctcaaaaaaaataaagtacggtacttgagtgtagattag

SEQ ID NO: 458653 - DNA, 201 bp, Homo sapiens
agtagttgggaccaaaggtgcacactaccacacctggctaatttttgacaacattttttttgtagaggcggtgtcccactatgttgccctggctggtctcraattcctgggctccagtgatctttctgcctcagcctcccagagtgttgggattacaggtgtgggccaccatgcccagcttccctgatggttttttgaaaa

SEQ ID NO: 458654 - DNA, 201 bp, Homo sapiens
tgagtcagaacatgacctgttgcttaatggctgtttgaaatcactggcttttgattctgaacattctgcagatgagaaggaaaagccttgtgctaaatctygagccagaaagagctctgataatccaaaaaggactagtgtgaaaaagggccacatacaatttgaagcacataaagatgaacggaggggaaagattccaga

SEQ ID NO: 458655 - DNA, 201 bp, Homo sapiens
ttcttcctgtggaaaaaacactgcaaagaaagaatttgagacttcaaatggtgactctttattgggcttgcctgagggtgctttgatctcaaagtgttctygagagaagaataaaccccaacgaagcctggtgtgtggttcaaaagtgaagctctgctatattggagcaggtgatgaggaaaagcgaagtgattccattag

SEQ ID NO: 458656 - DNA, 201 bp, Homo sapiens
tcagcccctggcaattgccattctattttctgtctcaagaattttcttattctagatacctcatatacttgaaatcatacgatatttgttctttgtgtcttaagtaatttcccttagcatacataatgtcttcaaggttcatccactttttgtagcctttgtcagaatttcattccttttaaagtgtgttattctttttga

SEQ ID NO: 458657 - DNA, 201 bp, Homo sapiens
gtctttccatgcataattttgaggggtatggtctattttcttattttggaaataatgaaagcaaaggcttagaattcttagttatgaagaatgggacagcrgtgcacttgctgtgtttcaggtcctttacttacagtcatgtttatttcattcccccagcagcccataatggttggttttcttccataatgcatgtgaaga

SEQ ID NO: 458658 - DNA, 201 bp, Homo sapiens
ttcattcccccagcagcccataatggttggttttcttccataatgcatgtgaagaaacagagtgaggattggggaggtgatctttcacacatagatagagkagctggattgagagctgggtttttgactccaagactattaaatcatgttgcctttctagagaaagaaagattgagatagtaaagcctttaggtggttcta

SEQ ID NO: 458659 - DNA, 201 bp, Homo sapiens
tcctgggtttaagtgattctcatgcttcggcatctggtgtagctcgcattatagacatgagccaccatgcctggctagtatttttttttttttttttttttaagtagagacaggctttcaccatattggccaggctggtctcgaactcctgagccaccgcacctgccccaaaggcatgaatttcttaccagttcgttatta

SEQ ID NO: 458660 - DNA, 201 bp, Homo sapiens
gctggaattctggggcaagaggtggctggtgagtggcataagctctctgaagcagggacagtgtgaaggaaggtcatcatccacaccttcggactgtagcrtagccttggcccatgtgatatgtatctcttttttcctaaacttttgatttacttctgtgttttcagggaaatgggaatgtccgtggcatcagtgtgacat

SEQ ID NO: 458661 - DNA, 201 bp, Homo sapiens
tacgtatctgtgatgtaccaggtacctttcctgcattttatcttcatgacaatctcttttcccagagaagagaatgaggctcagagagggtagttaacccrgttaagattggtactaatgtgttcacagaatgctgactgttcaatatctgacctgtagaatcaacccattgccacggaagaaaagtcaaagaaattcaag

SEQ ID NO: 458662 - DNA, 201 bp, Homo sapiens
ctacatccctctatttgagactcatatgaatgaaattatataatatgtagacttttgttactgtttttttctattagcatgatgttttgcaggtttatccytatttagcatgtatcagcggccacataatacttcattgtatggatatttcacattttgttatccattcatcagttgatggtcatcatcccaaacaagaac

SEQ ID NO: 458663 - DNA, 201 bp, Homo sapiens
aggaagtccgccccttcctttcttaagtctttgctgtatacctttgaagggtttccctagtttatataattgcttgtgatagtttttcccctatttattgrctgttttgggggagatactggcccttgaagttcatgacgactccatttcctctgatgtcactataaacacttttgactgtggcagcctttgctaaaaata

SEQ ID NO: 458664 - DNA, 201 bp, Homo sapiens
ggatgaagcagtaatttggtagttaaatgaacattaattcaacttgctttggttagtgggaaggatattttagtgttattttcatattcacattatcctgytggtcagcattcctttttattctcctccttggtcgtcagaaaagaggttaaaaaggccgggcgcggtggctcacgcctgtaatcccagcactttgggagt

SEQ ID NO: 458665 - DNA, 201 bp, Homo sapiens
agttcggtggtgtgatctcagctcactgcaacctccacctcccaggttcaagagattctcgtgcctcagcctctgtattagttgggattataggcgcctgycaccacacccagctaattgttttgtatttctagtagagacggtgtctcactatgttccccaggctaggcttaaattcctggcctccagtgatccaattgc

SEQ ID NO: 458666 - DNA, 201 bp, Homo sapiens
ttattatataatcaatgcaccattgcccaaaatacttatctgaattttttttttttgacacggagtcttgctcttgtcacccaggctggagtgcaatggcrtgatcttggctcactgcaacccctgcctcctgggttcaagcaattcttctgcctcagcctcctgagtagctgggattacaggtgcccactacaacgcccg

SEQ ID NO: 458667 - DNA, 201 bp, Homo sapiens
agatgtgagccccactcctggctgcattaaaatattttaatagacatttgattgattgattgattgatttatgagatggagttttgctgttgttgcctagrctggagtgcaatggcgggatctcggctcaccacaacctccgcctcccgggttcaagtgattctcctgcctcagcctcctgagtagctgggattacaggca

SEQ ID NO: 458668 - DNA, 201 bp, Homo sapiens
ctgtgattataattttgttatgtgtcctggtatctcttgtttttctttttattatttatttatttattttatttatttgtttattttgagatggagtctcrctctgttgcccaggctagagtgcagtgacatgatctcagctcactgcatcctccgcctcccgggttcaagcgattctcctgcctcagcctcccaagtagc

SEQ ID NO: 458669 - DNA, 201 bp, Homo sapiens
gtctgataacagtgtccttgaaattccagatgctttcgatagaacagagaacatgttatctatgcagaaaaatgaaaagataaagtattctaggtttgctrccacaaacactagggtaaaagcaaaacagaagcctctcattagtaactcacatacagaccacttaatgggttgtactaagagtgcagagcctggaaccga

SEQ ID NO: 458670 - DNA, 201 bp, Homo sapiens
atatccattaacataagattctcaaaactgtgtatcatagtagatttttctctaacagctttattgaaaatgcagttatcatatcataaaattcagctttyaacgtttttaattgagtggtttgtagtatagtcacagagttgtgcaacaatcagtgcgatcaattgtggaatatttgcatcatcccagacagaaacacag

SEQ ID NO: 458671 - DNA, 201 bp, Homo sapiens
ttaggctgaggcaggagaatagcttgtgcccaggaggcagaggttgctttgagctgagatcgcaccacggcattccagcctggaggacagagcgagactcygtctctaaataaataaataaataaataaatgtatactaactgcattagcaagactccgtctctaaataaataagtgaataaataaatgtatactaattgc

SEQ ID NO: 458672 - DNA, 201 bp, Homo sapiens
accccagtcagattttacaaatgatgctctctctccaaaattcaacctgtcatcaagcatatccagtgagaactcgttaataaagggtggggcagcaaatyaagctctattacattcgaaaagcaaacagcccaagttccgaagtataaagtgcaaacacaaagaaaatccagttatggcagaacccccagttataaatga

SEQ ID NO: 458673 - DNA, 201 bp, Homo sapiens
tcttcttttggcttctcaggaatccatacctgttttgtatgtaagcagagtggggaagatgttaaaaggtgccttctacccttgtgtggaaagttttaccwtgaagagtgtgtccagaagtacccacccactgttatgcagaacaagggcttccggtgctccctccacatctgtataacctgtcatgctgctaatccagcc

SEQ ID NO: 458674 - DNA, 201 bp, Homo sapiens
aaaaggtgccttctacccttgtgtggaaagttttaccatgaagagtgtgtccagaagtacccacccactgttatgcagaacaagggcttccggtgctcccyccacatctgtataacctgtcatgctgctaatccagccaatgtttctgcatctaaaggtatggatttcttatgtggaccagtctaattgtaaaacctcagt

SEQ ID NO: 458675 - DNA, 201 bp, Homo sapiens
atatttttgtttttcttttgcttgtccctgattttcctgctttaggtcggttgatgcgctgtgtccgctgtcctgtggcataccacgccaatgacttttgsctggctgctgggtcaaagatccttgcatctaatagtatcatctgccctaatcactttacccctaggcggggctgccgaaatcatgagcatgttaatgtta

SEQ ID NO: 458676 - DNA, 201 bp, Homo sapiens
gttttccttctccttttcacctttcccaggtggtggccagctgagatctgccatcctcgagctgttccttccaacattgataagatgagacatgatgtggkagagttcccagtcctcttttttggatctaatgactatttgtggactcaccaggcccgagtcttcccttacatggagggtgacgtgagcagcaaggataag

SEQ ID NO: 458677 - DNA, 201 bp, Homo sapiens
aataccccgttgcaactgtaaagctactgatgagaacccctgtgggatagactctgaatgcatcaaccgcatgctgctctatgagtgccaccccacagtgygtcctgccggagggcgctgtcaaaaccagtgcttttccaagcgccaatatccagaggttgaaattttccgcacattacagcggggttggggtctacggac

SEQ ID NO: 458678 - DNA, 201 bp, Homo sapiens
tggtcacagaagatttggacaaatgttgtcacaaaaggttatgcttaattttccgtaatttatttcggcagtgagtaggaagaaaatttgaatgcgtataygttacagacagtctttttgaggctggggacgtggctcacacctgtaatctcagcactctgtgaggccagtgcaggaggatcgcttgaacccttgagtttg

SEQ ID NO: 458679 - DNA, 201 bp, Homo sapiens
cattaaatagtaattcctaatagttccctattcctactccttggtaacctaaattctttctctccctttgaatttgcctgttttattttagataatataaktagtatcatataatatttatctgtttatatctggcttattaacataaagtggagccaattttagcacatttttgtcacttcaaaatgaaaccttcttgct

SEQ ID NO: 458680 - DNA, 201 bp, Homo sapiens
aaatagaaactccaacttattagagagaatagtcaaattttaatccacagcagaggtctcaggaagtctgatgtgtagcttcttttggaattctaggaccraatcattgatgctggtcccaaaggaaactatgctcggttcatgaatcattgctgccagcccaactgtgaaacacagaagtggtctgtgaatggagatacc

SEQ ID NO: 458681 - DNA, 201 bp, Homo sapiens
acttctgtgttttcagggaaatgggaatgtccgtggcatcagtgtgacatctgcgggaaggaagcagcctccttctgtgagatgtgccccagctccttttstaagcagcatcgagaagggatgcttttcatttccaaactggatgggcgtctgtcttgtactgagcatgacccctgtgggcccaatcctctggaacctggg

SEQ ID NO: 458682 - DNA, 201 bp, Homo sapiens
ttagatcagttgataagaaacaatgattaaaacatatattttccagcctgggcaacatagcaaaacccagtctctacaaaaaatacaaagaaaaaaaaaaatttggggtgcctgttgtcccagctacctgaatcacctgagcctggaaagtcaacgctgcagtgagctgtgattgcactactgcactccagtctgggggac

SEQ ID NO: 458683 - DNA, 201 bp, Homo sapiens
gtttacctgtcaagcttaggctctttttcttatgttgtactgcatctcacagagagatagaggtctgtggtttttgttttgttttgtttttttgttttttkgttttgtttttctgagacagtctccttctgtggcccaggctggagttcggtggtgtgatctcagctcactgcaacctccacctcccaggttcaagagatt

SEQ ID NO: 458684 - DNA, 201 bp, Homo sapiens
aactttccaggatagcaaatagcctcacagggtccaacactgccccaggaagttttctgttttcttcctgtggaaaaaacactgcaaagaaagaatttgaracttcaaatggtgactctttattgggcttgcctgagggtgctttgatctcaaagtgttctcgagagaagaataaaccccaacgaagcctggtgtgtggtt

SEQ ID NO: 458685 - DNA, 201 bp, Homo sapiens
tctactaaaaatacaaaaactagctgggcgtggtggcaggcgcctgtaatcccagctactcaggaggctgaagcaggagaatagcttgaacccaggaggcrgaggctgcagtgagccgggatctcaccaccttactccagcctgggcaacagagtgagactccgtctcaaagaaagaaaaagaaaaaagaaaaaaaaacag

SEQ ID NO: 458686 - DNA, 201 bp, Homo sapiens
attggtgacatggaaaaggagccaggaattcccagtttgacaccacaggctgagctccctgaaccaggtaaggacatctaaatgtgataaaaaaaaaaaaattggagaaagtgctgataaacattgtccttctgaaattggtctgttgtaatggtaaagtgaagtataaactaggggggaagaatcatcacttcaatgaag

SEQ ID NO: 458687 - DNA, 201 bp, Homo sapiens
gagctctatctcctccaccttccccttggtgatggtcaccaagtggtctaacttgttggctttgacaatcttcaccgcataatcagagctactggaacacwcgatgccgatgaccttgcgggcccggccttggcggcgaacatgcagaggatgcttgtgtccgagcccacatccagcaccaccttgtctttaaagaggtgg

SEQ ID NO: 458688 - DNA, 201 bp, Homo sapiens
aatttgcatgtctaacaaattgccaaatggtgatggtgctggtccagggatcacactttgagaaccaaagttctttgggatcttttctctgagaggttcartctttacaaatagaaactccaacttattagagagaatagtcaaattttaatccacagcagaggtctcaggaagtctgatgtgtagcttcttttggaattc

SEQ ID NO: 458689 - DNA, 201 bp, Homo sapiens
agtttccagagcatagaactccttcagcaagcatacttgaggaaccactgacagagcaaaatcatgctgactgcttagattcagctgggccacggttaaaygtttgtgataaatccagtgccagcattggtgacatggaaaaggagccaggaattcccagtttgacaccacaggctgagctccctgaaccaggtaaggaca

SEQ ID NO: 458690 - DNA, 201 bp, Homo sapiens
taattctttttctcctttaaatttaaggttcctcagaaaattttgagtaaatgggaagccagtgttggacttgcagaacagtatgatgttcccaaggggtsaaagaaccgaaaatgtattcctggttcaatcaagttggacagtgaagaagatatgccatttgaagactgcacaaatgatcctgagtcagaacatgacctg

SEQ ID NO: 458691 - DNA, 201 bp, Homo sapiens
caataccttctttttctttcctctttcttaagatatcactaaagaagccgaacacggtggtgcatgcctgtagtcccagctattcaggtggccaaggtgggaggattgcttgagcccaggaattcaagaccagcctgggcaatatagcgagactgacctcataaacaaaacaaaacaaaaaacaaccaaaaaaatagatac

SEQ ID NO: 458692 - DNA, 201 bp, Homo sapiens
cagaccttcaagatcgtgtctccagtgttttatacttgcttttttatttttaaactcctttcctcaggtgtagtagacggtcttttatactttttttaaaygacaatgcagtactttgggtaatgccgtaagaaatctaaagtgtgacagtttcagtatttcatcgtgcttatatgtgattccattgtgcttcccttgtct

SEQ ID NO: 458693 - DNA, 201 bp, Homo sapiens
ggtgaggagaaaatcttgggggaccttctctagaagagaaatggaatagctggctcttcccactctgttcatgacaagaacggaagcacaagcatagttcrttttaggtagaggtatgagcttaaaagaagatcagaaatagccgggcacggtggctcacgcttgtaatcccagcactttgggaggccgaggcgggcggat

SEQ ID NO: 458694 - DNA, 201 bp, Homo sapiens
tctgcctgcctcggcctcccaaagtgctgggattacaggtgtgagccactgcgcccggccggccatttttatatctctggtttcagtgtgatatcattcaraaatgcatgccaaggcaggattgggggtttcgtgttgatttgttttttgtttgtttgtttttttaatgaaaactcttgtcctagaaattttcttctgctt

SEQ ID NO: 458695 - DNA, 201 bp, Homo sapiens
cttccctgggccacactggaagaagaattgtcttggaccaaacataaaatacactaacagtaacaataactgatgagctaaaaaaaaaaaaaaaaaaaaaagtccatgcataatttttatgatatccgccaccacagataagcaaaaaagttctcgtattcagatggatggatgccagtgatctaaagggtgatagtctgt

SEQ ID NO: 458696 - DNA, 201 bp, Homo sapiens
ctcccttttcttactatttctgtcttctttagcatagttgtgaattattgatgagttagtaataatgtgtaatgatgaattagtaagttgttacaagatakaggaaaagtaagaacactaaaattccataccgtgtcttagatttagtctgatggacttacatggtatttacaagacagaatcagttttgttctttgtttg

SEQ ID NO: 458697 - DNA, 201 bp, Homo sapiens
ggatggtctcgatctcctgacctcgtgatcggcctgccttagcctcccaaagtgctgggattacaggcgtgagccactgcgcccggcctcccttttcttaytatttctgtcttctttagcatagttgtgaattattgatgagttagtaataatgtgtaatgatgaattagtaagttgttacaagatataggaaaagtaaga

SEQ ID NO: 458698 - DNA, 201 bp, Homo sapiens
cgccaggtaaggtggggttggggtctcagtatttgagcagatatgattagaggaagcaggagattttagtatgttttgatgtaaagccaacattgtatctrtatacaataaactacccccttttgtcctgggaaatacttaaaatgatggttaattagatatagttactaaccatgaactgtggcacactatcaagaagat

SEQ ID NO: 458699 - DNA, 201 bp, Homo sapiens
tacaggcgtgagccaccgtgcctggcctctttttttgtttttttaagtaaagatgaggtctcacttatattgccaagtatggtcctgaagtcctaggcccragcagtcttcctgccttggcttccgaaagtgctgggattacaggtgtgaacccccacaaccagcctcagttaaggggtaaaatttttttgtttgtttttt

SEQ ID NO: 458700 - DNA, 201 bp, Homo sapiens
accaggataacagggcttcaagaggagtactgcacattagtggaataagcactatgcttcaagtgctggctccaccaatccttgtgttacttgggaagttrtttaatctctgaacttgtttcctcatctataaatggagatcataatgtattaatgtgtaatgttatatacctgacaacatagtaattaccagttcattag

SEQ ID NO: 458701 - DNA, 201 bp, Homo sapiens
gttttggtttgcttttggtttacgatgtgataagtacaaaacttatttttggattaataacaggttagatcagttgataagaaacaatgattaaaacatawattttccagcctgggcaacatagcaaaacccagtctctacaaaaaatacaaagaaaaaaaaaaatttggggtgcctgttgtcccagctacctgaatcacc

SEQ ID NO: 458702 - DNA, 201 bp, Homo sapiens
tggcagtgagacctacatccattttccccacggacagcatcttgctggagtgtcttgcaggtctatacgatcctcccactgcagcttcctgagtagctggracctcaagcacttgccaccatgcccggctaagctttataatttttttgtagacatagggtttcattgtgttgcctggtctggtcttgaacttctgggctc

SEQ ID NO: 458703 - DNA, 201 bp, Homo sapiens
gggtttcactgttgttagccaggttggtctcgatctcctgacctcgtgatccgcccgccttagcctcccaaagtgctgggattacaggcgtgagccaccaygcccggcccttatattattattttttaaagtccttgctgatcatttttagtgactgtcttaatttttttatataatggatggacatactagatgaacatc

SEQ ID NO: 458704 - DNA, 201 bp, Homo sapiens
cagtttctttatctgcaaaatcgagataatgctgtcttgtaaggttgtgaggggtaagcaaaataatgtatgtgtattagttttggggggctgttgtaatrcaataccacaaactagctggcttaaacagcagaaattctctctcagttcgggaagctagaagtacaaactcaagttgtcagcacattgttttgaggactg

SEQ ID NO: 458705 - DNA, 201 bp, Homo sapiens
aagatatgacatcttagcatatttcatagagttgtaatagcataattttttttggttatatagatgagaggtttctgtgttggccaggctggccttgaacrcccagcctcgcctccttatgcaccaggacaacaggcctgagccaccacggctcctagcataatttttttaaacagatctcttggtggatattaacttttg

SEQ ID NO: 458706 - DNA, 201 bp, Homo sapiens
aactcaggaaatgagaaattttaaaaatgacattttgagtagcagttataacattgatgtacatacatatagaaattagtgtgtgtgtcagcagtcatacrtgatctgagatttcctacatgaaaggctgttttgcagttgtgtgaccatgtatgtgtataaactggtttcaggtttcctttccaagtgaaaaaaattttt

SEQ ID NO: 458707 - DNA, 201 bp, Homo sapiens
ttgagacaggctaggtgctttggatgtggagaattaaatgagcatggcattttcagaggatacttgttggagattgcttgggtaggatggatgtagtcagstaatggggcctagaaattcagactgaagcatttggtattgatgtgatgggaactggcagcccttgagagattttagctgagaagtgatgtaaaatctgtt

SEQ ID NO: 458708 - DNA, 201 bp, Homo sapiens
gcttatagtaagttcagttatgctttgttgaatgaacgagaaataggcatgtgtacccacacacagaagtctagtttagttctgaaagtagacgaatataraagtgaaactttggccaggtgcggtggctcacgcctgtaatcctagcactttaggaggccaaagcgggtgggtcacaaggtcaggagttcgagaccagct

SEQ ID NO: 458709 - DNA, 201 bp, Homo sapiens
tatatatacgttgtttgtaccttgatttttttgtttcactctcatatccatgcataatgagtttctcattttttaagcagcagagtgtgccatagtttttygtttttgtttttgagacagggtctcactttgttgcttaggctggagtgtggtggcacaatcttggctcactgcaacctttgcctccggggctcaagcaat

SEQ ID NO: 458710 - DNA, 201 bp, Homo sapiens
ctcttgtcaatctgccttcaggtttttttttctttttttttcttgagacggagtctcgctctgttacccaggctggagtgccgtggcgtgatctcggctcmctgcaggctccgcctcccgggttcacgccattctcctgcctcagcctcctgagtagctgggactacaggcgcccgccaccacacccagctaatttttttt

SEQ ID NO: 458711 - DNA, 201 bp, Homo sapiens
cagaagcccttttccccaaccttttcaagtaaatctctataacatctttctttctcactttctctctctctctttctctctctctctttttttttttttttctaattttttttttcttttgagacagggtctcactgtgttgcccaggctggtctcaaactcctgagttcacgccatctgccagcctttgcctcctaaagt

SEQ ID NO: 458712 - DNA, 201 bp, Homo sapiens
cttacccttacctagtttccaaccggaggccctatcggcagtactacgtggaggcttttggagatccttctgagagagcctgggtggctggaaaagcaatygtcatgtttgaaggcagacatcaattcgaagagctacctgtccttaggagaagagggaaacagaaagaaaaaggatataggcataaggtaggaaacgaaa

SEQ ID NO: 458713 - DNA, 201 bp, Homo sapiens
ccagaagcccttttccccaaccttttcaagtaaatctctataacatctttctttctcactttctctctctctctttctctctctctctttttttttttttttctaattttttttttcttttgagacagggtctcactgtgttgcccaggctggtctcaaactcctgagttcacgccatctgccagcctttgcctcctaaag

SEQ ID NO: 458714 - DNA, 201 bp, Homo sapiens
ctctgcctcttggactcatgtgattctcctgcctcagccccccaagtagctggaactacaggcaagggccaccatgcccagctaatttttaaatttttttrtagacagggtctccctgtattgcccatgcttgtcttgaactactgggctcaaacagtcttcttgccttggcctcaaaaagtgtttggattataggcgtga

SEQ ID NO: 458715 - DNA, 201 bp, Homo sapiens
gaggtgtttattggggctttcagattctggaaaattgatttactctggtcacagtcatgagcattagtggatatgtgtttctgtgcttaaaaaaaaaaaaatacacactaccagattgtccgtttgatcctttctttaagaggaggctactcctctagttaccctaattttttttttttctttttgagatggagtctcact

SEQ ID NO: 458716 - DNA, 201 bp, Homo sapiens
gatggtctcgatttcctgacctcgtgatctgcccgcctcggcctcccaaagtgctgggattacaggcatgagccactgcacccagccttttttttttttttcttttttttttttgaagagtctctctgtcgccgaggctaaagtacggtggctcttggctcgctgcaacctccgcctccagggttcaagcgattctcctgt

SEQ ID NO: 458717 - DNA, 201 bp, Homo sapiens
agggtttcactgttgttagccaggttggtctcgatctcctgacctcgtgatccgcccgccttagcctcccaaagtgctgggattacaggcgtgagccaccrcgcccggcccttatattattattttttaaagtccttgctgatcatttttagtgactgtcttaatttttttatataatggatggacatactagatgaacat

SEQ ID NO: 458718 - DNA, 201 bp, Homo sapiens
accaagagttcgaaagcagcctggggaacacagggagacctgtgttctgggtgtggtggtgtgtgcctttagtcccagctattcgagtggctgaaatcaaygcgccactgcaccccagcctgggtgacagactgaggctgtgtctcaaaaaacaaaccaacaatcaaaaagaaaatgggaggttttaaatctagttagctt

SEQ ID NO: 458719 - DNA, 201 bp, Homo sapiens
cagtcatattataatagcatcaattaaatgaaaagatatgattaaagcccttgcacagtgagaaaataagtttaaatggtctctggtctcatttttaatcmtctgtagggctgactttttctgcagcctgcctcattttgtttgattttcttctaaaaattatctttgttattacccactttccctgcaagatgacttcct

SEQ ID NO: 458720 - DNA, 201 bp, Homo sapiens
cagggtttcactgttgttagccaggttggtctcgatctcctgacctcgtgatccgcccgccttagcctcccaaagtgctgggattacaggcgtgagccacyacgcccggcccttatattattattttttaaagtccttgctgatcatttttagtgactgtcttaatttttttatataatggatggacatactagatgaaca

SEQ ID NO: 458721 - DNA, 201 bp, Homo sapiens
tcaaaaaaacaaaaccaaatatatatttgcttttttgtttgtttttttgagacagagaccaaatatatattatatatatatataatatatatttgttttttattataatatatatacattatatattatatattatatatattttatatataatatataatatattttatatatttatatattatatatgtatattatata

SEQ ID NO: 458722 - DNA, 201 bp, Homo sapiens
caccatgcccggctaattttttatatttttagtagaaacagggtttcactgttgttagccaggttggtctcgatctcctgacctcgtgatccgcccgcctyagcctcccaaagtgctgggattacaggcgtgagccaccacgcccggcccttatattattattttttaaagtccttgctgatcatttttagtgactgtctt

SEQ ID NO: 458723 - DNA, 201 bp, Homo sapiens
gtgctagattggttatagttaaatttgtcataaagcatataataataatgaggttttgttgttattggataacaggagagtggtttaagaatttaggctcyggagttgtatctccccaggtttgaatccttggttctgtcacttaataactatgtaaccacaggcatgtagtaaaataatgggtaataatgtgtttacttg

SEQ ID NO: 458724 - DNA, 201 bp, Homo sapiens
atgagagcgagactgtctcaaaaaaacaaaaccaaatatatatttgcttttttgtttgtttttttgagacagagaccaaatatatattatatatatatataatatatatttgttttttattataatatatatacattatatattatatattatatatattttatatataatatataatatattttatatatttatatatta

SEQ ID NO: 458725 - DNA, 201 bp, Homo sapiens
ggagtgcagtggcgcaatctcggctcactgcaagctccgtctcccgggttcacgccattctcctgcctcagcctcctgagtagctggaactacaggcgccygccaccatgcccggctaattttttatatttttagtagaaacagggtttcactgttgttagccaggttggtctcgatctcctgacctcgtgatccgcccgc

SEQ ID NO: 458726 - DNA, 201 bp, Homo sapiens
aaccattctgtttttcactttcaatgtagtattcagtaaattacaggagatattcagcagttaattttaaaataggctttgtgtcagaaatattgcacaastgtagaccaatgtaagtgttctgagcatgtttagcgtaggctaggtgtattaaatgcattttctaattattattttttttttagaggcagggtcttgctt

SEQ ID NO: 458727 - DNA, 201 bp, Homo sapiens
gatgagagcgagactgtctcaaaaaaacaaaaccaaatatatatttgcttttttgtttgtttttttgagacagagaccaaatatatattatatatatatataatatatatttgttttttattataatatatatacattatatattatatattatatatattttatatataatatataatatattttatatatttatatatt

SEQ ID NO: 458728 - DNA, 201 bp, Homo sapiens
tcttcctgtggaaaaaacactgcaaagaaagaatttgagacttcaaatggtgactctttattgggcttgcctgagggtgctttgatctcaaagtgttctckagagaagaataaaccccaacgaagcctggtgtgtggttcaaaagtgaagctctgctatattggagcaggtgatgaggaaaagcgaagtgattccattagt

SEQ ID NO: 458729 - DNA, 201 bp, Homo sapiens
tacttcatttgtctcctcccacttataattgagtggttttttttaagaaataagtgtttatttttgcagttgtcatgccttttgtactgtaatcatttatrtatgacttatctgtcagacagtgagttcttttttctcctcacgttgctggcacatcagaagttcttgatctgttaatgaaatttatttatttatttattt

SEQ ID NO: 458730 - DNA, 201 bp, Homo sapiens
ccagttccagttcctgtaggtgatttttattgaaggatttaattcagtaggtgggaaataaggagttcattttttttttcagtttgtttttaaaatgaacyagacaacacaaaatttaactaagttttagtttcattattaagctatgttttttaatagaaaaactaccatgtgtacacttttgaaaccagcatttacaga

SEQ ID NO: 458731 - DNA, 201 bp, Homo sapiens
gtatgtgttgttaggatgaaagaggttaacggcttcctttcagatatttcagctggttgctgatagggatgtgtcggttattttgttaagtctttaggtaygtagagttaccaatctttttagaggtgtttattggggctttcagattctggaaaattgatttactctggtcacagtcatgagcattagtggatatgtgtt

SEQ ID NO: 458732 - DNA, 201 bp, Homo sapiens
acacttcagtttgctagacagaggctcagatctctagcagagctacatttgctccaaggagtcttgtcttgtcttgtcttgtcttgtcttgtcttgtcttbagctcgttgggaagaagtaaaattcaccagatattgtagaacaaactagtaaaggtcaaagcataaatgctctgaatcaaaataaagttttgtaaactgg

SEQ ID NO: 458733 - DNA, 201 bp, Homo sapiens
aacctaactttatgatttacaattataggaataatacatgttctctgtcgaaatttttttttcttttgtgtattttgtgaaaagtttttttttttttttttaaatgaaaagacagtaataatctcacaaggcaggcgcattgttaacatttcggcatatgtactcccagacgtaccaatacgcagttatgccccccaccat

SEQ ID NO: 458734 - DNA, 201 bp, Homo sapiens
tttagtagagatggggtttcaccgtgttagccaggatggtcttgatctcctgacctcgtgatctgcccgcctccgcctcccaaagtgctgggattacaggygtgagccaccgcgcccagctgtggtgtataatttatttttttttctttttttggtgggagtcagtaccctttttgtttttgtaaagtatgcatgatttta

SEQ ID NO: 458735 - DNA, 201 bp, Homo sapiens
ttcagcctcccaagtagctgagattacaggcttgcgccaccacgccctgctaatttttgtatttttagtagagacagggtttcactatgttggccaggctrgtctcgacctcctaacctaaggtgaccccccgccattcccccgaccttggcctctcaaaatgctaggattacaggcgtgagccactgtgcccggcctcgt

SEQ ID NO: 458736 - DNA, 201 bp, Homo sapiens
aaacttgtagttagtccaggggcttgattaggtttaatttcagttttttctttttttggcgggggtgccagcggcaagcattttctgtagacaatatgtaytttctgttgtatcacgtcagggagtatctattaccagattgttcatttataataatactaagattgttacagtgggttcagacgatgtcaaaccgatcag

SEQ ID NO: 458737 - DNA, 201 bp, Homo sapiens
caccacgccctgctaatttttgtatttttagtagagacagggtttcactatgttggccaggctggtctcgacctcctaacctaaggtgaccccccgccatycccccgaccttggcctctcaaaatgctaggattacaggcgtgagccactgtgcccggcctcgttaccgtaattatttattttttaatttatttattttta

SEQ ID NO: 458738 - DNA, 201 bp, Homo sapiens
ctgccacaaacactagggtaaaagcaaaacagaagcctctcattagtaactcacatacagaccacttaatgggttgtactaagagtgcagagcctggaacygagacgtctcaggttaatctctctgatctgaaggcatctactcttgttcacaaaccccagtcagattttacaaatgatgctctctctccaaaattcaacc

SEQ ID NO: 458739 - DNA, 201 bp, Homo sapiens
aacgcagaatgctgcaccccagagtctctgctttagtgtatttgaagcacaacccaggaatttgcatgtctaacaaattgccaaatggtgatggtgctggkccagggatcacactttgagaaccaaagttctttgggatcttttctctgagaggttcagtctttacaaatagaaactccaacttattagagagaatagtca

SEQ ID NO: 458740 - DNA, 201 bp, Homo sapiens
ttcagttttttctttttttggcgggggtgccagcggcaagcattttctgtagacaatatgtactttctgttgtatcacgtcagggagtatctattaccagrttgttcatttataataatactaagattgttacagtgggttcagacgatgtcaaaccgatcagtccattataaaatttcttatgaacttttcacctaatgg

SEQ ID NO: 458741 - DNA, 201 bp, Homo sapiens
cctaacgtagctgctggtattgtgaacatacttgataaagaaatagtgataagaatgatttcctttaacattcgatgaaaaactatgtatagcagtctcastgataaaaggcatgtcagtctgcaaagggaaatcttcctaagaattgacagtttttaatatgaatgatggttaccttatacattaactgtaaacattacc

SEQ ID NO: 458742 - DNA, 201 bp, Homo sapiens
gtgtgaacccgggaggtggagcttgcagtgagtggagatcgcgccaccgcactccagcctgggtgacagagtgagactccgtctcaaaaaaaaaaaaaaaattagctggtcatagtggtatgcacttttagtcccagttacttgggaggccaatgctagaggaccgctggaacccaggaggcagaggctacagtgagttgt

SEQ ID NO: 458743 - DNA, 201 bp, Homo sapiens
gcattgaatgctacagagaaatcaggaaaggaagagtcaatcgtcaatccatgtgggaaacttcattatgggtttttttttggttttttttttttttttttggcaggttctcaccttgtcacccaggctggagcgcattggcacaatctcatctcactgcaacctccaactcgcgggttcaagtgattctcctgcctcagc

SEQ ID NO: 458744 - DNA, 201 bp, Homo sapiens
ataaaatactatcaaatggcattgaatgctacagagaaatcaggaaaggaagagtcaatcgtcaatccatgtgggaaacttcattatgggtttttttttgkttttttttttttttttttggcaggttctcaccttgtcacccaggctggagcgcattggcacaatctcatctcactgcaacctccaactcgcgggttcaag

SEQ ID NO: 458745 - DNA, 201 bp, Homo sapiens
gccactgcactccatcctcggtgacagtgacagagcaagactgtctccagaaaacacccaaaaagagagaaagaagctctactgtgcataaaatactatcmaatggcattgaatgctacagagaaatcaggaaaggaagagtcaatcgtcaatccatgtgggaaacttcattatgggtttttttttggttttttttttttt

SEQ ID NO: 458746 - DNA, 201 bp, Homo sapiens
aagtaggggtaaagtagacccaagagatgtttctttgagctgagttatgaagtataagtagctattagccagataggaaaatgaagcgtgccttagattgwaaagtatgatcaagtgcatggaggtgtgatagcataagatttatgtgaactacaaagtgtaaatcgtgtgatggaacttggtcatagtttttcctagggt

SEQ ID NO: 458747 - DNA, 201 bp, Homo sapiens
agaagttattatataatcaatgcaccattgcccaaaatacttatctgaattttttttttttgacacggagtcttgctcttgtcacccaggctggagtgcartggcgtgatcttggctcactgcaacccctgcctcctgggttcaagcaattcttctgcctcagcctcctgagtagctgggattacaggtgcccactacaac

SEQ ID NO: 458748 - DNA, 201 bp, Homo sapiens
ggagtgcagtggcgcgatctctgctcactgcaagctccacatctcgggttcacgccattctcctgcctcagcctcccgagtagctgggactacaggcgccygccaccacgcccggctaatttttttttgtatttttagtagagatggggtttcaccgtgttagccaggatggtcttgatctcctgacctcgtgatctgccc

SEQ ID NO: 458749 - DNA, 201 bp, Homo sapiens
agccactgcacccggccagaagttattatataatcaatgcaccattgcccaaaatacttatctgaattttttttttttgacacggagtcttgctcttgtcrcccaggctggagtgcaatggcgtgatcttggctcactgcaacccctgcctcctgggttcaagcaattcttctgcctcagcctcctgagtagctgggatta

SEQ ID NO: 458750 - DNA, 201 bp, Homo sapiens
ctgcaattacttctgtaccaacctaatagtttgcttagtgtttttatcatgaaaaggtattagatttttaaaatgttttttctgtctgttgaggttatcatgtgttattttgctttgttgtattattgtggtgtataattttttttgagacggggtcttgctctgtcgcccaggctggagtgcagtggcgcgatctctgct

SEQ ID NO: 458751 - DNA, 201 bp, Homo sapiens
actgcaattacttctgtaccaacctaatagtttgcttagtgtttttatcatgaaaaggtattagatttttaaaatgttttttctgtctgttgaggttatcatgtgttattttgctttgttgtattattgtggtgtataattttttttgagacggggtcttgctctgtcgcccaggctggagtgcagtggcgcgatctctgc

SEQ ID NO: 458752 - DNA, 201 bp, Homo sapiens
tctactaaaaatacaaaattagccaggcttggtggcgcatgcctgtaatcccagctacttgggaggctgaggcaggagaatcgcttgaacctgggaggcaraggttgcggtgagccgagatcgcgccattgcactccagcctgggcaacaagagcaaaactctatctcaaaaaaaaaaaaatatatttgtgaggctttatt

SEQ ID NO: 458753 - DNA, 201 bp, Homo sapiens
gcttgtctggatcagtctttgtgtaggtcccttgtgctgtcacaatttattaatagcacttcttttcactctcaggtgtcccggtttgaaagataaattaygtggttatcccagttgaataattagtctataacatttagttaatgcaaaaactttatttctaattcacgttgtaattaacgttttcctatttaagtgctg

SEQ ID NO: 458754 - DNA, 201 bp, Homo sapiens
ggggaggctgtgacaggaggatcacttgaattggactggaggctgcagtgagtgaaaatggtaccactgcactccagcctgggtaatagagtgagatgctrtctgaaaaaaaaaaaaagttttagtttttttgggtggggggattttaacttcacctattttttttgttgttgctcagttttgttgttcaatctatgaatc

SEQ ID NO: 458755 - DNA, 201 bp, Homo sapiens
gactggtctcgaactcctgacctcaggtgatccgcctgcctcggcctcccaaagtgctgggattacaggtgtgaaccactgcacccggccgaatatatttwtttttttttaaatggagtctcgctctgtggcccaggctggaatgcagcggtgtgatcttagctcactgcaacctctgcctccctggctcaagcgattctc

SEQ ID NO: 458756 - DNA, 201 bp, Homo sapiens
caaatgatcctgagtcagaacatgacctgttgcttaatggctgtttgaaatcactggcttttgattctgaacattctgcagatgagaaggaaaagccttgygctaaatctcgagccagaaagagctctgataatccaaaaaggactagtgtgaaaaagggccacatacaatttgaagcacataaagatgaacggaggggaa

SEQ ID NO: 458757 - DNA, 201 bp, Homo sapiens
cctcagcctcctgagtagctgggactacaggcgcccgccaccacacccagctaatttttttttgtatttttagtagagacggggtttcactgtgttagccrggatggtctctgatctcctgaccttgtgatccgcccgcctccacctcccaaagtgctgggattacaggcgtgagccactgtgcccagccctgccttcagt

SEQ ID NO: 458758 - DNA, 201 bp, Homo sapiens
attatctggctgcaaatacagtattttgcaaggaagttgacccatgtaactcattatttttgagccttaacctttacttaatttgaatttccttgagcttktttttgacttatcagttgttttgtcagcattccatcaaataatggagttctgaaactatttcatagaagaaacacttcagtttgctagacagaggctcag

SEQ ID NO: 458759 - DNA, 201 bp, Homo sapiens
gagactggtctcgaactcctgacctcaggtgatccgcctgcctcggcctcccaaagtgctgggattacaggtgtgaaccactgcacccggccgaatatatwtttttttttttaaatggagtctcgctctgtggcccaggctggaatgcagcggtgtgatcttagctcactgcaacctctgcctccctggctcaagcgattc

SEQ ID NO: 458760 - DNA, 201 bp, Homo sapiens
attattttgagacagagtctcgttctgtcacccaggctggagtacagtggcatgatctcggcttgctgcaacctctgcctcctgggttcaagcgattcttstgcctcagcctcccaagtagctgggactacaggcatccgccaccacgcccggctaatttttgtatttttagtagagacaaagtttcaccatgttggccag

SEQ ID NO: 458761 - DNA, 201 bp, Homo sapiens
ctgcacccagtgatgttcatttcttttggataaatacctagaatggcattggtggaacatagggtaattctacttttatttttatttttttttgagacaarggtctccctctgtcacccaggctggagtataatgatgcgatctcaagtcactgcaacctctgcctcctgggctcaagcaattcttgtgccccagcctccc

SEQ ID NO: 458762 - DNA, 201 bp, Homo sapiens
agggtactctggcttaatgtatatccacactagactatatatacaaagtaagttactggcatcttagtcacatcctctaagaagttctttggtctttttcrttctaaacagaatagtttgatttttattcatatggtatgattgttgtgtgtgtgcatgtgtgtgtgtgtgtgctgttaatttttattttaagttataaaa

SEQ ID NO: 458763 - DNA, 201 bp, Homo sapiens
acacatatatatatacacacacatatatacacacatatatatgaatgattttatatatatatatatatatatatatatgaatgatatatatatatatatatgaatgaatgaatgagatggagtctcactctgtcacccaggcaggagtgcagtggtgccattttggcttatggcagcctccgcctccggggttcaagtgat

SEQ ID NO: 458764 - DNA, 201 bp, Homo sapiens
aggtattactcagttcctgatcttttcaccttctaaagagaagctacttttcacgccagaggccacatccctctttcccttgagttttcttaagaatactrttctactgaaatggctgatggccataaggaatcttggaggaaaagtagagccttatcctaataataaggcaaggcatgtattgcagctgtcaatatggtc

SEQ ID NO: 458765 - DNA, 201 bp, Homo sapiens
cacacatatatatatacacacacatatatacacacatatatatgaatgattttatatatatatatatatatatatatatgaatgatatatatatatatatatgaatgaatgaatgagatggagtctcactctgtcacccaggcaggagtgcagtggtgccattttggcttatggcagcctccgcctccggggttcaagtga

SEQ ID NO: 458766 - DNA, 201 bp, Homo sapiens
cagctactcaagaggctgaggcaggagaatcgcctgaacctgggaggtggaggttacaatgagctgagatcatgccactgcactccagcctgcctgggtgkcagagcaagactcttgtctcaacaaaaaataaataaaaattgtaagtgttagttacagtatttttgtagtaattaattacagtatttttgtagtaattaa

SEQ ID NO: 458767 - DNA, 201 bp, Homo sapiens
ataccctaggtattctagggcatttagggaccaataaatatttattcctccgtactcttccctcgctcttttcagatttttttttttttttttttttttttgagatggagtcttgctctgtctccaggctggagtgcagtggcgcgatcttggctcactgcaacctctgcctcctgggttgaagtgattctcttgcctcag

SEQ ID NO: 458768 - DNA, 201 bp, Homo sapiens
catagttaaaaatcttaagtcatttggtatgtgtgagagaacctgaaagataaattgctatcgaggtttatttatttatttttgaaatggggttcttgctrttttgcccaagcctggtctcaaactctttccttcacttgagagatcctcctgcctcagccaaatagctgggaccacagccgtgtactaccatgcccagct

SEQ ID NO: 458769 - DNA, 201 bp, Homo sapiens
ggatgattccagtggagtcactttctttaaggatttgacccctttttttctccccacaaagaaagatacttggagaaatagtttagtgttggtgaaccacstgcccttaaggcccatgaaggaatatatgccgcgaaacaagtctgagatggaatatgtgaatctctggttgcttattcaaatataattctccagtacttc

SEQ ID NO: 458770 - DNA, 201 bp, Homo sapiens
caaatttataacaactgtagggcagggtgtggatagggatatttttactgagtaaatactattacatgtactagaggtattctgttatgttaaaatatccygttagagatacatgatgaaacacatatggatgaaatattatggagtatgagatattgcaaaataacatggaaagatggggatacagataaaaatagattg

SEQ ID NO: 458771 - DNA, 201 bp, Homo sapiens
aacttggaattacatgtttgagtctagcatgtttgaatcatgctcatttctggcaagagcgtggctcatttctttttggcaacaaaataaaatgcctgccygtctgctgaaactactgtgttttgaaagcatttatatatttatttatttgagacaagagccttgctgtcaccctggctggagtgcagtggtgctgtcttg

SEQ ID NO: 458772 - DNA, 201 bp, Homo sapiens
aatgcctgaacattgatatccctgaaggaaactggtattgcaatgactgtaaagcaggcaaaaagccacactacagggagattgtctgggtaaaagttggmcgatacaggtaagcctgaagaatagcactcatctcttttaccatcctctgtttcttgagacctctcagatacaatgcttaacgtatttctaatgatctac

SEQ ID NO: 458773 - DNA, 201 bp, Homo sapiens
aaacactagggtaaaagcaaaacagaagcctctcattagtaactcacatacagaccacttaatgggttgtactaagagtgcagagcctggaaccgagacgyctcaggttaatctctctgatctgaaggcatctactcttgttcacaaaccccagtcagattttacaaatgatgctctctctccaaaattcaacctgtcatc

SEQ ID NO: 458774 - DNA, 201 bp, Homo sapiens
agaatttgagacttcaaatggtgactctttattgggcttgcctgagggtgctttgatctcaaagtgttctcgagagaagaataaaccccaacgaagcctgktgtgtggttcaaaagtgaagctctgctatattggagcaggtgatgaggaaaagcgaagtgattccattagtatctgtaccacttctgatgatggaagcag

SEQ ID NO: 458775 - DNA, 201 bp, Homo sapiens
atgagaaaacataagccattttgtgcctcttgcatcttaagccatagtctattttactatgtggtttcccatctggttacttttgggagtatcagatggtmtcataaaaacagtgggttttcctgaagctttttgattaatgttgaatttgtttatcatcttttagctgtgcggtcagagaagaaacgccttaggaagcca

SEQ ID NO: 458776 - DNA, 201 bp, Homo sapiens
caatgtttctgcatctaaaggtatggatttcttatgtggaccagtctaattgtaaaacctcagtttaattggcaacagatattttcttttttctttctttytttttttttttttttggagacagagtctcgctgtgttgccgaggctggagtgcagtggcgtgatcttggcccactgcaagctccgcctcctgggttcacg

SEQ ID NO: 458777 - DNA, 201 bp, Homo sapiens
cactgaagaaaagaagttggtaaccacagagcaaagtccctgggccctgggaaaagcctcatcacgggcagggctctggcccatagtggctggacagacaytggcacagtcttgctggtctgctgggagcacacagacattggcacagacttgctggtctcttggaagagggcaagaccccaaaccagagcaaaatacact

SEQ ID NO: 458778 - DNA, 201 bp, Homo sapiens
ctgcctccagggccaagcactcacctggcagagcaatcaacaggaatggctgctcaggcacccaaaatgtcagataaacctcctgctgacaccaaccagaygctgtcgctctccaaaaaagctctggcagggacttgtcagaggccactgctacctgaaagacctcttgagagaactgactccaggccccagcctttagat

SEQ ID NO: 458779 - DNA, 201 bp, Homo sapiens
ggtacacacatgtgtatattaaccagttccagttcctgtaggtgatttttattgaaggatttaattcagtaggtgggaaataaggagttcattttttttttcagtttgtttttaaaatgaaccagacaacacaaaatttaactaagttttagtttcattattaagctatgttttttaatagaaaaactaccatgtgtacac

SEQ ID NO: 458780 - DNA, 201 bp, Homo sapiens
tcaacttgtcctttttctccctccagagcagcagagagcggatggcgcccaaggccgggaccctctgctgctcccacaggcctctcaggcggctctgcagraccagccagcagcctctgatgctcccttcctattccatggcttcaggtgccatcctctccacagagacggtttctattgtgacgctctccctgacttgga

SEQ ID NO: 458781 - DNA, 201 bp, Homo sapiens
tttcagttgaagacagtgttcaaagcttacccgtgtaaatgccactgatctgtgaacccccttcctgtcatgcccagggcctggcagactgtggctagaasggtgggatcagagcagtgggtcacgtgacctgcgcacgggtgtgctggcctccctgggccgcggtggccaggacagccttcctttccctttccagccaca

SEQ ID NO: 458782 - DNA, 201 bp, Homo sapiens
catcggggctgtcactgcagaagtcttccacaggccttcgctgaggtgcgggttggtgtggggaatacaagggaactccccagaatggaggctgcttgtgyaagtttcaacttgtcctttttctccctccagagcagcagagagcggatggcgcccaaggccgggaccctctgctgctcccacaggcctctcaggcggctc

SEQ ID NO: 458783 - DNA, 201 bp, Homo sapiens
ccggcctgttcacacactggcctttcagttgaagacagtgttcaaagcttacccgtgtaaatgccactgatctgtgaacccccttcctgtcatgcccaggrcctggcagactgtggctagaacggtgggatcagagcagtgggtcacgtgacctgcgcacgggtgtgctggcctccctgggccgcggtggccaggacagcc

SEQ ID NO: 458784 - DNA, 201 bp, Homo sapiens
ctgggctccgtcggcagcaagaaaaagcaaatccccatggtgcttccctccatctccccaggagggtgagatggccggggcctgagtggacgtgaggcacygcacaggggacgggcacggcaagcatggttcatcggggctgtcactgcagaagtcttccacaggccttcgctgaggtgcgggttggtgtggggaatacaa

SEQ ID NO: 458785 - DNA, 201 bp, Homo sapiens
tgcggtaagcactccgcaggtgtcagccgccagcccgcagtcccggacaggtcaggggaaggcccgcggtatgcagcaggctgccggcttcagtcactgcstggtggaaaacaagcctgtctttggggccagccagctaacaagtgagcccttcaccccatctgaaggcgaagcacccaaaggggcaaccgtggacggcta

SEQ ID NO: 458786 - DNA, 201 bp, Homo sapiens
atggccggggcctgagtggacgtgaggcaccgcacaggggacgggcacggcaagcatggttcatcggggctgtcactgcagaagtcttccacaggccttcrctgaggtgcgggttggtgtggggaatacaagggaactccccagaatggaggctgcttgtgcaagtttcaacttgtcctttttctccctccagagcagcag

SEQ ID NO: 458787 - DNA, 201 bp, Homo sapiens
tccacaggccttcgctgaggtgcgggttggtgtggggaatacaagggaactccccagaatggaggctgcttgtgcaagtttcaacttgtcctttttctccstccagagcagcagagagcggatggcgcccaaggccgggaccctctgctgctcccacaggcctctcaggcggctctgcaggaccagccagcagcctctgat

SEQ ID NO: 458788 - DNA, 201 bp, Homo sapiens
tgccaatgcctacaggatacggtggcacaaaatgatttccacggtcttaggatatagacccaggccgactcgagagattaagtggatttcaaactgtggtmttgagccttctgggaactgcccgaaaggaggggaaggcgccagcctcggagtggtccagctgcccggcctgttcacacactggcctttcagttgaagaca

SEQ ID NO: 458789 - DNA, 201 bp, Homo sapiens
cctataaatggccgctgcgctctggcccgggcaacactgagactccgactctggaaaacaacaaaacttaaaagacgaacacagatggaagtttgggagcytggtatgcggtaagcactccgcaggtgtcagccgccagcccgcagtcccggacaggtcaggggaaggcccgcggtatgcagcaggctgccggcttcagtc

SEQ ID NO: 458790 - DNA, 201 bp, Homo sapiens
ccgtcggcagcaagaaaaagcaaatccccatggtgcttccctccatctccccaggagggtgagatggccggggcctgagtggacgtgaggcaccgcacagrggacgggcacggcaagcatggttcatcggggctgtcactgcagaagtcttccacaggccttcgctgaggtgcgggttggtgtggggaatacaagggaact

SEQ ID NO: 458791 - DNA, 201 bp, Homo sapiens
gccagtcagtacggaccctattcctggagctaatccgagcccgccggcccctggtgctacacaatggccttatagacttggtgttcctgtaccagaacttytatgcacacctccctgagagtctgggaaccttcaccgctgacctgtgtgagatgttcccagcaggcatttatgacaccaaatatgctgctgagtttcatg

SEQ ID NO: 458792 - DNA, 201 bp, Homo sapiens
acccgggacgtctgaacggaagttcgacccatcggcgacccgacggcgagaccccgccccatccccgactgcctgaaccgcgccaggagacggaccgcaartccagcgtacccacagacgactcaggcgggagacgagcggtgtcatggccgccgacagtgacgatggcgcagtttcagctcccgcagcttccgacggtga

SEQ ID NO: 458793 - DNA, 201 bp, Homo sapiens
tgtggctgtggggtggagggtagagagattctagggaacatcagataggaagcatttctctcccaaatctttttttttgacttgatagtttttttttttttatttgaataggtttatggggaacaggtggtgtttggttaaatgagtaagttctttagtggcaatttctgagattttggtgcacctatcacccagtgtaca

SEQ ID NO: 458794 - DNA, 201 bp, Homo sapiens
cctacccacaggagctgagtgggcttggggacaggaagagtttgctgaaccagtaagtataagcccttttctctttagtgccagccctcaactgtggagtrggggggtcacagacctgggtggtttgggtccttcataaggctaactcctagccacagcaacccccatacccaaccccaaggtgcattgaggaacgttaca

SEQ ID NO: 458795 - DNA, 201 bp, Homo sapiens
ctcctctccgggcgtccgtgcgcctagctctgcgctgggagcctcgcgccctttgacagcagttagttgctgactcggatgcagagagtcggtaacacctyctccaacgagagccgggtggcatcccggtgtcccagcgtgggccttgctgaacggaaccgggtggccacaatgccggtgcggctgctcagggacagtcca

SEQ ID NO: 458796 - DNA, 201 bp, Homo sapiens
atggccaatggctgatggtgaccggacagcagcaactggacgtcagggacccggaaagggtcagttaccgcatgtcacagaaggtgcaccggaaaatgctmccgtccaacctgagtcctaccgccatgacctgctgcctgaccccctccgggcagctgtgggtcagaggccagtgtgtggcgctggccctccctgaagccc

SEQ ID NO: 458797 - DNA, 201 bp, Homo sapiens
gtaggccgcgcgaggtccctcctctccgggcgtccgtgcgcctagctctgcgctgggagcctcgcgccctttgacagcagttagttgctgactcggatgcmgagagtcggtaacaccttctccaacgagagccgggtggcatcccggtgtcccagcgtgggccttgctgaacggaaccgggtggccacaatgccggtgcgg

SEQ ID NO: 458798 - DNA, 201 bp, Homo sapiens
aactggtggtgcaggtggatggccaatggctgatggtgaccggacagcagcaactggacgtcagggacccggaaagggtcagttaccgcatgtcacagaasgtgcaccggaaaatgctaccgtccaacctgagtcctaccgccatgacctgctgcctgaccccctccgggcagctgtgggtcagaggccagtgtgtggcgc

SEQ ID NO: 458799 - DNA, 201 bp, Homo sapiens
gctgactcggatgcagagagtcggtaacaccttctccaacgagagccgggtggcatcccggtgtcccagcgtgggccttgctgaacggaaccgggtggccrcaatgccggtgcggctgctcagggacagtccagcggctcaggaggacaatgaccatgccagagacggtttccaaatgaagctggatgcccacggcttcgc

SEQ ID NO: 458800 - DNA, 201 bp, Homo sapiens
tgccagagacggtttccaaatgaagctggatgcccacggcttcgccccggaggaactggtggtgcaggtggatggccaatggctgatggtgaccggacagyagcaactggacgtcagggacccggaaagggtcagttaccgcatgtcacagaaggtgcaccggaaaatgctaccgtccaacctgagtcctaccgccatgac

SEQ ID NO: 458801 - DNA, 201 bp, Homo sapiens
tgctggacctcagcaggaaccagctgggcaccatcagccgagaggccctgcagcccctggccagtctgcaagtcctgcgcctcacaggtacctcttcctckgaaagcgtctctgtctgggccacggtgttggcagtagggagcaggctcatgtgtggaggggctctgacatcaggcaactgggcagcagtctggaaggctg

SEQ ID NO: 458802 - DNA, 201 bp, Homo sapiens
ttttcctcacgatctgctgtccttacttcagcgactgcaggagcttcacctgcaagaaaacagcattgagctgctggaggaccaggctctagcggggctgkcctccctagcactgctggacctcagcaggaaccagctgggcaccatcagccgagaggccctgcagcccctggccagtctgcaagtcctgcgcctcacagg

SEQ ID NO: 458803 - DNA, 201 bp, Homo sapiens
gagaggccctgcagcccctggccagtctgcaagtcctgcgcctcacaggtacctcttcctcggaaagcgtctctgtctgggccacggtgttggcagtaggsagcaggctcatgtgtggaggggctctgacatcaggcaactgggcagcagtctggaaggctgcaccaccgcctgcagccacactggagggctgcgggagtg

SEQ ID NO: 458804 - DNA, 201 bp, Homo sapiens
ttttaggctgaggggaggcagacaaaattgcaaaggagagagacagctgaccaggactggggacattcccaagagagggcatccaaaggcaaggctgagargacttgtgaggtttcagtgctggtgagatgtctatgtggacgcccaggttcctaaaaacagtggcacttgttgcaggaagacttaaggagcaggtgcttt

SEQ ID NO: 458805 - DNA, 201 bp, Homo sapiens
gaattctaaatttgaacctgatgccccagagctttaagaaaatgtttttgtcaaaggagaaaaccagaacgttttattagtttcttgaacctatttatagygtcaaaagttagacgcaggtgcaggcctccattccatctattggctggctctcgactgccgagactggcctgccaacctgtgtttcaggagggcacgcgt

SEQ ID NO: 458806 - DNA, 201 bp, Homo sapiens
tgtggaggggctctgacatcaggcaactgggcagcagtctggaaggctgcaccaccgcctgcagccacactggagggctgcgggagtgggtgtgctggggratacagctcaggcaccctgcctggggaaaacagaagacaggaactccacagggtgacttaacagaattgagggttctgcacacttttaggctgaggggag

SEQ ID NO: 458807 - DNA, 201 bp, Homo sapiens
ttgcgcgtcgtcccgctgggaatcccgccagggacgcaggtgggcaccgtgtggagctgcgggaggacggggtgcccccagggagaggaagacccccgcarcggggtaagcgcctcctctttccccggcctgcagacactgttcctgcaggacaacaacatcgcccgcctagagccgggagccctggcgccactcgccgct

SEQ ID NO: 458808 - DNA, 201 bp, Homo sapiens; identical to SEQ ID NO: 309759

SEQ ID NO: 458809 - DNA, 201 bp, Homo sapiens
cgagaaaagagcaaggcgacagaggtaatggcagatatgtttgatggccgcttggagccaatcgtgttcccaccgccccggcttccagaggagggggtcgygccccaggatcccgcagatggtggccatactttccacatcttggtcgatgcgggtcgcagtcatggagccatcaaagcggggcaggaagtgactccacca

SEQ ID NO: 458810 - DNA, 201 bp, Homo sapiens
ttactcgccattttgtgtgaggaacgttgacgctacctacctctggcctggcctctacccactgctgccctggccgctaccaacatgagcctcccggagaktcctcacagccccgctactctcgactatgctctggaagacccgcaccagggccagaggtcccgagaaaagagcaaggcgacagaggtaatggcagatatg

SEQ ID NO: 458811 - DNA, 201 bp, Homo sapiens
cgatgcgggtcgcagtcatggagccatcaaagcggggcaggaagtgactccaccacccgcggagggcctagaagcggcctctgcctcgctgacaactgacrgcagcctcaaaaatggctttccgggtgaagagacgcacggcctaggtggggagaaggctctagaaacctgtggggcagggaggtcggagtctgaagtgat

SEQ ID NO: 458812 - DNA, 201 bp, Homo sapiens
caaatgggcgaggtgtttactcgccattttgtgtgaggaacgttgacgctacctacctctggcctggcctctacccactgctgccctggccgctaccaacrtgagcctcccggagagtcctcacagccccgctactctcgactatgctctggaagacccgcaccagggccagaggtcccgagaaaagagcaaggcgacaga

SEQ ID NO: 458813 - DNA, 201 bp, Homo sapiens
gaagacccgcaccagggccagaggtcccgagaaaagagcaaggcgacagaggtaatggcagatatgtttgatggccgcttggagccaatcgtgttcccacygccccggcttccagaggagggggtcgcgccccaggatcccgcagatggtggccatactttccacatcttggtcgatgcgggtcgcagtcatggagccatc

SEQ ID NO: 458814 - DNA, 201 bp, Homo sapiens
cagatatgtttgatggccgcttggagccaatcgtgttcccaccgccccggcttccagaggagggggtcgcgccccaggatcccgcagatggtggccatacyttccacatcttggtcgatgcgggtcgcagtcatggagccatcaaagcggggcaggaagtgactccaccacccgcggagggcctagaagcggcctctgcct

SEQ ID NO: 458815 - DNA, 201 bp, Homo sapiens
atcccgcagatggtggccatactttccacatcttggtcgatgcgggtcgcagtcatggagccatcaaagcggggcaggaagtgactccaccacccgcggasggcctagaagcggcctctgcctcgctgacaactgacggcagcctcaaaaatggctttccgggtgaagagacgcacggcctaggtggggagaaggctctag

SEQ ID NO: 458816 - DNA, 201 bp, Homo sapiens
cgggtgaagagacgcacggcctaggtggggagaaggctctagaaacctgtggggcagggaggtcggagtctgaagtgattgcagaggggaaggccgaggaygtgaagcctgaggagtgtgccatgttctcagccccagtggatgagaagccaggaggcgaagaaatggacgtggcggaagaaaacagagcaatagatgagg

SEQ ID NO: 458817 - DNA, 201 bp, Homo sapiens
ggactccgtgaatgcagaggctgacagggcgctcctgcaggtggagcgcaggtttgggcagattcatgaatactacctggagcagaggaatgacatcattygcaatatcccgggcttctgggtcactgctttccgccaccacccacagctgtctgccatgattagaggccaagatgccgagatgttaagctacttaaccaa

SEQ ID NO: 458818 - DNA, 201 bp, Homo sapiens
gtggccatactttccacatcttggtcgatgcgggtcgcagtcatggagccatcaaagcggggcaggaagtgactccaccacccgcggagggcctagaagcrgcctctgcctcgctgacaactgacggcagcctcaaaaatggctttccgggtgaagagacgcacggcctaggtggggagaaggctctagaaacctgtgggg

SEQ ID NO: 458819 - DNA, 201 bp, Homo sapiens
gccatcaaagcggggcaggaagtgactccaccacccgcggagggcctagaagcggcctctgcctcgctgacaactgacggcagcctcaaaaatggctttcygggtgaagagacgcacggcctaggtggggagaaggctctagaaacctgtggggcagggaggtcggagtctgaagtgattgcagaggggaaggccgaggac

SEQ ID NO: 458820 - DNA, 201 bp, Homo sapiens
cagcatgatgctagcggcgatgggatggcttctagagaaccagaagggtagggtctctcacatccacctacctggcaaccacaggtgcagacctagaagayagaggtggtgaagcccggccagtgaggacaagagctgcggggaaggacaccgaggtgacttgacggcagcagcaggcctgaaggctctggctgctttgga

SEQ ID NO: 458821 - DNA, 201 bp, Homo sapiens
ggaaaaaaagcgaaaacggggccgggcgagagtgggcggggcggcccgcctgaggcgtggcccgcggggctagcccgggtccgtcttacgtagcctgggcggaggcgatgggctcctggtccagcgaggggccttcggcggacgaggttgcggtggcagcgggggggcgggtacctggcggggtgggggagccgcggcggg

SEQ ID NO: 458822 - DNA, 201 bp, Homo sapiens
ccagaagggtagggtctctcacatccacctacctggcaaccacaggtgcagacctagaagacagaggtggtgaagcccggccagtgaggacaagagctgcrgggaaggacaccgaggtgacttgacggcagcagcaggcctgaaggctctggctgctttggaagatatttcaatgagatgcaaatcgcaatcgactgacca

SEQ ID NO: 458823 - DNA, 201 bp, Homo sapiens
cccaggtgggtctggagggagagggggccggcccacggagcaggaaaggcaacaacttccccctccagcactaggaacggggccagactccccaaggccgmcaaacttgcttggagtcggcttaaactgaagggcgggactaagctgggcaaccccggaaaaaaagcgaaaacggggccgggcgagagtgggcggggcggc

SEQ ID NO: 458824 - DNA, 201 bp, Homo sapiens
cccagggagacgtgctggaggtggatgtggttgaggttgcagagtaaagctctctgaggggacagcatgatgctagcggcgatgggatggcttctagagamccagaagggtagggtctctcacatccacctacctggcaaccacaggtgcagacctagaagacagaggtggtgaagcccggccagtgaggacaagagctgc

SEQ ID NO: 458825 - DNA, 201 bp, Homo sapiens; identical to SEQ ID NO: 227869

SEQ ID NO: 458826 - DNA, 201 bp, Homo sapiens; identical to SEQ ID NO: 229571

SEQ ID NO: 458827 - DNA, 201 bp, Homo sapiens; identical to SEQ ID NO: 227819

SEQ ID NO: 458828 - DNA, 201 bp, Homo sapiens; identical to SEQ ID NO: 227242

SEQ ID NO: 458829 - DNA, 201 bp, Homo sapiens; identical to SEQ ID NO: 226240

SEQ ID NO: 458830 - DNA, 201 bp, Homo sapiens; identical to SEQ ID NO: 227145

SEQ ID NO: 458831 - DNA, 201 bp, Homo sapiens; identical to SEQ ID NO: 225727

SEQ ID NO: 458832 - DNA, 201 bp, Homo sapiens; identical to SEQ ID NO: 225888

SEQ ID NO: 458833 - DNA, 201 bp, Homo sapiens; identical to SEQ ID NO: 227739

SEQ ID NO: 458834 - DNA, 201 bp, Homo sapiens; identical to SEQ ID NO: 228759

SEQ ID NO: 458835 - DNA, 201 bp, Homo sapiens; identical to SEQ ID NO: 229349

SEQ ID NO: 458836 - DNA, 201 bp, Homo sapiens; identical to SEQ ID NO: 197900

SEQ ID NO: 458837 - DNA, 201 bp, Homo sapiens; identical to SEQ ID NO: 197884

SEQ ID NO: 458838 - DNA, 201 bp, Homo sapiens; identical to SEQ ID NO: 197869

SEQ ID NO: 458839 - DNA, 201 bp, Homo sapiens
tgtggccagaagctggtggttcaagcctagtggatgggacctcacagcaaccatcgtatatattagtaccatggcctcccaggcaccaactccttgagcckgagttctgtgtgccatctccctgggggtgaagaattagagggaatgagcatgtaaaactctgttgatggtggtttggaggctcccgacggggtgaaggca

SEQ ID NO: 458840 - DNA, 201 bp, Homo sapiens
gagccctggccaggtatgggcccagtcagtgaggcttgagtaggggacactgttactaatcctattccaccatggatttaacaatagtcattcagggaaaragataacgaattaaatctgtgggtgtataagaaaaaaaatacaggccaggtgcagtggctcacgcctgtaatcccagctctttgggaggctgaggtgggc

SEQ ID NO: 458841 - DNA, 201 bp, Homo sapiens
atggtgtagcaaagtgaagtcatcatgagccatgaggggatggggaggtttcgatgggtggccggaagtgttcccggagagctaagatctgaataataatrttagctaaggggtgggtggtgctggggcgcagggaggggtcagtgttctaggctcaggggacagcacattcacagcttttcttgagtatgtaccagtctt

SEQ ID NO: 458842 - DNA, 201 bp, Homo sapiens
tgatgggtgtggagcatggcttcgagaccgccagccacgagggcgaggcgggtccctcggctgaagccctgcagtaacccgcccagcctcccgcggggccrcacacttcccctcccaacacacacacacacctgccatcttggtcatgagctactgtctgtccctccccaggacccgcggtgggtgctgcatgttcccggc

SEQ ID NO: 458843 - DNA, 201 bp, Homo sapiens
gctctgtgtggtttagcaccatggtagattccatcgtgcggatgtccctccagcaggggaggtctttggggccagggctaggccagcacccacatttgccrcctgaccccgtccctccgtctctgtctctccattcctccctgcccctcgtgcagccgctgccatggcccagacactgcagatggagatcccgaacttcgg

SEQ ID NO: 458844 - DNA, 201 bp, Homo sapiens
aagaactaatcttgaataaaaccagccagaatgtttgccttcattgagctgacagtgcccttggaggggttaactgtacatacacctcttttttcttttctttttttttttttttttgagatggagtatcactctgttgcccaggctggagtgtagtgactcgatctcagctcactgcaacctccacctcccaagttcaag

SEQ ID NO: 458845 - DNA, 201 bp, Homo sapiens
agtagagacggggtttcaccatgttggccaagctggtcttgacctcctgacctcaggtgatctgcccgcctcagcctcccaatgtgctgggattacaggcktgagccaccgcgcctggcctgtacatataactcttaaaatgctgccctgaccctggggctcactttcaaagatgtccacactctgtaggccaggacccca

SEQ ID NO: 458846 - DNA, 201 bp, Homo sapiens
gcctcagcctcccgagtagctgggattacaggcacgtaccactgtgcctggctaattttttgtatttttagtagagatggggtttcaccatgttagccagkatggtctctatctcctgacctcgtgacctcgtgatccgccctcctcagcctcccaaagtgctggggttacaggcgtgagtcaccgtgcccagccagcccc

SEQ ID NO: 458847 - DNA, 201 bp, Homo sapiens
gaggaacactcagctgggagttggagaccagcccaggcaatatagtgagatcacgtctctaccaaaaaaaaaaaaaaaaaagcatacatatacatatacttttttttttttttttttttttttttttcggttaactggatgggccgggtgccgtggctcacgcctgtaatcccagcactttgggaggtgggcggatcactt

SEQ ID NO: 458848 - DNA, 201 bp, Homo sapiens
gcgagactctgcctcaaaaaaaaaaagaaaaaaaaaattagctggatgtagctcctgtggtcccagctatttgggaagctgaggtgggaggattgcttgascccaggagtttgaggctgaagtgagctatgatggtgccactgtactccagcctgggtgacagagcaaggccctgtctccaaaagcaaaagagtagagaaa

SEQ ID NO: 458849 - DNA, 201 bp, Homo sapiens
gctgggggctggggaagcatcccggagtaacagatccagagcagctagctctcaagcgaccaaactttcacaagcaaaggatcaagataatttcacatacytctgtgtttacaaagatggtgtagcaaagtgaagtcatcatgagccatgaggggatggggaggtttcgatgggtggccggaagtgttcccggagagctaa

SEQ ID NO: 458850 - DNA, 201 bp, Homo sapiens
tcgcttgaacgattcttgcagtgagccgagatcccaccactgcactccagcctgggcgacagagcgagactctgcctcaaaaaaaaaaagaaaaaaaaaawtagctggatgtagctcctgtggtcccagctatttgggaagctgaggtgggaggattgcttgagcccaggagtttgaggctgaagtgagctatgatggtgc

SEQ ID NO: 458851 - DNA, 201 bp, Homo sapiens
tggtgcttcaggcctgtcttagtcagctcaagctgccacacaacaaaatatcacagactgggtggcttaaacaacagacatttatatttcagagtgctggrggctggcagtctagatgagagtgccagcgtggtcaggttctggtgagggctctcttcatggcttgcagacagctgccttcttaataccaccgttatgacc

SEQ ID NO: 458852 - DNA, 201 bp, Homo sapiens
tttaatttggctgcccagggaggtggttcagggctgccaggacccctgaagtaggctctctgggctctgtcctttgccccccaacatggtgcctgtttctyctgcctcttcatgcagagtggccagctcctggcccattcagctctgagtttgagctcctgggcggagatttttgttgccttgtaactgggattcctagat

SEQ ID NO: 458853 - DNA, 201 bp, Homo sapiens
gggcagcagggagccccagcaggttcttgagctgggctttgaggagatgtgagttttggtcagccttacagggtctattgaaggagtctgcctggaggccygggggtttggagagagtttggggttggcccaacattgtctgaccctagatttcatcagtgtcattgccagagcctgtgtggagagagggatcccatcagg

SEQ ID NO: 458854 - DNA, 201 bp, Homo sapiens
aattaaatcatccccggtgtctcctcactagacagctccacataagcacagctggtccttttagggctgtgtccccagcacctcccacaaaggaggatgcrgttcatcaggatgggttggatgaacagcccattttacagatgaataaactgaggcacaggcaggtgcaggattttggcagcactgcacacctgtcctggc

SEQ ID NO: 458855 - DNA, 201 bp, Homo sapiens
aggcataagatgtcttctactcccagggagtttgcggcccagcacggggccaggggatacgactaacagcagctggcattcatgagcaccgactacggggygagcgccgatcggcctgtgttctttggttgtttaatccttgaaatagccttgtgaggtggctgctgctgtcagcccattttctagatgggagactgatat

SEQ ID NO: 458856 - DNA, 201 bp, Homo sapiens
cctctcccaggatgatccccatccctccaccctcctttgtgttagcggcaccagggtcacctcagggcctttgcacttactgttgttccctccacccttgkttgccgccactgctgccctgtcttttgggtatgatctgattacacgcagggagtgggatgtaactccgaagggtgggcttatggttggagttggtgggga

SEQ ID NO: 458857 - DNA, 201 bp, Homo sapiens
cccttcctgcagatggcaggatccaccggcagtgtgagcaattcgtcaggtaacactgcggtctcaataggcccctgactgctggctacccaccttggcarctgtcaaaggaggtcgtctgtctgcccagccacagataatgcttctgagccctattcctgtttgagccacgttaatgtggaacaaaacagggagttaggt

SEQ ID NO: 458858 - DNA, 201 bp, Homo sapiens
cagctagcttagcagatttgaccacatattgtaaaagtgagtctgtaccaggacagatagggtagagggctctgtgtggtttagcaccatggtagattccrtcgtgcggatgtccctccagcaggggaggtctttggggccagggctaggccagcacccacatttgccgcctgaccccgtccctccgtctctgtctctcca

SEQ ID NO: 458859 - DNA, 201 bp, Homo sapiens
agcctagtggatgggacctcacagcaaccatcgtatatattagtaccatggcctcccaggcaccaactccttgagcctgagttctgtgtgccatctccctrggggtgaagaattagagggaatgagcatgtaaaactctgttgatggtggtttggaggctcccgacggggtgaaggcagggcacagagaagagttaagggg

SEQ ID NO: 458860 - DNA, 201 bp, Homo sapiens
agcagctagctctcaagcgaccaaactttcacaagcaaaggatcaagataatttcacatacctctgtgtttacaaagatggtgtagcaaagtgaagtcatyatgagccatgaggggatggggaggtttcgatgggtggccggaagtgttcccggagagctaagatctgaataataatattagctaaggggtgggtggtgct

SEQ ID NO: 458861 - DNA, 201 bp, Homo sapiens
cgtgctgggtccagggccccagtggagccccctgacttgggccgtggggacagctggcctgctgtgtgccttgccaggctgctggagagcgacagggcagmcagtgctatgtcccttgccagttgttgtggctcatctggaattagctgggcgggtctgtccctttgtgagtccagctgaaagaagcagacctgggcttgt

SEQ ID NO: 458862 - DNA, 201 bp, Homo sapiens
atctcctgacctcgtgatctgcctgcctcggcctcccaaagtgctaggattacaggtgtgagccacagtgcccggctctttttctttttttttttttttttgacagagtctagctctgtcaccagtctggagtgcagtggcgcaatctcagctcactgcaacttccgactccctggtctaagtgattctcctgcctcagcc

SEQ ID NO: 458863 - DNA, 201 bp, Homo sapiens
gagcaccagaagctgcgggctcggcatcggggtgcgcccggtggtctggtctgagactaaaaactagaaggcagttcccgccggccgggttgcagggacckctccgccttccgccttccgccgtcgaccggaagtgacgcactagggacgcgccctgtgggggcatggcgtccgatcgaggcgggcgttcacgggcggcca

SEQ ID NO: 458864 - DNA, 201 bp, Homo sapiens
gcgatctcggctcactgcaagttccgcctcccgggttcacgccattctcctgcctcagcctcccgagtagctgggactacaggtgcccgccaccacatccrgctagttttttgtatttttagtagagacgaggtttcacaccgtgttagccaggatggtctcgatctcctgacctcgtgatctgcctgcctcggcctccca

SEQ ID NO: 458865 - DNA, 201 bp, Homo sapiens
cgccggcgccgggcctcgcgacccagtctctccgacacatcctgagccgtgcctgtctggctgccgaagagcaccagaagctgcgggctcggcatcggggygcgcccggtggtctggtctgagactaaaaactagaaggcagttcccgccggccgggttgcagggaccgctccgccttccgccttccgccgtcgaccggaa

SEQ ID NO: 458866 - DNA, 201 bp, Homo sapiens
ccttctttttaactctttagccttttcacagccagatgtggttttttttttgtttgttttgttttttgtcttttttttgtttttgagacggagtctcgctytgtcgcccaggctggagtgcagtggcgcgatctcggctcactgcaagttccgcctcccgggttcacgccattctcctgcctcagcctcccgagtagctgg

SEQ ID NO: 458867 - DNA, 201 bp, Homo sapiens
agcctgcctcacagtggccatggggtgtcggggtgaagggctgtcccagctacttgtcctctgcaggaccctaagcccctgcccgcagcccacatgccctytgtgatgagtggcgtctttcctgcctctgatgatggactcaataaacagcactggacaaggctgctggtgtccccactgcgtggtccttggctgagaagg

SEQ ID NO: 458868 - DNA, 201 bp, Homo sapiens
cgggcacgccaggcctgctcgtcccccacgccgaggccctagcgagccctcaccaccgggtaggagtccagggcctgcacccggcagccaagccgccggcsccgggcctcgcgacccagtctctccgacacatcctgagccgtgcctgtctggctgccgaagagcaccagaagctgcgggctcggcatcggggtgcgcccg

SEQ ID NO: 458869 - DNA, 201 bp, Homo sapiens
tgaggttccagtgtcgctgagacacatccccctccttccgtggctgcaggacctcgagccaacagggtccagatcctctggttccacaccgtgccttccayggtgtcctcccagcttgatcagaggcccccccaaggaacctactgccccctccctacctggatcccaggtggcctgtgtgcgtggtcttcaccgcccacc

SEQ ID NO: 458870 - DNA, 201 bp, Homo sapiens
tctcgattctgcttgacctattgggtccgttccatgtcccggggactctctcttcctgacaccactgcaatgtgtccacttctatcttctgccaccacctyagctcagatcggtagcatctgctgcctgtcctgtgcatctcatggcattattcctgctgtcctgcagaccagtgcggttttgctagcttaggaacatgac

SEQ ID NO: 458871 - DNA, 201 bp, Homo sapiens; identical to SEQ ID NO: 140640

SEQ ID NO: 458872 - DNA, 201 bp, Homo sapiens
tcagcggctggcggtgctgctgcttttcctggggtacaggtgaagggcagctcttcagtggagttgtctgggtggtgggagtcggtgaggggcctgccccrgggctggctgtgcctgcacagggtatgatacccttgcccgcctccgaggggtgcagccctgctctgggcagtggggagctgctggcctgtgtgccggggt

SEQ ID NO: 458873 - DNA, 201 bp, Homo sapiens
cagcagtgtctactgagcaggctgctgactgcagggcaggtgatggaaagaaggtgatgtccgtgcactccaattccccttctccccgtgactccaagcgrtctccctattgtctgcaggcttgaaaggctgtggaagcactctgaagccctccctggggcagaagggacttgtcagccgggaggctgtgccctcagggtc

SEQ ID NO: 458874 - DNA, 201 bp, Homo sapiens
cttctgtgcagctttacatgccagagcccttcctggaacacccactcccccagtcctctccttggggtgctgcaccctctcttctagctgcttggtcactytcctgccctcctgggctctaacgttctgggcagcctgtcctgtggggagagaggagcttcctcttctcacacttctgtattgtggctacctcaacaccta

SEQ ID NO: 458875 - DNA, 201 bp, Homo sapiens
gaggagggagaggcggggctgggctcagctcacacctccatctgggcaggttggggctggctgcttggccctttgtcccaggtggaggccaggccctttgrtaaccaaagctaggtgtgcacaggcagggtgggtggagcgagaacagaagggtcctgagaagccgggaggctctgctgggaggctgggctgagctgggac

SEQ ID NO: 458876 - DNA, 201 bp, Homo sapiens
tagactcggaggaggccccccaagcagccaaactaccctacctcccgcaccctgccaggcctctgcaccctgccaggcccgggtgcgtggcagagcttcagccccggggcagcaacaccttcacagtggtgcccaagaggaagccagggactctgcaggaccagcacttcagtcaggccaacagggagcctcggccacggg

SEQ ID NO: 458877 - DNA, 201 bp, Homo sapiens
tgtctcgattctgcttgacctattgggtccgttccatgtcccggggactctctcttcctgacaccactgcaatgtgtccacttctatcttctgccaccacyttagctcagatcggtagcatctgctgcctgtcctgtgcatctcatggcattattcctgctgtcctgcagaccagtgcggttttgctagcttaggaacatg

SEQ ID NO: 458878 - DNA, 201 bp, Homo sapiens
gcaaccaacgacgatggcgacctgccctccgacctcatcgacccggactacaaggagctggtggagctcttcaaagggaccacgatggactgagccagctytgcccgcccgcccccgcgcccagggccgcctccctggagaagccgcgcgtcgcccatgggccagcacgtgccccacccgtgggccaggggcggccggacc

SEQ ID NO: 458879 - DNA, 201 bp, Homo sapiens; identical to SEQ ID NO: 411210

SEQ ID NO: 458880 - DNA, 201 bp, Homo sapiens; identical to SEQ ID NO: 411213

SEQ ID NO: 458881 - DNA, 201 bp, Homo sapiens
aaaaacaaagagacaggaattacctatatttcattgttgaaggttaaattttgtttgtatttgtaccttagttccacacttttttctttctggaaacgtayatgataaacatatgcttgaaaacaaaggattacatggatattctgaactcccaaaaagagaatctcatgactaagccaatttcacatttctaattagcat

SEQ ID NO: 458882 - DNA, 201 bp, Homo sapiens; identical to SEQ ID NO: 324153

SEQ ID NO: 458883 - DNA, 201 bp, Homo sapiens
gaggtaggggcatggctgtctgagggtggaggggtgagtagggggcctgcagtgtgctgtgacgcctgggaaggggattctaagccatttcccatcagccrtttactaagtagcctggggatcttgttaaaatgcagatcctgatagattagggctggggtgctgcccaagattctacatttctaagagtccctggatgac

SEQ ID NO: 458884 - DNA, 201 bp, Homo sapiens
ttttccagagtgtgggcattaccccaactgtctctgcagacggcttcctgcatgtttcccacaagcgctcagatggctgaattggcaagtctgtggtgctrctctttggggccacctcgttctttgcctttccctccccttagcgatgtgtcccatccgttgcctacagtcaagtcagtccacatgtttaggctaaggtgg

SEQ ID NO: 458885 - DNA, 201 bp, Homo sapiens
  misc_feature (1)...(201): n = A,T,C or G
ctacagtcaagtcagtccacatgtttaggctaaggtgggcatgaccgagtggccttcccccgggaagaccagtgtcgtaactggaattaagttgtggaacntaagagtcaaggctcgtgtctgctgtgaactggagttgagggaatgtttggggatcccacctggtatcagtaagggaaccatggcgacggccagccttgc

SEQ ID NO: 458886 - DNA, 201 bp, Homo sapiens
tacagtcaagtcagtccacatgtttaggctaaggtgggcatgaccgagtggccttcccccgggaagaccagtgtcgtaactggaattaagttgtggaacayaagagtcaaggctcgtgtctgctgtgaactggagttgagggaatgtttggggatcccacctggtatcagtaagggaaccatggcgacggccagccttgcc

SEQ ID NO: 458887 - DNA, 201 bp, Homo sapiens
ttctatttcctttaattttactttatagctggtcacggtggctcatgcctgtaatcccagcactttgggaggccaaggtgggtggatcacttgaggccagragtttgagaccagcctggccaacatggtgaaaccccatgtctacaaaaaatacaaaaattagctgggcgtgtggtacatgcctgtaatcccagctactta

SEQ ID NO: 458888 - DNA, 201 bp, Homo sapiens
gtgtgatctcggctcaccacaacctctgcctcccggtttcaagcgattctcctgcctcagcctccgagtagctgggattataggcatgtgccaccatgccyggctaatttttgtatttttagtagcgatggggtttcactatgttggtcaggctggtcttgaactcctgacctcaggtgatccacccaccttggcctccca

SEQ ID NO: 458889 - DNA, 201 bp, Homo sapiens
cctcaaagtgctgggataacaggtgtgagctaccacgcccggccatttttgtatttttttagtagagacgagatttcatcatgttgaccagggtggtatcraactcttgatctcagatgatccctccaccttggcctcccaaagtgttgggattacaggcatgagccaccactcctggcctacaataaagtattttttaag

SEQ ID NO: 458890 - DNA, 201 bp, Homo sapiens
gtggagggagtcacgattctccaaagggtagtttagcttcaaaggctgtatgtgtcctgcaagtcctgtcagtgtacactgagctcccatgatgtgcaagrtgctggcagaaggggtgggtgcacgtcagccaccaaacctgcccatccccaccatcgccatcccagtatctgggacacagctactgttattgtcatgcca

SEQ ID NO: 458891 - DNA, 201 bp, Homo sapiens
tcttttcctaggaacgagggcagtgtggttcatgtcaggaaccttagccagagctctgtacctcctttggcctaggccccactccttggaactttggtcarcacacaaatgacagcactgatggctttggtcatgcacaggcttgcactttatgtgtgtgtcctgtctaccactgcagctctgagaggcagggatgaggct

SEQ ID NO: 458892 - DNA, 201 bp, Homo sapiens
agccctgggggccagccctaggggaggtgccagtgtgtgcaagctccatcccttctcaagtggagaccggcacctgctcaccacaggtgtgtcttggccargtgaggcctgagcctcaagctcctcagtgcctggtgctgtgtgaacctggtacccaagctccctggaaagcatggaggcatccaggcagcactgaccgca

SEQ ID NO: 458893 - DNA, 201 bp, Homo sapiens
cacaggcacatagatgttcctaagaccaggagcagacagttgggctggaactggggttgggagagccacctggagagttgaggctttattctgtgggcagygaaggatggccctgggcaggtggccagggacttgaacctcactcaggtgatagacaagtttggggcagtaagagaaggctatgcccacgcctttggtacc

SEQ ID NO: 458894 - DNA, 201 bp, Homo sapiens
gcagggctggggagatgggaggtggtgggagacggggtgatacaggaagacaggggcttctcatcagggggtgctgagaagacagctttgcagcatgacargccctgggccatttttccacggttgtggtcctgcatttcatgactgggctgtgcctttgtccccacatgtcccctgctcgagccactcgcgtcaggttct

SEQ ID NO: 458895 - DNA, 201 bp, Homo sapiens
ggtgctgccatagacccttttcctctggaagggcccaatgccagctggtaaaggaggggctgggcaagaggcccctgcctgaggtgctaggtgctctgggytgtgccctctgcctcgggtatagcaggccccaggagacctgaggaccagagcgtctggtgcccacaggctgtccatggtggaactagaggttcctgggct

SEQ ID NO: 458896 - DNA, 201 bp, Homo sapiens
actattttatgttcttttttcttactggtttcagagatccactggtgtgtcaggtgacagcaggtctcagtttggcctggccactgctccatcattcagtractgcatgtagctttgctgagtggggctttggggtacgggtataagagtgtgggggggttgggggtcagccttggttcccacttggtgctgccatagacc

SEQ ID NO: 458897 - DNA, 201 bp, Homo sapiens
catgggaataaataccctgcggcaggggagccggtggctagaaacaccctgctgtgggggctgtggtcctgctcagaaacagcttaggccaaggggcgagmtggccgtgtgtttggggagagcatttccgcagatgttggctgattatgcagcattaactgtttggcaagaaaaaatatctcatctgaaatggtgtgaggt

SEQ ID NO: 458898 - DNA, 201 bp, Homo sapiens
actaaggtctgctgtgtgccctgctctgtgctaggcactggggagccacactggggctatgcttgagagtctgtggcttaggaggagaagtagatgtgtamgcagatcagtaattaaagttcaggtacatacgtgctgtacgatcacagagctaggagaaaggtgtatcttcagaggagctttgagttggctttttaaatg

SEQ ID NO: 458899 - DNA, 201 bp, Homo sapiens
ctgtgtcccagaaggaaaaggcctatcagtgcccatacttgaaacttggcacacaaggggaaggtggtttgagggcacactgtaacggtggctgtgccgtrccgtgctccgccaggcctgttctgtgcacacttgctgggcccactcagcctccatgaggtcccctcttgcctcatgacccctggccccacttatcagctg

SEQ ID NO: 458900 - DNA, 201 bp, Homo sapiens
gtgatcttggttcacttcaacctctgcctttggggttcaaagaattctcctgcctcagcctcctgagtagctgagattataggtgtgtgtcaccatgcccygctaatttttgtatttttagtagagacagcgtttcaccatgttgtccaggctggtcttaaactcctgacctcaggtgatccacccatcttggcctcccaa

SEQ ID NO: 458901 - DNA, 201 bp, Homo sapiens
gcttatacatatattttcattatttttgagaacatgaatttccttttgaaaaagagataaaatattatgaaaacaaaggtattgtcatagtatatacactytcagtttttatttagagtctacaataaaatttaagcattatgaattggattatatgtcattttctctacatcaaaaataagacatcaccagtcctaaagg

SEQ ID NO: 458902 - DNA, 201 bp, Homo sapiens
ccaccaagcccagctaattttttgtatttttagtagagatggggtttcaccatgttgaccgggctggtctcgaactcctgacctcaggtgatccacctgcmtaagcttcctgaagtgctgggattacaggcatgagccaccgtgcctggccaaatgtatgcctttttaaatggaccctactgattgttccattagcttctg

SEQ ID NO: 458903 - DNA, 201 bp, Homo sapiens
ggtaaggaggaagttgtgtttaagaggtcgtacgtggaaaattttttccccacatgctttaaaagggaaaagaatagccttgaaaggccagccttgattaygtgtccccctcccatcccactgccacctttgacactgtgcttgcctctagccagccactcctggaatggtgtcctgtgtcttccttcttcagccagtgga

SEQ ID NO: 458904 - DNA, 201 bp, Homo sapiens
catgtccagtgccccatgtgtgtttgcatgctgggtcctgcagaaatcccatttttatgtattcatacctgttctgttctgggccatttgggcctgatggrttataccattgttcctaccatgctggaatgggaaatacatggtctgatgaaatgaccatgttttccatgggcatcagataaagaactacttcattcattc

SEQ ID NO: 458905 - DNA, 201 bp, Homo sapiens
gtcacctctcacgttggacagcacagacccagaacgttgctgtcattgcagagtgttccatcaggtaggagcacacgagactgtgtcccagtgtggggagratccaaatctgggagaaccaaaagtgcagaggaggtattctgctgaaagaaaagacactggaccttcctgctcccaaaacacagaattgaaaattagttt

SEQ ID NO: 458906 - DNA, 201 bp, Homo sapiens
gaggacggtttcgtcccgtcggcgctggggacccgcgagcagtgagtgtgacgctgggcaggggaggatgagccgtgccgccctgcctgggccccgagaargggacggcggggtggagacccggggctcagggacagggagaccctcgggggcgtgacgggagcagggccacctggcggggggcttacggggatttcaaag

SEQ ID NO: 458907 - DNA, 201 bp, Homo sapiens
tcctcacgtggggctgctcccagcctttggcccaggacctggtgctcaggtggtgctcagaatgtgtggctgttacttaccacatcctccgggcccatcamctgatggatcagtgaatccccggtggccctgacttctcctcccagcccttgagcagactctgcatttcttgagctatgagcaggctggtaaagccgggca

SEQ ID NO: 458908 - DNA, 201 bp, Homo sapiens
ctggggtgagctccccaccacttgtgaagcacagggccccgggaagtctgggatttgccctaggctttgggttccctgacggtcaggtagggatggtgacrtcctcacgtggggctgctcccagcctttggcccaggacctggtgctcaggtggtgctcagaatgtgtggctgttacttaccacatcctccgggcccatca

SEQ ID NO: 458909 - DNA, 201 bp, Homo sapiens
atcctcacccaccctgtaatcctcacccaccctatggtccttacccaccctgtaatcctcacccaccctgtggtcctcacccaccctgtgaggggctcctyctgttctactttccagggaagaaaagggagtgccgaggccatgtacttgctggctgcgtggcagagcggtgagtgggatccactcactctttggccccga

SEQ ID NO: 458910 - DNA, 201 bp, Homo sapiens
gcccatcaactgatggatcagtgaatccccggtggccctgacttctcctcccagcccttgagcagactctgcatttcttgagctatgagcaggctggtaargccgggcacggggctcatagagaggctctgtggccagcaccatggcctctctggaagagcgctttagttctgcctggcactgcggttcagctgtcctgtt

SEQ ID NO: 458911 - DNA, 201 bp, Homo sapiens
ccagaggtgggagtgggtgtggtgagtgcagggcatggcgaggctgcggtgactggggtcggagtgggcgtggtgagcgcagggcacagtgaagctggggkgacaggttcctgagtcgggggtgcaagggatgcttgagatgtcggcagggccatcacggttggccttgcaggctggggtgaggagcgggctttttgcctg

SEQ ID NO: 458912 - DNA, 201 bp, Homo sapiens
cttacctgactgctatgcttatcttccaccttgggggttcgaccgcagacggccccagggaaaccggttcaaggaggtcacggcaagaaggcacatgaggrtgaaagcataccagagagatgcttaggcagggccccagtgtcggggacaggctcagaggaagttagtcaggcacctctgcaagtgcctctcatggtgatg

SEQ ID NO: 458913 - DNA, 201 bp, Homo sapiens
tggcagcatgagcctctgtcgccccaggcactgcatcagtagagaatttctcctgctgacaggagcccatttatgtaccatttttgtggtatcagccatcyggaattaccactctttcttgcaacttcaagccacagtcaagaaatcagaaagcaaatgccacacgaagaacaaaccctttgctgcaatccccatgctggc

SEQ ID NO: 458914 - DNA, 201 bp, Homo sapiens
tcccagcccagagtagttccggaaggggcagccatgaactgtcagagccaacactcacagcagtggagagtgggcactgctgtgggtttgggactccaggygggacaccagcagcctggctttcctcttaggatccttgcagtggccctgtgaagcagcctggccagagacagcagttctgcttcccaggggaggaaacgg

SEQ ID NO: 458915 - DNA, 201 bp, Homo sapiens
gaagccaacacactgcaggttcctagacgttgtccaagagagtctgaattagcaggtctggggcagagccccagtacctcggggtcccagaagctccctakgtgagtctggggcttgtgggggcagcagagatgggcacattcctagcccagtgactccacagatgcccagggactagttttgtgtcatatggagatggca

SEQ ID NO: 458916 - DNA, 201 bp, Homo sapiens
agtagacatagcgtttcaccatgttggctaggctggtctcgaactcctgacctcaggtgatctacccaccttggcctcctgaagtgcttggattacaagcrtgagccaccacgcctggcctgtttatcttctttagtaaaatgtctcttcagatcttttgcccatttttaaattggattgtttacttattaagttttgaca

SEQ ID NO: 458917 - DNA, 201 bp, Homo sapiens
aggcctcacctgagggcgcagctgagttgttgagcggtgctgctggggtatgagtcccgggctctgtaactctgagggcagggttttgccttattgccacstggtagaggcctctcatatcctaagggaaagagaggtgcactgtcgttggaacacagctgctgttggagtcagaagagctgggtttgagaggcactctgc

SEQ ID NO: 458918 - DNA, 201 bp, Homo sapiens
gtgattctcctgcctcagcctcctgagtagatgggattacaggtgcgcgccagcacgcctggctaatttttttgtatttttagtagacatagcgtttcacyatgttggctaggctggtctcgaactcctgacctcaggtgatctacccaccttggcctcctgaagtgcttggattacaagcgtgagccaccacgcctggcc

SEQ ID NO: 458919 - DNA, 201 bp, Homo sapiens
gatttctagcctggggaggtggaccttgcttttctgtggggccctgagaacgaggcctagggtatccctgtgtatttatcaagagccctggcgagtgcacrgccttgtgcgtgggaacctgatgagctgggcatgttgctggtgtacaaggactaacgtgttgccagatggccagtgaggtgagaccactggccacagacc

SEQ ID NO: 458920 - DNA, 201 bp, Homo sapiens
aggggcctctggaaagtgtgtgtgcccaaggcctatggccagagccctgaggctgggcccgtggacgctgagccatgcccccaccaagagtctagaccctsgtcagccctctctccatggggctctgcctgctttggctctgccatcagatgatttctagcctggggaggtggaccttgcttttctgtggggccctgagaa

SEQ ID NO: 458921 - DNA, 201 bp, Homo sapiens
cctgcttggcagtgggtctcgggcacagggaaagtagagaggggcctctggaaagtgtgtgtgcccaaggcctatggccagagccctgaggctgggcccgyggacgctgagccatgcccccaccaagagtctagaccctggtcagccctctctccatggggctctgcctgctttggctctgccatcagatgatttctagcc

SEQ ID NO: 458922 - DNA, 201 bp, Homo sapiens
cagcctcctgagtagctaggattacaggcgtacaccatgcctggttaatttttgtatttgtagtagagatggggttctgctatgttggccagctgttctcraactcctgacctcaggtaatccatctgcctgcctcagcctcccggagtgctggtattataggtgtgagccactctgcctggcctgaacttcttttttttt

SEQ ID NO: 458923 - DNA, 201 bp, Homo sapiens
tttgtttggcaaatgttactcctgtattgagtaagtctaacattacgtcccttttctttttggggaggggtagccagaggagtgagtttttcatttagatsaacattgatcaaccattaagacaagatagttgaagacatgtatgtggactgtcaacaaaaataacattttttgaaaagcttttattttcaacatgtaaaa

SEQ ID NO: 458924 - DNA, 201 bp, Homo sapiens
acataggctgtttctggggctgcaggggcttccctgagctggatgttgtgggtgttgccgtgcttcaggaagtgtggcgaccagaaagcgtagacccgggkcccagggtctgcccgcccctgcagcctggcctccccgcacaggctgtggcttgcactccagccgctctagtctctcaggaatttgcttgttacttgtact

SEQ ID NO: 458925 - DNA, 201 bp, Homo sapiens
actagccacagttggaataacaccactggcatcattggagacatttcttgacctcgtttggttagaaactatttaaaaatacattgctcagtggggctgcrcccagttgtatagatggcttcatcagccccaggcaggcctcccagatctgggaaggtgtgcggagcctgaggaggctgctctggttcagcctgtctgtcc

SEQ ID NO: 458926 - DNA, 201 bp, Homo sapiens
cccagcagcctggagtcaccttggtgctcactggagcctctgctggttctgggccgtcctagacaagcatagattgccagtttcagaaatacccaggagtrggttaatttccttgtttttttaaatcctattcaaagaaagattatttccagttggtttttaaaaagcgtttatttctatttacaagcaaatattcccttt

SEQ ID NO: 458927 - DNA, 201 bp, Homo sapiens
ttaaatacctaccaaatatcatttcaggtttcacttctattcttctcttgactgactcaagccattcacatgtgcatgatttataaatatatataggctcragaaaatagtactaacaggttgttccctgatatcatggcatattttgtaactttgcttttatactgtaaacttgaatacaagaactatgtcaaatttatc

SEQ ID NO: 458928 - DNA, 201 bp, Homo sapiens
tgccagtctgaaatgcttgtcttctttcccggaaacagtggctgacagctgaagcgaatgggccacaataggtgggggcttcagaaagttctctagaggcrgtgaggaggtaggcctggagtagggaggccctgaggggtcccttcaagaagcaccaagatcgcaggctggccatgggaaaggaaggcagatgggagggat

SEQ ID NO: 458929 - DNA, 201 bp, Homo sapiens
aagtaaagagcactaaccccatcctgagggcctcactctcatggcctcatctaaccctaattatttcacaaaggccctatctccaaatatcatcacattgsgggtagggggtcagggcttcaatatgtggattgtaggggaaaccagcatttagtccataatactcctgaaatcaattaaggcttagaaaaagccctacaa

SEQ ID NO: 458930 - DNA, 201 bp, Homo sapiens
agactgaggaagggcagagccagaagcaagccgtgccaggccatctgcctgctcatggggtcctaaagcgcgggctaagcctgcaggaaagccggggcggkggggggggcttagtgccacatgcaccccactcattccaaagccaccaaactgccaggggctgccgtccacccgtggggcccaggggctggggccacagcc

SEQ ID NO: 458931 - DNA, 201 bp, Homo sapiens
ttcccttccttcctttccctccctttctttcctttcttttgacggagtgttgctctgtcacccaggctggagtgcagtggtgagatctcgactcactgcarcctccgcctggatccctcctttctgtctctagtcacagccctcaggttgcacaagcaatctgcttaaggtcactgggatcggggccgagtgttgccacaa

SEQ ID NO: 458932 - DNA, 201 bp, Homo sapiens
ggaagggacaagctgtggagctggctgagtcacagccacctccccacctccccgcaagctggtcccatcgaccagcaagcccagccccagggcgcttaggsagaaatgacccagcctcctcagaccccgcctgcctgtcctgtgcccaccacgcagcagtcaggggagaaaatggtggctatcccttctgcttagagaaag

SEQ ID NO: 458933 - DNA, 201 bp, Homo sapiens
gacacagctgatgggcccttgcgtgttctcagggagaaagtgggaggcttcacactcatcttgttcataggagtgagttagcttctaaggcctttgctagwggctgtccatcaagagcatgttgtgtagcttgagaaggaagccctgagggtccccatcctgtcctgtgaaacctctgatgggtgaagtgatccttctcca

SEQ ID NO: 458934 - DNA, 201 bp, Homo sapiens
gctggcagaaagcccccagccccacagccctgagagatggtgttgctagctcaggtggctgacacatggggtatgccgggcactgggcaggtcccagagcyggggaaccagctcacctctggttgctgtagctcctgccggaggcatgtctacttgtgatcccggacagccgaacccaagagctggtggctctgagcagac

SEQ ID NO: 458935 - DNA, 201 bp, Homo sapiens
tgcgagcaggtgggcagatgagggccctatgcgcactcaggggtgaagggcgtccgctggccactctgcaggggcccctgcaggattccaggcacctcccrtttgtccttgaggactgctggctgtaaccagggcacatcacccacctcaagacaagcccacgcccttgtcagcttagggggagcccagtcctgagggctg

SEQ ID NO: 458936 - DNA, 201 bp, Homo sapiens
gagcgtggcagccaccaggtccacagaactactgcagcccagaggacagctttgaagtttgcgtcttttctgcctctttccctgtgggatgttgggcagtstctgttgtccccggcagagctgggcaccgctctgtatccccctggtggtgggggctgtcagggagggcctggggtgggggccaggggccatctgctatgt

SEQ ID NO: 458937 - DNA, 201 bp, Homo sapiens
attgcgcgtgtctttatgagcacagagcgctcattggccggaggtgcatcttcatgagtacgttgctcatgggcccgtccttgcctggataggaggaaccygggacttgattggtcttgccacagcctggtggtctagttgctttgtggggtgtgcagtcctggggctgcgggaggggagtaacccttagtaacctgtgtg

SEQ ID NO: 458938 - DNA, 201 bp, Homo sapiens
cccctctgctattcgacctcgttgctgcagtccggttggggatatccaggactgcgccgggagtgcccctcactgtctcagcctctgtcctgtctgtggcrtgtgcatcattctgaggagaaggctggattttgtgctctgccctgggagcaggtgttgaactgcacccacttgtgcacagtgtcagccctacccccatcg

SEQ ID NO: 458939 - DNA, 201 bp, Homo sapiens
ggcctgggtttgaatcctggtcttgcccctgctagatgtatgatattgggcaaatgacttgatttcttttcttggagcctcagtcttcccatctggaaaaygtgcatactaccaaccataatgcctgttcataggaacgtgagaggattagctgagaaggacccagcctctggtggatgcccagggagatgggaatggagg

SEQ ID NO: 458940 - DNA, 201 bp, Homo sapiens
ggccacagtgatatcagatagctgtgttcagcggttgcaaacaaatgaagacacattgaagactgtagaacaaaagcaagaaaatttcatgttagcaaggmcttgtgtgagagcaaagctgtcccccctgtttctgtggtgtcagagacagagtggcctggggaggaaggcctgggtttgaatcctggtcttgcccctgct

SEQ ID NO: 458941 - DNA, 201 bp, Homo sapiens
gtggggccggagccttacttggcagccgctccagtgctggcctttctctagcctctgatgttggtctcctgctcgcattgtctcttttcctaggaacgagrgcagtgtggttcatgtcaggaaccttagccagagctctgtacctcctttggcctaggccccactccttggaactttggtcaacacacaaatgacagcact

SEQ ID NO: 458942 - DNA, 201 bp, Homo sapiens
caacctggagcaggcagtaactgcctcactggctccgcctccgccttccctcctgcccctctagccccacttcctgggcctgcattcaggcctctgcctgytgcctggtgtctggacgccagtcttggtggccctccctcagtcaggtctcttcagcccttaccagatgtgacactggtgccactctgctcatgggcctca

SEQ ID NO: 458943 - DNA, 201 bp, Homo sapiens
tggagcaccccttataacacagactgcagacagtgtgaagatctagtgagagaggtaggcatggaaagccctagaaagcccattgcaatgaaagaaatgckaaatacaagtaaaggcaaaaacttttgtgggcaggcacacgagagtagttgcttctgacttagagatagttaggataggcttgaacaaaggaagagagcc

SEQ ID NO: 458944 - DNA, 201 bp, Homo sapiens
gccccggctggtcttgaatacctagccttaagtgatagaaagtgcatagaaatcaggatcatggtagaggtaacttgacagcctgtctcatttagtaagtrctgaagctgagacttcacctaggattttagattccaagttaattttttgaacctaggatttgaacctaggattttagacgccaagttaattttttttaaa

SEQ ID NO: 458945 - DNA, 201 bp, Homo sapiens
gcctgtctcatttagtaagtgctgaagctgagacttcacctaggattttagattccaagttaattttttgaacctaggatttgaacctaggattttagackccaagttaattttttttaaaccatactgtgatgctttgaaagttactagttccttgtcttccaggccctttattagttcgtttagtttgagtcttcatct

SEQ ID NO: 458946 - DNA, 201 bp, Homo sapiens
acaaaccaggtgatagaggctaacagagatacagctttgcagagatgacaaacaggaagtggaggaaatgggaggtggatggaaagcctgttttttccaawttgtttttggtcttgtcttttccttgttaaattcaaagtgattttggaggagcatacatatgctgtacatacatagtagaattgaaaaatcatgaagtga

SEQ ID NO: 458947 - DNA, 201 bp, Homo sapiens
aaagcccttcccatgcctttcctttgcagcagaaacatggcatcctcatctgcctctttctcacctactggtcagggcattgtgcacctgggtggttggtkcagcctctgattctgctaggccaaggctctgacgatgccactgttctccttcagtgcattctagggactgttggagctcctgaaggccaaggatcatctt

SEQ ID NO: 458948 - DNA, 201 bp, Homo sapiens
gaaatgcaaacgcgatttctctgtggagccttcacggaattgctgcttttcactatgattattgctgcataacaggccacttctgtgtgtaggaagtgcgygtgcaagtccaaagggaattgaggcctgaatgggtgggttatcccaattaacaaatacaaagttttcagtacattttgttttaagccaggtgcacaagtt

SEQ ID NO: 458949 - DNA, 201 bp, Homo sapiens
cacattttgtctaattgttcacccagcaaagcgtctgtggagtatttcctggttttggctgttatgaataaagggctgttacaaacatttgtgtgtgaacrtaaatcttaatctctctggaataaatgctaaggagaactcttgctggtagttgtttgaatgggcatttgaaggggttttttaggggatggagaggtgagg

SEQ ID NO: 458950 - DNA, 201 bp, Homo sapiens
ctgttggaatttgtatgatgaagacattatgtagcagaagtgagatcatttcattatttgcaatgaattaagcagattattttctgaacttgaaattcagwtgaatttattttggttcctttcattttataacagcaggtaatttgttaaaatctattaagcaatagaatagatgtcaaacaaatgatttttaaaaatatt

SEQ ID NO: 458951 - DNA, 201 bp, Homo sapiens
gaatattaagtgagaaatgtaaagcagcttagcgggattgctggcacacaccaaggctaaatcagtgttctttcctccaaggacccttcttcccatggagytaatatgtttaattgtttgagattttacccctcagtgccacagttttagtatattcagttccattgtaggcatttgtgttctaggagtgattaaatgagt

SEQ ID NO: 458952 - DNA, 201 bp, Homo sapiens
cagcctccatagtaggtgggaccacaggcacgtgccaccacacccagctattttttgtaatttttgtagagacaaggtttcgccatgttacccaggctggwctcgaactcctggcctcaagcagtcctcccgccttggcctcccaaagtgctgggattataggtgtgagccaccgcatccggccccagtaattattcacta

SEQ ID NO: 458953 - DNA, 201 bp, Homo sapiens
tgtgagctaattgcctaattatttttttcaaaatgagttttcagaattttcattggtaaattgtgaatattttataaaattgaggcggattgctatttccratgcttagtatgcatcaggttattaacagtgaatgagatggtgatgtatgacttcacacctccaactgaagtaattacagtttaacagttatttaatttc

SEQ ID NO: 458954 - DNA, 201 bp, Homo sapiens
gatttacaatctggacagcaagtaaataccagggtgcaattaatttttacacagagcagcagattctaaaacattttcctgtgttgagcagtttgtttctrattacagattggaagctgcttttctatttaatactgttatcatgattattttttactttttgatggtgatcttcaggttccttgtatctgtgtgactttc

SEQ ID NO: 458955 - DNA, 201 bp, Homo sapiens
agagtcatcctgtgtggggagaagcggggccacgcgtggactctcagtcaaggctccctccacatcttctcccacttgcagtgggggacccagggtcacaygtgtactagtttgatcttttttggtgaaacagggcaagtggagtgagcgcagtctccattcaccacccttggctaattgcagccattcagtgcatttgta

SEQ ID NO: 458956 - DNA, 201 bp, Homo sapiens
aggccccggcatgcccagcccctcaaccctgcctaggctttagctgtcaaccgggccagaccagtaaactgggttgtggagatgttggtctttatttcaakgatttctagtctttgcactgtgtaagttataataaggtggaagtctggtgggtttgtgatgacagagagagtcgcccttgtagggccaggtcttgaggcc

SEQ ID NO: 458957 - DNA, 201 bp, Homo sapiens
gcctgtgggagctgaggggtagaataggaagtcctggtcagacccaaaagggctgtcacaagaccctagtctacccagccttgtgcagatggtgagattgwggcccctcttcccagtgccccatctggtgtggtttttaactgtgaggatctcactgggcatctttttgtaagagcaaagacttcccagaagcagtggcag

SEQ ID NO: 458958 - DNA, 201 bp, Homo sapiens
tccccggtggtttacagctttcagcaaaccctcagggccccagacacatagctcagaagcctgcctcctcgcctgcttcctgggacaacctcacctttgcrcttccttcctgcgtcatgctgggaaagagagaggccccggcatgcccagcccctcaaccctgcctaggctttagctgtcaaccgggccagaccagtaaac

SEQ ID NO: 458959 - DNA, 201 bp, Homo sapiens
cttctcaaccacctgccatggctctgggacacctggcggtgctcttgatgctgccactgaagaagatggagacagggagatcagctggccctggttttccrtgtgacatacttgggaggcccgtccccacaggattgaatacctccccggtggtttacagctttcagcaaaccctcagggccccagacacatagctcagaa

SEQ ID NO: 458960 - DNA, 201 bp, Homo sapiens
tgtgaattactgttttttataggcggtaaaaaagatgaccattgattacttgatgcttcagatgattgggcattgtttgacctctcagtgtctctctgtgrctctccttgcccacctttggggacgtcttgccggatgagtttctgtaacgtctgcgtggactcagaaaccactctcagatgatagatgatgatgactgtg

SEQ ID NO: 458961 - DNA, 201 bp, Homo sapiens
atcctggaagctgtcctcctagtccttccagccagggtctgagtcctccaggtgagacactcaaagcactttctggacacaagttcaaaaagagcagcccygggactcttctgtgtgttttaactattttggtcccctacggtgcctgagtgaagggacaggcactggtgtgtggtttacaactccaacattgagaatttc

SEQ ID NO: 458962 - DNA, 201 bp, Homo sapiens
gggtctgggatcctggggtgggcatttgtgccgtcgccttcgccgccgcgctcgccttgcaggagcgggtgcagatggagccaggctgacggttgttcaasaggaacaaatgtttgttcaattgttggatggtggagaaaagggactgtttcctattgactgctgcaggagttggaatggcattgtttattggcctgggaa

SEQ ID NO: 458963 - DNA, 201 bp, Homo sapiens
tggctaggatgggaggaaatcttccagaggaaacttggcttctgggtgtcttggagtgatgcgaggaggctggagctgaagattttattttctttcccctyacagtgattggagatacttgagcttttctgaaaaatagagacgtccttgggtttttcttgtcgttttttttgtttgtttgtttttttgttaaatgtgggt

SEQ ID NO: 458964 - DNA, 201 bp, Homo sapiens
gatgggggacagcttggccagaccacgctggactatcatggagaccacattgcctcttgggcatctgtaagtctcgggaaggacttttttcacggtgccastctcaggagggtgaaagcaaatcatgttggtaaacagcccatttgacctcagaacgcagtggcaggctaactcctgacttctccactcactctttttgtt

SEQ ID NO: 458965 - DNA, 201 bp, Homo sapiens
ggactatcatggagaccacattgcctcttgggcatctgtaagtctcgggaaggacttttttcacggtgccagtctcaggagggtgaaagcaaatcatgttsgtaaacagcccatttgacctcagaacgcagtggcaggctaactcctgacttctccactcactctttttgttctcttgttaaacaaagaaacagattcttc

SEQ ID NO: 458966 - DNA, 201 bp, Homo sapiens
gtgtgcgtgtgttttgaaggaagaataaggagacccatctctagcaaggcctgcctggccaggcatgctgtcctttctgcccctgaagagtttgtaggagmgtgctggggcccctgtgctctgaacttctagaagctagagtaaagtaatggttctgaatattggctgcacattagagtcacctgggaaggttggaaaaaa

SEQ ID NO: 458967 - DNA, 201 bp, Homo sapiens
agagtcacctgggaaggttggaaaaaaaaaaaaatccagatgcccaggctgcattcaggcccaattacatcacaatcttggagaggggggcagcaacccarcattggtatctttaaagttcctgagtcgattctcttgtgcatccaagactgaggagtgagggctgtaatagaccccatgcatacctacgggtcggttcct

SEQ ID NO: 458968 - DNA, 201 bp, Homo sapiens
ctcatgacgtggaaccttaattcctgcttgcaagacagcctgctttagcgtagaccagcaggtgaacttgatcattgctcacagagttcattagccaagtkaaacatgctacccatcccccgtccccaccccccagtcccaatggaaggtgctgaaaccttgtaaaggtgagcttgctgaaaaaggttttggcctctttgc

SEQ ID NO: 458969 - DNA, 201 bp, Homo sapiens
gtccccaccccccagtcccaatggaaggtgctgaaaccttgtaaaggtgagcttgctgaaaaaggttttggcctctttgccaaaagtgtgtcagtctgccyggctgtgttgtggtggtggtgagtagtgaataagggctcttccccctgtggggagttgggtttgggccgagtgaagggagaagaggagaattgctatttt

SEQ ID NO: 458970 - DNA, 201 bp, Homo sapiens
ctagcccgatttcattgctgaagacatgctgcctgcagaaatcactcaccccaggttgggatttgaacttggcccagctgacctcagccctgtattctttstaccacaccctgctgcttttccatccagtgctcaccaggggaggagagttcctgctgtaagacacgtgcattgcccagtgggcgttccctggcaactcct

SEQ ID NO: 458971 - DNA, 201 bp, Homo sapiens
tgggtgttgccgtgcttcaggaagtgtggcgaccagaaagcgtagacccggggcccagggtctgcccgcccctgcagcctggcctccccgcacaggctgtrgcttgcactccagccgctctagtctctcaggaatttgcttgttacttgtactgtgtaaataaagcttcctggttcaatacccaagtgcctggtgccagct

SEQ ID NO: 458972 - DNA, 201 bp, Homo sapiens
cacatgacttgagtatgctgcagggacagcagattgttagccacccagaccctgagatagatcttaaaggtatcatgcggctggaccccaatttgttgttstatccaccaggccattttacaagtgaggcagcccaaggctggcatggcaggggtgggcggggggactctgagaaggtaactctgggccttggtgactctc

SEQ ID NO: 458973 - DNA, 201 bp, Homo sapiens
ctcccccatgaaactgctagcagtagctgctgctgattgagcactctcctggatgagcgagacactgggcaaaggacttgggctctgttttcatcagatacagtaaccttgtgaggcaagcactgttttccctgttgtacagagagggaaactgaggctctgagagtaacttggcaaaggccactcaaacaatgtatttca

SEQ ID NO: 458974 - DNA, 201 bp, Homo sapiens
agaccatggcagggtgtgtgccccagaggtggcctgtgggagggctttgcgaggcttccacctcgcgccctgtgggatcacccagttattgtctttttctkggccatgcccccggcttctctttgagaagaccctgaccctgtttgcagactgggctcgaagtctccggcctggtcctggcattccccagtgaagttggcc

SEQ ID NO: 458975 - DNA, 201 bp, Homo sapiens
gtagagatggagtcttgctgtgttgcctaggctggtcttgaactcctggtctcaagcagtccttttgcctcaacctctcaaatgctgggatcactggtgcragccactgtgaccagcctcagccccattttaaagatgaggaaactgaagtcgagtgatttcatggcgaaggccagggccgctaaattccacacacacgtt

SEQ ID NO: 458976 - DNA, 201 bp, Homo sapiens
gtagagtttgcaacactttcttgtatgtattaattcattagcatgcaatcctcttttgaagtggatgagccaggtggggctcccacttgctggaagctgakagtcccaggccacagtgatatcagatagctgtgttcagcggttgcaaacaaatgaagacacattgaagactgtagaacaaaagcaagaaaatttcatgtt

SEQ ID NO: 458977 - DNA, 201 bp, Homo sapiens
tactgacttagcagatagacatcagtcaggttgctgctgtgggcaggctctgtgctgaggccacaggatgactgagggagggcaacacctaggctgcacaygtggagggggggctccccacaaacaacctggaaatgaactttgagagaaggacagggtggcagtgggggaggcataggcaggaggcacaggacctgagga

SEQ ID NO: 458978 - DNA, 201 bp, Homo sapiens
ttccttactgcttttttgagacctggtttgaccacccagcattggttggctcccagcaagacttgagccatacgcggccatttagacatggatcacgtgtrtgtgagcaaagatttcagaaaaaagcaacaattaaaaagttcacccattgaatgcagtccccctaggtgtcatagtccctgctgtatttttaactccaag

SEQ ID NO: 458979 - DNA, 201 bp, Homo sapiens
cctcacaaattctgagaacgtgcccagatcatttcacatgttgctgtaatttagctggattctggaaatgtgtattgagctgctagggtatgtgagggatygtggtaggtgttgcaaagggttcagaaaaaattgctctcccaacagatcaaagcagccagctccagcttctaacctcctttgggagcccccacagctgca

SEQ ID NO: 458980 - DNA, 201 bp, Homo sapiens
ttaagaaattcacaggctagtatgtaggctaaatgttcttttcgtactgctcccaggaatgttctgccttttagaactagaggctgatttcttttcttgayattttaaatccaaaggattcagcctttagattgggtttttaagctctgtgaaatcaccaactgtatctagttttagtttcctttctacctaatgaaaatg

SEQ ID NO: 458981 - DNA, 201 bp, Homo sapiens
tgtgcagtcctggggctgcgggaggggagtaacccttagtaacctgtgtgtctgcccctccacagaactgtcagaccttcagcagcctcagctgcctgagygcagggacagaggactgcggtccccagagccccttcgcccgccacgtcagcaacaccagggcctggaccgccctgctctcagcctccggcccagggggca

SEQ ID NO: 458982 - DNA, 201 bp, Homo sapiens
taagggttgtgactaggtgattgctattggtttcttgtagctcaaaactctagaaatgcatatatatatatatatataaaatatatatatatatatataatagatgaccttttgcaattccagtaggacatacgtatcttatcttataggtaagcatatggtttgaaaagtgcattttgtccatggaactgtgtttcggta

SEQ ID NO: 458983 - DNA, 201 bp, Homo sapiens
aagggttgtgactaggtgattgctattggtttcttgtagctcaaaactctagaaatgcatatatatatatatatataaaatatatatatatatatataatwgatgaccttttgcaattccagtaggacatacgtatcttatcttataggtaagcatatggtttgaaaagtgcattttgtccatggaactgtgtttcggtaa

SEQ ID NO: 458984 - DNA, 201 bp, Homo sapiens
tatatataaaatatatatatatatatataatagatgaccttttgcaattccagtaggacatacgtatcttatcttataggtaagcatatggtttgaaaagygcattttgtccatggaactgtgtttcggtaaacattccactgctagctaaaccatcactgttgtatgcctgcagtgtgctcttgctatgctgtgtgctgt

SEQ ID NO: 458985 - DNA, 201 bp, Homo sapiens
gtgtagctgggaccacaggtgtatgccaccatacctggctattttttaaattttttatagagatggggatttctccatgttgcccagctggtcttgaactsttgggctcaagcatttcacctgcgtcagcctgcccaagtgcagggattataggcgtgagccactgcgcctggcggtgaagcccttctttgcagaaatctc

SEQ ID NO: 458986 - DNA, 201 bp, Homo sapiens
tgctggtattataggtgtgagccactctgcctggcctgaacttcttttttttttttttgagacggagtctcactctgtcccccaggctggagtgcagtggsgcgatctcggctcactgcaagctccgcctcccggattcacgccattttcctgcctcagcctcctgagtagctgggattacaggcacccaccaccacgcct

SEQ ID NO: 458987 - DNA, 201 bp, Homo sapiens
gtacaaccaagcctggttcagatggctccactagggggacagtgacagctatagccgcagctggtgtacttggcagtctttcaagcattttggggtgtgckgcggacaaacaatagaatgaatctttgtttctggagcctgggccatttctaacgaggaagatgattactcatttttggaagttgggttaactcttccaga

SEQ ID NO: 458988 - DNA, 201 bp, Homo sapiens
ctaaaatgcctgatctcgtgattttccccccttggctccccaaagtgctgggggtgcaggggtgagccaccgcgcccagcctaccttttacatttagacctttttttttttttttttaagatggaatcttgctctgtcttccaggctgtagtgcagtggtgtgatcttggttcacttcaacctctgcctttggggttcaaa

SEQ ID NO: 458989 - DNA, 201 bp, Homo sapiens
ttgtcaagacgaggtctcactatattgcctaggctggtattattattatttttaagtctgagaacatatctatgccacctcccttgggtctgctcctgatsgaggtggccagtgttggtggtttgtttgtttttttttttttttttagatgaagtctctcttttgtcacccaggctggagtgcaatggcgcgatctcggct

SEQ ID NO: 458990 - DNA, 201 bp, Homo sapiens
agttggtagttatttttatctattctaacaatctctaacctttaactggtgtatttagaacatttatgttcaatgtgattattgatacgtttggatttagktctacattttattgttttcccttttttacctctgtttttttttttttgagacagagtttcactcatgttgcccaggctggagtgcaatggagggatcttg

SEQ ID NO: 458991 - DNA, 201 bp, Homo sapiens
agccttggcttgcctaagtgattctcttgcttccgcctcctgagtatctggggctgcaggcacatgccaccatgcctggctaatttatttttttgtcaagmcgaggtctcactatattgcctaggctggtattattattatttttaagtctgagaacatatctatgccacctcccttgggtctgctcctgatcgaggtggc

SEQ ID NO: 458992 - DNA, 201 bp, Homo sapiens
taacctttaactggtgtatttagaacatttatgttcaatgtgattattgatacgtttggatttaggtctacattttattgttttcccttttttacctctgtttttttttttttgagacagagtttcactcatgttgcccaggctggagtgcaatggagggatcttggctcactgcaacctccacctcctgggttcaagtga

SEQ ID NO: 458993 - DNA, 201 bp, Homo sapiens
tctagtcatcctacagtgctatagaacactagaacgtactccttctatctggctgtaattttgtatcctttaacaaatctcttcctgttccccgccttccscctacccttcccagcctctagtctcctctgttctgctttttacttctatgagatcaaaattttttaagcttccacatattctcgtagcctcttagaaagc

SEQ ID NO: 458994 - DNA, 201 bp, Homo sapiens
agtagctgggattacaggtacccgccaccacacacggctactttttgtatttttagtacagacggggtttcgccctgttgtccaggctggtcttgaactcttttttttttttttttttttttgagacggagtctcgctctgtcgcccaggctggagtgcagtggcgcgatctcggctcactgcaagctccgcctcccaggt

SEQ ID NO: 458995 - DNA, 201 bp, Homo sapiens
taaaattaaaatttaaattgacacataattgtacttatttatggggtacatagtgatgttgcaacacatataatgtatgatgatcggctcagggtgattarcatttccaacatctcaaacgtttatcatttctttgtgtcaggagtgttcaatatctttcttctaactatttgaaactacataatattgttaactctagtc

SEQ ID NO: 458996 - DNA, 201 bp, Homo sapiens
cttcttggaaattattttagagagggttttcttgcaacaaattttttttgttttcctttacctgagaatagctttatttcaccttcattcctaaggagtgttttttttttttttttggctgaatatagaatcttttttttttttgagacacagtctcactctgtcacccaggctggagtgcagtggcacaatctcacaatc

SEQ ID NO: 458997 - DNA, 201 bp, Homo sapiens
tatgctctgctactgtggaacccagaaaacttttgagcccagcccctccgtgaatcaggaggtgctgtgctttgaattagtgttaacaacattttgatagytatcggaaaccccctgcaagcaagacagatttcagtatctctggcaccaagaatgttgagacttgacttaacgtggtgattgtgttctttgtttcagcag

SEQ ID NO: 458998 - DNA, 201 bp, Homo sapiens
ttgcgatatttctagcttttgttttttctattttttttttctgtattactgtctttctcctttcattttgggagtctatacacatgaaatgtcaatttttytgttgctccacaggtccccgtgaactccacaggttcaattttttaaaagtcatttttgtctttgtcggccaaatgttatatttcaattgatctgtcttca

SEQ ID NO: 458999 - DNA, 201 bp, Homo sapiens
gcacagccagcctagtgcgtgttggacttgggacgagactgataccgggaggaaataatgcccagagagaagcacaacacagggagtacatgagatttgcyggttcaactacagtcacctagaaatactttttgtttctgagtaaaagtctgttctaaggagcgcagcgtcacatgtgtatataatcttcccattgaccca

SEQ ID NO: 459000 - DNA, 201 bp, Homo sapiens
atttgaacttgggtggtgtggctagcagtctgtgtgctgagcccgtgcagcgcagcctcagtgggggcacagggagcagggtttgaggaccagcaggctgsagaagctttgacaggcggacacggggagcatgggtggaggcagggaacgtggccttggtgttccatccccaggctgtggccctttagctcactgcactgc

SEQ ID NO: 459001 - DNA, 201 bp, Homo sapiens
cctcctgctgtgtgagactgggtggtgtccaggaggtagtcccagggtgtgggtggggagatgggagatgagaatgtcctgaagctagccttgtcacctgwatgtgacaggacactgtggtcagtccaccctctccagccaagagtgtccaatgtggagtgaagttatgaatgggcccctaagctgggcctgaggaggcag

SEQ ID NO: 459002 - DNA, 201 bp, Homo sapiens
cctccctgggagcgctcttccttcccatccttgccagcatggccacagaccggaagtggcccttcccagagctgatgttccagtgtggtccagtttctgtyctggtgtggagagaggaagtccgctcagacccaggggttgggagggccaggccctaggctccaggtcctttgtttgaagatttttttctgagcaccatag

SEQ ID NO: 459003 - DNA, 201 bp, Homo sapiens
gttacttaacctttctgagcctgtttgctcatctgcaaagcaaaaaagagcacctttaggggcttgttggtgcacgcaccatgcctggcccattgtgaggrcatggtggagggctctgctgttgcatttctagtgggttctccctcgtgaagccccatggcaattattcttgaggtctcatggcattcctatgaggcaggc

SEQ ID NO: 459004 - DNA, 201 bp, Homo sapiens
ctgtaaccagaaacttcttatattttccaaagaagtatattttgctaacatatttccagtcacctatctttttgaaaatacttaaggtggacttggtgatrtctgtcttctcataatttattataagcaattttaaaaaggttctgcttttaaaaagatcttttcaaatgtagaaagaacagtgtgaaatgtgaatgactg

SEQ ID NO: 459005 - DNA, 201 bp, Homo sapiens
caagggattggagcccaaggggcttgtgggtgcgggacaggctttggctcctgggaggccttttgggagtctcgaacctgagggccaggcttgggggaaasggggagagggcgaggctggcgaatagggctggtcggcgagagtgagagaccgagggagaagtgctgggcctgggagccgaaaaggctgagtaggagggga

SEQ ID NO: 459006 - DNA, 201 bp, Homo sapiens
cccctctgtggcatgatcctggggaccgggccgtaggaaccgctctcccctgtaatccctttggcagtcaaacgattcagtttcctggctggaaggtagtrggcacagactgcctacttgctggacctaatttgccctgtaaccctcactgggcctctgatttctcaccttgctggtcctgcctcccagcgtttttaggaa

SEQ ID NO: 459007 - DNA, 201 bp, Homo sapiens
ggaaaaccttgattggcgttttattttactttaattttaaaatttattttgagacagagtctggctctgttgcccaggctggagtgcagtgggataatctyggcttaccacagcctccatcatccaggcatctcccacttcagcctcccaagtagctgggactacaggcgcacaggcacaggccaccacaacggcttattt

SEQ ID NO: 459008 - DNA, 201 bp, Homo sapiens
acttctctgagctgtgattttctcatctgtggactgggaataatagtgcctacttaacagagcaggaggaataaacaggatagtgcgagtccaagcacccwgttctttcccgttttcattcacccaacaagtactttttgaatgccactgtgcgttaggcttcgccgttaattcatataaccaccctgagaagtgagtgct

SEQ ID NO: 459009 - DNA, 201 bp, Homo sapiens
acatgagcagttttcctttgtggaatactgtcctccctcagccaacagcacacctgcctcaacaccagagctggcgagacgctccagcggcctttcccgcwgccgctcccagccgtgtgtccttaacgacaagaaggtcggtgttaaaaggcggcgccctgaagaagtgcaagagcagaggccttctctagaccttgccaa

SEQ ID NO: 459010 - DNA, 201 bp, Homo sapiens
ccccctagcaagcgccagtgccgctcactgtccttctccgatgagatgtccagttgccggacatcatggaggcccttgggctccaaagtctggactcccgkggaaaagagacgctgctacagcgggggcagcgtccagcgctattccaacggcttcagcaccatgcagaggagttccagcttcagcctcccttcccgggcc

SEQ ID NO: 459011 - DNA, 201 bp, Homo sapiens
tcaattgatctgtcttcagattcactgactttttctctgtcaccttcattttgctgttaagtccacacattgcaattggctgacatgtcttaattttttaytgcatgatttctttatttaccattacgatttattttttgtaggaggtagttcatttgtctgaatggtttttcacaatgtgaattttctaattacatctct

SEQ ID NO: 459012 - DNA, 201 bp, Homo sapiens
tgttagctataagccttatcatcatccttttaaaggtaatctgtcgccttgtatcccacatccctactccctggatgtttttgagatttttctgtttttctttttttttttttttggtacggagtctcacgccgtcacccaggctggagtgccatgtgccatctctgctcactgcaacctctgcttccggggttcaagtga

SEQ ID NO: 459013 - DNA, 201 bp, Homo sapiens
tcagaagtcgtggggctttctgtgtgttttcaaagcccattaactcgatggactccataactcactagagacttgggacaaaaaatctgggcctaattttrtgcagatgttttctctttgaataccttttcctcctttccctgatctgacattggcaaaggacagtcacccttttattgtgactttagaagggatcagtag

SEQ ID NO: 459014 - DNA, 201 bp, Homo sapiens
ccatttaggtttttgtaagtacactccatggtgacacatgactgtgtgtgtgtatgtgttacatcttatattctgtgctatattctgtctttttttctttytttttttttttttgagtcagagttttgctcttgtagcccaggctggagtgcaatggcgcgatcttggctcactataacctccacctcctgggttcaagca

SEQ ID NO: 459015 - DNA, 201 bp, Homo sapiens
ttattttttcttctgtatgtttgttcatacactactgctcctgatgtttgcaaatacacataatacttaactatggattaaccagatcaaaagggttttcyttttttttttttttttttttttttttttgagactgagtctcgctcagttgcccaggctggagggctggagtgcggtggcgccatctcggcttactgcaag

SEQ ID NO: 459016 - DNA, 201 bp, Homo sapiens
ccattctcctctctcagcctctgaagtagctgggactacaggcgcctgcagccacgcccagctaattttttgtatttttagtagagatggggtttcaccgkgttagccaggacggtctcgatctcctgatctcgtgatctgcccgcttcggcctcccagagtgctgggattacaggcgtgagccaccgcgccctgcccaca

SEQ ID NO: 459017 - DNA, 201 bp, Homo sapiens
ccaggctggtcttgaactcctgaccttgtgatccacccgcctcggcccctcaaagtgctgggataacaggtgtgagctaccacgcccggccatttttgtatttttttagtagagacgagatttcatcatgttgaccagggtggtatcaaactcttgatctcagatgatccctccaccttggcctcccaaagtgttgggatt

SEQ ID NO: 459018 - DNA, 201 bp, Homo sapiens
atctcagatgatccctccaccttggcctcccaaagtgttgggattacaggcatgagccaccactcctggcctacaataaagtattttttaaggcacccaatttttttttttttttttttttttttgagatggagtttcgctcttgttgccctggctggaatgcaatggtgtgatctcggctcaccacaacctctgcctccc

SEQ ID NO: 459019 - DNA, 201 bp, Homo sapiens
tcttttcttttcttttcttttttttttttttttgaggcagtgtctcgccctgtcgcctagacagtagtgcagtggtgcgatctctgctcactgcaacctcygcttcccagttcaagcaattctcctgcctcagcctcccaagtagctgggactacaggcacatgccaccacgcccggctaattttttgtatttttagtaga

SEQ ID NO: 459020 - DNA, 201 bp, Homo sapiens
gggtttcaccgtgttagccaggatggtcttgatctcctgacctcatgatccgtctgccttggcctccctaagtgttgggattacaggcgtgagccactgcrcccggccaatataaggtatgttttcatacagggaccttttctattttgtttactgtttttttttttttttttttttttaagatggagtctagctttgttt

SEQ ID NO: 459021 - DNA, 201 bp, Homo sapiens
ctaagtgttgggattacaggcgtgagccactgcgcccggccaatataaggtatgttttcatacagggaccttttctattttgtttactgtttttttttttktttttttttttaagatggagtctagctttgtttcccaggctggagtgcaatggcgtgatctcggctcactgcaagctctgcctcccgggttcacgccatt

SEQ ID NO: 459022 - DNA, 201 bp, Homo sapiens
gaccttcagccgtgaactggtgaggacctggcaggcttcctgctttccatgaccatttctgaggcctgatgtacagacagggctgtggactgagcacctargcttagcaaatcgagtccagagtccccaagagcaaagctctgtgaggcgtcccgggctggggcaacagggcacaggagcagagcttgactgagaacttgc

SEQ ID NO: 459023 - DNA, 201 bp, Homo sapiens
cttcgtgggatgagatgtcttggtggggaaagccaaggaggtagcaagttcaaggagcccctagtcttcctgttgacacccaggagggtgtggctttcagrcccctccccaggccagcaggtcctgacacctgaattcatgtggaaatgctgagcctctgaatggcctcctgctgtgtgagactgggtggtgtccaggagg

SEQ ID NO: 459024 - DNA, 201 bp, Homo sapiens
ccctgtcttcctagcctgccggccgctccaggagccgcccagcgtgcaccgctgcgcctcatcttctgagccttccatcctcactgctcctgggggcagcyctgtgggggaaatcacgtttttaattagcctggttcgggatggcggctctaaagctccgggccgtgaatgcagcctcttcgcctttggaatccgctgcca

SEQ ID NO: 459025 - DNA, 201 bp, Homo sapiens
gcctgcaagccagcctgagcacccatctgcctgttgggccaccgggcagcttctgcagatgggagtcatcaggcttgagaaggtgacatctgggctatgcygggctgcccttctgttttggtagagtcactgccttcactgccccacccttgaagctggcttgcttttgtcacaaccaccggagaggcgttggtgtgagag

SEQ ID NO: 459026 - DNA, 201 bp, Homo sapiens
ggagcacacttggtgcctgggagcacacagagggagcacacttggtgagcggagaagcttctgcgcagcctactctctctctggggcctcaaagggcccakcaaggcaggcagggagcatcatgcacctcttccagatgaggcccccagctggcgagcaccagaacctggagcctggcccctcctcagcagatcagacctc

SEQ ID NO: 459027 - DNA, 201 bp, Homo sapiens
gccagttttttatgtagtgcacaggcatttctgggaaagtatcttgagaatctacagatatttgcttgttttttcttagaatccttttcagattagtttgtttttttttttttttgatcctgcactttttaaaggataggataaattttcaggatggagtcttgggtaaataatatggtactcaatatttggttaaatttt

SEQ ID NO: 459028 - DNA, 201 bp, Homo sapiens
aggcagaggttgcagtgagctgagcttgtgccactgcactccagcctcggtgatggagtgagactccgtctcaaaaagcaaacaaacaaacaaaaaaactygacacatgctagctgcttcctacaaaccaggtgatagaggctaacagagatacagctttgcagagatgacaaacaggaagtggaggaaatgggaggtgga

SEQ ID NO: 459029 - DNA, 201 bp, Homo sapiens
gagtttgattcacaaaaagcttagaatggttctttgttgaaaagcttttcgagtcactatttggggcatgttagtgccatttgcaaaggtgaaggttttcttttttttttttttttaaccatagagcttttgataaggttaggaaaaggaagttgtcatctcttcttattactctaatcctgctggaagctagcttcttag

SEQ ID NO: 459030 - DNA, 201 bp, Homo sapiens
cagattacctaatttgccactctaagatgagtatagtatatgggtatagtatatgggtctgcccttctttttttttttttttttttttgagatggagtctygctctgtcgcccaggctggagtgcagtggcgcgatctcggctcactgcaagcttcgtctcctgggttcacgccattctcctgcctcagcctcctgagtag

SEQ ID NO: 459031 - DNA, 201 bp, Homo sapiens
atattataatgccagattttcatgaaatgtcctttatgatgtgtcagcagagactaagaatacccctcggatttagatcgttacctgttttaagtggtaattttttttttttttttttttggagacagggtctcactatgtcacccaggttggagtagggtggtgcaatcatggctcattgcaacctcaacctcctgggct

SEQ ID NO: 459032 - DNA, 201 bp, Homo sapiens
ccggggagggtttgcggtttgtgttgtcccaagtgtgttctcgctccccccgcccccccaccttgtcccccagcccccagctctccacccccattttcggwcttggggaacaatgcttgtagtacgggccggggcgccgcagcagcgacgaaccgcgcggacaggtttgcccgggtccctcgcgttcggacgccccctgaa

SEQ ID NO: 459033 - DNA, 201 bp, Homo sapiens
tggccagttctaagtaatttaaagccaaatgcctggacttagctttgaattaggacttcatgaagcctttcttcgtcttcttccttctttcttcttcttctttttttttattttttttgtgagacaggatctttctctgtcacttaagctgtagtgaagtgttgctatcatagctcactgcagccttgaccttcctggctc

SEQ ID NO: 459034 - DNA, 201 bp, Homo sapiens
aaatattataatgggaaatgttatataaataattatatacaattgaaaacattttttaggcatgagtcccttagaaaatggtatttggagttagatatggsacagtaacagaatacactgccttgcgtcactgccaaaggtcttgttcctgactactcatactggctgccacattctctttgcataaaataaagcttgttt

SEQ ID NO: 459035 - DNA, 201 bp, Homo sapiens
ttgctttggctaatattttcctcatgctgctttaaaaggtaggctctgtgtcacctgttacttctgcactagcaaagtactgatgaaagaggttttctttktttttttttttttttttgaggtggagtctcgctctgtcacccaggctggagtgcagtggcacgatcttggctcactgcaagctctgcctcccgggttccc

SEQ ID NO: 459036 - DNA, 201 bp, Homo sapiens
agtcatacttggagaagtcagatagtacaaaagggaggctacatggattgtgagagaacctaggcaatctgagtcctagtcttgactcttttggctatagycttaaccttgagtaagccacttaatttttctaggcttctgttctttcctaagggttgtgactaggtgattgctattggtttcttgtagctcaaaactcta

SEQ ID NO: 459037 - DNA, 201 bp, Homo sapiens
agggcaagtttctttcctggtttttaaatacaggtgttcttttttactcctagaaccagcagacaaaaacatatttgtctgtctttgataatgaggaacasactttagcctggttagagtacttaaaaatgtgtctttgtctgaaaactattaagtaaactatgttcaattttagaacaaaatacagaatttaagcaaaat

SEQ ID NO: 459038 - DNA, 201 bp, Homo sapiens
aatattcaaacctcacatagggttggacgtggttcctctccggaactgtcattcccttctccaggcaaccactgtgtgggaccatgctggactccttctatttttttttttttttctttttttgaggcagagactcactctgtcactcaggctagtggactcgctcttcttgcctttgtcactttataggatttcttggag

SEQ ID NO: 459039 - DNA, 201 bp, Homo sapiens
ggtcttatttcactgcagacctcagctagggctcgggtgctcgcagagtgcagacactgagtgtcttgtgaaacctcagagggccgaggggttccctcggmctggtggggcctccacaccgtgattggctcattcttcccactgtgggtgcaggaggttcaaagtgttggaaaggccgtgtgtataggaatggtaaatacc

SEQ ID NO: 459040 - DNA, 201 bp, Homo sapiens
gtcttatttcactgcagacctcagctagggctcgggtgctcgcagagtgcagacactgagtgtcttgtgaaacctcagagggccgaggggttccctcggcctggtggggcctccacaccgtgattggctcattcttcccactgtgggtgcaggaggttcaaagtgttggaaaggccgtgtgtataggaatggtaaatacca

SEQ ID NO: 459041 - DNA, 201 bp, Homo sapiens
atgatcctggggaccgggccgtaggaaccgctctcccctgtaatccctttggcagtcaaacgattcagtttcctggctggaaggtagtgggcacagactgyctacttgctggacctaatttgccctgtaaccctcactgggcctctgatttctcaccttgctggtcctgcctcccagcgtttttaggaagatcagtttaga

SEQ ID NO: 459042 - DNA, 201 bp, Homo sapiens
tcttaggggttcatgccatggttctggttcccctgttttaaaaaactaaatgctggtgaaacaactgtctttccctcaaagaaagatgtgggaaaaagggraaaaaaggactgaccagtgctcagcattttgcctttcccagcacagggcccacctgcctggggggagatggccctgaggctcagctgtgcccatggccct

SEQ ID NO: 459043 - DNA, 201 bp, Homo sapiens
tcttatttcactgcagacctcagctagggctcgggtgctcgcagagtgcagacactgagtgtcttgtgaaacctcagagggccgaggggttccctcggcctggtggggcctccacaccgtgattggctcattcttcccactgtgggtgcaggaggttcaaagtgttggaaaggccgtgtgtataggaatggtaaataccag

SEQ ID NO: 459044 - DNA, 201 bp, Homo sapiens
tttgtgatgatttgctaggatagtttccaggagtggaatagacaggctggagggcagggacatttttaaggctcttgattcattttgctgacatgccttcmagagaagattgccttgatcttctgtttctgtgcaagtgtgaattactgttttttataggcggtaaaaaagatgaccattgattacttgatgcttcagatg

SEQ ID NO: 459045 - DNA, 201 bp, Homo sapiens
caaagagactctccagggagccagaggctctaaagtccatttaaaaacagatgagacgattgtgggggagctcatgtcattgccctgcttgtgtccccccsacccccatgttcttttcgtaagatcagtttagcaaaaccgccttcagaaagacacctcggctctcttgattttcccattgatgggttggtgagcttctcc

SEQ ID NO: 459046 - DNA, 201 bp, Homo sapiens
ttctgttccctgagcgaatggggaaaacacagggctaaacatagccttgattgtttttacttttctcgtattgtacttctcaaagcgataaagatagaaasaattacaatattatctgcctgcagactgagcaagtggtcacctggctggtgttgatacacaatagcagtgctttgcttttccaaagtattttagacgtga

SEQ ID NO: 459047 - DNA, 201 bp, Homo sapiens
ggcagatgggagggatggtgtgttcctatttagctggctcccgattccccttttggaagtgatttccctagagatggggaagattccaggccagtggtgcaaaaatggaacagaaaatggtatcctctgagagtgggatcaactccttttcatgtcacgggtttccccgaggcctggcggagacgcagtctgtagtatgtc

SEQ ID NO: 459048 - DNA, 201 bp, Homo sapiens
ttgtagtccttgctgcctcgagcactcatgggttaaatctcagttttctgcacctgagcccatcttgcctgacccataaactccttagggccagggccagagtcaggctcacccacagtccacctcagcgctgcagtgtagtgaaaagggcctgcgctctggggcctgactaagctgggtttacatcctgtctggtgttag

SEQ ID NO: 459049 - DNA, 201 bp, Homo sapiens
tgtagtccttgctgcctcgagcactcatgggttaaatctcagttttctgcacctgagcccatcttgcctgacccataaactccttagggccagggccagagtcaggctcacccacagtccacctcagcgctgcagtgtagtgaaaagggcctgcgctctggggcctgactaagctgggtttacatcctgtctggtgttagc

SEQ ID NO: 459050 - DNA, 201 bp, Homo sapiens
gtagtccttgctgcctcgagcactcatgggttaaatctcagttttctgcacctgagcccatcttgcctgacccataaactccttagggccagggccagagtcaggctcacccacagtccacctcagcgctgcagtgtagtgaaaagggcctgcgctctggggcctgactaagctgggtttacatcctgtctggtgttagct

SEQ ID NO: 459051 - DNA, 201 bp, Homo sapiens
tagtccttgctgcctcgagcactcatgggttaaatctcagttttctgcacctgagcccatcttgcctgacccataaactccttagggccagggccagagtcaggctcacccacagtccacctcagcgctgcagtgtagtgaaaagggcctgcgctctggggcctgactaagctgggtttacatcctgtctggtgttagctg

SEQ ID NO: 459052 - DNA, 201 bp, Homo sapiens
cctgccagctgtggcgcatgctggcatcaggcttccaggagactagtttcagctctagtcctcatcttccctgcttcccttccttcctttccctccctttstttcctttcttttgacggagtgttgctctgtcacccaggctggagtgcagtggtgagatctcgactcactgcagcctccgcctggatccctcctttctgt

SEQ ID NO: 459053 - DNA, 201 bp, Homo sapiens
atggctgaaagacaattgcatagtggggaaaaaaattaggaaatccttacatttctcttggttaggcaggaaacagagatgtccatagaagaagagggagytcatcagcatgttttattaacagttaatggaagaaaattaatgctaatttattcttcatatacaccatgcaatttgttagaaaagtaaaagaatagtttg

SEQ ID NO: 459054 - DNA, 201 bp, Homo sapiens
caagtggctcgcttgttgtggcaagcactttccaccaccagtctctccagtgacgctgcacattcgttaagggctgggacggtgctttctcttctcagggyggcttcccacaattgctaatcccggccagaccccttagcagcaaaaggagccccgaacaggcgggacaggtggactagctctgagttctgtttcatctgt

SEQ ID NO: 459055 - DNA, 201 bp, Homo sapiens
tctttgcctcgttctggcttcctgcttcatgcagagctgtgtctggatgggctaatgtgttcccatggcgacagacttccacagtttcattctactggcckcctcctacttcaccagagggatgggccatcatatagccaggcccttgttaatggaatttagcttgtttccctttaaacacatttgagaggatggccgctt

SEQ ID NO: 459056 - DNA, 201 bp, Homo sapiens
tgtgcaagggaaagtcaccagggtcctcgcaaccctgggtgtcatgtggcactggaggaggagctcgtggccaattctgaggcctgttgaggggtgtgagsactcggtctccctcccagccttcttaggggttcatgccatggttctggttcccctgttttaaaaaactaaatgctggtgaaacaactgtctttccctcaa

SEQ ID NO: 459057 - DNA, 201 bp, Homo sapiens
gaagcaggtgcataacctataactacattaacacccagggtgcttttacctgtggctttagattgggtctctagaagcggggcctgagccggggattctcrtgccagtgacacagagagggatgctcccagcaagaaccttcagggaggcgagggaagcccatgaactgcagaggcccaggaaagaggtgggctcagctga

SEQ ID NO: 459058 - DNA, 201 bp, Homo sapiens
aaatcactgtcagtggctgagttctcatgtttaggttttgatctgagtcctgtttttaaggcggtaaaattaactgtgaaactaatgtgtgcaagtagtamgtacaggctaaataaagacactaaaagaaggaaaagcttgtcttgctgatttccagtttcttttaagggatagcccttcaaaatgcattacagagcattt

SEQ ID NO: 459059 - DNA, 201 bp, Homo sapiens
cctccagctgcagagtctagtttcccactctcctctccggaaccctccaggttcagtggagagccagggcccagggggtgagaataccgcagcctccttcrgaggaggcaaccgggacaaaggggagtggtcactatctgctcccagacatatcacctgaccagccagctttgtctttgtcaccggatgcccactcctgca

SEQ ID NO: 459060 - DNA, 201 bp, Homo sapiens
tcaggcaggacagctctgggagggcagacctctgagaggtggagagaagcagagtgatgggaggcagagagcagggtggcggcttgtggctgtccggtgcrcagagctccccctgcctgggccttgtgagggcgctggcgctggcactggccgatgttgtggcagctgacctgtctgggcatcctgaggctccttccacca

SEQ ID NO: 459061 - DNA, 201 bp, Homo sapiens
aggtgatctgcctgcctcggcctcccaaagtgttgagattacaggtgtgagtcactgcgcccggcctaatttttgtatttttagtggagaccgggtttcamcatgttggtcaggctggtctcaaactcctgacctcaagagatccacctaccttggcctcccagagtgctgggattatgggcatgagccactgtgttcagc

SEQ ID NO: 459062 - DNA, 201 bp, Homo sapiens
ttcactcttgttgcccaggctggagtgcaatggcgtgatctcggctcaccgcaacctccgtttcctgggttcaaacgattctcctgcctcagcctcccgaktagctgggattactggcatgcgccaccacgcccagctaatttttgtatttttagtagaggcggggtttgtccatgttggtcaggctggtctcgaactcct

SEQ ID NO: 459063 - DNA, 201 bp, Homo sapiens
tcaagtctatcccgggcaacatagcaagactcctgtcttcaagaaatcttatttccagtgaacttagttccaaataaattgtcatttttaagaatatgtcraattttctactttttgacagaaacaggtttttcataaactaggcttgtgagctccataatgtgctggtattattagggaatatggctagctttgatttgt

SEQ ID NO: 459064 - DNA, 201 bp, Homo sapiens
agaggatcgcataagcccaggaggcagaggttgcagtgagtcgagattgtgccactgcactccagcctgggtgacagagtgagacacatctaaacaaaaaragagaaaaacttaagttctctatttgagtcgtacaatcttttatttaaggtatataatctattatttatagaatcaaacaaaaagcacatatattgtgct

SEQ ID NO: 459065 - DNA, 201 bp, Homo sapiens
tatatacacatatatatgtatatacacacatatatacacatatatatgtatatacacacatatatatacacacacacatatatacacatatatatacacayatatatacacacacatatatatacatatatacatatatatatatatttatactttaagttctagggtacatgtgcacaacgtgcaggtttgttacgtatg

SEQ ID NO: 459066 - DNA, 201 bp, Homo sapiens
tatacacatatatatgtatatacacacatatatacacatatatatgtatatacacacatatatatacacacacacatatatacacatatatatacacatayatatacacacacatatatatacatatatacatatatatatatatttatactttaagttctagggtacatgtgcacaacgtgcaggtttgttacgtatgta

SEQ ID NO: 459067 - DNA, 201 bp, Homo sapiens
catatatatgtatatacacacatatatacacatatatatgtatatacacacatatatatacacacacacatatatacacatatatatacacatatatatayacacacatatatatacatatatacatatatatatatatttatactttaagttctagggtacatgtgcacaacgtgcaggtttgttacgtatgtatacatg

SEQ ID NO: 459068 - DNA, 201 bp, Homo sapiens
tatatatgtatatacacacatatatacacatatatatgtatatacacacatatatatacacacacacatatatacacatatatatacacatatatatacayacacatatatatacatatatacatatatatatatatttatactttaagttctagggtacatgtgcacaacgtgcaggtttgttacgtatgtatacatgtg

SEQ ID NO: 459069 - DNA, 201 bp, Homo sapiens
gctgtttctggggctgcaggggcttccctgagctggatgttgtgggtgttgccgtgcttcaggaagtgtggcgaccagaaagcgtagacccggggcccagrgtctgcccgcccctgcagcctggcctccccgcacaggctgtggcttgcactccagccgctctagtctctcaggaatttgcttgttacttgtactgtgtaa

SEQ ID NO: 459070 - DNA, 201 bp, Homo sapiens
tatgtatatacacacatatatacacatatatatgtatatacacacatatatatacacacacacatatatacacatatatatacacatatatatacacacayatatatatacatatatacatatatatatatatttatactttaagttctagggtacatgtgcacaacgtgcaggtttgttacgtatgtatacatgtgccat

SEQ ID NO: 459071 - DNA, 201 bp, Homo sapiens
catggggaaatagaatcagagacatgagtttataaggagggatttttcaaacctgaactgaaggccgcactctttcttcatttgtttggtgggaaatgatsgtgggttatcggagaggggctgcggataggctgtgcagaatggcgatgctgagtgggtcccatcactgctggaagctcagtttagttcattctggggaag

SEQ ID NO: 459072 - DNA, 201 bp, Homo sapiens
gtctgccttttgcagactctaggagtaggtcttgatccatgtccctggccactagcctgaggccatagggacagttcccactgagctttttacctgggcaggcctgttccagagtaggtggcccagcccagggctggggctggatgtcaagagagcagaagtcgacgggctgggggacagttggtcctggagcagcacttt

SEQ ID NO: 459073 - DNA, 201 bp, Homo sapiens
ccctctggccccacactggcaatgatgccacaccttgccatgtccacgctgttggtcaaacccctctgtcatgcctctttaaagagaaaagaagagaaagattttttttttttttaatggcagaccgaagtggagatcttgtagcctagataggatagtctgaccttctagcatagtctttttggcaaatgatttgtgttt

SEQ ID NO: 459074 - DNA, 201 bp, Homo sapiens
cctctggccccacactggcaatgatgccacaccttgccatgtccacgctgttggtcaaacccctctgtcatgcctctttaaagagaaaagaagagaaagaktttttttttttttaatggcagaccgaagtggagatcttgtagcctagataggatagtctgaccttctagcatagtctttttggcaaatgatttgtgtttt

SEQ ID NO: 459075 - DNA, 201 bp, Homo sapiens
tctccttccttttgagtgtgtcaagcagcttccagtctatagcaagctcttctttcatagtgtttgtgggttaaaaggacatgagcggtcgtgagaattaygggagtgcctataggaagctcgtccatcagttatttttcattgataaatggactcttgacaagtcatgcatgcagttggcttcagtttcaagaaacaaca

SEQ ID NO: 459076 - DNA, 201 bp, Homo sapiens
ttatagaccacagggtctacaaagcctaaaatatttattgcctggccctttacagaaaaaaaaatgtgctgacctcttctccacatgaatactctgcactycggacctgggctgttcagtatgttagctgtagcctcatgtggcaatttaaattaaatctaaatgaaacgaagacttcagttctttggttgcactagccac

SEQ ID NO: 459077 - DNA, 201 bp, Homo sapiens
gcgagtccaagcacccagttctttcccgttttcattcacccaacaagtactttttgaatgccactgtgcgttaggcttcgccgttaattcatataaccacsctgagaagtgagtgctgttattattccctttttatagatgaagaatatagggttctgtgaggtaaagtgcccaaggtcatttagctcatgggcagtagtt

SEQ ID NO: 459078 - DNA, 201 bp, Homo sapiens
ggttcagccacttcacttctctgagctgtgattttctcatctgtggactgggaataatagtgcctacttaacagagcaggaggaataaacaggatagtgcragtccaagcacccagttctttcccgttttcattcacccaacaagtactttttgaatgccactgtgcgttaggcttcgccgttaattcatataaccaccct

SEQ ID NO: 459079 - DNA, 201 bp, Homo sapiens
ttaatggctgcatacctacctagactgagagtgaggggcccacttaccaccttctggattctctttaggtgctttgcagtgggcatctttgttttttgttyttcctctcacgttgggggagctgccttggacacctggagtcagcgtcttccgggtgcgggttatgtggttgcagctggagcgcctgcccccagctcggcc

SEQ ID NO: 459080 - DNA, 201 bp, Homo sapiens
ctgaagggaggctggaaggacatgagtcaggcaggttgccctgaggaggtcagtcagtgatgacaagatacaggacagagcagaggggacttcaactggarttgggcttggctggacgggtcaggctggggcggatagagccttttctcctccagcatcttcctctctcagatagcgtagggtttttttcgggaggaaaag

SEQ ID NO: 459081 - DNA, 201 bp, Homo sapiens
tcctgcctcagcctcctgagtagctgagattataggtgtgtgtcaccatgccccgctaatttttgtatttttagtagagacagcgtttcaccatgttgtcsaggctggtcttaaactcctgacctcaggtgatccacccatcttggcctcccaaagttctgggattacaggcgtgagccaccctgccctgcctatttttat

SEQ ID NO: 459082 - DNA, 201 bp, Homo sapiens
gggagaaggtttggctcaggattggtagcccttgactctgtgtctgcacttggctgtcacccatcatgcgacctgggagtctgccgatccagcttccaggygctttttcaggttaaaaagctaaggagaggcgtggggaaggcctgtatttttttcttccaaacgttccttcagagaacgaggcgatttaaattcaaataa

SEQ ID NO: 459083 - DNA, 201 bp, Homo sapiens
aacaaaaattaaccaggcatggtggtggcatgagcctatccagctacttgagaggctggggtgggaggattgattgagccaggaggcaaggctgcagtaasccatgattgtgctactgcactccagcctgacttacaagagtgagaccctgtctcaaaaaaaaaaaaaaaatctttaggtacacagataccatcgtgctac

SEQ ID NO: 459084 - DNA, 201 bp, Homo sapiens
caggatggtcttgatctcctgacctcatgatccgtctgccttggcctccctaagtgttgggattacaggcgtgagccactgcgcccggccaatataaggtrtgttttcatacagggaccttttctattttgtttactgtttttttttttttttttttttttaagatggagtctagctttgtttcccaggctggagtgcaat

SEQ ID NO: 459085 - DNA, 201 bp, Homo sapiens
attattttttcttctgtatgtttgttcatacactactgctcctgatgtttgcaaatacacataatacttaactatggattaaccagatcaaaagggttttytttttttttttttttttttttttttttttgagactgagtctcgctcagttgcccaggctggagggctggagtgcggtggcgccatctcggcttactgcaa

SEQ ID NO: 459086 - DNA, 201 bp, Homo sapiens
gtctcctatcttcctccctcctcctcaagcctccttctttcttgggacacagcaatattgaaattaggccaattaaaaaccttacagtgggacaggcgcastggctaatgcctgtaatcccaacactttaggaggctgaggtgggcagatcactttgaggtcaggagtttgggactagcctggccagcatggtgaaaccat

SEQ ID NO: 459087 - DNA, 201 bp, Homo sapiens
aagttagtcctggaaaatttatacagacagaaaatttttattattaaatatccagagcatttgtaaaatttttgaaaacaaatatgggtgtataactatgyatgtatccaggacaatgcctgcattttccagcattaagaaacatcatattattttattaaaaggaatgtcataatttggaaaagttttcttacgataagc

SEQ ID NO: 459088 - DNA, 201 bp, Homo sapiens
ctccttctttcttgggacacagcaatattgaaattaggccaattaaaaaccttacagtgggacaggcgcagtggctaatgcctgtaatcccaacactttakgaggctgaggtgggcagatcactttgaggtcaggagtttgggactagcctggccagcatggtgaaaccatatctccaccaaaagtacaaaaaatagccag

SEQ ID NO: 459089 - DNA, 201 bp, Homo sapiens
acttgacaactccccaggccaacggagtgactttctagggctccgttatgagtaaccctctgttgctgatagcccacgggatgagtggagtccacagggcmcctgctggagcccacgcttgccttccttgggtctggcaggggagatagtaggctgggcctgctggccctaggtccgtcttcagaggcctgggattttagg

SEQ ID NO: 459090 - DNA, 201 bp, Homo sapiens
atataaataattatatacaattgaaaacattttttaggcatgagtcccttagaaaatggtatttggagttagatatgggacagtaacagaatacactgccytgcgtcactgccaaaggtcttgttcctgactactcatactggctgccacattctctttgcataaaataaagcttgtttcaccaatcttttaaggttcttt

SEQ ID NO: 459091 - DNA, 201 bp, Homo sapiens
gatttgcacgggcagacgtgcacctgggcccgtggggagcttgttctgaccagacgtacagattttcattctcagaaagccttacttttcaaccaaatttytgtagccagttttgtgaatttgtacactgaaagaaaatttaaataaaggggaagtccacattaaaaagaaaacaaaacaaaccctaactaacttccaaat

SEQ ID NO: 459092 - DNA, 201 bp, Homo sapiens
taaagagaaaaggaaagaaaagaactttggtagagaaacatcgagagattttaatatggagatggggtgggaattcgaccttggaaaacacaagcgatcaygtgaataggattttggccttttctaacttagtgtgtgctctgctcttaagataaatacacacacacagagatagacatggcatttcattttcggacagta

SEQ ID NO: 459093 - DNA, 201 bp, Homo sapiens
cccccgctacctgcgccttatgccagaggaggtcagtgggaagctccgagcaggaccgagagggtgagcacagacaagcgctgtgcggcgtctgtccgatygcgcaggctgcgctcctgctgcgttcacgtgcgaggccacagaaaacactcgcagcaggccacgccccaggcccctcacatgacagctcgcagaaaacgc

SEQ ID NO: 459094 - DNA, 201 bp, Homo sapiens
cctttgttcccaggacaagacaagattctaggggatgacggactggtgggattcatggcatctccacctttgggttggttttctgcacaggaagaaacacrtggatttaagaatgatttagggtggctccaagccctgcacattcttcaggggccatcttggtgtgccccctactccccttgttatcccagccactgcctg

SEQ ID NO: 459095 - DNA, 201 bp, Homo sapiens
ctgcacttgtggtgactgtcagttagggctccgatggcttattcttcctcgaggaacactcacgttctcagggtgggcatgtatgcacacgtgtatgcacrcacgccatttgttcagttgtgtacctgctttaggcttccggctctccagctgggtgaccttagcaggttcctcagcctctctaggcctctgtttcctcaa

SEQ ID NO: 459096 - DNA, 201 bp, Homo sapiens
gcagatgggagtcatcaggcttgagaaggtgacatctgggctatgccgggctgcccttctgttttggtagagtcactgccttcactgccccacccttgaarctggcttgcttttgtcacaaccaccggagaggcgttggtgtgagagtgagacccgtcactgtggacgtgttcacacgcatggcgctctggctgtcctctc

SEQ ID NO: 459097 - DNA, 201 bp, Homo sapiens
tcggggatcctgactcacggggatttcaggttccgtgttcactcagggacattgctgccgaaggatggcaaccattctggctgctgtggcagagcgggacrcctgcaagccagcctgagcacccatctgcctgttgggccaccgggcagcttctgcagatgggagtcatcaggcttgagaaggtgacatctgggctatgcc

SEQ ID NO: 459098 - DNA, 201 bp, Homo sapiens
ttttcgtgctctttcttttctttctttaagatcatctcaagctaacagtgagaaaaaaggcatatgtgagcgattctgcctcgacaggtcccacgataccrtcaggaatgtccgtttttcttgctttcatgaaaacactgtggggtcttacttagaggagacagtggtagagatgaaagaaggaaggagaggagtgcatgt

SEQ ID NO: 459099 - DNA, 201 bp, Homo sapiens
tggatgccctgtgtctctctgaggatggggcggtggtcagaaagggccctgtcttcctagcctgccggccgctccaggagccgcccagcgtgcaccgctgygcctcatcttctgagccttccatcctcactgctcctgggggcagccctgtgggggaaatcacgtttttaattagcctggttcgggatggcggctctaaag

SEQ ID NO: 459100 - DNA, 201 bp, Homo sapiens
gcagatgccatgtacagatgggcatctccaacctctggatgccctgtgtctctctgaggatggggcggtggtcagaaagggccctgtcttcctagcctgcyggccgctccaggagccgcccagcgtgcaccgctgcgcctcatcttctgagccttccatcctcactgctcctgggggcagccctgtgggggaaatcacgtt

SEQ ID NO: 459101 - DNA, 201 bp, Homo sapiens
aaaattgatagcttattacatttgcattgattttgttaatataatttaattgggttaagtaaaatatatgacaaatttatgtgtgaattggaaattatcakcatcaaaagttaatgttacctttttttgcctgagggcttatacatatattttcattatttttgagaacatgaatttccttttgaaaaagagataaaatat

SEQ ID NO: 459102 - DNA, 201 bp, Homo sapiens
cacagcaatattgaaattaggccaattaaaaaccttacagtgggacaggcgcagtggctaatgcctgtaatcccaacactttaggaggctgaggtgggcasatcactttgaggtcaggagtttgggactagcctggccagcatggtgaaaccatatctccaccaaaagtacaaaaaatagccaggtgtggtggcgggcacc

SEQ ID NO: 459103 - DNA, 201 bp, Homo sapiens
aggaggctgaggtgggcagatcactttgaggtcaggagtttgggactagcctggccagcatggtgaaaccatatctccaccaaaagtacaaaaaatagccrggtgtggtggcgggcacctgtagtcccaactacactccagcctggacaacagagggagactgttttaaaaaaaaacagaggcaggaggattgcctgaacc

SEQ ID NO: 459104 - DNA, 201 bp, Homo sapiens
tctattgattttcatgctctctccagagttgccatttgcctgtgacacgtgaggaaactgaggcccagagagtcataaagacctggctgaagccacacagstgatacgtgactacagttagagtctcactagtcagaaacggagcttatctggcccagcatcctatttgactcatgagggaactgaggctccgaggaggga

SEQ ID NO: 459105 - DNA, 201 bp, Homo sapiens
tagcctggccagcatggtgaaaccatatctccaccaaaagtacaaaaaatagccaggtgtggtggcgggcacctgtagtcccaactacactccagcctggrcaacagagggagactgttttaaaaaaaaacagaggcaggaggattgcctgaacctggaaggtggaggttgcagtgagctaagattgtgccactgcactcc

SEQ ID NO: 459106 - DNA, 201 bp, Homo sapiens
aggctgtcccagggcagatgctgccattgtctgagaaacctgcagcagccagcctggagccaggaggctgttgcgtgggctggagcatctttggggacccrgaaatgtgttagaaagttcttactgtaaccaagaccacttccaccactgctattagctctggccctagcactggcctgttttgaaactgacaatgaaaag

SEQ ID NO: 459107 - DNA, 201 bp, Homo sapiens
gcctggccagcatggtgaaaccatatctccaccaaaagtacaaaaaatagccaggtgtggtggcgggcacctgtagtcccaactacactccagcctggacracagagggagactgttttaaaaaaaaacagaggcaggaggattgcctgaacctggaaggtggaggttgcagtgagctaagattgtgccactgcactccag

SEQ ID NO: 459108 - DNA, 201 bp, Homo sapiens
tgccccacctcaaagttaggcagtggaggctgtcccagggcagatgctgccattgtctgagaaacctgcagcagccagcctggagccaggaggctgttgcrtgggctggagcatctttggggacccagaaatgtgttagaaagttcttactgtaaccaagaccacttccaccactgctattagctctggccctagcactgg

SEQ ID NO: 459109 - DNA, 201 bp, Homo sapiens
gagcaaagctctgtgaggcgtcccgggctggggcaacagggcacaggagcagagcttgactgagaacttgctggaaggaaggaactcagctcagatttgasgtcatctggtgaatgaggaggggaggccatcccctggtaaataacagcaagtgtgattctgccgcctgccaagccaggattgacattccttctgtctcca

SEQ ID NO: 459110 - DNA, 201 bp, Homo sapiens
aaccatatctccaccaaaagtacaaaaaatagccaggtgtggtggcgggcacctgtagtcccaactacactccagcctggacaacagagggagactgtttyaaaaaaaaacagaggcaggaggattgcctgaacctggaaggtggaggttgcagtgagctaagattgtgccactgcactccagcctgggtgacggggagac

SEQ ID NO: 459111 - DNA, 201 bp, Homo sapiens
tcactcaggtgcttcacctagtgtaatcttcttatctacaagtgccttcctgaggctgaggcaggcagatcgcttgagcccaggagtttgagaccagcctrgtcaacgtagagaaaacccatctctactaaaaatacaaaaattagccgggtgttatggcatgcacctgtggtcccagcaactgggaggctgagacgggag

SEQ ID NO: 459112 - DNA, 201 bp, Homo sapiens
agcggctcatgcctgtaatcccagaacgttggaaggccaaggcgggtgggtcacttgaggtcaggagtttgagaccagcctggccaacatggcaaaacccygtctatactacaaatacaaaaattagctgggcatggtggtgcacacctgtaatcccagctactcgggaggctgaggcgggagaattgcttgaactcggga

SEQ ID NO: 459113 - DNA, 201 bp, Homo sapiens
gagctcccatgatgtgcaagatgctggcagaaggggtgggtgcacgtcagccaccaaacctgcccatccccaccatcgccatcccagtatctgggacacakctactgttattgtcatgccaggttaccaccacagacacagaagcacagacctaattaaataactcacctagggccatggtgccggttctaggcaggtaag

SEQ ID NO: 459114 - DNA, 201 bp, Homo sapiens
accaaaagtacaaaaaatagccaggtgtggtggcgggcacctgtagtcccaactacactccagcctggacaacagagggagactgttttaaaaaaaaacasaggcaggaggattgcctgaacctggaaggtggaggttgcagtgagctaagattgtgccactgcactccagcctgggtgacggggagactgcgtctcaaaa

SEQ ID NO: 459115 - DNA, 201 bp, Homo sapiens
ctcaagccgaagaccctcattgtgcagatgggcccagagcaagcaagacttccccagggcatgcccagcacaaggcggctggagccaaagccaggcacccrcgtcctgccaggtacgtcctggacctgcgctgcctcatggcatgtctggttgtctcctgccacctgcggaccctgtgaggcccagcaccagcaagggtga

SEQ ID NO: 459116 - DNA, 201 bp, Homo sapiens
gtgtgggccagagcgaggatggatcgtttgctctgcgttcgtttgctgcctcaatttcctctgtctcctgaagcattttggtggggctcttccgctccatrtggtggaacgaaacccaaacgtgaacagcgagggcagcactgggcttctcgccactgaagacaaacccctagaaagttcgctctgggccaggcacagcgg

SEQ ID NO: 459117 - DNA, 201 bp, Homo sapiens
gtcttaggtttgttttcattctcgttgaaggcaagaggggggtttcagagtttagggcacagaaaatccactttaggatgaaccctttcttttcaaacacmtctctctctcgaaacaaatggctgatggcaaaggaatattggcctcctagcagggctggggacattgtactggggaaatagtctggaaattggtcatctg

SEQ ID NO: 459118 - DNA, 201 bp, Homo sapiens
ccagatagaagatcaaaccagccatagcattctctcaagccacagcctaatccagagcaaggccttgactcttttcaattctgtgaaggctgagagaggtkaagaagctgcagaagaaaagtttgaagctagcagtagttagttcatgagatttaagaacagaagccatcttggctggacacagtggctcacgcctgtaat

SEQ ID NO: 459119 - DNA, 201 bp, Homo sapiens
ggtgcacctgagaatgcacctgtagcaaggtgcagccgtcagggctccctgaattgccttctttgctgctccagttggtgtggtggctctgcccaagggcyttcagccttgtagttgggaatttttaccaagcagcaggcaaggcttgctgggggttcctaggggtagaaagtgattttctgccatcctgaattctggtat

SEQ ID NO: 459120 - DNA, 201 bp, Homo sapiens
cttggcctccctaagtgttgggattacaggcgtgagccactgcgcccggccaatataaggtatgttttcatacagggaccttttctattttgtttactgtktttttttttttttttttttttaagatggagtctagctttgtttcccaggctggagtgcaatggcgtgatctcggctcactgcaagctctgcctcccgggt

SEQ ID NO: 459121 - DNA, 201 bp, Homo sapiens
aggctccatggaggctttgatagggctggggtggctgtttcatttcagctgggctatgcaatggcaggaagagtctttcgggagagagaggtttaggaagygggcgatcctggcctatggagggcactccatgggaggggctccatgtgtccaggggagcctgagtaggcagggagggtatgagtgagattggcctggaga

SEQ ID NO: 459122 - DNA, 201 bp, Homo sapiens
ccctctgctttgagagtatgagaccaagtgtcttgtgttccacagtagtaacctctttagctaatgtcgtgtgtgtgtgtgtgtgtgtgtgtgtgtgtgtkgagggagtgttgatgggctctgaaagaagtcttgtctcgtacatttcactgaatgaaggctgcccatgacctagagcttgattgtgggaggtgaagagca

SEQ ID NO: 459123 - DNA, 201 bp, Homo sapiens
cctcgcctgccaggaggacctgtcctgtgaggagtcagacagctgcgccctggacgaggattgtggcaggagagcggagccggctgcagcctggcgggacygcggggcccctgggaacagcctctgctccctggacggcgagttggacattgagcagatagagaagaactgagggggtgtgggcccaggcagggctggggt

SEQ ID NO: 459124 - DNA, 201 bp, Homo sapiens
gcatacctacgggtcggttccttagtttccctattccttagcaggagattgggggctttcgtattcgggagcggagcaaacctattggcatttgctgctgmtgctgctgctctgtcttggtgaagtggcatctgaagggcacccatccctaggggaagtgtctgctgtgggcatcatcgaggtcatttctgtttctgctgg

SEQ ID NO: 459125 - DNA, 201 bp, Homo sapiens
gctgtcactgggtaagggctgtgtgccatgactgtgctagcccagctaactcggtgagctagctctccttaccagcattttccaattgaggcaggctcggwggggccaagtgaccaggcggtagacaaatagctgcaaagtggccaggcctgggtaccctcttcccccaactataagcagctcaaggcctggtggcttgtg

SEQ ID NO: 459126 - DNA, 201 bp, Homo sapiens
tagtgggttctccctcgtgaagccccatggcaattattcttgaggtctcatggcattcctatgaggcaggcaggacgaggtcattattgccattttacagrtgggggaggctcccaaggaggggggagatgtgtgatgatgttatggcaggtggtggagagccaggccaggacacagcaggccgcagcccatcctacccca

SEQ ID NO: 459127 - DNA, 201 bp, Homo sapiens
tgccgtcagctgggccagtgtcctggcaggggcccgcagcccatcttgttcttgcaagacctcttgaaagtgtaacacggagagtgaggcctggccatccrggaccctggcagtgcctgggtattttcagctctgtgagatgcccctgttgagtccatcagggtccccacgccagagcccttctggcaagcccctgcttta

SEQ ID NO: 459128 - DNA, 201 bp, Homo sapiens
ggagctggttgcggctctagctgtgggactttgagcaagtcattggatttctctgatcctgtttcctcattcgtaaaatgggcatgaaaagagggagttargtgaaatgtctgtctcatgctcagggctaacagcacacaacaaatgctcaattcatggtaaatggtaatattcttgttagtagagggcacaaacacttgt

SEQ ID NO: 459129 - DNA, 201 bp, Homo sapiens
ctgtctgctgggtgagcctgggaactgacctggttctttgactgtgggagaaaagtcaccagtcacaaccaagatgctgccaaagtgcccacccagttccrtggtcttggtaatatttgtggttagtatgacctacatatcgtcacagctgctttcagtggccgcgtagaaaagcaagcaagcagaaaggaaccttcctgg

SEQ ID NO: 459130 - DNA, 201 bp, Homo sapiens
ctctttgctggacaggtcctccccaggtgaagccccccagccagcttccactttccatcttttgtgctggtggggccgcctttgagggacagtggcccttsttggtcgccatggggttggctacatgacttcttgcgctggcacccccagcagctgcaggccagctgtgcctttccttggccaagttcctgtgcggcaggc

SEQ ID NO: 459131 - DNA, 201 bp, Homo sapiens
agtggccgccctccctgtacttgtaattacaaccacttggttccacagagcaggttgtccaaaggcagctcagaggactggctatgctgcgatccctgcgyaagcccggccccgtgggcctcctgcacagctttcctccttacgtggtgtttttggccctcctggctggtgttctctgtgaggctgcagccttccttttgc

SEQ ID NO: 459132 - DNA, 201 bp, Homo sapiens
tcagcagagcccgggacacacggctgaggccacccaggctgggccatcttgcccctgttttgtgccccctactcagttctccttctgtcctggctcaggtstaggccagtcaagagggtggctgagaagcaggaggagcctcagagaccctcccctcgaaagcactggggcttccacctcacaagcggcaggttcgctttg

SEQ ID NO: 459133 - DNA, 201 bp, Homo sapiens
aggccctgacgcatcctggcctcaccctaggcctcctctgtcggggcagcctggctcagcagagcccgggacacacggctgaggccacccaggctgggccrtcttgcccctgttttgtgccccctactcagttctccttctgtcctggctcaggtctaggccagtcaagagggtggctgagaagcaggaggagcctcagag

SEQ ID NO: 459134 - DNA, 201 bp, Homo sapiens
ccgggctgctctggccttgactggacatgattatttatccttacacaccgtggctgctctacaggccaagaaacaggctgctcagccagggtcaggagaargtgggtcaggctccccggggacctcaggccctgacgcatcctggcctcaccctaggcctcctctgtcggggcagcctggctcagcagagcccgggacaca

SEQ ID NO: 459135 - DNA, 201 bp, Homo sapiens
ggaccgagagggtgagcacagacaagcgctgtgcggcgtctgtccgattgcgcaggctgcgctcctgctgcgttcacgtgcgaggccacagaaaacactcrcagcaggccacgccccaggcccctcacatgacagctcgcagaaaacgctggcacgcgttcgggcgtcaggcacacgcatctcaacagatgtggctgacac

SEQ ID NO: 459136 - DNA, 201 bp, Homo sapiens
ctgacctcagccccttccagggcgcagtgaggcaaaagccacacgtctgtgaaaggtctagctaatgggtctccagtgcccgtgcctggctatggctaatgcataaagtgtcttactttgtttgggctgctgtgacaaagatgccttagactggggaacgtataaaccgcagaaatgtatttcttagttagaagctgggaa

SEQ ID NO: 459137 - DNA, 201 bp, Homo sapiens
ttgagtaagccacttaatttttctaggcttctgttctttcctaagggttgtgactaggtgattgctattggtttcttgtagctcaaaactctagaaatgcwtatatatatatatatataaaatatatatatatatatataatagatgaccttttgcaattccagtaggacatacgtatcttatcttataggtaagcatatg

SEQ ID NO: 459138 - DNA, 201 bp, Homo sapiens
ctttgtcaccggatgcccactcctgcatgtggggccgtagctcatgagttctagggacagcagtccctagacaaatgctggggctgtttccccctccactycccaggccttgcccttcggagcccagagtgggttctgggtcactactgataaaacatgtggtttagttcagctcaggagatgtttctagcgtctctatta

SEQ ID NO: 459139 - DNA, 201 bp, Homo sapiens
ttgcctgagggcttatacatatattttcattatttttgagaacatgaatttccttttgaaaaagagataaaatattatgaaaacaaaggtattgtcatagwatatacactttcagtttttatttagagtctacaataaaatttaagcattatgaattggattatatgtcattttctctacatcaaaaataagacatcacca

SEQ ID NO: 459140 - DNA, 201 bp, Homo sapiens
catcctggggtgtaggcctcaggaccccagggctgtgcaaacagaggcccagttgggagggccgaccgggtgggcccttccttcctacctaccctctgccmccaggctgcacgatgcacccactgtgaaccaggccgtggcatgtggggtcagggttccctgcacgcttggcaggaaatggggtacacacaggagcttggg

SEQ ID NO: 459141 - DNA, 201 bp, Homo sapiens
actgtgtggagcaggatggccatgggcccttctctctggcagcttccatctagtgtagacagatagacaatattaagagcaaagcagattgtgttggacaragtaagtgctgcaaagacaaggagcatgggtagtgggacagaggcgacgagcagagaagtagaaggatcttctgcgtggaatgagagacctccaaggctg

SEQ ID NO: 459142 - DNA, 201 bp, Homo sapiens
cctcgtccggctgctaccctcccctccacgccacaaaacagggtctggccaggggacttgggtgctgggaggagtgttgattgttctccctcaactccttyctgaaatgtcagtctgatcatccagggagagtttctgtttaaacttgtccaacggatacactttccaaaaatcattgactctctttctctgattaatttg

SEQ ID NO: 459143 - DNA, 201 bp, Homo sapiens
ccacctgggcttcagtgatcctcccacctcagcctcccgagtagcggggaccacaggcatgcgccactatgtcaggctaatttttagtttttttggtagaratggggttttgccatgttgcccaggctgatctcaaactcctgggctcaagcaatccacctgccttggcctcccaaagttgtgggatgacaggtgtgagcc

SEQ ID NO: 459144 - DNA, 201 bp, Homo sapiens
cctacttcaccagagggatgggccatcatatagccaggcccttgttaatggaatttagcttgtttccctttaaacacatttgagaggatggccgcttgggygtccattgccgagaggaggatctggactcccagcctcccccatgaaactgctagcagtagctgctgctgattgagcactctcctggatgagcgagacact

SEQ ID NO: 459145 - DNA, 201 bp, Homo sapiens
gccccatggcaattattcttgaggtctcatggcattcctatgaggcaggcaggacgaggtcattattgccattttacaggtgggggaggctcccaaggagsggggagatgtgtgatgatgttatggcaggtggtggagagccaggccaggacacagcaggccgcagcccatcctaccccagcttcccagaccttcccctcc

SEQ ID NO: 459146 - DNA, 201 bp, Homo sapiens
atgcactatccatatgggtgtgtgtttatgtatgtgtatgtgtccacatctgttgatatgcgtgtgtgtgtatctgtatctgtatgtacacacactccccycagtgcattggctggcacaggccgggtgctgacagatacttatgatcatcgtcacagtcgcaggacttggagggagggtgtgggctgtttctgggtgtct

SEQ ID NO: 459147 - DNA, 201 bp, Homo sapiens
acctgccttctcctttccatgcctgccacgtgtgctgaccacccagttacccaggcgcttttggtgcttctgctgcctctctgagccctggccccttgtcrggactctgctggggatggagctagagagagctggggtgccccgtctttgcctcgttctggcttcctgcttcatgcagagctgtgtctggatgggctaatg

SEQ ID NO: 459148 - DNA, 201 bp, Homo sapiens
atgtctgtgcagcagatgccaccaccgccacaggactgtgggaggagcaagggaaacaacatgtgtggataatgcactatccatatgggtgtgtgtttatrtatgtgtatgtgtccacatctgttgatatgcgtgtgtgtgtatctgtatctgtatgtacacacactccccccagtgcattggctggcacaggccgggtgc

SEQ ID NO: 459149 - DNA, 201 bp, Homo sapiens
gagcaagtgccctggggtgtagactctgctagaagcagaggatatcaggagatgtgacctcagagcttgtccattccagtctctcttgaggaaactgaagwtctcttggtccctgtgcccatcagagtttttctgggcatggtgttcacttttggatctgcatttagaaggtgacattgacaaaccagaaggcctccagag

SEQ ID NO: 459150 - DNA, 201 bp, Homo sapiens
tgctgggagctgccttccttggcaagcaagaccctggcctgacttccctctctgagcctgcaaactgggcgcctgcctggcgtccacaggctgagctctcrgctgtgcaggcagtgcagccccagcagcagtgctctcatgcgcttgtcatccacttgccattggatgacttcggtgtgttctcagctgcacctctcagct

SEQ ID NO: 459151 - DNA, 201 bp, Homo sapiens
cagtgcacattgctgaagcaggtgccaggtaccccagtgttccccccagcaaggatgtgggttggcctgtgtgggtcttggctgcctggcatatgaggctygtctttcctttcattttcccactgcatcttattttctgggaaacttgagactagattcccggagatgttttgttttccgttcagccatcttcatggaagc

SEQ ID NO: 459152 - DNA, 201 bp, Homo sapiens
atatacactttcagtttttatttagagtctacaataaaatttaagcattatgaattggattatatgtcattttctctacatcaaaaataagacatcaccastcctaaaggaatattataattcataaacaaaacattatattaaaattttatactaaagtataaaattatttctctctaggcaaaatttggtttctctaat

SEQ ID NO: 459153 - DNA, 201 bp, Homo sapiens
ccacctgggcctcccagatctggaggggatgtcagatttggggcaagataccttgtccacagaaaaggaaaaatggcgcctgccctgtgagtctgaccagyctgagacagtgccgccaaagtctgtcccctgctgtactggcttctggaacggggtgaccacagtctggctggcatgtggcaggcgctcagtacacatttg

SEQ ID NO: 459154 - DNA, 201 bp, Homo sapiens
gggatggctgggggtgtggagaccatggagagagccccaagctggtgccacccttcccgaagtgactcagcgtggcctggactggccgccacacagcatayctggctctggcaccacctgggcctcccagatctggaggggatgtcagatttggggcaagataccttgtccacagaaaaggaaaaatggcgcctgccctgt

SEQ ID NO: 459155 - DNA, 201 bp, Homo sapiens
ctccggaggccataggtaattttccttagagtccttgtccccagctgggtcctaggcctcgagttaccgtaggcaaggctacactgtgtaaagaatccagygggaggggtgcccccaggatgcacagcatgagggccccaagagagccaccagagcggggacagcaaggccaagggatggctgggggtgtggagaccatgg

SEQ ID NO: 459156 - DNA, 201 bp, Homo sapiens
ggccagggggcttggagagtgagagcttcttgggcctgctgatgtaaccttctggaagagaagtccgatccttaagaggtgaggtgactctcccagggtcscgtagccagttgtcaaaggtgcagactctgtctcctgagtccctgccctactgctgtgttctcatgacgtggaaccttaattcctgcttgcaagacagcc

SEQ ID NO: 459157 - DNA, 201 bp, Homo sapiens
tcggccccccgccagaaccctgtgtgctttggaaaggtcccttgacttttgttaggcaaagaattctcttcacgccaagctgcgagcgaggtggtttcacragtcctgtcctgagtgtgtgctggctggaatgtacaccacagaaacaaaatgtttgttttccaattgtgagagcaccgggaggccctttggcgtcagctc

SEQ ID NO: 459158 - DNA, 201 bp, Homo sapiens
tagagcaaatgtggaggcggccagggcagttgttgggtgaatgtggagagcacatggccatgtcttgcccccggagtaccactgggcgtggggggtcctgkcaccacatgcccggtgtggccgagggcacacagcctctatagcaggccttcctgtggaaggcagaggcagtgagggaggtggacggtgccagctgaggct

SEQ ID NO: 459159 - DNA, 201 bp, Homo sapiens
gcacagtccctttgaaccaccttctttccagattgaagggggcagattttactcaggctgtggtttcagggcagttctcatgcaggccctgcctccccacrgtcctagtggtcttgttctttctggggatttggcataccgtgtgcccctggggctcaggggaggaaagatgcagttaggttccagggcatatcctggcaa

SEQ ID NO: 459160 - DNA, 201 bp, Homo sapiens
ggtttgcggtttgtgttgtcccaagtgtgttctcgctccccccgcccccccaccttgtcccccagcccccagctctccacccccattttcggacttggggracaatgcttgtagtacgggccggggcgccgcagcagcgacgaaccgcgcggacaggtttgcccgggtccctcgcgttcggacgccccctgaagccgagct

SEQ ID NO: 459161 - DNA, 201 bp, Homo sapiens
agcactctcctggatgagcgagacactgggcaaaggacttgggctctgttttcatcagatacagtaaccttgtgaggcaagcactgttttccctgttgtayagagagggaaactgaggctctgagagtaacttggcaaaggccactcaaacaatgtatttcaagagctgggattccaactcagttgtgcttgactcaggac

SEQ ID NO: 459162 - DNA, 201 bp, Homo sapiens
ccgttatgagtaaccctctgttgctgatagcccacgggatgagtggagtccacagggcacctgctggagcccacgcttgccttccttgggtctggcagggkagatagtaggctgggcctgctggccctaggtccgtcttcagaggcctgggattttaggtgtctgggctggggatgggctgtccccaagatcaactcctcc

SEQ ID NO: 459163 - DNA, 201 bp, Homo sapiens
acaaaacaggcatagggagttttaaaaaaacttctctttaaaaatcgctttttggatacaaggtcaataaaataacatacaccagtaggaaggagtaatgsgaaatctagggcttcacaaggaaaacaatccccctcccccaggtgagcagcacaatgaaaatactctgcttattctatcagggttacattcctgaactta

SEQ ID NO: 459164 - DNA, 201 bp, Homo sapiens
ctaatcttcttaagatttatataggattgtagagtttgcaacactttcttgtatgtattaattcattagcatgcaatcctcttttgaagtggatgagccargtggggctcccacttgctggaagctgagagtcccaggccacagtgatatcagatagctgtgttcagcggttgcaaacaaatgaagacacattgaagactg

SEQ ID NO: 459165 - DNA, 201 bp, Homo sapiens
gctgcataacaggccacttctgtgtgtaggaagtgcgtgtgcaagtccaaagggaattgaggcctgaatgggtgggttatcccaattaacaaatacaaagwtttcagtacattttgttttaagccaggtgcacaagttagagttgctttttgggactggcatttatgtatgtgagaatcaaacctgatatcactcttggca

SEQ ID NO: 459166 - DNA, 201 bp, Homo sapiens
gatgtacggctgcctctgtcccccagcctggctctgctcagcatccttcagttaagcgctgtctaacgttctccagcggggcgggagatctcttctagcgygcatcgcagctccgtcctagttcttcactcagcagatccttgcctggagtgtgctggccacctggcattcagctaggccctggggatgtttctgcaatgc

SEQ ID NO: 459167 - DNA, 201 bp, Homo sapiens
cctcctctgacacctgacaacagcatgaactcagcccatcccggtgttgcccagggcctcagtttcctgatctgtgaattgggcatgagttccttgctcarttcacccctgggcacggctggatgtgaacgtattgtgcacatggtaagaccctggctagtcctaagccctggtattatggttgacacctactgagtagaa

SEQ ID NO: 459168 - DNA, 201 bp, Homo sapiens
aaagttgactctggcctgggacccagaaaactctgtcagccagatatcttctggccccttaggtggacagccagctcagaagttgctagaggagatgagcytgtggtaatggagcttggcccggcaaggtggttttgcagccactctgtgaaaataagggtggggatggttggctcagatttaaaagcctcagctggctgt

SEQ ID NO: 459169 - DNA, 201 bp, Homo sapiens
atttatccctccaaacacttctgaggctttgaggctcttattagccttgtacacatgagaaactgaggcacagaagtttaatgatttgccaagttccctcrgggcacacccgagctgggattccagcccaggcctgtccagcccatactaccccaccgtcctgccggaggactgcatgctttcctgagcacagcccagagt

SEQ ID NO: 459170 - DNA, 201 bp, Homo sapiens
tcagcttcccaaagtcctgggattacaggtgtgagccatggcgccaggcccggtcctagtgttgacaggcaggatcccaccccaaatggatcatcatttcrgtccttcattcagccacctgaccctgtttttccaggcatcagggttgcagcccacagaggcactcagacagggagggcccaccagctcctgggtgcgggg

SEQ ID NO: 459171 - DNA, 201 bp, Homo sapiens
aggccctttggcgtcagctcccacaccttctgtgttcgggcaggccatctgccatctggggcctggtgcagaaacgtcgccaccgtgtggcctgtggggtrccctcggagaggggcccctgggttggccaccattcagaggacacgcgtggctctgggcctccaaggtctgttcttacccacggcatcctggggtgtaggc

SEQ ID NO: 459172 - DNA, 201 bp, Homo sapiens
atggggtgacatggaaagggtacaggccttccctgccctctgctgcttcctagctgtgacactggacacatacctgcctccctgagcctcagctgccacaygagtgcattggtgacatgcatctctgctcacacttgttctgaggacagtcctgctaatggaaagctcccgcatgtggtggggtcttggcgacagctttcc

SEQ ID NO: 459173 - DNA, 201 bp, Homo sapiens
ctgcacattcgttaagggctgggacggtgctttctcttctcagggcggcttcccacaattgctaatcccggccagaccccttagcagcaaaaggagccccraacaggcgggacaggtggactagctctgagttctgtttcatctgtaggaccttgggcaagttacttaacctttctgagcctgtttgctcatctgcaaagc

SEQ ID NO: 459174 - DNA, 201 bp, Homo sapiens
gatctcaatagtcactcctcttcaagctgctttcaactcttattttgtatcaaaggagtgggattggtattattaaactcattgctgaggttatttttcartgaaaataaattgttttatttagttcttggatcaaagagtaattttgtcctcagcaaccaaatacctctttaaaaaggtgtgtgtgtatatatatgtatc

SEQ ID NO: 459175 - DNA, 201 bp, Homo sapiens
ttgaggcctgaatgggtgggttatcccaattaacaaatacaaagttttcagtacattttgttttaagccaggtgcacaagttagagttgctttttgggackggcatttatgtatgtgagaatcaaacctgatatcactcttggcagcctgactaaagccatttaaaaataagtacaaattgtccttgaatgatttttttcc

SEQ ID NO: 459176 - DNA, 201 bp, Homo sapiens
tgccagttttttatgtagtgcacaggcatttctgggaaagtatcttgagaatctacagatatttgcttgttttttcttagaatccttttcagattagtttktttttttttttttttgatcctgcactttttaaaggataggataaattttcaggatggagtcttgggtaaataatatggtactcaatatttggttaaattt

SEQ ID NO: 459177 - DNA, 201 bp, Homo sapiens
tataaatagcttaaatggaatatagtggtgacttttgctctgtatccctcagttatttgactgattctctctaacaggtttggagaagagagtatgaatcractaataaggtggatgcagaaacacaagattccactggatgcttcagtgcttgatattggaactggaaatggtgttttcctggttgaacttgttggtact

SEQ ID NO: 459178 - DNA, 201 bp, Homo sapiens
acacaatatttatcagttcagtttgctgtcttatgtgggtgcaattcatcacaccccaaaataatagttacatcaaagatgactggccacagatcaacatracagatacaataatgaaaaggtttgaaatattgtgagaattaatgaaaacgtgacacagagacactgaagagagcacatgctgttggaaaatagtgccaa

SEQ ID NO: 459179 - DNA, 201 bp, Homo sapiens
tacttcctttaaataagccttgaggatggaggtcggacctatagaagtaaaatcttggaggttgaaatttcttcattttccctgaaaggagtagtagaatyggcagggcagactgttacctatctatctatttggttcactgagttctcaagtatttttcaattcttactgatttggggacagaaatttcctatattcatt

SEQ ID NO: 459180 - DNA, 201 bp, Homo sapiens
actgtcaaaagaagtgattccccatgcaaagaaacaatttagggtcatatttgacagactatttttttaaggaattttctgttatctccaaggcagagcarttatcaactacagggaaaagaattctacctacatcccttttcctagctccttaattaagcattactattacatgttagaaggtgatatgtttcagtacct

SEQ ID NO: 459181 - DNA, 201 bp, Homo sapiens
aaagggacaagtaaggaaaccttgaaacttaagcaataaaataagataacctgatgagttgggaacaatcctgtccttttgagaaattactccccaagatwaaaaaatagaaaataaacatattactgttagtttttttccaaaaagtaaatagtaactttggatattagaaaataatatatatcaaagcacgatgtaagc

SEQ ID NO: 459182 - DNA, 201 bp, Homo sapiens
tttttgtttttttttgttttttttttgtttgtttgtttgtttttgagacggagttttactcttgtcacccaggctggagtgcaatggcacgatcttggctyactgcaatctccaccccccaggttcaagcgattctcttgcctcagcctcccgagttgctggaattacaggtgcctgccaccacaaccagctagttttttt

SEQ ID NO: 459183 - DNA, 201 bp, Homo sapiens
tagttacataaattcaaaagtagaatcgttttatttctctttggcctgcaaaacattatctcaatatggcaagtacctagagtttgactttgtctgtggtmggtttcttagatgtgagaaaatgagactgggattacatttgtaagccactgcaccagtgcactttctgcatatcagcaagaaagctgttaggttttctta

SEQ ID NO: 459184 - DNA, 201 bp, Homo sapiens
aggctggagtgcagtggcaccatctcggctcactgcaacctccgcctccggggtcaagcaattctcctgcctcagcctccccagtagctgggactacaggygcacactgccatgcctggctaatttcttccgtatttagtagagacagggtttcactgttttgcccagggtggtctcgaactcctgagctcaggcaatcca

SEQ ID NO: 459185 - DNA, 201 bp, Homo sapiens
ctcctggattcaagcgattctcatgcctcagcctcccgagtagctgggattacaggcacccgccaccacacctggctaatttttgtatttttagtagagtyggggtttcgccatgttggtcaggctggtcttgaactcctgacctcaaatgatctgcccaccttggcctcccaaagtgctgggatcacaggcgtgagccac

SEQ ID NO: 459186 - DNA, 201 bp, Homo sapiens
tgagattatttacttttctcttgcctggcttatgtgcagcattggatattttaaaccaaaatgttctcatttagtttatgggatgtttgtgattagagagrcaactcaaattaggtatatacattcattctgttttagtgtatatgtataggtagagaagaatttaacaacttaggtttctatttggaaatactaaattaa

SEQ ID NO: 459187 - DNA, 201 bp, Homo sapiens
cacaccatccctagctcctggcaaccactaatttattctccatctctataattttgtcactttagaaatgttacataaatggaatcatacagtatgtgacyttttaagattggcttcttttttttcactcaccataatgttcatgaaagtttgttcctttttattaccaagtattccatggtatggatgtaaccaaaacca

SEQ ID NO: 459188 - DNA, 201 bp, Homo sapiens
tggtggcttacgcctgtaatcccactactttgggaggctgaggcaaaaggatcacttgatgcaaagagtttgagaccagcctaggcaacacagcgagaccytattaaataaatacacaatattttttaaaaagataagggagggtgagaacagccaaggtaactgagttgacctacgtaacagggtgaaagctttttaggt

SEQ ID NO: 459189 - DNA, 201 bp, Homo sapiens
tggaaaatgagcagtggtcagggtcccagccaacaactattccacagaactctgaggacacttctggatccatgattgcatttctggatgcttggaaattygatttgactactatttccactaccagagtagcatctctgaaatcctaatacttttgtgttcctagctccctgttcaaagtctagttttaggcaagatcag

SEQ ID NO: 459190 - DNA, 201 bp, Homo sapiens
taggactgtttttatattattaattctaagtccttgtttcttgacccagtttctggcaatcttgtaagataccagagaatactacatcagatttgggatayttggacaggagtctctgatgaagaatagccacactagcgagtatttgaggtccatcctaattgattaagataaggcagggctgagtttggtggcttacgc

SEQ ID NO: 459191 - DNA, 201 bp, Homo sapiens; identical to SEQ ID NO: 145733

SEQ ID NO: 459192 - DNA, 201 bp, Homo sapiens
ttaaataatttattcctattaatttgctttcttcccaaatatccccttaaagaaacctgcctcagctcagtcgtctgaagggctaattccataatgacagrgaatgcagtggtttgacatgacactgatatcagtgacctattagacactttaccattgaagaccatttttatttacatttccccattggcatagcataca

SEQ ID NO: 459193 - DNA, 201 bp, Homo sapiens
ggtcctttacagacgcggttacttgagatgaaccttatgcatgcgcctcaagtatgtgttttaatgctttttaggcatgtttccaacattgttttagtaaytgtgcagcgcctctcagattgttatgcaaagctactgaggggcctactccttattaaagaaaatgtagctattataatattcttttgtactttaacagtt

SEQ ID NO: 459194 - DNA, 201 bp, Homo sapiens
taaaacttaaaatccctgtcccaccaggtgtggtggctcatgcctgtaatcccagcactttgggaggctgaggcaggcggattgcttgaggccaggagttygagacaagcctgaccaacatggtgactccatctctactaaaaataaaaaatcagccaggtgtgatggtggatgcctataagatcctagctgctactcagg

SEQ ID NO: 459195 - DNA, 201 bp, Homo sapiens
ctgtaaatgaacttatttttataccctttaactacattgtccaactgaaggatctcttgtcatcaaagcttggacctacagcaaatgaatgtgaatatatraagatttctcttttcctagactgtttagactgatagcagttaataaatgagtgcctatttgagcaagatactgttggaattgaagattctataaaaatcc

SEQ ID NO: 459196 - DNA, 201 bp, Homo sapiens
caaaagaatagcttattctgcccaaatacttgtccagtcactaggatcatttcacttttttgaataccatttgctttggggagggaagtattgccagaccrtgaattcattattacctctgatcagttttaaacttcatttgaaaagtggttccttctcgttttctccctccctcaggctgcatcctagcatgcccagttt

SEQ ID NO: 459197 - DNA, 201 bp, Homo sapiens
aggaaatttgagggccagtgcaatggtttgccaaggtcacacaactagttagtggaaggatccaggcattctaattcctttctttcactaatacatttggmctgctctacagaattacttctgtctgatactatccactttgaagagtagctagcatatagtagccatttacttttggctcaattaaaagcaaacattttt

SEQ ID NO: 459198 - DNA, 201 bp, Homo sapiens
ttggaaaatagtgccaataggcttgctcgatgcagggttgccataaaccttccattcgtaaagattcatctgcactgcaaagtgcagtaaaatgaggtatscctgtaatacgtaaactgtgctatctaagttttgaattgtctttcctcttatcagtttcatgttatataagagcttgggatatccatatttaaatgtgct

SEQ ID NO: 459199 - DNA, 201 bp, Homo sapiens
ctgtaatacgtaaactgtgctatctaagttttgaattgtctttcctcttatcagtttcatgttatataagagcttgggatatccatatttaaatgtgctgyagaaatgaaggaaactttaaatattagcttataatttttcaaataaccctcttgttctggaattttaccatctctaaaatggaattagactgaatgtttt

SEQ ID NO: 459200 - DNA, 201 bp, Homo sapiens
ttgagaggtttgagggtaggtaattttccaaacaagcaattagaaattggcctttactgatattattattattttatttttattttttatttttaattaatttttttttttttttgagacagagtctccctctgttgcccaggctggagtgcagtcgtgccatcttggcttactgaaacctctgcctcctgggttcaagcg

SEQ ID NO: 459201 - DNA, 201 bp, Homo sapiens
gtgcctggcctaattttataattttaaatgtctgtaaagtaagcaaaatgactagttgaattgtacattaaatatatctaatccctaagagtttataatgraaagggatcaaaactttttcaattgcgataaaactcacataacaaaattaaccattttaaagtgaacaatttagtggtatttagtgcattcacagtgtcg

SEQ ID NO: 459202 - DNA, 201 bp, Homo sapiens
tgagaggtttgagggtaggtaattttccaaacaagcaattagaaattggcctttactgatattattattattttatttttattttttatttttaattaatttttttttttttttgagacagagtctccctctgttgcccaggctggagtgcagtcgtgccatcttggcttactgaaacctctgcctcctgggttcaagcga

SEQ ID NO: 459203 - DNA, 201 bp, Homo sapiens
tcatacctgtaatcccaacactgggaggtcgagctgggaggattacttgagcccaggagttcgagaccagcctgggtaacatagggagaacctgtctcttaaaaaaaaaaaaaaattagccaggcatggtggcgcctgtagtctcaggtactgaggaggctgaggtaggaagatcacttgagcctgggaggtcgaggctgc

SEQ ID NO: 459204 - DNA, 201 bp, Homo sapiens
aaattaggctgaatttattcttatcacttttgatgttagtttatggtggactgaattaacaccttacattcctgaccaatattcattatgaaatttgtacwtaatatgaacttgggataatacttagctataactgttttatgattataactattctcttacacactgacattgtaatttaagttgatgtatttttgattc

SEQ ID NO: 459205 - DNA, 201 bp, Homo sapiens
atcacttgatgcaaagagtttgagaccagcctaggcaacacagcgagaccctattaaataaatacacaatattttttaaaaagataagggagggtgagaacagccaaggtaactgagttgacctacgtaacagggtgaaagctttttaggtatcattatccttttctgtgaacagtcatatgggaccatttgtggtattaa

SEQ ID NO: 459206 - DNA, 201 bp, Homo sapiens
taggattacaggtgtgagccaccgtgcccggctatgtatattttgtacttagagcatatatcaattcagaccctattttctttggaaatcctggtccgtakttagagttcataaaatttacagttagaaaggcagatttggggctgggggtagtggctcatgcctgtaaactcagcactttgtgagccaaggtaggagcat

SEQ ID NO: 459207 - DNA, 201 bp, Homo sapiens
cttgagcccagggggcagaggtttcagtgaatcgagattgcacctctgcactccagcttggatgacaaagcaagaccctgtctcaaaaaaaaaaaaaaaagaaaagaaaagaaaagaaaatggataagccagttataaaaattgacagatgtttgttcaaatatgtcatcaccaaggtctaactgggcaccttaaattgaa

SEQ ID NO: 459208 - DNA, 201 bp, Homo sapiens
aagtggagggatagcttgagcctgggaggtcgaggctgcagtgagctatgatcgtgccattggactccaacctgggcaacagagtgagactctcaaaaagaaaaaaaaaaaaggaaaacttacagtttgtagaaattaaagctttgtcactctatatggataaacctcaaatgccttgcaaaaaaagcaagttgcaaaaga

SEQ ID NO: 459209 - DNA, 201 bp, Homo sapiens
taaagctttaaaattgatagctatctataaaaggctaggaaaactacagaacacttagattactgctctctcactgcctattatgtgtgtgtgtgtacacwatatatatatataatgattcctgagactttatagaaagttctgaagtattttttgtcttggaagaattttacattacaagtaaaaccaaaatgtttttgt

SEQ ID NO: 459210 - DNA, 201 bp, Homo sapiens
ttctagccttgcagggtgccagattatcaattaccgtacagatgcaaaacaaaagtggttacttctgactggtatatctgcacaggtaacattttaactakttttttatgaagaagaggtttagaacacggttgtgcccagaatgcagtttgattttgaaattaggtctttctatactcaatcctgttgaatttcacttat

SEQ ID NO: 459211 - DNA, 201 bp, Homo sapiens
ggtagcttaggattcttacagcataacttactgcttttaggtatatagctctatgaactttatgagcccactggaatgttttctccaattatcggaaaggmtaattatcaattaaacttaaggagtctaaggaccctctactcagaaaaatagatgtgagatcctgtctcaaaagaaaagttaaagtcaggaagaagttaa

SEQ ID NO: 459212 - DNA, 201 bp, Homo sapiens
ggacttaagctgtgacaggtgaaactcagtgccttagatgaaggcttggtagagacttagaaacatagaattcttacagggtagcttaggattcttacagsataacttactgcttttaggtatatagctctatgaactttatgagcccactggaatgttttctccaattatcggaaaggataattatcaattaaacttaag

SEQ ID NO: 459213 - DNA, 201 bp, Homo sapiens
aggtgacagctttgttttcaattattgttaagaaaactattcattaggcttattttcagttgggatttagaattccatggaagtcatactatctgtttaargtgtgtttattagaggtaatgtagtttttgcttaaaacgtagatgtagattgtttgcttagtcttagctgttacctctttaatggttgctgctgtatcga

SEQ ID NO: 459214 - DNA, 201 bp, Homo sapiens
ttaacttggtttcttgaaatttatttaaatatgaaccttttctaaatgttaactagctttctttactgtaggtcttctccatgccttttatattcactcartacttatttctctttacagagagcatataatggtagtatgttttcctgagcacattattccttatgtggaatagtgactgagaaacagccaaaggatgtt

SEQ ID NO: 459215 - DNA, 201 bp, Homo sapiens
ttatcgcgctttttaagcaaccaacttatatttgggagtattcaatataacagttttttaattacataaatgtttttcagtcattctcaaaagtgtgcctrtgcttaattgtaattacttgtttctttaaggtctcttttattttctgggatccattgttaactttagccaggacccagatgtgcactttaaatatattca

SEQ ID NO: 459216 - DNA, 201 bp, Homo sapiens
ttgcactagcaaggacttattttcctttaaggcttgaaatgtaaagaataataaatttttacccataaaatgagttaaataatgcactttcctcagtcatytataattttcaaataactcatctgaagtaatggaatataccttggcaataaaaacacttttacagagggttaaaaatgttaaataacaaaatggacattt

SEQ ID NO: 459217 - DNA, 201 bp, Homo sapiens
atcaccaatgttctacaaaatcctgatttggctctgagaatggctgtacgtaataacttagccggtgctgaagaactctttgcccggaaatttaatgctcwttttgcccagggaaattactcggaggcagcaaaggtggctgctaatgcaccaaaggtaaagagttatgaaaatgaagttgtcatgacattaatccattgt

SEQ ID NO: 459218 - DNA, 201 bp, Homo sapiens
gggacttaagctgtgacaggtgaaactcagtgccttagatgaaggcttggtagagacttagaaacatagaattcttacagggtagcttaggattcttacakcataacttactgcttttaggtatatagctctatgaactttatgagcccactggaatgttttctccaattatcggaaaggataattatcaattaaacttaa

SEQ ID NO: 459219 - DNA, 201 bp, Homo sapiens
attaaaaggagtataccttaaacaacttgcaagtgaaccctaaatgtcatttagatatcatagcttcttcagtgtcattttctgtaggttatcaagattgmagtcctcaagaagttttaaattatgtggagttgtctttcagagctcaattaagtgggaatgttaatttttgatactgactgtgttaagaatgaatagatg

SEQ ID NO: 459220 - DNA, 201 bp, Homo sapiens
attgctgagtgttctagacattctcactcaaaaggaacatcagtaaggaaaacaatcttacctaccttatttgaagaggtggaagcaaatttaaccttctsttagccaatacggtcacttgaagttcttttttttttttttgccaaagtcttgctctgtcactcaggctggagtgcagtagggcggtcttggctcactgca

SEQ ID NO: 459221 - DNA, 201 bp, Homo sapiens
atgctctttttgcccagggaaattactcggaggcagcaaaggtggctgctaatgcaccaaaggtaaagagttatgaaaatgaagttgtcatgacattaatycattgttaatattctgtttcttatattactagaaaaggaaccagcttcctacagataaactgtttttagattacatttgggttacattttcctttagtag

SEQ ID NO: 459222 - DNA, 201 bp, Homo sapiens
tatatttaacaaggtgttttccctgtcattgttaccgttgtggctttttctctttgagttattgtccagtagaactttcttcaatgatggaactgtctacyagctacatagggatattgagcacttgaaatgtggctgatgtgactgaaaaactaaatttttgctttaatttctttttaatttaaatgtaaatagccacat

SEQ ID NO: 459223 - DNA, 201 bp, Homo sapiens
ccgtctcatgcagcacatttatgacattgaaaaccaccagtaatagataacattgagatttgaaatttagttttacttaggtataatgacagaccaagtayaaggctttggttgagagaccagcttttaaatattgaaagacaaatatagtgtaaaaggcgcaatggaatttgtatagtgaaggagattctctagtcccag

SEQ ID NO: 459224 - DNA, 201 bp, Homo sapiens
gtcatcttcagacctcacttcttgcttcagtacttttgcctttttttcatgcacacatacaccaaaataactgactgcatgttacttttcctctgcagcayattgcagtctttgtggaaaagccttttacattttagtgaattttcagtagtacagatggaactgaattcattgacatgcttacctgtaatttttcttttt

SEQ ID NO: 459225 - DNA, 201 bp, Homo sapiens
gctgggggaggtgccatgcacttggtttcaagctacccagaaagctgaggcaggaggatcacttgagcccaggaggtcaatgttgcagtgagctatgatcrcaacactgcactctccaaccttgacaacagagcaagactcctactttctgaaaatattagaagtcaagatctgagctttagtgtatttgcttctaagatc

SEQ ID NO: 459226 - DNA, 201 bp, Homo sapiens
cttgtgagacctgtctttaagctgctgttaacctaagtgctgtaaatttttctagtgattaagctgctttctttcatactgtagcataaattcttctgcaktaagctttgaagttacacaaaattctaaattttgcttccagtatgccctttattttcacttctctcatacctttttagtggttagatgtttcttccctaa

SEQ ID NO: 459227 - DNA, 201 bp, Homo sapiens
gaggtgaacatgggaaaaaaaaaacaagctgggggtctaattgccttataacattcactattcgtcttagtgtccttttttgatgtatgaatttactcacyctatcttcagcagttactagctgtctctctgtagaacatttttaaatggttttagaggatccttttcgtcaaagcaaaaaacatgattaaaatcagagtc

SEQ ID NO: 459228 - DNA, 201 bp, Homo sapiens
gtgtatttatgagggtgaaaataatctatgtatttttttatttaaaaaactttgataaattttatttcaaaatagtatttttctcaaaatcagttcttgtractcaaatattcatgactagtattgtagattcccttttatttggttggttcctgactttaatgatgtctatgcctgtttcccctggggaagctgcatgta

SEQ ID NO: 459229 - DNA, 201 bp, Homo sapiens
aaaaaaagcttttagcttatctcttctttgaaaattttaatttaaatgatacaactaggaggcttttttccccttgcaaaaccagatttatattggaaagyttccattgtttttcttggtttactagttcagtatgtggggtctaatgtttttgactttcactatttctttgaataggatgcaatgcagtatgcttctgaa

SEQ ID NO: 459230 - DNA, 201 bp, Homo sapiens
gaggctgaggccggagaatcgcttgaaccctagaggcaggttgcagtgagcccagattgcatcaccactgcactccagcctgggcaacagagggagactcyatctcaaaaaaaaagaaaaaaatcttgccctccaaattagaaatattgtccatttcatagccatatgttagtccttgatagtgaaaatcttggagaaaat

SEQ ID NO: 459231 - DNA, 201 bp, Homo sapiens
tgaaaacagaataagtaatcctagattatctgtaagtgataaagataacaaaaatattttatatgtgtataggtaagatgactagtgtgttgatccatacttttttgatgttcatttagtaggaaaaacatgacatactaaaatttttacatagatagatgcagacagattctagaaatgatcgtaacagctattagtgca

SEQ ID NO: 459232 - DNA, 201 bp, Homo sapiens
gaaaacagaataagtaatcctagattatctgtaagtgataaagataacaaaaatattttatatgtgtataggtaagatgactagtgtgttgatccatacttttttgatgttcatttagtaggaaaaacatgacatactaaaatttttacatagatagatgcagacagattctagaaatgatcgtaacagctattagtgcag

SEQ ID NO: 459233 - DNA, 201 bp, Homo sapiens
tataaggataagagaaaatacaaaagaccaagtgcatcagtgttatatcttactaataagaagtatagaactgcaaatgagatggggttttatacctaaawaaaatagacaacatattttaaaagttctaaaaatagaagagttgttataatgagtcttaaattctcctgagataagtataaataaaatattttggaaacg

SEQ ID NO: 459234 - DNA, 201 bp, Homo sapiens
atcaaactcctgggctcaagtgatcctctcatctcagcctcccaaagtgctgggattataggtgtgaaccaaggtgccaggccaaatctttgttgtttttkttttttttttttttttttacaagtaaaataccctgaggctgaaggtcattgctaactgatgcagcgtgtttttcttactgctttttttctggggatctaa

SEQ ID NO: 459235 - DNA, 201 bp, Homo sapiens
ccctgggccacagagcaagaccctgtatgagaaaaaaaagaattggaagtcctaaagtgtaatttccttttctcctcacttccccaacaaaaacaaacttwaaaaaaaaaaaggcatttcatagtgtctgaggcagttaagcacccagagaccactaatctagtatcagtagttgaaagaaattcacacccagagtttcag

SEQ ID NO: 459236 - DNA, 201 bp, Homo sapiens
gccaccacacctggctaatttttgtattttttgtagagatggagtttcatgttgcccaggctagtctcgaatgcctgggctcaagcaatcctttgccttgrcctcccaaagtgctgggataataggtgtgaaccaccgagcccaactaataaggattattttaattggcatctttggtctttgacctctgagcttctacca

SEQ ID NO: 459237 - DNA, 201 bp, Homo sapiens
cctgggccacagagcaagaccctgtatgagaaaaaaaagaattggaagtcctaaagtgtaatttccttttctcctcacttccccaacaaaaacaaactttaaaaaaaaaaaggcatttcatagtgtctgaggcagttaagcacccagagaccactaatctagtatcagtagttgaaagaaattcacacccagagtttcagc

SEQ ID NO: 459238 - DNA, 201 bp, Homo sapiens
cttccctgaggcagtagggacagaaggtcactgaaagaacggaacgagggtagaatgggagaacgcatttcttagagctatgtcaatctcagagtgtgtgsggtcaaactccctaaggaaactcgcctccccttccccctttttttatttctctggggatgttgtggctcttaacccctctttggttctggaaggtaggaa

SEQ ID NO: 459239 - DNA, 201 bp, Homo sapiens
aaaacatcataactgaagaattccaaggaaaaatctataggaaaacaaattctttctcattgtgaagatatcaatttgaaaagaggattaagctcacactmatatcttgctgaatgtgggttacctttttttttccaggttggtgaccgttgttatgatgaaaaaatgtatgatgctgctaagttgttgtacaataatgtt

SEQ ID NO: 459240 - DNA, 201 bp, Homo sapiens
gaggccggagaatcgcttgaaccctagaggcaggttgcagtgagcccagattgcatcaccactgcactccagcctgggcaacagagggagactccatctcaaaaaaaaagaaaaaaatcttgccctccaaattagaaatattgtccatttcatagccatatgttagtccttgatagtgaaaatcttggagaaaatggtatc

SEQ ID NO: 459241 - DNA, 201 bp, Homo sapiens
gaatcgcttgaaccctagaggcaggttgcagtgagcccagattgcatcaccactgcactccagcctgggcaacagagggagactccatctcaaaaaaaaaraaaaaaatcttgccctccaaattagaaatattgtccatttcatagccatatgttagtccttgatagtgaaaatcttggagaaaatggtatctttaggtaa

SEQ ID NO: 459242 - DNA, 201 bp, Homo sapiens
catgtaaaattctacatgcacattaatttttttaaatgcttttttctttagtagaagtaagtcatttagtcgatcataaaatattcctgttcttttgaaawttttttttaatagctgacaaatgacactgattggaaggggaactcaaatgtagctgtttaccctcagtgtatttatgagggtgaaaataatctatgtatt

SEQ ID NO: 459243 - DNA, 201 bp, Homo sapiens
actattcgtcttagtgtccttttttgatgtatgaatttactcaccctatcttcagcagttactagctgtctctctgtagaacatttttaaatggttttagwggatccttttcgtcaaagcaaaaaacatgattaaaatcagagtctcacatctgattccttcagcctgcctgagttggggggatgggagggtgaagaagcg

SEQ ID NO: 459244 - DNA, 201 bp, Homo sapiens
ttcatatgagaaaacataaacacagcctgtgttctctagatcagtggtccacaacctttttggcaccagggaccagttttgtggaagaaaatttttccacyggttgggggtgggagtgggggtgggatggtctcagatgaaattgtttcacctcagatcacaaggcattcgttagattctcataaggagtgagcaacctag

SEQ ID NO: 459245 - DNA, 201 bp, Homo sapiens
gagaatcgcttgaacccgggaggcagaggttgcagtgagccgaggtcgtgccactgcagtccagcctgggtgacagagcaagactccgccttaaaaaaaawatatatatatatatatacatatatatatatataaccattatatatcaggctactgacacaaataataatatatacacttattatggttttgtctcctttt

SEQ ID NO: 459246 - DNA, 201 bp, Homo sapiens
ctttaacagaagagctatgtttgtgtgagcctctcttgttagcgtagaacaaattctcatatgttacacagatttgatacctcatagaagaaatttaaagyttccttttgtttgtctttttttcaggaagcaaaactaacagatcagctaccacttatcattgtgtgtgatcgatttgactttgtccatgatttggtgctc

SEQ ID NO: 459247 - DNA, 201 bp, Homo sapiens
tctgtcaggcaagtatttatttctctttgatatcaatttgtacttgactctttgaaggaatttacttccagccaggattagaggtgaatttagggtcttaygtctacataatttgacatgggagctcaatactaagatgcaactatcacattcatcctctgatgccagtgttgagagtgaacttattagattccttgttaa

SEQ ID NO: 459248 - DNA, 201 bp, Homo sapiens
taagagaaaaatatgtagtggtgttgaaattgtataaaatgaaaatacaggttgagtgtccctaatctgaaaatccaaaatgcaccaaagtccaaaacttyttgagcaccaacataacgctcaaaggaaatgcttgttggagcatttcagaaatcggattttcagattagggatgctgatcaggtaattataatgcgaata

SEQ ID NO: 459249 - DNA, 201 bp, Homo sapiens
tttttgaatctttcaagagttttgaaggtaattaggagtttttgagtttttaaaaaaagtacttaaggtagccaagaagaggtatgcttatgatcaggctrttggaaattttgtttttctaaaaatttggttctatgggacattttaattttttaagttttattcaatatatgtcaaggcccttttatgttggattctaag

SEQ ID NO: 459250 - DNA, 201 bp, Homo sapiens
cagagtttcagccaacctatggacagctgaattaagcagcccaggaggttgaagctgcagtgacccatgattgtgccactgaattccaccctgggccacasagcaagaccctgtatgagaaaaaaaagaattggaagtcctaaagtgtaatttccttttctcctcacttccccaacaaaaacaaactttaaaaaaaaaaag

SEQ ID NO: 459251 - DNA, 201 bp, Homo sapiens
atgcgcctcaagtatgtgttttaatgctttttaggcatgtttccaacattgttttagtaattgtgcagcgcctctcagattgttatgcaaagctactgagrggcctactccttattaaagaaaatgtagctattataatattcttttgtactttaacagttcactattaaaccttaatctgtaatacggatattgaattac

SEQ ID NO: 459252 - DNA, 201 bp, Homo sapiens
ctgtgtagctgaattttgaattatgtgtagccattaaagtgataatgatgattgctagcctggataatgttttaatcagggaaaagatagaaattatatamttagagtaatttttcaacacaattatacatattgtatagatttgtgtagaaagacctctctatgtaaatttaaaggtctttttcctacttcattcttttc

SEQ ID NO: 459253 - DNA, 201 bp, Homo sapiens
aaatatatattttttcgccgggcatggtggctcaggcctgtaatcccagcactttgggaggccatggtgggtggatcacctgaggtcaggagtttgagacyagcctgaccaacatggagaaaccccgtctctactaaaaatacaaaaatcagctgggcgtggtggcaggtgcctgtaatcccagctacttgggaggctgag

SEQ ID NO: 459254 - DNA, 201 bp, Homo sapiens
tttatagattaacaatgtggtatagtagacagaacagggagggctttaggggttgttgaaacaaatgctgtccaatagaaaaataatatgagccacatactttttttttttttttttgttttttgagacagagtctcactctgtcctctgtcacctagactagtgtgcagtggtgcgatctcggctcacagcaacctccac

SEQ ID NO: 459255 - DNA, 201 bp, Homo sapiens
ttttttttttccaaattctggataatcttataacattgaaccaggggtatgaaagacagtgactaaatatttactccagatggtaaagatttgaaacttcytaacttgatgttaatagatggattcattcctttaagattgacctaagagattgatctctacagggtgtttagtgtgatgtttggatcactttcgaagagc

SEQ ID NO: 459256 - DNA, 201 bp, Homo sapiens
tgagaatctaatgccgtggctgaaatgacaggaggtagagctcaggcggtgatgactgctcattggctgctcaccttcttctgtgtggcccagttgctaayggaatactggtctgcggcctgtggttcgggatccctgctctagattatggggaagccgaagtactattttctcattataaaaacagaatcctacctttta

SEQ ID NO: 459257 - DNA, 201 bp, Homo sapiens
tggtatagtagacagaacagggagggctttaggggttgttgaaacaaatgctgtccaatagaaaaataatatgagccacatactttttttttttttttttkttttttgagacagagtctcactctgtcctctgtcacctagactagtgtgcagtggtgcgatctcggctcacagcaacctccacctgccaggttcaagtga

SEQ ID NO: 459258 - DNA, 201 bp, Homo sapiens
cttttgatgttagtttatggtggactgaattaacaccttacattcctgaccaatattcattatgaaatttgtacttaatatgaacttgggataatacttakctataactgttttatgattataactattctcttacacactgacattgtaatttaagttgatgtatttttgattctggataatttttttttttttccaaat

SEQ ID NO: 459259 - DNA, 201 bp, Homo sapiens
ctctaattgcttaggggagaagggtattactggaaagacggggtgggtgacttttcatagtataaccttttgtaagattttagtgctttactgtatgcacrtgataactattcaaaaaaacaagcccctttttttggacccagtttattgactccatattcttataacagcaaaataaaaattcttttaagttaaaaaaaa

SEQ ID NO: 459260 - DNA, 201 bp, Homo sapiens
tgtgtatggcctcacagttggaactgttggatgttataagcagatgatttaaatatcccgtgaaaagcagtccattcgggcatgtttctagagatcataattttttttttttttttttttgagatggagtcttgctctgtcgcccaggctggagtacagtggcatgatcttggctcactgcaacttctgcctcccgggttc

SEQ ID NO: 459261 - DNA, 201 bp, Homo sapiens
ctcctgcctcagtctcccgagtagctgggattacaggtgcccaccaccatgcccggctaattctttttttttttttttttttttgtatttttagtagagayggggttttgccatgttggccaggctggtcttgaactcttgacctcaggtaatccacccaccttagcctcccaaagtgctggaattacaggaatgagccac

SEQ ID NO: 459262 - DNA, 201 bp, Homo sapiens
tgctagtatgttttgctcacttcatatgtaacaggtgcccttatgttgtgctgtatcctgtgctttttctgtgggaccattccattcaggagcaaagagcmccatgattccaatcttgtgtgtgtttactaacccttccctgaggtttgtgtatgttggatattgtggtgttttagatcactgagtgtacagaagagagaa

SEQ ID NO: 459263 - DNA, 201 bp, Homo sapiens
gtgacagtggtggtgtttgtggaggaaaactgtattgctagaggacaagggtgacagaaagacttgatttttttttttccatgctttttcttttctggggkgtgtgtgtgtgtgtgtgtgtgtgtgtgtgtgtgtattttgtaccatgcgaatttattatattacctttggaggaaagggggataaaactagtctggccaa

SEQ ID NO: 459264 - DNA, 201 bp, Homo sapiens
acaatggtgcccctgctttgatttgtgggaggtgccatcagttttccccaccactgcttttgcaccctcagtgcaaatatcaacacagagaaaaaaaaaawtaatagtattatgaaaacattgactctgtggagaccctgtgggttctgcagagtatactttgaaaactataagattatgagttctataaaataccaagta

SEQ ID NO: 459265 - DNA, 201 bp, Homo sapiens
agaaaattgttgacatcatctgtggcatgcagcaaaagttgatgtaaaaggaacagaaagacctatggagataatgggatgtaataacagaaaacatacakaaacaattggttctgaaatcagttaagagcagaactggaattcatactctgtggaatgaatcagcaatgtggaaggagtaacaagattttttaaaaagat

SEQ ID NO: 459266 - DNA, 201 bp, Homo sapiens
gcaagaatccatctcaaaaaaaaaaaaaaaagatttttagaaaccaaaataattggaatggaagctcttttcaatgaaagaaaacttttgtaatttgaaaraaccaaaattaaaagggcttagtgtttggaacaggcctgaagaagttgtaataccatgaatttaaaaaaacaaaacaaactcgggaggccaaggcacaag

SEQ ID NO: 459267 - DNA, 201 bp, Homo sapiens
gaaaggaagaggaatgaggattgagacatgtgaagacattgtgcattatatcaatgtgcattcctgtagttcattaacaaggtacatgcaatagtctaaaraaccagagtcactactatagtggcttaacatttaatctgtctccaatattttaaccaagtgacaccgaggtttttatcgaagcatttcacttaaatgaac

SEQ ID NO: 459268 - DNA, 201 bp, Homo sapiens
ttccattcaggagcaaagagcaccatgattccaatcttgtgtgtgtttactaacccttccctgaggtttgtgtatgttggatattgtggtgttttagatcmctgagtgtacagaagagagaaattcaaacaaaatattgctgttcttcagttttgtttgtggaatttgaaattactcaaatttaaaataaattactggact

SEQ ID NO: 459269 - DNA, 201 bp, Homo sapiens
aatctcttaaatttagtgtatgtaaacagcttacaaatacgtattgtctaaatgcatttaaatctgttttattcaaagaaaagctaaagcaaaaacactgkcatatgaccatgcaagactgtcagtgccaacaaagacaacactaatcagcacatcgtacactggattgcagtgcttcccagattattgaaaaatgttaca

SEQ ID NO: 459270 - DNA, 201 bp, Homo sapiens
tgatggttcccgatgattagatttagattatacatttccacccagagtactgcttcagtggtggtttgtttttctcttggtattatatccggaagcacgcrgtgttcatttgtcccctttgtcagtttttatcaagttgtaacatgtctttattacataattattaccctcttggagatattaaacagtctataagtagtc

SEQ ID NO: 459271 - DNA, 201 bp, Homo sapiens
tagcaaggaattaggacatacttcgataacttttgtccctgggacttcaataatgtgctatatttgtaacaaactctttattttaaaggttaaacagctaycactggtgaaaccgtatttgcgttcagttcagaaccataacaacaaatctgtgaatgaatcattgaacaatctttttattacagaagaagattatcaggt

SEQ ID NO: 459272 - DNA, 201 bp, Homo sapiens
tggccaacaactatttaaactttataagaaagagtgtcaacatagtatttgatagagggtgtatgttctaatgtatttcatacctaaagaatgtctgaatrtgtctttttttttcccccaagatggggtctcgtctgtcacccaggctggagtgcagtggcgtgatctcggctcactgcaacctttgcctcctgggttcaa

SEQ ID NO: 459273 - DNA, 201 bp, Homo sapiens
ctgtgtagatgggaaagaattccgtcttgctcagatgtgtggacttcatattgttgtacatgcagatgaattagaagaacttatcaactactatcaggtaytaacgagacttttatatgacctgagatcttttaccatagatattcttatctttaactgcacatttctcttgttcaggatcgtggctattttgaagagctg

SEQ ID NO: 459274 - DNA, 201 bp, Homo sapiens
agatatcattaccaaggtgtgtactttcttcagaagataaaggattcagaaggagaaagctcattaggaagtaactgacttatgtatggattttcccattrtaggttgccaatgtggaactatactacagagcaatacagttctacttagaattcaagcctctgttgttaaatgatttgctgatggtgctgtctccacggt

SEQ ID NO: 459275 - DNA, 201 bp, Homo sapiens
tatgaggcatattttaaacatttatgttaggctttaacaagataatgtttggggctgattttaagttaagaagtatcaaatctacagtgagagatgaagtracaaataattataaatcctgctaaagatgacaaagcattctaattatttcattacttgatgaatctgagagtttttgatttatgggtcttcaaacgttat

SEQ ID NO: 459276 - DNA, 201 bp, Homo sapiens
ttcaaaaaaaaaaaaaaagagggtgggggacaggtagggtggggctggaggtgggaggacttggcttttcaaacacttccagacagcagagtcacagggcrctgctgaccacactggtttctgtcccccacccctcccagacatgctgagtctgtcctggaagaggctggggaatctcagtgggccagtctgaggcccaca

SEQ ID NO: 459277 - DNA, 201 bp, Homo sapiens
atgaattcctctcaaatcttagcatcccacaaaagctgtattcgtcctaggcaatctcattaattttacaatgctaatgaatcttgtaaatgactttcccsctcttaattgtggcctacagtaagctcaaaatggaatttgcaacatggcctgcttatatgcatttttttctctgaaataactttattcctggcttttttg

SEQ ID NO: 459278 - DNA, 201 bp, Homo sapiens
atagcatagagagagcacgccttggaatacagcaaaactgggaccatgagctatgtgacctcaggcaggtgtgccacgccctctgtgggtttctttgtctrtgggaggtgagcaaaacaccgagtgtgtgctgggacaacactccataactggcagctccctggtcctcttcattctatttcttaagtgtttatctgggtg

SEQ ID NO: 459279 - DNA, 201 bp, Homo sapiens
atcttaataccatgcaaacagataaagagcagattaaagtgactatattttgaaaagaaatatctaatttagaccaaggtttaggaagtgtctcctcttcyaggatgaattcctctcaaatcttagcatcccacaaaagctgtattcgtcctaggcaatctcattaattttacaatgctaatgaatcttgtaaatgacttt

SEQ ID NO: 459280 - DNA, 201 bp, Homo sapiens
ctggctgcttccaggcaacgagatacagacatttattgcctttgcctcaaagggccttttcatcattcttgttttgttaaaaaaaaaaaaaagcacaagtwatatgaatggaaatcaaaatagagacttatccgtaattataccattaaatgaccttcctttcaaaagaagactgtgacatttatcctgagtgccacaaac

SEQ ID NO: 459281 - DNA, 201 bp, Homo sapiens; identical to SEQ ID NO: 118674

SEQ ID NO: 459282 - DNA, 201 bp, Homo sapiens
acttggagtttatagaagcttccgattgctgtgggccttctctgtccatcttagggtggtcagttttgttctttggggctaaaattttgaaatcgtcaacragaacacaaagaaggtgcttatgaccagaatacatatctcaccttatgtgtaagcatgatctgctaagagcaccagtagctcttcatgaagcatttacta

SEQ ID NO: 459283 - DNA, 201 bp, Homo sapiens
cagctttttccattttctggattatttcattaggctggatttccagaaatagagtcaaaaggtatgcatatttttaagactcaagaatttcaatggtctcytcaggagcagaaaaggcctgagagtagctggaggggagattccaagcagcagtcctgtgggccccaaggctgcaagaagctctgactgcccagggaggag

SEQ ID NO: 459284 - DNA, 201 bp, Homo sapiens
cccttgctatatccttccctctctggtccacaggccctccagggaaggcaccttccccagcacagaggcctccaggagccgccaccacacagggcccatgstgggcgggaaccagtcccaggcagggccccagggcctttctgcaccagtagaaaggaggtaagaaggcctaaagaataacaggggaaggtgagggcttcc

SEQ ID NO: 459285 - DNA, 201 bp, Homo sapiens
tgggaggtcggaagcagagcagattaggggagccacgcagtctcgtggcagtgaatgaaaggatgttttggtgacagggaccggccacaagctggagatgwtgaaggggcaggagagtcagcgccacagacctgacacctggcggatcctgacacctgctgagctccctggaagccttccatgaacaacactctccgacca

SEQ ID NO: 459286 - DNA, 201 bp, Homo sapiens
gcccgggcccgggcgcggagccctccttaccgtacatctcggcggggcgcgcgcctctcgagaggccggcgtcgctgcggcgttcccagccagccctcggsggcgcccgcctttcattcacagtcggggcggggactggcggcggccgacaggggcccgggcggggagggagcagacgcgggggccggccgcgggcaggac

SEQ ID NO: 459287 - DNA, 201 bp, Homo sapiens; identical to SEQ ID NO: 118675

SEQ ID NO: 459288 - DNA, 201 bp, Homo sapiens
tgcaacctccaccttctgggttcaagcgattctcctgcctcagcctcccgagtagctgggattgcaggtgcccaccaccatgcccggttaatttttgtagmtttagtaaagatgggattttaccatgttggtctggctggtctcgagctccccacctcaagtgatctatccgcccgcctcagcctcccaaagtgctgggat

SEQ ID NO: 459289 - DNA, 201 bp, Homo sapiens
ccttttcatagtgctttttaccaatggacacatttcatctgtgtctacactccatctccccactcgaaggtaagctcctcaagagtgagacctttgtccayttgtccccactgtgtcccagggctggaatagggtccaacccatgggtggtggtggcagggggtgctcatacaggtttgtggaataaagggaggacagtgt

SEQ ID NO: 459290 - DNA, 201 bp, Homo sapiens
cagcattccactttaattttctgtcctggtttattccttttcatagtgctttttaccaatggacacatttcatctgtgtctacactccatctccccactcraaggtaagctcctcaagagtgagacctttgtccatttgtccccactgtgtcccagggctggaatagggtccaacccatgggtggtggtggcagggggtgc

SEQ ID NO: 459291 - DNA, 201 bp, Homo sapiens; identical to SEQ ID NO: 118669

SEQ ID NO: 459292 - DNA, 201 bp, Homo sapiens
agtgcacgaggaagcttcagcaatcaaggcagtgcacttctagtgaaagaactgacaggtggatcagctggacatccacatgcaaaaaaaaatgaacatawacacagcccttacaccctggacagaagcttactcaaaataaatcattcacctgaatgtcaaactcaaagctataaaacttcttgaagataacataggaaa

SEQ ID NO: 459293 - DNA, 201 bp, Homo sapiens
tcctggcactgccacttcctaaactgtgacttggaacaagtaacaacattctctatgcatgggtgtcctatctctataacagggctagggctatcccacakggctggtagaagaccagagccagtccagggctataaagcacttatagcagggccaggactgtcaggccccaggaaggttctggaagctgcccgccccttt

SEQ ID NO: 459294 - DNA, 201 bp, Homo sapiens
cagtgcagctactctggctggagagggttccctgagacatcaggccgggacagtcctggtctggggacaccaactcagttcttctcaaatgaaaaccagayaggctgctgcctcctgctctcttgtattccagaaggggagctcctcaggccaccccttgctatatccttccctctctggtccacaggccctccagggaag

SEQ ID NO: 459295 - DNA, 201 bp, Homo sapiens
ctcccgggttcaagcaattctcctgtttcagcctccagagtagctggactacaggcacccaccaccacatgcagctaatcttttgtatttttagtagagayggggtttcaccgtgttgcctaggctggtcttgaacccttgagcttaggcaatccatccgcctcagcctcccaaagtgctgggattacaggtgtgaacctc

SEQ ID NO: 459296 - DNA, 201 bp, Homo sapiens
agtccacctcctccctcccgcccagtaagcaccccttcattctgccaattaaagatgaattctatctgtacaagcacaccacttgaaatgcaaatgtgccstgggaagattaagcctacaggtcattcagaaaagaatgagttccttcattgggaattactttaatcacaaaagaggtttacatagggcggagaaaagagt

SEQ ID NO: 459297 - DNA, 201 bp, Homo sapiens
ccaccacgcccagcttatttttgtttattttttgtagagatgggcagtatgttgtccaggctggttttgaactcctgggctcaagtgatcctcccacctcrgcctcctaaagtgctgggattataggtatgagccaccgtgcctggtctcagtgtttctatattgacatcaaaatatttaaatttttcaacagttaagtct

SEQ ID NO: 459298 - DNA, 201 bp, Homo sapiens
gcccggttaatttttgtagctttagtaaagatgggattttaccatgttggtctggctggtctcgagctccccacctcaagtgatctatccgcccgcctcascctcccaaagtgctgggattgcaggcgtgagccaccgtgcccgcccttcactgtgcctggaggtcatgcttgtttaccttcttcatgaagacggtgtcct

SEQ ID NO: 459299 - DNA, 201 bp, Homo sapiens
aagaaaaaaaagagaaatcatatccacaactgcaaaggggggtggagcctccatgagcaaaccaggaggcagctgagagcagggccagtggcaatttcacsgaggggaatcagtcactcaacctctccacaaactcgcatttggaccaatcttaataccatgcaaacagataaagagcagattaaagtgactatattttga

SEQ ID NO: 459300 - DNA, 201 bp, Homo sapiens
tcgatgttggcaaacttcacaaactatcagggaggaaggagagaaacacacgagagaggtgacccaccatgcttctcactgctgggcatccccagaccccytgccatggtcaagccatgggaaccacgcatcctggagccagcttggccggccttgcagagcacactggggagatgagttcccaatcccgctcgcctctcc

SEQ ID NO: 459301 - DNA, 201 bp, Homo sapiens
ttgcggagtcgcccccgcgggcccgggcccgggcgcggagccctccttaccgtacatctcggcggggcgcgcgcctctcgagaggccggcgtcgctgcggsgttcccagccagccctcggcggcgcccgcctttcattcacagtcggggcggggactggcggcggccgacaggggcccgggcggggagggagcagacgcgg

SEQ ID NO: 459302 - DNA, 201 bp, Homo sapiens
ttagaaacaggtatagaagaccccccccaacccctgtgcctaaccccaccctgctttgtcaagtcatacaggagggaaagatgccacgagtaacttctcaycattagtggttcttacttcaaccctgtcttcactgcctaagtgtaggtacaggactaatgcaattaaggaaaagctgttcccaggaaaccccaagttgag

SEQ ID NO: 459303 - DNA, 201 bp, Homo sapiens
tcccgggctcccgttctcctgcctcagcctcccgagtagctgggactacaggcgcccgccaccacgctcagctaatttttttgcatttttttttagtagaracgcggtttcatcgtgttagccaggatggtctcgatctcctgacctcgtgatctgcccgcctcagcctcccaaagtgctgggattacaggcgtgagccac

SEQ ID NO: 459304 - DNA, 201 bp, Homo sapiens
ggatggtctcgatctcctgacctcgtgatctgcccgcctcagcctcccaaagtgctgggattacaggcgtgagccaccgcgcccggcccacaaaaggcatyttaaagcctccttggccctgcttccagggagacaaaggtaaccagactcttggttctgtgtgttattaccaacagatttacccaccagggagcccagcac

SEQ ID NO: 459305 - DNA, 201 bp, Homo sapiens
gaccatggtttggggtcttcagggaggcgtggccaaccacgagtacaatattcctgggctccaaaacagtgttaagcagttgctagtcaatactcttatcrgggcttgcccaaaacaagtccctcccctgatcccaagccccatgccctgcgcacaccaggccccacctgaacagccagcaccagacggatgaggtccacc

SEQ ID NO: 459306 - DNA, 201 bp, Homo sapiens
gcagtggctcatgcctgtaaccccagcactttatttatttatttatttatttttattttttgagactaagtttcactcttgttgcccaggctggagcccartggtgtgatcttggctcactgcaacctccgcctcccgggttcaggtgattctcctgcctcagcctcctgagtagctgggattacaggcatgtgccaccat

SEQ ID NO: 459307 - DNA, 201 bp, Homo sapiens; identical to SEQ ID NO: 118668

SEQ ID NO: 459308 - DNA, 201 bp, Homo sapiens
ttgcatgcacaggcccactgctggacccaagggtgttactggaaagggcagtcaatggcattcagaggcagcctctgggttcctagaccaaaatgatgctrtgtgtgtggacagcccagcacagctgccaccgggtcagctgagtctaaaaaggctgagaatgaacaacaggagagatctcagggaaaaaggggtgcaggg

SEQ ID NO: 459309 - DNA, 201 bp, Homo sapiens
aagggaggtatggacagctatgcctaggaatgctgtccctctcaggtgcaggaggagatggaggagcagccagaggaagtcaggtctgatgtacacatcckctctagacatcgcccaatccagcctcccctaccctacagcccaggcaactctttgaacactccaacatccacctagatgacaccgagctcagtagacatg

SEQ ID NO: 459310 - DNA, 201 bp, Homo sapiens
tgagggcagtgttggagcacaaagggtttataaaaatctagtgccatgaagagtgtggactggaggggagggaagggaaggtgtgaggtggcggcggggtsgggggagttctgtttagattggcatggccagaactgagacagagattgagagatgagacaggaggtctagggagggagaggggactggggacctcccaac

SEQ ID NO: 459311 - DNA, 201 bp, Homo sapiens
caagccatagagcgcctcgtagtgtttctgcacgtttgtttcctccttgcagctcaggtagatgtgtctgtagagctgctgggagtgctggggacaggagygggcagaaggccagggtcggagggatggggacaggaggggcaaggagaacacggaggaagaccaatctgaaggggggcaggatggctgtgtgccccctcc

SEQ ID NO: 459312 - DNA, 201 bp, Homo sapiens
ccaggaggctgaggctgcagtgagccaagatcatgccactgcactccagtctgggtaacacagcaagaccttgtcttaaaaaaataataataataaataartaaataataaaaaatttgattctttgggatcaacaaatagaaatggaattactgagtgaaagggcataagtgtttttaaagctcttgacacattatttca

SEQ ID NO: 459313 - DNA, 201 bp, Homo sapiens
ggcagtgttagggagaagagattagcttggaggcagagggacaccttctcagagcccctcgcacagttcccgggtgaggaagtgaagcctgaagggccttrgggtagtcccagtccagtgctggagagaggccaaggacagcgctctgcagttgtggatgtgtgtggtgaagctgggcacctttgcttagcgttgggtgcc

SEQ ID NO: 459314 - DNA, 201 bp, Homo sapiens
agggcagagccaagaaaattaagagggataaaggagggggtcagaaaatgcagctgggggagaggaggactccaggctgggggagattggtggctcacccsgtcctgcctgtgtccaccgcctggtgcagggatggccgcgggaccttgctcatgatgaagaggatcacctcggagcgctggtaggtgggcagcgtgctgg

SEQ ID NO: 459315 - DNA, 201 bp, Homo sapiens
gggcatggtggcacacacctgttaatcccagctactcaggaggctgaggcaggagaattgcatgaacccaggaggcagaggttgcggtaagcagagatcaygccactgcactccagcctgggcgacagagcgagactccgtctcaaaaaaaaaaaaaaaaaaaaaaagaattctgcctggcacatagtggtgcccaattaa

SEQ ID NO: 459316 - DNA, 201 bp, Homo sapiens
gaggcaggcagatcacttgaggtcaggagttcgagaccagcccggacaacagggtgaaaccccgtctctactaaaaatacaaaaaatttgccaggcatggyggtacgcgcctgtaatcccagctactcgggaggctgaggcaggagaattgcttgaactcaggaggcagaggttgtagtaagccaagatcacaccactgca

SEQ ID NO: 459317 - DNA, 201 bp, Homo sapiens
tggcaatgcaaactggattagaaactcattccaccactaaggaaggctggcaccaataaaaccacaccaccagggtgatgtgcgagatttgagaccagccrtaagaaacaagaggaactggggccagagtctgaagactgcccagtaaaacagatacattgaaaagctgatgaaaactcaggggagaaagccacaggcagg

SEQ ID NO: 459318 - DNA, 201 bp, Homo sapiens
ggacgtttcaaatagaaaggatgtcacctgctgttcactgctttcctccttcattttcttatcagccatcactagctcctccagatttgaattttaaaatyatcagaagccagtaggatgcggtggctcacgcctgtaatcctagcactttgggaggctgaggcaggtggatcacttgagaccaggagttcgagaccagcc

SEQ ID NO: 459319 - DNA, 201 bp, Homo sapiens
ccaccctggttaacacggtgaaccccgtctctactaaaaataaaaaaattagccaggcggggtggcaggcgcctgtagtcccagctacttgggaggctcasgcaggagaattgcttgaacccaggaggcggaggttgcagtgagccgagatcatgccactgcactccagcctgggcaacagagtgagactctatctcaaaa

SEQ ID NO: 459320 - DNA, 201 bp, Homo sapiens
aggagtttgagatcatcctgggcaacgcagtgagaactcatctgaaccaaaaaaaaaaaaaaaaaaaaaaaatagctgggtgtggtgatgcgcacctgtaktcccagctgctcgggaggctgaagcgggaggatcacttgagccagggagttcgaggctgcagtgagctatgactgtgccactgaattcctactggggtga

SEQ ID NO: 459321 - DNA, 201 bp, Homo sapiens
aggcgtgagccaccgtgcccgcccttcactgtgcctggaggtcatgcttgtttaccttcttcatgaagacggtgtcctgtcgagagcacttgtccactttyagcttcaggacagagatgtcactgagggtactgggaagggatgcaaagggcctccttagcccttgcatgaggccagcctgagctcacacggggtcactga

SEQ ID NO: 459322 - DNA, 201 bp, Homo sapiens
ccttctgggaacacctgcacgaggtaggaagtccctcaagcagattctgcccatctcaagaagccaggagcagatggagtgagaacgcagctggaaagagwcagctcctgaaaagctctaaatgaggagtggagaacccttcctccaatgcagaccctcaggcccctggagagggtgaccctgttactgccacactgtcat

SEQ ID NO: 459323 - DNA, 201 bp, Homo sapiens
gaggtttgaatgcatttttacttaatcctcccaacaacactgaggtggggtctatcgtctccattttacagatgaggaaaatgaggcttagggcagttaartaacacttccaaagtcacattaactgctaaatggggtagctggattcaaacccagggctgtccgactacagggtcttcacacttaacccctggcctgcaa

SEQ ID NO: 459324 - DNA, 201 bp, Homo sapiens
gccctgctcagccatgtctgtgattgtgctgagacagtgccggaggcctaggagagtcaggctttgttttgtcattgaaggtcccctgagagtcagcaacrccaatggcagtgcccaaaaggcaggccttacactcagatggccctgccgtatgggcctccccccactgccctgccggcaccatcagcttcccagctgcca

SEQ ID NO: 459325 - DNA, 201 bp, Homo sapiens
cagcatagcaatcattagtcagcttgctctctggctgatgcgatgattcactgcgatggggaatctgcaggacactgaatttttcatgctgtagctgacaraacacctaccctgggctaggatttcctgtgggggaagctagaggtggtggccacctgcttccagtggcccccagggatgcatggtggctggttcattttc

SEQ ID NO: 459326 - DNA, 201 bp, Homo sapiens
aagagttttccagagatccaaagaatatgaagatgccagtttctaagtctccttttacagacacccctgatcaataaggtgactaacacaaagccatcgaygtggtctgattcatgctattggcagagggtatgatcaactctgataacatgtgtatgaaaacttttttaaaaaattatggtaaaatatatataatattca

SEQ ID NO: 459327 - DNA, 201 bp, Homo sapiens
ggaacccagacaatgccacacagttgcaccgggccctgcccaggagtcggtctactgccttggaagcatatattcattttaatttctttgtgattaattgttttttttttttttgagacagggtctcactccgtcacccaggctggagtgcaggggtgcgatcatggctcactgcagcctcgacctcccaggctcaagaga

SEQ ID NO: 459328 - DNA, 201 bp, Homo sapiens
agtagctgggactacagccacgatgcctggctggttttgtatttttagttgagacggggtttcaccatgttagccaggatggtctccatctcctgatgtcrtgatccgcccgccttggcctcccaaattgctgggattacaggtgtgaaccaccacgccctgccttttttttttttttttttttgtagagacagggtctca

SEQ ID NO: 459329 - DNA, 201 bp, Homo sapiens
gaaccaccacgccctgccttttttttttttttttttttgtagagacagggtctcattgtgttgtccaggctggtctcaaactcctgggatcaagcaatccycccaccttggcctccaacttgctgtttttgacatacgctgtgaaatagtcaccacggttaagccagttaacgtaacacctcacatagttgccactttctt

SEQ ID NO: 459330 - DNA, 201 bp, Homo sapiens
acgccctgccttttttttttttttttttttgtagagacagggtctcattgtgttgtccaggctggtctcaaactcctgggatcaagcaatcctcccacctkggcctccaacttgctgtttttgacatacgctgtgaaatagtcaccacggttaagccagttaacgtaacacctcacatagttgccactttctttcctcttc

SEQ ID NO: 459331 - DNA, 201 bp, Homo sapiens
aaatacagatttctgagccactccagcctactgccatcctactgaacaaactctctaggggttgggcttaggtatctgcattttcttttcttttctttttyttgagacagtatctcactcctgtcgcccaggctggagtgcagaggcgtgatcacggctcactgcagccttgacttcctggactcagccgattctcccacc

SEQ ID NO: 459332 - DNA, 201 bp, Homo sapiens
gatcccagggagaaatgggcgtgatcccagggagaaatgggcacgatcccagggagaaatgggcgtgatcccagggagaaatgccaccaaaagataaaaayatgaggggcaaggtgggtggggagtgggttattttcatggtttccacagattctaactgcaaagagaaaaatgtaattttacaatggagaggggtggctg

SEQ ID NO: 459333 - DNA, 201 bp, Homo sapiens
aatttgttcagcaaaggaaaagaaaaggagacagatgaagcaaatggggagaaattttcataactgttcatttcatatgagtgggcgtgaacagatgttcrttcaccattctactcgggccacctttgcggtatttgatagctttagtctgcatgatctgaggtcacttttgcggtatttcatagctgtagtctgcatgat

SEQ ID NO: 459334 - DNA, 201 bp, Homo sapiens
ccaaagtgctgggattataagaataagccactgtgcccagacaaagttttaaattttgacgaagtccaatttatctatgttgtttctataattgcttttgyttttgatatcatatctaagaatccattgccaagtccaagatcataaagacttatccctatagtttcttctaagagtcttatagttttagctcttacattt

SEQ ID NO: 459335 - DNA, 201 bp, Homo sapiens
tgcagcgagccaagatggcaccactgcactccagactgggcaacagagggagaccccatctcaaaaataaaaataaaataaaaaatgaagaacaagaagtaaaaaaaaaaaaaagctcacttaaatttttaaagttgtactttactgcatgtactgtacaggagtggtattagctaatttggattttgtgacaagtctctg

SEQ ID NO: 459336 - DNA, 201 bp, Homo sapiens
cggcccatggttgtctcgaactcatgggctcaagagatcctcctgctcagtcttctgagtcgctgggcctgcaggcgtgagccaccgcacccagcttagtyccgtatttttaaatatacacagatatccccttccccacccgctgttctgtgatctattttattgacctatttatgtaatgggtattttacattaaatatt

SEQ ID NO: 459337 - DNA, 201 bp, Homo sapiens
cagcctccccagtagctgggactacaggcgcccgccaccacgcctggctatttttttgtatttttagtagagacagggtttcaccgtgttagccaggatgrtctcgatctgctgaccttgtgatcctcccgccttggcctcccaaagtgctgggattacaggcgtgagccaccgtgcctggccttaactttggttttaact

SEQ ID NO: 459338 - DNA, 201 bp, Homo sapiens
agtagctgggactacaggcgcccgccaccacgcctggctatttttttgtatttttagtagagacagggtttcaccgtgttagccaggatggtctcgatctsctgaccttgtgatcctcccgccttggcctcccaaagtgctgggattacaggcgtgagccaccgtgcctggccttaactttggttttaactggggttgcca

SEQ ID NO: 459339 - DNA, 201 bp, Homo sapiens
ggactacaggcgcccgccaccacgcctggctatttttttgtatttttagtagagacagggtttcaccgtgttagccaggatggtctcgatctgctgacctygtgatcctcccgccttggcctcccaaagtgctgggattacaggcgtgagccaccgtgcctggccttaactttggttttaactggggttgccagggtgcta

SEQ ID NO: 459340 - DNA, 201 bp, Homo sapiens
ggcgcccgccaccacgcctggctatttttttgtatttttagtagagacagggtttcaccgtgttagccaggatggtctcgatctgctgaccttgtgatcckcccgccttggcctcccaaagtgctgggattacaggcgtgagccaccgtgcctggccttaactttggttttaactggggttgccagggtgctaccctgggt

SEQ ID NO: 459341 - DNA, 201 bp, Homo sapiens; identical to SEQ ID NO: 118667

SEQ ID NO: 459342 - DNA, 201 bp, Homo sapiens
tccccagaccccctgccatggtcaagccatgggaaccacgcatcctggagccagcttggccggccttgcagagcacactggggagatgagttcccaatccygctcgcctctcctgttgcacaataagattggaaaccatggcccttctcaggcctcccctgctgcgggagcagaggacagaagagaagggaacatgaaagg

SEQ ID NO: 459343 - DNA, 201 bp, Homo sapiens
acagggtttcaccgtgttagccaggatggtctcgatctgctgaccttgtgatcctcccgccttggcctcccaaagtgctgggattacaggcgtgagccacygtgcctggccttaactttggttttaactggggttgccagggtgctaccctgggtcttaccgaggaactgtggctggaggtggcagcagcctaggagaaac

SEQ ID NO: 459344 - DNA, 201 bp, Homo sapiens
tttcaaaagaagttcagaaagatcaggcctggagggggaggaagcttcttactcttcctattcatttatttatttatttttcgacacggagtctcactccrttgcccaggctggagtgcagtggcacaatcttagctcactgcaacttccacctcccaggttcaagtgattcttgtacctcagccacctgagtagctggga

SEQ ID NO: 459345 - DNA, 201 bp, Homo sapiens
atttgtcaagtgccactgctctccaggcagtgttagtgcttgggatgcatccgtgagtaaaacgacggaccctgccctcacagagcttacatcccagtggkaagagacaggtggtgaacaagaaacacagagagtaatgtatgaaacatgttaaaaggggaaagaaaccccggcagagtgagggaggagtgggcatgtggg

SEQ ID NO: 459346 - DNA, 201 bp, Homo sapiens
acgaatcatcccagcgtccttctgtatgaagggatctgcagcatttcaccattattacagtgtttacatgacgtaaaggaaggggtggggttgggcaagaraagaaactcaaggcctcgtgagccccagggcttagattactgcttttcctcttcctgaaaaaatgccagaaattcctgatatggaaaaaccatcctttgc

SEQ ID NO: 459347 - DNA, 201 bp, Homo sapiens
gggatttgggagtaaaaagagagcagagggcagagccaagaaaattaagagggataaaggagggggtcagaaaatgcagctgggggagaggaggactccasgctgggggagattggtggctcaccccgtcctgcctgtgtccaccgcctggtgcagggatggccgcgggaccttgctcatgatgaagaggatcacctcgga

SEQ ID NO: 459348 - DNA, 201 bp, Homo sapiens
agggatttgggagtaaaaagagagcagagggcagagccaagaaaattaagagggataaaggagggggtcagaaaatgcagctgggggagaggaggactccmggctgggggagattggtggctcaccccgtcctgcctgtgtccaccgcctggtgcagggatggccgcgggaccttgctcatgatgaagaggatcacctcgg

SEQ ID NO: 459349 - DNA, 201 bp, Homo sapiens
gcagatcacaaggtcaggagttcaagatcagcctgaccaacatggttaaaccccgtctcgactaaaaatacaaaaacattagccgggcatggtggcacacacctgttaatcccagctactcaggaggctgaggcaggagaattgcatgaacccaggaggcagaggttgcggtaagcagagatcacgccactgcactccagc

SEQ ID NO: 459350 - DNA, 201 bp, Homo sapiens
cccctgatcccaagccccatgccctgcgcacaccaggccccacctgaacagccagcaccagacggatgaggtccaccaccacctcctcgttagccagctcratgctgatgagggccagcaagccatagagcgcctcgtagtgtttctgcacgtttgtttcctccttgcagctcaggtagatgtgtctgtagagctgctggg

SEQ ID NO: 459351 - DNA, 201 bp, Homo sapiens
gcctatcaaagaggtcaaagtgagagagaacaccagaaagacccacagagccagccaggtggtcagcagttcatgtggagtgggtctacggcaggtgtggygggggtggtgggcttggctgggttacaggcaggttgtggaagaccccagaagtcaagctgaggatgctggattttttctcaaagagctaggaaagcgcag

SEQ ID NO: 459352 - DNA, 201 bp, Homo sapiens
actcctactctggctgtaccaccagccccgggtgcctcagctgcaggacagaagagctggaaaacccttccagcccattcattccagctctcccagtttayggatggtgaaactgaagctgagagaggttaagaatcttgcccaaatttacacagcaatcagctctaatggccaactcttccccttgtccagaaatgtcct

SEQ ID NO: 459353 - DNA, 201 bp, Homo sapiens
atgtgaaagagaggaaaagcacttccatattgctggagccactgtcttttgagtttctttatactctaaatagcacaagcacctaataatcagatttgggagtgctttagaaacctgatggcacaaataaaggtgaattctgagcaatccaaagcaaaccaagtgactgacctcattggaaagggaagttagagctagaaa

SEQ ID NO: 459354 - DNA, 201 bp, Homo sapiens
aaacaaagctgattaagatagtgtcctcaagaggttcacagatctgttgtgtaaagaaataaacgacaacagtaaactctaagatacagtagaggagaccyggagggaggctgcagagctccagattttcccagcatccaccctgtatgcttctgctctagaagcatccctcctgcacacgctgtgagcagctataaggtg

SEQ ID NO: 459355 - DNA, 201 bp, Homo sapiens
agctgggattgcaggtgcccaccaccatgcccggttaatttttgtagctttagtaaagatgggattttaccatgttggtctggctggtctcgagctccccrcctcaagtgatctatccgcccgcctcagcctcccaaagtgctgggattgcaggcgtgagccaccgtgcccgcccttcactgtgcctggaggtcatgcttg

SEQ ID NO: 459356 - DNA, 201 bp, Homo sapiens; identical to SEQ ID NO: 20238

SEQ ID NO: 459357 - DNA, 201 bp, Homo sapiens
tttggcaggagaatcacttgaacctgggaggtggaggttgcagtgagccaagattgtgccactgcattccagcctgggcaacagagtgagactccatctcaaaaaaaaaaaaaaaaaaattagctgggcatggtggcacacacctctaatcctagctactggagaggctgaagtagaagaatcacttgaacctcggaggcg

SEQ ID NO: 459358 - DNA, 201 bp, Homo sapiens
ctaaagcctgagtgaacaacttcggaaactaggaatacacaacatccaatagcaatgagccaagtcctctcactagatgactgacaactagtatggtttgsctccgcgtccccacccgaatctcaccttgaattgtaataatccccacgtgtcaaggggggcaccaggtggagagaattgaatcatgggggcggttttccc

SEQ ID NO: 459359 - DNA, 201 bp, Homo sapiens
cgtaaatgtaataaaggatgaattaaaagattcgttcttctttatgtcttgacctaaatcatatccatcattgaatgttaggcagatatttaaaaaaaaawtttttttttgagacggagttttgctcttgttgcttaggctggagtgcaatggcgcaatctcggctcactacaacctctgcctcccaggttcaagcgattc

SEQ ID NO: 459360 - DNA, 201 bp, Homo sapiens
agtgtttacatgacgtaaaggaaggggtggggttgggcaagagaagaaactcaaggcctcgtgagccccagggcttagattactgcttttcctcttcctgaaaaaatgccagaaattcctgatatggaaaaaccatcctttgcaacagaaaaaaaaaaaaaaaaaaaaaaaaaaattggctacttaccaggagtggaaagt

SEQ ID NO: 459361 - DNA, 201 bp, Homo sapiens
ctgttcataaaatgaatactcctaacatattggtacattcttttttgttgttgtttttgagacagggtctcgctctgttgcccaggctggagtgcagtggygtgatctcagctcactgcaacctctgcctcctgggttcaagcgattaccccatcttagcctcctgagtagctgggactataggtgcatgcccccacaccc

SEQ ID NO: 459362 - DNA, 201 bp, Homo sapiens
ttcaaattacatggaaagtatctttataaacacaatttttattgactagataacattttatcaaatgacatacaccataattcactgaaatattctcctcygactggacattttacttctactttttcattattataaataacaagataacgaacatctctgtgtgtgaaggtagactgtatttaagattgattccttggg

SEQ ID NO: 459363 - DNA, 201 bp, Homo sapiens
ttccctttcttttgatttcctggcagcaaaaccttttatccaaataaaatgctgcaaacttccatacaaacaatggaaaggaccgggcgtggtagctcacrcctgtaatctcagcactttgggaggccaaggcaggtggatcacttgaggtcaggagttcgagaccagcctggccaacacagtgaaaccctgtctctacca

SEQ ID NO: 459364 - DNA, 201 bp, Homo sapiens
gggtgtgtatatatataccatgtgtgtgtgtgtgtgtgtgtaagtgtgtgtgtgtgtgtgtaggaatggatgatacagcatcattaaaagccacccaggcygggtgtggtggctcacgcctgtaatcccagcactttgggagcctgaggtgggcggatcacaaggtcaggatatcgagaccatcctggccaacatggtgaa

SEQ ID NO: 459365 - DNA, 201 bp, Homo sapiens
agatgcacaggggccgaaagaatcactgtctaaagccagcgctctagctgtgtgagcacagacaaatcatctcgcttcttggcgtcccatctctacactgrgaaatccaacaaaatgaggggttacaatgagcttgattcattttgctttctcttcctttttctccttccctttcttttgatttcctggcagcaaaacctt

SEQ ID NO: 459366 - DNA, 201 bp, Homo sapiens
aggcaccatcatagcacactacagccttgacctgccaggctaaagtgatcttcctgctctgcctcccaacaggtacgctccaccatacctggctaattttwtttatttatttattattattattatttcttagaccaagtctctccctgttgcccaggctggagtgcagtgacatgatctcagctcactgcaacctctgcc

SEQ ID NO: 459367 - DNA, 201 bp, Homo sapiens
actggaggataagaatggtttattaggaagggtagccatgggtctggctatggttgaatttgagtttagagagctaagaagaagggagaccatctagagargaagcagaagtcaaggcataagaaaataaggatgctgggtgcagtggctcacgcctgtaatcctagcactttgggaggctgaggtgggaggatcgcttgg

SEQ ID NO: 459368 - DNA, 201 bp, Homo sapiens
gagagctcaataccatcctgggtactcacggtagaaacttccacacagtgccccaagggggctgtggggttgtcagtgcagctactctggctggagagggytccctgagacatcaggccgggacagtcctggtctggggacaccaactcagttcttctcaaatgaaaaccagataggctgctgcctcctgctctcttgtat

SEQ ID NO: 459369 - DNA, 201 bp, Homo sapiens
tgctcttcaaaaggcgccgtcaaaagaatgaaaagtcatagactaggagaaagtatttgtagaagacatagctaataaagaatatatgtgtgtgtgtgtgwatatatatatatatatacatatatgaagattttatatatatacataatcttcaaaatataaggaacactgacatggtttggctgtgtccctaaccaaatc

SEQ ID NO: 459370 - DNA, 201 bp, Homo sapiens
ttctgcagctacccctgaggtggtgcgaggtagaaaacataagtggtaatccctttcctaaaaccacagaaggcctcattccagaccaggtcagcagtttytcctgaatctgtcccaagcgggtcagccacagctgctaacctcactggaaaactcccttgctctctccttctgcggctccatgagtccctggatgtgtgt

SEQ ID NO: 459371 - DNA, 201 bp, Homo sapiens
cagggcagcttcactgacaaggggacatttgagcaaaggtttgacagaggcgatgcagtgagccatgcagatccctggaggaagcattcccagcacaagcwcagactgtgcaaaggccctgaggcagtgtctgtggtgtgctggaggggaacgagcaagcaggagggccaaggagatggagtggagaatgcagctgggatc

SEQ ID NO: 459372 - DNA, 201 bp, Homo sapiens
acgtgtttgcttccccttctgccgtaattgtaagtttcctgaggcctccccagccatgctgaactgtgagtcaattaaagctctttcctttataaattacrcagtctcaggtatgtcttcgttcacagcatgagaatggactaatacaaacacttaaaactaaacaataagaaaataacccaattaaaaatggggccagac

SEQ ID NO: 459373 - DNA, 201 bp, Homo sapiens
gtccccacccgaatctcaccttgaattgtaataatccccacgtgtcaaggggggcaccaggtggagagaattgaatcatgggggcggttttccccatactrttcttgtgatagtgtgttctcatgagatctgatggttttataaggggcttcccccttcgctcagctctcattctctcccctggtgccatgtgaagaggtg

SEQ ID NO: 459374 - DNA, 201 bp, Homo sapiens
tctattcctcctctcctaggccccctttcccctcacaaagccctgaatccctgtgaagacctgtttggaactcccgggctagactctaagataatgtcatrcactagcatgctagcaggtctaaaacgatgaggagcaaaaggacactcttctcaggaaggctcaagaaggtctgggcacagagagctggaaagagcatca

SEQ ID NO: 459375 - DNA, 201 bp, Homo sapiens
ctgaaaatagcacccagatgctttgattccccagttcacctttctgactatccagctcttccttgtcttgcttcatacaacagaggcagcctgggaccccsaccttcagatatctcgggtaaacgaccaaattatcttggactaaatgcaatgaggcagcccagcagaacccagttcctaattctgacccattctgatgag

SEQ ID NO: 459376 - DNA, 201 bp, Homo sapiens
cctgggcaacagagtgagactccatctcaaaaaaaaaaaaaaaaaaattagctgggcatggtggcacacacctctaatcctagctactggagaggctgaartagaagaatcacttgaacctcggaggcggaggttgcagtgagccgagatcatgccagtgcactccatccggggtgacacagcgaggctctgcctcaaaaa

SEQ ID NO: 459377 - DNA, 201 bp, Homo sapiens
agcaaaaatgcctgtgtgccattgactctgggttactcagagtacaactttttaaaaaattgaagtaaaattcacataacataaaattagccattttaaartgcccaattcagcggcatttaatccattcacaatgttttgcaaccaaaacattttcctcaccccaaaaggaaaccctatacccactcagcagtccctccc

SEQ ID NO: 459378 - DNA, 201 bp, Homo sapiens
gacctgccctcttcaaaaagtcaatgtcatgaataaaagaggggcagagagaggttgcgaagctgctaagagagttaagggatgtagaaaacaaataaatrgtctttactaagttctgatttgaaaaaggatagcaatgcagacaacgggggaaaattagggaaatctggatttagacgacatattaaaataagatcaggg

SEQ ID NO: 459379 - DNA, 201 bp, Homo sapiens
gcattcacaggttccagggattaggacataggcaaccgtgggatgggggcatcattcagcctaccacagaaactaagcagggcacatccggtgggaagagrtggagtgacaggcctgaggaagtgaagggagtgtgaacaagggtgggatcccagggagaaatgggcgtgatcccagggagaaatgggcacgatcccaggg

SEQ ID NO: 459380 - DNA, 201 bp, Homo sapiens
tcttcaaaaggcgccgtcaaaagaatgaaaagtcatagactaggagaaagtatttgtagaagacatagctaataaagaatatatgtgtgtgtgtgtgtatrtatatatatatatacatatatgaagattttatatatatacataatcttcaaaatataaggaacactgacatggtttggctgtgtccctaaccaaatctca

SEQ ID NO: 459381 - DNA, 201 bp, Homo sapiens
ggactccaaggactgcactcaggaagcacagacctcggggaacaccagctggctgcctctgctctcagagcctgtccctacctggggctgagccccatgcyttgggccgttccactggccttggtctctagcagtgctgatttttgaaccaaagtgctgaaaattggggcatatctagtcgacaggtgacagttaaaacca

SEQ ID NO: 459382 - DNA, 201 bp, Homo sapiens
tactccttagccccagtccccagttttcttggtctgtttgataatctatttcttttttttttctttttttgagacaaaatcttactctgagagtcacccakgttggaatgcagtggcacaatcatggttccctgcagcctcgaccttctgggctcaagtgatccttctgcttcagcctcccaagtagctggcactacaggt

SEQ ID NO: 459383 - DNA, 201 bp, Homo sapiens
atgtagatgactcctcctttgttttcaagacagtaagtgggataaggcaggacaggttggatgaggatggtggtgcaatcaaaccttaattttttttaagkccccagactgtatgagggcttctgtatggaaacgcaagagagaatggatgctggaagaggtgcttgtaggaagccaacacccttttcttcccaaacctca

SEQ ID NO: 459384 - DNA, 201 bp, Homo sapiens
tcattttacagataaagaggcaggatcagagaggttaagtgccctgcccaaggtcacatagcatgttcttctctgccatgaaactcccctaattcttccaycactttccaaaaaatatatctctaacaatttcccaagttcatcttgtgctctccttcgccacagccaccttgctggaagcctcctgaacacctgccaccc

SEQ ID NO: 459385 - DNA, 201 bp, Homo sapiens; identical to SEQ ID NO: 118670

SEQ ID NO: 459386 - DNA, 201 bp, Homo sapiens
gtgtgtgtatatatatatatatatacatatatgaagattttatatatatacataatcttcaaaatataaggaacactgacatggtttggctgtgtccctamccaaatctcatcttgaatcgtagttctcataatccccacgtgtcatgggagggacctagggggaggtaatttaatcatggggacagttaccctcatgctg

SEQ ID NO: 459387 - DNA, 201 bp, Homo sapiens
acaaatttatccccataaaaaaagtgcttagaattctgcctggcacaggctgggcaaagtggctcatgcctgtaatcccagcactttgggaggccaaggcrggcagatcacaaggtcaggagttcaagatcagcctgaccaacatggttaaaccccgtctcgactaaaaatacaaaaacattagccgggcatggtggcaca

SEQ ID NO: 459388 - DNA, 201 bp, Homo sapiens
acgcagtctcaggtatgtcttcgttcacagcatgagaatggactaatacaaacacttaaaactaaacaataagaaaataacccaattaaaaatggggccasacggggtggttcatgcctgtaatctcagcactttgggaggctgaggcgggcagatcacttgaggtcaggagttcaagaccagcctggccaacatggcaaa

SEQ ID NO: 459389 - DNA, 201 bp, Homo sapiens
taacatattctgaaaagtcaacagccactagcaccctcattttggtcaggcgcggtggctcacacctgtaatcccagcactttgggaggctgaggcaggcraatcacttgaggtcatgagttcgagaccagcctggccaacatggtgaaatctcgtttctactaaaaatacaaaaattagtcaggtgtggtggtgcaggcc

SEQ ID NO: 459390 - DNA, 201 bp, Homo sapiens
ctgactctcgctggacaggtcttccccatccccacctccacgcacacttcctcacattggtgcctccaccagccacacctgcctcccttctctgcccctcrgtagaggagaaagggctgttgtttctgaagcctgcccagatgactccacctcgcactggtctcttccacttcaagatactgctggttgaacatctgatga

SEQ ID NO: 459391 - DNA, 201 bp, Homo sapiens
tagccaggtgtggtggcacacgcctgtaatcccagctactcgggaggctgagacatgagaactgcttgaacctgggaggtggaggttgcagtgagtcaagrccacgccactgcactccagcctgggcaacagagtgagactgtctcaaaataaataaataattaaaaaataaaaaaattaagaaacagagaaaagagagtt

SEQ ID NO: 459392 - DNA, 201 bp, Homo sapiens
ctgtataatgctaacaaaaagaaaagctcatgggaatccatttttgcatagaatttgctaatgatcttcccaccccagtaaaaatgctttcattttttcakgtcccttgtcagtctgccttcataggattcccacacaaaactgtgggcagtcactgtgtccttttagagagccatttccagaaactgatgggtttaggaa

SEQ ID NO: 459393 - DNA, 201 bp, Homo sapiens; identical to SEQ ID NO: 118671

SEQ ID NO: 459394 - DNA, 201 bp, Homo sapiens
atgtgaaatttcagttgccaatatgatctgaaaacccagaggatggctgaaggtgttaaatgtgctataatcattaaggatactgtgttctgtgttattgttcttctttttggtgtgtggaggttgtaattgccatgtaggtatacaaacttttaaaaacatttggtttgcatttaattctatttatagaacactgtttgt

SEQ ID NO: 459395 - DNA, 201 bp, Homo sapiens
tgtgaaatttcagttgccaatatgatctgaaaacccagaggatggctgaaggtgttaaatgtgctataatcattaaggatactgtgttctgtgttattgttcttctttttggtgtgtggaggttgtaattgccatgtaggtatacaaacttttaaaaacatttggtttgcatttaattctatttatagaacactgtttgta

SEQ ID NO: 459396 - DNA, 201 bp, Homo sapiens
gtgaaatttcagttgccaatatgatctgaaaacccagaggatggctgaaggtgttaaatgtgctataatcattaaggatactgtgttctgtgttattgttcttctttttggtgtgtggaggttgtaattgccatgtaggtatacaaacttttaaaaacatttggtttgcatttaattctatttatagaacactgtttgtat

SEQ ID NO: 459397 - DNA, 201 bp, Homo sapiens
tatacccaactgcatccaaagtaggaccaaaactatgaaagttacgattacattaggacaggggatgtgcagaaaagaaaagagcttggctggctgggtgsagtggctcacacctgtaatcccagcactttgggaggccgaggcgggtggatcgcgaggtcaggagttcaagaccggcctggccaacatagtgaaacctca

SEQ ID NO: 459398 - DNA, 201 bp, Homo sapiens
aagaaaagagcttggctggctgggtgcagtggctcacacctgtaatcccagcactttgggaggccgaggcgggtggatcgcgaggtcaggagttcaagacyggcctggccaacatagtgaaacctcatctctactaaaaatacaaaaaatagccaggtgtggtggcgtgaacctgtaatcccagctactcaggaggccgag

SEQ ID NO: 459399 - DNA, 201 bp, Homo sapiens; identical to SEQ ID NO: 118672

SEQ ID NO: 459400 - DNA, 201 bp, Homo sapiens
tccccactgtgtcccagggctggaatagggtccaacccatgggtggtggtggcagggggtgctcatacaggtttgtggaataaagggaggacagtgtgatygagcagaaaagcaatcatgaatttcaaggtcagtaatttcaaagtcagtaagtcaaagtctatgaggcacttagcaaaagatctctgggtgtttgcaaga

SEQ ID NO: 459401 - DNA, 201 bp, Homo sapiens
tttgccccaaaccccctgtccagaatgttcttccccatgtcctctgacctcccactctcatgtccctaaggtctctgcccaaatgtcacctagctggaaaragcttccctgaccagcattccactttaattttctgtcctggtttattccttttcatagtgctttttaccaatggacacatttcatctgtgtctacactcc

SEQ ID NO: 459402 - DNA, 201 bp, Homo sapiens
aggtcagatgggcttaggatgaaattctagctcttcccttttcttactgtctggccctgtgcaatactccacacttcctgggtaggtaatcaaagctgatrgcaggagattcccagctctcctctccgagttgagagctggaggcgctttggtcaggagcgcccagcttctgggtcccaaagcagcttagtgggtgctggg

SEQ ID NO: 459403 - DNA, 201 bp, Homo sapiens
ggtgaaaccccttctctactaaaaatacaaaaaaattagcagggcgtggcagcgcgcacctgtaatcccagctattcgggaggcggaggcacaagaatcgyttgaatctgggaggcagaggttgcagtgagccgagatcgcaccactgcactccagcctgggtgacagagtgagactcattctcaaaaaaataaataaata

SEQ ID NO: 459404 - DNA, 201 bp, Homo sapiens
cacctgtctttactaaaaatacaaaaattagccaggcatggtggcgagtgcctgtaatcccagctactcaggaggctgaggcaggagaattgcttgaaccyggggagcggaggttgcagtgagccaagattgcaccattgcactctagcctgggcgacagagtgagactccgtctcggggggagaaaaagaattgtaagtg

SEQ ID NO: 459405 - DNA, 201 bp, Homo sapiens
tgcacagaactcatacctgtcagctgaggaatgtagggcaggcagagccggtccgagttgtagccactgcctcccaggacttcactgatcttgctctggcrgaagaggagctcaatgaccaccccatcaagattctgagacagcctggaagatgaaggagggagaaagttcgttagaaccgcggtatctagaatgacttct

SEQ ID NO: 459406 - DNA, 201 bp, Homo sapiens
cttgaacccaggaggcggaggttgcagtgagccgagatcatgccactgcactccagcctgggcaacagagtgagactctatctcaaaaacaaaaaacaaamaaaaaaaaacaaaaactaaaaaggaggctgtagaacacctatgatatgattccatttgtgtgcaccctcacaggccaaaccaatggggtgtgtatgtaaa

SEQ ID NO: 459407 - DNA, 201 bp, Homo sapiens
aacccaggaggcggaggttgcagtgagccgagatcatgccactgcactccagcctgggcaacagagtgagactctatctcaaaaacaaaaaacaaaaaaamaaaaacaaaaactaaaaaggaggctgtagaacacctatgatatgattccatttgtgtgcaccctcacaggccaaaccaatggggtgtgtatgtaaatatg

SEQ ID NO: 459408 - DNA, 201 bp, Homo sapiens
tgatacaaacgtataaaatgtatatatgtgtgtgcatgtgtatggatatatatacatgaatgtatacatgtatgtgtgtatgggtgtgtatatatataccrtgtgtgtgtgtgtgtgtgtgtaagtgtgtgtgtgtgtgtgtaggaatggatgatacagcatcattaaaagccacccaggccgggtgtggtggctcacgcc

SEQ ID NO: 459409 - DNA, 201 bp, Homo sapiens
ggaggcggaggttgcagtgagccgagatcatgccactgcactccagcctgggcaacagagtgagactctatctcaaaaacaaaaaacaaaaaaaaaaaaamaaaaactaaaaaggaggctgtagaacacctatgatatgattccatttgtgtgcaccctcacaggccaaaccaatggggtgtgtatgtaaatatgtgcgtg

SEQ ID NO: 459410 - DNA, 201 bp, Homo sapiens
gggacgagaatcacttgaacccaggaggcagaggttgcagtgagccaagattgcaccactgcattccagcctgggcgacaaagtgagactgtttcaaaaamaaaaaaaaaatcaacctccaattcaaggtgccaacccctgtggctgagttggagccaacattgaaattcacatttattctcttctgtggaatatgtctgg

SEQ ID NO: 459411 - DNA, 201 bp, Homo sapiens
cagagacatgacccacctcgggatcctcagggaagatgttgtcaaccagccttttgtacctggggcgtagggcaccacagcagccacacacacctggaatragaatgggaaaaactgtgagcaaagcctcctggtcgggcccaggaaaggttggagccagggccagggcagcctgtgagtggcaggaaacagacaggctgg

SEQ ID NO: 459412 - DNA, 201 bp, Homo sapiens
tgaggcaagagaatggcttggtcccaggaggcggaggctgcagtgagccaaaattgcgccattgcactccagcctgggagacacagcgagactccatctcaaaaaaaaaaaaaaaatcaacactgaataatattctatcatacacagatattgcattttgtttatccgtttgtctgtcgatggacacttaggctgcttcta

SEQ ID NO: 459413 - DNA, 201 bp, Homo sapiens
ccatagtggctgcaccattttttcccactagctgtacacaatgatggttccagtttctccacaacctcaccaacacttggttattgtttttttttttgggrgggggggcgcggggagacagagtctcactctgtctcctaggctggagtgcagtggcgtgatctcggctcactgcaagctccccctccagggttcaagcaa

SEQ ID NO: 459414 - DNA, 201 bp, Homo sapiens
acttgaacccgggaagcggaggttgcagtgagctgagattgcgccactgagctccagcctgggcgacacagcaaggctgtgtctgaaaaaaaaaaaaaaamacacacacacacacaaaagagaaatgtgttctctgctttcatggagcttacagtttactgggggaaacaaacaagagaaatattagtgatgaatggccat

SEQ ID NO: 459415 - DNA, 201 bp, Homo sapiens
ttgaacccgggaagcggaggttgcagtgagctgagattgcgccactgagctccagcctgggcgacacagcaaggctgtgtctgaaaaaaaaaaaaaaacacacacacacacacaaaagagaaatgtgttctctgctttcatggagcttacagtttactgggggaaacaaacaagagaaatattagtgatgaatggccatgc

SEQ ID NO: 459416 - DNA, 201 bp, Homo sapiens
gtagttccagctactctggaggctaaggcagaagaatggcatgaacccgggaggtggagcttgcagtgagccgagatcgcgccactgtactccagcctggrggacagagcgagaatctgtctcaaaaaaaaaaaaaacataaaaaaaacaaaagtgactccagcacagatcatacggtgaatctttgttttattcattgct

SEQ ID NO: 459417 - DNA, 201 bp, Homo sapiens
ctgccttttttttttttttttttttgtagagacagggtctcattgtgttgtccaggctggtctcaaactcctgggatcaagcaatcctcccaccttggccyccaacttgctgtttttgacatacgctgtgaaatagtcaccacggttaagccagttaacgtaacacctcacatagttgccactttctttcctcttccctcc

SEQ ID NO: 459418 - DNA, 201 bp, Homo sapiens
tctcagccagctccgcggggctctctttctccttctcaggtgcttggaggggtgagggagaccggctggggagacagaggcacatgggtagagggtggcaygcaggctggggtcaggctctgtacaatcccggctttccgtgtttcatccacacaagacaagcaggaatttgacatgggttgcactaggcaataggggagg

SEQ ID NO: 459419 - DNA, 201 bp, Homo sapiens
ccaggggtgggttgatttaagatttgctggtgaggcctgtgctttctagacctctccaccccatcagcaccatgcacatttcactgtagttcaagaccagytccgtcttctcctgccaggaggaaggggccttggacggcagtggggctgatgggcagctgcagggggaggcctatcaaagaggtcaaagtgagagagaac

SEQ ID NO: 459420 - DNA, 201 bp, Homo sapiens
gaagaaactcaaggcctcgtgagccccagggcttagattactgcttttcctcttcctgaaaaaatgccagaaattcctgatatggaaaaaccatcctttgyaacagaaaaaaaaaaaaaaaaaaaaaaaaaaattggctacttaccaggagtggaaagtggaaaatttccattttggtagaaggtgaaaattatggtagaa

SEQ ID NO: 459421 - DNA, 201 bp, Homo sapiens
aagggatcgactcggctgcggcaccacaactgtaatatccccttccccccagccagccaggagatgccagggacctgaaacacatccaggctgaaggctgrggccaaggcagtgggtgggggcactcacatgagaacaggcttgatggcgtttttgatgttgccaaaggcagcccggcccagcagctcccgaagacacctc

SEQ ID NO: 459422 - DNA, 201 bp, Homo sapiens
taaagcctgagtgaacaacttcggaaactaggaatacacaacatccaatagcaatgagccaagtcctctcactagatgactgacaactagtatggtttggstccgcgtccccacccgaatctcaccttgaattgtaataatccccacgtgtcaaggggggcaccaggtggagagaattgaatcatgggggcggttttcccc

SEQ ID NO: 459423 - DNA, 201 bp, Homo sapiens
ggaaaagctacagggaggcagagtgggctcagggtgaggctttttcttgacttctcacccacaaggccgggggttgccttgtgatagactaagtctggtcwtgggggctatctgcacagaggctgggtgccacactttggaatcaagggcccaatgaggggcttctgaccttgccaccccccagattctagggagaatatt

SEQ ID NO: 459424 - DNA, 201 bp, Homo sapiens
agatttaatatttttagtttatcattagtaagtgcccttaaaaaatcaggacatgtggtgattgacactgtcctcaagacatgcatctggacccaagacaygcatctggacccatcatgcaatgaggcaggtgtgcagaagtgaatccccagtgagtaaggagcttagctggccctgactcccccaccttctcctggtgtt

SEQ ID NO: 459425 - DNA, 201 bp, Homo sapiens
catgccttgttctgttggaagccttcaaaatatccgaaagacatcacaaagcccgagttctagaagaggctattcatagacataggagttttcatcaggawtggcgaggccaggcccagttaacacctacagtctaagtaataacagcagtaaatatttctgtggcactcactgcttaacacgtcagtgttagctgtctct

SEQ ID NO: 459426 - DNA, 201 bp, Homo sapiens
agcgcctcgtagtgtttctgcacgtttgtttcctccttgcagctcaggtagatgtgtctgtagagctgctgggagtgctggggacaggagcgggcagaagrccagggtcggagggatggggacaggaggggcaaggagaacacggaggaagaccaatctgaaggggggcaggatggctgtgtgccccctcctcccttgggg

SEQ ID NO: 459427 - DNA, 201 bp, Homo sapiens
cctgacccagcgtccccactgtccccgccaggtggtggcctctgccatccccgacgaccagggctggggcgtccgccctcagcagccacaggtgggtttgsggcccctcagacccctgcctggcctcacccagctttctgggaaagaaaatgctgcacaagctctgagccctcctggggctgcgaagttcctctgatggga

SEQ ID NO: 459428 - DNA, 201 bp, Homo sapiens; identical to SEQ ID NO: 340745

SEQ ID NO: 459429 - DNA, 201 bp, Homo sapiens
gtcatggccgggagaccgggtcagtctcctcctcagagccctcagccctcccccagcccactccccgaaacagccaggagtccagggtgccagggtgcagyggccgaggccctgcacggagcccggtgcccttctcgtgccccctcgcgttccggggccgcctgttcctgcgcatcccaaacgccagcgctgcccaccccc

SEQ ID NO: 459430 - DNA, 201 bp, Homo sapiens; identical to SEQ ID NO: 340746

SEQ ID NO: 459431 - DNA, 201 bp, Homo sapiens
gcctgcggttcaagctgcaagcctgggaggtgaggccgggcagggctcactgtgctgctggctgtggggtgtccacgggcggtggcactgtcacaggaggrccctgtggactggggagcgcctctggccgaagctcttggtgccatggaataccctggccactccttgacccgcaggaggttctggtggcagtggaggtgg

SEQ ID NO: 459432 - DNA, 201 bp, Homo sapiens; identical to SEQ ID NO: 340748

SEQ ID NO: 459433 - DNA, 201 bp, Homo sapiens
catcgactacacgcagctgggcctgcggttcaagctgcaagcctgggaggtgaggccgggcagggctcactgtgctgctggctgtggggtgtccacgggcrgtggcactgtcacaggagggccctgtggactggggagcgcctctggccgaagctcttggtgccatggaataccctggccactccttgacccgcaggaggt

SEQ ID NO: 459434 - DNA, 201 bp, Homo sapiens
gctgccatcgactacacgcagctgggcctgcggttcaagctgcaagcctgggaggtgaggccgggcagggctcactgtgctgctggctgtggggtgtccaygggcggtggcactgtcacaggagggccctgtggactggggagcgcctctggccgaagctcttggtgccatggaataccctggccactccttgacccgcag

SEQ ID NO: 459435 - DNA, 201 bp, Homo sapiens
catgtgcatggacccctggcccaccagacctgagtgtgcagacctaggcaccgcactgccctccctcaggtctccttggaaccaggtgttgggggcggctsgagcggggctggtgtgaaagctgcctaaccacagccccatctccgccctgtgctgctgaggggaccccggctgcccacaggttccaggaggctctgtctg

SEQ ID NO: 459436 - DNA, 201 bp, Homo sapiens
ggggggtccctgcgtccctgccacagatagcgaggtcccggggggggggggtccctgcgtccctgccacagatagcgaggtcctggggggatgcctgtgtscctgccacagatagcgaggtccccgggggggtgcctgtgtccctgccacagacagcgaggtcccaggggggtgcctgtgtccctgccacaggtagcgagg

SEQ ID NO: 459437 - DNA, 201 bp, Homo sapiens
cattggccgataaaatagacaaaaataacatacatattttttcaagcacaaattcatgcacgctagcgacaggctcacgggtgtgagaactacgagcagawgaacagtgctcatgaggagctaggtcagaaggggtaagacgtaggtgcgtagactctggctggtgactgtgtgcacctggctttataactggtcatcaaa

SEQ ID NO: 459438 - DNA, 201 bp, Homo sapiens
gggatttatttgagaaacataaaaacacgacggaacccttcattggccgataaaatagacaaaaataacatacatattttttcaagcacaaattcatgcaygctagcgacaggctcacgggtgtgagaactacgagcagatgaacagtgctcatgaggagctaggtcagaaggggtaagacgtaggtgcgtagactctggc

SEQ ID NO: 459439 - DNA, 201 bp, Homo sapiens
ctgagtggcgacagccctgcccaggcaggggctccgaaggttcctggacaggagcaggaggggctgtggggggtccccaggggctgacggaattccgtggycctgtcacccatcacgctgtatctgtgatgctgcgtgaccaggttacagaccttggcatcccgtgggcatttttgtccccaggcatttgaccaagccgtg

SEQ ID NO: 459440 - DNA, 201 bp, Homo sapiens
ggccgggcagggctcactgtgctgctggctgtggggtgtccacgggcggtggcactgtcacaggagggccctgtggactggggagcgcctctggccgaagytcttggtgccatggaataccctggccactccttgacccgcaggaggttctggtggcagtggaggtggagggaccattttgtgccatttcaggccaccagg

SEQ ID NO: 459441 - DNA, 201 bp, Homo sapiens
gagcccgtggatttcctgggcaaggccaaggtaaaggtggggacggcgtcctggggcatggcggctggtgctgagccctcgaactgtgttcccagggatgsggggaggtgcagtccaggccaccgtaagggccaggagggtagagagtgggcccacagccatcctcaaactggcgcccacggtaggggggcggtgccccaa

SEQ ID NO: 459442 - DNA, 201 bp, Homo sapiens; identical to SEQ ID NO: 340757

SEQ ID NO: 459443 - DNA, 201 bp, Homo sapiens
gtccccaggcatttgaccaagccgtgaccaaggacacctgcatggcggttggcttcttccagcgaggagtggccaacttccagctggcaaggtgagtacasgggtgccttgttccttctctgacggccctttgtctccctgcagagtccactcctgcacctcctcctcctccctctccatccactccctcctcttgcccac

SEQ ID NO: 459444 - DNA, 201 bp, Homo sapiens
tattatcttcgccagcttcctcatcaccttcttgacctttaccttcttcaaagtccctgagacccatggcagggcttttgaggatatcacatgggcctttraaaggcaggcacatggtgcagatagatctgggaaggatggcatcatggagatgaacagcatccaggctgctaaggagaccaccaccaatgtctaagtcat

SEQ ID NO: 459445 - DNA, 201 bp, Homo sapiens
caatggccggctgctccaactatacctccaacttcttagtcggactgctcttcccctctgctgcttattatttaggagcctgtatttttattatcttcgcyagcttcctcatcaccttcttgacctttaccttcttcaaagtccctgagacccatggcagggcttttgaggatatcacatgggcctttgaaaggcaggcac

SEQ ID NO: 459446 - DNA, 201 bp, Homo sapiens
agaattagattaggaccatgcggacacagaaggtcaccccagctctgatcgttgccattacagttgctacaattggctctttccaagttggctacaacackggagtcatcagtgctcctgagatgatcataaaggaatttatcaataacactttgagtgaccaggcaaatatccctccctctgagatgttgctcacgtccc

SEQ ID NO: 459447 - DNA, 201 bp, Homo sapiens
tcagcataaattttggtcgggaacagccagcccagatgagcaactttctcataacaaccaggccaagaatagagaaagctggtgctgtgatcgacccagayaagggctcagcatacagtttctgcaacgatctctctcttttaacgtgaaccacaacaaacacgctttctccttgaattcttccagattcattattctatg

SEQ ID NO: 459448 - DNA, 201 bp, Homo sapiens
cgtatgtcttttgatgaaaatggttctttacttttgtgatcttcctcccgcaaacccacaacccgaagcttataattagaaaaacatcaggaaaatcacarcagaggccattctacaaaatacctgatcgatattcctcaaaactgtcatggtcatcaaaaacagagtcagagaaattgtcacaagtcaggggagcctaag

SEQ ID NO: 459449 - DNA, 201 bp, Homo sapiens; identical to SEQ ID NO: 281025

SEQ ID NO: 459450 - DNA, 201 bp, Homo sapiens; identical to SEQ ID NO: 281026

SEQ ID NO: 459451 - DNA, 201 bp, Homo sapiens; identical to SEQ ID NO: 281031

SEQ ID NO: 459452 - DNA, 201 bp, Homo sapiens; identical to SEQ ID NO: 281039

SEQ ID NO: 459453 - DNA, 201 bp, Homo sapiens; identical to SEQ ID NO: 281049

SEQ ID NO: 459454 - DNA, 201 bp, Homo sapiens; identical to SEQ ID NO: 281057

SEQ ID NO: 459455 - DNA, 201 bp, Homo sapiens; identical to SEQ ID NO: 281022

SEQ ID NO: 459456 - DNA, 201 bp, Homo sapiens; identical to SEQ ID NO: 280996

SEQ ID NO: 459457 - DNA, 201 bp, Homo sapiens; identical to SEQ ID NO: 281023

SEQ ID NO: 459458 - DNA, 201 bp, Homo sapiens; identical to SEQ ID NO: 280998

SEQ ID NO: 459459 - DNA, 201 bp, Homo sapiens; identical to SEQ ID NO: 280997

SEQ ID NO: 459460 - DNA, 201 bp, Homo sapiens; identical to SEQ ID NO: 281024

SEQ ID NO: 459461 - DNA, 201 bp, Homo sapiens; identical to SEQ ID NO: 293360

SEQ ID NO: 459462 - DNA, 201 bp, Homo sapiens; identical to SEQ ID NO: 293361

SEQ ID NO: 459463 - DNA, 201 bp, Homo sapiens; identical to SEQ ID NO: 293443

SEQ ID NO: 459464 - DNA, 201 bp, Homo sapiens; identical to SEQ ID NO: 293462

SEQ ID NO: 459465 - DNA, 201 bp, Homo sapiens; identical to SEQ ID NO: 293806

SEQ ID NO: 459466 - DNA, 201 bp, Homo sapiens; identical to SEQ ID NO: 293444

SEQ ID NO: 459467 - DNA, 201 bp, Homo sapiens; identical to SEQ ID NO: 293445

SEQ ID NO: 459468 - DNA, 201 bp, Homo sapiens; identical to SEQ ID NO: 293446

SEQ ID NO: 459469 - DNA, 201 bp, Homo sapiens; identical to SEQ ID NO: 293447

SEQ ID NO: 459470 - DNA, 201 bp, Homo sapiens; identical to SEQ ID NO: 293811

SEQ ID NO: 459471 - DNA, 201 bp, Homo sapiens; identical to SEQ ID NO: 293633

SEQ ID NO: 459472 - DNA, 201 bp, Homo sapiens; identical to SEQ ID NO: 293635

SEQ ID NO: 459473 - DNA, 201 bp, Homo sapiens; identical to SEQ ID NO: 293948

SEQ ID NO: 459474 - DNA, 201 bp, Homo sapiens; identical to SEQ ID NO: 293235

SEQ ID NO: 459475 - DNA, 201 bp, Homo sapiens; identical to SEQ ID NO: 293473

SEQ ID NO: 459476 - DNA, 201 bp, Homo sapiens; identical to SEQ ID NO: 293376

SEQ ID NO: 459477 - DNA, 201 bp, Homo sapiens; identical to SEQ ID NO: 293379

SEQ ID NO: 459478 - DNA, 201 bp, Homo sapiens; identical to SEQ ID NO: 293382

SEQ ID NO: 459479 - DNA, 201 bp, Homo sapiens; identical to SEQ ID NO: 293420

SEQ ID NO: 459480 - DNA, 201 bp, Homo sapiens; identical to SEQ ID NO: 293358

SEQ ID NO: 459481 - DNA, 201 bp, Homo sapiens; identical to SEQ ID NO: 294003

SEQ ID NO: 459482 - DNA, 201 bp, Homo sapiens
catggaactgatcagcttagttcaagaagtggtaagactactactaaaatataattattttgtttttaatctgtaatatataataatatatttatataatrtaagttaatcagatgttgaaatcaaggttttcaagatttgcaaatttgataggctgtacctatagtcaaattccataaatttcagagtatctgagaaatt

SEQ ID NO: 459483 - DNA, 201 bp, Homo sapiens
tagcatccgccaggtttcttcactccaaaatttgtactttttcctttataattaataagtatcttatgtatgggactgtaaatatcctatttttcatcctrctttttcctatgaattttgacaccctttgatgagtgttgcctgaaaaaggttactgtgttgattgccaagtggtgtttttctaattccattatttcttac

SEQ ID NO: 459484 - DNA, 201 bp, Homo sapiens
taattgaactataaatgttagcagccagtttgttttttttttaagattatcttagatacttagtatatattgctaacagcttctctctaacccttagagcrgttttgcagggtagatatgttgattctcttgttgcatatgaggagacgagctcagtcacttgtccaatgtcatgtggtccataagtgccagagctgggaa

SEQ ID NO: 459485 - DNA, 201 bp, Homo sapiens
agtatatatagtatatattgtaaggattaaccatttcccttatctttttattttacattttttgccctaaagtgcttgcttgcactgtgcttggggttgargaatactaagataaatgacaaattgcctgccttgaaggagcttaaatctaattgagggaatggagtttagaatgtttattttgaagaatgtgcggtatca

SEQ ID NO: 459486 - DNA, 201 bp, Homo sapiens
aattaatttctaccttgttaattttttagtggacagaaaatacatttattgcactaaattttaacttttttaattttttttattttttttaacagagcctygctctgtcacccaggctggagtgcagtggcgtgatctcagctctctgcaacctctgcctccccggtttaagtgattctcctgcctcagcctcccaagtag

SEQ ID NO: 459487 - DNA, 201 bp, Homo sapiens
ctaaaaatgaaggggttaatagtacttgtacctctctgtagtcatatcccagtagacactggagatgtataaggatctctgttgtcagccttcattgtctygttgggggaacagatgtttaaacaagtagttataataaatgtgattcttttaaaacatagacacctgaagtactagggaaatacataggaagtaattctc

SEQ ID NO: 459488 - DNA, 201 bp, Homo sapiens
tggtttttttttttttgtttttttttttttgagacagagtctcactgtcacccaggctgtagtgcagtggcacgatcttggctcattgcaacctccgcctyctgggttcaagcgattctcctgcctcagcctcccgagtagctgggattacaggcacccaccaccatgcctggctaatttttatatttttagtagaggcgg

SEQ ID NO: 459489 - DNA, 201 bp, Homo sapiens
tccccttctactatcttctggtaaccactaatctactttttccctatggatttttcttcttctggacttttttttttttgagacggagtctctccctgttrcccaggctggagcgtagtggcacaatctcggctcactgcaagctccgcttcccgggttcacgccattctcctgcctcagcctcccaagtagctgggacta

SEQ ID NO: 459490 - DNA, 201 bp, Homo sapiens
aagtattttgactggaattgctttacatttaaagactagtttaggggtgctgggcaccatggctcctgcctgttaatcccagcattttgggatgctgatgrgggaggatggcttcttgagcccaggagttcaacatcatatggcaagaccttaatctctacaaaaataaatttttttgataagccagtcatggtggtatgt

SEQ ID NO: 459491 - DNA, 201 bp, Homo sapiens
ggaatgataaacttataagtaagcaggaaatgagaattctgtcccttttttggtggtgggtggtgggtggtgggtggtggtggtggtggtggtggtggtgstgctgctgctgctggtggtagtgatagggatagggagtggttggtttaatggaaatgttactgagatctgctattcgacatgcttgatctgaacacaaca

SEQ ID NO: 459492 - DNA, 201 bp, Homo sapiens
tcacctgctattcaaggaaatggtatattaaaccaaatggtatattaaaaccaaaagtacagctttttgggtggactttctcaaaaagcctttgttacatrttttgcagatacagttgacccttgaacagcacaggcttgttgtactgtacaggtccacttaatattcgaatttttttcaaccagagaaagattgaaaata

SEQ ID NO: 459493 - DNA, 201 bp, Homo sapiens
gctaataagaaaaatatagacatggtttttgtccacagggaactcaagatgaaattggcagataaaaacagaatttactactctcttattataaaataatrctatagtagcaccgtaagtaaattgctatgaagtttgtggatagggggcttcacattatcctattaatgagacattgctcaaactttaaaccttttattt

SEQ ID NO: 459494 - DNA, 201 bp, Homo sapiens
catcatattctcgaaaagataaagaccaaaggaagcaacaggcaatgtggcgagtgccctctgatttaaagatgctaaaaagactcaaaactcaaatggcygaagttcgatgtatgaaaactgatgtaaagaatacactttcagaaataaaaagcagcagtgctgcttctggagacatgcagacaagccttttttctgctg

SEQ ID NO: 459495 - DNA, 201 bp, Homo sapiens
ttttcacttattttattgcttacttctgtttttttttctcctttgatttgacctgctcaagggatttgctaattttgttcatctcctcaaagaccaagttyttagatttatttcatccattgtcttttaccatttcattatatttctgcttttgtctttgttaatgcttttttttttttttttttttttttttttttgaga

SEQ ID NO: 459496 - DNA, 201 bp, Homo sapiens
atttatagatctagggcaagcagtgttctgggtaaacagaacagaaactgcaaagtcactgacacaggatttattttgcgtatttgaaggattgaaggaaraccagtatggcaaagaaagcagagagaggagactagcaggagacgaagtcagagagaggtaggcagaatttagatcagggagagtcttgcaaaacctcaa

SEQ ID NO: 459497 - DNA, 201 bp, Homo sapiens
ggcataacagtgtgacatcaaattagaaaggaccagtagacagctaaaaattaagaactggggctgggcgcagtggctcacgcctgtaatctcaacacttrgggaggctgaggcgggtggatcacctgaggtcaggagttcgagaccagcctagccaacatggtgaaaccctgtctctactaaaaatacaaaaaattagcc

SEQ ID NO: 459498 - DNA, 201 bp, Homo sapiens
ggcgggccaatcacctgaggtcgggagttctaaggccagcctaaccaacatggagaaaccccgtctctactaaaaatacaaaattagccaggcatggtgcygcatgcctgtaatcccagctactagggaggctgaggcaggagaattgcttgaacctgggaggcaagactccgtctcaaaaaaacaaaaaagaaaagaaag

SEQ ID NO: 459499 - DNA, 201 bp, Homo sapiens
cgtcctgcgcgcatgcgcttcgcagcttctctcgccgccgcgcccccagctgctctggttacggttggtgtttgcgaattctctgcggcaccttcttcgckgaactccaccgtcagttccataggcgcgcgcccgcgtcacgtgggccgaggttccggcgcggctgctggccggcggctgagccgggagaaaggagctgcg

SEQ ID NO: 459500 - DNA, 201 bp, Homo sapiens
gccattgtgctcctgcatttgtgtttgagctgctatatatttgtggaaattacactgaaagttgactaagagactattgaaaaagcatgaataattaaatrtacatgtgagagacatctcatctgctgtattttacttagtgaatattgttcactcttccgtgtctgatgtcttgctgaatgctgtgactcatagtttact

SEQ ID NO: 459501 - DNA, 201 bp, Homo sapiens
cagcgtcctgcgcgcatgcgcttcgcagcttctctcgccgccgcgcccccagctgctctggttacggttggtgtttgcgaattctctgcggcaccttcttsgcggaactccaccgtcagttccataggcgcgcgcccgcgtcacgtgggccgaggttccggcgcggctgctggccggcggctgagccgggagaaaggagct

SEQ ID NO: 459502 - DNA, 201 bp, Homo sapiens
aaaatacaaaattaaccgggcatggtggcacatgcctgtaatctcagctactcaggagactgaggcaggagaatcacttgaacccaagaggcaaaggttgyggtgagctgagttcgtgccattgcattctagcctgggcaacaagagtgaaaccccatctcaaaaaataaataaataaaataaataaaagttctacctatt

SEQ ID NO: 459503 - DNA, 201 bp, Homo sapiens
caccagtctggagtggaatttctgtaacaccaagttaggaagtggagtgatcttggttcaaatactgcagatgcccacttgtcttacccagtttttatagrtttttttgagtagatgtttcttcatttgctgtatgcccttgggaccatttccagagtcgttaagtggttgtttttaaaataattgtcaccagtttgacta

SEQ ID NO: 459504 - DNA, 201 bp, Homo sapiens
agcttttggaatccttacttcaggaggtggagcaccaggtgatgaaatattaaatgtaatgaaatagtctttatccttttttctctgtatactgtagttgtttttttttttttttttttttgagacggagtctctctctgtcgcccaggctggagtgcagtggcgcgatctcggctcactgtaaactccgcctcctgggtt

SEQ ID NO: 459505 - DNA, 201 bp, Homo sapiens
tttagaaaagttttgtataatggcattacacaataatatatcatcttttatgtctggctttattcacctagctgatgagtcatttattcattgatatctaytgagtgattatcatgtcgaacctcaaaagttgcctcaggtcctttcaagcaaagtagactaaaaatgaaggggttaatagtacttgtacctctctgtagt

SEQ ID NO: 459506 - DNA, 201 bp, Homo sapiens
gcttttggaatccttacttcaggaggtggagcaccaggtgatgaaatattaaatgtaatgaaatagtctttatccttttttctctgtatactgtagttgtttttttttttttttttttttgagacggagtctctctctgtcgcccaggctggagtgcagtggcgcgatctcggctcactgtaaactccgcctcctgggttc

SEQ ID NO: 459507 - DNA, 201 bp, Homo sapiens
ttgaacccgggaggcagaggttgcagtgagcagagatggtgccactgcactccagcctggcgacagagcgagacttcgtctcaaaaaaaaaaaaaatttckgtttccttattcttgcctaaggaagatacatatgcctttgtcaagagtattatccgtaacacttaaataatttttttctagtcacacagctcacaattga

SEQ ID NO: 459508 - DNA, 201 bp, Homo sapiens
ggtggagcaccaggtgatgaaatattaaatgtaatgaaatagtctttatccttttttctctgtatactgtagttgtttttttttttttttttttttgagayggagtctctctctgtcgcccaggctggagtgcagtggcgcgatctcggctcactgtaaactccgcctcctgggttcacaccattctcctgcctcagcctc

SEQ ID NO: 459509 - DNA, 201 bp, Homo sapiens
ccattatgtcattggttgatgcagtagctcaaacatgatatcattattcttggtaacccaagactataaactttgatatatatcatatgatatatgatactttttttttttttttgagacagagtcttgccttgtcgcccacgctggagtgcagtggcgtgatcttggctcactgtaacctccgcctcctgggttcaagca

SEQ ID NO: 459510 - DNA, 201 bp, Homo sapiens
cctgacctcaggtgatcctcccaccttagcctcccaaagttctgggatttcaggcgtgagtcactgcgcccggccttgagatatatatatatatatatatwtatatttttttttttttttttttaaattcctttttttcttagctttctaagaagaactggctgattttttttttttttttgagatggagtctcgctctgt

SEQ ID NO: 459511 - DNA, 201 bp, Homo sapiens
tcggggtgacactgggcagagtgtggaaatgcttttttttaatatgcttattatgaaggtccatttcaagcctcgaatggtttatgtgttttttgtttttsttttgttttgttttgttttttgagatggagccttgctgtattgcccaggctggagtgcaatggcacgatctcggctcactgcaacctctgcctcccgggt

SEQ ID NO: 459512 - DNA, 201 bp, Homo sapiens
agtattctcatataacctatacacatctcccatatacaaacatgtgtcaaattatgaccttttggtcaatgacagactgcatatgtgacagtggtcccacragattaaaatggagctgaaatacttctgttgcctagtagtgatgtctaatgacatcatagccattgtaatgtagtagcacaaagcattaatcatgtgttt

SEQ ID NO: 459513 - DNA, 201 bp, Homo sapiens
agccagtcattttttattaggtataactgacatgcagtaaactacacatatttaaagtgtacagtttttttgtttgttttgttctttttttttttttttttgagacggcgttttgctcttgttgcccagcctggagtgcaatgacgcgatctccgctcactgcaacctccatctcctgggttcgagtgattctcctgcctc

SEQ ID NO: 459514 - DNA, 201 bp, Homo sapiens
acccgcctcagcctcccaaagtgctgggattacagatgtgagctaccacacctggcctggttaatgttttagaactacacaattgtctaaagagttatgtsatctaaagaattacgatgttaagttatgcgttaaaaaggggatgattgggcttatataaaagctaggtataaagttaaatgtttacttaataatcttatt

SEQ ID NO: 459515 - DNA, 201 bp, Homo sapiens
aatggagaagaacctgtcaccgatccgtctgtctttttatgaggttttttttctatgtgaacttcagaagcatggtttttgttgtttttttgtttttttgkttttttgtttttttgtttttttgaatctcgctctgttgcccaagctggaatgcagtggcacgatctcagctcactgcaacctctgcctcctgggttcaag

SEQ ID NO: 459516 - DNA, 201 bp, Homo sapiens
tttataccttttggggaaattgcagaaaaagttaaaagttcatgttgtgtattcagtcatatagtctgccttttttccttttttcttttttttttttttttgagacagaatctcactctgtcacccaggctagagtgcagtggcaccctcttggctcactgcaacctccgcctcctaggttcaagcaattcttctgcctta

SEQ ID NO: 459517 - DNA, 201 bp, Homo sapiens
ccatatctggtatttgttatgcattatactaggtgctagagaaaagtcagatgcttttcttggcttaaagagcatagtccaatataggggtataggcatartatctgcctacagatgtctgtaatgtgcatcagtcattaacatgacagtccaaaaacttcaaattgtaccccattatttaatcaaagtagaaaaagtcta

SEQ ID NO: 459518 - DNA, 201 bp, Homo sapiens
aatttgaacctcaaccttaaatcccaaaccgaaattaggcacataaatcttactttgaattttgaggtaagacttttttccccctcttcagagcccagtaraaacagacaaaattccttgctgttttcctatgccagtaggcagacatttttctagtctgttctttcaataggaattttagcattggccaggcatggtggc

SEQ ID NO: 459519 - DNA, 201 bp, Homo sapiens
attgaggagtgatggtttgaaacgttactctgtgaggaagctgatgtggaatatgtgaaggattccagtcacactgagggcccagctgaaggcggcacgcrtaagttagtaaaatgatatcagtcagtgtggttgtgtgatttttctctacagggctcagcagctgaggcacaggagcagaaaatagatttttgaaaactg

SEQ ID NO: 459520 - DNA, 201 bp, Homo sapiens
aaagttggtttttttttttttgtttttttttttttgagacagagtctcactgtcacccaggctgtagtgcagtggcacgatcttggctcattgcaacctcygcctcctgggttcaagcgattctcctgcctcagcctcccgagtagctgggattacaggcacccaccaccatgcctggctaatttttatatttttagtaga

SEQ ID NO: 459521 - DNA, 201 bp, Homo sapiens
attttatcttagacaactgtattaataatattcatccatgaatattaataatataattaacattcatgacatgaatattaataatattataattaataatmatattcatggcaataatattcatgggtcttatttttatttggaaggctttttaactcccaggttaataaaaataacccttaatttcttctggtacttttt

SEQ ID NO: 459522 - DNA, 201 bp, Homo sapiens
tatgaatatccttaaataactacactacccatctctccaggttttattgctactttcagtggaaaagatagagtggaatgtgcttgctccattgtacctaraaccttccttccagagaggattttacttttgctttattcaaataacactagctcctgaacaatttttatgttaatttcttaaaatttgaacctcaacctt

SEQ ID NO: 459523 - DNA, 201 bp, Homo sapiens
aatattaaaagatgattatactgcagagaagcgaggaagaaacattctgggttttgttttatttttaatggtgaagactgcttgttgaagcattaattaawtttgggagacttggtgatacattccttttcccttaaatgtcacaattttgagggttttttttcccctgaaacttaaaagatattgctgaatatttcagta

SEQ ID NO: 459524 - DNA, 201 bp, Homo sapiens
cctcctgagtagctgggattacaggtgtgtgccaccacaccgggctaatttttgtatttttagtagagatggggtttcaccatgctggccaggctggtctygaactcctgacctcaggtaatccacccactttggcctcctgaagtgctgggattactggcatgagccaccgcacccagactgttaatgcattcttttttc

SEQ ID NO: 459525 - DNA, 201 bp, Homo sapiens
aaagtcgttccccatcttccccttctactatcttctggtaaccactaatctactttttccctatggatttttcttcttctggacttttttttttttgagayggagtctctccctgttacccaggctggagcgtagtggcacaatctcggctcactgcaagctccgcttcccgggttcacgccattctcctgcctcagcctc

SEQ ID NO: 459526 - DNA, 201 bp, Homo sapiens
aggtaaggaatgataaacttataagtaagcaggaaatgagaattctgtcccttttttggtggtgggtggtgggtggtgggtggtggtggtggtggtggtgstggtggtgctgctgctgctggtggtagtgatagggatagggagtggttggtttaatggaaatgttactgagatctgctattcgacatgcttgatctgaac

SEQ ID NO: 459527 - DNA, 201 bp, Homo sapiens
atctagaaagtgaacaaaggaaacctgtaaattagggactgactccctttgaaactcacagtgaatgtacaaggagtttgtaatgacttcagttggtgacytgaagtttgtttccctaaccaatattacactcttgtttggatttattttactatttcctattctaacttgtttagcaggcaaacagattgatgcagacca

SEQ ID NO: 459528 - DNA, 201 bp, Homo sapiens
aaaatcattgtgttgtaatactggtggtatcttactttgttttgcaagagacatttaagctatttgcagatcagaatagaagagtgggcatttgtcctttmacatcacgtgattttcaaaggtgaaaaaaatttcttttgctaacttacgattcaaagaaaaatggtctcaaattaaagtgtggacaaaactgtagtattc

SEQ ID NO: 459529 - DNA, 201 bp, Homo sapiens
agatcacgtcactgcactccggcctgggtgacagaatgaaactccatctcaaaagaaggaaaggaaatgatgcacactgacagcaacagggggcgggtgtkggggggaatgctcagttatgcagcttgtcagtacagacagttgtttctgataatttggtaacttgggtaaatttctatgatgttcaaatgattttactgt

SEQ ID NO: 459530 - DNA, 201 bp, Homo sapiens
tcctggaaatactctgctgtttcttgaagtgtaacgggggctggggaggggctggcgttcttggattaggttgcagttttaggcactgtgtccctaggttkgggagggtctctgtttacttgccccttcccagctaattgtgggcccagtgatatttctgccccctcctctgggatggggcttttcttccatagtcccttc

SEQ ID NO: 459531 - DNA, 201 bp, Homo sapiens
tcttcgaatatttcttctgcccattatctttctcttctccttctaggattctagttgtgcatattttacacagatactgtcccacagcttttgtatattaygttctgggttgattttgttttcccttcatttttttctgttgtgtttcagttaaggtaatttttttaacttatcttcaagatgtactgattttcttttcag

SEQ ID NO: 459532 - DNA, 201 bp, Homo sapiens
aagcaggaaatgagaattctgtcccttttttggtggtgggtggtgggtggtgggtggtggtggtggtggtggtggtggtggtgctgctgctgctggtggtrgtgatagggatagggagtggttggtttaatggaaatgttactgagatctgctattcgacatgcttgatctgaacacaacattccttgtgccactgaattt

SEQ ID NO: 459533 - DNA, 201 bp, Homo sapiens
ccaaagaggatgaagaagatgaggagaagattcagaatgaagattatcatgtaataatgaggccagttttagatttttgtgtttgattaaaaaaaaacagyagcatcatggcttttaacatattatgtgctaaaacagtaggctaaaaatattgtccattgatttccattagtaatgtatgtatgcccttatgtaaatgtt

SEQ ID NO: 459534 - DNA, 201 bp, Homo sapiens
aacctgaaaggccaaaagatttcttcagagatgatagcttttagttcagacctgtttgcttttaggacaggaaagtagtttccccctcgtttccaagccaycttatatactaaagctgctctgagttccttggtgatgtcgggaacaccgctgttttccctcttccttgatgtagtctgctatgctaaattttaggtagca

SEQ ID NO: 459535 - DNA, 201 bp, Homo sapiens
ctaagaagtctgcatgctctgacatgcttctcgaaggtggtcctactacagcttctgtaagagaggccaaagaggatgaagaagatgaggagaagattcakaatgaagattatcatgtaataatgaggccagttttagatttttgtgtttgattaaaaaaaaacagtagcatcatggcttttaacatattatgtgctaaaa

SEQ ID NO: 459536 - DNA, 201 bp, Homo sapiens
atttctaataaattttgaaaccaaggtctttctttcagagttctgtagtatactaatttgattactgagaactgttaactcttcttttttttgttacataygctgtccgcattccctgttccccttcttcccccatattagacaactgtttgtttgtccacaccttgttctctaatacattctgctggaaggcctattgga

SEQ ID NO: 459537 - DNA, 201 bp, Homo sapiens
atcaatcatgagcccatgatctaagatttttaataattgctgtaattaatgtttcttaaagaccttgttttctgttacaaagttggtttttttttttttgkttttttttttttgagacagagtctcactgtcacccaggctgtagtgcagtggcacgatcttggctcattgcaacctccgcctcctgggttcaagcgattc

SEQ ID NO: 459538 - DNA, 201 bp, Homo sapiens
taatcaatcatgagcccatgatctaagatttttaataattgctgtaattaatgtttcttaaagaccttgttttctgttacaaagttggtttttttttttttgtttttttttttttgagacagagtctcactgtcacccaggctgtagtgcagtggcacgatcttggctcattgcaacctccgcctcctgggttcaagcgat

SEQ ID NO: 459539 - DNA, 201 bp, Homo sapiens
tatagcattatgaatgaggatgcacagtacatgtcaataatgatatctctgattatattctgaagaaatggaaggaatttaataaatacttatatttttarttaatttcaaatgcaggattaggcattggaaatagtatttaatcaatcatgagcccatgatctaagatttttaataattgctgtaattaatgtttcttaa

SEQ ID NO: 459540 - DNA, 201 bp, Homo sapiens
agttgactaagagactattgaaaaagcatgaataattaaatatacatgtgagagacatctcatctgctgtattttacttagtgaatattgttcactcttcygtgtctgatgtcttgctgaatgctgtgactcatagtttacttttgttcaaaatagtttgcactttttgttaataaaatcaacttgagaaaatatgcctct

SEQ ID NO: 459541 - DNA, 201 bp, Homo sapiens
gtgaaactgtgatataaggttttctttcatactcataattagcccaaaacagttgccaaactttgccattgtgctcctgcatttgtgtttgagctgctatrtatttgtggaaattacactgaaagttgactaagagactattgaaaaagcatgaataattaaatatacatgtgagagacatctcatctgctgtattttact

SEQ ID NO: 459542 - DNA, 201 bp, Homo sapiens
ctcactgtagccttgacctcccagacaaaagtgatccttccacctcagcctcccaagtagctgggaccacagacacagacacatgcagccatacctggctttttttttttttttttttttttttttttgccgagacagggttttgctacattgtccaggctggtcttgaacttttgggctcaaacaatcttcctgtctcag

SEQ ID NO: 459543 - DNA, 201 bp, Homo sapiens
tcactgtagccttgacctcccagacaaaagtgatccttccacctcagcctcccaagtagctgggaccacagacacagacacatgcagccatacctggcttkttttttttttttttttttttttttttgccgagacagggttttgctacattgtccaggctggtcttgaacttttgggctcaaacaatcttcctgtctcagc

SEQ ID NO: 459544 - DNA, 201 bp, Homo sapiens
acttttttaattttttttattttttttaacagagcctcgctctgtcacccaggctggagtgcagtggcgtgatctcagctctctgcaacctctgcctcccsggtttaagtgattctcctgcctcagcctcccaagtagctgggattacaggtgcccgccaccacaccctgctaatttttgtatttttagtagagacgaggt

SEQ ID NO: 459545 - DNA, 201 bp, Homo sapiens
ggagcttcagctgcccctgaagaaggtaaggaatgataaacttataagtaagcaggaaatgagaattctgtcccttttttggtggtgggtggtgggtggtgggtggtggtggtggtggtggtggtggtggtgctgctgctgctggtggtagtgatagggatagggagtggttggtttaatggaaatgttactgagatctgc

SEQ ID NO: 459546 - DNA, 201 bp, Homo sapiens
gagcttcagctgcccctgaagaaggtaaggaatgataaacttataagtaagcaggaaatgagaattctgtcccttttttggtggtgggtggtgggtggtgkgtggtggtggtggtggtggtggtggtggtgctgctgctgctggtggtagtgatagggatagggagtggttggtttaatggaaatgttactgagatctgct

SEQ ID NO: 459547 - DNA, 201 bp, Homo sapiens
atgaacataaataggccttttcctttttactggaaccatatgggacaacctttggttgtattagtcgctggtttaatgatctgatgctgaaaaggttgacttattttttctttcaattgatgacctgcacaactgtaggtaggccagtttatttcttgttctttgtaaaactaaaggctttgctctctgacttcttgctga

SEQ ID NO: 459548 - DNA, 201 bp, Homo sapiens
tggaaagaagtttgaggacatggaagaagactagtttgccttagagaagagtgactgactgataaggttgtggcagatgatttgggctgtggttaaagatyttggttctttttaataagttaatttctagttaaatgaatattttgctaaagccctttatttataatcttgaaagagttcctacttggaccaagtgatttt

SEQ ID NO: 459549 - DNA, 201 bp, Homo sapiens
tgaacataaataggccttttcctttttactggaaccatatgggacaacctttggttgtattagtcgctggtttaatgatctgatgctgaaaaggttgacttattttttctttcaattgatgacctgcacaactgtaggtaggccagtttatttcttgttctttgtaaaactaaaggctttgctctctgacttcttgctgaa

SEQ ID NO: 459550 - DNA, 201 bp, Homo sapiens
gaacataaataggccttttcctttttactggaaccatatgggacaacctttggttgtattagtcgctggtttaatgatctgatgctgaaaaggttgacttattttttctttcaattgatgacctgcacaactgtaggtaggccagtttatttcttgttctttgtaaaactaaaggctttgctctctgacttcttgctgaag

SEQ ID NO: 459551 - DNA, 201 bp, Homo sapiens
gtgatacgcccacctcagcctcccagagtgttgggattacaggcgtgagccactgcacctggcctaaattttaacttttttaaagtatcagagattttacttttttttttttaatgggatgagatagtactttttttttttttgagatggagtctcgctctgttgcccaggctggagtgcagtggcatgatctcagctcac

SEQ ID NO: 459552 - DNA, 201 bp, Homo sapiens
ggttatgcattattgggaaggcccttagtgcatcacatcaggggggatatgatgttgatatataaatatacatatatatacatacatacacacacacacacacacacacacacacatatatatatactttttttttttttttgatggagtctcactctgttgctcaggctagaatgcagtggcaccagcttggctcactgc

SEQ ID NO: 459553 - DNA, 201 bp, Homo sapiens
cagctcgatggcagcagttcctctgctagttccacagcaacaagtaatacagaagaaaatgatattgatgaagaaactatgtgagtttcccactttactaytgtaaagcatttaagtggtaattattagaagcatattaactaactcacacttaaatgtagggatattcagcacttttttgaaagattgaatcaatagtca

SEQ ID NO: 459554 - DNA, 201 bp, Homo sapiens
ttccataggcgcgcgcccgcgtcacgtgggccgaggttccggcgcggctgctggccggcggctgagccgggagaaaggagctgcggccaccgttcgccctrcttctgcgcctcggggcgggcgcgccggtaaaaatggcgaaatgggggtaggcggcgctggacctgaagagatggggcgcgcaggtggggcggttgtcag

SEQ ID NO: 459555 - DNA, 201 bp, Homo sapiens
atgatttgggctgtggttaaagattttggttctttttaataagttaatttctagttaaatgaatattttgctaaagccctttatttataatcttgaaagarttcctacttggaccaagtgattttaagcgggcactggcctgcttcaacaaaattaaattagctaataaggtaaagttcatttgagagatttaccagttta

SEQ ID NO: 459556 - DNA, 201 bp, Homo sapiens
ctaaaatataattattttgtttttaatctgtaatatataataatatatttatataatataagttaatcagatgttgaaatcaaggttttcaagatttgcaratttgataggctgtacctatagtcaaattccataaatttcagagtatctgagaaatttgcatacaaagcccctggcttgtaaggaagcagttggagtcag

SEQ ID NO: 459557 - DNA, 201 bp, Homo sapiens
gtaaggattaaccatttcccttatctttttattttacattttttgccctaaagtgcttgcttgcactgtgcttggggttgaggaatactaagataaatgayaaattgcctgccttgaaggagcttaaatctaattgagggaatggagtttagaatgtttattttgaagaatgtgcggtatcataaggaggcactaaagaag

SEQ ID NO: 459558 - DNA, 201 bp, Homo sapiens
ctcttctcaagcccaggatttcaagaccagcctgggcaacatattatagcaagaccctgtccctccaaaaaatttttaaattagcagggcatggtgtcatrtacctgtggacctatctacttgggaggctaaggcggaagtatcccttgagcttaggagtttgaggctgcagtgagctatgatcaggccactgcagcccag

SEQ ID NO: 459559 - DNA, 201 bp, Homo sapiens
tgatggtttgaaacgttactctgtgaggaagctgatgtggaatatgtgaaggattccagtcacactgagggcccagctgaaggcggcacgcataagttagyaaaatgatatcagtcagtgtggttgtgtgatttttctctacagggctcagcagctgaggcacaggagcagaaaatagatttttgaaaactgtattattct

SEQ ID NO: 459560 - DNA, 201 bp, Homo sapiens
tctagtctgttctttcaataggaattttagcattggccaggcatggtggctcatgcctgtaatgccaccactttaggaggccaaagcgggtgaatcacttyagctcaggagttgaagaccagtctgggcaacatggcgaaatcccatgtctactaacaaattacaaaaattagccaggtgtgatggcacaggcctgttggg

SEQ ID NO: 459561 - DNA, 201 bp, Homo sapiens
tcaaatgattttactgtacctagtggttcccttctgtcttgctgtgtgctgctccttcagaaagaggtgttccttttgatctaagtaatactatattttarggaattttttcaagtgtaacacttactaatcaaaatgttccttttctgtcattccctgcttcagtaaaccccttcaaatatgtccttctttcaaaacttc

SEQ ID NO: 459562 - DNA, 201 bp, Homo sapiens
aatacccatcgatttttccttgagtaacctttggtagtttgtacctaggaaagaatttgctcatttcatctgtttttggtttcatgagcatacagttactkatagcattttattatattttactgtttatagaacctgtagttgatgtcctctttcattcctgatattggaaattttgtttgctctctttttgttagtgaa

SEQ ID NO: 459563 - DNA, 201 bp, Homo sapiens
tgtaaatgttaataagtcagaagttgttgaatcaaagcatttcaaggttgtgaaaaaaacaatacattgtataaaacaaaccgtgatacacattttaaaacctaaactaccatacattgtggattttaaaaatgtgttctggccgggtgcggtggctcacacctgtaatcccagcactttgggaggccaaggtgggtggat

SEQ ID NO: 459564 - DNA, 201 bp, Homo sapiens
aatacaaaactagccaggcgtggtggcgcatgcctgtaatcccaactacttgggagactgaggcagaagaatcacttgaacccgggaggtggaggttgccrtgaaccaagattgtgccatcgcactccagcctgggcaaaaagagtgaaactccgtctcaaaactggacactaaagcttgagtgagtttccctggttgaca

SEQ ID NO: 459565 - DNA, 201 bp, Homo sapiens
gaggttgcaatgagctgagattgtggccattgcactccagcctgggtgacagagcgagactctgtctcaaaaaaaagaagaaaagaaaaaaaagaacttgraagagctagaatttgaacctagagccagtgctcttaactgtcgcctctctctgctaacctagtccctaatccacccttggaaagatcatcctaagggatg

SEQ ID NO: 459566 - DNA, 201 bp, Homo sapiens
aaattgctgggattacaggcatgagccaccctgcctggccttattctttaactgtttagtagaattcaccagtgtaaccaactaggaggaaacttttttcttttttttttttttttttgagacagagtttcactcttgttgcccaggctggagtgcaatactgcgatctcagctcactgcaacctccgcctcctgggttta

SEQ ID NO: 459567 - DNA, 201 bp, Homo sapiens
ttgggaggccaaggagggtggatcacctgagttcagaagttcaagaccagcctggtcaacatggtgaaaccccatctttactaaatatacaaaaattagcygagtgtggtggcgggcacctgtaatcccatctacttgggaggctgaggcaggagaatcgcttgaacccgggaggcggaggttacagtgagctgagatcgc

SEQ ID NO: 459568 - DNA, 201 bp, Homo sapiens
aaagtttatttccttttcaaaaacaactgctgtgtcagtctggagttccctatttcatgttttctaattattacaataaatagtcttcaaaatagaagatmaaatgctgctttaagaagtaacagttatttttcaacaccataccatttgtctggaaaatcattgtgttgtaatactggtggtatcttactttgttttgca

SEQ ID NO: 459569 - DNA, 201 bp, Homo sapiens
taaggaatgataaacttataagtaagcaggaaatgagaattctgtcccttttttggtggtgggtggtgggtggtgggtggtggtggtggtggtggtggtgstggtgctgctgctgctggtggtagtgatagggatagggagtggttggtttaatggaaatgttactgagatctgctattcgacatgcttgatctgaacaca

SEQ ID NO: 459570 - DNA, 201 bp, Homo sapiens
gggtcactgattgggtataacactaaggaagtttttgtctcgatagcagaaattagccctagactgaacactgctctggacccacctaacaaaagtgagayctgaaaggatcaaattgttttcaagtaacttaactgcatcccagaaggaagctcaagaaaatttataaggttgctgaagtatctaacatccaacagagta

SEQ ID NO: 459571 - DNA, 201 bp, Homo sapiens
ccttcatggtcatgacacagcccccggatgaaggtgcagcacatgatgtcattttacacagattactaaaaccaccgctgccgcttctctttcttcttctkctgctgctgctacttctactttttccgctctactgcttttgcttcttctgcttctacttctttttttttttttttaattattgtcatttgtgagacaaca

SEQ ID NO: 459572 - DNA, 201 bp, Homo sapiens
atacctgactcagatcacaaattctctgaagacagagatttgttcacaacccagcacatctttatcacttaaataacacatttggtaagattatttaaagwcttgggaaggaaaatactgcccttgttatatgcttttaaattttaaattttttatttattttttaatcatagatacacattccagttttcctgatggtga

SEQ ID NO: 459573 - DNA, 201 bp, Homo sapiens
ttatacaaatgaaaatcatacaatatgtactcttacggatctggctttttttcactcagcaaaaatactgtatgtatcagtagtattcctttttattgctragtagtattccattgtatgtatttaccacaatttgtttatgcattcacctgttgatgggcatatggcatgtttacagtttttgctattacagtgaaaatt

SEQ ID NO: 459574 - DNA, 201 bp, Homo sapiens
agaagctttcttttctcttgggtaaataattagtaatggaacggatagagattatgtggtagatgtgtgtttaacattttgaaaattgccaagctattttytaaaatacttgtatctgggagctaaacaatgagcatacatggacataaagggggaaatgctagacactggggacttcaaaagagggagaggaggagaggg

SEQ ID NO: 459575 - DNA, 201 bp, Homo sapiens
cagatgacctcacagcactgaggcggacggctctggtgtccagcaggcacggaattaatacgccttgcctgtcctggccggttggcttgcctctctcctgycagaatgcaacctggctttatgcacctagatgtccccagcgcccagttctgagccaggcacatcaaatgtcaaggaattgactgaacaaactaagagctc

SEQ ID NO: 459576 - DNA, 201 bp, Homo sapiens
aaatataaggtcggttctgtgtagatagacaggtggaacccagcaatcagtttaaccagcctccaagcggttctgatgcatgccagaggtggagaaccactactctagagtgtcacgctctataagtacacacattctatttagtcattccattctagaccgatagcttttatttttagtttggaactattacaaattgtg

SEQ ID NO: 459577 - DNA, 201 bp, Homo sapiens
atataaggtcggttctgtgtagatagacaggtggaacccagcaatcagtttaaccagcctccaagcggttctgatgcatgccagaggtggagaaccactactctagagtgtcacgctctataagtacacacattctatttagtcattccattctagaccgatagcttttatttttagtttggaactattacaaattgtgct

SEQ ID NO: 459578 - DNA, 201 bp, Homo sapiens
aaggcaggcggatcgtttgaggccaggagtttgagaccagcctgggcaatgtagcaagactctgtctctgcaaaaaaaattaaaagatacctgagagctcmctttaatatcaaggtatttgcatccattcccaccctgttagctcttaagggaggagggaaatcaattccaaccatactttcctgtgatggaagatgtttc

SEQ ID NO: 459579 - DNA, 201 bp, Homo sapiens
gctaacgaggttgggcatttttacatgcttgctagctgttaggatatctttctttatgtaatatcccttcagatgtttgcatattgattaatccgactgtytttttccagttaatttttcctttgttgaataaatatgttgcaaatataccttcccattctgtgacttgtcgtttattttctttcctcttttttttttttg

SEQ ID NO: 459580 - DNA, 201 bp, Homo sapiens
tataaggtcggttctgtgtagatagacaggtggaacccagcaatcagtttaaccagcctccaagcggttctgatgcatgccagaggtggagaaccactactctagagtgtcacgctctataagtacacacattctatttagtcattccattctagaccgatagcttttatttttagtttggaactattacaaattgtgctg

SEQ ID NO: 459581 - DNA, 201 bp, Homo sapiens
ctgggaggtgtgcccagcagctcattgagaacgggccatgatgacaatggcggttttgtggaatagaaaaggcggaaaggtggggaaaagattgagaaatyggatggttgccgtgtctgtgtagaaagaagtagacatgggagacttttcattttgttctgtactaagaaaaattcttctgccttgggatcctgttgatct

SEQ ID NO: 459582 - DNA, 201 bp, Homo sapiens
ggttctgtgtagatagacaggtggaacccagcaatcagtttaaccagcctccaagcggttctgatgcatgccagaggtggagaaccactactctagagtgtcacgctctataagtacacacattctatttagtcattccattctagaccgatagcttttatttttagtttggaactattacaaattgtgctgctctggaca

SEQ ID NO: 459583 - DNA, 201 bp, Homo sapiens
gcggggaaatataaggtcggttctgtgtagatagacaggtggaacccagcaatcagtttaaccagcctccaagcggttctgatgcatgccagaggtggagaaccactactctagagtgtcacgctctataagtacacacattctatttagtcattccattctagaccgatagcttttatttttagtttggaactattacaa

SEQ ID NO: 459584 - DNA, 201 bp, Homo sapiens
cggggaaatataaggtcggttctgtgtagatagacaggtggaacccagcaatcagtttaaccagcctccaagcggttctgatgcatgccagaggtggagaaccactactctagagtgtcacgctctataagtacacacattctatttagtcattccattctagaccgatagcttttatttttagtttggaactattacaaa

SEQ ID NO: 459585 - DNA, 201 bp, Homo sapiens
ggggaaatataaggtcggttctgtgtagatagacaggtggaacccagcaatcagtttaaccagcctccaagcggttctgatgcatgccagaggtggagaaccactactctagagtgtcacgctctataagtacacacattctatttagtcattccattctagaccgatagcttttatttttagtttggaactattacaaat

SEQ ID NO: 459586 - DNA, 201 bp, Homo sapiens
gggaaatataaggtcggttctgtgtagatagacaggtggaacccagcaatcagtttaaccagcctccaagcggttctgatgcatgccagaggtggagaaccactactctagagtgtcacgctctataagtacacacattctatttagtcattccattctagaccgatagcttttatttttagtttggaactattacaaatt

SEQ ID NO: 459587 - DNA, 201 bp, Homo sapiens
gaaatataaggtcggttctgtgtagatagacaggtggaacccagcaatcagtttaaccagcctccaagcggttctgatgcatgccagaggtggagaaccactactctagagtgtcacgctctataagtacacacattctatttagtcattccattctagaccgatagcttttatttttagtttggaactattacaaattgt

SEQ ID NO: 459588 - DNA, 201 bp, Homo sapiens
actaagaatattttgaataggaacaataagtaggaaaaatgtttgcaatgggatattaatatgtattataaacccacagaatctgaagacaagagtgatgractgtatatagatggaacagaatagagtgaccacatatgaaccctagtgtatgtgggaatttagcatgtgataaaaatgaagaaaaatacagtgaggcaa

SEQ ID NO: 459589 - DNA, 201 bp, Homo sapiens
gtttctgaatggaaagattcagttttgtaggtatacaaattttcccaaattaatatttaagtttagtgcaattccaataaaaaattctagtgggattttaytggggaggggcaggtgtgatgggaattgatgatgtgattttaatttttcttatttatgttctgagtaaaacattttcttggggtgcagaaaattttatga

SEQ ID NO: 459590 - DNA, 201 bp, Homo sapiens
agccttgatctccccaggctcaggtgatcctcccacctctgcctccctagtagctgggtctacaggtgcatgccaccatagccaagtatttttttttttttgtattttttgtagagatagggtttcgccatgttgcccaggctggtttggaactcctggactcaagagttccaccaaccctggcatcccaaagtgctggga

SEQ ID NO: 459591 - DNA, 201 bp, Homo sapiens
ttggtggatacttgggaaatatttatcaagtagctttaaaatatgcatagtctttaacttagtaattctacttctgagaatgtttcctgagaaatagctakggatgtgtactaggttttcttttctgttttctaaacaataaactactttgaaaatgaggaaaggacactaaatgacattcatgggtaaagcttttatgtc

SEQ ID NO: 459592 - DNA, 201 bp, Homo sapiens
actggttttgttcagactatctgtactttatgagtgatacttccaatgttatctcagttttcggaacctctacttggcagctttgagtatgttccatgcaygcacagctcagggttaagcctgggcctgtgctaggtcatacacagagttaggagatccatttctctaatctcttatctccgggactccccatagtcacct

SEQ ID NO: 459593 - DNA, 201 bp, Homo sapiens
gcatcctgggtgtagaggttcattgaacgattgatagcccatagcctctggctgtgattgagtagatagcccacccagagatggtagacatctttgagatyctctactctacaaaattctttacatattcactcattgagatagttgacatccctgcagcaagtggtacatttgactagcctggtatctggttgatatggt

SEQ ID NO: 459594 - DNA, 201 bp, Homo sapiens
gctggtatatcggaatataattaacttttttatattgacttgtacatatgctggcaccttgctaattcacttactagtttaaaagctttttgtagattcartgaaatgttctacatgaacatgttatctatgtatgaataaatatatttttgctttttcccttccaatatttatatcctttacttctttttattgccttat

SEQ ID NO: 459595 - DNA, 201 bp, Homo sapiens
ccctcgccctttatcacctgtttatagcatattactaggaagtgatgtgtcttgcttcacattattacgtgccaaatgctaattgtggaggacctcttctkcttctaccctcttaggtcttagccattaggtattagttgtcaatccttaaggcctccttcacccagttcttttaggtcctctcagggcattgctacactc

SEQ ID NO: 459596 - DNA, 201 bp, Homo sapiens
attttggagtagtaaattattattgttattatttgattcaggacctcacttcacccatgctggagtgcagtggcattaacttggctcactgcagcctccamctcctgggctcaagtatcctctgcctcagactcctgtgtagctaggactacaagtgtgcctacactccctcataaagaaagctggctacttggtgattgc

SEQ ID NO: 459597 - DNA, 201 bp, Homo sapiens
ttttaaatatatttttggattcaatttgataatattttataagatttttgtgtctgtgttcttaaaggatattgggttgacattttcttaattgtaatgtytttggttttattgggtaatgccaatctcataaaatcaattgagaagtgttccttcctcttctttatctggaagagattatgtaaaattattatttcttcc

SEQ ID NO: 459598 - DNA, 201 bp, Homo sapiens
tgccttttagtaagtagccatcagactataaaggatccctgaagttttgactgggagtcattttgatgtagcctaaaaatagaccactatactttaatttwaaaaaatttaccagataatgtgctcaacatacaccctttccatttcacagagtctcggcctcaccctttcttcactcgtgtgtgagccacacccaggttc

SEQ ID NO: 459599 - DNA, 201 bp, Homo sapiens
agtgcactccataatgttcacacaatgacaaaattgcctaatgacacatttctcagaacatatccccatcgttaagtgatgcatgactgtaattagagctrggtaaaaatccctgtaccaatgggaggagacatataaaactaaaattaatgttaggatggtgagattgtgttttttttcaactctataaactttcttgtt

SEQ ID NO: 459600 - DNA, 201 bp, Homo sapiens
gcctcccaaagggctgggattacaggcttgagccatatttaccatggtgttataattgcctacagtattcagtatagtaatgtgctgtgcaggtttgaggygtaggagcaataagctataccatgtagcctaggtatgtagtagactataccatctaggtttgtgtaagtgcactccataatgttcacacaatgacaaaat

SEQ ID NO: 459601 - DNA, 201 bp, Homo sapiens
ttgaagaaagaaatttttacacatgaatttagtgtagcctaagtgtacagtgtttataaagtctacagtacattcattcaccactcactcactgtctcacycatggcaacttccagtcctgcaagctatattcatggtaaatgccctatataggtgtaccattttttatccttttttttttcattttttttttttaagaca

SEQ ID NO: 459602 - DNA, 201 bp, Homo sapiens
gcaatcaatggacacaaacctttggataatttccgtccttggcggtgtgttctatagcataggtatgaagtgggtgctctgggagctcagaagaggggctyttctcttaacttatgggtggccagggaaggcttcctggagctcaaatgactgagtggagtcttcaacattaaaaaaaaaaaaaagaaaaaaaaagtgctt

SEQ ID NO: 459603 - DNA, 201 bp, Homo sapiens
gagtttattagggagtattgactcacattatcacaaggcaaagtcactcaataagctatctacaagctgaggagcaaggaagccagtccaagtcccaaaayctcaaaagtagggaagccaacagtgcagccttgtctgcagctgaaggtctgagagcccttggcaaaacactggtgtaagtccaagagtccaaaagctgaa

SEQ ID NO: 459604 - DNA, 201 bp, Homo sapiens
gtttcttatgtcttcttctttctgcatagacaacagtaacagtctgatctctctttctttcgtccacatcagcattttgaaaacatgatttttcataaaartatctggatttttgtctcctgaaaggtcagaagatctagcaacacagcaacaccaggcccatgttccatctggcaaacagtggctgctgagtagcctttt

SEQ ID NO: 459605 - DNA, 201 bp, Homo sapiens
aacatgtgagcaaaggtctctgtgtcgtaaataagtttaaggaaaggttctatgcctcgatgtgcacataggccagatttatgtttgactttacacaaacrtctcagtgcagtaaagagcagtattgcctccagcatgtctcacctccagccataaggcggttttttccatcttagtaaatagaatgtacgtcgggtttta

SEQ ID NO: 459606 - DNA, 201 bp, Homo sapiens
agggtaaattctgatgggggaaggtgtaaatgattggagttcagagatgagaaaaatcctctggatggggctggcaggtttaaggcaggggcatggcaatrttgagagtagtgactcacatactgtgatttgcgttttcatcacagtgatgtgttggtgcgtgcatgctaatcatatttaccgagttcttcagtgacccag

SEQ ID NO: 459607 - DNA, 201 bp, Homo sapiens
aagaaggtctttcccagactcagccaagcctagttagctccaaccaggccctagaccaaaagcaagggaagagcacatcctttcaatagaataagggtagraagggattctctgaatgtagtaactatgaagctatgccaaaggtaggcagaaaatgggcttgggagccagacactccagggttcagtagttcctacccac

SEQ ID NO: 459608 - DNA, 201 bp, Homo sapiens
tttcttttgaaatgtagggaaagcatatttgacatcatcttaaagaaattatgtagccatataaaaccggagggtagggtctactggccaggaaaaaaaaaggcctttactgccacctggtggccatattctttaactgcaatatgcctaagtgaggctggaaaggaaagcgttggaaaacatgctaaacccagagggcac

SEQ ID NO: 459609 - DNA, 201 bp, Homo sapiens
tcacaaaaccgtttaaagctaatgtaatttaatctctaatttggctccaagttttaacagctccttgttttaactccctttgtagggaagaaagagaatarttgggaaagaagagtagtttggcctaaggcactgttaacaatatgttgtggaaatcagctagaaaacacaatactctataaatatggagaatgaatacag

SEQ ID NO: 459610 - DNA, 201 bp, Homo sapiens
aggcagaaaatgggcttgggagccagacactccagggttcagtagttcctacccacagtctttgtgtgcttgctaaatggtgtacatttcttgttaaccaygttattaaaacttgatcagcatgtaagctttcttctgttagatcttttggcagcaaacaaccttccccccaagcctctgaattttggaggagggtaggct

SEQ ID NO: 459611 - DNA, 201 bp, Homo sapiens
aggtattggccagttagttcctagtgagggctccttcctgccttgtagatgtgtgctcatgcggcagggagagagagtaagctcgctggtgtctcctcttmtaaggacactaatcctatttcattggggtctacctttatgatcccatttaacatcagttacatccttacaccaaatacagccacactgggggttaggagt

SEQ ID NO: 459612 - DNA, 201 bp, Homo sapiens
tttacacaatgaaatcacctaataacacatttctcagaatgtattgctgtcgttaagggatgcatgattatagttgactctagagacttatcagagtcagstttcatttttctgtcaaaacgacttcatacatggtagaaaaatctcatgtctctcttttttcccgatgacattctttacactgtcagtgtagtttctgaa

SEQ ID NO: 459613 - DNA, 201 bp, Homo sapiens
tgattatagttgactctagagacttatcagagtcaggtttcatttttctgtcaaaacgacttcatacatggtagaaaaatctcatgtctctcttttttccygatgacattctttacactgtcagtgtagtttctgaacttagttgcaatctgtaagagagggtttcttgacttcatcactattgaagttttgtaccagcta

SEQ ID NO: 459614 - DNA, 201 bp, Homo sapiens
actcaatgctcaacctctcctttgaaaaacttgaatatttaaagaataagaaatatttaaagaatctctgattgaaggtgtgccaccttattgcatgcctraaaatccacctgtctggtcgcattcttcagatgaagcaactgaggctcagaggatttaagtaatttgcctgaggtcatgtagacagtaagtggcagaatt

SEQ ID NO: 459615 - DNA, 201 bp, Homo sapiens
atcccatttaacatcagttacatccttacaccaaatacagccacactgggggttaggagtgcaacacatgaactttgggaggacacaattcagtccagagygtaaactaataaatagctcagttatttagtaagttttagaatgttcttatttgctccttttgttcttttccagctctctgggtcatatctattgatgagt

SEQ ID NO: 459616 - DNA, 201 bp, Homo sapiens
tgatattaataacttaattaagatataacatgtaaggaggctgaggcaggagaatcgcttgaacctgggaggcggaggttgcagtaagccgagatctcacygctgcactccagtgtgggcaacagagcgagactctgtctaaaaaaaaaaaaatgtacatatatatatgtatgtaacatgtaacatctcttcagtggttaa

SEQ ID NO: 459617 - DNA, 201 bp, Homo sapiens
caattttgttttgccatgctttctagttcattaattttgaattttatttttattagtttctcctattctctgttggcttattttttttttttaattttttwaaactttcttgaactgggtgcttagatcatttactttcaatcttccgtatatattaagaagatcactgaaagctctgaattttcctttgagttaagactt

SEQ ID NO: 459618 - DNA, 201 bp, Homo sapiens
agttcagaaataccctcatttttaaagataattggagtcagggtttctgttacttgctgtcaaaagcattcttaattagacttgctaatatttgactttgsattttaagaataacccaatatgtattttatttttactattgtttagtatttagtatactttagtatcagaattaaatttgtcagtgaagtgtattgggaa

SEQ ID NO: 459619 - DNA, 201 bp, Homo sapiens
tatttaagtttagtgcaattccaataaaaaattctagtgggattttattggggaggggcaggtgtgatgggaattgatgatgtgattttaatttttcttatttatgttctgagtaaaacattttcttggggtgcagaaaattttatgatggaagaataagaaaactaagaatattttgaataggaacaataagtaggaaaa

SEQ ID NO: 459620 - DNA, 201 bp, Homo sapiens
atatttaagtttagtgcaattccaataaaaaattctagtgggattttattggggaggggcaggtgtgatgggaattgatgatgtgattttaatttttcttatttatgttctgagtaaaacattttcttggggtgcagaaaattttatgatggaagaataagaaaactaagaatattttgaataggaacaataagtaggaaa

SEQ ID NO: 459621 - DNA, 201 bp, Homo sapiens
ctcagaagaggggctcttctcttaacttatgggtggccagggaaggcttcctggagctcaaatgactgagtggagtcttcaacattaaaaaaaaaaaaaaraaaaaaaaagtgcttccctcccacccccagttaaaaaggtaatacacctcattgaaataatttaaactttacagaaatgtgttcctttaaagttcagaga

SEQ ID NO: 459622 - DNA, 201 bp, Homo sapiens
gctcagaagaggggctcttctcttaacttatgggtggccagggaaggcttcctggagctcaaatgactgagtggagtcttcaacattaaaaaaaaaaaaargaaaaaaaaagtgcttccctcccacccccagttaaaaaggtaatacacctcattgaaataatttaaactttacagaaatgtgttcctttaaagttcagag

SEQ ID NO: 459623 - DNA, 201 bp, Homo sapiens
gaccctggtatttacatattggatgtcaccccaaaagcccctgaccagggggtttccgggatgtaataagaatgccactctgggctttggaaggtgcaccrtatgcacacccatactatagggcaggggttagcatttcagacccctgttcctcccttgacaagcaagtgcttttctccagggaagacgttcaggttcatt

SEQ ID NO: 459624 - DNA, 201 bp, Homo sapiens
ttcccattgcttagttatgtagccattgtaacatggtagcacaacacattaccttttctatgtttagatatgttgcaatacacactattgtgttacagtcrcctacagttttcagtacagtaacatgctgtacaggtttgtagtctgggagcaataggctgtaccatatagcctaagtgtgtagtagattataccatccag

SEQ ID NO: 459625 - DNA, 201 bp, Homo sapiens
agatataacatgtaaggaggctgaggcaggagaatcgcttgaacctgggaggcggaggttgcagtaagccgagatctcaccgctgcactccagtgtgggcracagagcgagactctgtctaaaaaaaaaaaaatgtacatatatatatgtatgtaacatgtaacatctcttcagtggttaacatgaagctgacaaacctcc

SEQ ID NO: 459626 - DNA, 201 bp, Homo sapiens
ccaaagagaagggaactgaattgtctccccctcctctgcacacactttgttgttttaagtctgcacctttgcttgctgttgcctccactgcttggaatgcrccatcttctcagcctcagcctggtcagcagttactgggtcagtaagagtcagctgaggtctcactctgtgaagtttccctgacctcattttgacctccta

SEQ ID NO: 459627 - DNA, 201 bp, Homo sapiens
ctgggaagaaaagcttttcttctatttagttgagaacagtgacaaggattattttacttgaggatggcagattattttaccagcagctggcagatgagaakaattccctagacaacaaggaggggcagtatggtagggagggaacccggttcggagggtctggggttcacagctccacagtgctgcttaccagctcttagc

SEQ ID NO: 459628 - DNA, 201 bp, Homo sapiens
caaatttaactgtgcggcctatattttttctggcaaccctaaatgcgggcaggggcagtggtggtgacatgtagggatggtgtgaggataaaataataccrcagttaggttttatcgcagtgtgtagtctgtgtgtagtcaacacataactgtaagtagtgactgtaacataactgtaactggtgcatagtaaaaaacaaa

SEQ ID NO: 459629 - DNA, 201 bp, Homo sapiens
ggggcagtggtggtgacatgtagggatggtgtgaggataaaataataccgcagttaggttttatcgcagtgtgtagtctgtgtgtagtcaacacataactrtaagtagtgactgtaacataactgtaactggtgcatagtaaaaaacaaatggatattattagtataatagttgttattaataaaggtctttaaatgacaa

SEQ ID NO: 459630 - DNA, 201 bp, Homo sapiens
ttcgattttggtatttggacaaggcttgaagtggaatctcctggtgaacaaaattggggaatggaaagaatttggtagtgttgtgttttgtgtcttcctgycccttttcttctgatttcccaaagagctcaccctgttctgtagactaaatcttaggcctctgtggcaacaaagactataggctaatggcttagatgacaa

SEQ ID NO: 459631 - DNA, 201 bp, Homo sapiens
agaaattatgtagccatataaaaccggagggtagggtctactggccaggaaaaaaaaaggcctttactgccacctggtggccatattctttaactgcaatrtgcctaagtgaggctggaaaggaaagcgttggaaaacatgctaaacccagagggcaccaaggccgcgtcatgacagtaagagccgtcaagtactgtgtcc

SEQ ID NO: 459632 - DNA, 201 bp, Homo sapiens
acttactatttggctggcactgttctaagcactttgcatgtttaaactcctttaaacgttcctttgttgccgcttttttttctgctagggactaaccttgrcattgtgggggagaggtgttctcgtatagctgtgggactgtaacatggctttattttcctattatgtgcaggacagtaaatcctgcagaggaatacaagt

SEQ ID NO: 459633 - DNA, 201 bp, Homo sapiens
ctgcagccagatcgaatttctcctaagaaaacgggattttcttttttattacattgtcaggctgcaaattttctgaactgttatgctctgcttcccttatraaactgaatgcctttaacagcatccaagtcacctcttgaatgctttgctgcttagaaatttcttctgccagataccctaaatcatctctgtcaagttcaa

SEQ ID NO: 459634 - DNA, 201 bp, Homo sapiens
acattaattcctgcagtgaacaactctatagacccttcaccctaatgtgtccatttaaatggagccctatttgctatgcacacactttttcaaagaatctrttagagaatgtgaataccaagttataagcaacaaaaaagaaagcaacaaaatataatgaaatccccattacatccctttgccctataatactttcccttg

SEQ ID NO: 459635 - DNA, 201 bp, Homo sapiens
tcaacatatgaatttgaagggtggaggtacacaattcatttcataacactctggtttggatggcaattgtctaacaaagatctagttgttttggactcggrtggctgtgagctggtctctgggtttggactggattcctcactggggagcaacccctcgccctttatcacctgtttatagcatattactaggaagtgatgt

SEQ ID NO: 459636 - DNA, 201 bp, Homo sapiens
aatatgtagttctatagataataattcctttttaaaaagtaaccacaaaacaataaattcaactaacattagcaataattcattaatatcataaactagtyagtatttaaatttataattatctcataaatgcatatgcacaatttttacagcttgtttgaattaagataaaaatcagctgcacatattatagttggttcc

SEQ ID NO: 459637 - DNA, 201 bp, Homo sapiens
tggccttatttaatcttaattacctctcaaaggccctacctccaaatgtcatcgatatgtgaatttgggaattaagtttccagcacatgaaatttgggggwcacattcaaaccatagcaatgcttaaccttagaatactgcctggcatctgcccaggcttccacagccactacctctgggacatgttgggatctctattta

SEQ ID NO: 459638 - DNA, 201 bp, Homo sapiens
ctgtggaatggaagatgaggagcctgctgggctttggggtgagtgtggtggttggagttgaactgttttggtttccttgggcacaggccctgagaggaggwtacccctgctctgactgcactcagaggtttagtaacaataatattctaagcttttatttttatttccatctttattgtctatttttgacaatcagaatat

SEQ ID NO: 459639 - DNA, 201 bp, Homo sapiens
taaaagaagcaagtagggaggaaaagtttggagagggtggataggagaaaaaagtggactgtggaatggaagatgaggagcctgctgggctttggggtgartgtggtggttggagttgaactgttttggtttccttgggcacaggccctgagaggaggttacccctgctctgactgcactcagaggtttagtaacaataat

SEQ ID NO: 459640 - DNA, 201 bp, Homo sapiens
ggctttattgaattcactcttgactgtactttcttttatattcttttttcacttctatctgtactacctctctcaagatacaatgactgacactaatcctrtccttttattctttgaagtagaaaccatgactatccctttaaagaccacatctgtcacttcaggtatttttacttgtggctttcatttgctggctgagcg

SEQ ID NO: 459641 - DNA, 201 bp, Homo sapiens
ggcaatccgcccaccttggcctcccaaagtgctgggattatagggcttgagcaatggtaagggaggggagctataaggaaggagaggaagtgagattgagktagaaactaggaaaagcaaagagaagggaggggaaaaaggatgaaaaagaagaaaagggtgagaagtaaaagaagcaagtagggaggaaaagtttggaga

SEQ ID NO: 459642 - DNA, 201 bp, Homo sapiens
ttcaatcaagttgacactcagtattaaccattacacacagtttatttattcattcacttactgaaggacagtcttggctgcttcaaggttttggcagttawgaataaagtcactatgtacatccatgtgcaggtttttgtgtggacatatgtttttaactcatttgaataaatgccaagggatgtgattgctggattgtat

SEQ ID NO: 459643 - DNA, 201 bp, Homo sapiens
cttttcttctcttaatagcaaatacagtaatgccttataagcattggtttcttagatttgatgaaatgggatatttgcacaaaatttacctaagaaattgstgtcgtttttacatgaacaaggtagattataggtaaaacacctaaaactggtttttaatgctccttcattttttttttttcaggagagttctgtattcct

SEQ ID NO: 459644 - DNA, 201 bp, Homo sapiens
gatggtatctcattgtggttttgatttgcatttctctgatgaccagtgatgatgagcattttttcatctgtctgttggctgcataaacgtcttcttttgaraagtgtctgttcatatcctttgcccactttttgatggggttgtttttttcttgtaaatttgtttaagtttattgtagattctggatattagccctttgtc

SEQ ID NO: 459645 - DNA, 201 bp, Homo sapiens
taatccagtctatcattgatgggcatttgggttggttccaagtctttgctattgtgaatagtgccacagtaaacatacatgtgcatgtgtctttatcgtaraatgatttataatcctttgggtatatgtccagtaatgggattgctgggtcaaatggtatttctagttctagatccttgaggaatcaccacactgtcttcc

SEQ ID NO: 459646 - DNA, 201 bp, Homo sapiens
atattccttggtgtatatgtgccacattttcttaatccagtctatcattgatgggcatttgggttggttccaagtctttgctattgtgaatagtgccacartaaacatacatgtgcatgtgtctttatcgtagaatgatttataatcctttgggtatatgtccagtaatgggattgctgggtcaaatggtatttctagttc

SEQ ID NO: 459647 - DNA, 201 bp, Homo sapiens
ctcttgttcctgaatttgaatgttggcctatcttgctaggttggggtcattctcctggatgatatcctgaagtatgttttccaacttggttctattcttcytgtctctttcaggtaccccaatcagttgtaggtttggtccttttacataaacccatatttctcagaggttttattcattcattttcattcttttttctct

SEQ ID NO: 459648 - DNA, 201 bp, Homo sapiens
gttatcttactggggttctcttgttcctgaatttgaatgttggcctatcttgctaggttggggtcattctcctggatgatatcctgaagtatgttttccawcttggttctattcttcttgtctctttcaggtaccccaatcagttgtaggtttggtccttttacataaacccatatttctcagaggttttattcattcatt

SEQ ID NO: 459649 - DNA, 201 bp, Homo sapiens
atcttttctcttttattctttattagtctagctagcagtctatctattttattaatttttttcaaaaaaccagctcctggattcattgattctttgaaggktttttcatgtctctgtcttcttcagttctactctgattttggttattttttgtctcctgctaactttgggttggtttgctcttttttctctagtttgttt

SEQ ID NO: 459650 - DNA, 201 bp, Homo sapiens
ttattgagagtttttaacatgagggatgttgaattttatcaaagactttttctgtatctattgagataatcatgtgatttttgtctttagttctgtttatrtgataacttaacatttattgatttttgtatgttgaacagccttgcatcccaaagatgaagccaacttgatcatggtggataaactttttgatgtgctgct

SEQ ID NO: 459651 - DNA, 201 bp, Homo sapiens
ggtatttcattgttgtattgatttgcatttctgtaatgaacactgatgttgagctttttctcatgtttgttgtccacatctatgtcatcttttgagaagtrtctgttttgtcttttgcccactttttaatggggttgtttgtttttttcttgtaaatttgtttaaattccatatagatgctggatattagacctttgtcag

SEQ ID NO: 459652 - DNA, 201 bp, Homo sapiens
gaacttatccagtggtcactgcagagtgttagagtcataaatctttacagtggaagggaactttgaggtcatataatacaaaccctatctccaacccccctaccaccattttaaagctgaagaaactgagttcaagtcaggaatggatttttaattttatcaaatgtcttttggcctttagtaacacaaagcatgaagctt

SEQ ID NO: 459653 - DNA, 201 bp, Homo sapiens
gataattgctgttttctctgtgtattttgcagtacttcaataaggttaaaaaaacaagaagaaaagaaaagaaaaagaaattgccactgtgtgtacattakaatagttgtatatgaactattattttcctgaattgttcaaaaagctcactccagtgtttcaaaacaaacttcaggaagtttcagtcaatgttgctaaatt

SEQ ID NO: 459654 - DNA, 201 bp, Homo sapiens
ccgctagagaacaaacctcctttgactgtaattttcctttacctacccaaatcttataaaatggccccacccctatctcccttctctgactctcttttcgkactcagcccacctgcacccaggtggttaaaagctttattgctcacacaaagcctatttggtggtctcttcacatggacgcgcatgaaaaagattctttgt

SEQ ID NO: 459655 - DNA, 201 bp, Homo sapiens
ataaagttagatgtaggtttttcatagatgccttttattagtttaaggaagttccctactctttcttgtttgctggagtttttttttttttttttttttttatcatgaagtgattactgaatttattctaaactttttcttcatccaataagatattcatgtgattattcttttttagactgttgatgtggtgaattacat

SEQ ID NO: 459656 - DNA, 201 bp, Homo sapiens
cacaaacaagaggatgctcactctccttggagcctacctgaaacacccgttactgctgctagacccataactagggtcaattgtcatcatattccagtggygtggaagtggcagccagtctgtgaatataactctggccctgagtcccaagtttgccccttattccaaagagtcactgtttgctatgcagaggaagtatgg

SEQ ID NO: 459657 - DNA, 201 bp, Homo sapiens
tgctcttgtgtatctgcagaatttttttctcccctcaaaaaccctgtaattgcctctcctggagcaaatacttcacaaacaagaggatgctcactctcctyggagcctacctgaaacacccgttactgctgctagacccataactagggtcaattgtcatcatattccagtggtgtggaagtggcagccagtctgtgaata

SEQ ID NO: 459658 - DNA, 201 bp, Homo sapiens
tttctctatctgtagtttctctggagatgatatctagtccagcgcccttaaataacatatatatgctgttgatgctaatttttatcttcagacaagctcawcatttgtatagccatctatctgccaatttgacaccttgatctgaatatgtcacagacatttgatatatattcaaaatttaattcttaattctctttcttt

SEQ ID NO: 459659 - DNA, 201 bp, Homo sapiens
gggaagaaagcagcaatttaaaataactttttgggagactgaattgagtaataataaaacttcagtctttcgctaataataataataataataataataacaacaacttattgaatgtggccagctcactagatgaggaaagaggaaggcattttctgcattcttgcctagttttccttataagcaccactaagttaatag

SEQ ID NO: 459660 - DNA, 201 bp, Homo sapiens
cctgggttcaagcgatcctcctgcctcaacctctcaagtagctgggactacaggcgtgcaccaccacacctggctaattttgtatttttagtagagacagrgtttcaccatgttggccaggctggtcttgaactcctgacctcaggcgatctgcccgccttggcctcccaaagtactgggattacaggcgtgagcaactgc

SEQ ID NO: 459661 - DNA, 201 bp, Homo sapiens
gaggcttcctttctgtgtgtgatgggggatagggagttagctcccctgttgtctcagcactaagaaattgaggtcaggccaggcgcggtggttcactcctkttattccagcactggggtggccaaagtgggcagattgcttgcgctctggagctcgagaccagcctgggcaacatggtgaaaccctgtctctaccaaaaat

SEQ ID NO: 459662 - DNA, 201 bp, Homo sapiens
attgaggtcaggccaggcgcggtggttcactcctgttattccagcactggggtggccaaagtgggcagattgcttgcgctctggagctcgagaccagcctgggcaacatggtgaaaccctgtctctaccaaaaatacaaaaaaaaagctgggcatggtgggtgcatgcttgtcccagctactgaggaggctgaggtgggag

SEQ ID NO: 459663 - DNA, 201 bp, Homo sapiens
aagaaagcagcaatttaaaataactttttgggagactgaattgagtaataataaaacttcagtctttcgctaataataataataataataataataacaayaacttattgaatgtggccagctcactagatgaggaaagaggaaggcattttctgcattcttgcctagttttccttataagcaccactaagttaatagctc

SEQ ID NO: 459664 - DNA, 201 bp, Homo sapiens
atcaacaggaaatgtttcaaaggagggatgaaatgcttcttggcttcctcagcacttggcaaggtagacctcatagcaaccttgaatatgactttctttaktctctagctatgcactattaagtgcctcttgggtagaggtagagttaagtattgagtgccagtcttgacgtccgtatgcctcagtttttctcatatataa

SEQ ID NO: 459665 - DNA, 201 bp, Homo sapiens
aaaataactttttgggagactgaattgagtaataataaaacttcagtctttcgctaataataataataataataataataacaacaacttattgaatgtgkccagctcactagatgaggaaagaggaaggcattttctgcattcttgcctagttttccttataagcaccactaagttaatagctctgtctttttggtgttt

SEQ ID NO: 459666 - DNA, 201 bp, Homo sapiens
caaggtgggtgacagagacgctgtctcaaagaaattgaggtcaggcttccttcttacagaattatttttttctctgtagtttgcctcattttttcactttyttttcaatgagaatcgaagtgtttcttttgggtttttttttcccccttttaaaatcaacaggaaatgtttcaaaggagggatgaaatgcttcttggcttc

SEQ ID NO: 459667 - DNA, 201 bp, Homo sapiens
tgcgctcccacctgggtgacagagactctgtctcaaaaaaaaggacatttatcattataacatcttattagagcccctaatttcttatctgaaggcactgtttttttttttaaacagttaagtactgatgtcaacagacaaatatttctgatcagatagtcccctgtcaacagtagcaaatgtggtttcataaagtgggaa

SEQ ID NO: 459668 - DNA, 201 bp, Homo sapiens
gtgggaagaaagcagcaatttaaaataactttttgggagactgaattgagtaataataaaacttcagtctttcgctaataataataataataataataataacaacaacttattgaatgtggccagctcactagatgaggaaagaggaaggcattttctgcattcttgcctagttttccttataagcaccactaagttaat

SEQ ID NO: 459669 - DNA, 201 bp, Homo sapiens
tgggaagaaagcagcaatttaaaataactttttgggagactgaattgagtaataataaaacttcagtctttcgctaataataataataataataataataacaacaacttattgaatgtggccagctcactagatgaggaaagaggaaggcattttctgcattcttgcctagttttccttataagcaccactaagttaata

SEQ ID NO: 459670 - DNA, 201 bp, Homo sapiens
cggactgccgccttgagcccctgccccagcaagctgccggagccgccgagcctgccgccttccctccatgggcccagcgctccatctccgaaactgcgtgrgggatggcgtagacctgtgccctccgagcaccgctccccggcagtcggggatcctttgtgctgcccggcgttcggcgcgggctgcaacgtttctccccgt

SEQ ID NO: 459671 - DNA, 201 bp, Homo sapiens
gcagctccgtgacagttctcagcggcctccactatcggactgccgccttgagcccctgccccagcaagctgccggagccgccgagcctgccgccttccctmcatgggcccagcgctccatctccgaaactgcgtgggggatggcgtagacctgtgccctccgagcaccgctccccggcagtcggggatcctttgtgctgcc

SEQ ID NO: 459672 - DNA, 201 bp, Homo sapiens; identical to SEQ ID NO: 328705

SEQ ID NO: 459673 - DNA, 201 bp, Homo sapiens; identical to SEQ ID NO: 327722

SEQ ID NO: 459674 - DNA, 201 bp, Homo sapiens; identical to SEQ ID NO: 328855

SEQ ID NO: 459675 - DNA, 201 bp, Homo sapiens
ctggcctgtggtctggtgaagaagaaacagccgaaccgagactttcaccagcccctctaattgctcaaaccgctttcacaatcctctctttctacatcatycctagtggttcttttctgatggaacctctgactggtaacatggcattaccagtcctttccctctcatgttttgctatttcctgatggaacctgggagtct

SEQ ID NO: 459676 - DNA, 201 bp, Homo sapiens
gtgttcccagaattcccttccttgtttgtttctctggtgagggttggccacgagagagatttgcatgaggtttggaagtggaagtagagcaacagccatgygtattcactggaagtggatgtaggtcaggccctgttccatcacgtgcacgttaccatggatctcctgcacttgtggtgtgggcagccgctgggcccacgg

SEQ ID NO: 459677 - DNA, 201 bp, Homo sapiens
tccacatgcttcaaaccaaaaagataaaaaagttggcaactagatctagttgcctgccaggatgaccagcgttatgctggtgtgtgcgtgtccatgcctcygggatttttccagggttatcaatgtcagtgtaagatctgatggaatttaccgttgactcaattttcttcaccaatcaaggctcattccttgaggcatgag

SEQ ID NO: 459678 - DNA, 201 bp, Homo sapiens
tgcacagagtaaacatttcattaaatgagtttcaaggactccataccctgatataggagtacattcaagaaatgagtttaggccgggcgcggtggctcacrcctgtaatcccagcactttgggaggccgagacgagtggatcacctgaggtcaggagttccagaccagcctgaccaacatggtgaaaccccatctctacta

SEQ ID NO: 459679 - DNA, 201 bp, Homo sapiens
tatgctggtgtgtgcgtgtccatgcctccgggatttttccagggttatcaatgtcagtgtaagatctgatggaatttaccgttgactcaattttcttcacyaatcaaggctcattccttgaggcatgagttatgcgaaaagcttttctgcaccaagtactttcattctggtctttggaattgtcataattctgacagagaa

SEQ ID NO: 459680 - DNA, 201 bp, Homo sapiens
cagcactttgggaggccgagacgagtggatcacctgaggtcaggagttccagaccagcctgaccaacatggtgaaaccccatctctactaaaaaaaatacrgaaattacccgggcatggtggctggtgcctgtaatccccgctacttgggaggccaaggtgggagaatcgcttgaacctgggaggcggaggttgcagtgag

SEQ ID NO: 459681 - DNA, 201 bp, Homo sapiens
gtctcagtcgtacttgctctccctcaccatcctttccaaccgcctggcctgtggtctggtgaagaagaaacagccgaaccgagactttcaccagcccctcyaattgctcaaaccgctttcacaatcctctctttctacatcattcctagtggttcttttctgatggaacctctgactggtaacatggcattaccagtcctt

SEQ ID NO: 459682 - DNA, 201 bp, Homo sapiens; identical to SEQ ID NO: 325100

SEQ ID NO: 459683 - DNA, 201 bp, Homo sapiens; identical to SEQ ID NO: 325104

SEQ ID NO: 459684 - DNA, 201 bp, Homo sapiens
gacaggcattattagattctttcctgaggaccattatcatttccattttgcagatgaaggtactgacacagagaggttaaataacttgcccaaggcagtgyggctagcaaataatcacgctaaggtttggaaccctggtctcatgccaaagatcatgcttctaatgaagtattttgaagagcaaggctttctttggtgacc

SEQ ID NO: 459685 - DNA, 201 bp, Homo sapiens
cctcaggtgatccactcacctcggcttcccaaagtgctgggattacaagtgtgggccaccatacctggcctcaatgaacacttgtttaggtccttctaagsgttgtggatacagcagtgagcacagcaggtcaaaatccttgccttcataaggctgacattccagtcaggagagacagaaaatgaacacataagaaaaata

SEQ ID NO: 459686 - DNA, 201 bp, Homo sapiens; identical to SEQ ID NO: 325136

SEQ ID NO: 459687 - DNA, 201 bp, Homo sapiens; identical to SEQ ID NO: 325124

SEQ ID NO: 459688 - DNA, 201 bp, Homo sapiens
attttgtgtttttagtagaaatggggtttcaccatgttggtccggctggtctcgaactcctgacctcaggtgatccactcacctcggcttcccaaagtgcygggattacaagtgtgggccaccatacctggcctcaatgaacacttgtttaggtccttctaagggttgtggatacagcagtgagcacagcaggtcaaaatc

SEQ ID NO: 459689 - DNA, 201 bp, Homo sapiens
actccagcctaggtggggcagagtgagactccgtcttaaaccaaaaaacaaaaggaggttgaaggacgtgctgctctgtgggatataggagaaggggtgcygacagatcttggctgagggtgactcagggatgggaggtttggggtatgcagagaattccccagcctgccttctgcgtgtgggtccctgggtgtctgcttc

SEQ ID NO: 459690 - DNA, 201 bp, Homo sapiens
cctaggtggggcagagtgagactccgtcttaaaccaaaaaacaaaaggaggttgaaggacgtgctgctctgtgggatataggagaaggggtgccgacagawcttggctgagggtgactcagggatgggaggtttggggtatgcagagaattccccagcctgccttctgcgtgtgggtccctgggtgtctgcttcaagcgct

SEQ ID NO: 459691 - DNA, 201 bp, Homo sapiens
gtgttagcgcaactgctttgctagttgcaaagctgtattatcagagtaaaagtgtatttgtatactgtatgggaactaaaaattaagaataaaaccatttkcttattaaaaaaaaaaagcaaaaggaaaagaggcctgagcaaatgaagtttgagcagatgactgaatgaagtaaggaagtcctatgagactatttggggt

SEQ ID NO: 459692 - DNA, 201 bp, Homo sapiens
aacatggtttagacacggtcatagggaaggctgctggtccatcatttgttctgaacaaatggcatttcctgctcctgaccctggcagttggccccagattscttgtcgatgacttggaaacgtccattctgggtaaggtcagcactccctgagagatgttaacaaagtttacctatgagtcttactgtgtagacaatctga

SEQ ID NO: 459693 - DNA, 201 bp, Homo sapiens; identical to SEQ ID NO: 128008

SEQ ID NO: 459694 - DNA, 201 bp, Homo sapiens; identical to SEQ ID NO: 128205

SEQ ID NO: 459695 - DNA, 201 bp, Homo sapiens; identical to SEQ ID NO: 128009

SEQ ID NO: 459696 - DNA, 201 bp, Homo sapiens
ctggctggccatacagagggattcgttgtcatattgaaaaggctctgaaagatgagtttctaattgaagctcactatctcaggttggtgtttctactgtgyagtcccaagcctgtatccatatcataaaagtggaggcctggtactcctccaggttatctggccagtgtagactcctccatctgaatatgaacctccaggg

SEQ ID NO: 459697 - DNA, 201 bp, Homo sapiens; identical to SEQ ID NO: 128071

SEQ ID NO: 459698 - DNA, 201 bp, Homo sapiens; identical to SEQ ID NO: 128031

SEQ ID NO: 459699 - DNA, 201 bp, Homo sapiens
tctggtgtttttatggcttaaccttatatcattgatccaacatctagcctgatgctggagctcttatttctagcctgatgctggagctcttatatctagcytgatgctggagctcttgaagctgactcttggaagtttggagggtgtagagtttcccatctagtatttaatttgtccctgtgccattagtcccagcttgaa

SEQ ID NO: 459700 - DNA, 201 bp, Homo sapiens
atatttctgtgataagttaggatatgcgttttaggcaatatttttcattaatatcacttgttcttttgaaaaatagcatactggtttggtgccaattttttcattagaatataatgctcttatattgttggagagcaggttaatcttttttcgaagtaattgcgtttgaagtataatttcaaaatgtattgaatttgtgaa

SEQ ID NO: 459701 - DNA, 201 bp, Homo sapiens; identical to SEQ ID NO: 128013

SEQ ID NO: 459702 - DNA, 201 bp, Homo sapiens; identical to SEQ ID NO: 128015

SEQ ID NO: 459703 - DNA, 201 bp, Homo sapiens; identical to SEQ ID NO: 128086

SEQ ID NO: 459704 - DNA, 201 bp, Homo sapiens
gaaacatcttccatcacaggaaagtatggttggaattgatttccctcctcccttaagagctaacagggtgggaatggatgcaaataccttgatattaaagkgagctctcaggtatcttttaattttttttgcagagacagagtcttgctacattgcccaggctggtctcaaactcctggcctcaaacgatccgcctgcctt

SEQ ID NO: 459705 - DNA, 201 bp, Homo sapiens
aatgatagcttgagaatattaccaatctgcaactgttaattaaatagtgtttctagtcaataaatcattaatagctgctaacaccgcaaaaggagagacarccctgtattctgtacctccaaatatttacaccatcatttatggaaagcaaacctagagctgatcaaggctctagatatgacagctgctttatagggggca

SEQ ID NO: 459706 - DNA, 201 bp, Homo sapiens
actggttgctagttccatgagatgacccacgcattaaatgaatgaatgaatgagtgattccttggtcaaatgagattaggggatgctgcatattcagtctyccttttggagaattacagaacaagttaacatatatcagactctgaaaatcctgctccaaaggaatttttttaacatggcattttttttctaacttagttg

SEQ ID NO: 459707 - DNA, 201 bp, Homo sapiens
tggtttgtcaagacctctcgtggcctttgtgttcctcagagcatcctctgtgctttggcttctgaggccaattgcctgttcgtttcctacctccttttgcrttcctgagagataattggattggcccaggtcctcttttttgttctaggctgtaggtcagaggtcagccggtggactacctggtttgatcatatgtcctcc

SEQ ID NO: 459708 - DNA, 201 bp, Homo sapiens
atgttcacaagcatcctggcatgtggcagagaccggcttttcatttgttaaaggagactcctggggcacctgcatctctgagggcaaattacaaccccacrtatcctagaggaagatttgtcatccagccacctggaaaaaacactcagcagtgttgaagacacacaaaactacccagaatttctttgggggcttgagtca

SEQ ID NO: 459709 - DNA, 201 bp, Homo sapiens
gaatgactcccaatccctccaaatactgccagctgaaacatatttccaccatctggcatcctatttacagatgagaagatgaagaaaaatttctttctttyttttttttttttttcttggagacggagtctcactcctttgcccaggctggagtgcagtggcacgatcccggttcactgcaacctccgcctcctgggttca

SEQ ID NO: 459710 - DNA, 201 bp, Homo sapiens
gagtcatcacatttctgagctacttttacggtggggaaactgaggcactgggtgatttgctggaggtcaaagttatggcaggagcaacacaagaatgcatratctgacagagtctgttttcttgcccatgggcagactctgatcacgttaaaaggggagccagaaccgaggttgttcacccactggcttagaatatgatgc

SEQ ID NO: 459711 - DNA, 201 bp, Homo sapiens
tggactccttagaaggcggcccaaggggctagggcatcagaagggccagagtgagcctggaggacccagcacaccacaggggctgttgcagtgctggtgayactcggaacctgttgccagggcaggcgagtagctgagcttgtcctgggatgaaacaggcatgagctctgggagcagttgggatgtgggcaggccatggcc

SEQ ID NO: 459712 - DNA, 201 bp, Homo sapiens
tccttagaaggcggcccaaggggctagggcatcagaagggccagagtgagcctggaggacccagcacaccacaggggctgttgcagtgctggtgacactcrgaacctgttgccagggcaggcgagtagctgagcttgtcctgggatgaaacaggcatgagctctgggagcagttgggatgtgggcaggccatggccacctc

SEQ ID NO: 459713 - DNA, 201 bp, Homo sapiens
tctgcagaatgaggtccctagactggataattttggaaacacttctcagttctaaggtttgatgagctctgtagttgatttatgtgagtggggtgtgtgtrtaattttggggtaagctttaaaggatggctttaaaaatgatgggaattgtgtagttacgccctctcccccttgccaggagaaaaagacttgctttgacta

SEQ ID NO: 459714 - DNA, 201 bp, Homo sapiens
atttaagtctagaattcttccacctcccagtgtccttcaggaaaggtatctgagttcggacacccattatctaacagtggggcaggggtggagtggggtartggtgagagatgtcagtcatagggatgtaataggtctgcactggtacccagtgatgtgtccttatccctgtctggtcttgagtcatgtggtccccactgt

SEQ ID NO: 459715 - DNA, 201 bp, Homo sapiens
tcttccacctcccagtgtccttcaggaaaggtatctgagttcggacacccattatctaacagtggggcaggggtggagtggggtagtggtgagagatgtcrgtcatagggatgtaataggtctgcactggtacccagtgatgtgtccttatccctgtctggtcttgagtcatgtggtccccactgtatctgctttggcatc

SEQ ID NO: 459716 - DNA, 201 bp, Homo sapiens
gggcatctctgggttggtcagcactggggtcacattgcatgtttgctcagcttgccccttctcagtgccagtagaagcccatggtgagcccagatacaggrtctgttgactcacggggaatttgctgcccacagaggagggagaaatgcacctccccaaagccaacaatcaaaggccaggcaagccctgtgggaggaaaat

SEQ ID NO: 459717 - DNA, 201 bp, Homo sapiens
tccaggaggcggagcttgcaggaagctgcgatcgcgccactgcactccagcctaggtgacagagcgagactctgtctcacaaaaaaaaaaaaaaaaaaaargaaaaaaaaagaaatcaactcaatagagaagcctggctgtatacgttccttgacacctatcaagagtgagagaacagtgtggggaggggcctgaagacaa

SEQ ID NO: 459718 - DNA, 201 bp, Homo sapiens
ccttttttattttttgagacagagtctcgctttgtcacccaggctggagtgcagtggcgcagtctcggctcactgcaacctccgcctcccgggttcacgcrattctcctgcttctgccccctgagttgctgggactacaggtgcctgccagcacgcctggctaatttttgtatttttagtagagatggggtttcaccgtgt

SEQ ID NO: 459719 - DNA, 201 bp, Homo sapiens
gtgtctatattttggtttcttctcttagtgaccaaattaatgagcttttttcttggtaagtattattttgcacttgttctacagaaaattaattgacttcycagggagtggtttaatataatttctttcttttcttttcttttcttttttttttttttttggagacggagtcttgctctgttgcccaggctggagtgcagt

SEQ ID NO: 459720 - DNA, 201 bp, Homo sapiens
tgggatgtcagattcctggcatggggtgatgcagggggcttggaacattccagaggaaacaaaagcgagatgagcagagacaaagagctgtgaacaccagkttcaaaatgcatgagtgagggtgttggaaaacttcccaggggtggtggctgcccaagtcaaaggacaccaacaggaaatgcaaagtcccagggtcccagg

SEQ ID NO: 459721 - DNA, 201 bp, Homo sapiens
ggggtggtggctgcccaagtcaaaggacaccaacaggaaatgcaaagtcccagggtcccagggctagcaggaagctttgcctccaggctgtggtgcttgcygggcctctatgcttcgaagagccggcccgaggtgactcagatttcctgagaagcctcttatcacagccagcacagacatctgtgcctttcctcgcctgag

SEQ ID NO: 459722 - DNA, 201 bp, Homo sapiens
gatgtttggatgatgacttgagagaggtaaagtagtgacatatgtcatagtaatgacatagataaatggagggagaaggaggagcaggtgcaaagatttgmgtctgtagtgtgcatgtttgaggcacaacaaggaggctacagtggctggggcaggaggagccaggagggggacagtaggagaagtgaagatcagagattg

SEQ ID NO: 459723 - DNA, 201 bp, Homo sapiens
aatgattttccacaaggaaaaatcttcatccctctttcagaccctgtggtgtggtggaggctggccccttccccaagattcaagtcactaaaacttgattycaggtcttttgttggaactcctgggaagagaagccctcctccaagagaggacttgaaactgggaagttgtaagtcaggggcttctgggggctaccacgta

SEQ ID NO: 459724 - DNA, 201 bp, Homo sapiens
tccccaaatgccctcagttaaaagtaatcggcacaccaaagcatcagctttcaggtggcatttcctgaacttcttcacctcacatttgatgcattccaaayagaactcctaatccaatcccaccccaaatctgctctccctgcatcctttcttgtttcaatgattgcaagtcaaccctttcagttgctcaggctgaaaaca

SEQ ID NO: 459725 - DNA, 201 bp, Homo sapiens
tgaaactgggaagttgtaagtcaggggcttctgggggctaccacgtagtgaccacttccaccacatagtgaccacttgctggggagtggagcccagactgmggaaagcagaacttacagaaacctggatgaactgagtcctgatgctgctgctttctgtgcttaagccagtgcttatctgtattatgctccttgggctgct

SEQ ID NO: 459726 - DNA, 201 bp, Homo sapiens
gggattaaataatgtccaggtggttagaatggacttaaagagaaatagagaggaaaaggatctagtggtcatagtgaatcccaagttgaaatgagtcaacrggaagggacagtgatgaacaggaagggacagtgggaaaaccctgacagaaatgctttagctacatcctgtaccttcccacttttattagaagatgcttga

SEQ ID NO: 459727 - DNA, 201 bp, Homo sapiens
ttacagaaacctggatgaactgagtcctgatgctgctgctttctgtgcttaagccagtgcttatctgtattatgctccttgggctgctatcacaaagtacsgcaagctggatgtcttcaacaacagcactttattgcttcatagttctggaaatttgagatcaaagtgttggcagagttggttacttctgaaggctgcgag

SEQ ID NO: 459728 - DNA, 201 bp, Homo sapiens
ggggcaaactgtacaggcaaagagacttaagaagtttatagaccaatttgcatcgaagtttggtttgtcaagacctctcgtggcctttgtgttcctcagarcatcctctgtgctttggcttctgaggccaattgcctgttcgtttcctacctccttttgcgttcctgagagataattggattggcccaggtcctctttttt

SEQ ID NO: 459729 - DNA, 201 bp, Homo sapiens
tatttacccatcatctttcgatcatctctgcatttctaatttagaatgtctcacagtttttatgctttcttcctcacgtgtttatcctgaaataaaaaccrtatctaacctgactctggctggtctccccagaagtgattctccttgtttacctggatgccgttaaaacctctccagaagatgctggtttcccagcccagc

SEQ ID NO: 459730 - DNA, 201 bp, Homo sapiens
ctggctgtatacgttccttgacacctatcaagagtgagagaacagtgtggggaggggcctgaagacaacagtgcaaatggccttctcagagccaccttcaraaaggatggcagagcccctgttggggtgggtgctacaagtcaaaagaagctccatttgtcttgttgttcatgagtggaggggaggttcctgcctcttctg

SEQ ID NO: 459731 - DNA, 201 bp, Homo sapiens
ttttagttttcttctttggttgctgtggttcctatactcttgatggtttaacctatttctagggctttctatgcctggaaccagcatagaccatgaatatytctgttcctttatgttcagcagcttctagctccatggctgaagaaaaaaattcagtcattaaatgtagtacagacatatttggaaatgtaatacatgctt

SEQ ID NO: 459732 - DNA, 201 bp, Homo sapiens
ggcgcccagctaattgtttgtatttttagtagagacggggtttcaccatgttagccaggatggtctcaatgttctgacctcgtgatccgccttcctcagcstcccaaagtgttgggattacaagcgtcagccaccgcgcctggccggtgtcgctctttctcatactttctttttaatattagttcttctgtaatcaatatg

SEQ ID NO: 459733 - DNA, 201 bp, Homo sapiens
gaggggcctgaagacaacagtgcaaatggccttctcagagccaccttcagaaaggatggcagagcccctgttggggtgggtgctacaagtcaaaagaagcyccatttgtcttgttgttcatgagtggaggggaggttcctgcctcttctgcaaaaaaagttttagaaatcaccatgaaacagtggccaaactgaggtagaa

SEQ ID NO: 459734 - DNA, 201 bp, Homo sapiens
tctctgggttggtcagcactggggtcacattgcatgtttgctcagcttgccccttctcagtgccagtagaagcccatggtgagcccagatacaggatctgytgactcacggggaatttgctgcccacagaggagggagaaatgcacctccccaaagccaacaatcaaaggccaggcaagccctgtgggaggaaaataactt

SEQ ID NO: 459735 - DNA, 201 bp, Homo sapiens
atgtccactgtcttccccagacttgctgggagagagagcagaaccttgtcagactggcccaccccaactcccccccatccccctcacctgtgcatttcccrtagcatttccagacgcccaggctgtcccgcacctccgtgactttgctcagatccttcccttgtctagaacttgtttgaagaactgaatggagatactcag

SEQ ID NO: 459736 - DNA, 201 bp, Homo sapiens
aggccctcaataattcagattaaatgagtggattaataagccttcggtggtgtatccctcagggttcaggaatgggtgaacaccgtggctgtcacggggakacaggagtgaaggccaggatgagacagactgtcatgctggacatttagtggtttgtttcttgggcctcttcacaatgacccgacttgcctctgctgccgc

SEQ ID NO: 459737 - DNA, 201 bp, Homo sapiens
ccgtggctgtcacggggatacaggagtgaaggccaggatgagacagactgtcatgctggacatttagtggtttgtttcttgggcctcttcacaatgacccracttgcctctgctgccgcccagcagccccgctactgagtaggactctactcagagcttctggtggccaagtggtcatctttggactctcttcattcttct

SEQ ID NO: 459738 - DNA, 201 bp, Homo sapiens
actgaatggagatactcagggctcagggacactgagccacaaaataggggcccatggaaaggttgaaggcatggctccgctgacacgggagctccagagcragaatgaattcagggagtttagggctggagttgaagaggaactagagcctggagagaggggaggatagagaaaggctttttgagaaccgcagcaatgagg

SEQ ID NO: 459739 - DNA, 201 bp, Homo sapiens
aaaggggtggcttggcccattgattgagcgcagtcctgggaaatgccgggctgtttccctgaagtgttctccaggttcacaatgtccctattgtttcaacrgagcaggacttcctttttctgattgattagatattatgaggcaacacattttaatagtcacactgctcaggagctgtcaggcagagagagggtctctgag

SEQ ID NO: 459740 - DNA, 201 bp, Homo sapiens
agaagaacatggatcccgagtggggaagcacttcactcaggatttggaagcaatgaggctggcatttaaaccatgcccactgcccatcatttcctttgccytttgagatccagcataaccattttctcttcttgaacctccttcttgacactcctccccacccaggttgaattaggaaactggtggtctgtcttcctcatg

SEQ ID NO: 459741 - DNA, 201 bp, Homo sapiens
ccttgtttttaactgttgtggcttgctgaatcaaagtcgctgaatttgaaacaagctcaatgttgtttccttcatctttctgggtttgagatactgaacargcaacacttggtctcatccaaaccctgtggatgtatttttcacccaagaaattttggatttcgacaggagacccattctcctggataacaacattgatgg

SEQ ID NO: 459742 - DNA, 201 bp, Homo sapiens
tcaaacactccctcccttggttctttttatcgtttcctagttcctgcttcagcaggtacgagaaaaacccaccattcgtagacttgtcctatcagccacayggcacagctgtaggggtcaggtgagtcctggccagaggctctgagcaggatggtgggtcacacagatgcacacaagtctggaaacaaatgtttgtaagac

SEQ ID NO: 459743 - DNA, 201 bp, Homo sapiens
atccacgttatcaatgtggggcgcttattcggtattggccatggctcctaccatgatcccagaacccacacacttacatgcggattccagagactgtccarctgaaaactataacaagatcatctttgcccgcaagcctatgatgaggatgctccctacagttcgctactgaccaacaaggagaaacatgcaaatgtttta

SEQ ID NO: 459744 - DNA, 201 bp, Homo sapiens
cccaaggactctctgaggagtggccattagtcctacagctcctgagtgcatattgtggccagtcccacaaatgtgaagttctcttctttcctccgtgagtygttgggtcaaatagaactcttgttaatagctcaccaagtcagttaaagattgggaaggtgggcattgtgaatttgggattaaataatgtccaggtggtta

SEQ ID NO: 459745 - DNA, 201 bp, Homo sapiens
tcgctttgtcacccaggctggagtgcagtggcgcagtctcggctcactgcaacctccgcctcccgggttcacgcaattctcctgcttctgccccctgagtwgctgggactacaggtgcctgccagcacgcctggctaatttttgtatttttagtagagatggggtttcaccgtgttagccaggatggtctcaatctcctga

SEQ ID NO: 459746 - DNA, 201 bp, Homo sapiens
tgagtggctagtttagagtaggaagttagaaaaagcctttctgagaaggcaacattgagctaagatttaaatgatcaaacaccagctatgtaaaaatctgygaaagtcaatctggagggagggaatggttggagtttggtgagtttgaggactgacaggaggacactgtggctggagggtggttggcggtggggaaggcgg

SEQ ID NO: 459747 - DNA, 201 bp, Homo sapiens
attaaactgccagactttacagcctgctctgcactgtgtcctcctggcatcttggggactttttcacggttggggccacaggggaggttagaagctgctcrctctctccattgccaagcactggccggtcaatggagttggggagaaggaggctaattctcaacagcctgttagtgacagccattctctctccagcttatc

SEQ ID NO: 459748 - DNA, 201 bp, Homo sapiens
tctggaggcctgagcccgaagcccactgtttgtgctggaagctcttgctttacacttgtttgagctacattgagtcagtatgagagaggcagataggtgaygcaggttaagaacatgggcagccgagtccctgggttcaaatccagactctgtcacttgtcagttcacccactggcctgggtcagggagctgacctgggtc

SEQ ID NO: 459749 - DNA, 201 bp, Homo sapiens
gggtggaggttgattcctcagaagggagtgggctattaggaaaatagaaatgatgtgtgcctgttccaggaaatgcgagttgagagcggcttctcatccgkcattgagcaagtttattcgtggtgagagtggacagccccaggcgtctcaaaggctctgtctgggatgggggtgcagtaaggtgggaaaagactgtggttc

SEQ ID NO: 459750 - DNA, 201 bp, Homo sapiens
tcaggtgagtcctggccagaggctctgagcaggatggtgggtcacacagatgcacacaagtctggaaacaaatgtttgtaagactgggctttcctgaggcktcagggttcatcaactagaaacttagaagcaatgatgaaaggaatgactcccaatccctccaaatactgccagctgaaacatatttccaccatctggcat

SEQ ID NO: 459751 - DNA, 201 bp, Homo sapiens
gtgaaaagtagtgtggctggggagggatgggtgagatgtagggacagcactgtggcagcagttgtgttgaagggtcccctgagcatgtcttctgacctccyatgacttcagtcccttccctgatcttcaacgtagtgactcagttttggcaagatgtgtcttggtactaatttctccagcctgaacattggactgcattgt

SEQ ID NO: 459752 - DNA, 201 bp, Homo sapiens
ggcctgacacatatacatttgtaataagtgttagcttgtgttataaatgcctcatctggaaacaagatagctaataaccccaaaagtggttttcagctggygagggagagtagtagggggtcatcttggaatcatgatatttaatgattatgattattttacttatttggaatttcaaataagataaaaggaaggaacgag

SEQ ID NO: 459753 - DNA, 201 bp, Homo sapiens
tctagtagtggctactgccaagtgagccagtctgtgtttttcatttgtgtcccatacaagtgtgcagctgctggatatttggatttccagcgatccctggrgattccaggagaagttgcttatggcaattgcagtaacgtccatttatctgatgattttgacccaagagcctggggacagagcaatgaatgtgatggatga

SEQ ID NO: 459754 - DNA, 201 bp, Homo sapiens
aaaaggaaggaacgagattttctttttttcaaaagatggattgcgttataaaaaaggttgcaaaagcctgtcctactagacaatgcacttgggcgtgcctmcacctctgtgcattattaattctagcttcatttcgtagggagtatatgctgtgtcaagtgtttttggcatgcaaacgggactattctccttggcaagcta

SEQ ID NO: 459755 - DNA, 201 bp, Homo sapiens
tacacctctgtgcattattaattctagcttcatttcgtagggagtatatgctgtgtcaagtgtttttggcatgcaaacgggactattctccttggcaagcyaggctcatccacttacaaaggagaagctaagagtaaagcttttgcatggcccttggacagtttatgaacctctccacaactgttatttctctagtttaat

SEQ ID NO: 459756 - DNA, 201 bp, Homo sapiens
aggcctgccagccctgtgtgccttggatgtggggcaactaaagcgcactccccacttttaagaagccattgacccagtggagtaaacaaacatgaacaacmaacaatatcacaatgaaataagtgtgagtggtatgtcaggagagccccaaagagggaagatcagaaaaggcctgacagaggtgaagctgggctgggagga

SEQ ID NO: 459757 - DNA, 201 bp, Homo sapiens
taaacttatcagtgctttgtagcatcaccactgtggtgtgattgccccttgaggcgtgtgagaggaaaggtggaggaagatgaggctgacaaggttaagtrgggcagagtgctctggcactactgggattgtagggaggggaaccgagggacatcatggcacaaatctggaacccgagcaaagcgagttttctgaaagata

SEQ ID NO: 459758 - DNA, 201 bp, Homo sapiens
agtgaaaagactcattgagaaaagcaaaactagagaactggaatgcatgcgtgccctcgaggaaagaccctgggcatcaaggcagaataaaccttccagcrtcattcagccgaaaaggaggaagtcttccaagtcttctggcaaagctgtgttcagggacacgctgtcagaatccacgttatcaatgtggggcgcttattc

SEQ ID NO: 459759 - DNA, 201 bp, Homo sapiens
gaggtttgcaaccagcctgagcaaaatattgagactcctgtctctccaaaacaataaaaaataaataaacaaataaataaataaatggctagacataatgrtgtgcacctgtagtcccagctgtttgggaagctgaaatggaaggatcgcttgaggcccagagtctgaggctgcggtaagctgtgttcgcaccactgcact

SEQ ID NO: 459760 - DNA, 201 bp, Homo sapiens
accctcgtctcagaaaaaaaaaaaaaaaaagttgtcagcagtcaaaaaaaatagatttagactattacagcagaaggaggaaggccagttgggtgctgttrtggtaatctaggccaatggttcccagacttttgttaaagatacagcttcctattcttttagcacatttgaaatgtacaatacgttattattaactgtggt

SEQ ID NO: 459761 - DNA, 201 bp, Homo sapiens
cagcttcctattcttttagcacatttgaaatgtacaatacgttattattaactgtggtcaccatgcagggcaacagatcactaaaactaatgaattcagtstaactgaaattgcgtcttcatcaatatctctcctttcccggcctctttcctctatccacccctgctgcccccaccacagcctctgatatcagctttctac

SEQ ID NO: 459762 - DNA, 201 bp, Homo sapiens
agccttaaaaacacaatttaaggagagagagggagagagagaaagagaaagagaaagagagagagacacatcccaactaaataacacataatgggatagayggccttgatagataaggttcagataagatacttgggagcagagaggagggcctgtctatttcacctagaggcctgggccagcctctcaaaagaagtatca

SEQ ID NO: 459763 - DNA, 201 bp, Homo sapiens
caggagaagttgcttatggcaattgcagtaacgtccatttatctgatgattttgacccaagagcctggggacagagcaatgaatgtgatggatgagatcaycgctgtcatgtggcttatagtctagttggttaagagaaaataaatgagtaaatcataagaaatgtcaggcagggatagtgttagacagagtattaaaata

SEQ ID NO: 459764 - DNA, 201 bp, Homo sapiens
ttgcatttctctgatgattagagatgttaaatattatttcatacgcctgttggctgtttgtatctctttttttgagaaatgtcagttcaaatcctttgccsattttttaatgtttttttaccacaaaaatgtaagttggtgagctgaggatatgttaattagcttgactgaatctttctataatttatacatagataaaaa

SEQ ID NO: 459765 - DNA, 201 bp, Homo sapiens
acgttccaggtaattgaatgatttaggccaaacctagtctgtcagactagattctgaaaatggtgggatgagagattgagcgggggagtggggagctggcyctgaaagcccagtggtctgaacttgggctttgtgtctgtaggaaaaacaagaaagccgcttcaacgctctgcctcctgcccctcccgtcaatgctgtttc

SEQ ID NO: 459766 - DNA, 201 bp, Homo sapiens
tgtgaatagtgcgggcagccactcttgttatggtggcagagaacacagcatgttcaggagatggaacggggttgctgctcattttgctccaggcgtttgartttggactctgccagatccatgcaaatgccctatcccacaagatcttacatttgcttggaggaggcaagggtgaacagtctgtgcttggaggccttgctg

SEQ ID NO: 459767 - DNA, 201 bp, Homo sapiens
ttttcacttcccctctgtggaccagcctccacacagcccccagcctacccagcctctctcctttaaagttaggagactggaaagcagaacacccagagacyatcatgacagtctacagctcttgagcaaggccatgcctgcaggcctttgcggggctcacttggcctgtctccagctccacaaaaagcatgtcctcttctc

SEQ ID NO: 459768 - DNA, 201 bp, Homo sapiens
tcagaatccacgttatcaatgtggggcgcttattcggtattggccatggctcctaccatgatcccagaacccacacacttacatgcggattccagagactstccaactgaaaactataacaagatcatctttgcccgcaagcctatgatgaggatgctccctacagttcgctactgaccaacaaggagaaacatgcaaatg

SEQ ID NO: 459769 - DNA, 201 bp, Homo sapiens
ccacccccacccagggtggctactaattgctttccagtttgaggaggctctggctaacaagtgtattttcccataggaatctgaacctgtgatgttaagawatcagtaaatattaaaaagaagatggatgcaagaaggatgaagaaagaagaaggtagggttgggagtgttaccagtggaagctcctgcactggggccgtc

SEQ ID NO: 459770 - DNA, 201 bp, Homo sapiens
tctggcatccggaatgcattaaaaacaacccacaaatctgaagctcctcgcaggagagagagagagagagagagaggagagagaggagagaggagagagggagggaagagagtgacggagaaggagagaaagagacgggagagaggagagagaaagagagagagaggagagagagaaagaacgaacgaacagggaacttgt

SEQ ID NO: 459771 - DNA, 201 bp, Homo sapiens
ggcatccggaatgcattaaaaacaacccacaaatctgaagctcctcgcaggagagagagagagagagagagaggagagagaggagagaggagagagggagggaagagagtgacggagaaggagagaaagagacgggagagaggagagagaaagagagagagaggagagagagaaagaacgaacgaacagggaacttgtaaa

SEQ ID NO: 459772 - DNA, 201 bp, Homo sapiens
agccctgtattctgtacctccaaatatttacaccatcatttatggaaagcaaacctagagctgatcaaggctctagatatgacagctgctttatagggggyagaggtgcttgctaaaggacactatgaagatgtaatcggttcagtccagaccatgggaaactcagttccttctgcagataaggacacattattggagagg

SEQ ID NO: 459773 - DNA, 201 bp, Homo sapiens
gcatccggaatgcattaaaaacaacccacaaatctgaagctcctcgcaggagagagagagagagagagagaggagagagaggagagaggagagagggagggaagagagtgacggagaaggagagaaagagacgggagagaggagagagaaagagagagagaggagagagagaaagaacgaacgaacagggaacttgtaaaa

SEQ ID NO: 459774 - DNA, 201 bp, Homo sapiens
gtattctgtacctccaaatatttacaccatcatttatggaaagcaaacctagagctgatcaaggctctagatatgacagctgctttatagggggcagaggygcttgctaaaggacactatgaagatgtaatcggttcagtccagaccatgggaaactcagttccttctgcagataaggacacattattggagagggagggg

SEQ ID NO: 459775 - DNA, 201 bp, Homo sapiens
tcagcatggaaaccgcaagttctgctaagtggatccttgctcaggagcatctttccagatctcagagataagcttttcaagacacttctggctttagtggyagcttcctctttagccaaacataaatgaggagtggctagagggaaggaaaaaaagaaaaaagcagagggcagggaggagatggaaggtcaaagaggataa

SEQ ID NO: 459776 - DNA, 201 bp, Homo sapiens
atccggaatgcattaaaaacaacccacaaatctgaagctcctcgcaggagagagagagagagagagagaggagagagaggagagaggagagagggagggaagagagtgacggagaaggagagaaagagacgggagagaggagagagaaagagagagagaggagagagagaaagaacgaacgaacagggaacttgtaaaact

SEQ ID NO: 459777 - DNA, 201 bp, Homo sapiens
tttatggaaagcaaacctagagctgatcaaggctctagatatgacagctgctttatagggggcagaggtgcttgctaaaggacactatgaagatgtaatcrgttcagtccagaccatgggaaactcagttccttctgcagataaggacacattattggagagggaggggcaaactgtacaggcaaagagacttaagaagtt

SEQ ID NO: 459778 - DNA, 201 bp, Homo sapiens
agtacctaatgcatatgggttttgttaggatttaattagtcactataggtaatacacttagcgtgtgccctggtcacaccacacggcatagaaatgttagytgttactccacgtgggaccaatcggcacagtggcgttttcctctcaccaagtttagttgctgagatgacagcacccaaaagagccccacaggtggattga

SEQ ID NO: 459779 - DNA, 201 bp, Homo sapiens
tctgctaagtggatccttgctcaggagcatctttccagatctcagagataagcttttcaagacacttctggctttagtggtagcttcctctttagccaaamataaatgaggagtggctagagggaaggaaaaaaagaaaaaagcagagggcagggaggagatggaaggtcaaagaggataaaatgcagaggtgaaatgagg

SEQ ID NO: 459780 - DNA, 201 bp, Homo sapiens
ggaatgcattaaaaacaacccacaaatctgaagctcctcgcaggagagagagagagagagagagaggagagagaggagagaggagagagggagggaagagagtgacggagaaggagagaaagagacgggagagaggagagagaaagagagagagaggagagagagaaagaacgaacgaacagggaacttgtaaaactaagg

SEQ ID NO: 459781 - DNA, 201 bp, Homo sapiens
gagatgcttgcagcttagattttggatgtagcatcgttattggggatgataagaacagtggcctgatcacagaggcacgggtggtggagactgagaggaaracctggtgattggaaatgagcaggtcaaggactgctgggctggaggtctgcacagatcattcaggagacaatgaagaagccacggtgatgacagggaaca

SEQ ID NO: 459782 - DNA, 201 bp, Homo sapiens
cctgtttgagaaaatgtgattctccttctggggccaggcaagacacttagggatggctcaggaagaaaagtgggaggtgagacaaacaaaagaagccttgyagattggagcagagaagagaagaaagaggctgaacagagtgaacacaggtcttgtttccagtggagctttttcttctgcatagggacagttttggggact

SEQ ID NO: 459783 - DNA, 201 bp, Homo sapiens
aatgcattaaaaacaacccacaaatctgaagctcctcgcaggagagagagagagagagagagaggagagagaggagagaggagagagggagggaagagagtgacggagaaggagagaaagagacgggagagaggagagagaaagagagagagaggagagagagaaagaacgaacgaacagggaacttgtaaaactaagggg

SEQ ID NO: 459784 - DNA, 201 bp, Homo sapiens
atcgaatttccattatatggatattccatattttaatcagtctccctttgatcagcatttagattgtttccagattcttgacattataagccatgtcaccrggcacattcagttttataccattatattaccttttttattttttgagacagagtctcgctttgtcacccaggctggagtgcagtggcgcagtctcggctc

SEQ ID NO: 459785 - DNA, 201 bp, Homo sapiens
atgtgtttggtctagggtccagcacatagtaggtgttcactcttgggggtgggaataatcactctaatgtccgtgtttgaggactgcattgctggtgaccrctgagcctgcagaggaggaagagagcagggcagaagattcaggagggggtgcatggcaacttctgatgtcacagtgccccccttcactcctgacttctgg

SEQ ID NO: 459786 - DNA, 201 bp, Homo sapiens
tttgatggtggagtctttctttgataggtgcagctgcctggtggcacatctccaggctttgcgttctccaccccggcccagtgatccaaaatttcagcccmactcataaaaaccctagccctcccctacccacttccccattgtttcccaacacgcctgatcttctctccttaccctgaatccagggctcttgactgatgc

SEQ ID NO: 459787 - DNA, 201 bp, Homo sapiens
atcacagaggcacgggtggtggagactgagaggaagacctggtgattggaaatgagcaggtcaaggactgctgggctggaggtctgcacagatcattcagragacaatgaagaagccacggtgatgacagggaacagcgcaaaggaggacagtgtgcctggggctcaagttgtcagggactgaggggcagaggacagcgct

SEQ ID NO: 459788 - DNA, 201 bp, Homo sapiens
ttcccaaattttgctgcacagagaaattgtctgggacacttttaattccagtgcctgtactgcatcccattccaatcaaatcacgatgttgggagtgggcrcctacatttgtatttttccaagatccctagtaattccaatgtgctgcaaagtttggggaccactgggtttagaagcattttaatttccagacattttttt

SEQ ID NO: 459789 - DNA, 201 bp, Homo sapiens
gcattaaaaacaacccacaaatctgaagctcctcgcaggagagagagagagagagagagaggagagagaggagagaggagagagggagggaagagagtgacggagaaggagagaaagagacgggagagaggagagagaaagagagagagaggagagagagaaagaacgaacgaacagggaacttgtaaaactaaggggaaa

SEQ ID NO: 459790 - DNA, 201 bp, Homo sapiens
aacaagctcgtcccattcctaggattctgatttactttgtctgcagagggcttgagctcaggtatgtctataatgacagccaggtgattctattgtacacycagggctgaccactctacttaagcaaaacacacacacacaaaatatacccccgttcccccccatcccctgggggtgatgggttggggatgagggtgatga

SEQ ID NO: 459791 - DNA, 201 bp, Homo sapiens
tggggaaggcgggggagggagggagagagacagaaacagagagatctaagaggtggacagaggcagccatggaaggagtttggatttcatcccaagggctstgaggaaacccttggaaagggatgtttgtgttggggagtggtgtgtactggtgcaggttttagaaagatcactctggctgctgtgtggacaaaacagatt

SEQ ID NO: 459792 - DNA, 201 bp, Homo sapiens
ttaaaaacaacccacaaatctgaagctcctcgcaggagagagagagagagagagagaggagagagaggagagaggagagagggagggaagagagtgacggagaaggagagaaagagacgggagagaggagagagaaagagagagagaggagagagagaaagaacgaacgaacagggaacttgtaaaactaaggggaaaagg

SEQ ID NO: 459793 - DNA, 201 bp, Homo sapiens
aaattagtaagaaaccttgcgatccatgaatgcaccttggtgtagataggggtggggagaagagaacagaagagactcgtttctgcagatgaggcagcccwtcccttctccccatctgggtggaagctggcccagcgcccaggctcccaccccaggcagtgtttctggaggcctgagcccgaagcccactgtttgtgctgg

SEQ ID NO: 459794 - DNA, 201 bp, Homo sapiens
aacaacccacaaatctgaagctcctcgcaggagagagagagagagagagagaggagagagaggagagaggagagagggagggaagagagtgacggagaaggagagaaagagacgggagagaggagagagaaagagagagagaggagagagagaaagaacgaacgaacagggaacttgtaaaactaaggggaaaagggcaga

SEQ ID NO: 459795 - DNA, 201 bp, Homo sapiens
ttttcagttttcattgtttatttctaaaataaatgtttattttacctttgtatttaaggtttttaggaacatgggaaagaatgattttgttctggttttaracacttacttttggccttagagagacacgagccaacttgctaattacagcctaaaagtcagtgtttgatggtggagtctttctttgataggtgcagctgc

SEQ ID NO: 459796 - DNA, 201 bp, Homo sapiens
cccacaaatctgaagctcctcgcaggagagagagagagagagagagaggagagagaggagagaggagagagggagggaagagagtgacggagaaggagagaaagagacgggagagaggagagagaaagagagagagaggagagagagaaagaacgaacgaacagggaacttgtaaaactaaggggaaaagggcagaagaga

SEQ ID NO: 459797 - DNA, 201 bp, Homo sapiens
gcctaggtgacagagcgagactctgtctcacaaaaaaaaaaaaaaaaaaaaagaaaaaaaaagaaatcaactcaatagagaagcctggctgtatacgttcsttgacacctatcaagagtgagagaacagtgtggggaggggcctgaagacaacagtgcaaatggccttctcagagccaccttcagaaaggatggcagagcc

SEQ ID NO: 459798 - DNA, 201 bp, Homo sapiens
gatgtaaaactcttggcatgttgcctgcccactgataagccctcaataaaggctggcaataattaccaaagttcttattcaaagaactatagtccgatacrgtataagtgtgtcaaaagaagtatgatcaaagggccatggggcacagcagagggaacatcagttctatactgggtgggtagtcagggagaagaatccttt

SEQ ID NO: 459799 - DNA, 201 bp, Homo sapiens
ggtggcgggcacctgtagtcctagctactcaggaggctgaggcaggagaatggcgtgaacccgggaggcggagcttgcagtgagctgagattgcgcaactrcacttcagcctggcgatagagcgagactccatctcaaaaaaaaaaaaaaaaaaaaaaagaaaaggaaaaagaaagacagttctctgcaaatagatacccc

SEQ ID NO: 459800 - DNA, 201 bp, Homo sapiens
atggaaaccaggtgggagaacatttcaagaatgtgagagtgagtgctcaactctatccatgaccattgcattttggaaggtggagggtgagaggcctgagytgcaagtggagaggtgttctttgacaggaatacagatgcctcattcatagtagtgggaaggaaggcatagtgcaggggagcttatggtggagagttggta

SEQ ID NO: 459801 - DNA, 201 bp, Homo sapiens
atgataagaacagtggcctgatcacagaggcacgggtggtggagactgagaggaagacctggtgattggaaatgagcaggtcaaggactgctgggctggargtctgcacagatcattcaggagacaatgaagaagccacggtgatgacagggaacagcgcaaaggaggacagtgtgcctggggctcaagttgtcagggact

SEQ ID NO: 459802 - DNA, 201 bp, Homo sapiens
gggttattctttttaagttgatctttagtcttagagctgtgaaggatccctaaaattcttccactttagaattaaggaactagagttttggaagagttagrtgattgccctaaacctttataatgttagtgacattgttaaaactcaaatgtgagcttcctgactctcaatctaaggtgctttccactccccccaaccccc

SEQ ID NO: 459803 - DNA, 201 bp, Homo sapiens
caggggtgtctgcggcagaagggagagagggtgtgtgtctccacatttcagcttcttaccctcagcttttcagattttgaatgcaaggtcatcagtttacstgaggcctgaagtaaagccctacaccttttgctttctggcaatttctcaatgtaattgtgacacacactatttataatacagtcactttcaccttcctct

SEQ ID NO: 459804 - DNA, 201 bp, Homo sapiens
acatgacttttacagggagatggaatccttctacagcacattctttactgacagatctgtccccagacaagctccagctcctggacagccacgaggcagcrtgggaataactatacgacctacacttcacttgattatccccatttacggcatttttttttttaactgcattcaatttggagatggcaagatgactctttt

SEQ ID NO: 459805 - DNA, 201 bp, Homo sapiens
gtcagcctcagtttcgtcctctattaaatgggagaatacctaccttataaggtgtaactagaagtaaatgaaagagtttaggctgggagacatagccgaargttttagtcactgtgctaaaagcttaacataagttatctttaatccacaagaaagttccatgaactttgtcttattctaatcaccattttacagattaag

SEQ ID NO: 459806 - DNA, 201 bp, Homo sapiens
tgttcagggacacgctgtcagaatccacgttatcaatgtggggcgcttattcggtattggccatggctcctaccatgatcccagaacccacacacttacakgcggattccagagactgtccaactgaaaactataacaagatcatctttgcccgcaagcctatgatgaggatgctccctacagttcgctactgaccaacaa

SEQ ID NO: 459807 - DNA, 201 bp, Homo sapiens
tatgatgaggatgctccctacagttcgctactgaccaacaaggagaaacatgcaaatgttttagccaggggtccctgcagccattccccaagaacgtacaraagttaagctccatttaccactcacttgacagtgtcctttaaatctgaacttgctcttgctcatgcggagcttggctaagagaaaccagatcagaatgca

SEQ ID NO: 459808 - DNA, 201 bp, Homo sapiens
ttaatgtcaactatttgtctcctgttattttcaaacaaacaagtcctccccatgagttttgaggcagtctcaaacactccctcccttggttctttttatcrtttcctagttcctgcttcagcaggtacgagaaaaacccaccattcgtagacttgtcctatcagccacacggcacagctgtaggggtcaggtgagtcctgg

SEQ ID NO: 459809 - DNA, 201 bp, Homo sapiens
atgatgaggatgctccctacagttcgctactgaccaacaaggagaaacatgcaaatgttttagccaggggtccctgcagccattccccaagaacgtacaamagttaagctccatttaccactcacttgacagtgtcctttaaatctgaacttgctcttgctcatgcggagcttggctaagagaaaccagatcagaatgcaa

SEQ ID NO: 459810 - DNA, 201 bp, Homo sapiens
tgcctaggataggccttatgggcccaattgccattcatcctattggctctgtcacctttgcagttctgttaagacgtgagttgtgaggggcagaggaaaaygatttccatgtttacccttactcctcttgggaggtagatagctttgttggcatagcatctagagacttctcaggggcaaaaaattctgagtttctaagct

SEQ ID NO: 459811 - DNA, 201 bp, Homo sapiens
ccacaaatctgaagctcctcgcaggagagagagagagagagagagaggagagagaggagagaggagagagggagggaagagagtgacggagaaggagagaaagagacgggagagaggagagagaaagagagagagaggagagagagaaagaacgaacgaacagggaacttgtaaaactaaggggaaaagggcagaagagag

SEQ ID NO: 459812 - DNA, 201 bp, Homo sapiens
cacaaatctgaagctcctcgcaggagagagagagagagagagagaggagagagaggagagaggagagagggagggaagagagtgacggagaaggagagaaagagacgggagagaggagagagaaagagagagagaggagagagagaaagaacgaacgaacagggaacttgtaaaactaaggggaaaagggcagaagagagg

SEQ ID NO: 459813 - DNA, 201 bp, Homo sapiens
aatttccaaatgacagcacagtttggcatagctgttctgagtctaggagcataggagccctcacgccatttctgtgacctccccaaggcaaatcatgaaamttgcagattttctttattaccaagtgaggcagtgacagacctgctcaatggtccttaaattttcatgagcaacagaatccccaggaaggcttgtgaaaat

SEQ ID NO: 459814 - DNA, 201 bp, Homo sapiens
acaaatctgaagctcctcgcaggagagagagagagagagagagaggagagagaggagagaggagagagggagggaagagagtgacggagaaggagagaaagagacgggagagaggagagagaaagagagagagaggagagagagaaagaacgaacgaacagggaacttgtaaaactaaggggaaaagggcagaagagaggc

SEQ ID NO: 459815 - DNA, 201 bp, Homo sapiens
agattattggaagccatcttgcagcctgcctaggataggccttatgggcccaattgccattcatcctattggctctgtcacctttgcagttctgttaagaygtgagttgtgaggggcagaggaaaatgatttccatgtttacccttactcctcttgggaggtagatagctttgttggcatagcatctagagacttctcagg

SEQ ID NO: 459816 - DNA, 201 bp, Homo sapiens
caaatctgaagctcctcgcaggagagagagagagagagagagaggagagagaggagagaggagagagggagggaagagagtgacggagaaggagagaaagwgacgggagagaggagagagaaagagagagagaggagagagagaaagaacgaacgaacagggaacttgtaaaactaaggggaaaagggcagaagagaggca

SEQ ID NO: 459817 - DNA, 201 bp, Homo sapiens
tgagatgtagggacagcactgtggcagcagttgtgttgaagggtcccctgagcatgtcttctgacctcccatgacttcagtcccttccctgatcttcaacrtagtgactcagttttggcaagatgtgtcttggtactaatttctccagcctgaacattggactgcattgttttggcattgcagcagacattgccatcctgc

SEQ ID NO: 459818 - DNA, 201 bp, Homo sapiens
tgaagctcctcgcaggagagagagagagagagagagaggagagagaggagagaggagagagggagggaagagagtgacggagaaggagagaaagagacgggagagaggagagagaaagagagagagaggagagagagaaagaacgaacgaacagggaacttgtaaaactaaggggaaaagggcagaagagaggcagcagcg

SEQ ID NO: 459819 - DNA, 201 bp, Homo sapiens
gaagggcccgttcccggattttaaaagtatttgacacatccctccaccatgccaagaagacacattaaaaccctttttgtttaattggatttctgactcarcaaaaacttcttttgtcagaacttcaggatttcctggcatgttacccacacatattttctatgtggatagttatgtttcattgtatactattggggtatc

SEQ ID NO: 459820 - DNA, 201 bp, Homo sapiens
tatgactgggaggtaaacgatgtgtacacatggacataaaggtgaagataacagacactgtggactccaaaagggaggaggatgagaggagggtgagggtkgaacaattacctgttgggtacaatgttcaatattttgggtgatgggttcaccaggatcccaagcccaccatgacacgatatacccacgtaacaaacaggc

SEQ ID NO: 459821 - DNA, 201 bp, Homo sapiens
gctcctcgcaggagagagagagagagagagagaggagagagaggagagaggagagagggagggaagagagtgacggagaaggagagaaagagacgggagagaggagagagaaagagagagagaggagagagagaaagaacgaacgaacagggaacttgtaaaactaaggggaaaagggcagaagagaggcagcagcgtggt

SEQ ID NO: 459822 - DNA, 201 bp, Homo sapiens
ttagacaaggtttcatttcttctttcaacaaagtgtgaatcctggactgtcacgggtccatgtgcttgaattcttgctccttaacaggcaactgcaatgcygcactcaatcttcacaataaacctactgggacatgtatcattcccattttatggatgggggaaaactttaaggctcagagagagatagggcaagggattt

SEQ ID NO: 459823 - DNA, 201 bp, Homo sapiens
tacacatggacataaaggtgaagataacagacactgtggactccaaaagggaggaggatgagaggagggtgagggttgaacaattacctgttgggtacaawgttcaatattttgggtgatgggttcaccaggatcccaagcccaccatgacacgatatacccacgtaacaaacaggcacacggacccttgaatctaaaata

SEQ ID NO: 459824 - DNA, 201 bp, Homo sapiens
atatttgtaattgaatattccttggataaatataaaattcagattcatggttgtacctgataagtatacagtgcctaatgcttcttcccgcagtgaatttrtaaagtgtttcttcagccaattcagcattataattcacatgcagaaaacacactgtttggaaactgcctatattatctgcatgctggaagaagaacatgg

SEQ ID NO: 459825 - DNA, 201 bp, Homo sapiens
cctcgcaggagagagagagagagagagagaggagagagaggagagaggagagagggagggaagagagtgacggagaaggagagaaagagacgggagagaggagagagaaagagagagagaggagagagagaaagaacgaacgaacagggaacttgtaaaactaaggggaaaagggcagaagagaggcagcagcgtggtccc

SEQ ID NO: 459826 - DNA, 201 bp, Homo sapiens
tggtctgtcttcctcatggggctgtgagctccttgaaccaagactcagtgcctgcctgatgtatgagatgcttagtcagtacctgactgcagagtggttgrtggaacatgtattgtcctatgtactgggaggcctctgcttttgtttctcgtaacacagatagcaatgattagtctggatttatcagcacgggaaacctgg

SEQ ID NO: 459827 - DNA, 201 bp, Homo sapiens
cagagtggttgatggaacatgtattgtcctatgtactgggaggcctctgcttttgtttctcgtaacacagatagcaatgattagtctggatttatcagcaygggaaacctggattgcggacccttgacattgagaagggtagatcccaaagtaagaggcaaatgtggaaaatccacagtgggtcctgggtgagtgcaggac

SEQ ID NO: 459828 - DNA, 201 bp, Homo sapiens
ctcgcaggagagagagagagagagagagaggagagagaggagagaggagagagggagggaagagagtgacggagaaggagagaaagagacgggagagaggagagagaaagagagagagaggagagagagaaagaacgaacgaacagggaacttgtaaaactaaggggaaaagggcagaagagaggcagcagcgtggtccct

SEQ ID NO: 459829 - DNA, 201 bp, Homo sapiens
acctcaacttgtagtggaagcccagtgtgacacccttgatcatgttctgtacatgagtaaaatagtccaaacggtagcagttcctttccgttaccccaccmtttgtcaacccggagccttttttgttttctgtccgagaagactgggttctacactgatgtgattgaagtccctctggggcccttcacgataactgtgtgt

SEQ ID NO: 459830 - DNA, 201 bp, Homo sapiens
cgaggacgaagagggaaggggtggagacctccaccttctctgcgtgtggctgcgtccctttacagaatgacaggcccttacttccgagggcggggactaatgtgtaaggcttaacagatccaattccagaaattatctgtgtttttttcaatcaccctcttgtgcccccccaccccccattaaatttcatcttttatcttt

SEQ ID NO: 459831 - DNA, 201 bp, Homo sapiens
ctcaacttgtagtggaagcccagtgtgacacccttgatcatgttctgtacatgagtaaaatagtccaaacggtagcagttcctttccgttaccccaccctwtgtcaacccggagccttttttgttttctgtccgagaagactgggttctacactgatgtgattgaagtccctctggggcccttcacgataactgtgtgtcc

SEQ ID NO: 459832 - DNA, 201 bp, Homo sapiens
tggcactgatacccacagcagggactctgtaagatctgtctctaaataggtttgacaaaaagagcatttttttgggagtatgaatgaatctccgggatgcyatcctttgttagatgtgttataataaaatgctggaatgtgtgaataatttactctataaaaatagtggaatttaaagttgaccctgtcaatgacacactc

SEQ ID NO: 459833 - DNA, 201 bp, Homo sapiens
gaacacccagagactatcatgacagtctacagctcttgagcaaggccatgcctgcaggcctttgcggggctcacttggcctgtctccagctccacaaaaarcatgtcctcttctcagggggtggagtcatcttagcctcatgcagtgaccatataggacttagaaccacccccacccagggtggctactaattgctttcca

SEQ ID NO: 459834 - DNA, 201 bp, Homo sapiens
aaatggaaggatcgcttgaggcccagagtctgaggctgcggtaagctgtgttcgcaccactgcactccagcctgggtgatagagtgagaccctcgtctcaraaaaaaaaaaaaaaaaagttgtcagcagtcaaaaaaaatagatttagactattacagcagaaggaggaaggccagttgggtgctgttgtggtaatctagg

SEQ ID NO: 459835 - DNA, 201 bp, Homo sapiens
agaaaaaaaaaaaaaaaaagttgtcagcagtcaaaaaaaatagatttagactattacagcagaaggaggaaggccagttgggtgctgttgtggtaatctargccaatggttcccagacttttgttaaagatacagcttcctattcttttagcacatttgaaatgtacaatacgttattattaactgtggtcaccatgcagg

SEQ ID NO: 459836 - DNA, 201 bp, Homo sapiens
atcataagaacagcacgggaaaaacccacccccatgattcagttacctcccaccaggtccctcccacaacacgtggggattatgggagctacgattcaagwtgagatttgggtggggacatagccaaatcatatcataggggaacaagagtggaagcagggagaccagtagcaggtgttcagtagttcagttagtagatgt

SEQ ID NO: 459837 - DNA, 201 bp, Homo sapiens
tctggggggtggtagcggaacaagttatgggagggtgaggggaggaaatgagtggcaaataaatgttgtcttgttaaacgtctctcaggtaataaacgttrcctgagaggagtaagtgatggtctgtcagtgctggtgtcaatcttatctcctttcctgtgttcttccctggttgatgagattcctggggaaggaattcat

SEQ ID NO: 459838 - DNA, 201 bp, Homo sapiens
cttccagcgtcattcagccgaaaaggaggaagtcttccaagtcttctggcaaagctgtgttcagggacacgctgtcagaatccacgttatcaatgtggggygcttattcggtattggccatggctcctaccatgatcccagaacccacacacttacatgcggattccagagactgtccaactgaaaactataacaagatca

SEQ ID NO: 459839 - DNA, 201 bp, Homo sapiens
ttacattgaaaaataatgcttgtcagtctactaaaaatgcagtgtcatattatcatatgatcttaagttaattgcaggatttctaaaaattaataatttartagtgtatggcaggaggcctgccagccctgtgtgccttggatgtggggcaactaaagcgcactccccacttttaagaagccattgacccagtggagtaaa

SEQ ID NO: 459840 - DNA, 201 bp, Homo sapiens
atcctttgcccattttttaatgtttttttaccacaaaaatgtaagttggtgagctgaggatatgttaattagcttgactgaatctttctataatttatacrtagataaaaacatcacattgtgccccataagtgtacacaattattatttatcaactaaaattaataaataaatcaatacacttaaaacatttaagaaaac

SEQ ID NO: 459841 - DNA, 201 bp, Homo sapiens
aacactaccaaatggcccactgtatgcaacgtgactttttaaagatagtgcggtaatggacttgtttctctcctttgtgtgtgtgttcgtttctggggagrggcgctagagaggaagacgtgtccagcaaattattgcatagggagagggagagagatgccttctttcccgaaagaccaattcgcccctccccactcccat

SEQ ID NO: 459842 - DNA, 201 bp, Homo sapiens
gcccgccaccgcgcccggctaattttttgtatttttagtagagacggggtttcaccttgttagccaggatggtctcgatctcctgacctcatgatccaccygcctcggcctcccaaagtgctgggattacaggcgtgagccaccgcgcccggccggcttggaatttttaatagtggttacaatgtgggcaggggcttgtgt

SEQ ID NO: 459843 - DNA, 201 bp, Homo sapiens
ttcagggacacgctgtcagaatccacgttatcaatgtggggcgcttattcggtattggccatggctcctaccatgatcccagaacccacacacttacatgyggattccagagactgtccaactgaaaactataacaagatcatctttgcccgcaagcctatgatgaggatgctccctacagttcgctactgaccaacaagg

SEQ ID NO: 459844 - DNA, 201 bp, Homo sapiens
ctgggaattatctcccattttccctctagactcagcacaaggtagtgatggacagcacagactctagagccagtgatggacatcaaattccatatctgacrctgtgtgatttggggcaggttactcagtctccctgggcttaagttcatttcctcatctggaaaatggggatactaatagcatctacatcactgagttttt

SEQ ID NO: 459845 - DNA, 201 bp, Homo sapiens
atcttgaccaaattgcttatgttctgttctttgtgcagcagttctgtgtctatacaatggtggagggagtgggctctcctgggacagctataagggttaartaggatgtggaggtgatagagccttgcaaagtgttccagggtgggctggtcatatttcataatatgcggcacagcttaacactttctgcccattacttcc

SEQ ID NO: 459846 - DNA, 201 bp, Homo sapiens
atgataaaactgaggctgaaacacaggtgttttctgcctggcctttttctagaatgcacctctctctgaagattatagagaactatgaagaaaaggagatygtgggaaatatatgattgagtcagtatgatttggaggaagctcaagtgcttgctgtggttgcagagaagtgaggggactttacattcctggctggacagg

SEQ ID NO: 459847 - DNA, 201 bp, Homo sapiens
cccataagtgtacacaattattatttatcaactaaaattaataaataaatcaatacacttaaaacatttaagaaaacactaaaaaacaaaaactaaccaamcaaacaaacaaaatacagcctcttagacttcactccagacctattaaacctacattccagggtgtggattatggaaataggtgtttgtaaatagctccca

SEQ ID NO: 459848 - DNA, 201 bp, Homo sapiens
tcatggcccttttaaatgtttaaaggcccttgagatgcagtgctgactataatcagggattcttgagtgaaagcatgtgtcttaggactggaaagggactraaaagatcttctggacctctctctctctctctctctctctctctctctgcgcttggctaatttttatatttttagtagagacggggtttcgtcatgctgg

SEQ ID NO: 459849 - DNA, 201 bp, Homo sapiens
tgaatgatttaggccaaacctagtctgtcagactagattctgaaaatggtgggatgagagattgagcgggggagtggggagctggccctgaaagcccagtrgtctgaacttgggctttgtgtctgtaggaaaaacaagaaagccgcttcaacgctctgcctcctgcccctcccgtcaatgctgtttctgtctgtagactgc

SEQ ID NO: 459850 - DNA, 201 bp, Homo sapiens
ctgacagatctgtccccagacaagctccagctcctggacagccacgaggcagcgtgggaataactatacgacctacacttcacttgattatccccatttayggcatttttttttttaactgcattcaatttggagatggcaagatgactcttttaactctcctccctgcaaaactccagttgaaatgaccaaagaaatata

SEQ ID NO: 459851 - DNA, 201 bp, Homo sapiens
gtctacagctcttgagcaaggccatgcctgcaggcctttgcggggctcacttggcctgtctccagctccacaaaaagcatgtcctcttctcagggggtggmgtcatcttagcctcatgcagtgaccatataggacttagaaccacccccacccagggtggctactaattgctttccagtttgaggaggctctggctaacaa

SEQ ID NO: 459852 - DNA, 201 bp, Homo sapiens
tgaagcaggagaatcgcttgaacccaggaggttgaagttgcagtgagccaagatcgtgccactgcactccagcctgggcgacagagcgagattccacttcaaaaaaaaaaaaaaaaaaaaaatcagaatagaagcagagaaggcatgcagctccttctttcctggagctggggcaatagcccaggctggatccctgaacaa

SEQ ID NO: 459853 - DNA, 201 bp, Homo sapiens
gaagcaggagaatcgcttgaacccaggaggttgaagttgcagtgagccaagatcgtgccactgcactccagcctgggcgacagagcgagattccacttcaaaaaaaaaaaaaaaaaaaaaatcagaatagaagcagagaaggcatgcagctccttctttcctggagctggggcaatagcccaggctggatccctgaacaaa

SEQ ID NO: 459854 - DNA, 201 bp, Homo sapiens
aagcaggagaatcgcttgaacccaggaggttgaagttgcagtgagccaagatcgtgccactgcactccagcctgggcgacagagcgagattccacttcaaaaaaaaaaaaaaaaaaaaaatcagaatagaagcagagaaggcatgcagctccttctttcctggagctggggcaatagcccaggctggatccctgaacaaaa

SEQ ID NO: 459855 - DNA, 201 bp, Homo sapiens
agcaggagaatcgcttgaacccaggaggttgaagttgcagtgagccaagatcgtgccactgcactccagcctgggcgacagagcgagattccacttcaaaaaaaaaaaaaaaaaaaaaatcagaatagaagcagagaaggcatgcagctccttctttcctggagctggggcaatagcccaggctggatccctgaacaaaat

SEQ ID NO: 459856 - DNA, 201 bp, Homo sapiens
ataaataaatcaatacacttaaaacatttaagaaaacactaaaaaacaaaaactaaccaaccaaacaaacaaaatacagcctcttagacttcactccagayctattaaacctacattccagggtgtggattatggaaataggtgtttgtaaatagctcccaagtaatttagaagtacctttcatggaatgacatttgggaa

SEQ ID NO: 459857 - DNA, 201 bp, Homo sapiens
ctgcaagcgtccgctttcctggccaagcagcccccagcacgcctgctttgtggggcagggccatgcggccccgaggaaggatgcggtgagccagagggttycagacaaaggaggggatccccaaggctctgggccagccagtccctgttttactggcaccacggtccctcctaggcgaggacgaagagggaaggggtggag

SEQ ID NO: 459858 - DNA, 201 bp, Homo sapiens
ttggtgtgtctggtactggtgtatgtctgtgttggtgtgtgttgtgtgtgtgtgttggtgtgtgtgttatgtgtgtctgtgttggtgtgtctggtgttggwatgtgtctgtgttgtgcatgtctgtgttgtgtgtgtctgtgtgttggtgtgtctggtgttggtgtgtgtttgtgttggtgtgtgtgttgtgtgtgttggt

SEQ ID NO: 459859 - DNA, 201 bp, Homo sapiens
agcctctctcctttaaagttaggagactggaaagcagaacacccagagactatcatgacagtctacagctcttgagcaaggccatgcctgcaggcctttgyggggctcacttggcctgtctccagctccacaaaaagcatgtcctcttctcagggggtggagtcatcttagcctcatgcagtgaccatataggacttagaa

SEQ ID NO: 459860 - DNA, 201 bp, Homo sapiens
acaatctgtatggctttatagggcagcttttgccatgggccccttctttttctttaagtaatacctattaacatcttgaggagagattcttgcattctgtsggacacagtttaggaaacactagattgagataataatccactcatcatgactatgtaaatggaactactttcacagccttagtagggcaaaaagtctgag

SEQ ID NO: 459861 - DNA, 201 bp, Homo sapiens
gctggtcttgaactcctgggctcaagcaatcctcccaccttggtctcccaaagtgctgggattacagacatgagccaccatgcccggccaaggcttggaattttttttttttttttttgagacggagtctcgctctgtcgcccaggccggactgcggactgcagtggcgcaatctcgtctcactgcaagctccgcttcccg

SEQ ID NO: 459862 - DNA, 201 bp, Homo sapiens
aaagatgggaaggactgacatgcccatgattttggatctgtaaaggaacaggctgcttgataaactaatgcgttgaatttctagcaacacccacccccctyggcaaacaccccaaacttctggccagcaaccatagtgaaaagctttggtttttttgagccttgttaagcttgagttcaaacccaccacttgttagtcgtg

SEQ ID NO: 459863 - DNA, 201 bp, Homo sapiens
attcacctgtatcatgtcaacttctattaaaatttattttaaaaatatcatcttttaaaattccctatcttttgctatgtttctctctctctctctctctmtatatatatatgtatacacacacacacatatatatatgtttttatatatagtggtttccaaatgttttgatcacgtcattaaaaagtttaatgcccaaac

SEQ ID NO: 459864 - DNA, 201 bp, Homo sapiens
ggctaggtatggggaaaggggaggggatcttccatgccctccctggggcatcctccaggaacctccatgcattcgtttgtctggaagctctctgaaccctrtgcttttgggtttttatggaaacttcattacttaggcataattgattaaaccattggctaatggtgatcaactcaaccttcagcacctctctcctcccca

SEQ ID NO: 459865 - DNA, 201 bp, Homo sapiens
cttgcatcaggcccttggcttgagctcctgaagctggcaacccctcatcgtgacacccatcccttctgcccccgtgtccacggcgagatggagtctcgctstgttgcttaggctggtcttgaactcccacatctcttcccactggctgtgagccctgagaagggatgggcaggtgtactgctcagcacatagtacatgctc

SEQ ID NO: 459866 - DNA, 201 bp, Homo sapiens
aaaataaaacctgcctctggggtgcaggggaggagagaggaggacgcgaatcacacccgctgctgcgcgccagcccgccccgtctgtacaatgggatgctygggactcggacgggaggatccagtgactgcgagccccgcattcgcccgatcccagcctcacacccccagccagcccccagagaccctcccacacttacga

SEQ ID NO: 459867 - DNA, 201 bp, Homo sapiens
caggagaggagtgagcggaaggtatgagtgggcaggactcaaggcagcggggggcacagggtggtcatggagaggaccacatatcgggaacctgacagccyggtctgagcatctcagggaggcagggaggcggggagccagggagagtgagctggggacatggacaagacaggatgggatgggacaggagagaagcggggg

SEQ ID NO: 459868 - DNA, 201 bp, Homo sapiens
aggcccttggcttgagctcctgaagctggcaacccctcatcgtgacacccatcccttctgcccccgtgtccacggcgagatggagtctcgctctgttgctyaggctggtcttgaactcccacatctcttcccactggctgtgagccctgagaagggatgggcaggtgtactgctcagcacatagtacatgctcaataaatg

SEQ ID NO: 459869 - DNA, 201 bp, Homo sapiens
ggcctacatgtaacgtgacttctgttagcaagtccttcacattcagatgactgcaacagttgaacatgcacattacttttttccacatttctgagttacargcatatcctgtctttttgtgccatgaatttcataagaacttcagtaagatatagacgtgttttcctgtccgaaaaatcactgatacacatttcctaaaaa

SEQ ID NO: 459870 - DNA, 201 bp, Homo sapiens
caaacaagcaaaaatcaaaaacattgtttcagatcttattttcctattgacctaagagttatttaatatagacttttgaattttcaggtagattttacttktgtttcttttaattttattattaatttccagttttagtagaaaatgtctatataatttcaaccttttttttttgctaactcctagttttgtgtctagatt

SEQ ID NO: 459871 - DNA, 201 bp, Homo sapiens
atattcttctgttgctgttttctcagtgaaaaagaagatcaatagaatgtgagagcatcaatggaatattattagcattcagtatgggcttattcaggatrtgattaaaattgattctccgaagtacagttccttagatgtcgggttttactattttcagatctttgtacattatccctgtgttgaaatgcaaataggact

SEQ ID NO: 459872 - DNA, 201 bp, Homo sapiens
gaggcagaagaattgcttgaacccatgaggcagaggttgcagtgagccgagatcctgccattacactccagcctgggtgacagagtgagactcagtctccaaaaaaaaaagaaagtcctggtttaagctgccagctatatttagtactattcagaacagattttctccatcccctaccacccagtcatcttcactctataa

SEQ ID NO: 459873 - DNA, 201 bp, Homo sapiens
tgttcattttatttttctaagagattatatatcttgaatattttatatgtccttgtgtattttctaaaacttagcacttagagattaatacacacgcacamtctctctctctctctctctctctgtttctctcacgtctgtttttgctgtaccttaacaggatcatactactcacaactgtttgttactgcactcctcact

SEQ ID NO: 459874 - DNA, 201 bp, Homo sapiens
tatggatgctttatgatttatttaatctgttttcttttttttttttttttgagacggggtcttgctctgttgcccaggctggagtgcagtggcatgatccygcctcactgcaagctccgcctcctggtttcacgccattctcctgcctcagcctcccgggtagctgggcttacaggtgcctgccaccatgcccggctaatt

SEQ ID NO: 459875 - DNA, 201 bp, Homo sapiens
atcccgcctcactgcaagctccgcctcctggtttcacgccattctcctgcctcagcctcccgggtagctgggcttacaggtgcctgccaccatgcccggcyaattttttgtatttttagtagagacggggtttcaccatgttagccaggattatttaatctgttttctattgaaggacatttaggttcttcccagcttttt

SEQ ID NO: 459876 - DNA, 201 bp, Homo sapiens
caatagctaatgaaatataaatagtgtttggtatatactctaggcaatgtttagatacagacatatataaatataatcttaacaataatcatataagatargtactatgattatccctattttatagggaaggaaaaggtagcatggaagtaacttgcccaaggtcatacaactaggatgtggttcaggcaggatttgcac

SEQ ID NO: 459877 - DNA, 201 bp, Homo sapiens
acacttaggtaggttttatgttatataaattatattgcagtaaagctgttaaaatccaagaactttacatttaatttaacattgtttgaatatccaagaartaatacatgtcccagaaagcttatttttcctctcagcaaaataacaataaccaatagctaatgaaatataaatagtgtttggtatatactctaggcaatg

SEQ ID NO: 459878 - DNA, 201 bp, Homo sapiens
agtttgggttatggtgacgtttgcacaactctgtaaatttactaaaaatcattgaattgtacacttaggtaggttttatgttatataaattatattgcagyaaagctgttaaaatccaagaactttacatttaatttaacattgtttgaatatccaagaaataatacatgtcccagaaagcttatttttcctctcagcaaa

SEQ ID NO: 459879 - DNA, 201 bp, Homo sapiens
cggccattatggtcagaccagggaaagggaaagtaagaagctgagatcagagttaggcaaggacccggtaatgtaaccactaagagaaattgaaagccacrggctgcttgtattctaaaattatttctccggttgagtgcaaaagcaggaagcaccgatactgaggcagtttcagttgttgagttagacagggtggtggtt

SEQ ID NO: 459880 - DNA, 201 bp, Homo sapiens
tgctaattccacaatgacatgtatcaaaacatcacattgtagcctataaatatatacaattattagtcaaaagacaaaataattattagtgagtatttggraaaactagaaccctcatacattgcagtgggaatgtacgatactatagatacgaccctgtaattcttctcctaaatgtttactcaagagaaataaaaatgt

SEQ ID NO: 459881 - DNA, 201 bp, Homo sapiens
tagggatatttgggggatgacggaaatattctaagtttgggttatggtgacgtttgcacaactctgtaaatttactaaaaatcattgaattgtacacttargtaggttttatgttatataaattatattgcagtaaagctgttaaaatccaagaactttacatttaatttaacattgtttgaatatccaagaaataataca

SEQ ID NO: 459882 - DNA, 201 bp, Homo sapiens
gttccctttggctttttttttctttccaaattgtataacaatattttagagttttggttaaggattacttttgttgtcttttatttctacattagaaatgwtgcttcttttagtaaaagaaaacagcatgtgtttgctttcttgttttattttagatttggagaccaagtatgagaccaagaagttatctttagaaaatga

SEQ ID NO: 459883 - DNA, 201 bp, Homo sapiens
ccagtaaaaacatagaagctgcttgtaggatattgagtttttttctccaagttcaagggatgactactttaaaaactatctctttaacctatttaaagaaygctttccactatgcaaagttaaaatatatgtttcaagtatatatggtcatgtagaattatgaaataaatgtaagcgaaaaggaaatcaagatcaatatct

SEQ ID NO: 459884 - DNA, 201 bp, Homo sapiens
cagtgtgcagttttgtggtggtaatggctgccaggcttggtctttatgaatttctctctttgtgtctggtgaatctaaacaggcctatgaaactttgaagraggaagattgtggtttagatgatacagccccttatcagccctggaattagcaagggattagactcgtccagactccctcaaatttctctctctctctctg

SEQ ID NO: 459885 - DNA, 201 bp, Homo sapiens
gaaacaaaacaaaagcttggtcaagaagtcatgagaagtagcagcagtgaaacaaggcattaattgaagatgtttagccatgtttatataggcagaactcwgacatacatgaacacacttagaaatcatagagtcagttcagattttgggagctgaaatcaacaaaaccagtaaaaacatagaagctgcttgtaggatatt

SEQ ID NO: 459886 - DNA, 201 bp, Homo sapiens
ccaggcaggtcttgaactcctgacctcgtgatccacctaccttggcctcccaaagtgttgggattacaggtgtgagccactgcgcccagcctaaaacattmttgtaataaacaccccttgggtctttcaatgtgctgttttattagatatttagaattttttcctcagtgttcagaatattggtgtgtagttttctttttg

SEQ ID NO: 459887 - DNA, 201 bp, Homo sapiens
cttctcctggcaagtaaaccccaaggaggactgaccagttcttgaatttctataccatggcccttgtaagtttttttctcctcctaggaatactatcatgytaaggttctgtgaccatttttttattctgaaacttccttactatcagagctccatccaagaaccttcttccagttcttccaaatccagtggcgggtgaac

SEQ ID NO: 459888 - DNA, 201 bp, Homo sapiens
atttttgtattattggtagagatggagtttcgtcatgttggcgaggctagtctcaaactgctgacctcaagtgatctgcccacctcggcctcccaaagtgktggttacaggcatgagccactatgcctggccaataaattattctttgatgaactctcttgcaatacatctttgtatacttttacaaatatttcctaacga

SEQ ID NO: 459889 - DNA, 201 bp, Homo sapiens
ggagctgtggtggagagatcagaagagaggggaaaggtcacagtaactcaaatcatttggggatttctgaggtccatctgatctcatggccttgttttcckctccctagatcagcctctgtggactcggtgcttctcctggcaagtaaaccccaaggaggactgaccagttcttgaatttctataccatggcccttgtaag

SEQ ID NO: 459890 - DNA, 201 bp, Homo sapiens
tatgatttatgtagtggtaaaatggatcaacagcatgtatttacaattcaagagaactcattcccttcattaataaacaatcatattcagttttacctacytttatgattgaaaattaaaaatctggccgggcgcggtggctcacgcctgtaatcccagcactttgggaggccgaggcgggcggatcacgaggtcaggaga

SEQ ID NO: 459891 - DNA, 201 bp, Homo sapiens
ttcctcctccttaatggagctgaggggtaaggtggtgctctctttggctcactgttgacaaccattgtatattttgattcagttgctttcctcctttgcatttttttttttttttttttttctgagatgcagtttcgctcttgttgcccaggctggaatgcaatggcacaatctcggctcactgcaacctctgcctcctga

SEQ ID NO: 459892 - DNA, 201 bp, Homo sapiens
agcccctgcccaaatttctgacccacaaaaacatgagatataataaaatggttgttgttttaagccactaaactttcttttattatcatactaaatatttmtttttacataattcatactaaaggctgtgggcataatgagtatagaaatgccttccaccaacatttaatcttcattgaacttgagatatcttattctcgt

SEQ ID NO: 459893 - DNA, 201 bp, Homo sapiens
gtgccactatgcctggctaattttttgtattttttgtagagatggggtttcaccatcttggccaggctggtcttgaactcctgaccttgtgatccacccgcctcagcctcccaaagtgctgggattacaggtgtgagccaccgcgcctggcctttttttttttttttttgagatggagtcttactctgttccccaggctgg

SEQ ID NO: 459894 - DNA, 201 bp, Homo sapiens
catcttaaacaagaccatgtattttttttctttcttttctattcttcctttaagaaagtttgattaaagtataaataacatgccttcagaaaagtggacaratgactttcttgaggtgatatttgagaagagacatgaagtaagggctcaagacatgtcattttctgggaaaagagcattatgagctgatagaaaaggtct

SEQ ID NO: 459895 - DNA, 201 bp, Homo sapiens
ccactatgcctggctaattttttgtattttttgtagagatggggtttcaccatcttggccaggctggtcttgaactcctgaccttgtgatccacccgcctsagcctcccaaagtgctgggattacaggtgtgagccaccgcgcctggcctttttttttttttttttgagatggagtcttactctgttccccaggctggagt

SEQ ID NO: 459896 - DNA, 201 bp, Homo sapiens
ataccattaaaagagtgtgacaatgtattgtagtccatcatcactcaaacctgaaacttcagcatatttgttctaaaaactaatcctgttataagaatgaraaagacatttaccgtcatccctatcccatcactttgtgtcatactggacaagacgcttaactgctctgtgctataattttttaatttatgacatggtcat

SEQ ID NO: 459897 - DNA, 201 bp, Homo sapiens
cactatgcctggctaattttttgtattttttgtagagatggggtttcaccatcttggccaggctggtcttgaactcctgaccttgtgatccacccgcctcagcctcccaaagtgctgggattacaggtgtgagccaccgcgcctggcctttttttttttttttttgagatggagtcttactctgttccccaggctggagtg

SEQ ID NO: 459898 - DNA, 201 bp, Homo sapiens
tatgcctggctaattttttgtattttttgtagagatggggtttcaccatcttggccaggctggtcttgaactcctgaccttgtgatccacccgcctcagcctcccaaagtgctgggattacaggtgtgagccaccgcgcctggcctttttttttttttttttgagatggagtcttactctgttccccaggctggagtgcag

SEQ ID NO: 459899 - DNA, 201 bp, Homo sapiens
tagagaatgaggactgagaattgaccccaggttccagcaagatggagaatcctggtaagcttgtcaagaaagattttcaatggagtcaggatgaaagcccragtggagtgacttgatgagagaagggtttgtgaggcagtaacaagaatgagtataagacaactctggaggaattatgtatgaagggaagctgggaaatag

SEQ ID NO: 459900 - DNA, 201 bp, Homo sapiens
tctcctgcctcagcctcccgagaagctggaactacaggcgcccgccaccacgcccggctaatttttttgtatttttttttggtagagttggggtttcaccrtgttagccaggatggtctcaatctcctgatctcgtgatctgcccgcctcagcctcccaaagtgctgggattacaggcgtgagccaccgcgcctggccatg

SEQ ID NO: 459901 - DNA, 201 bp, Homo sapiens
gggactacaggcgcccgccaccatgcctggctaatttttttgtatttttagtagagatggggttttaccgtgttagccaggatggtcttgatctcctgacsttgtgatccgcccaccttggcttcccaaagtgctgggattacaggcgtgagccactgtgcccggcctcctaatctattttaaaattcacattcaggtaat

SEQ ID NO: 459902 - DNA, 201 bp, Homo sapiens
atactggtgaaaaaccttacgaatgtaaggaatgctggaaagcctttagtcgctactcacaacttatttcacatcagagtattcatattggtgttaagccytatgactgtaaggaatgcgggaaggccttcagactactttcacaactcacacagcatcagagtattcatattggtgagaaaccttataaatgtaaggaat

SEQ ID NO: 459903 - DNA, 201 bp, Homo sapiens
atggtaagtctgatcacattctctatttgctctatgggaattgatctatataaacattttattaacatctatctcttccatgatcagttttgataaattayatttttctaaaaaattatccattttaggctgggtatggttgctcatgcctgtaatcccagcactttgggaggctgaggcgggtggatcacaaggtcagga

SEQ ID NO: 459904 - DNA, 201 bp, Homo sapiens
gaggcaggagaatcgcttgaacccaggaggcagaggctgcagtgagctgaggtcacaccactgcactccagcctgggtgacagagtgagactctgtctcaraaaacaaacaaacaagcaaaaatcaaaaacattgtttcagatcttattttcctattgacctaagagttatttaatatagacttttgaattttcaggtaga

SEQ ID NO: 459905 - DNA, 201 bp, Homo sapiens
tttggatccaccagaccagccaccagctaaatgccagtgagcgacttggtaacctgaactgatgccatgtagaatggaagaattgaccagctgagcccctgcccaaatttctgacccacaaaaacatgagatataataaaatggttgttgttttaagccactaaactttcttttattatcatactaaatatttctttttac

SEQ ID NO: 459906 - DNA, 201 bp, Homo sapiens
aaatacattttcttccatttcatttataatgtgtggtttgtcatttcagcgatcagtgatgttcagtgatgtatccatagacttctctccagaagagtggsaatacctggacttggaacaaaaggacttgtacagagatgtcatgttggagaactacagcaacttggtctcactgggtaaggttatctgcttctaggaatt

SEQ ID NO: 459907 - DNA, 201 bp, Homo sapiens
ggctaattttttgtattttttgtagagatggggtttcaccatcttggccaggctggtcttgaactcctgaccttgtgatccacccgcctcagcctcccaargtgctgggattacaggtgtgagccaccgcgcctggcctttttttttttttttttgagatggagtcttactctgttccccaggctggagtgcagtggtgtg

SEQ ID NO: 459908 - DNA, 201 bp, Homo sapiens
aggttgcagtgagccgagatcctgccattacactccagcctgggtgacagagtgagactcagtctccaaaaaaaaaagaaagtcctggtttaagctgccarctatatttagtactattcagaacagattttctccatcccctaccacccagtcatcttcactctataagaataaaatttaagttgcccgtagtctcaccat

SEQ ID NO: 459909 - DNA, 201 bp, Homo sapiens
atgatacagccccttatcagccctggaattagcaagggattagactcgtccagactccctcaaatttctctctctctctctgcctatgtgtgtgtgcgcgygtgtgtgttggaggagctgtggtggagagatcagaagagaggggaaaggtcacagtaactcaaatcatttggggatttctgaggtccatctgatctcatg

SEQ ID NO: 459910 - DNA, 201 bp, Homo sapiens
ctatgcctggctaattttttgtattttttgtagagatggggtttcaccatcttggccaggctggtcttgaactcctgaccttgtgatccacccgcctcagmctcccaaagtgctgggattacaggtgtgagccaccgcgcctggcctttttttttttttttttgagatggagtcttactctgttccccaggctggagtgca

SEQ ID NO: 459911 - DNA, 201 bp, Homo sapiens
tccaacctgggcaataagagcaagactccatctcaaaaaaacaaaaacaagaacaaacaacagcaacaacaacaacaaaatatatatatatacacacacayatacacacacacacacacatacatatataacacccaacatactggaattcttgataaatagacatttgttattgtcaaatgaccaagagcatgaatccat

SEQ ID NO: 459912 - DNA, 201 bp, Homo sapiens
ttttttttttttttgagatggagtctcgctcttctgtccaggctggagtgcagtggcgtgatctcagctcacttcaagctccgcttcctgggttcacgccrttctcttgcctcaggctcccaagtagctgggactacaggcgcccgccaccatgcctggctaatttttttgtatttttagtagagatggggttttaccgtg

SEQ ID NO: 459913 - DNA, 201 bp, Homo sapiens
atcttgataacaaagcctgtatttttaataactgagagtctgccacctcccaacattgtacatattcttttagtctgactcccatagctagtaatttatcrtgaatatcttccttctttaattaatgtgggccaatgccatcattaataattgcataatgtgctataatatagtagaacatcatttattcaacttgttgcc

SEQ ID NO: 459914 - DNA, 201 bp, Homo sapiens
acaaaatttagccgggtgtggtggcgtgtgcttgtaatcccagctacttgggaggccgaggcaggagaatcgcttgaaggtggtggggcgtggcggggggmcagcgggtggaggtgcaggttgcagtgagccgagattatactactgcactctagcctgggtgacagagtgagactctgtctcaaaaaacaaaaaaacaac

SEQ ID NO: 459915 - DNA, 201 bp, Homo sapiens
atactggcgaaaaaccctttgagtgtaaggaatgtaggaaggcctttagacttaattcatcccttattcaacatctgagaattcattctggtgagaaaccmtatgaatgtaaggaatgtaagaaggcctttaggcaacattcacaccttactcatcatctgaaaattcataatgtaaaaatctaagaaagtcttttcaact

SEQ ID NO: 459916 - DNA, 201 bp, Homo sapiens
cccgagaactgactcatgggtcactccaccctgtagacctttgaaagagggaaagagggacaacaaaagagataaagaaggagcagccactaaaaaaattaaaaaaaaaaaaagaaggggcagccattgagataaaataaaaataaaggaaatgtttcaccatggacggagtagagaatgaggactgagaattgaccccag

SEQ ID NO: 459917 - DNA, 201 bp, Homo sapiens
ataatttggaatgaagtaaggttctgttaaagaaaatatatttgaagaccctttaaagcagtgaatctgaaacaattttcacacccttaagtggttgataygtacctatttttaggtattttgaggtatttaccataaactaaatttagaaattttttagattcacttgaagtaaacattacaaacattggatacggtggg

SEQ ID NO: 459918 - DNA, 201 bp, Homo sapiens
gagacaggaggaccagttgagcccagcaagatcaagcccaggagtttaagaccagcctaggtaaccaatgagacccccatctctacaaaaaaacttttttwaattacccaggcattgctgggcacagtggctcacacctggaatcccagcactttgggaggccaaggcaggaggattgcttgcttccaggagttcaagacc

SEQ ID NO: 459919 - DNA, 201 bp, Homo sapiens
gggcagggcttatgtggtatttgtgccttgggctgcacaggaaatgggctcaaagagtttcagtgcagctccccctggagcccggcacttctggctctggwtatggtacttttcactgcagtgtgctgattctgggtgcctccagaagacccacaatgtgactgttgggcccagccctgttcccaacaatggcagggcctg

SEQ ID NO: 459920 - DNA, 201 bp, Homo sapiens
cacatgtaattggcttatgttcatttaaaggcaagataaggggaaaactaatcaaactaataaaaatactgttgcaagggaggtttggtagagaggacaargatggaagctaggtttctcctagtgtgatttgttttgcagttttgactttggaactatgtaaatattttatgtaataatggataagattgatatttattt

SEQ ID NO: 459921 - DNA, 201 bp, Homo sapiens
tcaactatttatttaataaaccttacaaacaagctatagggaattatcttacatgtgtagactactttataagtatgtaggaagataatttgtttgcaggygacagcttgccccagtctcctgtggcgggcagggcttatgtggtatttgtgccttgggctgcacaggaaatgggctcaaagagtttcagtgcagctcccc

SEQ ID NO: 459922 - DNA, 201 bp, Homo sapiens
atacacatacacatatgcacatgcatacacatacacatatgcacatgcatacacatatacacatgtatgtataagtatatacacacatgcacatacatacacatgtatatataagtatatacatacacatatgcacatacatacatacacgtagatatatatatacatacacatatgcacatacatacacatatacacata

SEQ ID NO: 459923 - DNA, 201 bp, Homo sapiens
catacacatacacatatgcacatgcatacacatacacatatgcacatgcatacacatatacacatgtatgtataagtatatacacacatgcacatacatacacatgtatatataagtatatacatacacatatgcacatacatacatacacgtagatatatatatacatacacatatgcacatacatacacatatacacat

SEQ ID NO: 459924 - DNA, 201 bp, Homo sapiens
gaggctgaggcgagtggatcacttgagttcaggagctcaagaccagcctggccaatatggtaaaacaccgtccctactaaaaatacaaaaattagccagaygtggtggtacacgcctgtaatcccagttactcaggaggctgaggcaggagaattgctcgaacccagaaggcagaggttgaagtgagcgaagattgtgcca

SEQ ID NO: 459925 - DNA, 201 bp, Homo sapiens
ttgagacaaagtctggctgtatcacccaggctggagtgcagtggtgcaatctcagctcactgcaacctccgcctcctgggctcaagccatcctcccacctyggcctcctaagtaactgggactacaggcatgcaccaccatgccctgctaatttttgtattttttgtaaagacagggcttcaccatgttacccaggctggt

SEQ ID NO: 459926 - DNA, 201 bp, Homo sapiens
gggtgcttctttccagacctactgtcttgtgacgttcccttaggcacgcagcacaggctgctttctgatttagaagtgagcctgttcagttgatggctcarcgcaggcctctaaaaaagcaagcctgatgtgggttagtacatctgtggttgacttatttggtgttcattttttcagttttcagaaaggtcagttgaagtg

SEQ ID NO: 459927 - DNA, 201 bp, Homo sapiens
acgatgttaggccaggcgcggtggctcacgcctataatcccagcactttggaaggctgaggcgggcggatcacaagcttgcagtgagctgagattgtgctmctgcactccagcctggcaacaaagcgagactcttgtctcaaaaaaaaaaaaattaaatattttttatttcctgtttattgcatgtttgaaacttttttct

SEQ ID NO: 459928 - DNA, 201 bp, Homo sapiens
acacagctgaacagatgccagtttcatgggggactgtcagatattctgaagggacctaatcaagtcagtacagtgggaaggagagagaaacagaagcctcrtttgtgaaatactacttgagtttgtgcatgaagaatggataggatttagactgagaagcttggaaaggggacaaccacaaacaactgtagagaggctgga

SEQ ID NO: 459929 - DNA, 201 bp, Homo sapiens
aaaacccactgcattttaaaaaatgagacagggaaaattaaaacactacctggatattttatgatatttaaagaaatattgataactatttttttttttttgagatggagtctcgctttgatacccaggctggagtgcagtggtgcagttttggctcactgcaagctctgcctcccgggttcacaccattctcctgcctta

SEQ ID NO: 459930 - DNA, 201 bp, Homo sapiens
tgctcctgcactccagcctggcaacaaagcgagactcttgtctcaaaaaaaaaaaaattaaatattttttatttcctgtttattgcatgtttgaaactttkttctgtattttctatttcgggatgtacgtaacattgatgcaggagtacattacctgggggtgtaggcacaaggttttcttactagtggaatgtgaaccaa

SEQ ID NO: 459931 - DNA, 201 bp, Homo sapiens
acatacacatacacatatgcacatgcatacacatacacatatgcacatgcatacacatatacacatgtatgtataagtatatacacacatgcacatacatacacatgtatatataagtatatacatacacatatgcacatacatacatacacgtagatatatatatacatacacatatgcacatacatacacatatacaca

SEQ ID NO: 459932 - DNA, 201 bp, Homo sapiens
cacatacacatacacatatgcacatgcatacacatacacatatgcacatgcatacacatatacacatgtatgtataagtatatacacacatgcacatacatacacatgtatatataagtatatacatacacatatgcacatacatacatacacgtagatatatatatacatacacatatgcacatacatacacatatacac

SEQ ID NO: 459933 - DNA, 201 bp, Homo sapiens
tggcacttgagtacataagacaatacgatgttaggccaggcgcggtggctcacgcctataatcccagcactttggaaggctgaggcgggcggatcacaagsttgcagtgagctgagattgtgctcctgcactccagcctggcaacaaagcgagactcttgtctcaaaaaaaaaaaaattaaatattttttatttcctgttt

SEQ ID NO: 459934 - DNA, 201 bp, Homo sapiens
atacatacacatgtagatatatacatacacatatgcacatacacatatacatacacatgcacatgcatacacatacacatacacatatgcacatgcatacrcatacacatatgcacatgcatacacatatacacatgtatgtataagtatatacacacatgcacatacatacacatgtatatataagtatatacatacaca

SEQ ID NO: 459935 - DNA, 201 bp, Homo sapiens
aatggtttgctggcacttgagtacataagacaatacgatgttaggccaggcgcggtggctcacgcctataatcccagcactttggaaggctgaggcgggcrgatcacaagcttgcagtgagctgagattgtgctcctgcactccagcctggcaacaaagcgagactcttgtctcaaaaaaaaaaaaattaaatatttttta

SEQ ID NO: 459936 - DNA, 201 bp, Homo sapiens
tggatatggtacttttcactgcagtgtgctgattctgggtgcctccagaagacccacaatgtgactgttgggcccagccctgttcccaacaatggcagggsctgggacaaaaatacaagtatttaaagtttataactttatagtttataacaatacaagtatttaaaaagttataaatcaaactagcaaactattagatta

SEQ ID NO: 459937 - DNA, 201 bp, Homo sapiens
gcccaggagtttaagaccagcctaggtaaccaatgagacccccatctctacaaaaaaacttttttaaattacccaggcattgctgggcacagtggctcacrcctggaatcccagcactttgggaggccaaggcaggaggattgcttgcttccaggagttcaagaccagccttgaccacatagcaagaccctgtctctacaa

SEQ ID NO: 459938 - DNA, 201 bp, Homo sapiens; identical to SEQ ID NO: 169871

SEQ ID NO: 459939 - DNA, 201 bp, Homo sapiens; identical to SEQ ID NO: 169718

SEQ ID NO: 459940 - DNA, 201 bp, Homo sapiens
aacaaccccaaacaccccaatcctttcattaagagagacatttctgtttttgtttttttgttttgttttgtttttttgagacagggtctcactctgtctcmcaggctggagtgctgtggcgtgatcttggctcgctgcaacctctgcctcctggctcaagcaatcctcccacctcagcctcccgagtagctgggactacag

SEQ ID NO: 459941 - DNA, 201 bp, Homo sapiens
tgacagcaacacggcccagtggcagaggctcctgggggtgggggcattaggggatgaagcaggcctggaggatgggtggatccagagagcactggtgagtggggggggtgcctcagctcagggggcaggcctgcgggatggggggacccctgggacatttatccagcctgagactggaggcagctcttcttaccttcctgg

SEQ ID NO: 459942 - DNA, 201 bp, Homo sapiens
ctggatactaggcccctattttaggtatgtgatttacaagtattctctcccattctctgggtcgtcttttcacctttttgatactgtccttaaagaacaayagtttttaattttgatgaagttccaaattgtctatttcttctgtggttgcttatgcttttggtgtcatatttaagaacccattacctaatccaacaaaga

SEQ ID NO: 459943 - DNA, 201 bp, Homo sapiens
ctctactaaaaatacaaaaattagccaggcatggtggcagtgcctgtaatcccagctacttggagggctgaggcacaagaattgcttgaacccaggaggcrggggctgtggtgagccaagataatgctactgcactccagcctgagtgacagagtgagactctgtctcaaaaacaaaaaacaacaacatcaaaaacctgta

SEQ ID NO: 459944 - DNA, 201 bp, Homo sapiens
gatttacaagtattctctcccattctctgggtcgtcttttcacctttttgatactgtccttaaagaacaacagtttttaattttgatgaagttccaaattrtctatttcttctgtggttgcttatgcttttggtgtcatatttaagaacccattacctaatccaacaaagatttacaactatgttttcttgtaaaagttct

SEQ ID NO: 459945 - DNA, 201 bp, Homo sapiens
caaaaaataataaataaataaataaataaataaataaataaataaataaataaaaataaagctgattagaagctgcgtgcatggatgagcttgtcaactgrtgaccttcaccaattgtaatctgatagggcgatttcattgggaaactcctaatgttagtatctttgggtccttcctcttgagttggtctgagtacttaca

SEQ ID NO: 459946 - DNA, 201 bp, Homo sapiens
ttgttgcttttgagaaaaagtccggctgggcacagtggctcatgcctgtaatcccaacactttgggacactgaggcgggcagattacaaggtcaggagatygagaccatcctggccaaaataagtgaaaccccatctctactaaaaatacaaaaattacctgggcgtggtggcgtgtgcctgtagtctcagctactcagga

SEQ ID NO: 459947 - DNA, 201 bp, Homo sapiens
tgtaaccctctactgtcattttagtggggttttgatgtcagaggagtgagattaacccgcatggtcaattggtcatctttttttttttttttttttttttggagacacagttttactctgtcagcaggctggaggggagaggcgcgatctgaactcactgcaacctcacctcctgggttcaagcaattctcctgcctcagc

SEQ ID NO: 459948 - DNA, 201 bp, Homo sapiens
agccattctcagctgcaccgggtccgggcatccacagccggctcacgcgctggtggtcgccaagcctcagctcttgctggctgttggttcagggcttcggytcccagccaggtggggctctccaaaggagagggcagctcaaaacaacccgctggcttcccccagagcaagtgataggagacaggaagagggagctagaga

SEQ ID NO: 459949 - DNA, 201 bp, Homo sapiens
gtaattgcagtgttttgggaggctaccacattttttgaagatagattggccaaaactcagtttcataaattctatatgattgggttttctttctttctttyttttttttgaaacagaatctcgctctgttgcctaggctggagtgcagtggcgcagtcttggctcactgcaacctccaccttccgggttcaagcgattctc

SEQ ID NO: 459950 - DNA, 201 bp, Homo sapiens
ttttgaaacagaatctcgctctgttgcctaggctggagtgcagtggcgcagtcttggctcactgcaacctccaccttccgggttcaagcgattctcctgcytcagcctcctgagtagctgggattacaggggcctgccatcatgcccagctaatttttgtatttttagtagagacggggtttcaccatgttggtcaggctg

SEQ ID NO: 459951 - DNA, 201 bp, Homo sapiens
atggctgtcttttcacccctgccaccttgaaaaaaatttttaagtagaaatgggatcccactttattgcccagactggtctgaaactcctgggctcaagcratcctcccacctcagcctcccaaagtgctgggattgctggtgtgagccatcgtgtccaccgtgggattactcagttctctaggagaaggtatctgtgttt

SEQ ID NO: 459952 - DNA, 201 bp, Homo sapiens
tttgggtccttcctcttgagttggtctgagtacttacagaggagcccttccatttcctgcctgaatggaataagccttgctcccaggcttgtgggagctgmgttagggagggagaccgtgataccattctgcacattaactgtcactttaaacctagatttttggtatggtaatttcccctcagctgtgttcatatcccct

SEQ ID NO: 459953 - DNA, 201 bp, Homo sapiens
aattagggctcttcatcttggtaggtaacacaggagggagtggagcctggggtttaggaagtgtggcaccgttagcatacacagaggaagctcataagtgmtctgcaggagcccaaatggtgctgaggtctgtttcatacgaagagtctcggaggccaggattcagctgaggagacagattcctgtcctcgggtctccctg

SEQ ID NO: 459954 - DNA, 201 bp, Homo sapiens
cagctctgggatgtctctcgagggacccaggctccgtcctgagcctgtggcctgtctccggcagccgcccttgggtgggaaggtcctggctggccccagakgtttttcctaagagcctgtaattctccccggagagataaggcatggttacatggactcatatcacactggcagagaaagcgcctccaggaattaggccac

SEQ ID NO: 459955 - DNA, 201 bp, Homo sapiens
cccctgcacccacctggcaaacctttcactcccagcagctctgggatgtctctcgagggacccaggctccgtcctgagcctgtggcctgtctccggcagcygcccttgggtgggaaggtcctggctggccccagaggtttttcctaagagcctgtaattctccccggagagataaggcatggttacatggactcatatcac

SEQ ID NO: 459956 - DNA, 201 bp, Homo sapiens
tggtggaggggacccggtcagaccatagcaggctagaccgtgtgtggtgacagcaacacggcccagtggcagaggctcctgggggtgggggcattaggggatgaagcaggcctggaggatgggtggatccagagagcactggtgagtggggggggtgcctcagctcagggggcaggcctgcgggatggggggacccctggg

SEQ ID NO: 459957 - DNA, 201 bp, Homo sapiens
tccagcctgggcaacagagtgagacttcatctcaaaaaccaacaaacaaaaaaacagactaaagaaatttttattatgaaaaatgtataacctatttaaarcagagaatggtataaagaatgccacatagccgtcattcagctttaacacatggctaaccttgtttcttctattacattcccaccccattattggattatt

SEQ ID NO: 459958 - DNA, 201 bp, Homo sapiens
ggggggtcactctggtggaggggacccggtcagaccatagcaggctagaccgtgtgtggtgacagcaacacggcccagtggcagaggctcctgggggtggrggcattaggggatgaagcaggcctggaggatgggtggatccagagagcactggtgagtggggggggtgcctcagctcagggggcaggcctgcgggatggg

SEQ ID NO: 459959 - DNA, 201 bp, Homo sapiens
tattaaagttactataaaagttagatcatgatgtctaacacaattaacggcattatttctgactttctttttcctttttttttttttttttttgagacagkgtcttgctctgttgcccaggctggagtgcagtggtgtgatctcagcttactgcaatctctgcttcccaggttcaagcgattctcccacctcaggctcctg

SEQ ID NO: 459960 - DNA, 201 bp, Homo sapiens
ttgcaaatgacaggaaggagcttgacgttttcccctgaaggagaagtccagggaggttctcaggcagcctctctgcaacctggttctagtctcaccagctytgagctttgcagtcccagagggaaaaggctcttcactttcccaatggtttcaacagaagccccagtcatgtgctactctctgaacggagtaggggacctg

SEQ ID NO: 459961 - DNA, 201 bp, Homo sapiens
gagacagattcctgtcctcgggtctccctgccataactctggaagacaaccttgaaccagtggatatgattcttgtaggatattaaatatgtctcttttcrcagtcatgctatttatttactcaacactttttattttttttgagacagagtattgttctgtggcccaggctggagggcagtggcacaatcttggctcact

SEQ ID NO: 459962 - DNA, 201 bp, Homo sapiens
ctatcctcctgcctcggcctcccaagtagctggaattacaggcatgtgccactgcattgagctccatcttttttatttctgtaaagtgaggttgtaatgtyccctctctcattcctgattttcacaattttttttcttttctctttttcccccctttagttagttagtttgtattttgcttggtcagtctagctaaaggtt

SEQ ID NO: 459963 - DNA, 201 bp, Homo sapiens
aatgacaggaaggagcttgacgttttcccctgaaggagaagtccagggaggttctcaggcagcctctctgcaacctggttctagtctcaccagctctgagytttgcagtcccagagggaaaaggctcttcactttcccaatggtttcaacagaagccccagtcatgtgctactctctgaacggagtaggggacctgactgg

SEQ ID NO: 459964 - DNA, 201 bp, Homo sapiens
gtttgcatatgtatagccagttgtcccagcactatgtgttacttttttcaaaaaaaaaaaattgagaaagggtctcactctgttacccaggctggagtgcrgcagcatgatcgtggctcgctgcagccttgacctcccgggctcaagtgatgttcccacctcagcctcctgagtagctgggtctacaggcatgcgccacca

SEQ ID NO: 459965 - DNA, 201 bp, Homo sapiens
caatgtgagatagggatccaacttcatttgtttgcatatgtatagccagttgtcccagcactatgtgttacttttttcaaaaaaaaaaaattgagaaaggstctcactctgttacccaggctggagtgcagcagcatgatcgtggctcgctgcagccttgacctcccgggctcaagtgatgttcccacctcagcctcctga

SEQ ID NO: 459966 - DNA, 201 bp, Homo sapiens
ttttttttttttttttggagacacagttttactctgtcagcaggctggaggggagaggcgcgatctgaactcactgcaacctcacctcctgggttcaagcrattctcctgcctcagcctcctgagtagctgggattacaggcacctgccaccatgcctggctaatttttgtattattactagaaacagggttttgccatgt

SEQ ID NO: 459967 - DNA, 201 bp, Homo sapiens
tttcccagtttccaagggtcaggagcccgggaagctgctctcaggctgctgcggctcaggatcgctgatgaggcctgccgcagccattctcagctgcaccrggtccgggcatccacagccggctcacgcgctggtggtcgccaagcctcagctcttgctggctgttggttcagggcttcggttcccagccaggtggggctc

SEQ ID NO: 459968 - DNA, 201 bp, Homo sapiens
gctgcaccgggtccgggcatccacagccggctcacgcgctggtggtcgccaagcctcagctcttgctggctgttggttcagggcttcggttcccagccagrtggggctctccaaaggagagggcagctcaaaacaacccgctggcttcccccagagcaagtgataggagacaggaagagggagctagagagagccctgaag

SEQ ID NO: 459969 - DNA, 201 bp, Homo sapiens
ccacgctctgtgaaggtacttgtgaacttgcatatttttgctcaggagagatgcaaattatttctgttgtgtagagaaggtaacctcaaagattacagttgtgtgtgtgtgtgtgtgtgtgtgtgtgtgtgtgtgtgtgtgtgtttgagatggagtcttgctctgttgcccaggctggagtgcagtgccatgatcttgact

SEQ ID NO: 459970 - DNA, 201 bp, Homo sapiens
atcgtggctcgctgcagccttgacctcccgggctcaagtgatgttcccacctcagcctcctgagtagctgggtctacaggcatgcgccaccatgctcggctttttttatttattttatttatttatttttatttttattttttgagacagagactcattctgtcacccaggctggagtgcagtggtgcgatctccaacaga

SEQ ID NO: 459971 - DNA, 201 bp, Homo sapiens
ccttaaaaccatcacattgggcttaggatttcaacatacaaattttggggggacataaactttccatccctaacattacccaaatagtatctatatagtcrtttctaaatatacacgtatttagaaatttctaaatagccagtaaacatacaactgacttggccttgatataactgttttcattttcttttattttcattc

SEQ ID NO: 459972 - DNA, 201 bp, Homo sapiens
atttttgcatgctactctatgcggttctttcagccagggaacattgctgagcacccgctcacgtgctgtatggagcgcagactgcagggtgcgaggggcgraggtgatgtgctaggcctgaattcaagagggggcgcagccacaggccccgcgatgccggggtggcctcttgtaacgacgttttaaccgctgacctaagtg

SEQ ID NO: 459973 - DNA, 201 bp, Homo sapiens
ttctttaaatcttatgtttaaacatcatgtgctgctagttgctagtcattttctctatcccctgccccagaccctctctttctcaggaaaggatatccagsgatccgggtcccagttagtcaaggagatataagaggaaggctatgaggctttctgggaaacattttctttttccaagagagaagtgttcagagggaaaag

SEQ ID NO: 459974 - DNA, 201 bp, Homo sapiens
cctgcagcacaggatggcggctggctttcccgagtgggcgcaggtgagccacgctttgctctcccgggtgggcgcaggtgagccattgtttgctctcccgrgtgggcgcaggagagccacgctttgctctcccaggtgagccgccgctcgctgtcccggtgaggggaagtgagccacgctctatgggaatccttcgaatct

SEQ ID NO: 459975 - DNA, 201 bp, Homo sapiens
cagactgcagggtgcgaggggcggaggtgatgtgctaggcctgaattcaagagggggcgcagccacaggccccgcgatgccggggtggcctcttgtaacgwcgttttaaccgctgacctaagtggatccgctcctctcccgccgcccgctccctgcctgcagcacaggatggcggctggctttcccgagtgggcgcaggtg

SEQ ID NO: 459976 - DNA, 201 bp, Homo sapiens
cccgacggctttgtgagtgaaagtgaagagacacttcgaggcaggtgtctgtgctccccattcatccctgtttccgtggctatcttgactttcggggtgaraagtgaggttaggccctgtttccccgacccttccctcgcgccatcacactctagtggcctggcacagccccagaggtcggccgctgtagcccccattgcg

SEQ ID NO: 459977 - DNA, 201 bp, Homo sapiens
gggaacgctgaaaaggactagtgggtggggtgcgagggtggggtcttgcccgaattaaagatggccgcagtcagctctgccccgcgcaatttcacgtcaasttttggagctgcgggagccggccagttggcctcagcgcctccttacggaattggcgtaaggcaaagaggcgcggctggaagaaccagactgagaaagtgc

SEQ ID NO: 459978 - DNA, 201 bp, Homo sapiens
aaatgaatggacacaggaactactgggtaacaaaatactaataaagggctgcgattgtgtgagtttctactgtagcgatgaatgtcgctgtcattggaacrttccccaagtgccttctagtgaaagccttacttcactcggaataacctgtggtcttttcttgaacgtgatggctctcttggttgtattcttcatgcacat

SEQ ID NO: 459979 - DNA, 201 bp, Homo sapiens
cagtgcacacacaaatccaacatgtaacaatgctccagatcatggtaatgtgagttaaaatgattcctgatttctaataaaaataaaacatcttatcttcyctaatgagaaagagcatatcaaaaaatgagacctaacaggaaacaaacaaaggcctgaaatataagtcatttgtttctaatagtacttctaggaattcag

SEQ ID NO: 459980 - DNA, 201 bp, Homo sapiens
ctgcctaccatcaggcattcagaatggtggctgccttctattgggcattcagaagagtggctgtctaccactgggcatttggaatggtggctgccttccaytgggcattcagaatggtgtctgcctaccgctggggcatttagaatggtggctgccttccactgggcattcagaatggctgcctcctccactgggcatttg

SEQ ID NO: 459981 - DNA, 201 bp, Homo sapiens
tgaggcaggggaatcgcttgaacccaggaggcagaggttgcagtgagccaagattgtgccattgcactccagcctgggcagcagagtgagactctatctcaaaaaaaaaaaaaaaaaaaagaaaagaaaagaaaagaaaaaaggaaaaaaagaaagtgggaaggagaagagctggatgagaacttggagctttggacccca

SEQ ID NO: 459982 - DNA, 201 bp, Homo sapiens
gaggcaggggaatcgcttgaacccaggaggcagaggttgcagtgagccaagattgtgccattgcactccagcctgggcagcagagtgagactctatctcaaaaaaaaaaaaaaaaaaaagaaaagaaaagaaaagaaaaaaggaaaaaaagaaagtgggaaggagaagagctggatgagaacttggagctttggaccccaa

SEQ ID NO: 459983 - DNA, 201 bp, Homo sapiens
aggcaggggaatcgcttgaacccaggaggcagaggttgcagtgagccaagattgtgccattgcactccagcctgggcagcagagtgagactctatctcaaaaaaaaaaaaaaaaaaaagaaaagaaaagaaaagaaaaaaggaaaaaaagaaagtgggaaggagaagagctggatgagaacttggagctttggaccccaag

SEQ ID NO: 459984 - DNA, 201 bp, Homo sapiens
ggcaggggaatcgcttgaacccaggaggcagaggttgcagtgagccaagattgtgccattgcactccagcctgggcagcagagtgagactctatctcaaaaaaaaaaaaaaaaaaaagaaaagaaaagaaaagaaaaaaggaaaaaaagaaagtgggaaggagaagagctggatgagaacttggagctttggaccccaagt

SEQ ID NO: 459985 - DNA, 201 bp, Homo sapiens
aacccaggaggcagaggttgcagtgagccaagattgtgccattgcactccagcctgggcagcagagtgagactctatctcaaaaaaaaaaaaaaaaaaaagaaaagaaaagaaaagaaaaaaggaaaaaaagaaagtgggaaggagaagagctggatgagaacttggagctttggaccccaagtttgcaacccttatctct

SEQ ID NO: 459986 - DNA, 201 bp, Homo sapiens
gccctttttttctggaaaacaaaacaagacattccaaggggaggttataagtacacagttgggggaaaaaaaaagtcagactttgttttgttgtttcccaygtaacccagagcaatgaaaggtctttggaaaacaccctatgggcagaaaagggttatcctattctcggatcacaggttttggacctgggctccatgaatg

SEQ ID NO: 459987 - DNA, 201 bp, Homo sapiens
gctgcgtgttctaaggcctgtgctcttacccgctacaccacctgcctgtagagaacacatggctaaccttgggcttcctcctccaccccccaccccccatmctgggcctcttgcgcctggtctccacaggcacatctacatattgctatggttcccatgccatgctgcctgccagggtatggcccaagcagaggctcatgg

SEQ ID NO: 459988 - DNA, 201 bp, Homo sapiens
ctcgtgtctacaggataaacttccaatgccacatagagaatgtaataaggccccacctatatcactcctgcatacttccaaccaccaccattctcttttaycctttagcagtcagagaaatccaatcactacagcccaaccatggcaggttctgaaatatctctgtgtctttgtgtatattcttccctttgcctgaaatac

SEQ ID NO: 459989 - DNA, 201 bp, Homo sapiens
gggctcaaaggagatgactgatctgaaaagcactttggaatgtgtaatacacatattgaagttgaaaagaggcccagaacacttggtgagaggccaagaawaaaaaaatgttaggaaactgtttgcacagtgtgaaaatttctgtttggttttgtaccatcttggcagtctattatatccatcacgtcaaccacaagcttt

SEQ ID NO: 459990 - DNA, 201 bp, Homo sapiens
caccatcctttactgtcctatctggtgtctagaatgaggactctgatgtgcttcaacaaatgaagaggaaatgaactagtgaaccatccataagaaaatayattttaatttcacactcaggttttctttctgtggtttaaagttgatactgatttttggacatcagggtttactatacatacaaacttttgggtaagagaa

SEQ ID NO: 459991 - DNA, 201 bp, Homo sapiens
agtcaatttcatgggtcctctgtcgccctaaccttttgttttccacactcaccatcctttactgtcctatctggtgtctagaatgaggactctgatgtgcytcaacaaatgaagaggaaatgaactagtgaaccatccataagaaaatacattttaatttcacactcaggttttctttctgtggtttaaagttgatactga

SEQ ID NO: 459992 - DNA, 201 bp, Homo sapiens
  misc_feature (1)...(201): n = A,T,C or G
agtggcagcagcacttctctgcactctgagaaggaaaacacagacagctcacacacagcagtgccacctcctgaactgcctgtctccttcctgcaactctncctcgaccagtaccagtagctctaagctctgcaatcagccctgcagggatgcagcccctccaggccacccaggaacacctggttttaggcacggaacttt

SEQ ID NO: 459993 - DNA, 201 bp, Homo sapiens
atataatgacttattttcctttgggtagatgcccaggagtggaattgctggattgaatggtacttctacttttagttctttaaacatgtttcatagttgtyatactaataatttgcattccctgtttttcatagtctgtttttcatagtttttcatactgtttttcatagtcgtcgtactaataatttgcattcccccagc

SEQ ID NO: 459994 - DNA, 201 bp, Homo sapiens
  misc_feature (1)...(201): n = A,T,C or G
ccttcctgtccagcacctccaggatgttgctcagaagctgcgagcttgcctcgtggtcaggcttgttggagttgtcatctaactggccgctgagctggtcngtcagcagtggcagcagcacttctctgcactctgagaaggaaaacacagacagctcacacacagcagtgccacctcctgaactgcctgtctccttcctgc

SEQ ID NO: 459995 - DNA, 201 bp, Homo sapiens
cctcggcctcccaaagtgctggggttacaggcgtgagccaccacgcccggccttagccctgtgttttcaagagggatgggggccaggtcacagagaaaacrcaagatgagaaaacataatttccattaggttccagagaaagtatcagtgtccaagaggatatggaaatgagaacttctcagcagctcagaaatatcaggt

SEQ ID NO: 459996 - DNA, 201 bp, Homo sapiens
gaagtcataactaattatatcttctagaatatgccctgaacagcaaaattaactcttttccaattaagtttcctcatctgccatctaggtttggaactacsttctgctgagaaatactagaaaaggtttctttccctttgtgggattaaaccggagggttatgaaatgaaatggttgaagtgacccaaattgctaggatat

SEQ ID NO: 459997 - DNA, 201 bp, Homo sapiens
aattctgacatcttcagatgctcccataaatgagggattatgcctgcctacaggagttgacttaaaagaagcctaattccttttattctgcctcaacccaytgggatccatcaatatggagccagatagaaactttatggagtgaagaaagaggagctcactctccagaacattcatggttctaagcattcaacagataaa

SEQ ID NO: 459998 - DNA, 201 bp, Homo sapiens
gatgtatttatatctaaaccacaacatacatttatttagggagagaataaaaatagagtacttctatggtactatattcacttataactcatctttctgcrgttttctgcagttttacaaatttttttatgtattcatcaatgtgtgttttattgctttaattagagtgtcaattaccaaaggttcataagtcgtgctctg

SEQ ID NO: 459999 - DNA, 201 bp, Homo sapiens
gcagggaacacaggatttgactccattccttctgactcagtttcactttctttaaggaacctcagatagatgagttttgtctttagatctctttttggctyttccctacaaagcaatctcttgtccaaaagtggaaaatggtctcacagaataatatataactttatgaagaaaatagttgaaaatgatcagtcataacac

SEQ ID NO: 460000 - DNA, 201 bp, Homo sapiens
aacaggaaacaaacaaaggcctgaaatataagtcatttgtttctaatagtacttctaggaattcagcctaaaacaataaccagagagatgtaaacaaatayttatgtgagaagatattcacacaatcacttataatagtgaaatattgaaaactacaaagttgcaacaataaacactagttaatatgtttaactgcttacc

SEQ ID NO: 460001 - DNA, 201 bp, Homo sapiens
tcactggtgttcttgctgacaagtcagtgggcagcaatctacaggatgtggcttaagccactgtcataagaagatcatggaccaatccagctacattcctwtcactatttatcacattctgcacaataactggaaggcaacgggtgggtgtggcaggcacacacaatgccatggtgagctgagtgctctggggaggaatgc

SEQ ID NO: 460002 - DNA, 201 bp, Homo sapiens
gcagcagcacttctctgcactctgagaaggaaaacacagacagctcacacacagcagtgccacctcctgaactgcctgtctccttcctgcaactctccctygaccagtaccagtagctctaagctctgcaatcagccctgcagggatgcagcccctccaggccacccaggaacacctggttttaggcacggaactttaccc

SEQ ID NO: 460003 - DNA, 201 bp, Homo sapiens
tagagagactattatgtgtcaggcactatgttaaatgctgtgaagaaaccaactcaagccagcatccttggcctcagggagctgactatctcaaagacagsggagtcgatgcccaggtaacctaacgggcaggaggaaggaggctctggaaaggtgttttctctaatccaaggatgcagctaatgaaacattccatgacat

SEQ ID NO: 460004 - DNA, 201 bp, Homo sapiens
tttctgtaatcactgtggacagccacatagcaccggaggtgcgtgggaagagaaccctggactcacgatgctcagcttcagtcatttttttaaaccaaatwtaagaagtcttcaggttaccaggaccagtaaaggcaacttacgatgatgtcttgtctggttttgaaagtgctgatgtagtggctatagtggctgtcgtcc

SEQ ID NO: 460005 - DNA, 201 bp, Homo sapiens
ttgaagcctctcttgcaacatggccataaagagcaaaaaataaatattaatagtaaagttcacatttgagccttcagggattatatatttcatattttttwaaaaaattatgataataaagatggtgactttgcacttctgggtaaaatgagggacaaaaaataaaaatttgtcacctgtagtgcattgggatcagtttgc

SEQ ID NO: 460006 - DNA, 201 bp, Homo sapiens
agagagactattatgtgtcaggcactatgttaaatgctgtgaagaaaccaactcaagccagcatccttggcctcagggagctgactatctcaaagacaggrgagtcgatgcccaggtaacctaacgggcaggaggaaggaggctctggaaaggtgttttctctaatccaaggatgcagctaatgaaacattccatgacatt

SEQ ID NO: 460007 - DNA, 201 bp, Homo sapiens
gaaggaaaaggaaagcacaaatccaagactccttagaccaccaactgacaaaaacactatgtgagccccatgaacttggcttttcccacccactgagccaygcaggtatcccaccacactggaaacacgctgcattctaaaggtccaaaggccacgtgctttgcggtttctgcttcaaaccacctccttccaggtctgagt

SEQ ID NO: 460008 - DNA, 201 bp, Homo sapiens
cctaaagctgcaactgaccttcctcctcagctgtggcattcaggtaaaatcctgtcctgaaatttcaccccaccaaggtgaaaacgatgcttgctttgagmctttcagcttcttcccctccaccctcacctctggctttcccagattctgatatcacttatccctgatctgatttcaattcttgcaatgggttgtaggttt

SEQ ID NO: 460009 - DNA, 201 bp, Homo sapiens
atgtcagctgtggacagtatacaccccataaccatactgaagaccacagtgggggtggccctagtgactctaagactactcaattgctctatcggtgcaamaggacccctgtttttctctattactaaatgacaccactgacttcaggtttcgttcctgaaatactcacagtttttccagaagaaccttgtattgttcgtc

SEQ ID NO: 460010 - DNA, 201 bp, Homo sapiens
tcccagtactttgggaggccaagttgggcagatcacttgaggtcaggagtttgaggccagcctggccaacattgtgaaaccccacctctaccaaaaatacaaaaaaaaaaaaaaattagctgggtgtggtgatgtacacctgtaatcccagctactcagggggctgaggcaggagaatcacttgaacctgggaagcagagg

SEQ ID NO: 460011 - DNA, 201 bp, Homo sapiens
gtgagaggccaagaataaaaaaatgttaggaaactgtttgcacagtgtgaaaatttctgtttggttttgtaccatcttggcagtctattatatccatcacrtcaaccacaagctttgctattcaaattctcatacatcactgagtttcttaatgataaatgctcttaatacagaattataattactgattcatttcttact

SEQ ID NO: 460012 - DNA, 201 bp, Homo sapiens
atgctagtctcgtgatagtgagtgagttctcacgagatctgatggttttacaaggggttttcctcctttttgcttggcacttcttgctgccgccatgtgaygaaggacgtttgcttcctcttctgccatgattgtaggtttcctgaggcctccccagccatgctgaactgtgagtcaattaaacctctttcctctataaac

SEQ ID NO: 460013 - DNA, 201 bp, Homo sapiens
caaagtctccttttcacttatcatggttctgttctgctgatatgtgtccactaagtctgacaggcaagctctccattattatgtattttttgtttttttcsagacggagtctcgctctgtcaccaggctggagtgcagtggcgcgatctcagctcactgaaagctctgcctccggggttcaagtgattccccctgcctcag

SEQ ID NO: 460014 - DNA, 201 bp, Homo sapiens
ccaacccagcctacaaaaccatttgttccactttagccactgaactgcccgtgccgatgctggcctgctctaccataagggccttccaggacaagaccccytagtcttcgctgatacatgcttgccttaattaaagtactctacttgtctccaaaagatctgtccaccaactcaaaagtgggttctttctcataagtagaa

SEQ ID NO: 460015 - DNA, 201 bp, Homo sapiens
gtttattttttaggcctggtggggtggttcacacctgtaatcccagcactttgggaggccaaggtgggcggatcacttgaggtcaggagtttgagaccagkctggccaacatggtgaaaccccatctctattaaaaatacaaaaattagccaggcatggtggtgggcacctataatcccagctactcgggaggctgaggca

SEQ ID NO: 460016 - DNA, 201 bp, Homo sapiens
atgacaattaccatgagagcactgaagagacgacgctagagaagggagtagagagcccgaggtggagcaaaggcaattaccctgggaaaatcaagatcacragcacataaattaggacctctggagcaggaagatcctcactttacagatgatgggtttgaggcaaagggatttaaagacatttcccaaagttcacacagc

SEQ ID NO: 460017 - DNA, 201 bp, Homo sapiens
cctacaaaaccatttgttccactttagccactgaactgcccgtgccgatgctggcctgctctaccataagggccttccaggacaagaccccttagtcttcrctgatacatgcttgccttaattaaagtactctacttgtctccaaaagatctgtccaccaactcaaaagtgggttctttctcataagtagaaatcaagaga

SEQ ID NO: 460018 - DNA, 201 bp, Homo sapiens
tttattttttaggcctggtggggtggttcacacctgtaatcccagcactttgggaggccaaggtgggcggatcacttgaggtcaggagtttgagaccagtmtggccaacatggtgaaaccccatctctattaaaaatacaaaaattagccaggcatggtggtgggcacctataatcccagctactcgggaggctgaggcag

SEQ ID NO: 460019 - DNA, 201 bp, Homo sapiens
cacaaatcaactttcacttccagacacacagacaaatacatctcagggttatctggattaaaataaaaaaaagactttatcgtgggatgcttatcactcaraggttgtgatcaggcctgttcaaggctagacactcacccaggttataccacatgtcccggattctaaagccgatttcctttctcatgtccccatatctag

SEQ ID NO: 460020 - DNA, 201 bp, Homo sapiens
aagcaaccaggggacgcacattgccagtctcttccccagctcaggttcttctttaataacatataagggaaaagtaaccacacgcaggccatcacagacartgtgtaatgaagcaactctcctagtcaatttcatgggtcctctgtcgccctaaccttttgttttccacactcaccatcctttactgtcctatctggtgtc

SEQ ID NO: 460021 - DNA, 201 bp, Homo sapiens
ttattttttaggcctggtggggtggttcacacctgtaatcccagcactttgggaggccaaggtgggcggatcacttgaggtcaggagtttgagaccagtcyggccaacatggtgaaaccccatctctattaaaaatacaaaaattagccaggcatggtggtgggcacctataatcccagctactcgggaggctgaggcagg

SEQ ID NO: 460022 - DNA, 201 bp, Homo sapiens
tgaggcaggaaaattgcttgaacctgggaggcagagacgcagtgagccgagattctgccactgcactccagcctgggtgacagagccagagcctgtctcaaaaaaaaaaaaaaaaaaaaaaagtttattttttcaattataaagcagtataaacttattgtactaaggcctttgatatatatatattgccaaattatcata

SEQ ID NO: 460023 - DNA, 201 bp, Homo sapiens
gagattctgccactgcactccagcctgggtgacagagccagagcctgtctcaaaaaaaaaaaaaaaaaaaaaaagtttattttttcaattataaagcagtrtaaacttattgtactaaggcctttgatatatatatattgccaaattatcatatagcttgttttcccaacggtgtctaacacaatttgtttctccaagacc

SEQ ID NO: 460024 - DNA, 201 bp, Homo sapiens
cacctgtcacctatattacaaaatttttaaagcttgggacttgacatttaatttgcatatatatatatatatatatatatatatatataatcttcatatakagggatttaaaattttatctagtaaaattgttttcttgtattttaactataaaaaatccatgaatcctattcctcctcaaatcagttatctatttattat

SEQ ID NO: 460025 - DNA, 201 bp, Homo sapiens
tttgtgtattttttttaagacagggtcttgccatgtttctcaggctggtctccaactcctgggatcaagcaatctgctaggttcagcctcccgaagtgctrggatcacaggcatgagccaccgcacccagccccaaattgttaactaattttctaaataacatttactaaaaaccttcattttccctttagaaaggtaatg

SEQ ID NO: 460026 - DNA, 201 bp, Homo sapiens
tgtgacaggcatatgtgctttaggaaatgaaaaaacacaggaaaacctttttcatgtgaaaacagtgaaatctgaggagacattttccaaattcatatagytctcttgccatggccaagaattctagaagcaggtaggtgagtcacatgcctacctgaagttcaaagcttgcctgatccatgaagaatcttgtgagaactt

SEQ ID NO: 460027 - DNA, 201 bp, Homo sapiens
ttaaaacaggttagaggctgggtgcagtggctcatgcctgtaatcccagcactttaggatgctaaggcgggtggatcatttgaggtcaggagatcaagacyagcccggccaacatggcaaaacctcgtctctactaaaaatacaaaaattagctgggtgtcagggcacacacttgtaaccccagctatttgggaggctgag

SEQ ID NO: 460028 - DNA, 201 bp, Homo sapiens
aggctacagtgcagtggcgatcatggctgactgtagcctcgacttccctggggctcaagcgatcctcacatcttagcctcctgagtagctgggattacagrcgcatgtcaccatgcctggctaatttttgtgtattttttttaagacagggtcttgccatgtttctcaggctggtctccaactcctgggatcaagcaatct

SEQ ID NO: 460029 - DNA, 201 bp, Homo sapiens
atagaattccatggagaaatgtctgaaatacttagattagttaaacaaatcttaacggggaggaaggctagcaggaaaagaggtggcaacactgagcatgraggagaggagggcaagcgatgatgatgaaaactccctgctagaatacctgtgatatgctttggctgtgtccccacccaaatctcatcttgaattgtagtt

SEQ ID NO: 460030 - DNA, 201 bp, Homo sapiens
aacacgctgcattctaaaggtccaaaggccacgtgctttgcggtttctgcttcaaaccacctccttccaggtctgagtgaagaaatctcattaacagctawgaagtgtggaatcctatagacaggacacctcaatgagattaccagtgaagatgtaacaacttgtggggctttgggtttcttgttgagacagagctgtagt

SEQ ID NO: 460031 - DNA, 201 bp, Homo sapiens
tgatgggaagttatccaaagactagtgtcaacatgacaacagtgtgctaatccagcggcacatcctgtccactgctctgcaaagtctaataacaccttcakggacgtctgaagggccactaataatcccctgaagggaaggtgccgtgaagccacagccggaggcctaactcagcttcttagatgagtgcttcacagcaac

SEQ ID NO: 460032 - DNA, 201 bp, Homo sapiens
ggccatctactcagcatgacagaggcagaaagtggaaaatctagaacaaagagactggagtacgcacagatgatgggaagttatccaaagactagtgtcamcatgacaacagtgtgctaatccagcggcacatcctgtccactgctctgcaaagtctaataacaccttcatggacgtctgaagggccactaataatcccct

SEQ ID NO: 460033 - DNA, 201 bp, Homo sapiens
accttgggcttcctcctccaccccccaccccccatactgggcctcttgcgcctggtctccacaggcacatctacatattgctatggttcccatgccatgcygcctgccagggtatggcccaagcagaggctcatggagaccttcagctaaagccacgtagtctaacacggcattgagagtccaccatggaaccaactaata

SEQ ID NO: 460034 - DNA, 201 bp, Homo sapiens
agtggaatggtcagaattcaaacccagagctgcgtgttctaaggcctgtgctcttacccgctacaccacctgcctgtagagaacacatggctaaccttggscttcctcctccaccccccaccccccatactgggcctcttgcgcctggtctccacaggcacatctacatattgctatggttcccatgccatgctgcctgcc

SEQ ID NO: 460035 - DNA, 201 bp, Homo sapiens
taactacacttttttgtctatcttggcaccccttaaggcagagctcttgcctgtacctcactcaaactgtctacaaggccaaaggcaacagtctctacacrgcatatgggagacagaatttctagcgcaagtcccctaggcagctcattcttggtttactacatccagtagggttccttacacattacttaagttaaataa

SEQ ID NO: 460036 - DNA, 201 bp, Homo sapiens
ccaaagtctccttttcacttatcatggttctgttctgctgatatgtgtccactaagtctgacaggcaagctctccattattatgtattttttgtttttttsgagacggagtctcgctctgtcaccaggctggagtgcagtggcgcgatctcagctcactgaaagctctgcctccggggttcaagtgattccccctgcctca

SEQ ID NO: 460037 - DNA, 201 bp, Homo sapiens
catgcctgtaatcccagcactttaggatgctaaggcgggtggatcatttgaggtcaggagatcaagactagcccggccaacatggcaaaacctcgtctctrctaaaaatacaaaaattagctgggtgtcagggcacacacttgtaaccccagctatttgggaggctgaggtaggacaatcacttgaacctgggaggtggag

SEQ ID NO: 460038 - DNA, 201 bp, Homo sapiens
atttgggaggctgaggtaggacaatcacttgaacctgggaggtggaggtcgcagtgagccgagatagcacccctgcactccagcctggctgacagagtgasaccctgtctcaaaacaaaataaataaacaggttagtttaataaattgtttattagttttactaaaatttgagtaaaccctcttgggttttgtagatatgc

SEQ ID NO: 460039 - DNA, 201 bp, Homo sapiens
gagtttcaccatgttggccaggctggtctcgaactcctgacctcaggtgatctgcccgcctcagccttccaaagtgctgatattacaggcatgagccaccrcacccagcttcctaagtcattcttacccttcaatagtcaatgggtggaaaagacagatcagttaagctatagattttatttttgcacaagtgattaacag

SEQ ID NO: 460040 - DNA, 201 bp, Homo sapiens
accagcatttgactcccaccagataaacaatgtcagctgtggacagtatacaccccataaccatactgaagaccacagtgggggtggccctagtgactctragactactcaattgctctatcggtgcaacaggacccctgtttttctctattactaaatgacaccactgacttcaggtttcgttcctgaaatactcacagt

SEQ ID NO: 460041 - DNA, 201 bp, Homo sapiens
tcatttacttgtttcccatttccctgaatgaaagtgattcataaaatcagcctctccaggagatgctgctttcacttccatttacataacatttccttagkgtggccctaaatagttgtgcaagttacacgctgtgccttgtggggagggtatgaaatgaataaggctcctctgagcctttagagatttctattgtggggg

SEQ ID NO: 460042 - DNA, 201 bp, Homo sapiens
aaacacgtgggttgtctctagtttttttgctatcataagcaattccgccatgaacattctcatacgtctcctggtatacaggtagagcagcttctctgggrtagaaaactaaggtgggatttctggggcatcaggaagaatatcttcaaccatattaaatattatgcaaagtcactgtcctcattttacattcttgtcaga

SEQ ID NO: 460043 - DNA, 201 bp, Homo sapiens
atttacttgtttcccatttccctgaatgaaagtgattcataaaatcagcctctccaggagatgctgctttcacttccatttacataacatttccttagtgkggccctaaatagttgtgcaagttacacgctgtgccttgtggggagggtatgaaatgaataaggctcctctgagcctttagagatttctattgtgggggtg

SEQ ID NO: 460044 - DNA, 201 bp, Homo sapiens
atcattgcaccactgcactccagcctgggcaacagagagagaccctatctcttaaaaacaaacaccaaaaacaaattgtaataataacaaccatgaacacyagagcagccaatatttattagtcatgaactctgcaacagatgctatgttagcacatcatctcctgtaattctcatgatgatatcaaaaaatagatgttat

SEQ ID NO: 460045 - DNA, 201 bp, Homo sapiens
tgaggttgcctgagcaactaaatggatgggaatgttattagtaacatggtaacaaagtgaggtaggatgggctggggaggagcaaagagtgagaaataaargttcctgttaccgccttgttcagtttgagctgcatattggccaatcaaagtttatatgtaaatccaaagttagagaaggtgctcagggctagaaataatt

SEQ ID NO: 460046 - DNA, 201 bp, Homo sapiens
aagttacacgctgtgccttgtggggagggtatgaaatgaataaggctcctctgagcctttagagatttctattgtgggggtgcgggtgagtggtacataawtttttttttttttttttgagacagagtctcgctctgttgcccaagctggagtgcagtggtgtgatcttggctcactgcaacctctgcctcccgggttcaa

SEQ ID NO: 460047 - DNA, 201 bp, Homo sapiens
tttgtaactagtatttatttttactctgatatttttgtgactaaattaaatagaatttcttatttataatctctaaatagcttccattgttaaagaacagkcattaaatatcatttattttaaaacaggttagaggctgggtgcagtggctcatgcctgtaatcccagcactttaggatgctaaggcgggtggatcatttg

SEQ ID NO: 460048 - DNA, 201 bp, Homo sapiens
ggagggtatgaaatgaataaggctcctctgagcctttagagatttctattgtgggggtgcgggtgagtggtacataaatttttttttttttttttgagacagagtctcgctctgttgcccaagctggagtgcagtggtgtgatcttggctcactgcaacctctgcctcccgggttcaagtgattctcccgcctcagcctcc

SEQ ID NO: 460049 - DNA, 201 bp, Homo sapiens
aaatgccaccactctgcacctcctccttgcctccatctgctgtgttctctagggccaggctggccaggaaaataccagcatttgactcccaccagataaayaatgtcagctgtggacagtatacaccccataaccatactgaagaccacagtgggggtggccctagtgactctaagactactcaattgctctatcggtgca

SEQ ID NO: 460050 - DNA, 201 bp, Homo sapiens
cccacctatattaagaactaaaccaaaccaaacctgaacttggcatcataagacctcataatctaacagtgtccttgcagacaacagcataacaccatccrcagatggggcacaggaggtcagtttacagaacaaacaagaagagccactcagggccacatcccaatttaggtaattgaaggtagatctgagactgcaaac

SEQ ID NO: 460051 - DNA, 201 bp, Homo sapiens
aagacaccggctccacaaaggtgcctcagggcgcctctgtgtttgtgggatctacctagagctgagctgtagggtgcaggggcggcctgacagtaccctcscatcacaccggaggcatgtcacataccagcacgttcacagtgcagctcatacggttctccttgctctcatcttgcatgatgatggttctatagtccagca

SEQ ID NO: 460052 - DNA, 201 bp, Homo sapiens
tattaagtaattagttgaagacttacctcactaacaacatgggtagccactaaatagtaatttctgtgatacctaaaatattgctctcaatgtaaacaaayggaagaagccccttcccgatcttaactttaaaaggacacttactttttaacaattttgttgcgcttggcttgtgagaaggtttcaagctgaagggactca

SEQ ID NO: 460053 - DNA, 201 bp, Homo sapiens
tatccttgcttggggtgaaggtgaccaggtttttagatgcttgaagctctttttcttccatctccatcttggttccaggcagggtcaggtagaatttagcrtcttccatttttttgttgtcaccctaaaaggaagcatgttaggaacaccaaatgatggccaaaatctcttatatgcaaataaaaacaatttctatcatgc

SEQ ID NO: 460054 - DNA, 201 bp, Homo sapiens
ccagacacacagacaaatacatctcagggttatctggattaaaataaaaaaaagactttatcgtgggatgcttatcactcagaggttgtgatcaggcctgytcaaggctagacactcacccaggttataccacatgtcccggattctaaagccgatttcctttctcatgtccccatatctaggaagaagatcataaactag

SEQ ID NO: 460055 - DNA, 201 bp, Homo sapiens
tacctaataagacccagccccatatagtccagccctgtgagcctaaccaaggagcccagaaaggctgagcaagaagcttatttgtgtcagtgtattcaccrctcctaccattctgggtgagctttgtggagcagatgagggtggcaatctgaaagctgtctttagtgctatccttgcttggggtgaaggtgaccaggtttt

SEQ ID NO: 460056 - DNA, 201 bp, Homo sapiens
gctgggcatttcccatgcatggagccaagcaacacttaattaaccctcaaggtgggtactatcttacagatgaggagactgaagttcagtgaggttaaacygcttgccccaaattgcatacaagggagtggaatggtcagaattcaaacccagagctgcgtgttctaaggcctgtgctcttacccgctacaccacctgcct

SEQ ID NO: 460057 - DNA, 201 bp, Homo sapiens
gtttaatgttctgggagttggaacgccaatttaacaagcctaacaggtcaactaggaagaacaaccacaaacattagatacaggtgagaacaacccagacmatttcaggacatagctaaagaattctctagaacaggtaattgctctcaatagtggctaattcaagatgccttatatattcttttaatttactatctccta

SEQ ID NO: 460058 - DNA, 201 bp, Homo sapiens
attggccattctgttaacttttcttctaaatccataagaattcatggtttgtgaagcaaggattgaatttagatacttgttatttgcttcagatacagacyctctatttaactcctggaaatctaaattaatgagacggcatgatggaactcacagggaatcccaaagcctggttttatccaccacttcccaagggccttc

SEQ ID NO: 460059 - DNA, 201 bp, Homo sapiens
acagaaatctgggtacaactagtttaaatcaaagaggtttaaaatagcattttttaaaaaactagcacacttgtttaacaacgtagattttatatttacartgaatgatttaattttaaatggtgaaccaattaggtataattagataggtatatatatgtaggtatgtgtatttctaactatgaatatataaacatacct

SEQ ID NO: 460060 - DNA, 201 bp, Homo sapiens
agtgatccacctgcctcagcctcccaaagtgctgagattacaggcatgagtcaccacatccggcctcattatatattttaagtgcttccaccaatttattrgccattctgttaacttttcttctaaatccataagaattcatggtttgtgaagcaaggattgaatttagatacttgttatttgcttcagatacagactctc

SEQ ID NO: 460061 - DNA, 201 bp, Homo sapiens
actgaagataagaaaaacggagaggttattttgatgctttcattcagccccacaccacagaaatctgggtacaactagtttaaatcaaagaggtttaaaayagcattttttaaaaaactagcacacttgtttaacaacgtagattttatatttacaatgaatgatttaattttaaatggtgaaccaattaggtataattag

SEQ ID NO: 460062 - DNA, 201 bp, Homo sapiens
gtgtgtgtgtgcaactgtggattctcccctggttttatggcgagttagacatacccaccctcagttctgaaatcctagacataattaatgaattcaaattygtttcatcatatattttatttacttatttatttatttatttcgagatggagtcttgctttgtcgcccaggctggagtgcagcggcacaatctcgacttac

SEQ ID NO: 460063 - DNA, 201 bp, Homo sapiens
agaaatagaacaatcagagttgaaatcaaagctaaaatgttttgaaggcatttttattagttagctaaatttagaccttttccactgggattcttgaaagycctgtccagtttctctggcactaacctacacagttctgcctggacacagtatgtgagagacaggaggcccaggtcctattgctaaccatatttttctgag

SEQ ID NO: 460064 - DNA, 201 bp, Homo sapiens
  misc_feature (1)...(201): n = A,T,C or G
catggccaagaattctagaagcaggtaggtgagtcacatgcctacctgaagttcaaagcttgcctgatccatgaagaatcttgtgagaacttcagcaaacngatttatagcacggagaaaaaccctgcggaaggaaaacaccagataaagaagccaactgtatgtcctttgaaaccttttcccacctatattaagaactaa

SEQ ID NO: 460065 - DNA, 201 bp, Homo sapiens
agaactgttctttagaaccaaactcatttgtcggtaggagagttacctgtgtgcttatttgtagccatgtgtgtctatgtgcatttgtgtaaatatacaargggtcaactccaaatgtttatagcgacaaggaggactatttatatttttgatcttctactattactctttaagattttttttttacatatgttaccttta

SEQ ID NO: 460066 - DNA, 201 bp, Homo sapiens
ttcacactgacttcctagaactgaatcaaaaggaaaaccccacctctccacacccaagtaacaaaaggatcagaggctacccctttgcactctgtggcagwtgaaaaattgaaagtacctctgattagtcccctcccacaattggtgggagggtcagactggtcacatgctactccttcatttacatagggtgtaaccaag

SEQ ID NO: 460067 - DNA, 201 bp, Homo sapiens
aaatggattttttttcctttattttctgtaaatcatactaaaattcataagctatgcatgaaccatgattcactttgtttctccctcatgatggccaattytaagcggtcccagaacatccttaccacagcctaagaagagttacccatgatgctgccaggctgaccttgatcttgacggcttcctccagaggcctgtcca

SEQ ID NO: 460068 - DNA, 201 bp, Homo sapiens
tgaatgaagtatgatcatacagtactgtgactaatgcctaacaggtgactaaatacttatatactttatagactgatattggggtaatatacatccattcyagcgtgtttttcaaaatattcacattggaaggctctacaccatgcactctcaatgggagtgatactgtccacaaagggataaatattggtccttgggagc

SEQ ID NO: 460069 - DNA, 201 bp, Homo sapiens
atgcagttggtcaacactagaaaagttcagggaacatgagaaagcaatggtctagagtagttacaacctgaatgaagggtaggcctgtaaataataataayaataatactaggccagacgtggtggctcatgcctgtaaatcccagcccattaggaagccgaggctggaggattgcctgaggccaagagtttcagaccagc

SEQ ID NO: 460070 - DNA, 201 bp, Homo sapiens
aactttcagatcaacatggacttgcattattaaggttactgcttctctatatagaaagaaatgagttatgatttgactatatgtccatttactaatattaygcggtctgccacttcttaccatatggaaattgccatttccactgaaattgaactcacactgcatcatatcaaagaaaatggggattgtggctttccggag

SEQ ID NO: 460071 - DNA, 201 bp, Homo sapiens
ggccagacgtggtggctcatgcctgtaaatcccagcccattaggaagccgaggctggaggattgcctgaggccaagagtttcagaccagcctgggcaacayagcaagaccctgtctctacaaaaataaaaatgaaaaccagctgggcatggtggtgcacgcctacagtcctagctactagggaggctgaagtgggaggatc

SEQ ID NO: 460072 - DNA, 201 bp, Homo sapiens
agcaaccctgtcagaggcctaacatattttgacccagactcaccaggaggttgccaaggccctcgtagtcaaatactttgctttcgtaagtctcagccaamtctttgctcagcttgatggccttctcccacatcttcagaaaaaggaaagtaaggttaaaagtggagaacaaggcagtcattgattcagtggcaaaagcca

SEQ ID NO: 460073 - DNA, 201 bp, Homo sapiens
aaacaatccaatactcactttgcctttgtcgaaatatgatatgatttcttgatacagcttctctttaagctcttgctgggtataaacatagtaactgtccytctgaagcaaatgaggcacacagggcttgtcagaccactgaaaaggaagaaaagcgacacacggttaatacaacaaatattcagccccccaacatcaaga

SEQ ID NO: 460074 - DNA, 201 bp, Homo sapiens
ctacatcttttttcattctcatttcaagcaaagttgacttttccattgtaaaaaaacaccattcatcctgactttcaacttacggaaacattttcatgagygctaattttagcaaccctgtcagaggcctaacatattttgacccagactcaccaggaggttgccaaggccctcgtagtcaaatactttgctttcgtaagt

SEQ ID NO: 460075 - DNA, 201 bp, Homo sapiens
ccagatcgtgcctcccatcctgcagagtggtgccatccgggttcatcagcttcacgaaggccaccccaaatgctcgctccgatttatctctggctgaaaargcagaaagacatgtctgagcagtgcagagagacaccaggaggcgatggctatgacacgatttcacattttgctcgggggtgcagcgttcaaccatattct

SEQ ID NO: 460076 - DNA, 201 bp, Homo sapiens
gaagacttacctcactaacaacatgggtagccactaaatagtaatttctgtgatacctaaaatattgctctcaatgtaaacaaatggaagaagccccttcmcgatcttaactttaaaaggacacttactttttaacaattttgttgcgcttggcttgtgagaaggtttcaagctgaagggactcatgggtgagaaatgcaa

SEQ ID NO: 460077 - DNA, 201 bp, Homo sapiens
tgaaggagtgtgctttgtgaagcgctatgaatgaggaggtactatgcctgcaatttggggaagctgccagcagaggcgcagctgttcttggggatgggcamgctgacagccaaggtccgtctccaggtacagatttgataaaaagcatgggatgactgatgggaagatggttgggccttaagaaaagagagctgaacctgg

SEQ ID NO: 460078 - DNA, 201 bp, Homo sapiens
aattttctacagacaggtgttgccttaggaaagacatgtagcaaaaaaatcttttccaggctctgggttgcactgtctgactctatctctaattgctttayaaaatgaaatgtaaagtgaactttcagatcaacatggacttgcattattaaggttactgcttctctatatagaaagaaatgagttatgatttgactatat

SEQ ID NO: 460079 - DNA, 201 bp, Homo sapiens
cctatcaaaatcttctaacaaagtctcatgttactttgtcctttgcattacatttgattaaaaacatattatccaaaacattgctttctgttacaactatkcatataaaaatagaataataattcttgtttttctattttacttcagtttcatgtctaagtctctgcagtgagattgcttttgcagaggttcatagatgcg

SEQ ID NO: 460080 - DNA, 201 bp, Homo sapiens
agtaaggtatgacctattatgtcttctgagatctttgctattgtaacacattttataatgagttcaggtactctgaatgctacagaaatgactgttaaccrtgatcacactctaagtagaactatccagtgcatgcttgctcttctgctcaaacaccttatctttactatctcaattaccttttctgtatccttaaaaagt

SEQ ID NO: 460081 - DNA, 201 bp, Homo sapiens
acaatgtcagctgtggacagtatacaccccataaccatactgaagaccacagtgggggtggccctagtgactctaagactactcaattgctctatcggtgmaacaggacccctgtttttctctattactaaatgacaccactgacttcaggtttcgttcctgaaatactcacagtttttccagaagaaccttgtattgttc

SEQ ID NO: 460082 - DNA, 201 bp, Homo sapiens
gataaacaatgtcagctgtggacagtatacaccccataaccatactgaagaccacagtgggggtggccctagtgactctaagactactcaattgctctatyggtgcaacaggacccctgtttttctctattactaaatgacaccactgacttcaggtttcgttcctgaaatactcacagtttttccagaagaaccttgtat

SEQ ID NO: 460083 - DNA, 201 bp, Homo sapiens
actgggcaaaatgccaccactctgcacctcctccttgcctccatctgctgtgttctctagggccaggctggccaggaaaataccagcatttgactcccacsagataaacaatgtcagctgtggacagtatacaccccataaccatactgaagaccacagtgggggtggccctagtgactctaagactactcaattgctcta

SEQ ID NO: 460084 - DNA, 201 bp, Homo sapiens
ccttcctatcctgtgaccttcacttatgctgcgcttctttgtggactcgagttccagttttctttaggactcagctcaagtcccaacatcacttagaatcygagcacacaatgtccttctttcaatgtctgtttttgtttgtgttttattcagtcaacaaacccttgctcaaaaggttcgtgtgtgctctgtgaggactct

SEQ ID NO: 460085 - DNA, 201 bp, Homo sapiens
taccctcccatcacaccggaggcatgtcacataccagcacgttcacagtgcagctcatacggttctccttgctctcatcttgcatgatgatggttctatartccagcaggttctctaagaggctgctgaccaggagggcgaagacctccccagagctggagaggtatttgtgtttccggcaatgttctaggagcctggagg

SEQ ID NO: 460086 - DNA, 201 bp, Homo sapiens
aggattgcttgagcccaggagtttgagaccagcctgggaaacatagcaagatctcatctctttaaaaaaaaaaataaagaaagaaaaagaaaagcggatargttaggggcatgttctgaacagaggggccacatctctcgcttgtggagaatgtgggaggtggtgagtaaaagagagaaattgaagatgactatgaggttg

SEQ ID NO: 460087 - DNA, 201 bp, Homo sapiens
caaagttggtgctggagggtgcaatgactgactgagtatgaacctcctggcccaaggccacgcacctctggggacctgcacattcctctctttttcctggraaacaaatctattcttaccttccagtgggcccagaaaccaatgatcccacacaaattggtctgttttagtttctaaaaaacaaatcaagtaaacaaaaga

SEQ ID NO: 460088 - DNA, 201 bp, Homo sapiens
gcaatcagccctgcagggatgcagcccctccaggccacccaggaacacctggttttaggcacggaactttacccttgttcaatgcgcagatgaatgaattaaaaaaaaaaaaaatgacccttctcacaggtgaaggtgggaacttagcaaaatgtttaaattatttaacaatttctctagcttttcaaaacgccaacctaa

SEQ ID NO: 460089 - DNA, 201 bp, Homo sapiens
ccctgagggtgtatgctgaagtgtgtgcacgttggaattcttctgcgtaacggggcagtgcacaactttcagcagtttctcaaagtgggctcagggactayaaaaggttaaaaagtgcattctgagattcacagaaggcggctgcacttaaccagacacccatgggagaagataaagaaccttccaaggccaggcgcagtg

SEQ ID NO: 460090 - DNA, 201 bp, Homo sapiens
cttaggaagacaccggctccacaaaggtgcctcagggcgcctctgtgtttgtgggatctacctagagctgagctgtagggtgcaggggcggcctgacagtrccctcccatcacaccggaggcatgtcacataccagcacgttcacagtgcagctcatacggttctccttgctctcatcttgcatgatgatggttctatagt

SEQ ID NO: 460091 - DNA, 201 bp, Homo sapiens
attgttgcttttcaaaagtttcacttttccaaagagatcactgtttccctttaacaaatatccccataagaaaaggggatatttatcctcaggatgcaaargcacaagagtgatataatggactttgggaactcagtggggaaggttataggagggtgagggataaaagactacattttgggtacagtgctcgggtgacgg

SEQ ID NO: 460092 - DNA, 201 bp, Homo sapiens
ttataaaagttctgccaggaaaaaaaaggatcacagaatcccaacataaatcaagagctattgacacaaaaatagacaaaccactattgttgcttttcaamagtttcacttttccaaagagatcactgtttccctttaacaaatatccccataagaaaaggggatatttatcctcaggatgcaaaagcacaagagtgatat

SEQ ID NO: 460093 - DNA, 201 bp, Homo sapiens
  misc_feature (1)...(201): n = A,T,C or G
acttcaagctaagactcttgggtgggttttcctgcctcttcctgtacagcctctcctgcccacccaggccagaagttgtctatccttcccctgatccctgncatgacctcacataggcactccttcctgtcgtacttattcatgtatctgtctaaagagtttgtcggttcagggtgaatggagcgtatcatgtacttttag

SEQ ID NO: 460094 - DNA, 201 bp, Homo sapiens
ctctttttcctgggaaacaaatctattcttaccttccagtgggcccagaaaccaatgatcccacacaaattggtctgttttagtttctaaaaaacaaatcragtaaacaaaagagtctccaagatctgtttgttaaaactccagtggcttttaaccttttgagtctgaataactctcctcaggcgaaggagaaatgccttt

SEQ ID NO: 460095 - DNA, 201 bp, Homo sapiens
tattaggtcttggacccctctgggaagctaatgaaagctatggaatctctccccaacaacatgcacgttggttacgtacaagtttgtttcatgttcagggrttcgcagacttcaagctaagactcttgggtgggttttcctgcctcttcctgtacagcctctcctgcccacccaggccagaagttgtctatccttcccctg

SEQ ID NO: 460096 - DNA, 201 bp, Homo sapiens
tcagaagaaagcaaatgcatgaataatctgcaatcatttgtccctggaataccccattttccctgatgctcgtgatgcctttgccaagtctccgtctttcyctctctgtaccctgttccctctccctgctcgcagtctgtttggatggcagctcactcctctctgactcagacaaggtttgcctttttaacccttctttgt

SEQ ID NO: 460097 - DNA, 201 bp, Homo sapiens
caacatctcttcctgcacatactacacagaatgcactatcagggaacatacggcttttgaattttacagttgctgttaataaatgcatttataggttttawgatattaaatactaaaatgtttttcatcctgctctaaagtggacgatgaaacttcagaagaggctgtgcaatgtgatcagcactacccagaataccactt

SEQ ID NO: 460098 - DNA, 201 bp, Homo sapiens
gtagagacagggtttcaccatgctgcccaggctcgagagttgatttagtgttcagctcattccataaccagaccccagcctgcttccctgcctgacccccytccccactactgtacagaagcaattccttcctcttgagccaagaagtcggatcttccccatttcttcaatacactgtgcacctcctgcctccgtgtttct

SEQ ID NO: 460099 - DNA, 201 bp, Homo sapiens
ataagaagttgatattggctagcacatgtcataatctacacaagagaggttaaaattgatatcagagatttgaaggaaaaaccaaatgaatccctctttgmactattcagctgaatttatggaaaatccctgactgcttggaaaaaaatgggaaagaagagaatataggagggaaggacagaactcaaacaggaagccctg

SEQ ID NO: 460100 - DNA, 201 bp, Homo sapiens
tcctaccattctgggtgagctttgtggagcagatgagggtggcaatctgaaagctgtctttagtgctatccttgcttggggtgaaggtgaccaggtttttrgatgcttgaagctctttttcttccatctccatcttggttccaggcagggtcaggtagaatttagcatcttccatttttttgttgtcaccctaaaaggaag

SEQ ID NO: 460101 - DNA, 201 bp, Homo sapiens
ataaaaggaacaaattaggagtataaaaatgaataggaagaggtaaaactaccacaatttgcaaacattatggttgtattcctcacaatgcaaggcagttsactaagaaactgcgacacacaataagagaattaagttacgcagcaggaaaaacaattaatatacttgaaataaaatttatttcagatacacggagactaa

SEQ ID NO: 460102 - DNA, 201 bp, Homo sapiens
caaaatgattcataaactaagatgttaagaaaaatattcctcaggtagatgcatctcaaaagagcagccaactgtggggaaatccccagatattgttggcyaaatgagatcttccagcatctactttatactctaaaatctcagtagaagtgggagctcagcatcagttggaaggcaagaacaaagacaaaactttcaggg

SEQ ID NO: 460103 - DNA, 201 bp, Homo sapiens
gtggggctcaaaggagatgactgatctgaaaagcactttggaatgtgtaatacacatattgaagttgaaaagaggcccagaacacttggtgagaggccaaraataaaaaaatgttaggaaactgtttgcacagtgtgaaaatttctgtttggttttgtaccatcttggcagtctattatatccatcacgtcaaccacaagc

SEQ ID NO: 460104 - DNA, 201 bp, Homo sapiens
ggtttcactgtgttagccaggatggtctcgatctcctgacctcgtgatccatccacctcggcctcccaaagtgctggggttacaggcgtgagccaccacgyccggccttagccctgtgttttcaagagggatgggggccaggtcacagagaaaacgcaagatgagaaaacataatttccattaggttccagagaaagtatc

SEQ ID NO: 460105 - DNA, 201 bp, Homo sapiens
gctatgtccctcaggaatctgtttccagaccttgtcccacagcaaccataaccactgtctctctttcccataaacccaagtccaaccagttggatctcaastaggtggccttttctttctttatcttaaaccttagctttaataccctaatcatttcctaaactgactagtttctcaaagctggtaaatcgcctaaagctg

SEQ ID NO: 460106 - DNA, 201 bp, Homo sapiens
tatacaggtttatccatgtagctctagttaattttttttctcgctgtatagtgtctattcaattgtatgggtgtacacaatttgtttatccactctgctgmtgataaacacgtgggttgtctctagtttttttgctatcataagcaattccgccatgaacattctcatacgtctcctggtatacaggtagagcagcttctc

SEQ ID NO: 460107 - DNA, 201 bp, Homo sapiens
ttgtgctatcccttagactttggagggcactgatattttaaacttaaactttccttctggggatccttgagctttcctagaataataataatagttatatmcaataatagtcatacataataatataataatagtcacttataattattattattattattatttagatggagtctcattctgtcacccaggatggagtgc

SEQ ID NO: 460108 - DNA, 201 bp, Homo sapiens
tcacaaagccatgaaataaacagcagaagcaagaaatttccttcagcttaccttatgtatatgtcctctctcttcttttctttataaaagttctgccaggaaaaaaaaggatcacagaatcccaacataaatcaagagctattgacacaaaaatagacaaaccactattgttgcttttcaaaagtttcacttttccaaaga

SEQ ID NO: 460109 - DNA, 201 bp, Homo sapiens
cttgagcccaggagttcaaggctttagtgagctatcattgcaccactgcactccagcctgggcaacagagagagaccctatctcttaaaaacaaacaccaraaacaaattgtaataataacaaccatgaacactagagcagccaatatttattagtcatgaactctgcaacagatgctatgttagcacatcatctcctgta

SEQ ID NO: 460110 - DNA, 201 bp, Homo sapiens
caaaaatacaaagctcttaccaccttctgtgttggagggaaaaaaacaagaaattcaagtcaagggaattgttatggagtaaatgtttgtgtctcctccarattcatatgtgaagccctaacccccatcgtgatggtattaggagatgcagctcttgagatgtaatgaaggttagatgaggtcatgagggtggggccctgg

SEQ ID NO: 460111 - DNA, 201 bp, Homo sapiens
tccaggtcagaaaggcttcctctggaggtgacgcttcagaagaaccttatggaatagctggaatgctgacagccagaggttatggggaaggcactgctagyggaagaccggtgtgaggcagagcagaccatgtgttcagggactgggcagaggccagtttggttggagtacaggtagcatacacagggaagtagcagaagc

SEQ ID NO: 460112 - DNA, 201 bp, Homo sapiens
gtggcattcaggtaaaatcctgtcctgaaatttcaccccaccaaggtgaaaacgatgcttgctttgagactttcagcttcttcccctccaccctcacctcyggctttcccagattctgatatcacttatccctgatctgatttcaattcttgcaatgggttgtaggtttaagtgctttgtgcgacaaattcaattttctgc

SEQ ID NO: 460113 - DNA, 201 bp, Homo sapiens
agggttgggtgtagtggcttacacctgtaatctcagcactttgggaggccgaggtgggcagcttggccaacatagtgaaatcccatctctactaaaaatayaaaaatttgccgggcatggtggtgtatgcctgtagtcccagctactcgggaggctgaggcaggggaatcgcttgaacccaggaggcagaggttgcagtga

SEQ ID NO: 460114 - DNA, 201 bp, Homo sapiens
gagacagggtcttgctgtattgcccaggctgcagtatgcagtggtccgatcatggctcactgcagccttaagccccagggctcaagtgatccacccacctyagcctcctaagtagctggcacgtgccaccaggcccggctaattttcgtatcttttgtagagacagggtttcaccatgctgcccaggctcgagagttgatt

SEQ ID NO: 460115 - DNA, 201 bp, Homo sapiens
agcaactaaatggatgggaatgttattagtaacatggtaacaaagtgaggtaggatgggctggggaggagcaaagagtgagaaataaaggttcctgttacygccttgttcagtttgagctgcatattggccaatcaaagtttatatgtaaatccaaagttagagaaggtgctcagggctagaaataattacttgggattca

SEQ ID NO: 460116 - DNA, 201 bp, Homo sapiens
aatgtcccaagattgtttatatatacaaaatggcaaaattactgtttttcgaattgataattcaagcaaaaggcttctctttaccatcactggtttttttygtttttgttttgtttccttgtttctatttccttgaagctttgaagggaggagaagcagaaaattttgtttttgttttttaaaaatcagaactacttaatg

SEQ ID NO: 460117 - DNA, 201 bp, Homo sapiens
tcaaagacctgtggccaggtattttaaaaagtcatctgtttctttctagttgcatcaacttgcacactggtgtctacctatatgtggtattcggaacttawaattcttattgagcagccattgcctatattttctcagctcctcactgacttctttatatgagctcagctgacaagcgaatacagctatttggttgccctc

SEQ ID NO: 460118 - DNA, 201 bp, Homo sapiens
caccttcagtatcttgaaagcgggtcccctcccgaggctcttaatttttggaaaacttgatgctgtttcagctgaaaaattagcaagactgttaaaaaaamaagttgaggggagctgtttaagaaactgaaaagtaattgcaaactacattgggtaattgtgactttcagttgttgttctgtatcagttgaatttttgtgc

SEQ ID NO: 460119 - DNA, 201 bp, Homo sapiens
ttgagcagccattgcctatattttctcagctcctcactgacttctttatatgagctcagctgacaagcgaatacagctatttggttgccctctcttcataytggaccatcaacaacagtgttctaactcatccatgatggtctgtgagatgcagactattacacaagattcaagttactcgtaagcaacttttagatagag

SEQ ID NO: 460120 - DNA, 201 bp, Homo sapiens
ttactgtgataatacagctttgcaactagcaaagctgttgcactaacattcataaatataggtggggagaaaattagcattcactaatatttctctacatmaactattcttttaatgtcattttttaaaaaacagttgcaaatagactacataatatacttgggcaaaaaagcaattaagtgaatttcttgaaacactaaa

SEQ ID NO: 460121 - DNA, 201 bp, Homo sapiens
atgttttctcatccccaattagccacatttgaaaagaccttgatttcagtgggagagatgaccataagtttcagaagggccacacaccagacacgaagtgmcttttagtttttctttttttttgaaaaagttactaagactgtgaaatttggctttttttaaccccaataccatgtgccagataaatctttcaccgcgaaa

SEQ ID NO: 460122 - DNA, 201 bp, Homo sapiens
tggggagaaaattagcattcactaatatttctctacatcaactattcttttaatgtcattttttaaaaaacagttgcaaatagactacataatatacttgrgcaaaaaagcaattaagtgaatttcttgaaacactaaatgtatgataaacagcatattatcaacatttacatgagtcacatcaaaatgatgacatcctaa

SEQ ID NO: 460123 - DNA, 201 bp, Homo sapiens
ccaattagccacatttgaaaagaccttgatttcagtgggagagatgaccataagtttcagaagggccacacaccagacacgaagtgccttttagtttttctttttttttgaaaaagttactaagactgtgaaatttggctttttttaaccccaataccatgtgccagataaatctttcaccgcgaaatataatatcctatg

SEQ ID NO: 460124 - DNA, 201 bp, Homo sapiens
aaattagcattcactaatatttctctacatcaactattcttttaatgtcattttttaaaaaacagttgcaaatagactacataatatacttgggcaaaaargcaattaagtgaatttcttgaaacactaaatgtatgataaacagcatattatcaacatttacatgagtcacatcaaaatgatgacatcctaaaacatatt

SEQ ID NO: 460125 - DNA, 201 bp, Homo sapiens
aagtgccttttagtttttctttttttttgaaaaagttactaagactgtgaaatttggctttttttaaccccaataccatgtgccagataaatctttcaccrcgaaatataatatcctatgcttataattttaaaatcctcagtgagctatggaatattgtgcatatttaatacctaccagaaacctagaagtaaatggcat

SEQ ID NO: 460126 - DNA, 201 bp, Homo sapiens
tgcatatttaatacctaccagaaacctagaagtaaatggcatccatgtgtctgtcacaccgactttccaaataacctgattcacccattgctgactgctcyggccctgggctctctgacttcctcagaaaccacctctttggaacttgcatttccacaattttttttaaacttgcacctagagctttctccatcatcccag

SEQ ID NO: 460127 - DNA, 201 bp, Homo sapiens
aatatttctctacatcaactattcttttaatgtcattttttaaaaaacagttgcaaatagactacataatatacttgggcaaaaaagcaattaagtgaatytcttgaaacactaaatgtatgataaacagcatattatcaacatttacatgagtcacatcaaaatgatgacatcctaaaacatattccttttaaaggatag

SEQ ID NO: 460128 - DNA, 201 bp, Homo sapiens
ttcacccattgctgactgctctggccctgggctctctgacttcctcagaaaccacctctttggaacttgcatttccacaattttttttaaacttgcacctmgagctttctccatcatcccagcctctctgcctgattccatcccgtgtaaagtaaactcttctgagaacttgcgatcaccttttaccaaacacatgataag

SEQ ID NO: 460129 - DNA, 201 bp, Homo sapiens
ttcatatattgcaggaaaattaattgtaggtctagtcatcagcttaatcagggatccttttcccattagcttttattaataaaagaatcacaattaggtcrtaaataaacaggcaaattattaattacatgatttgaggcttatgatgaaagcttgtcaaaattagtttgatacacagcaaagttatacgacacactaaaa

SEQ ID NO: 460130 - DNA, 201 bp, Homo sapiens
acaattaggtcgtaaataaacaggcaaattattaattacatgatttgaggcttatgatgaaagcttgtcaaaattagtttgatacacagcaaagttatacracacactaaaaccaactgttcaatggtttttgccttgtgtgaactgcccgtagtgaaaaacaaacaaatttttagtgatgaaagatactataaactatag

SEQ ID NO: 460131 - DNA, 201 bp, Homo sapiens
attaattacatgatttgaggcttatgatgaaagcttgtcaaaattagtttgatacacagcaaagttatacgacacactaaaaccaactgttcaatggtttytgccttgtgtgaactgcccgtagtgaaaaacaaacaaatttttagtgatgaaagatactataaactatagtttggaatgtttcaagaggaagaaggaaaa

SEQ ID NO: 460132 - DNA, 201 bp, Homo sapiens
gaaagtcctacccatgttttctcatccccaattagccacatttgaaaagaccttgatttcagtgggagagatgaccataagtttcagaagggccacacacyagacacgaagtgccttttagtttttctttttttttgaaaaagttactaagactgtgaaatttggctttttttaaccccaataccatgtgccagataaatc

SEQ ID NO: 460133 - DNA, 201 bp, Homo sapiens
aaaacaaccccatcaaaaagtgggcaaaggatatgaacagacacttctcaaaagaagacagtagaggcgacctaaacatggagacagcgggctctggtackgggcagccggcctctctgctggaggctcccgggtccacggatgaccggcttttcctggttaaaggtggaattttccttggtactgttgctgcagcaggaa

SEQ ID NO: 460134 - DNA, 201 bp, Homo sapiens
attaaacatgttttatcagctgagactagactgaagattggggtggagagccaagatggccgaataggaacagctctggtctacagctcccagcatgagcracgcagaagatgggtgatttctgaatttccatctgaggaacgcagtccctcaccagcaacggaacaaagctggatggagaatgactgacgagttgagaga

SEQ ID NO: 460135 - DNA, 201 bp, Homo sapiens
gcaacatgggaaaaagagaaaacaaatgactcctaacacttctgcctcccagcaggtccttatttctcccacctctttcctccttctagcattagagctgkttctaaaaaaggcaatattaatccctgctttgaaacccttgattttacaactaaatggaaactccatagcaatgcagtactgcctcattcccccttccca

SEQ ID NO: 460136 - DNA, 201 bp, Homo sapiens
aaaagaaaacaaactgtagctaattaacttgttgtaagtcaaaaactagtcttgtatagaaaatgttataatccttctaaatttctttgtgttctgcctawataagcaaggtcttaactttttttttttttttttttttttttttgagacagagtcttgctctgttgaccaagctggaatgcagtggttcaatcttggctc

SEQ ID NO: 460137 - DNA, 201 bp, Homo sapiens
caccaggaaatttctgaggggtttgataaatgtagagtgacctgaaatagctcaataaacatactttttgtaatgactaaaggagattttgactccccgcyccccaggggattgagttagggttagaaagaagagtatgctgatgcaggaaaaccttttctgtcccaataagccattagtgttcacttccaagcctcccag

SEQ ID NO: 460138 - DNA, 201 bp, Homo sapiens
ctgattagatagcatgagtgagcttggaactatgtgccagttacttcatttaatactccccacaactttatgaggtggattttttttttttttttttttttgagacagagtcccgctctgttgcccaggctggagtgctttcagtggcgcgatctcgactcactgcaagctccacctcctgggctcacgccattcacctgc

SEQ ID NO: 460139 - DNA, 201 bp, Homo sapiens
caatgcttggtgtgtatctggttttccacaaatgttgaaattaatctgtggtatttagacagaggagtaagcataaaaaataagctcctaaattcatatctgctgttttgagacctccaaatttgtttttccacctttttaaaaaacaaacttggaatatgtttggtaagaaaatctgcaattaaaaagtaatgcagaact

SEQ ID NO: 460140 - DNA, 201 bp, Homo sapiens
tctcctttggtcagcataagtcaactaacctcttaatgttgggaaaaaagaaatcataccaaagatacctggtccaattgcaccagagatatagatccccraaacatggtgtatccacaccattatattacaaagtactgattgacatgccactgaaaggacacaatgactatttactgattagttccaagtgaaacatct

SEQ ID NO: 460141 - DNA, 201 bp, Homo sapiens
taatttcttggcatcaggcagaggttatattccatcttagagtcctaaactgtgtttatgtgatacttaggtaacttgattttttttaacttcagtgatayttgattgaaaaagacaaattttgctgatatttctgtcattcagttgaataatagttttgtgttgtacaaccatatcacaaaatgacacaaattcagactt

SEQ ID NO: 460142 - DNA, 201 bp, Homo sapiens
ttacagcatttgtttacaatggaaccaatgcatgactgaaaagactaaaataatggtttcccaaagaattgcattcattgaatatatagctgtttagcctsactcaggccacagagttacttccttcatgttgctttaaattcagcctaaagtccatcagcttcatatcttgtccagtcatctcttgccatgggacatgat

SEQ ID NO: 460143 - DNA, 201 bp, Homo sapiens
cttacaatgtcatggaaaatataatttctagagagttagatctttgcaatacccagaatattaaaaaatgctcttttaaaaaaattacattgtattccccycttctcaattaccagtccacctatttttttgaagttaaaagctcaaaaatgccagagaccacatgaaatgtacatttatcgttaagttaaaatatgtatt

SEQ ID NO: 460144 - DNA, 201 bp, Homo sapiens
aatgaacctgaggcaccaggaagaggcaatttcctaaatggatatggaagccttgaagaggatgatgtattggcgaatgttactctactaggtccatttaygcagttacaacaggccccataatcacgagtgaccagtgcaaactcacagctgaacacaaggccagagaggctttactcccacctaaggtcttgagccaac

SEQ ID NO: 460145 - DNA, 201 bp, Homo sapiens
atcacagtcagcgtctatatatttgtgcaagaaataagatggtaaggagtatttttagaataaaatttcatttttctctttgtggtggaggggctgtgtgytgtgctgttgatgcttctgctgctaggacttctttgtcttaaccaaaggcttgagaaaatgacatagcagacatttatgagacgtgtttcatggagttgg

SEQ ID NO: 460146 - DNA, 201 bp, Homo sapiens
atgaataatcatcagtgcagagaaaatacaggtactatacaaccaaattattattaataattatattgcttctttttagttgtgtttttggtgatggttaygttttatgagccagacattttacctatgacatatttccttcttgaaattctcaaaattgtcacagtatatgatgaatataatatgcatacacatgtgcta

SEQ ID NO: 460147 - DNA, 201 bp, Homo sapiens
ttttttatgttttgagttttacttgtgggtgcttaatacctattaaataagtaatgataattaatacttacctacaccacagtggtgatttgcaccttaaktgagtgatttgcacctttgtagagctctatagatgaaagctgaagtgcataggacatgcaaagcactttttttgaaatataattttaattagttaaaatt

SEQ ID NO: 460148 - DNA, 201 bp, Homo sapiens
catgttagccaggatggtctcaatctcctgatctcgtgatctgcccgccttggcctcccaaaatgctgggattacaggtgtgagccaccacgcccagcctwattctctttttctaatagttgcactttatcatattttacaaatgtgtgagtctgctatggattagaaattaataagagattttgccacagatagtttgag

SEQ ID NO: 460149 - DNA, 201 bp, Homo sapiens
ccccagagcaggaatccatcctcttcactgatattttcagcacctctggtagttcccagcacaaagaaagtgctgagtgaatgaagaacaaattatttacyctaattacactcaagagactgttgtgtgaggtcagaacatgaagttattaatttataacatgtgatacacctctctaatgtattaattatgtcaggtggc

SEQ ID NO: 460150 - DNA, 201 bp, Homo sapiens
ttgttaactaaattataatctatcaataagtatatgaagttgataactttccaagattaattaaaagctggcacaaacgtaatataatacatatctagagrtaaatattattgagatttatttcctgacattaaaaacaaatttgatacaggccaaacactttgcccttatttgaccttgggattctctgtctacaaactc

SEQ ID NO: 460151 - DNA, 201 bp, Homo sapiens
tctagagataaatattattgagatttatttcctgacattaaaaacaaatttgatacaggccaaacactttgcccttatttgaccttgggattctctgtctrcaaactcccgcccttcaatactcaacaatggctttatatatgccatgtcccatgggaacaaatctgtttctctccaggtagaattcatcactttcttttt

SEQ ID NO: 460152 - DNA, 201 bp, Homo sapiens
aaatattattgagatttatttcctgacattaaaaacaaatttgatacaggccaaacactttgcccttatttgaccttgggattctctgtctacaaactccsgcccttcaatactcaacaatggctttatatatgccatgtcccatgggaacaaatctgtttctctccaggtagaattcatcactttctttttactttttcc

SEQ ID NO: 460153 - DNA, 201 bp, Homo sapiens
tatcagtaagtaacgtgtgaatttgcctaagcaaagctctaaaatgcattttcatcagcttggttcatccaaatatcttctcctttaaagatttatcagcrggaaaattaaaccatattggttatagtataattgcataggtgatataactataaagaaaagctgctaaaggattatcaggcagtgggggaaagaagtagg

SEQ ID NO: 460154 - DNA, 201 bp, Homo sapiens
gcctaagcaaagctctaaaatgcattttcatcagcttggttcatccaaatatcttctcctttaaagatttatcagcgggaaaattaaaccatattggttayagtataattgcataggtgatataactataaagaaaagctgctaaaggattatcaggcagtgggggaaagaagtaggctatgataagaaaggggtatataa

SEQ ID NO: 460155 - DNA, 201 bp, Homo sapiens
tcacatgcctggaagttagaagtctgaaatcaaggtgtcactggggctgcactttttctgaaagctctaggaaagaatctaatctatgcctttctcttggyttctgctgttgcccaaaatccttgacattccttgactcatagatgcatcactccagtctttgtctacattgtcacatggcatttttttctctgcgtctct

SEQ ID NO: 460156 - DNA, 201 bp, Homo sapiens
tctcctcttctcataagggcaccagcatattggattagggctccccctaattcagcatgacctcatctttatttgattacatctgcaaagacccaatttcsaaataaggtcatattcacaggtatagggggctagacttcaatatgtctttttggagtacacaattcaattcataatagcatctttctcagaagccttgtt

SEQ ID NO: 460157 - DNA, 201 bp, Homo sapiens
tttattattttagtaacttgttcagtattaatggtaaagagtgtgcaccatgtgtggcaatgtgtgtgaaagaaagaggaagagaaaaagtgaattatcaraaattaagtgctatcatcaggcctgagttaaatttggccatgtccatttattccattagttaaatgtgcagtaaatgagattcacattgtaaaacaggca

SEQ ID NO: 460158 - DNA, 201 bp, Homo sapiens
aagtaggaaagaaggatctgtgtgttctgtatgggcctagaggcaggacccatttatagtctcagtatttgtttatacttatcatattgcctattagccaytttggcacaaaaaaatctctacagaggtctaacatatggacattcacttgtgtaaagtaaataaaataatgaaatacaaagatgtggaaaaatgttgggt

SEQ ID NO: 460159 - DNA, 201 bp, Homo sapiens
atcatggtcatttatatatttctattttactaagatttttttctcttataaaaataaattataccttctaatagtaaggaaattgcctctgccagtttttrttgtttaatttgttttaatttcaaacattaaaatagcacattaattgatcaaggaatctcaattactttcaaatgctgcaaatatactaatatttattca

SEQ ID NO: 460160 - DNA, 201 bp, Homo sapiens
ggccatgtcctgaccataatgaggaggttttcaggaagcaataaaatggggacagccttcaggagctaatagaaatgtggggactgtccagaatagagaayacccccatttggcatttttatcatttagatctcactgcaattgcaacaaaaatctgggacagctttgttagatgccatcaccgcatggtctagatttaga

SEQ ID NO: 460161 - DNA, 201 bp, Homo sapiens
tttatatttaatattgtgatggaaatatgtttgtttgtaaaagttgagaagttataggaaaacataaagagtaatttaaatcaaccataaccgttctactyagaataagcattcttaacatattggtatatattcttccaaatatacaatcacaaggaccaaaatggaaacatattctaaatatcattcttttccttaaaa

SEQ ID NO: 460162 - DNA, 201 bp, Homo sapiens
aatcgattgctacctttttatattgattataaatatcacatctttaaactagtatcttactgttaaaagagcaaagtgaaagagttgtttacgaagtcttrtaattattttaagcattatttatagttaaactcattgaagaattttagcgattttgtaatttttatacagtaatttttatagtccatatctctgaggaaa

SEQ ID NO: 460163 - DNA, 201 bp, Homo sapiens
cagaaatttgggaagttaagacagcatgactgcctgaggccaggagttcgagactagccttggcaacctagtgagaccctggctttatatatatatatatrtatatatatatatatatagagagagagagagagagagcacttcctatgtactgccattataggtgctgagaatactggagtgaacaaaagagaaaaaata

SEQ ID NO: 460164 - DNA, 201 bp, Homo sapiens
aaatctgttgatcattaagctctatgattgtttgcaattttttctattttattaaaataaatttaacaaagtttctagtagtttgttgaaagactaaaacmaccccttaaatatgtgtttaggatacagatcagacaaaggcagaagactgaaaatatatcttttttatatttgcacggaataaaaagaaatgtgatggac

SEQ ID NO: 460165 - DNA, 201 bp, Homo sapiens
atagttaaactcattgaagaattttagcgattttgtaatttttatacagtaatttttatagtccatatctctgaggaaaatgtgtgttaaaaattagtttyaaaaaatccaaaacattcctaaagtttttataactgttgttatgttcatcaaagcgatatatagtttgccatattagaatagatgatataagatttatga

SEQ ID NO: 460166 - DNA, 201 bp, Homo sapiens; identical to SEQ ID NO: 122879

SEQ ID NO: 460167 - DNA, 201 bp, Homo sapiens; identical to SEQ ID NO: 122880

SEQ ID NO: 460168 - DNA, 201 bp, Homo sapiens
cccagaaatttgggaagttaagacagcatgactgcctgaggccaggagttcgagactagccttggcaacctagtgagaccctggctttatatatatatatrtgtatatatatatatatatagagagagagagagagagagcacttcctatgtactgccattataggtgctgagaatactggagtgaacaaaagagaaaaaa

SEQ ID NO: 460169 - DNA, 201 bp, Homo sapiens; identical to SEQ ID NO: 122881

SEQ ID NO: 460170 - DNA, 201 bp, Homo sapiens; identical to SEQ ID NO: 122882

SEQ ID NO: 460171 - DNA, 201 bp, Homo sapiens; identical to SEQ ID NO: 122884

SEQ ID NO: 460172 - DNA, 201 bp, Homo sapiens; identical to SEQ ID NO: 122883

SEQ ID NO: 460173 - DNA, 201 bp, Homo sapiens; identical to SEQ ID NO: 122887

SEQ ID NO: 460174 - DNA, 201 bp, Homo sapiens; identical to SEQ ID NO: 122885

SEQ ID NO: 460175 - DNA, 201 bp, Homo sapiens; identical to SEQ ID NO: 122889

SEQ ID NO: 460176 - DNA, 201 bp, Homo sapiens; identical to SEQ ID NO: 122888

SEQ ID NO: 460177 - DNA, 201 bp, Homo sapiens
taagagagacagaagcccccagagcaggaatccatcctcttcactgatattttcagcacctctggtagttcccagcacaaagaaagtgctgagtgaatgawgaacaaattatttaccctaattacactcaagagactgttgtgtgaggtcagaacatgaagttattaatttataacatgtgatacacctctctaatgtatt

SEQ ID NO: 460178 - DNA, 201 bp, Homo sapiens; identical to SEQ ID NO: 122891

SEQ ID NO: 460179 - DNA, 201 bp, Homo sapiens; identical to SEQ ID NO: 122890

SEQ ID NO: 460180 - DNA, 201 bp, Homo sapiens; identical to SEQ ID NO: 122892

SEQ ID NO: 460181 - DNA, 201 bp, Homo sapiens; identical to SEQ ID NO: 122893

SEQ ID NO: 460182 - DNA, 201 bp, Homo sapiens; identical to SEQ ID NO: 122894

SEQ ID NO: 460183 - DNA, 201 bp, Homo sapiens; identical to SEQ ID NO: 122895

SEQ ID NO: 460184 - DNA, 201 bp, Homo sapiens
tatttcataccttatagaactcagtgtataaagggaaaagctatttcctaactctggtcactaaatgtgaataacttgacttaaaagatcaagtttaattytattcttagattttttttttttttttgccactcatttaattctggtagttgatatttactatgtatcaagcagtataggtctttatacattttgccctta

SEQ ID NO: 460185 - DNA, 201 bp, Homo sapiens; identical to SEQ ID NO: 122896

SEQ ID NO: 460186 - DNA, 201 bp, Homo sapiens; identical to SEQ ID NO: 122897

SEQ ID NO: 460187 - DNA, 201 bp, Homo sapiens; identical to SEQ ID NO: 122898

SEQ ID NO: 460188 - DNA, 201 bp, Homo sapiens
attccagtagctggagaagaaattcacacttttccacaagatttatataacttacaatcttggctggaagtacttagagggcaacttctctataaaagaasagcgattttatttctgcctatggagaatgacagagagtctacctgaacactcacactgttctagagggagaagaatggaaagcacaacctctacaaatcc

SEQ ID NO: 460189 - DNA, 201 bp, Homo sapiens
atcttgaagttcctacttaaagctgtctagttgttttgaaggtgtcgtttttaaaagacatattcatctagccagatttagagcctcttttttttgcaatraaatactccataacttgatggatcattttttataattctggtttacccatctctgctactggaagattcccataaaacaactgtcctaagaatggctgct

SEQ ID NO: 460190 - DNA, 201 bp, Homo sapiens
cttagaaaggagtggactgggcttgttcatccagctttcagttacattagtagactcactccatcatgattgaaatgtgtagcttatacaaggaaaagcarctactcagtactttcaaagaaggtagaatttaaaaatctagacttaataggagtaatttaggttagaaattaaaataatcttcctcattttaatgctata

SEQ ID NO: 460191 - DNA, 201 bp, Homo sapiens
agctttcagttacattagtagactcactccatcatgattgaaatgtgtagcttatacaaggaaaagcagctactcagtactttcaaagaaggtagaatttraaaatctagacttaataggagtaatttaggttagaaattaaaataatcttcctcattttaatgctatagtgaatgtgtgacaagctgtataaatccccct

SEQ ID NO: 460192 - DNA, 201 bp, Homo sapiens
gaatgattcaacgacagagaataacagattccattaaaaacaaaagtgatttcaccagccacccatctgtgtacacttccaacattcttttacttttccaytaacagttgccttttcttgttaacttctcttatctttatataaatattaattttcactgtaatataaatcaaatatgcagtctatctgctttgcaaaata

SEQ ID NO: 460193 - DNA, 201 bp, Homo sapiens
gcagtgagctgagattgtgccactgctacacagccctggtgacaagagcaaaactccatctcaagaaaaaaaaaagaaaaagaagaagaaaaacatttaayttgtgcctaaactaagcagagaaattgttggtcgacacttacctttaaccttgaccacacaagtgtttcaagagactaataatcactccttagggttatc

SEQ ID NO: 460194 - DNA, 201 bp, Homo sapiens
aagtcagggaacttaccagagaaagatagcttagagtggtcaatgatttaagtaaactatgttaaaaaaaaaaaaaaaaacctcaaataatgaaaacatayactaaggtctgattttcaccttaccaaacgatgtttttatttatcaacctaattctttgtcccatgtctattaaaaacacatttttttcaacaatttaaa

SEQ ID NO: 460195 - DNA, 201 bp, Homo sapiens
attgatgaaaacataactgaaaatatatgcagtgccttttaaaaatctttgtaatctttattttaaaattcctttttatgttttctttcaaaaagatagtwttcttctgacaatgttattctattataaattttaattttcttattctgctttgtctaactttatagatttaaatacctcagcaaatctaaagtataagga

SEQ ID NO: 460196 - DNA, 201 bp, Homo sapiens
tcaatctttacaacagcccaaggagggaagaaatatcagtgccattttacagataagcacactaaattatagacaagttatgtgcccaagatcacacagcraataacagacccacactctaaagctttgtctggccctcaactcatgttctttccgaaggcctgactattgcctactcctaagttttgcatacaaaaatgg

SEQ ID NO: 460197 - DNA, 201 bp, Homo sapiens
gcctactcctaagttttgcatacaaaaatggataaacacacaaagtgaaaacaaaaataatctagccctcttgctttgctattataatctaaatgcacaayggggaaaaaagaggtgactgctgatttcatagtttatataattccacctatttgaagagtctaacaataaaatacttaagggatgtagcatttataaatt

SEQ ID NO: 460198 - DNA, 201 bp, Homo sapiens
aaatttaaaattctttgttcactgagtaagtactttgtgaagaacaaatgctagattattaattccttatgaatattttaaatctcattatttagaagttyggctaaaatctttaattagggtataaggtaaaaatggtacctggtagtaatgtgcggactctaatttctaggatttgatggatgcaaaaattcttgagca

SEQ ID NO: 460199 - DNA, 201 bp, Homo sapiens; identical to SEQ ID NO: 122910

SEQ ID NO: 460200 - DNA, 201 bp, Homo sapiens; identical to SEQ ID NO: 122911

SEQ ID NO: 460201 - DNA, 201 bp, Homo sapiens
aaccacatttctagtgtttcatagctacatggggttaggggtcactgtactggatagtgcatatctagagtgttctgacctttccttctccagcaccaactatagctttccttacaaaagctttttgctttagtcaaaagaaacttttcatcaaacaatcaacccaccattcactttcctctcttccactgttaccttcac

SEQ ID NO: 460202 - DNA, 201 bp, Homo sapiens
tgtgtgtgatttctatggagtaatgccagctctgaatttgtcattagtattcatttatgagtaaatgcaaatattcttgttgcactgaaaaagtgaattcrcattcatagaacacaagaaatattttgctcctaaatcttaccgtctctttatttttacaatctcagaaacagtaacgttttttaaaaaagcaattatata

SEQ ID NO: 460203 - DNA, 201 bp, Homo sapiens; identical to SEQ ID NO: 122912

SEQ ID NO: 460204 - DNA, 201 bp, Homo sapiens; identical to SEQ ID NO: 122913

SEQ ID NO: 460205 - DNA, 201 bp, Homo sapiens
tcttctgacatctttatatttcataccttatagaactcagtgtataaagggaaaagctatttcctaactctggtcactaaatgtgaataacttgacttaaragatcaagtttaattttattcttagattttttttttttttttgccactcatttaattctggtagttgatatttactatgtatcaagcagtataggtcttt

SEQ ID NO: 460206 - DNA, 201 bp, Homo sapiens; identical to SEQ ID NO: 122914

SEQ ID NO: 460207 - DNA, 201 bp, Homo sapiens; identical to SEQ ID NO: 122915

SEQ ID NO: 460208 - DNA, 201 bp, Homo sapiens; identical to SEQ ID NO: 122916

SEQ ID NO: 460209 - DNA, 201 bp, Homo sapiens; identical to SEQ ID NO: 122917

SEQ ID NO: 460210 - DNA, 201 bp, Homo sapiens; identical to SEQ ID NO: 122918

SEQ ID NO: 460211 - DNA, 201 bp, Homo sapiens; identical to SEQ ID NO: 122919

SEQ ID NO: 460212 - DNA, 201 bp, Homo sapiens
agtggatagaagaagcccacaaatatccagccacataaaacttttaatgcagacatttcaaacaccaccagatttttgtcacttctttaaaggagggaaayttttgtgttgaacaataggaaaccatgaacagctggtttcgactgaagcctagttttcatattttaaacatgatcatttaaggtcagagaaaccaaaact

SEQ ID NO: 460213 - DNA, 201 bp, Homo sapiens; identical to SEQ ID NO: 122920

SEQ ID NO: 460214 - DNA, 201 bp, Homo sapiens; identical to SEQ ID NO: 122921

SEQ ID NO: 460215 - DNA, 201 bp, Homo sapiens
gtggaatggtatgaaaggatgaaaacctcccctgaccgctgctcaattccctccagcagagctgatttaaattaaaaaaaaaaaaaatgcccttttgcackacattggccttttctgtgaataggtcagccaggtgcaagctaccagatgtgactttccatggtctctaagccccaggaggccatttatctcttttattag

SEQ ID NO: 460216 - DNA, 201 bp, Homo sapiens; identical to SEQ ID NO: 122922

SEQ ID NO: 460217 - DNA, 201 bp, Homo sapiens; identical to SEQ ID NO: 122923

SEQ ID NO: 460218 - DNA, 201 bp, Homo sapiens; identical to SEQ ID NO: 122924

SEQ ID NO: 460219 - DNA, 201 bp, Homo sapiens; identical to SEQ ID NO: 20775

SEQ ID NO: 460220 - DNA, 201 bp, Homo sapiens; identical to SEQ ID NO: 122926

SEQ ID NO: 460221 - DNA, 201 bp, Homo sapiens; identical to SEQ ID NO: 122927

SEQ ID NO: 460222 - DNA, 201 bp, Homo sapiens; identical to SEQ ID NO: 122928

SEQ ID NO: 460223 - DNA, 201 bp, Homo sapiens
ttcagacaatgttagtatttaaagagttggcagaaaaggtgtttactgatgatgttaaggaaatataatagccagatgaagggacaaacatgaaaagatasgggctaaaaattagaggagagagttttaaaaggcaggtgtggtcaatagtagccactgtaagcaaattacgctgtatggggcagggaaatacataattgg

SEQ ID NO: 460224 - DNA, 201 bp, Homo sapiens
gcctccatcattctccagtgatggatgcttcctgccctcaaacatcagactccaagttcttcagcttgtggactcttggacttatatcagtgatttgtcargaactcttgggtcttcagccacaaactgaaagctgcactgtcttcttccctatttttgaggttttgggactcagactggcttcctagctacttagcttgg

SEQ ID NO: 460225 - DNA, 201 bp, Homo sapiens
atgtggcttgagatggactccctgtaatggtgaaggtggagttcgtgtatacagtggtagatacacaatattcaagcagactggtttgcatcagctgagayatcacatggagaacagtcattaccaagtatctctctacttgtaatcaggcttttcatgagtgacaaacttttgttgttttaagccacaagatttgaagtt

SEQ ID NO: 460226 - DNA, 201 bp, Homo sapiens
gtgagggtggagtgaggggttagggagcaagcctagcagtattgtacttcactcctattttcgtttgagtgagaagtgcattgccaatggctcttggccaraccgggcttgagcatgtggtctgggcttagccaatcagcctcccactgggcactttgaattttgagttattaatattagaacagagatgtaagaatggtt

SEQ ID NO: 460227 - DNA, 201 bp, Homo sapiens; identical to SEQ ID NO: 122929

SEQ ID NO: 460228 - DNA, 201 bp, Homo sapiens
aaaagggaaccacagtgggtaagcatttttatgtagttacattatatgtgcaaaaataactatagcaatacatagcagtttttctgttaggttgtatttaycttcaccttcctcctcttgaatcttatactctcagaatctaagaaaggacaggaagaagccagtgtcccccagcagggggaagaagaccctgcaggggtc

SEQ ID NO: 460229 - DNA, 201 bp, Homo sapiens
aagaagaccctgcaggggtcttctcaaaatgtctttgttaacagaaggaaacagcacagctactcaccctctgactcagtgttcctttaaaacagcctccyaggcctctttggccctaaaggtaaaactgtgtttgccttttgagaatcttcgaaacaccctgtctcaaattaagatccaaaacctgaaaccaatactcta

SEQ ID NO: 460230 - DNA, 201 bp, Homo sapiens
tgaccatctgacctctcacctcctccccaggctgctcctcctcaggtcactccccgccaggctgaatcaggctccaactcttcttcagcctctgctccccvaccctataacccttctattacctcccctccccacacttggtctggtttacagtttcattctgcaactagctctcccccacctgcccaacaatttcctctt

SEQ ID NO: 460231 - DNA, 201 bp, Homo sapiens
tctctcacccaagctggagtgcagtggcatgatcatggctcattgcagcctcaacctcctgggctgaagtgatcttcccacctcagcctccctagtaactrtaggcatgtaccaccatgctcggctgatttttgtattttttaatagaaatggggtttcagcgttgttgcaggctggtcttgatctcctggcctcgagtga

SEQ ID NO: 460232 - DNA, 201 bp, Homo sapiens
aactctacgatggtgtgaaaatgagcaacataagatatttttaacttcccatgagtttttggggacataaccactattgcaagtcaaagagcatctatatwcaacaaacatccattgtgcacaggtctctacctagatgcaaaaggcctgaaaaaaataaaagacttcctaggttcctagcaggaaaaaaaaaaagctatt

SEQ ID NO: 460233 - DNA, 201 bp, Homo sapiens
ctccatgagttgtttatcctgtctagtgatttgatggtgaacttttctaaataaatagccctttcccctccggtgtcggtatatattgcttctcaagccascgccttggtaatcatctctattgtctgaatgagcagtgatgctgtactctcagcttgaaacaggcatgacaccaatacatgctggcaggccagctcctcc

SEQ ID NO: 460234 - DNA, 201 bp, Homo sapiens
ttcttcaaattcaggggcaggaggggggaagcactgtgatttcagttgttctacttcctaagtaaatttgagaattgttttaaatctttaagcctccccayggagatctaaagcaagggcctatgttgggagaattttttgggtggcaggttctatttcactgaaaaaaacagtcacagccactgctgattgagctaggta

SEQ ID NO: 460235 - DNA, 201 bp, Homo sapiens
tgtaaactcttatgaggtttataatcccatctgatcttagatgtggtaccttttatgttgatggagcagtgacaagtcataattggcagcccagttcctcytcatgagtgtttcatgggcgtgcttcctggaatgctgcccctgaaatgaaggctcttctggaagacaagcttcaaggcctgtggggggcatcacctggga

SEQ ID NO: 460236 - DNA, 201 bp, Homo sapiens
aacactactgctttatttctgtggtagccctttaaacaaaatggaaggatttttttcctacattcataattgtgtttgtgcctagtatgcttgagaaaatkatgtcaacattagatatttaagaaaacatcacaaattcttaatatatgataccatatagaaagaattcattatctttttcatctttctaactgcttcctt

SEQ ID NO: 460237 - DNA, 201 bp, Homo sapiens; identical to SEQ ID NO: 122932

SEQ ID NO: 460238 - DNA, 201 bp, Homo sapiens
ggtccagagagctgtttgctaaatcaaattgccttcataagcctaatttgagaattttccagcaatggagaatctcaaatgattgtagaatcttcccactraaatcttttatactctttccacacactcagcagccattttccactaaaaatagtctacagtctaggaaagaaagaaaaacattccccctcaaaattacta

SEQ ID NO: 460239 - DNA, 201 bp, Homo sapiens
acaagtttaagttatataaaagaagctaagagcattttaaatgtgggcaaacaactcacaatagtaacattaaagttgttcatccatattcagtttgtaamattttcactcttaattgagaaaggattgtcataatatatttcaactatgaataatgaagacataaaatgattttactaagagataaaggattggaggacc

SEQ ID NO: 460240 - DNA, 201 bp, Homo sapiens; identical to SEQ ID NO: 122933

SEQ ID NO: 460241 - DNA, 201 bp, Homo sapiens; identical to SEQ ID NO: 122934

SEQ ID NO: 460242 - DNA, 201 bp, Homo sapiens; identical to SEQ ID NO: 122935

SEQ ID NO: 460243 - DNA, 201 bp, Homo sapiens
agtatctcaccttgatccagaaaatctgaagtccccaaagatcagagccaggagcctccgtcttttcccaagttgatcccaagatttcctctaaatggcaytgaaaatcattctataggaaaataaagacctgaaatgctttttcttggacttaatgaaattcagaggtatttattgatcatctaatcatctaatacattc

SEQ ID NO: 460244 - DNA, 201 bp, Homo sapiens; identical to SEQ ID NO: 122936

SEQ ID NO: 460245 - DNA, 201 bp, Homo sapiens
aatatatatatgtgtataaattagcattaaaattaagatgtacatccatttaatatacatgtaatatatatgaacacatatatttttatttgtaagcctgytgaaagaagctaataataatggttcatccttggaccaattcaaacattcttttgctaacaattacccatcaaatttacagctgcctttaaaaaattatat

SEQ ID NO: 460246 - DNA, 201 bp, Homo sapiens; identical to SEQ ID NO: 122937

SEQ ID NO: 460247 - DNA, 201 bp, Homo sapiens; identical to SEQ ID NO: 122938

SEQ ID NO: 460248 - DNA, 201 bp, Homo sapiens
aaagagcagaggtcagatgtcttcagacattagaggacagacaagtcaggtgagctgcttaaaaattcaaattccttgtcctacttgagtcttggggctcraaaatctttatgttaaaccatcaacacagatgactctgatccagctcttccaggaaccacactttaaaaatccctggactaagatgcagcatctgtgaaa

SEQ ID NO: 460249 - DNA, 201 bp, Homo sapiens; identical to SEQ ID NO: 122939

SEQ ID NO: 460250 - DNA, 201 bp, Homo sapiens; identical to SEQ ID NO: 122940

SEQ ID NO: 460251 - DNA, 201 bp, Homo sapiens; identical to SEQ ID NO: 122941

SEQ ID NO: 460252 - DNA, 201 bp, Homo sapiens; identical to SEQ ID NO: 122942

SEQ ID NO: 460253 - DNA, 201 bp, Homo sapiens; identical to SEQ ID NO: 122943

SEQ ID NO: 460254 - DNA, 201 bp, Homo sapiens
gaagagagctgggcgcggtggttggccaagcaatagaaccttctctgagaactattgttatgcagtgtactctgggtttgcatgtgtgtatgctcttgtcrtcttagttttgaccatgtatttatctgtacatttcatttcctctgttctttaggagagtacttgcatggttgattaccaattttaaaaatagatgttttc

SEQ ID NO: 460255 - DNA, 201 bp, Homo sapiens
gaatatggataatacgagagatgagtaaaatgaatgaaattggtaggcacacgataaaaatagaaataaatagaaaagatatttttaattgaaagtaatgwaaatactaagccaaagtggcttaatcaaaaaaggaatccctagattcacatataactgaaatgtttagggtattcctactgcaagcaaatctctctccag

SEQ ID NO: 460256 - DNA, 201 bp, Homo sapiens
tttaaagcatacagttcagcagtttttagtacattcacagagttctgtgaccattaccacaatctctggaacattttattctagaacattttcttcatccyctcagtaatccctgcacccgttagagtcacttttcagactcccccactccaacgtactagctctaggcaactactaatctactttctgtctctatagatt

SEQ ID NO: 460257 - DNA, 201 bp, Homo sapiens
tgttctttttttaaggtgcccagatttcatattgttcaaacacgcatgctctacaatttgtgcagttaacgcaatcatcacagggtcctgaggtgacatayatactcctcagcttgtgagatgacaggataagacgggcataggaaatcacaagggtattgattggggaagtgataagtgtccatgaaatcttcacaattt

SEQ ID NO: 460258 - DNA, 201 bp, Homo sapiens
atcttgttcctcttcctgtcactcatggtgctaacacagatgcctcaggacaccgcttggctgggtgcatctacaggtgttccctgcgtatccgaaatggscttattcagcagattctcttgcttgtgtacgtccctgtctctccctctaaaccggagccctgtgaaggcagaaatcattcttgtcttgtgttgcattatt

SEQ ID NO: 460259 - DNA, 201 bp, Homo sapiens
ctctgctgtgggctagctgtgtgatttgggggaagtccgttagcctctctgggcctctgtccatctctctataaagagatgaggctggacctgatcagtgwttgaaatgaggtgatccatttgctgattctgatccagaacggtgtttttatttttattttttcttgtttgtttttacagagaagcgtgtactcccatttt

SEQ ID NO: 460260 - DNA, 201 bp, Homo sapiens
tcatcctcagagtaactctataatgtccgtgttgttattctcttacgtgtgaaaaaacagaaatgtgcagactgtgtcaaagcagagtttcaaattcaagrccctagagctttacattaagctgatctagaagctctttttgcctttatttaaggaactgataacaaatgctgaatgaggaggagctgaactctgagcccc

SEQ ID NO: 460261 - DNA, 201 bp, Homo sapiens
caaaatgcttctttttcaccttctgtgataagagattatttaacaatgtcagaagatatttgtaatatgttacatggattaaacaacaggttataaaacastatgtacattataaattatagcccttttatgttttacacacagaaaaagacttcatgtggtacagttgtggttatgtctccagcacaatctctggtgtag

SEQ ID NO: 460262 - DNA, 201 bp, Homo sapiens
gttttgacacggagtctcgctctgttgctaggctggagttcagtggcgcgatctcagctcactgcaacctccgcctcctgggtccaagtgatgctcctgcytcaacctcccaggtagctaggactacaggcatatgccaccacgtccagctaatatttgtatttttagtagagacagtgtttcatcatgttggccaggatg

SEQ ID NO: 460263 - DNA, 201 bp, Homo sapiens
tgtttttttcttaaaatattattcatgataaatattaagacagacttttatcatttgttgtaacttcataggtttctttttaaaattaattacttatttcrttctaatgtaaaatgaaccacaagaaaatgagaaaagcaaaattgtatgcttgagggaaaaaaatttaataagtcactggtaattcaatgctagtttgta

SEQ ID NO: 460264 - DNA, 201 bp, Homo sapiens
cataaataggaaaccctaccagatcgtaattattcttttaattattagaattaaatgtaacaactgaaattactgtggcttcttggcttccattattcttyactaaagatcatatcaagtaaaaaaaaaaaaagtttacagaagctaaaaatataaggctgtacctggtttacaaaaaattatcaagaatctctgaagttc

SEQ ID NO: 460265 - DNA, 201 bp, Homo sapiens
atgttattatgtaagttatactacggactaaggatgcggtaacatgaagtaagtgaaacactgagatacattggaagggatcagagatggagatatggtaygttatttggggaaatggtctaccatatcctagaatatatcttcttattctgaattccaaaattaaatggtatcgaaactcttactttcatgctcaaaatc

SEQ ID NO: 460266 - DNA, 201 bp, Homo sapiens
aggagaagagatgaagtctcttatttactgcctttagaaatatcttacttttgaatggggaaaataattgtactgaaatcaactttaaatacaccatttaygatgtgtaaggcagcaaaatgtagtcagaagtaacttaatagtttaacattcagtaaccatcgttatgccactggaatgagtctttgacgaactggattt

SEQ ID NO: 460267 - DNA, 201 bp, Homo sapiens; identical to SEQ ID NO: 122947

SEQ ID NO: 460268 - DNA, 201 bp, Homo sapiens
tgcctttgtaaaagagactccagagagctgctgtgctccatttgcatgtaagggcccaagaagaaggtgccatttatgaaccaggatgtaggccctcaccwgacacaaatgttctaggaccttgatcttggacttcccagccaccaaatctatgagaaataaatctgtgtttttcataagccacccagtgtggtattctgt

SEQ ID NO: 460269 - DNA, 201 bp, Homo sapiens
tgccactggaatgagtctttgacgaactggatttggaataactcctgctggcccagattctctttcccagcaatgtgtccctctgcctgttggaagagggygtacctcctgaatcttagcctggggccagagccctcatcttacctgttgaaaggctatgtgatgctgacccacagtctcctttcaggctcagctcactag

SEQ ID NO: 460270 - DNA, 201 bp, Homo sapiens
ctttcttggctgagccaaccacagaagaacagagaagactaaaagggtgtgtgacccaaagtcagacttgccacagggacagtgggtgcaaggaggaagcrcagcttatcaggccaaatgtggaagctagtagcttgagcatggcaatattgtgaccatgggttccagcatgtgctcatgtctgtgggtcctggcatgtgg

SEQ ID NO: 460271 - DNA, 201 bp, Homo sapiens
tgcttttgtccaggagtttgagaccagcctgggcaacatagagaaacctcatctctgctaaaactgcaataaataaataaatatggaaataagggaaaaartgttaagctaaagataaaatttgagaatcatcaccaaatgattggtcatagaccttcatgagctttcttattagtatatacagtggataataaagtggtt

SEQ ID NO: 460272 - DNA, 201 bp, Homo sapiens; identical to SEQ ID NO: 122948

SEQ ID NO: 460273 - DNA, 201 bp, Homo sapiens
ctgagccaaccacagaagaacagagaagactaaaagggtgtgtgacccaaagtcagacttgccacagggacagtgggtgcaaggaggaagcgcagcttatyaggccaaatgtggaagctagtagcttgagcatggcaatattgtgaccatgggttccagcatgtgctcatgtctgtgggtcctggcatgtggtcagggagg

SEQ ID NO: 460274 - DNA, 201 bp, Homo sapiens
gggctgtttacaaaaagagaacactggatgaaggctgatttaagaggaaggtttttatggatttagttataaacacattcagtttggagagtcttcaaaaygttgaagttcacatgtcaactattcaattagaaataaaatatgggtcaagcatggtggcttatgtctgtaatcctggcactgtgagaggctgaggtgggt

SEQ ID NO: 460275 - DNA, 201 bp, Homo sapiens; identical to SEQ ID NO: 122949

SEQ ID NO: 460276 - DNA, 201 bp, Homo sapiens; identical to SEQ ID NO: 122950

SEQ ID NO: 460277 - DNA, 201 bp, Homo sapiens; identical to SEQ ID NO: 122951

SEQ ID NO: 460278 - DNA, 201 bp, Homo sapiens
aaaattattagtaagtgataagctttaagtattcattacatttatttttaatataatttatttaactacaaatatatataatttaattttgcataatgccygtgtttaacaactggctctcaaaatttccaatttatcaatcggtttttgagagcttgtatacatcacctataacataccactgactgttacctattgtct

SEQ ID NO: 460279 - DNA, 201 bp, Homo sapiens
ggcgccgccttgcgcaggttgttcaccctaacagggcctctaacctcgagcccgaaacggcctccttctccagccgtgccccttcctcccccgtggaggcsgcagtggatgcgctcacctccctgcggcctcctgaggtggtttggtggccccctcctcgcgagttggtgccgctgcaactccgattccgagctttcggca

SEQ ID NO: 460280 - DNA, 201 bp, Homo sapiens; identical to SEQ ID NO: 122952

SEQ ID NO: 460281 - DNA, 201 bp, Homo sapiens; identical to SEQ ID NO: 122953

SEQ ID NO: 460282 - DNA, 201 bp, Homo sapiens; identical to SEQ ID NO: 122955

SEQ ID NO: 460283 - DNA, 201 bp, Homo sapiens
gactggaggaagtagaggagtcaatgaaaaagaggtaaaagcaaaagaaacaatatattctaggggttggaagccaggagaataatgagttttaagatgastcaaactctgagtccaaatcagcttgcactcccatatacatccgcttatttaatccatacaacgacccttcaagatgtgtcattacacccatttgacaga

SEQ ID NO: 460284 - DNA, 201 bp, Homo sapiens
tcaccagatctggaaattgcctgttgccatgtcactgagggcaactatagaaaaagagcccctatcctgaattgcagctcagccatgctcatcattctccstgttgttgtggcagctgtcaggaaaaattatttgaacagcagcatcttgaacagatggcttagagacaagttagaaatggaaacacctatgagaagaaaa

SEQ ID NO: 460285 - DNA, 201 bp, Homo sapiens
tgttgtatagattattttgtcacccaggtagcaagcttactgcccattagttatttttctgatcctctccctcctcccaccctccatcctccaataggccmcagtgtatgttgctcccttctgtgtgtccatgtgttctcatcattcagctcccacttataagtgaaaacatgcatataccacatttttaatacattcatt

SEQ ID NO: 460286 - DNA, 201 bp, Homo sapiens
atgtcagagtcatgtggatagatgtgttctgctagcaggcttccattttactctataacagaaaagaaagataaaatttccaggaaaaagaaatgaaagcygctgccagtgaaaagaatttctaccaccaagtcaagtaggctggggtctccacttacagatggtgattaccatagactatggattaaatcatgtctgcat

SEQ ID NO: 460287 - DNA, 201 bp, Homo sapiens
tctgttttccatgtactcccttactgaatgccagaagagaaatggagaagagcaaggaggaaatgagagaatcagagagagaataaaagaagggtataackgaaggtaggggacagagaagcaggaacagtgaagataagaggaaacacattcaatattaggttaggcttctaggctgcacacattctgtagagcttcctg

SEQ ID NO: 460288 - DNA, 201 bp, Homo sapiens
ttatgaattgatgccatcataactcaggacaaaaggggctgatgatgaatgatggaagagaatcttccactttatttcatatatttgttttatttaaaagrtctataaagaagaatttagcaatttgaagatgaagtttaggaatgattacccaagaaacctttcctgtatactgctgaagagattggtttcagcatcttc

SEQ ID NO: 460289 - DNA, 201 bp, Homo sapiens
atttagcaatttgaagatgaagtttaggaatgattacccaagaaacctttcctgtatactgctgaagagattggtttcagcatcttcataatgttccttcytactaagtaatacaaataatacaaataataatttaaaataatagtcactgacattgagggcttattatgtgacaaaccctgttctaaagactttatatgc

SEQ ID NO: 460290 - DNA, 201 bp, Homo sapiens; identical to SEQ ID NO: 122956

SEQ ID NO: 460291 - DNA, 201 bp, Homo sapiens
ccaaagattacatccattctggtaagaagaattgatacaatttatctattaatcagaatatttactactccaacccatattttattgtattttcatattcyataaaaaacagaatactaaaaaaaaatcccactttaaacaaactggttatttgagaaataatactgagaaaacttgcaacttagacaagaaataagaaat

SEQ ID NO: 460292 - DNA, 201 bp, Homo sapiens; identical to SEQ ID NO: 122957

SEQ ID NO: 460293 - DNA, 201 bp, Homo sapiens; identical to SEQ ID NO: 122958

SEQ ID NO: 460294 - DNA, 201 bp, Homo sapiens
ctgagcgagcagctgggactacaggaacccactaccatgcctaactaatttttgtatttttagtatagatggggtttcaccatgttgcccaggctggtctygaactcctgacctcaagtgatctgcccacctcagcctcccaaagtgctgggattacaggcatgagccaccactcccagcttactgcactcatttttaata

SEQ ID NO: 460295 - DNA, 201 bp, Homo sapiens; identical to SEQ ID NO: 122959

SEQ ID NO: 460296 - DNA, 201 bp, Homo sapiens; identical to SEQ ID NO: 122960

SEQ ID NO: 460297 - DNA, 201 bp, Homo sapiens; identical to SEQ ID NO: 122961

SEQ ID NO: 460298 - DNA, 201 bp, Homo sapiens; identical to SEQ ID NO: 122962

SEQ ID NO: 460299 - DNA, 201 bp, Homo sapiens; identical to SEQ ID NO: 122963

SEQ ID NO: 460300 - DNA, 201 bp, Homo sapiens
caacgttaaagctcagatgcaagaaagaaagatgctgtaaccttggaatcttagaaagtctgcatggcagtaccctgtaggtgaaattgttatgtactgasgatcaatttttattaaatataaatagtagattacaacttgcctaaaaaaagttctaatatgatagacaatatgatatgaagaatcataacttaataagga

SEQ ID NO: 460301 - DNA, 201 bp, Homo sapiens
gcgacagcctggagacaaaactctgtctcaaaaaaaaaaaaaaaaaaaggaagaaagaaaaagaaaagaaaagaaaaagaatatgtactgaaaatagctamgtgtacaaactaccaaccaaaggaatgctaaggaaaacaaatgctacagaaagaggtaacatcttgctctagagaggtgtcaatgaagaattcacagaga

SEQ ID NO: 460302 - DNA, 201 bp, Homo sapiens; identical to SEQ ID NO: 122974

SEQ ID NO: 460303 - DNA, 201 bp, Homo sapiens; identical to SEQ ID NO: 122977

SEQ ID NO: 460304 - DNA, 201 bp, Homo sapiens; identical to SEQ ID NO: 122979

SEQ ID NO: 460305 - DNA, 201 bp, Homo sapiens; identical to SEQ ID NO: 122987

SEQ ID NO: 460306 - DNA, 201 bp, Homo sapiens; identical to SEQ ID NO: 122988

SEQ ID NO: 460307 - DNA, 201 bp, Homo sapiens
agtggtacagaggagcactggcagagcatggagttgaaaaacaacattatgtagaataacctattaatatggtggcgggggctgtggggaacaaacttggwcctctctcttttcttcagggtacaggtctataatattcaaccttgtctattatccatctcgcaaaatgagtagttggtgacatctcaggatatttagtca

SEQ ID NO: 460308 - DNA, 201 bp, Homo sapiens
gagatatacctaatgctaaatgacgagttaatgggtgcagcacaccaacatggcagatgtatacatatgtaacaaacctgcacattgtgcacatgtaccckaaaacttaaagtataataataataaaattttttaaaaagttgccttttctgaatgatagcaccacaattttgatgcataaatataaatatagtgtatctg

SEQ ID NO: 460309 - DNA, 201 bp, Homo sapiens
atcatgcaacaaaggtgcatcccattatatcagggtgtatgtgacatctagatgacattacagtgacattaacctttatcagtttggtaagggggctttcrccaggattcttcttagtaaacctatcacttttcctgcttttttctctattctttggaaataagctacaaagcctagaatgccctagcaggtagaaggaat

SEQ ID NO: 460310 - DNA, 201 bp, Homo sapiens
atattgtaattatttgtattcttttctcagtcctccaactagaatgtatacttctcaagaccgaggctgtgtcctattcattctagttcccctgcttaacrcagcaggtgttcattatgtttttatgaaagattgaatttaactcctcacccaattctggcttcagaaatgaattttgtaaattagtcatttcagatattt

SEQ ID NO: 460311 - DNA, 201 bp, Homo sapiens; identical to SEQ ID NO: 122990

SEQ ID NO: 460312 - DNA, 201 bp, Homo sapiens; identical to SEQ ID NO: 122991

SEQ ID NO: 460313 - DNA, 201 bp, Homo sapiens
ccctttgctgactcttttcggactcagcctgcctgcacccaggtgaaataaacagccttgtttctcacacaaagcctgtttggtggtgtcttcacacggamgtgcgtgacaggaagcagtgcatcttacgcgtaatctatagcagtggtggtttaaatgaatctcctttgtactcaaacagcatatctttaacttatcaga

SEQ ID NO: 460314 - DNA, 201 bp, Homo sapiens
gcccaagggcaacccaactttcaacgaaacaaacagtatcgagtgtgctagatgatggagaaaacgcatagtgagggcacgatataagaaaatggggacartgtgcctggtggagcagggaaaactccacccctttgtcctgccctaaccccctactacctatttttctctagtattctaactgcctagaagtaagcatcc

SEQ ID NO: 460315 - DNA, 201 bp, Homo sapiens; identical to SEQ ID NO: 122993

SEQ ID NO: 460316 - DNA, 201 bp, Homo sapiens; identical to SEQ ID NO: 122994

SEQ ID NO: 460317 - DNA, 201 bp, Homo sapiens; identical to SEQ ID NO: 122995

SEQ ID NO: 460318 - DNA, 201 bp, Homo sapiens
ccagaaagttgccaaactctatttgcttttccaggggattttgaggccttaagtgagtttacatatgtgaaagtagatggaatattctgttacacatttckatcattgaaaatcgtcggggaatataatcatatcattaattaaacatatacagacagttctctacttatcaaggttcaacttaatgatttttcaactcta

SEQ ID NO: 460319 - DNA, 201 bp, Homo sapiens; identical to SEQ ID NO: 122996

SEQ ID NO: 460320 - DNA, 201 bp, Homo sapiens
agaggttaaactagtgcgagatgagaaacggcgggggcaattcctggggtaaaattagacagaaggtgtcagtcagcctgcctgtctgtttctctctcagkctctcccagagcgctgggtagcgctctctttgagggagaaagggaacacgcgtttactgcgctcgccagagtttaggggttcgcgttcggtcacttctgg

SEQ ID NO: 460321 - DNA, 201 bp, Homo sapiens; identical to SEQ ID NO: 123019

SEQ ID NO: 460322 - DNA, 201 bp, Homo sapiens; identical to SEQ ID NO: 123020

SEQ ID NO: 460323 - DNA, 201 bp, Homo sapiens; identical to SEQ ID NO: 123021

SEQ ID NO: 460324 - DNA, 201 bp, Homo sapiens; identical to SEQ ID NO: 20773

SEQ ID NO: 460325 - DNA, 201 bp, Homo sapiens
agtaattctagctataattgagtctaagctatgccaagcctgtctggtatccactgtttgaaatgtctgcacagagccttgaaggaattcattgttcttcraagtgccagctgtacatactgccatttcctgcatggcttctgccactcaggaatgctgcaccctggtggttctttagtggtgtcttttttctccattgct

SEQ ID NO: 460326 - DNA, 201 bp, Homo sapiens; identical to SEQ ID NO: 20774

SEQ ID NO: 460327 - DNA, 201 bp, Homo sapiens
caatatcatgcagcacctctcatcggccagctgtaaactgaagcaacacggaaaagaggattctgggaaatatgatacctggcttcttctctacagtgcaraaataatcttggaaaggggttgtgggatgctaagttgacaacagatgatccaagattattggtttattagatatttcatgtgtatatctatatagagaga

SEQ ID NO: 460328 - DNA, 201 bp, Homo sapiens; identical to SEQ ID NO: 123058

SEQ ID NO: 460329 - DNA, 201 bp, Homo sapiens; identical to SEQ ID NO: 123069

SEQ ID NO: 460330 - DNA, 201 bp, Homo sapiens; identical to SEQ ID NO: 123071

SEQ ID NO: 460331 - DNA, 201 bp, Homo sapiens
attattagtgaaatgttttataatatttttgtactgagtcttttaaatccagtgtgtattttatacttacagcatatctcaaatcagactaaccacatttstagtgtttcatagctacatggggttaggggtcactgtactggatagtgcatatctagagtgttctgacctttccttctccagcaccaactatagctttcc

SEQ ID NO: 460332 - DNA, 201 bp, Homo sapiens; identical to SEQ ID NO: 123073

SEQ ID NO: 460333 - DNA, 201 bp, Homo sapiens
tagctaatgccctggcctcttgataaaggcactaatcccattctgagggctccactttcctaacctaattacctcccatggccccagctccaaataccatyacattgagcattaggtttcagcatatgaattttgggggtacacaaaacatttagcctattgtgctgcccaatcctgctgcctcccccacttctccctttc

SEQ ID NO: 460334 - DNA, 201 bp, Homo sapiens
aacaaagtaccgtaggcttgttgatgtataaaacacagaaatttgcttctcatagttctggagacatgaagtctgaaatcatgcttgcggtcaggctctgktaatgacactcttctggactgcatactgccaacttctccttgtattctcacgttgtacaaggagggctagctaatgccctggcctcttgataaaggcact

SEQ ID NO: 460335 - DNA, 201 bp, Homo sapiens; identical to SEQ ID NO: 123076

SEQ ID NO: 460336 - DNA, 201 bp, Homo sapiens; identical to SEQ ID NO: 123077

SEQ ID NO: 460337 - DNA, 201 bp, Homo sapiens; identical to SEQ ID NO: 123078

SEQ ID NO: 460338 - DNA, 201 bp, Homo sapiens; identical to SEQ ID NO: 123081

SEQ ID NO: 460339 - DNA, 201 bp, Homo sapiens; identical to SEQ ID NO: 123080

SEQ ID NO: 460340 - DNA, 201 bp, Homo sapiens; identical to SEQ ID NO: 123084

SEQ ID NO: 460341 - DNA, 201 bp, Homo sapiens; identical to SEQ ID NO: 123085

SEQ ID NO: 460342 - DNA, 201 bp, Homo sapiens; identical to SEQ ID NO: 123086

SEQ ID NO: 460343 - DNA, 201 bp, Homo sapiens; identical to SEQ ID NO: 123087

SEQ ID NO: 460344 - DNA, 201 bp, Homo sapiens
caaaccacggcaaagaattaagtaactgcccccagagaagttgcccaaggcttgcctctgcaggtacccctaccatcaactcctgcctcttgtgaatgatsacactgctctagtttttttttttaatttccgcttttcaaaaattccaggctgtctcaaatgaggcaacctagcaactttctccctatagaaaacttcacc

SEQ ID NO: 460345 - DNA, 201 bp, Homo sapiens; identical to SEQ ID NO: 123088

SEQ ID NO: 460346 - DNA, 201 bp, Homo sapiens
ccaaaggtcttttgtcttcagaatgcaatgaaaaataactcccataaaggaaggtggtataaggtgggaaatgcaggctactatgtcagagtcatgtggayagatgtgttctgctagcaggcttccattttactctataacagaaaagaaagataaaatttccaggaaaaagaaatgaaagctgctgccagtgaaaagaat

SEQ ID NO: 460347 - DNA, 201 bp, Homo sapiens
aagaagctcttaacagatttctgtaaatgctacaaaaataaaactccaaaaacgaacatagttaattttgttgataagatatagctctcatttaaaaaaawttttttttttttttgagacggagtccagctctgttgcccaggctggagtacagtggtgtgctcttggctcactgcagcctccatctcctgggttcaaggg

SEQ ID NO: 460348 - DNA, 201 bp, Homo sapiens; identical to SEQ ID NO: 123089

SEQ ID NO: 460349 - DNA, 201 bp, Homo sapiens
ggaggtgacataaatctctttctcatttcattgatgaaaactagtcacatggcataatctggatgcaggaagggctggaagatgcggttcctggctgggcrgccaaattcaactgacatctctacactgtgaaaggggatgctgaattttaggggacagctagccatctctgccatgtaaagttttgataaggcataatgg

SEQ ID NO: 460350 - DNA, 201 bp, Homo sapiens; identical to SEQ ID NO: 123090

SEQ ID NO: 460351 - DNA, 201 bp, Homo sapiens
aaggggatgctgaattttaggggacagctagccatctctgccatgtaaagttttgataaggcataatggacaagactaagaaggaaaccagcagaagaaayggaacattacgggaactggacaagacagttaactaaaaggaattgcatttgtctggtatcctggcataacaaagatgagatggatgactgaattaattat

SEQ ID NO: 460352 - DNA, 201 bp, Homo sapiens
catggagtcaatggagatcattttggagctttaagatttgactgccctattggatttcagacttgcatagggcctttagctcctttgttttagccaatttytcccatttaaaatgggtatattattcaatgcctgtacccccactgtatctagcaggtaactagcttgcttttgattttacaggctcatatgtggaagtca

SEQ ID NO: 460353 - DNA, 201 bp, Homo sapiens
catgttttctgcagaagcagaggatgccaatctgcaaaaagagatgaatgaagcaggcatgaagacaacagtgaggtgagagagaaagccagaatcctggytgctgttctagcccctgattccaaactatttctaaaacagggctgcagctgaccctcagggcatgatggcttgtgcctgtagccctagctacttgggagg

SEQ ID NO: 460354 - DNA, 201 bp, Homo sapiens; identical to SEQ ID NO: 123092

SEQ ID NO: 460355 - DNA, 201 bp, Homo sapiens; identical to SEQ ID NO: 123093

SEQ ID NO: 460356 - DNA, 201 bp, Homo sapiens; identical to SEQ ID NO: 123095

SEQ ID NO: 460357 - DNA, 201 bp, Homo sapiens; identical to SEQ ID NO: 123098

SEQ ID NO: 460358 - DNA, 201 bp, Homo sapiens; identical to SEQ ID NO: 123099

SEQ ID NO: 460359 - DNA, 201 bp, Homo sapiens; identical to SEQ ID NO: 123100

SEQ ID NO: 460360 - DNA, 201 bp, Homo sapiens; identical to SEQ ID NO: 123101

SEQ ID NO: 460361 - DNA, 201 bp, Homo sapiens; identical to SEQ ID NO: 123102

SEQ ID NO: 460362 - DNA, 201 bp, Homo sapiens; identical to SEQ ID NO: 123104

SEQ ID NO: 460363 - DNA, 201 bp, Homo sapiens; identical to SEQ ID NO: 123105

SEQ ID NO: 460364 - DNA, 201 bp, Homo sapiens; identical to SEQ ID NO: 123107

SEQ ID NO: 460365 - DNA, 201 bp, Homo sapiens
tggacaagactaagaaggaaaccagcagaagaaacggaacattacgggaactggacaagacagttaactaaaaggaattgcatttgtctggtatcctggcrtaacaaagatgagatggatgactgaattaattatctttgaaatttgggggtaaggtagtctaagaattcaggcatgatgagattaggaggctttgctcag

SEQ ID NO: 460366 - DNA, 201 bp, Homo sapiens
tttattaggccccagtctcattccagacacaagaccaacttagactgtgcctcaaaaaaaaaaaaaaaaaaaaaaaaaaaaaacttgtcatccctactatyttctgtctagtcatactcctattcaccgttctcaactactcaaacatgccctgctcttgtttacactgccagtttacactgtttttccaagccatcacag

SEQ ID NO: 460367 - DNA, 201 bp, Homo sapiens
agtcgtcccaattcttagaccttttatacctgtttttctccttctgttattccatttagtttttcaattcatacaaaactgtatccaggccatcaccaatmattctataagacaaatgtttcttctaacatccccacaatatcaccccttaccacaagacctcccttcagcttaatctctcccactctaggttcccacgct

SEQ ID NO: 460368 - DNA, 201 bp, Homo sapiens; identical to SEQ ID NO: 123108

SEQ ID NO: 460369 - DNA, 201 bp, Homo sapiens
ttgggaggccaaggcaggtggatcacgaggtcaggagatcgagaccatcctggctaacacagtgaaaccccatctctactaaaaatacaaaaaagctgggygtggtgacgggcgcctgtagtcccagctgcttgggaggctgaggcaggagaatggtgtgaacccgggaggtggagcttgcagtgagctgagatcaggaca

SEQ ID NO: 460370 - DNA, 201 bp, Homo sapiens; identical to SEQ ID NO: 123109

SEQ ID NO: 460371 - DNA, 201 bp, Homo sapiens
ccttttatacctgtttttctccttctgttattccatttagtttttcaattcatacaaaactgtatccaggccatcaccaatcattctataagacaaatgtktcttctaacatccccacaatatcaccccttaccacaagacctcccttcagcttaatctctcccactctaggttcccacgctgcccctaatcccgcttgaa

SEQ ID NO: 460372 - DNA, 201 bp, Homo sapiens
gcctatagtgaagattaaatgaattaatacagttcttgcctgacatggatgaatgctttctaagtatcatctactcttaaacaataaaatatctaaatacwctattaaagatatcaaaatcacgaaagcacatgagagatactgaaacataaacatattgtatgtaatatgaaaacagaagaattcatcagattgctttac

SEQ ID NO: 460373 - DNA, 201 bp, Homo sapiens
atttgaagatgaagtttaggaatgattacccaagaaacctttcctgtatactgctgaagagattggtttcagcatcttcataatgttccttcttactaagyaatacaaataatacaaataataatttaaaataatagtcactgacattgagggcttattatgtgacaaaccctgttctaaagactttatatgcattgtttc

SEQ ID NO: 460374 - DNA, 201 bp, Homo sapiens; identical to SEQ ID NO: 123110

SEQ ID NO: 460375 - DNA, 201 bp, Homo sapiens
aggagttcaagaacagcctggccaaaatggcgaaaccccatctctactaaaactacaaaaattagccgggcatggtgggtgcctgtaatcccagctactcrggagactgaggcaggagaatcacttgaacccaggaggcggaggttgcagtgagctgagattgtgccactgctacacagccctggtgacaagagcaaaact

SEQ ID NO: 460376 - DNA, 201 bp, Homo sapiens
ttctagatttttttgtgatgtgacgaattaaaaaaaaaaaacagtgcttgtatagcctgtaggataaaaggaagaggccactctgcttggagatgactggygagatgcgacagtggctttggggcaagaaaaaatggcagccctaaggcctgaagggatcaatatctctacatgtgtaacccattctcagcgtaagatgga

SEQ ID NO: 460377 - DNA, 201 bp, Homo sapiens
aaaagatcacgaaatgttgcaggttcatcttgtattttcgttaccttagttctggaataaaccatgtctccaaggaggcagtggcatactgttttagttayagagtgtttatagtgtatttttgatatctagtagaagtagttccccttgtggttttactgttttcctattttgtgacagaatctttcttggctgagccaa

SEQ ID NO: 460378 - DNA, 201 bp, Homo sapiens
tgtctcctgataaactctctttgctggaataactcctgcctaagaggtaggaagtaaaagacgctgatgaaatggatcaagtacatctggtggacattgaycggtatcagcaaagatgggcaattacaatggagaagcttaggaggatgatgaacatcataccagtggtggtgttcagtgtcaaacctcttaatggtgcca

SEQ ID NO: 460379 - DNA, 201 bp, Homo sapiens
catgtctttcccactgccacaattaccagttcagcgtgggcctatgatcaagcctggccaaggaaactgacaagaagaacttagaccccatcgtatcttcstctgtcttactagatgagaagaaggacgaccattgccctaattgacaccaaccttaggatgacactaactctgtggatggtagaaaatgtcatctaagga

SEQ ID NO: 460380 - DNA, 201 bp, Homo sapiens
tgctggagtgcagtggcacgatctcggctcaccgcaagctccgcctcccgggttcacaccattctcctgcctcagcctcccgagtagctgggactacaggygcccgccaccacgcccggctaattttttaatttttagtagagacggggtttcaccgtgttagccaggatggtctcagtctcctgacctcatgatccaccc

SEQ ID NO: 460381 - DNA, 201 bp, Homo sapiens
aaaatacaaaaaaaaatagcagggtgtggtggtgtatgcctgtaatcccagctacttgggaggatgaggcaggagaacacttgaacccagaagatgggggrttgcagtgagccgagatcatgccattgcactccagcctggggtgggactctgtctcaaaaaaaaaaaaaaagagtcttaaggcaattacagaacatacta

SEQ ID NO: 460382 - DNA, 201 bp, Homo sapiens
ccctaaatctgggtaatttcaacatgtaagctgctggaagccacaatgacacctacctgtgtaactgctttttttggtagttcatagggaactctggcacyggaattttatatttactataaaaagatttaagttcataaaaccagtaactgtggacatgtgtattagtccattttcatactgctataaagaactgctcaa

SEQ ID NO: 460383 - DNA, 201 bp, Homo sapiens; identical to SEQ ID NO: 123111

SEQ ID NO: 460384 - DNA, 201 bp, Homo sapiens
ccaccatgccccgctaattttttatatttttagtagagatggggttttgccatgttgcccaggctggtctggaactcctgagctcaggtgacccacccagytcaccctcccaaaggattataggcatgagccaccaggcccagtgggcctacttttttaatagagataaaacacagtcctctggcttcaaggagtcaggtg

SEQ ID NO: 460385 - DNA, 201 bp, Homo sapiens
tacactttacaagtagaaaatttgtaaagtctcagcccattcatggagtagaacatagagttctattctatgtttggaacacagagttccaaaagtttccmctgtctcaggaagcatatacacagtgtggaatttagatggccttggggcagagggtgggaaaagtcaactgtgagttgagcatagatcctaggaccagtg

SEQ ID NO: 460386 - DNA, 201 bp, Homo sapiens; identical to SEQ ID NO: 123112

SEQ ID NO: 460387 - DNA, 201 bp, Homo sapiens
aattaaaattgctaatgaagtttcgggcaccattgtcattgataacatcttatcagcagacagggtttgagagcaaccggtctgaccaaaatttattaggyaggaatttccttgtcctaataagcctgggaacactatgggagactggggcttatttcatccctacagtttcaaccatagaagatggctacacccaagggg

SEQ ID NO: 460388 - DNA, 201 bp, Homo sapiens
caactgagaggagcataattgaccaagggacccattgctgtattctgaatccagcactgagttggctgaggccatgcttcccatgtgctgctcccaggcartgattgagcgcagcagggatactgaggcagctacatttttgagagactcaaactcctctgccatgtgactttggctcagggactacacataggctttgcc

SEQ ID NO: 460389 - DNA, 201 bp, Homo sapiens
tggccaacatggtgaaacctcatctctactaaaaatacaaaaaattagctgagcatggtggtggacgcctgtaatcccagttacttgggaggctgaggctrgagaatcgctttaacccaggaggcgtagcttgcaatgagccgagatcgcaacactgcactccagctggggcaacagtgcaagactccatctcaaaaaaaa

SEQ ID NO: 460390 - DNA, 201 bp, Homo sapiens; identical to SEQ ID NO: 123113

SEQ ID NO: 460391 - DNA, 201 bp, Homo sapiens
acactatgggagactggggcttatttcatccctacagtttcaaccatagaagatggctacacccaagggggccattttagaggcccaccctcaggggtgcrttctctttctcagggatgttccttgctgagaaaaagaattcagcaatatttctcccatttgcttttgaaagaagagaaatatggctctgttccgcccggc

SEQ ID NO: 460392 - DNA, 201 bp, Homo sapiens; identical to SEQ ID NO: 123115

SEQ ID NO: 460393 - DNA, 201 bp, Homo sapiens
aattaaagaatgattgagactaattatttgcacaaggctctgtgtgtacaaatgaaataatcagaccatggatgatccacttatttctactctctaatggyggaaatagctgcaaactgaaattgtcattctctgagtctagttattattgcacctcagttgattggttacatcatatagacacaggcaaatcttttagga

SEQ ID NO: 460394 - DNA, 201 bp, Homo sapiens; identical to SEQ ID NO: 123116

SEQ ID NO: 460395 - DNA, 201 bp, Homo sapiens
tatttcatccctacagtttcaaccatagaagatggctacacccaagggggccattttagaggcccaccctcaggggtgcattctctttctcagggatgttscttgctgagaaaaagaattcagcaatatttctcccatttgcttttgaaagaagagaaatatggctctgttccgcccggctcaccagcggtcagaatttaa

SEQ ID NO: 460396 - DNA, 201 bp, Homo sapiens
gtgtgttgaggaattcacaaattgttttccaaagtggttgtgccgttttataatcccaccagcaatgtatgagggttcaaatttctctacattcttaccarcacttattattgtctgtcttttttgttttagcttttctgatggtggtgaagtgatatctcattgtagtttgagattgcatttccctaattactaatgatg

SEQ ID NO: 460397 - DNA, 201 bp, Homo sapiens
cagcctcccaaagtagtgggatgacaggcatgagccaccgcgcctggctgaggaaaaaggcttcttacacaacatggttactaaaatcccaccactgaaargaaaaacttcatcaaaacgattattcataagactagttgcaaagaggagaaagcatttgccccgcagaagagctacaagagggccttctaggcaagaaag

SEQ ID NO: 460398 - DNA, 201 bp, Homo sapiens
gtatcagtgtggaccatgttagggtaacaacaagcagcttagggtgactagagaacagccagggaaatgctggcaggggaggggtcagtttggagggcagrattcaatgaattggcagtgtaggcaggaggtggatcacagagctatcaaaacaggtcgggatgcaaaagagtttcaaacatgaaaataccagaattagat

SEQ ID NO: 460399 - DNA, 201 bp, Homo sapiens; identical to SEQ ID NO: 123121

SEQ ID NO: 460400 - DNA, 201 bp, Homo sapiens
atcagtgtggaccatgttagggtaacaacaagcagcttagggtgactagagaacagccagggaaatgctggcaggggaggggtcagtttggagggcaggawtcaatgaattggcagtgtaggcaggaggtggatcacagagctatcaaaacaggtcgggatgcaaaagagtttcaaacatgaaaataccagaattagatat

SEQ ID NO: 460401 - DNA, 201 bp, Homo sapiens; identical to SEQ ID NO: 123122

SEQ ID NO: 460402 - DNA, 201 bp, Homo sapiens
acaggcaggagattaaatttaaggcaagaagtttgaggatgtaaggaaattaattagatatcagttagggtaatgctagacaaatgctaacgaataagccytcacatttcagtggttgtcgtcacccccaggttaagagtccattgcaggtgttcttcgttggctgcagcttttctccatggaatagttcagacatccaag

SEQ ID NO: 460403 - DNA, 201 bp, Homo sapiens; identical to SEQ ID NO: 123125

SEQ ID NO: 460404 - DNA, 201 bp, Homo sapiens; identical to SEQ ID NO: 123126

SEQ ID NO: 460405 - DNA, 201 bp, Homo sapiens; identical to SEQ ID NO: 123129

SEQ ID NO: 460406 - DNA, 201 bp, Homo sapiens; identical to SEQ ID NO: 123131

SEQ ID NO: 460407 - DNA, 201 bp, Homo sapiens; identical to SEQ ID NO: 123132

SEQ ID NO: 460408 - DNA, 201 bp, Homo sapiens; identical to SEQ ID NO: 123133

SEQ ID NO: 460409 - DNA, 201 bp, Homo sapiens
aacatataatatccactgtcttagcatttttcaaaaatgtaatgtatcattaactatagtcatgatgttgtacgatagatcccttgaacgtattcctcccstgtaactgaaatttcggttttgtccaacatcacctccttgccacgtccaatagctccagcctcagataaataccattctactcttttcttctatgagttc

SEQ ID NO: 460410 - DNA, 201 bp, Homo sapiens
ttgacaaaatggtacgtatttatcacgtacagcatgagttttaaagtatatatacactgtggaataactaaatctatttaattgacatacacgttaccttmcagttatcatttttgtggtgagaacatataatatccactgtcttagcatttttcaaaaatgtaatgtatcattaactatagtcatgatgttgtacgatag

SEQ ID NO: 460411 - DNA, 201 bp, Homo sapiens
acattcctaccctcaaggagctcagagctgagtaagaaacttaagatttagtcagagaaatatatgccttttatacatttttttaattgacaaaatggtaygtatttatcacgtacagcatgagttttaaagtatatatacactgtggaataactaaatctatttaattgacatacacgttaccttacagttatcattttt

SEQ ID NO: 460412 - DNA, 201 bp, Homo sapiens
ttaagacagcatgactgcctgaggccaggagttcgagactagccttggcaacctagtgagaccctggctttatatatatatatatgtatatatatatatakatagagagagagagagagagagcacttcctatgtactgccattataggtgctgagaatactggagtgaacaaaagagaaaaaatactcctgtccttatgg

SEQ ID NO: 460413 - DNA, 201 bp, Homo sapiens
ttatagttcacccaaagaaccagaagatgaaaaaaaaaaaaaaaaggtagtaaacagacaaaaactataattaccactgtcccctatgcttcattaatgtwcacttttataattctaatggacatatagacaactatgtatcaaaagctttttaagctaaatattggaccaatgcatgaagacgtattttaacagatttaa

SEQ ID NO: 460414 - DNA, 201 bp, Homo sapiens
gtcctgaggtgacatacatactcctcagcttgtgagatgacaggataagacgggcataggaaatcacaagggtattgattggggaagtgataagtgtccaygaaatcttcacaatttatgtttagagattgcagtaaagacaggcataagaaattgtaaaagtattaatttggggaactaataaatgtccatgaaatcttc

SEQ ID NO: 460415 - DNA, 201 bp, Homo sapiens; identical to SEQ ID NO: 123134

SEQ ID NO: 460416 - DNA, 201 bp, Homo sapiens
atggtgcctagtggcaaaaggcagaagtcaggccccactaacttacccagttaacatgagctaaatgattcaatttataagaaaactttaggtaaaaatcwaagtgtgctacactgacgtgcagaaaatgtttggataccaagcattagtcaagtttagatactatgcattagtcagtaagtggatcttggctcatctata

SEQ ID NO: 460417 - DNA, 201 bp, Homo sapiens
attaatttggggaactaataaatgtccatgaaatcttcacaatccacgttcttcttccatggcttcagccggtccccccattcggggtccctgccttcccrcaacataggacaagagtgtatactctggagtcgtgctgccaggttgaatcctgactctaacacttggccgtatgagtttgggcaagttatatgatgtttt

SEQ ID NO: 460418 - DNA, 201 bp, Homo sapiens; identical to SEQ ID NO: 123135

SEQ ID NO: 460419 - DNA, 201 bp, Homo sapiens; identical to SEQ ID NO: 285164

SEQ ID NO: 460420 - DNA, 201 bp, Homo sapiens
gaggccaaggcaggaggatcccttggggtcaagagtttgagaccagcctgggcaacatagcgagagacctcacctttacaatcaatcaatctatctatctrtcaatcaataagtaagccaagtgtggtagcacatgcctgtagtctcagctattcaggaggatgaggcaagagaatgacttgtgcccaggagcttgaggcc

SEQ ID NO: 460421 - DNA, 201 bp, Homo sapiens
gcagtggcgcaatctcggctcactgcaagctctgcctcccgggttcacgccattctcctgcctcagcctcccgggtagctgggactacaggcgcccaccaccacgcccagctaattttttgtgtttttagtagagacgaggtttcactgtgttagccaagatggtcttgatgtcctgaccttgtgatctgcccaccttggc

SEQ ID NO: 460422 - DNA, 201 bp, Homo sapiens
agtagctgggactacaggcgcctgccaccacgcccgactaattttttgtatttttagtagagacggggtttcaccgtgttagccaggatggtctcgatctyctgaccttgtgatctgcccgtctcgacctcccaaagtgctgggattacaggcctgagccatcgtgcccagcctctgataatttttttaaaatctctttca

SEQ ID NO: 460423 - DNA, 201 bp, Homo sapiens; identical to SEQ ID NO: 123136

SEQ ID NO: 460424 - DNA, 201 bp, Homo sapiens; identical to SEQ ID NO: 123137

SEQ ID NO: 460425 - DNA, 201 bp, Homo sapiens
aaaacacttattaggaaaatagagttcagtagttataattagttttaacagctcaactctatttcttcaaatgttgcacaatccctagaccagaccacatrgaccctgaacttatttcacgtagaaaaaaaaatgatgcatttcacttaagtagaaaaatcagaaagaaaaagagaatagaataaataattttagacatgt

SEQ ID NO: 460426 - DNA, 201 bp, Homo sapiens; identical to SEQ ID NO: 123138

SEQ ID NO: 460427 - DNA, 201 bp, Homo sapiens; identical to SEQ ID NO: 123144

SEQ ID NO: 460428 - DNA, 201 bp, Homo sapiens; identical to SEQ ID NO: 123146

SEQ ID NO: 460429 - DNA, 201 bp, Homo sapiens; identical to SEQ ID NO: 123148

SEQ ID NO: 460430 - DNA, 201 bp, Homo sapiens; identical to SEQ ID NO: 123150

SEQ ID NO: 460431 - DNA, 201 bp, Homo sapiens; identical to SEQ ID NO: 123153

SEQ ID NO: 460432 - DNA, 201 bp, Homo sapiens
aagtccattaaatctctttgtctttataaattacccagtctcagggatgtctttatcagcagtgtgaaaatgaactaatacactgttttgaccaaaccacrgcaaagaattaagtaactgcccccagagaagttgcccaaggcttgcctctgcaggtacccctaccatcaactcctgcctcttgtgaatgatcacactgct

SEQ ID NO: 460433 - DNA, 201 bp, Homo sapiens; identical to SEQ ID NO: 123155

SEQ ID NO: 460434 - DNA, 201 bp, Homo sapiens; identical to SEQ ID NO: 123156

SEQ ID NO: 460435 - DNA, 201 bp, Homo sapiens
attgaaatatttatatttgtctttatatctgatatgagttgaaaactttaggttacacaaatttcttctgacatctttatatttcataccttatagaactyagtgtataaagggaaaagctatttcctaactctggtcactaaatgtgaataacttgacttaaaagatcaagtttaattttattcttagattttttttttt

SEQ ID NO: 460436 - DNA, 201 bp, Homo sapiens
aggcttgtttcaagaccctcaaagtcttccaaggccgagacactgagtttggaggcccaaccccagggaaaccccatgtttcaatcaaacatctcaaagtsaatgcaaataccagactaaatgtgatttatatgtaatggtatagatcttgactttcacttaatcagttgatattttaggtctcgcagaaaacctcactct

SEQ ID NO: 460437 - DNA, 201 bp, Homo sapiens
ccagcatgaaaactatttcgataattcaaaccaatgaaaccagattcatacacaatttgcccatgggcccagtctggcccacagctgattttatttggccsacatacttttttgaaaaaatcaaaataagtttccaatatttaatatataatattgcacattataacctgcatttgcaacttctccagaaaggcttgtttc

SEQ ID NO: 460438 - DNA, 201 bp, Homo sapiens
gaaatgaaaacaatactacttaccttcctctctctgtttggtcattgctcaaagtaactgcatgagcatcagggcaggcttcttaacttcaggaatatgawgttattcaccagtgaactgatggagacacaagaagatattacaagacacatagcaatgggaaggaaactgttgcttaaatttaaccgcctccagtgtttt

SEQ ID NO: 460439 - DNA, 201 bp, Homo sapiens; identical to SEQ ID NO: 122872

SEQ ID NO: 460440 - DNA, 201 bp, Homo sapiens
ggaaattgatcccctttaaaatgggtaccttttcttattgaagcaagtagctagattattaatgcaaaaataattttatcacatagactcatttttatcayttccattcttatcattattaaattagcctttaataaatctttagttatttgatttttttcccatacctcctgatagtccaatgtgttttgtgtcacgatt

SEQ ID NO: 460441 - DNA, 201 bp, Homo sapiens; identical to SEQ ID NO: 122873

SEQ ID NO: 460442 - DNA, 201 bp, Homo sapiens; identical to SEQ ID NO: 122874

SEQ ID NO: 460443 - DNA, 201 bp, Homo sapiens; identical to SEQ ID NO: 122875

SEQ ID NO: 460444 - DNA, 201 bp, Homo sapiens; identical to SEQ ID NO: 122876

SEQ ID NO: 460445 - DNA, 201 bp, Homo sapiens; identical to SEQ ID NO: 122877

SEQ ID NO: 460446 - DNA, 201 bp, Homo sapiens
ttccccaaatttccttctttcctgttcctcaccctgatcacgcttgatttattgatggcggttccaccaggcctaatcgccacacaccggcaaaggcaggytatgctatagtacaagccactagcctgcctcttagaacctctcatttcctttccatcatggaaatctatcctcaaggaaataacttctcagtgttccatc

SEQ ID NO: 460447 - DNA, 201 bp, Homo sapiens
aatttgaagtttatagttgaaagcttgcctgtgagttttaaaaataatcttaatttaatctctgattaccttcagcatttctttatgtccaatatacggartgcttagaaaagtatgatctgtctttggagagctctcaagcctaacagtggagaaagtaaaaaatatttagaaacagaaatgcacaagggataattacta

SEQ ID NO: 460448 - DNA, 201 bp, Homo sapiens; identical to SEQ ID NO: 122878

SEQ ID NO: 460449 - DNA, 201 bp, Homo sapiens
attagcttggcaatacctcttagattttttcttggtaggagatgcagactttatccaagaaagacagtgctactgccttccacaaaatttatattttgctrtttttgtctgcaggtcaaggtcacagtcagctttgaaagaatcagctataaatctaataagggcaaagaaacttagagggctttatggaaaagtaagttc

SEQ ID NO: 460450 - DNA, 201 bp, Homo sapiens
acaaatgtaaaataaatttttgaaaagacagaaagtgttttaaaaaaagaaagtgtttttttccctcataagtaagctttgggtaactgaaaaatctgtawaaactgaaaacatgctaataattgatatgaattaccaacttaaataatgtgttcatttaataaaatttcagttttgttaaagattttacactttaatttt

SEQ ID NO: 460451 - DNA, 201 bp, Homo sapiens
tccctcagaaaacataagcagattagatggatgttggaaggaaaatgctttggtttattttccccctgctttctgtttttatgtatttcatcatattttasttgtcaatccagcactgttttcccccatttcttcaataggtttttcttccagacagaaatatcatatttcttacagaatataaatgcaacatatatttca

SEQ ID NO: 460452 - DNA, 201 bp, Homo sapiens
cagaaattacttccctcagaaaacataagcagattagatggatgttggaaggaaaatgctttggtttattttccccctgctttctgtttttatgtatttcrtcatattttacttgtcaatccagcactgttttcccccatttcttcaataggtttttcttccagacagaaatatcatatttcttacagaatataaatgcaa

SEQ ID NO: 460453 - DNA, 201 bp, Homo sapiens; identical to SEQ ID NO: 122886

SEQ ID NO: 460454 - DNA, 201 bp, Homo sapiens
tatgaagtattataagcacattcagagcaaggtattaattattagcatgtcttttacagcgtagtactctaggatgtccaatgaactgagaaccccatagrtcaatgattctaatcccagctctctcaccttgagagtcacttaatttatttaaactttggtgttattaaagaactaacataagcatagtaaagggtttcc

SEQ ID NO: 460455 - DNA, 201 bp, Homo sapiens
gagtcagtaaatttataattgtttcatatttactttatataatatgattatagcctatatttcttttaatttgtaagtaaatgttagtaattatgagagayacttttcaggtacactggagttctgatgcaattagcttcttgagacaaaacaactccaacagatagaaacacctaggaactcaccatcttccctcccata

SEQ ID NO: 460456 - DNA, 201 bp, Homo sapiens; identical to SEQ ID NO: 122899

SEQ ID NO: 460457 - DNA, 201 bp, Homo sapiens
gctggaggatatattgttaagggggctagataaatgacgtctggataaccaaagtgttcataatggtctttttctttcttgttcttcttactttatttttyttggcccatgttctgtgtttcaggtcttaggtttgacagcatcacccatagcacctaggctttggtcactgagagcacataggccaaagagagtgcaaac

SEQ ID NO: 460458 - DNA, 201 bp, Homo sapiens
taaacaccaacttttaaaattatgttctttttcattttgcagagattgcttagagtaataaaaatgtaaatggtacaaatttacagcccttgattcgtggrgcaatccttgaattaaatgtggccaagacagcatacacatctcttgacacatttaccccttcccagacctcaattgttttggggagaaacttcaaaacaa

SEQ ID NO: 460459 - DNA, 201 bp, Homo sapiens; identical to SEQ ID NO: 122901

SEQ ID NO: 460460 - DNA, 201 bp, Homo sapiens; identical to SEQ ID NO: 122900

SEQ ID NO: 460461 - DNA, 201 bp, Homo sapiens
aagtgtagtttttacaaacttagctttattacttattaaaatccatttatatcttagttaataatactaactttccttgacattactaaaactccacttgytcccaaatattttctcaggcagatttctcacatttttctttcattattccaaatgaatgaggttttaaagtgttcacatttatgggactacatataaaaa

SEQ ID NO: 460462 - DNA, 201 bp, Homo sapiens; identical to SEQ ID NO: 122902

SEQ ID NO: 460463 - DNA, 201 bp, Homo sapiens; identical to SEQ ID NO: 122903

SEQ ID NO: 460464 - DNA, 201 bp, Homo sapiens; identical to SEQ ID NO: 122904

SEQ ID NO: 460465 - DNA, 201 bp, Homo sapiens; identical to SEQ ID NO: 122905

SEQ ID NO: 460466 - DNA, 201 bp, Homo sapiens; identical to SEQ ID NO: 122906

SEQ ID NO: 460467 - DNA, 201 bp, Homo sapiens
attttaagaaatttacatttacaattaaataagtacaggtggccagtgcctaccattttagacagctcacctctagagggatgtaatgggcacctcttgcrtcatctgcccaggcccccctttctctgcaaactgacccttctcctacaagcttcctcaggtagctccgcacagccaggttcataacgtttttccttttca

SEQ ID NO: 460468 - DNA, 201 bp, Homo sapiens; identical to SEQ ID NO: 122907

SEQ ID NO: 460469 - DNA, 201 bp, Homo sapiens; identical to SEQ ID NO: 122908

SEQ ID NO: 460470 - DNA, 201 bp, Homo sapiens; identical to SEQ ID NO: 122909

SEQ ID NO: 460471 - DNA, 201 bp, Homo sapiens
gtaattttttataaaatttttaattttttctttttgactcttttgtaataacacccaccttaaaacacaaacaacacattgtacagctgtacaaaaatatrttctttctttatatccttattctataagcttttttctacttctaaattttctcattctttcactttttaagctttttttgttaaaaactaagacataaat

SEQ ID NO: 460472 - DNA, 201 bp, Homo sapiens
gctctccgccgagcctagcccgggcatccgaaactactggaccaactgccgtccggaccgcagcagcggccgggtgaccccacgcgacccgccgccgaccyccgcgccctgaggctcccgcccgcgccgccaccgccggggaccacggtgagcaaggcgcgctgcccgcctcgcgcgggggaggggctttgagacctctag

SEQ ID NO: 460473 - DNA, 201 bp, Homo sapiens
tctgacaatgttattctattataaattttaattttcttattctgctttgtctaactttatagatttaaatacctcagcaaatctaaagtataaggatgaaraaaaaattctgatgtgatgacaatgtgccaactgaatggtatttatactttgtagtcagaaatgttacaatgaaattgtctctgcttgtgatctcacatt

SEQ ID NO: 460474 - DNA, 201 bp, Homo sapiens
gattcattatgtgggatgctccccacctctccacacaccatatatttctcccattctcattcaaaaaggacttttaaaactccctctctctgtcaagttckttcgtttctcaatacaaggagtcaagaagaaaatatttcagtgtatttttcattgaacaagttaaggagatgtgataaaaagatttgtctaattgattaa

SEQ ID NO: 460475 - DNA, 201 bp, Homo sapiens
tttgaaaacagcaaaaaaagaaaattttttcatgacaaccagttgttgaagaaagctcaacttaccaaataaaatgaatatgaaatacaaaacacaatatyagaatatttgtaaaggcaatggaacccagtcctaaaacaagttgtaataaaataaagtgattgagtttttatttggatcatgaatcaattcagaaaatat

SEQ ID NO: 460476 - DNA, 201 bp, Homo sapiens
ctgttccaataagaatgtgttgaaaatgttctctgtcccaggaaccatgtgaggctttccaaatacaaagttcataaagcacagctgtgttcttcgggagytacagatctgtgctattgtgggaagcagagatgagtacttagcagctgattaggtcaggaaaaagtcccaaggttatgaggcaatggtcctcataactat

SEQ ID NO: 460477 - DNA, 201 bp, Homo sapiens
accatcaccaaacatttactgagacaaaaaccaacatacataagaatatgtattgaaaagaccgggagcagtggctcacgcctgtaatcccagcactctasgaggccgaggtgggcggatcacctgaagtcaggagttcgagaccagtctggccgatgtggtgaaaccccatcactactaaaaatacaaaaattagccagg

SEQ ID NO: 460478 - DNA, 201 bp, Homo sapiens
aactcttgcttttcatttccaaaaccatgggggcaagataattcctccaaaggctaaaaccaagacagggtattggtggacacctggggctcagcaggccyggggagatagtgaaacctgagagttagagtttaccaggaaggtgtgataattataatttggctggaaaaaatagtaaaactaaattggttgggttgacaa

SEQ ID NO: 460479 - DNA, 201 bp, Homo sapiens
tggccgatgtggtgaaaccccatcactactaaaaatacaaaaattagccaggcatggtggtgcacgcctgtaatcccagctactcgggaggctgaggcagragaattgcttgaaccctagaggcagaggttgcagtgagccaagatcacaccattgcactccagcatgggcgacagcctggagacaaaactctgtctcaaa

SEQ ID NO: 460480 - DNA, 201 bp, Homo sapiens
tgattccacaaagttatgaaattcagatgggaggccctaacatgcgttggaggccagaaaaaaaatatccctaagaagacaggggccgggcatggtggctmacacctgtaatcccagcactttggaggccaaggtgggtggatcacctgaggtcaggagttcaagaccagcctggtcaacatggtgaaaccctgtttctat

SEQ ID NO: 460481 - DNA, 201 bp, Homo sapiens
accaccctttgctgactctctttttggactcagcccgcctgcacccaggtgaaataaacagccttgtttctcacacaaagcctgtttggtggtctcttcayatggacacgcatgacatttggtgccaaagacccatgacagagggactccttcgggagaccagtccccagtcctcaccctcactctgtaaagagatccacc

SEQ ID NO: 460482 - DNA, 201 bp, Homo sapiens
tataattataattatatatatttatataaaaagaccaataatagcagcatgttatgcatcaatagcagcaacaacttgtccaggttctgcagtcatctgarcaaaatatagagacacccagcacactccatttaaagaaaaggggaaaaaaaagtaaaaaccaaaatcccagaaaattgcaaagttctgttactattgtgg

SEQ ID NO: 460483 - DNA, 201 bp, Homo sapiens
tcactattgtcatcgtcacagccatcatcattagactgatgtcactgcagccattgttgtctccctcaaatcagtctcacatattgcatctagagtggagwtctaaaacactaatgtcatcatgccatcatgcctatttttaaacagtttaggacctacctaatgttgcactcctctccagcttccttttttgccatttta

SEQ ID NO: 460484 - DNA, 201 bp, Homo sapiens
tcctcaggtcactccccgccaggctgaatcaggctccaactcttcttcagcctctgctcccccaccctataacccttctattacctcccctccccacactyggtctggtttacagtttcattctgcaactagctctcccccacctgcccaacaatttcctcttagagaggtggctggagctgaagtcatagtcagggtaca

SEQ ID NO: 460485 - DNA, 201 bp, Homo sapiens
ccatttaaagaaaaggggaaaaaaaagtaaaaaccaaaatcccagaaaattgcaaagttctgttactattgtggtacctggcaccatttttttaaattagyttcagaatcattatctggaaggaaaacattctagaataacattatttaaaacaactttgataaagcatggtcactactatgtaccataaagctggtacaa

SEQ ID NO: 460486 - DNA, 201 bp, Homo sapiens
tcacccaagctggagtgcagtggcatgatcatggctcattgcagcctcaacctcctgggctgaagtgatcttcccacctcagcctccctagtaactatagrcatgtaccaccatgctcggctgatttttgtattttttaatagaaatggggtttcagcgttgttgcaggctggtcttgatctcctggcctcgagtgatctg

SEQ ID NO: 460487 - DNA, 201 bp, Homo sapiens
tggactgactttaatgttatcctaacttctaccctctccccagatgaatgggaaagtgttttttatctagcccaatctcacgctgataaccaccggcttcrtgagccagacctccaggaaggcattagagcagtcccccgagaagatcctcagtggaactatcaggcagattccctagatatagctaggcgagattacatg

SEQ ID NO: 460488 - DNA, 201 bp, Homo sapiens
gaactttttttcatatgattgttgactgcatgtatgtcttcttttgaaactgtctgttcatgtcctttgcccacttttttatggggttgattttttcttgyaaatttgtttaagttccgtatcgatgggggatactagacttttgttggaggcatagttcgcaaaaatttactcccactctgtaagttgtctgtttactct

SEQ ID NO: 460489 - DNA, 201 bp, Homo sapiens
ccaccggcttcatgagccagacctccaggaaggcattagagcagtcccccgagaagatcctcagtggaactatcaggcagattccctagatatagctaggygagattacatggtttcctgcctagttgaagggcttaaaaaggcagcttacaaagctgttaattatgacaaacttaaagaaactacccgaggtaaagatga

SEQ ID NO: 460490 - DNA, 201 bp, Homo sapiens; identical to SEQ ID NO: 122930

SEQ ID NO: 460491 - DNA, 201 bp, Homo sapiens
aactacccgaggtaaagatgaaaacccagcccagttcatggcccgcttagcagcaacacttagacgctttaccaccctagacccagaggggccagaaggcygccttattctcaatatgcattttattacccaatccgctcccaacattagaaaaagctccaagaattagattccagccctcaaaccccacaacaggaccta

SEQ ID NO: 460492 - DNA, 201 bp, Homo sapiens; identical to SEQ ID NO: 122931

SEQ ID NO: 460493 - DNA, 201 bp, Homo sapiens
ccagttcaaagcctccttcacgtcctccccttgtatctccccaccttaatccacaagtataggacacctctactccctccttggagaccaatcatgcaccycttaccatctcattaaaacctaatcaccattaccccgccatgctttaaaaggattaaagcccgttatcactcgcctgttacagcatggccttttaaagac

SEQ ID NO: 460494 - DNA, 201 bp, Homo sapiens
tgttgccctaagaattgtagggtgacaaaccatcccagcttgcccagaactagggagattcctgggatgcagatttttcgtgctaaaacgggactgtcccrggcaaactgggatggttggtcagcttaactcaatctggccaccctaagagcacatcacagttcaagtcacaaaatcaaccacaccagatggagagctcag

SEQ ID NO: 460495 - DNA, 201 bp, Homo sapiens
tatcacatttgtcattagctctcaaagaattcagatctctatttgtattcaatttcctcccatcccatttcaccatcatgggataattggtttataaaaawtttttaatccctctaagtactttcagagaagtacttagagaattcagactgtcccctaaaattcagtcttaagcaatgcatatcataactttgtgtagtg

SEQ ID NO: 460496 - DNA, 201 bp, Homo sapiens
accagcaaaggcaggctatgctatagtatcttccacatctaacatcgaggccaccacactgcccctctccactacctctcagcaagctgaactcatggccytcacatgggccctccctcttgcaaagggattacatgtcaatatttatactgactctaaatatgccttccatatcctgcaccaccatgctgttagatgggc

SEQ ID NO: 460497 - DNA, 201 bp, Homo sapiens
ctcacaactcaaaacccttcaaagttctcttggaaccttgagatcagtttcctttggaacccagttatgcctttaatcttcagcctgccacctccgtgttyttcctgaactagacctctggctcaaaaatgaccactgctatggtttgaagtttctcccctaaccctcctaattcatatgttgaaatcttaacccctaagg

SEQ ID NO: 460498 - DNA, 201 bp, Homo sapiens
tctctctctcattatttttgcctcacctgggacttttatttctggaccctactcccagcattagactaaaagttctccttaatgttgccagtgatcacccwagcacccaaaactagctttgttgcccacttgtctgcaaaatttgatattctgacaacctgatactctctttggcctttactctttcccttgcttttctct

SEQ ID NO: 460499 - DNA, 201 bp, Homo sapiens
tctcatgagatctgatggttttataaagggcagttcccctgcacatactgtcttgcctgccaccatgttaagacatgcctttgctcctcctttgccttccrccatgattgtgagtcctttccagccatgtggaactgagtccattaaaaatctttttctttataaattaccaagtcttgggtatgtatttattagcagcat

SEQ ID NO: 460500 - DNA, 201 bp, Homo sapiens
gctttgacatgtggatgtgtatgactaaaaggtatctccttaactcctggctatcccaagtattcaaataaactaaatctcaacaaaaatgttggtttctycacccccaattcttcctcttgactttcctatctctgtcttcaggcaacaccactctgttagtactaggctcattctcagccaccagtggtctctttctct

SEQ ID NO: 460501 - DNA, 201 bp, Homo sapiens
gtaaagcttgtgctatcaataaaaataatctattaaaacaagaaaatttctgcatactacttcaaaataatagtcaatctcacacttctgggtctttccgygaccctgcacgtctcagtcagtattccaaattcactcccactagtctgcatattttgttttattctgcaggtgcctagtttctggagtcaaaaagcccac

SEQ ID NO: 460502 - DNA, 201 bp, Homo sapiens
tgataaacactggtggtgtgttccttctcttcacttcgttttagtgatgtcacaagtgaaaggtttcagttatataaattagtggatttcaaatcttactrtaagaatcaactggaaaattcgatctagtagacaaaggtggggacaaatttagtgttttaacaagcactcctgataattctgagaaaagtagtcatcaca

SEQ ID NO: 460503 - DNA, 201 bp, Homo sapiens
ttacccaggctagagttcagtggtacaatcatggcttgctcagcctcctgggcttaagcaatcctcttgcctcagcctccaagttgctgggaccacctgcttttttttttttttagagagagaggctagacttgaactcctgtgctcaagtgatcctcccaccttagcctctcaaagtgctgggattacaggcgtgagcca

SEQ ID NO: 460504 - DNA, 201 bp, Homo sapiens
tacccaggctagagttcagtggtacaatcatggcttgctcagcctcctgggcttaagcaatcctcttgcctcagcctccaagttgctgggaccacctgcttttttttttttttagagagagaggctagacttgaactcctgtgctcaagtgatcctcccaccttagcctctcaaagtgctgggattacaggcgtgagccac

SEQ ID NO: 460505 - DNA, 201 bp, Homo sapiens
ttaggtgagaggatcacttgagcccaggaggctgaggcttcattgagccatgttggtatcactgccttccagcctgggcgacagagtgagacgctctcttaaaaaaaaaaaaaaaaatcacaaaaaacaatcaaacaaaaccttttccttttggaaaaattttatatttgctaaaatgtttcaaagacagtacaaagagtt

SEQ ID NO: 460506 - DNA, 201 bp, Homo sapiens
gtaccacagcatcaccattagaacagccctccatggctgcctgcataattcctgtgaaaggtcaccagtacttcaactacaaaggcctttttgcttttacaaaaaaaaaaaaaaaaaggaagaaaattgtaaatcagtattttcaatttttcaagaacaaaaaccagcaaaaaagcccagacacattttttttccttcttc

SEQ ID NO: 460507 - DNA, 201 bp, Homo sapiens
agttttgctttttaagtttatttttctgcagcaaagcctataggagcaattaagttggaaaataaaaaacacatcagctgtttttttaaaataaagtcacaaaaaaataaacataaaactacattaaagcaagaagatataagaagagaaaaaaaattaaaacacaccatattttgtgtaccttttaaccccatcccctcc

SEQ ID NO: 460508 - DNA, 201 bp, Homo sapiens
tggaaaataaaaaacacatcagctgtttttttaaaataaagtcacaaaaaaataaacataaaactacattaaagcaagaagatataagaagagaaaaaaawttaaaacacaccatattttgtgtaccttttaaccccatcccctccctaaaaggtattttctgtttctgagatttgcttgtctttacttcagtcatataca

SEQ ID NO: 460509 - DNA, 201 bp, Homo sapiens
ctctcagtaacccaacaatagagctcataattcctctctgttggttaacttttaccttgccttcactggtcaacaagtagaagcttttcttcttttttttyggaaaaaaaaaggtatttgacacatagtaactgtacacatttatggggtacataacgatgttttgatacatatatagtgataagatcagacaattagcat

SEQ ID NO: 460510 - DNA, 201 bp, Homo sapiens
agacactatctccaggcaataaacaaattcatgatctcaatattgacagatctcggttcaaatctttatcacttgtgagttgcttggcctctctgagcctyaactttgtccgttagggaaaaaaaagatgtaataatacttgcccaggttgttatgtgaattgaataagagaattttgtcaaagatgttaatatgaggtaa

SEQ ID NO: 460511 - DNA, 201 bp, Homo sapiens
ctagttggcataagtagtttttcccagaaatattgtgcctgtgaagatgtaattgtgggatgttgtacccaaacatccactgggttgctgataatgtctckgcacttcatgtctgcctcattctttctgcttccacagagctgatgatatttcttgggctcttttgctactacttctgtctttgtcaccaccacttttgtt

SEQ ID NO: 460512 - DNA, 201 bp, Homo sapiens
ctcccaccttagcctcctgagtagctgggactacaggtgtgcaccatcatgcctggctaatttttgtattttttatagaggcaggattttgctatattgcycaggcatgtctcgaacctgtgagctcaagcaatccactggccttggcctcccaaagtgctgggattacaggcatgagccactgcacctggtctcatcact

SEQ ID NO: 460513 - DNA, 201 bp, Homo sapiens
attattatttgtcaattaaaaacaaaacttaaaaaagaataaacatctttgataattacagtgaacaaaatttctagcatatattggcctatcctaaattrtaaggaagcattcaatttaattcttatattagaaactgaactatgtaatcctttaaaagtagtaaaatgtctcatgaaattttttttttttttttttttt

SEQ ID NO: 460514 - DNA, 201 bp, Homo sapiens
aaaggatgagaagaccaaagatgtcccctaaggatgctgtaggaatgaagaatatatattttatatatatatatatgtgtgtgtgtgtgtgtgtgtgtacdtatatatatatatatatatatgtatatttcatttacagaagctttgccttaaatagtccctgaataaatgagaaaaaaaactaaactgaaatttggaccc

SEQ ID NO: 460515 - DNA, 201 bp, Homo sapiens
aataaaaactcttctcaaggccgctttacttccaaaggaagctggagtcatacactgcaagggccaccaaaaggcatcaggtcccatcgctcagggtaacrcttatgctgataaggtagcttaagaagcagctagaattccaatttctgttcctcacagccagtttttctccttctcatcagtcactcccacctactctcc

SEQ ID NO: 460516 - DNA, 201 bp, Homo sapiens
ataaaaactcttctcaaggccgctttacttccaaaggaagctggagtcatacactgcaagggccaccaaaaggcatcaggtcccatcgctcagggtaacgyttatgctgataaggtagcttaagaagcagctagaattccaatttctgttcctcacagccagtttttctccttctcatcagtcactcccacctactctccc

SEQ ID NO: 460517 - DNA, 201 bp, Homo sapiens
tcagtgttccatctgctattctactactcctcagggattgttcaggccccctcccttccctacacatcaagctcagggatttgcccccgcccaggactggmaaattgactttactcacatgcctccagtcaggaaactaaaatacctcttggtctgagtagacactttcgctggatgggtagaggcctttcacacagggtc

SEQ ID NO: 460518 - DNA, 201 bp, Homo sapiens
taaagggtattcaattaggaaaagaggaagtcaaattgtccctgtttggagatgacatgattgtatatctagaaaaccccactgtctcagcccaaaatctmctcaagctgataagcaacttcagcaaagtctcaggatacaaaatcaatgtgcaaaaatcacaagcattcttatacaccaataacagacaaacagagagcc

SEQ ID NO: 460519 - DNA, 201 bp, Homo sapiens
tttggccttcatacctctatacagtctgataacggaccagcctttattagtcaaatcacccaagcagtttctcaggctcttggtattcagtggaatcttcrtaccccttaccgtcctcaatcttcaggaaaggtagaacagactaatggtcttttaaaaacacacctcaccaagctcagcctccaacttaaaaaggaggac

SEQ ID NO: 460520 - DNA, 201 bp, Homo sapiens
aggaaacaacaggtgctggagaggatgtggagaaataggaacactttgacactgttggtgggactgtaaactagttcaaccattgtggaagtcagtgtggygattcctcagggatctagaactagaaataccatttgacccagccatcccattactgggtatatacccaaaggattataaatcatgctgctataaagacac

SEQ ID NO: 460521 - DNA, 201 bp, Homo sapiens
cacacctcaccaagctcagcctccaacttaaaaaggaggactctgtcaaggatagagcccaaaaactcaccaaccaagcaagtaattatgctgaacccccytaggcactctctaattggatgtcctgggtcctcccaattcttagccctttaacacctgtttttctccttctcttatttggaccttgtgtcttccatttag

SEQ ID NO: 460522 - DNA, 201 bp, Homo sapiens
tggaaccaacccaaatgtccaacaacgatagactggattaagaaaatgtggcacatatataccatggaatactaggcagccataaaaaatgatgagttcamgtcctttgtagggacatggatgaaactggaaaccatcattctcagcaaactatcgcaaggacaaaaaaccaaacaccgcatgttctcactcataggtggg

SEQ ID NO: 460523 - DNA, 201 bp, Homo sapiens
gtgaaaatagacttaactgatgacattccaccattgtgatttgtttctgccccaccctaactgatcaatgtacttcgtaatctcccccacccttaagaagrttctttgtaatctcccccaccattaagaaggttctttgtaattctccccacccttgagaatgtactttgtgagatccaccccctgcccacaaaacattgc

SEQ ID NO: 460524 - DNA, 201 bp, Homo sapiens
aaaaaatgatgagttcatgtcctttgtagggacatggatgaaactggaaaccatcattctcagcaaactatcgcaaggacaaaaaaccaaacaccgcatgytctcactcataggtgggaattgaacaatgagaacacatggacacaggaaggggaacatcacacactggggactgttgtggggtgggtggagtggggaggg

SEQ ID NO: 460525 - DNA, 201 bp, Homo sapiens
caagctactcaggaggctgaggcaggagaatcgcttgaacccaggaggtggaggttgcagtgagctgagattgggccactgcactctagcctgggcaacaragcaagactctgtctcaaaaaaaaaaaaaaaaaaaaaaaaacccggcttatggaccagcatggccagagtagaatgaataagggaaataattctaagaaa

SEQ ID NO: 460526 - DNA, 201 bp, Homo sapiens
atatctctgcaccccaatcccttatttccatgccccaacctcttatattctgcaccccaatcccttatccatgccctgacctcttatctctgcaccccaamcccttttcccacttttctggaaggtaagaacccccgaacgccttccctccgtttctctactctctcttttctctaggcttgcttccttcactatgggcaa

SEQ ID NO: 460527 - DNA, 201 bp, Homo sapiens
agagagcttgatgtatacgcaaattcatatacatttctttaggttgccatagacactgatgccaatattccctttcatcctcaaattctctccctgagcayaggcaggctctataacaatgtcaatgccaatctgtgtgtggaacaccaactaggaaaaaaagttggatggcattaatttcacatgtgaagtggtctgaac

SEQ ID NO: 460528 - DNA, 201 bp, Homo sapiens
ttatttccatgccccaacctcttatattctgcaccccaatcccttatccatgccctgacctcttatctctgcaccccaaccccttttcccacttttctggraggtaagaacccccgaacgccttccctccgtttctctactctctcttttctctaggcttgcttccttcactatgggcaaccttccaccctccattcctcc

SEQ ID NO: 460529 - DNA, 201 bp, Homo sapiens
agcctgaggtgggtggatcacctgagggcaggagttcgagaccagcctggccaacatggcaaaaccccatccctactaaaaacacaaaaattagctgggcrtggcggtgtgtacctgtagtcctagctactcaggaggctgaggtacgagaatcccttgaatccaggaggcggaggttgcagtgagcctagatcacgccac

SEQ ID NO: 460530 - DNA, 201 bp, Homo sapiens
agaaaaagattctgtattttcctgtcaaactttgaaaatcaatctgtattttcaatatttatcaatattggttcatataactttttcgtaaaacttgtaasgaaaaagaaaatgagaccccattgtttttttttttaaggttttcttttctttttttttaaattatactttaagttttagggtacatgtgcacaatgtgca

SEQ ID NO: 460531 - DNA, 201 bp, Homo sapiens; identical to SEQ ID NO: 122944

SEQ ID NO: 460532 - DNA, 201 bp, Homo sapiens
catgccccaacctcttatattctgcaccccaatcccttatccatgccctgacctcttatctctgcaccccaaccccttttcccacttttctggaaggtaaraacccccgaacgccttccctccgtttctctactctctcttttctctaggcttgcttccttcactatgggcaaccttccaccctccattcctccttctact

SEQ ID NO: 460533 - DNA, 201 bp, Homo sapiens
aggtgggtggatcacctgagggcaggagttcgagaccagcctggccaacatggcaaaaccccatccctactaaaaacacaaaaattagctgggcgtggcgrtgtgtacctgtagtcctagctactcaggaggctgaggtacgagaatcccttgaatccaggaggcggaggttgcagtgagcctagatcacgccactgcact

SEQ ID NO: 460534 - DNA, 201 bp, Homo sapiens
ctacctcatactagatcaatatgatgaggcagattactacctaagaagtcaccaacttcttattcccacagctgctaaatacactttacaagtagaaaatytgtaaagtctcagcccattcatggagtagaacatagagttctattctatgtttggaacacagagttccaaaagtttccactgtctcaggaagcatataca

SEQ ID NO: 460535 - DNA, 201 bp, Homo sapiens
tttcctgtcaaactttgaaaatcaatctgtattttcaatatttatcaatattggttcatataactttttcgtaaaacttgtaacgaaaaagaaaatgagaycccattgtttttttttttaaggttttcttttctttttttttaaattatactttaagttttagggtacatgtgcacaatgtgcatgtttgttacatatgta

SEQ ID NO: 460536 - DNA, 201 bp, Homo sapiens
atctctgcaccccaaccccttttcccacttttctggaaggtaagaacccccgaacgccttccctccgtttctctactctctcttttctctaggcttgcttycttcactatgggcaaccttccaccctccattcctccttctactcccttggcctgtgttctcaaaaacttaaaacctcttcaactcacacctgacctaaaa

SEQ ID NO: 460537 - DNA, 201 bp, Homo sapiens
caaactttgaaaatcaatctgtattttcaatatttatcaatattggttcatataactttttcgtaaaacttgtaacgaaaaagaaaatgagaccccattgtttttttttttaaggttttcttttctttttttttaaattatactttaagttttagggtacatgtgcacaatgtgcatgtttgttacatatgtatacatgtg

SEQ ID NO: 460538 - DNA, 201 bp, Homo sapiens; identical to SEQ ID NO: 122945

SEQ ID NO: 460539 - DNA, 201 bp, Homo sapiens
ctctcttttctctaggcttgcttccttcactatgggcaaccttccaccctccattcctccttctactcccttggcctgtgttctcaaaaacttaaaacctsttcaactcacacctgacctaaaacctaaatgccttattttcttctgcaatgccgcttgaccccaatacaaactcgacagtagttccaaatagccagaaaa

SEQ ID NO: 460540 - DNA, 201 bp, Homo sapiens
ggaaaaagtctcatgagatctgatggttttataaagggcagttcccctgcacatactgtcttgcctgccaccatgttaagacatgcctttgctcctccttygccttccgccatgattgtgagtcctttccagccatgtggaactgagtccattaaaaatctttttctttataaattaccaagtcttgggtatgtatttatt

SEQ ID NO: 460541 - DNA, 201 bp, Homo sapiens
tatcaatattggttcatataactttttcgtaaaacttgtaacgaaaaagaaaatgagaccccattgtttttttttttaaggttttcttttctttttttttwaattatactttaagttttagggtacatgtgcacaatgtgcatgtttgttacatatgtatacatgtgccatgttggtgtgctgcacccattaactcgtcat

SEQ ID NO: 460542 - DNA, 201 bp, Homo sapiens
tcataaaataggcaaacggtctgaggtgcctgacgtccaggcattcttttacacatcagtcccttcctagtctctgtgcccagtgcaactcgtcccaaatmttccttctttccctcccgcctgtcccctcagtaccaaccccaagtgtcgctgagtctttctaatcttccttttctacagacccatctgacctctcccttc

SEQ ID NO: 460543 - DNA, 201 bp, Homo sapiens; identical to SEQ ID NO: 122946

SEQ ID NO: 460544 - DNA, 201 bp, Homo sapiens
tacaggcatgagccagtggtcccagccataaattttttaaagaaataatttgcagttgataatgtgcagtatcaggaactttgaatctggaaataaatgcstgtaatagtgagcatgtcaactgaatcatattcgccagtgacatgttttgttaactaaattataatctatcaataagtatatgaagttgataactttcca

SEQ ID NO: 460545 - DNA, 201 bp, Homo sapiens
agtcagtttggaatgtctgactgccatctctacctatcaaaattctacgaatatttcaaggcccatttcaaaggccatctccttctctatcctatttttcyttctattttagtttttgactagtttgagcacatggccttcattgttttataattgtttatagatggtttgtaggtgcaatactccaaaaccttctccaga

SEQ ID NO: 460546 - DNA, 201 bp, Homo sapiens
aaattaaactatctgctgcagttgtcagcagggtttaatttttagcataagctgaggccatcagtttcttagcagtcctattcttaaataatcatttctgyttaagagatcattttactgaacaatttcaaagcactaaatatcttcgagattgaaaaaataagcacctatagatggagcagaaactaaagaagaacaatt

SEQ ID NO: 460547 - DNA, 201 bp, Homo sapiens
gcccttcaatactcaacaatggctttatatatgccatgtcccatgggaacaaatctgtttctctccaggtagaattcatcactttctttttactttttccttttttttttttttaattgagatggggtctcactccatcacctggctgtaatgcagtggagcaatctcagctcactgcagcttcctcctcctgggcacaaa

SEQ ID NO: 460548 - DNA, 201 bp, Homo sapiens
tccactggccttggcctcccaaagtgctgggattacaggcatgagccactgcacctggtctcatcactttcatatttgagctagatccacttcaagttttcctggactacagaatgcatcatattatattatattatagtcattagccaacccattcttttcttctgggaaccataagctttttgaaaagcaggagacact

SEQ ID NO: 460549 - DNA, 201 bp, Homo sapiens
taataacttaatgaaaattaaaatgtgtagcacctctaaaactatgctcttatgtttatatgaataaatgaagttaatctataaattggtaaaattcatcrtattaatcaattgttctataatacaatcttattaaatcacacaaactcttgtgtgtgtgcataagtaacaagtaagtatgattttcagataatttaattt

SEQ ID NO: 460550 - DNA, 201 bp, Homo sapiens
aaatgtgcagtaaatgagattcacattgtaaaacaggcaatgacagaagtctggcctccttgttcttttagtttctgcttttttacttctcagggttttcttttttttttttttatcatgtttgtcttgttttttgttgcttttgcaagcattggttctcgaacttgcaattaaaagttaagtagaagtttttgtttattt

SEQ ID NO: 460551 - DNA, 201 bp, Homo sapiens
ttcttaataaaaatgaaacctagacctcagaaggttgatattgaaaggccaactctctggtgaggagtaacagccttcctaggaaagctaaatcaatctgmataattctactcctggagatcttccatggctacccttgcctaccttgccctgaccccataatgctagaactaaataactaatgctccatctcaagcataa

SEQ ID NO: 460552 - DNA, 201 bp, Homo sapiens
gaaacaatttaattgtttaaacaagagactgacatgggacgttaagttttatttaaaagaaaataaaaaaagattattccagcaatggcatagtgatgcagtacagcccagatttgaaagaaataaagtggaaggtttttggtggctttcattattttccaggtgaagatgacagcagcttgagctagggtcatagcaatg

SEQ ID NO: 460553 - DNA, 201 bp, Homo sapiens
cgcctcagacctcgccgccgccgccgccgccgccgccgcctgcgtgtggggcccgctcgcgtcttactcacacgcgccacgcacagccctgttggtttgcyctcattcacgccgactcgctctccgccgagcctagcccgggcatccgaaactactggaccaactgccgtccggaccgcagcagcggccgggtgaccccac

SEQ ID NO: 460554 - DNA, 201 bp, Homo sapiens
atttattcattaaaaatgcttcaaaaagaacaggctgcacaatattattttagctcccatttaacttgtagagttaaaatttcatgttaaattctcatatytatagaggagatgatataagaaaacttgaacaaatgtttttaagcaaaattatagttagatcacaataacgattgttagtatccagcactgtgctaagtg

SEQ ID NO: 460555 - DNA, 201 bp, Homo sapiens
tgctctactagtttgatattgaaaatatggagtatgatactttttttaaataatttatttaagaaacacttgcaataaattttattatgtgcctgacaatrtccaaagagctctactcatattaactcatttaattctggtagctctcctgtcatttcccattttacagagggaaaataagtaggtacagctgctattatt

SEQ ID NO: 460556 - DNA, 201 bp, Homo sapiens
aaggtagtggaatataaagataaggaggaattttagaaaagagaaaagaaggaggaggacttgcccttatactctatattgcttattttcatctctttcaygccctcctttaatatttggttcttcattagactgatcttcttaaaaactaatttcaattattatttctgattattggatgcttcatttctaagaggtttt

SEQ ID NO: 460557 - DNA, 201 bp, Homo sapiens
attgagttttgtggtcaattaagaccctcaatgtcatctcactggcatgagatggtatctcattgtggttttgatttgcatttctctaatgaccactgatratgagctttttttcatatgtttgttgatcatataaatgtcttctcttgggaagtgtctgttcacatcctttgcccacttttttatggggttatttttttt

SEQ ID NO: 460558 - DNA, 201 bp, Homo sapiens; identical to SEQ ID NO: 122954

SEQ ID NO: 460559 - DNA, 201 bp, Homo sapiens
atatgctattgaatcataaatactgatccaacaaactattttcagcacctctgatatgtgatcactttgctgtagctgacaccagctacatctccaaaccytcttggcttctgttgacaccatgcttccctgtggcctcctcctactccagttccacagtttcctctccagcaggcacttcttcacctcctcttataaaca

SEQ ID NO: 460560 - DNA, 201 bp, Homo sapiens
cactttgggaggccaaggcaggtggatcacgaggtcaggagatcgagaccatcctggctaacacagtgaaaccccatctctactaaaaatacaaaaaagcygggtgtggtgacgggcgcctgtagtcccagctgcttgggaggctgaggcaggagaatggtgtgaacccgggaggtggagcttgcagtgagctgagatcag

SEQ ID NO: 460561 - DNA, 201 bp, Homo sapiens
cctgtcccctcagtaccaaccccaagtgtcgctgagtctttctaatcttccttttctacagacccatctgacctctcccttcctccccaggctgctcctcrccaggccgagctaggtcccaattcttcctcagcctccgcttctccaccctataatctttttatcgcctcccctcctcacacctggtctagcttacagttt

SEQ ID NO: 460562 - DNA, 201 bp, Homo sapiens
tcctcgccaggccgagctaggtcccaattcttcctcagcctccgcttctccaccctataatctttttatcgcctcccctcctcacacctggtctagcttayagtttcgttccgtgactagccctcccccacctgcccagcaatttactcttaaaaaggtggctggagccaaaggcatagtcaaggttaatgctcctttttc

SEQ ID NO: 460563 - DNA, 201 bp, Homo sapiens
gtattttaggagagacgaggtttcaacatgttgaccaggatggtctcgatctcctgacctcatgatccatccgccttggcctcccaaagtgctgggattayaggcgtgagccactgcgcccagcctcagggacaaatttcttaccaccttttctaattatctgactcccatcgttgggacaaccaaccacaaagtgcacac

SEQ ID NO: 460564 - DNA, 201 bp, Homo sapiens
caattaatctcccaaacctcaatcccttacaaaacaacaactgctttccttcctaggcatagttagtgcggtcagaattcttacacaagagccaggaccgyaccctgtagcctttctctgcaaacaacttgaccttactgttttagcctagccctcatgtctgtgtgcagcggctgccgctgctttaatacttttagaggc

SEQ ID NO: 460565 - DNA, 201 bp, Homo sapiens
aattaatctcccaaacctcaatcccttacaaaacaacaactgctttccttcctaggcatagttagtgcggtcagaattcttacacaagagccaggaccgcrccctgtagcctttctctgcaaacaacttgaccttactgttttagcctagccctcatgtctgtgtgcagcggctgccgctgctttaatacttttagaggcc

SEQ ID NO: 460566 - DNA, 201 bp, Homo sapiens
tgccgctgctttaatacttttagaggccctcaaaatcacaaactatgctcaactcactctctacagttctcataacttccaaaatctgttttcttcctcayacctgacgcatgtactttctgcttccccgctccttcagctatactcactctttgttgagtctcccacaattaccattgttcctggcccggacttcaatcc

SEQ ID NO: 460567 - DNA, 201 bp, Homo sapiens
cagggattattcaggccccctcccttccctacacatcaagctcgaggatttgccccacccaggactggcaaattagctttactaaacatgcccgagtcagraaactaaaatacctcttagtctaaatagacactttcactgaataagtaaaggcctttcctacagggtctgagaaggccaccgcagtcatttcttcccttc

SEQ ID NO: 460568 - DNA, 201 bp, Homo sapiens
ccccttccaagccctgtcttaattgacttctaagctctcgtgtctgactttttatggtgattttcttctgtctctctcttcttcaacacttctttctgccaaaaaaaaaaaaaacaaaaattacataggacatgaaaaccttctaaatcaacaacaacaacaaaaaagactaatctttttttgttcttctcattttccatt

SEQ ID NO: 460569 - DNA, 201 bp, Homo sapiens
atacagtctgataacagacgagcctttattagtcaaatcagccagcagtttttcagactcttagtattcagtgaaacctttatatcccttatggtcctccrccttcaagaaaagtagaatagactaaaggtcttttaaaaacacacctcaccaagctcagccaccaactgaaaaaggactggacaatacttttaccacttt

SEQ ID NO: 460570 - DNA, 201 bp, Homo sapiens
aacaccaatccttaccttaacttcccaggatataattttttcttatttgtctagccactctattgaggcatataaggtcatggccttggaaatgctctatacacacacacacacacacacatacatacacacatctatgacatcatcaaaaatttttaaggctaatttataattatcctttaagatttcttatatgtacat

SEQ ID NO: 460571 - DNA, 201 bp, Homo sapiens
accaagctcagccaccaactgaaaaaggactggacaatacttttaccactttcccttctcagaattcaggcctgttctcggaatgctacagggtacggccsatttaagctcctgtatagacgctcttttttattaggccccagtctcattccagacacaagaccaacttagactgtgcctcaaaaaaaaaaaaaaaaaaaa

SEQ ID NO: 460572 - DNA, 201 bp, Homo sapiens
acaccaatccttaccttaacttcccaggatataattttttcttatttgtctagccactctattgaggcatataaggtcatggccttggaaatgctctatacacacacacacacacacacatacatacacacatctatgacatcatcaaaaatttttaaggctaatttataattatcctttaagatttcttatatgtacatg

SEQ ID NO: 460573 - DNA, 201 bp, Homo sapiens
gaaaaaggactggacaatacttttaccactttcccttctcagaattcaggcctgttctcggaatgctacagggtacggcccatttaagctcctgtatagaygctcttttttattaggccccagtctcattccagacacaagaccaacttagactgtgcctcaaaaaaaaaaaaaaaaaaaaaaaaaaaaaacttgtcatcc

SEQ ID NO: 460574 - DNA, 201 bp, Homo sapiens
ccatagttgaaggaaccaactcagtgagtggaatggtatgaaaggatgaaaacctcccctgaccgctgctcaattccctccagcagagctgatttaaattaaaaaaaaaaaaaatgcccttttgcactacattggccttttctgtgaataggtcagccaggtgcaagctaccagatgtgactttccatggtctctaagccc

SEQ ID NO: 460575 - DNA, 201 bp, Homo sapiens
aagctcctgtatagacgctcttttttattaggccccagtctcattccagacacaagaccaacttagactgtgcctcaaaaaaaaaaaaaaaaaaaaaaaamaaaaacttgtcatccctactattttctgtctagtcatactcctattcaccgttctcaactactcaaacatgccctgctcttgtttacactgccagtttac

SEQ ID NO: 460576 - DNA, 201 bp, Homo sapiens
catagttgaaggaaccaactcagtgagtggaatggtatgaaaggatgaaaacctcccctgaccgctgctcaattccctccagcagagctgatttaaattaaaaaaaaaaaaaatgcccttttgcactacattggccttttctgtgaataggtcagccaggtgcaagctaccagatgtgactttccatggtctctaagcccc

SEQ ID NO: 460577 - DNA, 201 bp, Homo sapiens
gttaaagagtagaaaattgaaaatggagtgctgagtcatttaatatatttcatctggaaactttcaccaaaatttgagagtttttttgtttttttgttttktttttttcccacactctcatagcttttggagatttagctgtagcaggtcatgggctaatttatgtaaatggaatttgtactcatacaaaaaaatgctttt

SEQ ID NO: 460578 - DNA, 201 bp, Homo sapiens
tctagaggagaggtgtccactatgtctgcaatgagggaaatgtcctatatctttactgctcaatacagtagccactggccacatgtggctattgagcactygagatgaggctaatgtgtctaaggaaattttaagaaatttacatttacaattaaataagtacaggtggccagtgcctaccattttagacagctcacctct

SEQ ID NO: 460579 - DNA, 201 bp, Homo sapiens
gtattataagtaatctaaagatgatttaaagtatatagcaggttggccaggcatggtggctcacgcctgtaatcccagcactttgggaagctgaggagggyggatcatctgaagtcgtgagtttgagaccagcctgaccaatatggagaaaccctgtctctactaaaaaaatacaaaattagccgggcatggtggtacatg

SEQ ID NO: 460580 - DNA, 201 bp, Homo sapiens
tgactatactgaatactgtaagcagtcgtaatacaatgttaaggatttgtgtatctaaacatagaaaaggtacagtaaagacataatagtgtaatctaacragaccactgttgtttatgtggtgtgtcattggccgaaacgatgttatgcagtacatgactgcagttgcactcacactctgtaggcagtagtgggaactga

SEQ ID NO: 460581 - DNA, 201 bp, Homo sapiens
ttggagatttagctgtagcaggtcatgggctaatttatgtaaatggaatttgtactcatacaaaaaaatgctttttgctttttaatagctgatcagaagaktactcttattatgtgtaaaagcatgagttacccattgattacaaagatactgaatacttattcacttacgatgccaatatttaaatgttaattcatttaa

SEQ ID NO: 460582 - DNA, 201 bp, Homo sapiens
gtcaggcagtgtgctggatctgagaatatgattactttattagtctttatattacaagttatcaaagaacttgtaagcccaagggcaacccaactttcaaygaaacaaacagtatcgagtgtgctagatgatggagaaaacgcatagtgagggcacgatataagaaaatggggacaatgtgcctggtggagcagggaaaac

SEQ ID NO: 460583 - DNA, 201 bp, Homo sapiens
tccaagaataagaataccttctataccaaatctctaagagaactgagtaaacccgtatacctgatacatctacactgcattgtggaggagtggaaactgcrcaaatggtggcaatgaaagccatccaagaacttggggtgtagtatgagtgcctgagccacagacagacaaagccacaaggccagtgaaccagaggaggga

SEQ ID NO: 460584 - DNA, 201 bp, Homo sapiens
atggatgactgtaacctcaaactcctgggctcaagggatcctcctggctcagcctccagagtgggtgagactacaggcatacactaccctgcccagctaattttttttttttttctaattttttgtggagaaggggtctcgttatgttgcccaggctgatctcaaactcttggcctcaagtgatccttccaccttctcctc

SEQ ID NO: 460585 - DNA, 201 bp, Homo sapiens
tgctaactctctggagagaatgaaattctattgttgttattgttattttcttttttcttctaaagattggagagtagagctgaaatatttgcgaaatgagyagttccataaatatcaagaagtgagtaataagtggaaactgttcttggaatgctaactcctaggatgtggtctatttttagtagaccacataataaatgg

SEQ ID NO: 460586 - DNA, 201 bp, Homo sapiens
aaggctaagttaacatgtgggtggggttttctcttcccagctggccccccccacacccctcacagccccactttatgcatctcttcccacccaacacacasgcgcgcgcgcgcgcgggatggatgcagtcgaagggtggtcatactgttactacaaacaagtctgagaggtcgctgtcgctactcactggagcgctgagac

SEQ ID NO: 460587 - DNA, 201 bp, Homo sapiens
acgatcttcagtaaacttgctttgccactgccctgcttcctggatccctgggactcatctatcctgagtggcatataagtgccaagcctgtgtcatttaarccttcctgacctagattgacactgttgtgactgtaactctgacccaatgccaccaccagctgatgccaaaacatctttttcctgcttgctcatctcgatg

SEQ ID NO: 460588 - DNA, 201 bp, Homo sapiens
tgtaatcccagaaatttgggaagttaagacagcatgactgcctgaggccaggagttcgagactagccttggcaacctagtgagaccctggctttatatatatatatatgtatatatatatatatatagagagagagagagagagagcacttcctatgtactgccattataggtgctgagaatactggagtgaacaaaagag

SEQ ID NO: 460589 - DNA, 201 bp, Homo sapiens
attccagtttccctttccactgccaccacattcattttaaatgtcaagagaagttagagaagttaggggaggtgagggcaaaggtctattccccttggacmcagaaatcagtgccagcctctgtggcagtcccaatgccaatcccgtggagcaaagcagactgcattatgcttgtcctgacattgcttttagtcatgcaga

SEQ ID NO: 460590 - DNA, 201 bp, Homo sapiens
ggtgtgcagcctgcatagtacaaagcaggggttctgcttgagcttctcaagcattatctcaactactcctcacaagctcactaggaagcgggcactgagcrtccttaccctacacatgaagaaactgaactcgaggattaggtaacttcccaagtcatagagctggtggaaggaagtcatagagcagggagagaacctggc

SEQ ID NO: 460591 - DNA, 201 bp, Homo sapiens
taagacagcatgactgcctgaggccaggagttcgagactagccttggcaacctagtgagaccctggctttatatatatatatatgtatatatatatatatrtagagagagagagagagagagcacttcctatgtactgccattataggtgctgagaatactggagtgaacaaaagagaaaaaatactcctgtccttatgga

SEQ ID NO: 460592 - DNA, 201 bp, Homo sapiens
cctaaaggtaaaactgtgtttgccttttgagaatcttcgaaacaccctgtctcaaattaagatccaaaacctgaaaccaatactctatagctttatacccyggataactctgtatactttatttttccatttactgagtgggaaagtataaactaaatgtgcataatgagatttgtactggttgaatacacattgtatgcc

SEQ ID NO: 460593 - DNA, 201 bp, Homo sapiens
ttccttcctaccttctaggtaaaagagtctcccttcattctggggcatggctccttatcacatttgttagttggcaataggctacattatgttgaggtaayaaatgaccagtctcaatggcttaagactttaaagattcatttctccctcccactatgtgtgtattgcaagttggaaactccactccaagtctgcacttta

SEQ ID NO: 460594 - DNA, 201 bp, Homo sapiens
aatggggaaattggaaatcattacccagcaaacattatctgcattatttttgtagctgctttagattgcattgtaatagaaaattaggagaccggctgtgragaagtttaagagggtcccctgaagagcttctgctttaaaattgattctttaagaaagcattaaaaagctattggaattgattgcctgctaatataaagg

SEQ ID NO: 460595 - DNA, 201 bp, Homo sapiens
atcagcttaattgaataagaatattactaagagaatctgcatttttttaaactcaccaaaatgttaattatcttagtatatttaaaaagtagcaataagarggcagcttttacatatttttaggttgaaattccattcagagctacatcttgcaactaagtggtttcttgtgtccaaaggagacagatttccactccctgt

SEQ ID NO: 460596 - DNA, 201 bp, Homo sapiens; identical to SEQ ID NO: 122964

SEQ ID NO: 460597 - DNA, 201 bp, Homo sapiens; identical to SEQ ID NO: 122965

SEQ ID NO: 460598 - DNA, 201 bp, Homo sapiens; identical to SEQ ID NO: 122966

SEQ ID NO: 460599 - DNA, 201 bp, Homo sapiens; identical to SEQ ID NO: 122967

SEQ ID NO: 460600 - DNA, 201 bp, Homo sapiens
aagacagcatgactgcctgaggccaggagttcgagactagccttggcaacctagtgagaccctggctttatatatatatatatgtatatatatatatatakagagagagagagagagagagcacttcctatgtactgccattataggtgctgagaatactggagtgaacaaaagagaaaaaatactcctgtccttatggag

SEQ ID NO: 460601 - DNA, 201 bp, Homo sapiens; identical to SEQ ID NO: 122968

SEQ ID NO: 460602 - DNA, 201 bp, Homo sapiens
gacagcatgactgcctgaggccaggagttcgagactagccttggcaacctagtgagaccctggctttatatatatatatatgtatatatatatatatatakagagagagagagagagagcacttcctatgtactgccattataggtgctgagaatactggagtgaacaaaagagaaaaaatactcctgtccttatggagct

SEQ ID NO: 460603 - DNA, 201 bp, Homo sapiens; identical to SEQ ID NO: 122969

SEQ ID NO: 460604 - DNA, 201 bp, Homo sapiens
cagcatgactgcctgaggccaggagttcgagactagccttggcaacctagtgagaccctggctttatatatatatatatgtatatatatatatatatagakagagagagagagagagcacttcctatgtactgccattataggtgctgagaatactggagtgaacaaaagagaaaaaatactcctgtccttatggagctaa

SEQ ID NO: 460605 - DNA, 201 bp, Homo sapiens; identical to SEQ ID NO: 122970

SEQ ID NO: 460606 - DNA, 201 bp, Homo sapiens
gtgttttattgacaagtccctcacatagtaagaggtttttacctattactgcttaaatctcttctggacaactctatttgtactttaagtattttacaaatttcggttatttaagcctaccacccttttagagactttatgtccctgagtgctcatatgtattctgtgaaaagatttcttagagtgtggtcaaagaaatca

SEQ ID NO: 460607 - DNA, 201 bp, Homo sapiens
caataaaattcttagacatttcttattaaagaaaaaaaaaactaggttttatcctagttctcacaaatccctgtgtaattttcaatagattactagatggaaaaaaaaaaacagtaaggatatttgtgctatacatacttcaaaggtggcatcctatgctcttctcatgaaggacagagaaatgccttttatattatgaac

SEQ ID NO: 460608 - DNA, 201 bp, Homo sapiens; identical to SEQ ID NO: 122971

SEQ ID NO: 460609 - DNA, 201 bp, Homo sapiens; identical to SEQ ID NO: 122972

SEQ ID NO: 460610 - DNA, 201 bp, Homo sapiens
tatgtaaatgattttactaagagataaaggatgagaagaccaaagatgtcccctaaggatgctgtaggaatgaagaatatatattttatatatatatatatgtgtgtgtgtgtgtgtgtgtgtacatatatatatatatatatatatgtatatttcatttacagaagctttgccttaaatagtccctgaataaatgagaaa

SEQ ID NO: 460611 - DNA, 201 bp, Homo sapiens; identical to SEQ ID NO: 122973

SEQ ID NO: 460612 - DNA, 201 bp, Homo sapiens
tattcattttgagagttaggataaaacaaattgaaaatataaacacattctgaaagacgcattatattgctactttaaaaccacatttatatttcagttgygcaggaaatacatttgcaggcatgtagaatttttcttctctgactttgtgacagaaattctgaaaggctaaaaattctattacttgtagttaatgctact

SEQ ID NO: 460613 - DNA, 201 bp, Homo sapiens
atgtaaatgattttactaagagataaaggatgagaagaccaaagatgtcccctaaggatgctgtaggaatgaagaatatatattttatatatatatatatgtgtgtgtgtgtgtgtgtgtgtacatatatatatatatatatatatgtatatttcatttacagaagctttgccttaaatagtccctgaataaatgagaaaa

SEQ ID NO: 460614 - DNA, 201 bp, Homo sapiens
taggaccatttgtggaataatttagtttacctgatgttggtgtcactccccaaagtaaagcataagcatgacgagggcaggcaccatgttacttttgttcmcagctaggtaggtgcctaacctaccactataggtactcaataaatatctactaaataaacagatggatgtatgaaatgtatttttcattaaatgtcaaag

SEQ ID NO: 460615 - DNA, 201 bp, Homo sapiens
gtaaatgattttactaagagataaaggatgagaagaccaaagatgtcccctaaggatgctgtaggaatgaagaatatatattttatatatatatatatgtrtgtgtgtgtgtgtgtgtgtacatatatatatatatatatatatgtatatttcatttacagaagctttgccttaaatagtccctgaataaatgagaaaaaa

SEQ ID NO: 460616 - DNA, 201 bp, Homo sapiens
actccagcctgggtgacagagtgagactccatctcaaaaaaaaaacttcagttacctcttaaaaactgtatctccaaattcctcaaatgtccaaatatctyctgcctccttaaaggccctatcacattaagcgttagaatttcaacatgaatttgagggagacacaattcagcccataacagcttgcctcttattaataat

SEQ ID NO: 460617 - DNA, 201 bp, Homo sapiens
gactgttatagaattccttcacatttcagttagcacctcattcttaagggacatctggatactggaactacatgcatccgtttactccaagtgtgttaacrattacccttgttagtaatgcaggaagcggagatcatttggggaggaaaagggcacttctacatgagaatgtgagaaatcctatgggtatttcctccaaga

SEQ ID NO: 460618 - DNA, 201 bp, Homo sapiens
atttaaaaagtagcaataagagggcagcttttacatatttttaggttgaaattccattcagagctacatcttgcaactaagtggtttcttgtgtccaaagkagacagatttccactccctgtttggggaccactcaagcagattacacaggcatcaagactagctggctctgtcatttcattttatttgcaagggaagagt

SEQ ID NO: 460619 - DNA, 201 bp, Homo sapiens
gagccttttcttatattctcttaaactagtggttcttaacatattgaagtaaaaaaaaattgtttttaaatcaggtggaagccatagtcactctgcccagaaaaaaaaaaatgcaaacacagtatgatatattttgcttacaaattttcaggtttttggacctcctaagtccatgagagttctaggttaagaatccagact

SEQ ID NO: 460620 - DNA, 201 bp, Homo sapiens
ctcaaaaaaaaaacttcagttacctcttaaaaactgtatctccaaattcctcaaatgtccaaatatctcctgcctccttaaaggccctatcacattaagcrttagaatttcaacatgaatttgagggagacacaattcagcccataacagcttgcctcttattaataatataccatttatttagtcattgtgacaatcatt

SEQ ID NO: 460621 - DNA, 201 bp, Homo sapiens
ttattaggcaggaatttccttgtcctaataagcctgggaacactatgggagactggggcttatttcatccctacagtttcaaccatagaagatggctacayccaagggggccattttagaggcccaccctcaggggtgcattctctttctcagggatgttccttgctgagaaaaagaattcagcaatatttctcccatttg

SEQ ID NO: 460622 - DNA, 201 bp, Homo sapiens
agcgttagaatttcaacatgaatttgagggagacacaattcagcccataacagcttgcctcttattaataatataccatttatttagtcattgtgacaatmatttcagaaggtcagtgtaagcctactatcacaacatctaatgcacaacagtgactatagattgtgcatcaaatttttaatttggataacataagcaggg

SEQ ID NO: 460623 - DNA, 201 bp, Homo sapiens
  misc_feature (1)...(201): n = A,T,C or G
tgtaacccattctcagcgtaagatggaaacctctggactctaaaccaagaagtgcatgtctttcccactgccacaattaccagttcagcgtgggcctatgntcaagcctggccaaggaaactgacaagaagaacttagaccccatcgtatcttcgtctgtcttactagatgagaagaaggacgaccattgccctaattgac

SEQ ID NO: 460624 - DNA, 201 bp, Homo sapiens
tgcatagtattttactcttttctcaatagccccaataacatcaactattttaccctattttatatctttcctcactccatccctccattatgtcctctatytcaatgcaaaaaaaaaaacctcctatatatataaaagtgcatcatgaaagatacagaacagaataacagttctctagcccttgctcaatgcgctctctat

SEQ ID NO: 460625 - DNA, 201 bp, Homo sapiens
cttttacatatttttaggttgaaattccattcagagctacatcttgcaactaagtggtttcttgtgtccaaaggagacagatttccactccctgtttgggraccactcaagcagattacacaggcatcaagactagctggctctgtcatttcattttatttgcaagggaagagtccaccctttatctttttttttttgaga

SEQ ID NO: 460626 - DNA, 201 bp, Homo sapiens
ggtatttgaggaattgccaaactatcttccacaatggctgaactaatttatactcccaccaagggtgtataagtattcctttttctcgacaaccttgtcascatctgttgttttttggactttttaatattagttattctgactggtgtgagatggcatctcattgtggttttgatttgcatttttctaagatcagagata

SEQ ID NO: 460627 - DNA, 201 bp, Homo sapiens
caatctctataatgcaaagagtattatttgagcaactcctttttacccagcaccattacttggggaaatacacatgctcaaaaatatgacccttgtggaamctctattcaaatcgtaggttaaaaaccaaataggacacacagaatagaagaagccactgtatttaattgctaaatgttgtatttcaaatatcaaaaggta

SEQ ID NO: 460628 - DNA, 201 bp, Homo sapiens
ctgggcctgggtactagttcagattacctctagtcatgaagtcaaagctggacagaaacaaataaattctcattttttctgtgggtaatgaactgagtacrgtgtagttccctcagcatgattattgatacagctttagaaagaagtctttgatatgaaagtaaaaaaaaacaaagatcctagggcaatgcttattttaaa

SEQ ID NO: 460629 - DNA, 201 bp, Homo sapiens
tatttcacttggggactttcgctatcagcaagcttcgtgttttgtttttcagttagaaatcaatgatagaaactttaaaagaaatgagcttccatctaaawtaaggttggcagaaaagtagccgaaaataacacatttcaaggctttgaagattaggagatatgtgagaagttcaaatagcttttctcttatctggagaac

SEQ ID NO: 460630 - DNA, 201 bp, Homo sapiens
atcagcaagcttcgtgttttgtttttcagttagaaatcaatgatagaaactttaaaagaaatgagcttccatctaaaataaggttggcagaaaagtagccraaaataacacatttcaaggctttgaagattaggagatatgtgagaagttcaaatagcttttctcttatctggagaactggataattcactgcttcacaag

SEQ ID NO: 460631 - DNA, 201 bp, Homo sapiens
gcaagcttcgtgttttgtttttcagttagaaatcaatgatagaaactttaaaagaaatgagcttccatctaaaataaggttggcagaaaagtagccgaaawtaacacatttcaaggctttgaagattaggagatatgtgagaagttcaaatagcttttctcttatctggagaactggataattcactgcttcacaagctaa

SEQ ID NO: 460632 - DNA, 201 bp, Homo sapiens
ttctgttgacttaaaaaaaattcaagtttctaaccctactcaatattattcatgcttacatagactgggatatctagtatgtagaacagaaaaaatatggytattaaataaggactagaaatgcaaatatgagatgcagcaatgctcagaggcatggagaaagctgaatgatgactagaaaacagaatgcttaaccccatg

SEQ ID NO: 460633 - DNA, 201 bp, Homo sapiens; identical to SEQ ID NO: 122975

SEQ ID NO: 460634 - DNA, 201 bp, Homo sapiens; identical to SEQ ID NO: 122976

SEQ ID NO: 460635 - DNA, 201 bp, Homo sapiens; identical to SEQ ID NO: 122978

SEQ ID NO: 460636 - DNA, 201 bp, Homo sapiens
agtgcaatcaggagtaacagtgggaaacaaattaaataatagattgtttacaacatatttttagcagttttcccccacaagggttaatggctgattgcttaaaaaaaaaatagtaacacaactcttgtacataaaaccatctcctttttattttttaaaactttcttaggaggatatgacagtaccaatacaagtggcacc

SEQ ID NO: 460637 - DNA, 201 bp, Homo sapiens
gagactccatgagtatatttgttaaccgctaatattttaaaaattatgattgtttatatgatatcagttgaattacttttaggtgcgagcttcagaaatayctagataaatgcatcaaaaagtgacttaagctgcattatgtaaaaagcattccaggagtaaagaagttccaggttagttaataaagttgcttaacaaatc

SEQ ID NO: 460638 - DNA, 201 bp, Homo sapiens
ttttatgtgcatggcatatgaagtattataagcacattcagagcaaggtattaattattagcatgtcttttacagcgtagtactctaggatgtccaatgawctgagaaccccatagatcaatgattctaatcccagctctctcaccttgagagtcacttaatttatttaaactttggtgttattaaagaactaacataagc

SEQ ID NO: 460639 - DNA, 201 bp, Homo sapiens; identical to SEQ ID NO: 122980

SEQ ID NO: 460640 - DNA, 201 bp, Homo sapiens
ggaaagctgctctcctacacataatactgttgcaacaccaaagtcacctacatttctttttatacgttactttttctttgattcaagaatttacccctatytctgtattggcttttcccatgctaatttaatggaatcagaatgtcatggaggcatttcctggaacttaggttttagtgctgaaaatttcatttcaggggt

SEQ ID NO: 460641 - DNA, 201 bp, Homo sapiens; identical to SEQ ID NO: 122981

SEQ ID NO: 460642 - DNA, 201 bp, Homo sapiens
cactattgtcatcgtcacagccatcatcattagactgatgtcactgcagccattgttgtctccctcaaatcagtctcacatattgcatctagagtggagttctaaaacactaatgtcatcatgccatcatgcctatttttaaacagtttaggacctacctaatgttgcactcctctccagcttccttttttgccattttat

SEQ ID NO: 460643 - DNA, 201 bp, Homo sapiens; identical to SEQ ID NO: 122982

SEQ ID NO: 460644 - DNA, 201 bp, Homo sapiens
ttagatcgggacagcttcctgcatcattggtttattgcaaccggtagtgatatggttggaagagtaacttccaaaagcagatgacattttggtataatttrtacaaataattatctatacacagacagactactaaaatacaaaaaataatttctacagtcttgaacaaaggtggcattatggaggatccttgctcactga

SEQ ID NO: 460645 - DNA, 201 bp, Homo sapiens
actattgtcatcgtcacagccatcatcattagactgatgtcactgcagccattgttgtctccctcaaatcagtctcacatattgcatctagagtggagttctaaaacactaatgtcatcatgccatcatgcctatttttaaacagtttaggacctacctaatgttgcactcctctccagcttccttttttgccattttata

SEQ ID NO: 460646 - DNA, 201 bp, Homo sapiens
gcaggagaatcgcttgaactcgggaggtggaggttgcagtgagccgagattgcgccactgcactccagcctgggtgacagagcgagactccatctcaaaamaaaaaaaagaaagaaaagaaaaatatccaattgtgcctgctttgccaaatcaaagcctcttaattggcatattggattttttttccaaactggtattatt

SEQ ID NO: 460647 - DNA, 201 bp, Homo sapiens
gaagaacttagtgtacatatggtatctagactgtgaacatatatgtctataacctgttgaaaagcatacagaaaaaagaaagtccaatcttttcataaaayagagcatgaaagaattagtaggggtcataatattttataatcaaattgttttctgtgcatctctaagtcacaaaacatcagtcagtggactacatatttg

SEQ ID NO: 460648 - DNA, 201 bp, Homo sapiens
tattgtcatcgtcacagccatcatcattagactgatgtcactgcagccattgttgtctccctcaaatcagtctcacatattgcatctagagtggagttctraaacactaatgtcatcatgccatcatgcctatttttaaacagtttaggacctacctaatgttgcactcctctccagcttccttttttgccattttatatt

SEQ ID NO: 460649 - DNA, 201 bp, Homo sapiens
cagatgaaatgattaaaatatgtatactaaatctgcttactaaatctgttgatcattaagctctatgattgtttgcaattttttctattttattaaaatamatttaacaaagtttctagtagtttgttgaaagactaaaacaaccccttaaatatgtgtttaggatacagatcagacaaaggcagaagactgaaaatatat

SEQ ID NO: 460650 - DNA, 201 bp, Homo sapiens
attgtcatcgtcacagccatcatcattagactgatgtcactgcagccattgttgtctccctcaaatcagtctcacatattgcatctagagtggagttctaaaacactaatgtcatcatgccatcatgcctatttttaaacagtttaggacctacctaatgttgcactcctctccagcttccttttttgccattttatattc

SEQ ID NO: 460651 - DNA, 201 bp, Homo sapiens
gtattctaaacaaagattagttgttctcttatttccaactaattactatagatctagttcccaaaaggattcacattcatatgtatgtataattagtggarcccatagtgaatattttatatatatatatatatatattttttttttcattttttgagatggaatctcgctctgtcacccaggctggagtgcagtggcacc

SEQ ID NO: 460652 - DNA, 201 bp, Homo sapiens
ttgtcatcgtcacagccatcatcattagactgatgtcactgcagccattgttgtctccctcaaatcagtctcacatattgcatctagagtggagttctaaaacactaatgtcatcatgccatcatgcctatttttaaacagtttaggacctacctaatgttgcactcctctccagcttccttttttgccattttatattcc

SEQ ID NO: 460653 - DNA, 201 bp, Homo sapiens; identical to SEQ ID NO: 122983

SEQ ID NO: 460654 - DNA, 201 bp, Homo sapiens
aactaattactatagatctagttcccaaaaggattcacattcatatgtatgtataattagtggagcccatagtgaatattttatatatatatatatatatwttttttttttcattttttgagatggaatctcgctctgtcacccaggctggagtgcagtggcaccatctcagctcactgcaacttccgtctcctaggttca

SEQ ID NO: 460655 - DNA, 201 bp, Homo sapiens
tgtcatcgtcacagccatcatcattagactgatgtcactgcagccattgttgtctccctcaaatcagtctcacatattgcatctagagtggagttctaaaacactaatgtcatcatgccatcatgcctatttttaaacagtttaggacctacctaatgttgcactcctctccagcttccttttttgccattttatattcca

SEQ ID NO: 460656 - DNA, 201 bp, Homo sapiens
attttctgttgacttaaaaaaaattcaagtttctaaccctactcaatattattcatgcttacatagactgggatatctagtatgtagaacagaaaaaatayggatattaaataaggactagaaatgcaaatatgagatgcagcaatgctcagaggcatggagaaagctgaatgatgactagaaaacagaatgcttaacccc

SEQ ID NO: 460657 - DNA, 201 bp, Homo sapiens
aatattttcttaataaaatctgaaattaccattctattatctgaatgataggatgataaaattcttaggttacagaactttttatacccttttgttttttkgagatagggtctcactccattacccaggctagagttcagtggtacaatcatggcttgctcagcctcctgggcttaagcaatcctcttgcctcagcctcca

SEQ ID NO: 460658 - DNA, 201 bp, Homo sapiens
tttttttaattagctgaacacaatgacacacacctgtggtcccacctactcaggaggcttaggtgagaggatcacttgagcccaggaggctgaggcttcaytgagccatgttggtatcactgccttccagcctgggcgacagagtgagacgctctcttaaaaaaaaaaaaaaaaatcacaaaaaacaatcaaacaaaacct

SEQ ID NO: 460659 - DNA, 201 bp, Homo sapiens
ccagaattcaatccagggtaccatagtatgtttgaaagtcacacctcctaagtctcctggacttctacactttctgtcttcctttgtttcttatgtctttraaagtcttgagggggactggcaagtagtctgtagaatgttttccaatctgggttcatattcaccagagaaaaagagctagaatggatagatcgatcaata

SEQ ID NO: 460660 - DNA, 201 bp, Homo sapiens; identical to SEQ ID NO: 122984

SEQ ID NO: 460661 - DNA, 201 bp, Homo sapiens
agatgaaatgattaaaatatgtatactaaatctgcttactaaatctgttgatcattaagctctatgattgtttgcaattttttctattttattaaaataartttaacaaagtttctagtagtttgttgaaagactaaaacaaccccttaaatatgtgtttaggatacagatcagacaaaggcagaagactgaaaatatatc

SEQ ID NO: 460662 - DNA, 201 bp, Homo sapiens; identical to SEQ ID NO: 122985

SEQ ID NO: 460663 - DNA, 201 bp, Homo sapiens; identical to SEQ ID NO: 122986

SEQ ID NO: 460664 - DNA, 201 bp, Homo sapiens; identical to SEQ ID NO: 122989

SEQ ID NO: 460665 - DNA, 201 bp, Homo sapiens
aactttaaaaagtcctgctttgtgttttgggcaagctgatatttacctttaccttcacaaggcctagaacatactcattctctcagcctgattctctgacrtatgggtcagaagtaaatcaatcaaggaaattcctaaataaatttattaggataggagaatttatagataagggaaaaaattctttctatgcattcattg

SEQ ID NO: 460666 - DNA, 201 bp, Homo sapiens
atcatgctgagtctacacccggctgatccttagaggctgagggttcaatattggaaaagagatgataaaattaataagccgaaggttatctttcaaagagaaaaaaaaaaaatcacatgattggtgcccatagaatcatcattttccttcccattctgcttcactcttctctttgcttctctcacttcccttcatggccag

SEQ ID NO: 460667 - DNA, 201 bp, Homo sapiens
gttcaggcagtgtggcttccctagtcaggcattgcggcttccctagtcaggcattgccacagtctccaaataaccaaagaccaaagaccaatgacaatgggtgtgtgtgtgtgtgtgtgtgtgtgtgcacgcgcatatgtgtgtgcatgtgtgtgtttatgggggcaggtaattctttctctcctatgtaatattcccttt

SEQ ID NO: 460668 - DNA, 201 bp, Homo sapiens
ttcaggcagtgtggcttccctagtcaggcattgcggcttccctagtcaggcattgccacagtctccaaataaccaaagaccaaagaccaatgacaatgggtgtgtgtgtgtgtgtgtgtgtgtgtgcacgcgcatatgtgtgtgcatgtgtgtgtttatgggggcaggtaattctttctctcctatgtaatattccctttg

SEQ ID NO: 460669 - DNA, 201 bp, Homo sapiens
aaaacattcctaaagtttttataactgttgttatgttcatcaaagcgatatatagtttgccatattagaatagatgatataagatttatgaccaaataatactcaattttgcagtttttattcaataagagaaacattatgatattgaatttattaagattcttagtatcaaaatatatgtcaacaaaatataattttgtt

SEQ ID NO: 460670 - DNA, 201 bp, Homo sapiens
gctggtagaaccacagataactctagaggagaggtgtccactatgtctgcaatgagggaaatgtcctatatctttactgctcaatacagtagccactggcmacatgtggctattgagcacttgagatgaggctaatgtgtctaaggaaattttaagaaatttacatttacaattaaataagtacaggtggccagtgcctac

SEQ ID NO: 460671 - DNA, 201 bp, Homo sapiens
taggggtctacatatacacaacttcccagtcatagattaggagaaacactcacttttatttactttgacatatttaggaaatcactattagacattaattaaagaatgattgagactaattatttgcacaaggctctgtgtgtacaaatgaaataatcagaccatggatgatccacttatttctactctctaatggtggaa

SEQ ID NO: 460672 - DNA, 201 bp, Homo sapiens
aaacattcctaaagtttttataactgttgttatgttcatcaaagcgatatatagtttgccatattagaatagatgatataagatttatgaccaaataatactcaattttgcagtttttattcaataagagaaacattatgatattgaatttattaagattcttagtatcaaaatatatgtcaacaaaatataattttgtta

SEQ ID NO: 460673 - DNA, 201 bp, Homo sapiens
gtgccactgcactccagcatgggcgacagagcaagacaccatctcaaaaaaaaaaaaaagaaaatgccagtaccatctctcagcctccatggtgtctaggstgttgtggaagaatgagcagcctctcttccagaagcttgaggggaactgaactcctgggggacaggcaggagattaaatttaaggcaagaagtttgagga

SEQ ID NO: 460674 - DNA, 201 bp, Homo sapiens
aggggtctacatatacacaacttcccagtcatagattaggagaaacactcacttttatttactttgacatatttaggaaatcactattagacattaattaaagaatgattgagactaattatttgcacaaggctctgtgtgtacaaatgaaataatcagaccatggatgatccacttatttctactctctaatggtggaaa

SEQ ID NO: 460675 - DNA, 201 bp, Homo sapiens
attaactctaaaacctctgcaggttgtctgagacacaaacacctaagcaataatctgcatgaaggcatagagacacttacagtgttagagtactaatggattttttttttttagatgagcctgaacaactttctggttttaaaagatagaggaaataagacctggagtagttaagtgaattgccagttagggctaaggaaa

SEQ ID NO: 460676 - DNA, 201 bp, Homo sapiens
caactaggagttaagaaaatgccaataacagccaggcgcggtggctcacacccagtagtttgggaggccaagatggatggattgcctgacgtcagcagttmgagaccagcctggccaacatggtgaaaccccatctctactacaaatacaaaaattagccagctgtggcacacacctgtaatcccagctacttgggaggct

SEQ ID NO: 460677 - DNA, 201 bp, Homo sapiens
gtagaatcaaaatgctaaactaaatatgtctaattctacagccaatgttcttaatcactatgctagacggtttcactattgtattacattaaggccatgaycagaaaaagaaaagctgctctttgcattccatatttgtcatttttaagatagggtttggggctttagaaaggtcaaaagagctgtgggaaagaaggtcaa

SEQ ID NO: 460678 - DNA, 201 bp, Homo sapiens
ggtcaaaagagctgtgggaaagaaggtcaaagcagcctccagctatatctcagtctgaaggtcaaagtcacgttgttcttcatagctcacagaagcttctscaattctcaaatctctgggaagcttccatcagtggtctcagtctatagtgggaaagcaggtgcttctcagcttactgggggagcctccaggacatttcat

SEQ ID NO: 460679 - DNA, 201 bp, Homo sapiens
ggggtctacatatacacaacttcccagtcatagattaggagaaacactcacttttatttactttgacatatttaggaaatcactattagacattaattaaagaatgattgagactaattatttgcacaaggctctgtgtgtacaaatgaaataatcagaccatggatgatccacttatttctactctctaatggtggaaat

SEQ ID NO: 460680 - DNA, 201 bp, Homo sapiens
ttattcaagagaagacaaaatgtctcttccttcaggtcaaagtttgcagtatatttgttatggtcatatacttggtgaattcttcactttctctgataaattttttttttttttttgagacggagtctcgctctgtcacccaggctggagtgcagtggcgtgatcttggctcactgcaagctctgcctcccaggttcacgc

SEQ ID NO: 460681 - DNA, 201 bp, Homo sapiens
atattatatgcctttatagtatcatgaacctcgtcttcagaggttttgatacatttacaacaggtaagcaatcattttacagcatttgcttttgtttttcwtcatctctgtagctctcactacagtgcacagcacagtgtagaggctcataagtatttgctgaatggtaagtgatctggagaagtgaatgatattggcaat

SEQ ID NO: 460682 - DNA, 201 bp, Homo sapiens
gggtctacatatacacaacttcccagtcatagattaggagaaacactcacttttatttactttgacatatttaggaaatcactattagacattaattaaagaatgattgagactaattatttgcacaaggctctgtgtgtacaaatgaaataatcagaccatggatgatccacttatttctactctctaatggtggaaata

SEQ ID NO: 460683 - DNA, 201 bp, Homo sapiens
taaaagaaacatggacaggccatgaatttctggaggttgacttttttaggtatgtagtctctttcttaagtaggggagaaaagaggaaatcacaaggaaattatttcaagtatttcattggttaaattgcctagtcttggcaaaactctgagaaactgggtagcacttttgttatcagcagaaacaaccaaaagtatcacg

SEQ ID NO: 460684 - DNA, 201 bp, Homo sapiens
ggagaccggctgtgaagaagtttaagagggtcccctgaagagcttctgctttaaaattgattctttaagaaagcattaaaaagctattggaattgattgcstgctaatataaaggaaaaactctttgccaccatttgagttaaaaaagagcatcttcattcatgcatgttattaaaactactggcctgaaagcccctgtag

SEQ ID NO: 460685 - DNA, 201 bp, Homo sapiens
agatcgtaattattcttttaattattagaattaaatgtaacaactgaaattactgtggcttcttggcttccattattcttcactaaagatcatatcaagtaaaaaaaaaaaaagtttacagaagctaaaaatataaggctgtacctggtttacaaaaaattatcaagaatctctgaagttcattatttgctgaaaaatagc

SEQ ID NO: 460686 - DNA, 201 bp, Homo sapiens
agttgttctcttatttccaactaattactatagatctagttcccaaaaggattcacattcatatgtatgtataattagtggagcccatagtgaatattttwtatatatatatatatatattttttttttcattttttgagatggaatctcgctctgtcacccaggctggagtgcagtggcaccatctcagctcactgcaac

SEQ ID NO: 460687 - DNA, 201 bp, Homo sapiens
ctttaataaacagtagaccaggaattcctcattaatcttccaagcataagccacatccttacaaaaaataaatcctgaatttacagcttttgctttattgytaagtttcctgtgcagcagcggtagaagtcatagctgataacacctctgattagcttttgaagcttcccctgaaataaggtaatgaccaatcggatccca

SEQ ID NO: 460688 - DNA, 201 bp, Homo sapiens
ttagccaggcgtggtggggcatgcctgtaatcccagctactctggagactgaggcatgagaatcacgcgagcctggggggcagaggctgcagtgagctgasattgcacaactgccctccagccagggcaacagagtgagactctgtcttaaacaaacaaacaaaatgggggttagatccaacaatctagttaaagaagcac

SEQ ID NO: 460689 - DNA, 201 bp, Homo sapiens
tgaggcaggagaatcacgtaaacccaggaggcagaggttgcagtgagccgagatcacaccattgcactccagcccaggtgacagtgcgagactccatctcaaaaaaaaaaaaaatccttaaggtatagatattagtaaaatgcaataaaattattagtaagtgataagctttaagtattcattacatttatttttaatata

SEQ ID NO: 460690 - DNA, 201 bp, Homo sapiens
actaattactatagatctagttcccaaaaggattcacattcatatgtatgtataattagtggagcccatagtgaatattttatatatatatatatatatattttttttttcattttttgagatggaatctcgctctgtcacccaggctggagtgcagtggcaccatctcagctcactgcaacttccgtctcctaggttcaa

SEQ ID NO: 460691 - DNA, 201 bp, Homo sapiens
catggaggtggatttcccccatgctgttctcatgatagtgagtgaattttcatgagatctgatagtttaaaagtgcggcacttcccgcctcactctctcaytcctgccaccttgtgaagagggtgcttgcttccccttcgtcttctgccatgattgtaagttttctgaggcctctttggccatgtggaactgtgagtcaat

SEQ ID NO: 460692 - DNA, 201 bp, Homo sapiens
aacaaagctgctgtgaatattcttgtacagatctttttgtgaacacgtttttctttattgtaagcaagtgcctaggactggaattactgggttgcatgtayggtatatctccataaggctatcaaactgttttccagtgtgatatactcccaccagaaacgtaagttccagtcgttccatccacatcatctccaatatctt

SEQ ID NO: 460693 - DNA, 201 bp, Homo sapiens
gatattagtaaaatgcaataaaattattagtaagtgataagctttaagtattcattacatttatttttaatataatttatttaactacaaatatatataawttaattttgcataatgcccgtgtttaacaactggctctcaaaatttccaatttatcaatcggtttttgagagcttgtatacatcacctataacataccac

SEQ ID NO: 460694 - DNA, 201 bp, Homo sapiens
cctaggttcaagtgagtctcctgcctcagcctcctgagtagcagggacttacaggcatgcaccaccatgcctggctaatttttgtatttttagtaaagacrgggttttgccatgttggctgggctggtctcgaactcctgacctcaggtgacccacctgcctcagcctcccaaagtgctgggattataggtgtgagccact

SEQ ID NO: 460695 - DNA, 201 bp, Homo sapiens
ttttcaagactcagtgtctctcacttttgaaagaagtacaaagctagaaacttacctatgattctaatggataggaatgtcattaaacaaaagacatattygtcaatcaaaaattagttgaaaatgactctaaaaccatctccacatgtcaaaaatcagagagaaagaaaaaaaatggaagtgagttcatctgtatatcat

SEQ ID NO: 460696 - DNA, 201 bp, Homo sapiens
tttaaacatgaaggaatagctttttatatttataagaaatgccctggtaccttgaaacagacaaatttgtgatttataaattgattgtagaagatctagtrctttctgccaaataacatttctgccaatcactcttgtttcttggactagtctcaaacctcaaattcatgcattttctgctttttggagtttatcttattc

SEQ ID NO: 460697 - DNA, 201 bp, Homo sapiens
tgttttattcacagagaatataatatagctcatatacaagcattatgtgtgtagagtgctgtatcctgggttatagctgctgagaatttccaggctaggtccagtgtatgaaaaatcttattcagtttgcctgcattcaaagcctgaagatgtatcctgctccaccatttaagcttcagtttcagtggcgtcatgagattt

SEQ ID NO: 460698 - DNA, 201 bp, Homo sapiens
acatggctaccccaactccgtaagtgttgagggacaatgcaactccattctttctttctcagcagtcagttcttctgggagaatcaatccaaggtagtagyagacgggagacacattgtctaccagtttccttctcttattcctcatttctttctctgtgaccagggcctgctttccttcccagcctttagctgtatgtcc

SEQ ID NO: 460699 - DNA, 201 bp, Homo sapiens
cattcagtttggagagtcttcaaaacgttgaagttcacatgtcaactattcaattagaaataaaatatgggtcaagcatggtggcttatgtctgtaatccyggcactgtgagaggctgaggtgggtggattgcttttgtccaggagtttgagaccagcctgggcaacatagagaaacctcatctctgctaaaactgcaata

SEQ ID NO: 460700 - DNA, 201 bp, Homo sapiens
ttcctcattatgactttgcctgataagagcccaacattttatgataaaaaagttgaatggaaaagttgtttttctctgtgtttatctcctttataaaaaaygtgagtggtaatagagaaaatacataatgaatgtagataaaagggagaacattgcttcagaagtaatacaaggactaacagaagcagagaatggaaaagg

SEQ ID NO: 460701 - DNA, 201 bp, Homo sapiens
ggtttcgatttaggattctctcattatgaattagaagaatctggaaaggtttaatgggggaggtgagctgaatcatgaaaaactatagaatatggataatrcgagagatgagtaaaatgaatgaaattggtaggcacacgataaaaatagaaataaatagaaaagatatttttaattgaaagtaatgaaaatactaagcca

SEQ ID NO: 460702 - DNA, 201 bp, Homo sapiens
aggcattgaatctgcagtccagaatttctgcttcctcaggaaaatctcacttcttttcattcagattttttaggataatctcttttgcttaaactgattawacaggctaaacacatctgcaaagtctctgcacagcaacacctaaattcatgtttgattgagtaactgagtattgttgctgagcctaagttggcacataaa

SEQ ID NO: 460703 - DNA, 201 bp, Homo sapiens
ttcttatttcaaattaacttggaaatatcttgtctaagataagtacatatcccaatcttcaaggacagtcttcaatcttatctttgtttaaaatgtctgaycttatccaagaggtttcccaatcactccatctaatacagtattcttgtcacttttgtcctctccttagttttcttaataatatttaccgaaatttttata

SEQ ID NO: 460704 - DNA, 201 bp, Homo sapiens
gttaatgcttgcaaaaatatgcatgttattattgcctattttcttatgtaaaatggcctaggaagtgttttgttgtgtttttatgtttctcaaataaatcyccttttaaaagtgtaaatacaattttttaaacttttttagaattatattttcagtattttgatcttttggaatttcaacacttgggactatggcatttgt

SEQ ID NO: 460705 - DNA, 201 bp, Homo sapiens
ttaccttgagccgagattgcaccactgcattccaaactgggtgacagagcgagactccatcgcaataaaaataataataataaaatagaaatttttttttwaaaaatcctatctttgcaattctaatcatgagtcataactcaactagactcagtcatttttacatgaatgaatttacccacttgtatcaaaattttaagt

SEQ ID NO: 460706 - DNA, 201 bp, Homo sapiens
ttaatagaaatggggtttcagcgttgttgcaggctggtcttgatctcctggcctcgagtgatctgcctacctgggcctcccaaagtgctgggattataggyatgagccaccacggccggctgagtatatattctttgatgatgaattatatgttcaattctttttaactgggtttattttcattttatcattcaactttaa

SEQ ID NO: 460707 - DNA, 201 bp, Homo sapiens; identical to SEQ ID NO: 122992

SEQ ID NO: 460708 - DNA, 201 bp, Homo sapiens
tttatcctagttctcacaaatccctgtgtaattttcaatagattactagatggaaaaaaaaaaacagtaaggatatttgtgctatacatacttcaaaggtrgcatcctatgctcttctcatgaaggacagagaaatgccttttatattatgaactactagtaaagtgagtaatgactaagaggatgtcctagcaaacctgc

SEQ ID NO: 460709 - DNA, 201 bp, Homo sapiens
atattagtaaaatgcaataaaattattagtaagtgataagctttaagtattcattacatttatttttaatataatttatttaactacaaatatatataatwtaattttgcataatgcccgtgtttaacaactggctctcaaaatttccaatttatcaatcggtttttgagagcttgtatacatcacctataacataccact

SEQ ID NO: 460710 - DNA, 201 bp, Homo sapiens
tggttcaagtgattctcctgcgtcagcctcctgagcgagcagctgggactacaggaacccactaccatgcctaactaatttttgtatttttagtatagatggggtttcaccatgttgcccaggctggtctcgaactcctgacctcaagtgatctgcccacctcagcctcccaaagtgctgggattacaggcatgagccacc

SEQ ID NO: 460711 - DNA, 201 bp, Homo sapiens
aggagaattgcttgaaccctagaggcagaggttgcagtgagccaagatcacaccattgcactccagcatgggcgacagcctggagacaaaactctgtctcaaaaaaaaaaaaaaaaaaaggaagaaagaaaaagaaaagaaaagaaaaagaatatgtactgaaaatagctacgtgtacaaactaccaaccaaaggaatgct

SEQ ID NO: 460712 - DNA, 201 bp, Homo sapiens
gacagagaatggtcctgtgaaaagggagagccttcgttaaatagtagttaaagtcatttagtaaagactaaaaagattgccagtgtaatagagagtaagcggtgtgtgtgtgtgtgtgtgtgtgtgtgtatgtgtgtgctgaagctcaagaattgacgtaaaacaatttaagctgaattcagtgatgagctttgtgctggc

SEQ ID NO: 460713 - DNA, 201 bp, Homo sapiens
gagatcaagagtttgagaccagcttgaccaacatggtgaaactccatttctactaaaaatacaaaaaattagccgggcatggtggcaggcacctgtaatcmcagctactcaggaggctgaggccggagaatcgtttgaatccgggaagcggaggttgtagtgagctgagatcgcaccactgcgttccagcctagtcaacaa

SEQ ID NO: 460714 - DNA, 201 bp, Homo sapiens
cagagaatggtcctgtgaaaagggagagccttcgttaaatagtagttaaagtcatttagtaaagactaaaaagattgccagtgtaatagagagtaagcggtgtgtgtgtgtgtgtgtgtgtgtgtgtatgtgtgtgctgaagctcaagaattgacgtaaaacaatttaagctgaattcagtgatgagctttgtgctggcaa

SEQ ID NO: 460715 - DNA, 201 bp, Homo sapiens
caccaactaggaaaaaaagttggatggcattaatttcacatgtgaagtggtctgaacaatgcaactaggagttaagaaaatgccaataacagccaggcgcrgtggctcacacccagtagtttgggaggccaagatggatggattgcctgacgtcagcagttcgagaccagcctggccaacatggtgaaaccccatctctac

SEQ ID NO: 460716 - DNA, 201 bp, Homo sapiens
tcagctcactgcaacctctgcctcctaggttcaagagattctcctgtctcagcctcccaagtagctgggattacaggcgtgcgccaccacacccagctaattttttttttttttttttatctttagtagagacagggtttcaccatgttggccagcctggtcttgaactcctgacctcatgatccacccacctcggcctcc

SEQ ID NO: 460717 - DNA, 201 bp, Homo sapiens
taagagttactgcaaagtaattgttcattcattcaacaaatatttgttgagtgcctactatgtattaaagactctgctgaatgttgggtatctaaaaatgaaaaaaaaaaaaagagtgtctgtcatctagggagatgaggctagagagttagacagggatcagatgatatgaggtcacagtaaagtgttatctttctttag

SEQ ID NO: 460718 - DNA, 201 bp, Homo sapiens
atacggcataatacctataagtcaatacagtcaacaatactgtgttatgcacttaaaaatccattaagaggatagatctcatattaaatgtgcttatcaccacacacacacacacacacacaaaagatgcaaagaaacttttggaggtgatggatatgtctgttaccttgattatggtgatggtttcacaggtggatgcac

SEQ ID NO: 460719 - DNA, 201 bp, Homo sapiens
aaagtcaatcactatccagtcccatgaactaatatttaagagatgatgatattttagatcataataaagtaacccagaatcaacacgtcaacatgaatatmttgtaagtgaattattttataaatttattttcgtatccttttagtgtacagtatttgattcatattattgctgttttatcatcactagacagactttcag

SEQ ID NO: 460720 - DNA, 201 bp, Homo sapiens
tagttcattttttaatgcagaatggtatcacattgcatggctatatcacaatttgtttagccattcacctgttaatggacaggttgttggatttttcaagwattttgctattataaattaagcccctatgtacattcatgtacaaatctttatatgtttgtatcctcttatttctcttaaataaatacttaggtgtggaat

SEQ ID NO: 460721 - DNA, 201 bp, Homo sapiens
gggaggatgaggcaggagaacacttgaacccagaagatggggggttgcagtgagccgagatcatgccattgcactccagcctggggtgggactctgtctcaaaaaaaaaaaaaaagagtcttaaggcaattacagaacatactatagcatctaagaaaaaagaaatagagaaatctattaaagagtctctgccaatacttt

SEQ ID NO: 460722 - DNA, 201 bp, Homo sapiens
tacggcataatacctataagtcaatacagtcaacaatactgtgttatgcacttaaaaatccattaagaggatagatctcatattaaatgtgcttatcaccacacacacacacacacacacaaaagatgcaaagaaacttttggaggtgatggatatgtctgttaccttgattatggtgatggtttcacaggtggatgcaca

SEQ ID NO: 460723 - DNA, 201 bp, Homo sapiens; identical to SEQ ID NO: 122997

SEQ ID NO: 460724 - DNA, 201 bp, Homo sapiens
aggggtgtcgcagcctggcacccccagcctgcctgcaccgggacccgcgccccttcctgcggctgtgcctgcaccttgactgcacgcccgacatctgggcrctgcaggaggggagtgcctggctcacacctttcatgcacgctgccactcatcactcccacacggcctccttactgcgttgcctcctggagccgctgtcgg

SEQ ID NO: 460725 - DNA, 201 bp, Homo sapiens
ccatccccatcaaggtaccaatgactttcttcacagaattggcaaaaactactttaaagttcatatggaaccaaaaaagagcccacatcgccaagtcaatyctaagccaaaagaacaaagctggaggcatcacgctacctgacttcaaactatactaccaggctatagtaaccaaaacagcatggtactggtaccaaaaca

SEQ ID NO: 460726 - DNA, 201 bp, Homo sapiens
tatgatttggaagtccttgcttgaagtgaatatagtaagatgttcatgctgcccttgctactgtcgttaattgtgcacagttctcccatgatccttcaccmgctgctgctactgcctatactgaggtggtcagaacaaagttcaggagaaatagatgttgaaatggacaaaaataagtgatcgtatgtcctatatgtattt

SEQ ID NO: 460727 - DNA, 201 bp, Homo sapiens; identical to SEQ ID NO: 122998

SEQ ID NO: 460728 - DNA, 201 bp, Homo sapiens
ctggcacccccagcctgcctgcaccgggacccgcgccccttcctgcggctgtgcctgcaccttgactgcacgcccgacatctgggcgctgcaggaggggartgcctggctcacacctttcatgcacgctgccactcatcactcccacacggcctccttactgcgttgcctcctggagccgctgtcggtttaccctgacttg

SEQ ID NO: 460729 - DNA, 201 bp, Homo sapiens
catctctactaaaaatacaaaaaaaattagccgggcacggtggcagacacctgtagtcccagctattcgggagactgaggcaggagaatggtgtgaacccrgtaggcggagcttgcagtgagccgagatcgcgccactgcactccagcctgggcaacagagcaagactccttctcaaaaaaaaaaaaaaaaaaaaaaaaga

SEQ ID NO: 460730 - DNA, 201 bp, Homo sapiens; identical to SEQ ID NO: 122999

SEQ ID NO: 460731 - DNA, 201 bp, Homo sapiens; identical to SEQ ID NO: 123000

SEQ ID NO: 460732 - DNA, 201 bp, Homo sapiens
cccaccaccctttgctgactctctttttggactcagcccgcctgcacccaggtgaaataaacagccttgtttctcacacaaagcctgtttggtggtctctycacatggacacgcatgacatttggtgccaaagacccatgacagagggactccttcgggagaccagtccccagtcctcaccctcactctgtaaagagatcc

SEQ ID NO: 460733 - DNA, 201 bp, Homo sapiens
tcttatgggaactggccatgatgtaacagcttgagctaagagatttgttctgcaaaagccctaagacttgttagcaaataataatttcattaaaagacagaaaaaaaaaaaaacatgtatctgcagagaaaataaaactctatcttttttcacttaataaaatagcaaatatcaccactgaactcagacatataaactgcc

SEQ ID NO: 460734 - DNA, 201 bp, Homo sapiens; identical to SEQ ID NO: 123001

SEQ ID NO: 460735 - DNA, 201 bp, Homo sapiens; identical to SEQ ID NO: 123002

SEQ ID NO: 460736 - DNA, 201 bp, Homo sapiens
ctcccgcctgtcccctcagtaccaaccccaagtgtcgctgagtctttctaatcttccttttctacagacccatctgacctctcccttcctccccaggctgytcctcgccaggccgagctaggtcccaattcttcctcagcctccgcttctccaccctataatctttttatcgcctcccctcctcacacctggtctagctta

SEQ ID NO: 460737 - DNA, 201 bp, Homo sapiens; identical to SEQ ID NO: 123003

SEQ ID NO: 460738 - DNA, 201 bp, Homo sapiens; identical to SEQ ID NO: 123004

SEQ ID NO: 460739 - DNA, 201 bp, Homo sapiens; identical to SEQ ID NO: 123005

SEQ ID NO: 460740 - DNA, 201 bp, Homo sapiens
atgctacagggtacggcccatttaagctcctgtatagacgctcttttttattaggccccagtctcattccagacacaagaccaacttagactgtgcctcawaaaaaaaaaaaaaaaaaaaaaaaaaaaacttgtcatccctactattttctgtctagtcatactcctattcaccgttctcaactactcaaacatgccctgc

SEQ ID NO: 460741 - DNA, 201 bp, Homo sapiens; identical to SEQ ID NO: 123006

SEQ ID NO: 460742 - DNA, 201 bp, Homo sapiens; identical to SEQ ID NO: 123007

SEQ ID NO: 460743 - DNA, 201 bp, Homo sapiens
tttcttattaatataagaaggcaggaatgtcaggcctctgagcccaagccaagccatcgcatcccctgtgacttgcacatataagcccagatggcttgaartaactgaagaatcacaaaagaagtgaatatgccctgccccaccttaactgatgacattccaccacaaaagaagtgtaaatggccggtccttgccttaact

SEQ ID NO: 460744 - DNA, 201 bp, Homo sapiens
gcacccccactgagcatcttgcgacccccactcctgcccaccagagaacaaacccccttcgactgtaattttcctttacctacccaaatcctataaaacgkccccacccttatctccctttgctgactctcttttcggactcagcccgcctgcacccaggtgaaataaacagccatgttgctcacacaaagcctgtttggt

SEQ ID NO: 460745 - DNA, 201 bp, Homo sapiens; identical to SEQ ID NO: 123008

SEQ ID NO: 460746 - DNA, 201 bp, Homo sapiens
ctgcacccaggtgaaataaacagccatgttgctcacacaaagcctgtttggtgttctcttcacacggacgtgcatgaaatttggtgccgttttttgttgcycacacaaagcctgtttggtggtctcttcacacggacgcgcatgaaatttggtgccgttttttgttgctcacacaaagcctgtttggtggtctcttcacac

SEQ ID NO: 460747 - DNA, 201 bp, Homo sapiens; identical to SEQ ID NO: 123009

SEQ ID NO: 460748 - DNA, 201 bp, Homo sapiens; identical to SEQ ID NO: 123010

SEQ ID NO: 460749 - DNA, 201 bp, Homo sapiens
agggcagttattatttattgtttgtaatgaaacctactcagcccagagggacattatgaggatcactgtcagattttgtaaaatgcctttggcttttcaayggaaaggtactatatatgataataaaaggaatagcaataatattcttgcaccatcttgacactgagttcatctttgtcttaaaaaataagttcatcttta

SEQ ID NO: 460750 - DNA, 201 bp, Homo sapiens
ttttaaaaatatacatcaaccaaaacatcttgcaaaagattgactactgaagcatttatgaaaatccagctgtcatttattatgtcagacactagaacttytcaaacatataaaacaatctatctcttcttgcagtttttgtttgcttggaaaggacagttatttttcataacaatgttatgtgttaacatggaatgagtt

SEQ ID NO: 460751 - DNA, 201 bp, Homo sapiens
agaaatttcactgaggtatagtatatttctagttatttttatgtattttaattaatgcccaacactttgaatgctcacaaagaatatcatcactagaaaaytcagtcttatctcttccaaaataaattattggatagtgttacttagtacaggactatcggggaacctgcccccaatagtcacgtaggttcttttctattt

SEQ ID NO: 460752 - DNA, 201 bp, Homo sapiens; identical to SEQ ID NO: 123011

SEQ ID NO: 460753 - DNA, 201 bp, Homo sapiens
gtgtcatgccaatgcttcctcacttgcaaggcactccagaaagtaccacagtttggtttctcctttgacctaaattctcctgaagtgtgtctccatggggmtattgatggtctcctgggcaccaagccctgaatatattagtctctctgcagcatttgacctggttggctgtttgaggctctttcttcttttggggtcctg

SEQ ID NO: 460754 - DNA, 201 bp, Homo sapiens; identical to SEQ ID NO: 123012

SEQ ID NO: 460755 - DNA, 201 bp, Homo sapiens; identical to SEQ ID NO: 123013

SEQ ID NO: 460756 - DNA, 201 bp, Homo sapiens; identical to SEQ ID NO: 123014

SEQ ID NO: 460757 - DNA, 201 bp, Homo sapiens; identical to SEQ ID NO: 123015

SEQ ID NO: 460758 - DNA, 201 bp, Homo sapiens; identical to SEQ ID NO: 123016

SEQ ID NO: 460759 - DNA, 201 bp, Homo sapiens; identical to SEQ ID NO: 123017

SEQ ID NO: 460760 - DNA, 201 bp, Homo sapiens; identical to SEQ ID NO: 123018

SEQ ID NO: 460761 - DNA, 201 bp, Homo sapiens
ttggaaattgagggcaactggctggggtcactccctagtattgcctgaaggcccaggaatgcatgggaataactgccctgcccagaaggggaaatgattcttttttttttttttaaatcttttctgggtgtggtccctgatccctgtgtgtagacagctcagagcaaacccgcacaagtttcaggtgacttaaaccttctt

SEQ ID NO: 460762 - DNA, 201 bp, Homo sapiens
atgctaaaagtcagggattacacccaggtaccaaaggaaagctcatagtaggctctggagggaaagcatgaaaagtggcactggtgcccacctaaggtcarcaacgtctgacactctaagattgcaccccacagaaggacactctgggggatcctgtggacctcaacctccccaaaggggacgctctcggcaaaggttctg

SEQ ID NO: 460763 - DNA, 201 bp, Homo sapiens
tcagcctcctgagtagctgggattacaggcgcccacgaccacacctgacgaattttggtcaggctggtctcgaactcccgacctcaggtgatctgcctggygctgggattacaggcgtgagccaccatgcccggccccttcatcttttttaatactttagttcccagtacctgaaatctgatgcaaaccatatttgtttat

SEQ ID NO: 460764 - DNA, 201 bp, Homo sapiens
ataagccctccttagaattttctctgagttgcaattttgcttggccccaaaattgtttagaatctggagtttactatctaatgggagagtgggatggccaytgcatgtatgcaggcttttgcactaagcagggggcctggttaactaacgtatgatgctctcatttggtgctgtttagccccagtgttctttggagtcggg

SEQ ID NO: 460765 - DNA, 201 bp, Homo sapiens
cccttagcggcaagtcccgcttttctacggggcaagaacccccaatcccttattttcacgccccaacctcttatctctgtgccccaatctcttatttccaygccccaacctcttatctctgtgccccaatcccttatttctgtgccccaacctcttatctctgtgccccaatcccttatttctgtgccccaacctcttatc

SEQ ID NO: 460766 - DNA, 201 bp, Homo sapiens
tctgagttgcaattttgcttggccccaaaattgtttagaatctggagtttactatctaatgggagagtgggatggccattgcatgtatgcaggcttttgcrctaagcagggggcctggttaactaacgtatgatgctctcatttggtgctgtttagccccagtgttctttggagtcgggaggtttggcctttaaaaatcaa

SEQ ID NO: 460767 - DNA, 201 bp, Homo sapiens
gcaattttgcttggccccaaaattgtttagaatctggagtttactatctaatgggagagtgggatggccattgcatgtatgcaggcttttgcactaagcagggggcctggttaactaacgtatgatgctctcatttggtgctgtttagccccagtgttctttggagtcgggaggtttggcctttaaaaatcaaactgccgt

SEQ ID NO: 460768 - DNA, 201 bp, Homo sapiens
ttagggacttcatcaaaagcatctaaaaatcttagcactacactttccaataaacaaaaatgaatacattgacgtaccacattgattttaacttgagtgtktaacagcataaccaccaaagtgttatctctataaaacaactgcttagtttcaaaagagaacccatttcaccctgtgtggggtacacgtgtcctctcgttt

SEQ ID NO: 460769 - DNA, 201 bp, Homo sapiens
gaataattctgtctaattcagaagttacctaaaagttagttcaaattacagatttgaaaaggttatttgtgaaacaatgtagtaaggaatcattaagtagrgaggaaagatctggaaaaagtttaaataataaaatattatttaaaacctgatggagaattggagatatttggctaacattttcataaagctcttagtctt

SEQ ID NO: 460770 - DNA, 201 bp, Homo sapiens
caccctttgctgactctctttttggactcagcccgcctgcacccaggtgaaataaacagccttgtttctcacacaaagcctgtttggtggtctcttcacayggacacgcatgacatttggtgccaaagacccatgacagagggactccttcgggagaccagtccccagtcctcaccctcactctgtaaagagatccaccta

SEQ ID NO: 460771 - DNA, 201 bp, Homo sapiens
tagagttgggggccctatccttgttaatagtgtaatcaatacaaaatgtaggaattacacctaagtgtcctatgcattatagctccatcatggtaattagyatttcttattataattacctttttatgtgtttcttcatgaatctcttgatgacagggattgtatcttattcatctttgaaatccttctgctaagcacagt

SEQ ID NO: 460772 - DNA, 201 bp, Homo sapiens
aaaaagaggtaaaaatattgtgcatcagctctcagtaaccacagaagatgtatttaatggtgcaacaagaaaattagctccataaaataatgtgatttgtrgcaagtatgtaggccaaggtggtaagaaaggggcagtagagtgctgtcccaatcactgaagtactagaatgcaaataagaattcatcagatacgacctag

SEQ ID NO: 460773 - DNA, 201 bp, Homo sapiens
gcacccaggtgaaataaacagccttgtttctcacacaaagcctgtttggtggtctcttcacatggacacgcatgacatttggtgccaaagacccatgacasagggactccttcgggagaccagtccccagtcctcaccctcactctgtaaagagatccacctatgacttcgggtcctcagaccaaccagcccaaggaacat

SEQ ID NO: 460774 - DNA, 201 bp, Homo sapiens
tagtaaaattatattttataaaactataagttaaaaatatatttaagtggaaaaatagcagataaaaatctctcatgataaaaagtgatgatgggaaggayggcatcatggtggattaactagagaaagtattttatttttacttcttgtttcattaacctctctattaaactgatggcttcagaaactgtgacaatcatc

SEQ ID NO: 460775 - DNA, 201 bp, Homo sapiens
tcttttcactctcttctccagcctctctcgctacccttcaatctccctgtccttccaattccagttttttcctctagtagagacaaaggagacacattttwtctgtggacccaaaactctggcgccggtcacggactcaggaagacagtcttcccttggcatttaatcactgcggggatgcctgcctgattattcacccac

SEQ ID NO: 460776 - DNA, 201 bp, Homo sapiens; identical to SEQ ID NO: 123022

SEQ ID NO: 460777 - DNA, 201 bp, Homo sapiens
gtggacccaaaactctggcgccggtcacggactcaggaagacagtcttcccttggcatttaatcactgcggggatgcctgcctgattattcacccacattmcattggtgtctgatcaccgcagggacacctgccttggtcattcacccacattcccttggtggcaagtcaattgtggagatgcctgttttggctgctcacc

SEQ ID NO: 460778 - DNA, 201 bp, Homo sapiens
attaggctcagcaaataacctgggctgtactgccacaaggcttcacagacagtgtcaattacttcagtcaagcccaaatttcttcctcattcattacctaycttggcataattcttcgtgaaaacacacgtgctctccctgctgattgtgtccagctaatctcccaaaccccaaccccttctacaaaacaacaactccttt

SEQ ID NO: 460779 - DNA, 201 bp, Homo sapiens; identical to SEQ ID NO: 123024

SEQ ID NO: 460780 - DNA, 201 bp, Homo sapiens
gtgctctccctgctgattgtgtccagctaatctcccaaaccccaaccccttctacaaaacaacaactcctttccttcctaggcatggttaggtacttctgyctttggatacctagttttaccatcctgacaaaaccattatataaactcacaaaaggaaacctagctgaccccataaatcctaaatcctttccccactccc

SEQ ID NO: 460781 - DNA, 201 bp, Homo sapiens
ctttaataaaaactcttctcaaggccgctttacttccaaaggaagctggagtcatacactgcaagggccaccaaaaggcatcaggtcccatcgctcagggyaacgcttatgctgataaggtagcttaagaagcagctagaattccaatttctgttcctcacagccagtttttctccttctcatcagtcactcccacctact

SEQ ID NO: 460782 - DNA, 201 bp, Homo sapiens
attccaatttctgttcctcacagccagtttttctccttctcatcagtcactcccacctactctcccactgaaacttccacctatcaatctcttcccacacraggcaaatggttctaggaccaaggaaaatatctccttccagcttcacagtcccattctattctatcatcatttcataatctcttccacataggtttcaag

SEQ ID NO: 460783 - DNA, 201 bp, Homo sapiens; identical to SEQ ID NO: 123025

SEQ ID NO: 460784 - DNA, 201 bp, Homo sapiens; identical to SEQ ID NO: 123026

SEQ ID NO: 460785 - DNA, 201 bp, Homo sapiens
cctgcacccaggtgaaataaacagccttgtttctcacacaaagcctgtttggtggtgtcttcacacggacgtgcgtgacaggaagcagtgcatcttacgcrtaatctatagcagtggtggtttaaatgaatctcctttgtactcaaacagcatatctttaacttatcagagagtagctagcagagcaggcttaactaggag

SEQ ID NO: 460786 - DNA, 201 bp, Homo sapiens; identical to SEQ ID NO: 123027

SEQ ID NO: 460787 - DNA, 201 bp, Homo sapiens; identical to SEQ ID NO: 123028

SEQ ID NO: 460788 - DNA, 201 bp, Homo sapiens
tatatttgtctttgctagagagtttgagatgttagtgtttggcatagaaagttataaaactataaacctagctgaaacaaaatgaccttggtttgcatgctttttttttttttaaataaatcagagtaatttatgaaaggaaaatatcttgggccctcaaaatcaccaagctgaagggaaaattcaagctaagaactcctt

SEQ ID NO: 460789 - DNA, 201 bp, Homo sapiens; identical to SEQ ID NO: 123029

SEQ ID NO: 460790 - DNA, 201 bp, Homo sapiens; identical to SEQ ID NO: 123030

SEQ ID NO: 460791 - DNA, 201 bp, Homo sapiens; identical to SEQ ID NO: 123031

SEQ ID NO: 460792 - DNA, 201 bp, Homo sapiens; identical to SEQ ID NO: 123032

SEQ ID NO: 460793 - DNA, 201 bp, Homo sapiens; identical to SEQ ID NO: 123033

SEQ ID NO: 460794 - DNA, 201 bp, Homo sapiens; identical to SEQ ID NO: 123034

SEQ ID NO: 460795 - DNA, 201 bp, Homo sapiens
aaagcagagtttcaaattcaaggccctagagctttacattaagctgatctagaagctctttttgcctttatttaaggaactgataacaaatgctgaatgargaggagctgaactctgagcccccaggactgacatttcagatctttttcctggtggcaccatccatttatcagacattcttatcaatcttcccagtaggca

SEQ ID NO: 460796 - DNA, 201 bp, Homo sapiens; identical to SEQ ID NO: 123035

SEQ ID NO: 460797 - DNA, 201 bp, Homo sapiens
gtcctttagctgaaacaaactaaaacacaagttatgattgactgaaggttttatcatctgtgatttacaaggaaaccaacctcttggaatgacttctcctyagcctcccagatacgctggaagaagttgagaatatttggtgaattaattctataaatgcttgctcactgactggggccatttaaaaataatgaggaggaa

SEQ ID NO: 460798 - DNA, 201 bp, Homo sapiens; identical to SEQ ID NO: 123036

SEQ ID NO: 460799 - DNA, 201 bp, Homo sapiens
tacataggtaaacatgtggtttgctgcacctatcaacccatcacctaggtattaagccctccatgcatagctatttatcctgatgctcttcctcccaccgscctccccaccctgacaggcccaagtgtgtgttgttcccctcgctgtggaatttgaccattttatatacctcatatgagtggaatcatgcagtatttatct

SEQ ID NO: 460800 - DNA, 201 bp, Homo sapiens; identical to SEQ ID NO: 123037

SEQ ID NO: 460801 - DNA, 201 bp, Homo sapiens; identical to SEQ ID NO: 123038

SEQ ID NO: 460802 - DNA, 201 bp, Homo sapiens
atcctgaatcaacttataataaaaacaatttggaaactaaattttctgggttcagtcacaggttctggtgcttactagctgtgttttattgggcaaattamttaacctctctatttctcaattttctcatctgcaaaatggatttaaaaattgtatatcatcatgggcctatagtgaagattaaatgaattaatacagttc

SEQ ID NO: 460803 - DNA, 201 bp, Homo sapiens; identical to SEQ ID NO: 123039

SEQ ID NO: 460804 - DNA, 201 bp, Homo sapiens
agaaactgtgacaatcatctttgctccctctctcttggtttatgtgccaaagcttagctcttcttggtgatctttggggctatgaaaaatgacatgctagktatttttcctcaaataacattaacttttaaaaatattgtattgcaattataatacaaatcactagccctgtgtgattgaaatgataacagtatattgtcc

SEQ ID NO: 460805 - DNA, 201 bp, Homo sapiens
gaaagaacagctgtggttctacatggggtccacctggcagcttgaagcatccagatgtcaactcctacttaaaaaaagaaaaagcaagcactcttttgccrtggtaatgttgccttcagaggcaactggtgtgggagtggagattaaaggaaagaaaaattagaggcgaaagggccacgcttccatttgattctcacctgt

SEQ ID NO: 460806 - DNA, 201 bp, Homo sapiens
aaatgctcttcatataaagtttatatataattgttattaaatacttgaacacgataaataactagagaagacttagacttatgtgttttataaagatcacrctaaaatatgattcaaaaaaattcaaaaatattggattacctaaaagaagtgtatccatttctgattacttattctcactttcccacgaaggaaaatttc

SEQ ID NO: 460807 - DNA, 201 bp, Homo sapiens
atagaaaaagagcccctatcctgaattgcagctcagccatgctcatcattctccctgttgttgtggcagctgtcaggaaaaattatttgaacagcagcatmttgaacagatggcttagagacaagttagaaatggaaacacctatgagaagaaaattgcaaaagtcaagcctagacttcaaagcacagggaatggactgct

SEQ ID NO: 460808 - DNA, 201 bp, Homo sapiens
tgcaattactatctgctaatagtaatttaattgtttaatgaataatatcaaggagagtaaatattaatgaaaatgtagaacattttattttatttatttawttatttatttatttatttatttatttatttttgagacagagtcttgctctgttgcccaggttagagtgcagtggcgtgatctcggctcactgcaacttcc

SEQ ID NO: 460809 - DNA, 201 bp, Homo sapiens
tgaggcaagagaatcgcttgagcctgggaggctgaagttgcagtgagccaagatcgtgccactgcactccagcatgggcgacagagcaagacaccatctcaaaaaaaaaaaaaagaaaatgccagtaccatctctcagcctccatggtgtctagggtgttgtggaagaatgagcagcctctcttccagaagcttgagggga

SEQ ID NO: 460810 - DNA, 201 bp, Homo sapiens
ggaagtgtctgttcacatcctttgcccacttttttatggggttattttttttcttataaatttgtttaagttccttgtagattctggatattagatctttrttagatggatagattgcaaaaatttcctcccattctgtaggctgcctgttcactctgatgatagtttcttttgctgtgcgaagctttttagtttaattag

SEQ ID NO: 460811 - DNA, 201 bp, Homo sapiens; identical to SEQ ID NO: 123040

SEQ ID NO: 460812 - DNA, 201 bp, Homo sapiens
aatggcttgttctactttatagatttttcaacactgcaattcacagaattatactgtactatgaaatataaagtattacacgcaactttgataattggtgtttatggaccacagagcacagataatcacaagtgtttaaatttggggttttagtttcttctcagacccccattaacccttccttggcaaaggttactgcta

SEQ ID NO: 460813 - DNA, 201 bp, Homo sapiens; identical to SEQ ID NO: 123041

SEQ ID NO: 460814 - DNA, 201 bp, Homo sapiens
tttaaacagtaaatcccaatttttgttttacaacatatatcctcacctgcttacatagacttacgtgtatttcttttttgtttgtttgtttgttttgagayggagtttcactcttgttacccaggctggagtgcaatggtgtgatctcggctcactgcaacctccgttttccgggttcaagtgattctcctgcctcagtct

SEQ ID NO: 460815 - DNA, 201 bp, Homo sapiens; identical to SEQ ID NO: 123042

SEQ ID NO: 460816 - DNA, 201 bp, Homo sapiens
agtgcaatggtgtgatctcggctcactgcaacctccgttttccgggttcaagtgattctcctgcctcagtctcccaagtaactgggattacaggcaggtgccaccatgcccggctaatttttttatttttagtacagatggggtttcactatgttgatgaggctggtctcgaactcctgacctcatgtgatccgcccgcct

SEQ ID NO: 460817 - DNA, 201 bp, Homo sapiens; identical to SEQ ID NO: 123043

SEQ ID NO: 460818 - DNA, 201 bp, Homo sapiens; identical to SEQ ID NO: 123044

SEQ ID NO: 460819 - DNA, 201 bp, Homo sapiens; identical to SEQ ID NO: 123045

SEQ ID NO: 460820 - DNA, 201 bp, Homo sapiens; identical to SEQ ID NO: 123046

SEQ ID NO: 460821 - DNA, 201 bp, Homo sapiens; identical to SEQ ID NO: 123047

SEQ ID NO: 460822 - DNA, 201 bp, Homo sapiens; identical to SEQ ID NO: 123048

SEQ ID NO: 460823 - DNA, 201 bp, Homo sapiens; identical to SEQ ID NO: 123050

SEQ ID NO: 460824 - DNA, 201 bp, Homo sapiens; identical to SEQ ID NO: 123051

SEQ ID NO: 460825 - DNA, 201 bp, Homo sapiens
cactatttatttgggagaaatttttctgttctttttgactctaaccttctaagaattgttaaatttgcaagcaaaattatgcagaaaatgtaaccttaagrcagaaaaattaataataatgacaagaaaaagaataatgctttaaattgcctacattcaaattcaagaagtagaagaattgaacagcaaggatttctattg

SEQ ID NO: 460826 - DNA, 201 bp, Homo sapiens; identical to SEQ ID NO: 123052

SEQ ID NO: 460827 - DNA, 201 bp, Homo sapiens
ttaaacaagaattaaatcaagaattaaaaaaaaaaacagctttaataatgtatcatccttatagaggaggaagtgattctgcaaatatttgaaacgttaasctgaaaaaccatgaatcttgtggtatgtggtcttataaacaaaacaaacaaaaaccccaaaatactctgactatagaatttccattgaggtgagagaaag

SEQ ID NO: 460828 - DNA, 201 bp, Homo sapiens; identical to SEQ ID NO: 123053

SEQ ID NO: 460829 - DNA, 201 bp, Homo sapiens; identical to SEQ ID NO: 123054

SEQ ID NO: 460830 - DNA, 201 bp, Homo sapiens; identical to SEQ ID NO: 123055

SEQ ID NO: 460831 - DNA, 201 bp, Homo sapiens; identical to SEQ ID NO: 123056

SEQ ID NO: 460832 - DNA, 201 bp, Homo sapiens; identical to SEQ ID NO: 123057

SEQ ID NO: 460833 - DNA, 201 bp, Homo sapiens
agccaaccattctgaacagatctttgtctacagatgcaaacagaggtgttttttttttctgaaaatagaatcacaatatttttaaactggtattttcactstgttgcagaaaccagaaagaaaagaaatatcttaaataacgaacataattataactctttattatgtccctcaattctgttgataaaaagtgaagaacaa

SEQ ID NO: 460834 - DNA, 201 bp, Homo sapiens
ccaccctccaccttcacattcatttctttcttcactccaatttagtctacactgctcccaggttaaagtgcattctggctttaatgcccgatgttctttcktatgagccccattctccagccaaaaaataaccatttgctatgcagtcttttcctctctgtgcctttgttatattattccttatgtgcataatattttatt

SEQ ID NO: 460835 - DNA, 201 bp, Homo sapiens
ctaattgacctgcttagaagaggcattgttttgttatttgcacgaaggcattatataacctagctgcaacttggcccttggatctgatgtatgtgttctgsatgaatggtgaaaacactatgcaatgaggattaagcaggcttcattaagagaaacaaaaaatcatacaacagttttgctaatccagcatttacttgcatt

SEQ ID NO: 460836 - DNA, 201 bp, Homo sapiens
caaaaaatcatacaacagttttgctaatccagcatttacttgcattgaaagtcatttacttgcattgaaagtcaacaaatgggtgaggtgcggtgctcacrcctttaaccccagcacttggggaggctgagatgggaggatcacttgagcccaggagtttgagaccagcctggacaacatggtgagaccccgtctctgcaa

SEQ ID NO: 460837 - DNA, 201 bp, Homo sapiens
ctgagaggtcctaaatagcaatcctggccaaagtatcaagctctgtctccctctgtggcagtcacagtgctatcagtaggctaaatccatcctctcttcasagttgagcctctctcccacactcacatggcaataattgaaactttgggtacatttgcctcgcctttccatatatgatcctacactgcataaatcctgcag

SEQ ID NO: 460838 - DNA, 201 bp, Homo sapiens
ataaatcctgcagcttttatgccatctgctttatctcccctttcttctcaacttaaagtcccacttttctgaatactctcagaaaggggaggcataaatcygaaactatgcatcagattagactagaaatccctatagagctctctagtccctgtagctcattcttcagatcaggtgtggagtcaggataaaacggcatga

SEQ ID NO: 460839 - DNA, 201 bp, Homo sapiens
atggccttggctcgttccatagagagcagcgtaaaacttggagggaagacttatcttgttaattctcagcagctgtctttaggttttagcagctgtttggsggtttaatgagaatagaggagaatagctctctatttggaaatgcaagagggttttggactaatttttttccaaagaattggtgctgaatgtataaatgta

SEQ ID NO: 460840 - DNA, 201 bp, Homo sapiens
attgattctagaatgaattactggctcatgcatcttcatctactttacctccactatactagaaatcagtcaaacatttttgttttttcttttaattaatrtcaattcataccaaatgatgaagcatgcttctctcataataaaggaaaataatgaaaaaaattaagttccaaacaatgatagtgaagttgcccaataaaa

SEQ ID NO: 460841 - DNA, 201 bp, Homo sapiens; identical to SEQ ID NO: 123059

SEQ ID NO: 460842 - DNA, 201 bp, Homo sapiens; identical to SEQ ID NO: 123060

SEQ ID NO: 460843 - DNA, 201 bp, Homo sapiens; identical to SEQ ID NO: 123061

SEQ ID NO: 460844 - DNA, 201 bp, Homo sapiens; identical to SEQ ID NO: 123062

SEQ ID NO: 460845 - DNA, 201 bp, Homo sapiens; identical to SEQ ID NO: 123063

SEQ ID NO: 460846 - DNA, 201 bp, Homo sapiens; identical to SEQ ID NO: 123064

SEQ ID NO: 460847 - DNA, 201 bp, Homo sapiens; identical to SEQ ID NO: 123066

SEQ ID NO: 460848 - DNA, 201 bp, Homo sapiens; identical to SEQ ID NO: 123065

SEQ ID NO: 460849 - DNA, 201 bp, Homo sapiens; identical to SEQ ID NO: 123067

SEQ ID NO: 460850 - DNA, 201 bp, Homo sapiens; identical to SEQ ID NO: 123068

SEQ ID NO: 460851 - DNA, 201 bp, Homo sapiens; identical to SEQ ID NO: 123070

SEQ ID NO: 460852 - DNA, 201 bp, Homo sapiens; identical to SEQ ID NO: 123072

SEQ ID NO: 460853 - DNA, 201 bp, Homo sapiens; identical to SEQ ID NO: 123074

SEQ ID NO: 460854 - DNA, 201 bp, Homo sapiens; identical to SEQ ID NO: 123075

SEQ ID NO: 460855 - DNA, 201 bp, Homo sapiens
atgggtcaagcatggtggcttatgtctgtaatcctggcactgtgagaggctgaggtgggtggattgcttttgtccaggagtttgagaccagcctgggcaasatagagaaacctcatctctgctaaaactgcaataaataaataaatatggaaataagggaaaaaatgttaagctaaagataaaatttgagaatcatcacca

SEQ ID NO: 460856 - DNA, 201 bp, Homo sapiens
cccatttcatgataccattttttaagacacagaatttctgtaatagcaaatcacttaccataagatttttttttcattaatttgcattcttcacaacaacwaacagaaaagtattgtgattgtgtctcacctgcaatttggtgggcaaactggtacacctactttaacctctatgatcaaatgacactgcttcaggagtat

SEQ ID NO: 460857 - DNA, 201 bp, Homo sapiens
tgggtcatttctaatcttatagaaaagtggtaaactagccattgtgagagagagagaatcaacttcaagcttttgaaaaatattcagagttgaattattartattgataaaatcaaataccttctgaacccatactatttgcatggcattctattatagggtatgaagtaatgtaagacatatccttatcttcaatatact

SEQ ID NO: 460858 - DNA, 201 bp, Homo sapiens; identical to SEQ ID NO: 123079

SEQ ID NO: 460859 - DNA, 201 bp, Homo sapiens
tgttcttttcaggtaaatgtccactaactaggaattaatttgaacttggggtaactgttttccaaaataatcagtctctaactcaaaagacttcagctctyagttattaaatgtatttttttctatttttcaaggataaatgatgtctaaagagaaatataaaatatttgaaaatatgaccatgaaaatagcaaacatgct

SEQ ID NO: 460860 - DNA, 201 bp, Homo sapiens
aggggtgagcctatccattttagtggaaatcagaacttcttttttcttcttttcttttgagacagtcttgctctgtcacccaggctggagtgcagtggtaygatcataattcactgcagcctcaaactcctgggctcaagcggtcctcccacctcagcctccctagtagctgggactacgggctccatacaccatcatgcc

SEQ ID NO: 460861 - DNA, 201 bp, Homo sapiens; identical to SEQ ID NO: 123082

SEQ ID NO: 460862 - DNA, 201 bp, Homo sapiens; identical to SEQ ID NO: 123083

SEQ ID NO: 460863 - DNA, 201 bp, Homo sapiens
agggaaaccccatgtttcaatcaaacatctcaaagtgaatgcaaataccagactaaatgtgatttatatgtaatggtatagatcttgactttcacttaatyagttgatattttaggtctcgcagaaaacctcactctacctccttttgtagtttactcaaaacacttattaggaaaatagagttcagtagttataattagt

SEQ ID NO: 460864 - DNA, 201 bp, Homo sapiens
gaagagtatgacagcatttcacactcggagtaaaacatataaaggccagagtcagggaaatgctactaatgacacaccaagcactcaacgttaaagctcaratgcaagaaagaaagatgctgtaaccttggaatcttagaaagtctgcatggcagtaccctgtaggtgaaattgttatgtactgaggatcaatttttatta

SEQ ID NO: 460865 - DNA, 201 bp, Homo sapiens
ttaggaaaaaataaaatattacctgaagttttcacacttggttatctcgaaccttcctatagtcctaggttttattcagtgtttaagaggtaaatccttcyactccttaattatcatttaaaagactttaggcattgtgccagacaagaaagatacagatagacagtggttccaccttttaaagggagagaagacaagata

SEQ ID NO: 460866 - DNA, 201 bp, Homo sapiens
gaggtaaatccttctactccttaattatcatttaaaagactttaggcattgtgccagacaagaaagatacagatagacagtggttccaccttttaaagggmgagaagacaagatatgcacatataaaatagctggacaattatccctagacacatagacaagggtctcaaacaataactaaagagctaaaattattaaaac

SEQ ID NO: 460867 - DNA, 201 bp, Homo sapiens
catctccaagcagcctagaagtactttattcttagtcatgatgatcattttcaaatgaataatctaagttggagtttttcaagcaaaacaattaaagattmttttacaaaaatataaccaacataatctttgattaacaaattatattgtggaaataacaatggaacattaaatataccattttgtgaatgtaccgtaatg

SEQ ID NO: 460868 - DNA, 201 bp, Homo sapiens
acatacattttaaaatgacagagtaaaaaaaatagtcatctttttgttcctttgtaattacaactataacctcgacaaggcaacctgcaatgagagcattyttgctcaagaagggatataagaataactctctggagctaactcttttaaaacgaccttgaataatatctgcatatggcttttcccgaagttagtgaaatt

SEQ ID NO: 460869 - DNA, 201 bp, Homo sapiens
acacatcagctgtttttttaaaataaagtcacaaaaaaataaacataaaactacattaaagcaagaagatataagaagagaaaaaaaattaaaacacaccrtattttgtgtaccttttaaccccatcccctccctaaaaggtattttctgtttctgagatttgcttgtctttacttcagtcatatacagcttatacgcacc

SEQ ID NO: 460870 - DNA, 201 bp, Homo sapiens
ctggcaatgctgtcttgttacttttttctccctcttttgtgtgcaattcttgtataacaaaggggagagcaagttcaaaaaaggatctaaaacacataagmttattactattatttcttacaacgagtggcttttttctagtttaaaaagtaacttattgggagctatggcaattctgatataatctgaagtcacctatgt

SEQ ID NO: 460871 - DNA, 201 bp, Homo sapiens
taatcccagctctgtcaccgtgtatagtcaggtgtatagttgtgtagttgtatacatagttgtatagtcagggaactagtagaagggaaatcagggaaggyctctaatcccagctctgtcaccttgtatagtcaggtgtatagttgtatacatagttgtatagtcagggaactagtaggtgctaacgagcacaaagatgac

SEQ ID NO: 460872 - DNA, 201 bp, Homo sapiens
atcagcctctcttctcaaaactccacatatcttctctattgtctctctccgctgatctcctttcctcttatttcattaaaaatagaagcatcagaagagarcttccaaagatttcaccagcagaaccatttggccccaagcctttgtgcctgcattctctgtcttctcctcattactctgggtgaaccacccatgcttcta

SEQ ID NO: 460873 - DNA, 201 bp, Homo sapiens
cattagaaaggctatgccttaggtttagtaccatacccttctctgcaaagcttaaaaacatgtgtgtcaagattccttagaaggggagataatctttcaawgttaagtcttgccctgttagaggggattgagagacaccttgacctttttacacatctgtcctagacaatgtcaaggtgatcatccagtaattaactgcct

SEQ ID NO: 460874 - DNA, 201 bp, Homo sapiens
tattgatttaatttcttttttctccacttttctgtgataattgttaatctgcaccacccatttttggtaatattgctttttatatggctaatcccaacccyttttattttttgtaatgagaacaagctttctgaattcatattcagtgataaaaatgttatgacagaatcataggcttatcaacttagagctggacaaagc

SEQ ID NO: 460875 - DNA, 201 bp, Homo sapiens
gcacctcttatttttagctgtacattagcccttttattggtgcttcttgtcatggcaagttacaaacaaccccacctgaagattttcatctaacagattcyggcttcagtggaaattgatcccctttaaaatgggtaccttttcttattgaagcaagtagctagattattaatgcaaaaataattttatcacatagactca

SEQ ID NO: 460876 - DNA, 201 bp, Homo sapiens
gaccagagatgctttgtcacccactccttagcttttcccactgctgactacataccttgtggttcctaaatacctttatggaacaacttaatgcccttaaygctatttcacttggggactttcgctatcagcaagcttcgtgttttgtttttcagttagaaatcaatgatagaaactttaaaagaaatgagcttccatcta

SEQ ID NO: 460877 - DNA, 201 bp, Homo sapiens
caaaatagctgaaaattttaagaaagaggattttagctgttcttaccacaaaaagaaatgataaatatttaagatgtggatattctagcctgacttgatcrttctacaatgtataaatgtttcaaaatatcacactgaatcccataaatatacaaattattatttgtcaattaaaaacaaaacttaaaaaagaataaacat

SEQ ID NO: 460878 - DNA, 201 bp, Homo sapiens; identical to SEQ ID NO: 123091

SEQ ID NO: 460879 - DNA, 201 bp, Homo sapiens
accagtctcctgaatcttctgtttcccttttccagcagcacctcttcatttactggctcttacacgtctgtgcacaatcaaggttccttgatctccaactygccactccttccccatccttctgccatcatcctttggtacttatctcagatctccaaattgtcttacactcttatccaaaaaaaatctaattctagttct

SEQ ID NO: 460880 - DNA, 201 bp, Homo sapiens
gatcttgtgagagaggttggtaagtcaaggatggcaccaaggtttttgactgagcaacctgatggggttgccaccaactgagaggaagaagactggaaatgactaagtgccaaagccaatgagctttttccctgtgatgctaaactttaccagatagggatgctacatgttaaatatcctaaaactttcgtgaaatctcct

SEQ ID NO: 460881 - DNA, 201 bp, Homo sapiens
ttaagcaaggatgctatctgacaaattacaaaactcatgtgcctcagcaatgcctgcaagtttccagtaatttccctgggtaatttggttcatggaacatkgctctgtgtcacatttccctttgttagtaatcatggaaatagttgaatgctggacaagcactgttcctacaatgttatattaagatgttttattcacaga

SEQ ID NO: 460882 - DNA, 201 bp, Homo sapiens
aatgtgcggactctaatttctaggatttgatggatgcaaaaattcttgagcacagaattcctataacagaataagagattaaatttttactaaaatattamctatattcaaagtagaattgaataaggcttacatgcctaaaacatacagctccaactgtttagttccagttggaagaatcctcaaatatatgcagtattt

SEQ ID NO: 460883 - DNA, 201 bp, Homo sapiens; identical to SEQ ID NO: 123096

SEQ ID NO: 460884 - DNA, 201 bp, Homo sapiens; identical to SEQ ID NO: 123094

SEQ ID NO: 460885 - DNA, 201 bp, Homo sapiens
tgggactatggcatttgtgtttgtttgttttggaattatgattagctcccacctgaaggacatactgagaatcctcaaatatatgaagtcttttgtttttycggtaaatttaaaattctttgttcactgagtaagtactttgtgaagaacaaatgctagattattaattccttatgaatattttaaatctcattatttaga

SEQ ID NO: 460886 - DNA, 201 bp, Homo sapiens; identical to SEQ ID NO: 123097

SEQ ID NO: 460887 - DNA, 201 bp, Homo sapiens
tcattctggtcagactcattaggagctgaagtttctgaactgcaaggttgattcatgaatggggaccactcctgaccactactgttgccaaaacattgatrttctttgtgtcccctacctggaccaccttttctgtcctgtgaactgatcagtaaacatggatgattgcaagggatacaccatccagacaaagggaaattt

SEQ ID NO: 460888 - DNA, 201 bp, Homo sapiens; identical to SEQ ID NO: 123103

SEQ ID NO: 460889 - DNA, 201 bp, Homo sapiens; identical to SEQ ID NO: 123106

SEQ ID NO: 460890 - DNA, 201 bp, Homo sapiens
ttcccacaacataatcaccatagttggaggaatagcataattttggaaattataatgtaattatattaagtttcataagtgttttctgtatttatacttcraaaaattttttaaatgtgctctttctctactgtgtgcacacaaagatctgcggttctatttgctttttatttctcataaaaataaaactgaattatagaa

SEQ ID NO: 460891 - DNA, 201 bp, Homo sapiens
tactatgttaactatagcttttagcacctctgtttatcattgtaatcaaattatattgaaagccaatgaaaacttaatagttacacttattttgttgaccyttactatatgtcaagaaaatgggacaatgcaatctttatttgcaggctaaaatcattttaaaattttcatgaagaaaataaaataaaaagtacaaaatgc

SEQ ID NO: 460892 - DNA, 201 bp, Homo sapiens
ttttaaattatactttaagttttagggtacatgtgcacaatgtgcatgtttgttacatatgtatacatgtgccatgttggtgtgctgcacccattaactcrtcatttaacattaggtattcttgattcaattcctaaatgaccaaagagcaagtgctgctttgatgttgctgggctctgttgattttcctgtctgtatcag

SEQ ID NO: 460893 - DNA, 201 bp, Homo sapiens
gaaagaattgagaattataccacttggtaggaagtcaacgcaattatattcggtgaaaaaacaaaaatctctacgcacaaaataatgatgaaccaaaagaygcagtggactctgcaagacaagttaagtatattagtttattgtaattccatttgctgtttttagagtaggaactggctattgagtggactgaagatggtg

SEQ ID NO: 460894 - DNA, 201 bp, Homo sapiens
ataccacttggtaggaagtcaacgcaattatattcggtgaaaaaacaaaaatctctacgcacaaaataatgatgaaccaaaagacgcagtggactctgcargacaagttaagtatattagtttattgtaattccatttgctgtttttagagtaggaactggctattgagtggactgaagatggtggggggcagaagagcaa

SEQ ID NO: 460895 - DNA, 201 bp, Homo sapiens
cgcagtggactctgcaagacaagttaagtatattagtttattgtaattccatttgctgtttttagagtaggaactggctattgagtggactgaagatggtkgggggcagaagagcaaaataaagaaaaaagacatatggaagaatgaaaagaaggaaggaaggaattatgaagtcagttttttaactcacagccaagaaag

SEQ ID NO: 460896 - DNA, 201 bp, Homo sapiens
gggcagaagagcaaaataaagaaaaaagacatatggaagaatgaaaagaaggaaggaaggaattatgaagtcagttttttaactcacagccaagaaaggcyagaagctcttactagaatttataaagcaaaaaattaaaattgtaaatatcttctgacaaagagaatctatatgacttgctgatataagggaatcagtttg

SEQ ID NO: 460897 - DNA, 201 bp, Homo sapiens
tttttatcttttagattaaaataatctggggtctgatcacttagattatttaaaattctggaaatgacaatgatagctatggttactaggaccctatgacytttgtctacaactgccaaagaaaactgtgcgttctagttaataccctgacttctctcttaaaaatcgattgctacctttttatattgattataaatatca

SEQ ID NO: 460898 - DNA, 201 bp, Homo sapiens
agaggtgttttttttttctgaaaatagaatcacaatatttttaaactggtattttcactctgttgcagaaaccagaaagaaaagaaatatcttaaataacraacataattataactctttattatgtccctcaattctgttgataaaaagtgaagaacaaaaatagtatttgttgacagggagtaaaagaaacctgtagag

SEQ ID NO: 460899 - DNA, 201 bp, Homo sapiens
gctattaacttgttattgtctttatttggaaattaagtatggtttaaggcaagggtgtccaatcttttggcttccctgggccacattaaaagaagaagaaytgccttgggccacatataaaatacactaacactaacgacagctgatgagatttttttaaaaatcacaaaaattctcataatgttttaagaaagcttatca

SEQ ID NO: 460900 - DNA, 201 bp, Homo sapiens
gaattctaggtttgctgacttttggactccaggacctccaccagctgtttcttgggtcctgaagcttttgacctcagattgaaacttacaccagcttcctsggttctgaggttactagacttagactgagccacactaccagcatctcagggtctccaacttgtagacgacctgtgctatgacttctcagccaccataaag

SEQ ID NO: 460901 - DNA, 201 bp, Homo sapiens
ttcacgccattctcctgcctcagcctcccgggtagctgggactacaggcgcccaccaccacgcccagctaattttttgtgtttttagtagagacgaggttwcactgtgttagccaagatggtcttgatgtcctgaccttgtgatctgcccaccttggcctcccaaagtgctgggattacaggcgtgagccactgcacctgg

SEQ ID NO: 460902 - DNA, 201 bp, Homo sapiens
ttagtagagacgaggtttcactgtgttagccaagatggtcttgatgtcctgaccttgtgatctgcccaccttggcctcccaaagtgctgggattacaggcrtgagccactgcacctggccactgtgaaatatttttataagacattataaaaagcattcagttttaaaagggaaacagagcataaaagtttagaaaaattg

SEQ ID NO: 460903 - DNA, 201 bp, Homo sapiens; identical to SEQ ID NO: 123114

SEQ ID NO: 460904 - DNA, 201 bp, Homo sapiens
aactatccttatactcaatcccaaacaatttaccaggttgcttgcatatgatcatcttttctaacattttcttatcgtcccaacgatactgtgaactccakgaagacacggtttgttttttcatgcaccaaaaaaaaaaaaaaagaaaagaaaagaaaaaatccagcactatgtatgactctttatatttccagcttctac

SEQ ID NO: 460905 - DNA, 201 bp, Homo sapiens; identical to SEQ ID NO: 123117

SEQ ID NO: 460906 - DNA, 201 bp, Homo sapiens
tttcaaaagaaggcattgcttttcatttttaaacacattctgttcagaggcccttaaacatcttgaaagtttgattaagaattctaggtacccccacaatwatcctcaaataacataagtttctcttgcaaccatctagaacttttgctcattccccctccacagatgttcaggatattcttaaacaaatagtgataatcc

SEQ ID NO: 460907 - DNA, 201 bp, Homo sapiens
agttgcaatagctgaagaatgatttatattatttatctagaagctaacaatggtatttccattttaataaacagatagtaagaatataattttgctcttartcttctttaaagttgtcacaatagaactctggaagggaaatgtatctatcccatgccattttacattttaaaacccacaaaaagccatctaaacctctag

SEQ ID NO: 460908 - DNA, 201 bp, Homo sapiens
gatgactgccttcggttctcattgccacttcttcagtgctggctccatttctgtgggtctcctccattattgtcacaatataaccatcagcagctcctggrgttatgtgttttcagataccagtcaagcacaaaacaatttgaaatttattcttgcagctctaatttgcccaaattgggttgtgtgttcaaccctgaacca

SEQ ID NO: 460909 - DNA, 201 bp, Homo sapiens
taatagttataccagatagttttcaaatttgtgtattcttaaagaaaattgagataaagcactgatgagcatacttttacgcattattatagttattcttytttttttaaaaaaaaaaacttcatttccgttgggtgccatggctcacacctgtaatcccagcactttgggaggctgaggcgggtggatagcttgagcctg

SEQ ID NO: 460910 - DNA, 201 bp, Homo sapiens
tagagctctgaatcttgttttcatgtgtctctgcctcccaggtgagatgttaatacaaacagtaaactaagcacatgcaattcgtaagaagagccacaacycacagccttctagtctcttttggtcaagcaaaaaaaaaaaaaaaaaaaaaaatgaacagactctaaaacccaagaagcaaatgattgaaataacgagaga

SEQ ID NO: 460911 - DNA, 201 bp, Homo sapiens
gatcaaagttgatgtccagcagcctctctctggttcctcccattaaattcacaccacatgcctccaccagcttttgtgtaattaaacttgctatttttaayacacaagcagaaaccattgaaaggtaatggtaactgttgtgtagatgaaaaaggcctatttgtcaccattcattataccaattcagccatgataaatgaa

SEQ ID NO: 460912 - DNA, 201 bp, Homo sapiens; identical to SEQ ID NO: 123118

SEQ ID NO: 460913 - DNA, 201 bp, Homo sapiens
ggtatggatttatttttacattagttatctttgtttttcatttggtgcaatatccccatttaagttccttggaaatagactccatgagaaatttgtgtgtstggaattttgggaagtgttttgataacaacagctgaaaggaaatgaaaaaaaaattttggacagatggagaggctcatctgtaacactgtcatgacagag

SEQ ID NO: 460914 - DNA, 201 bp, Homo sapiens; identical to SEQ ID NO: 123119

SEQ ID NO: 460915 - DNA, 201 bp, Homo sapiens
cacatcaatggctattgtggaaaatttgtgatcacaataattggtaagacactatctccaggcaataaacaaattcatgatctcaatattgacagatctcrgttcaaatctttatcacttgtgagttgcttggcctctctgagcctcaactttgtccgttagggaaaaaaaagatgtaataatacttgcccaggttgttat

SEQ ID NO: 460916 - DNA, 201 bp, Homo sapiens
cctcccgggttcaagcgattctcctgcctcagcctcccgagtagctgggattacaggcgctgccaccacaactggctaatttttgcatttttagtagagayggggtttcaccatgttggcccggatggtctccatctcctgacctcgtgatccgcccactttggcctcccaaagttctgggattacaggcctgagacccca

SEQ ID NO: 460917 - DNA, 201 bp, Homo sapiens; identical to SEQ ID NO: 123120

SEQ ID NO: 460918 - DNA, 201 bp, Homo sapiens
ggaaactggtcttgaattactaccctggtgagaatccaaataacaaacagaagtgtaaacagatttctcaagcttatgaagtgctctctgaagcaaagaarattgaattatttgagaaaagaggagagtgggcaattaaaaagggtgaagtgagtggcagttttggctccctcatggacatcgttgatatgttatttgaag

SEQ ID NO: 460919 - DNA, 201 bp, Homo sapiens
tgagagacatgcaagtttaagagtcaggagattaacggtaaatcccatgtgttctctgcattttgtgactggtcgtgtccttctactccctttctgggtamacaattccttgtctctcttcatatgaatactgaaatgttacaatctttatgcaattttctgacacttgacacccaaagaagaagcacaatcactccagaa

SEQ ID NO: 460920 - DNA, 201 bp, Homo sapiens
tatattctgcctctttagacatagtttatcaacacaatttacatttcctgatggttcaggattatcttcactataaacacatgatgctctccctcaaattkttgacacccaccccatgctgccattagtacatactgcctcaattactggaacctacttctattgtttcaccttaacctacagtctaacttatgttttaca

SEQ ID NO: 460921 - DNA, 201 bp, Homo sapiens
agagtttaaaagcttacctctctctccaagtttgatttcccacttcctcactatccctaacatcagtgtagtggtgagctgttttccatgtggccacaggkgattggaaaataggcttggaaaacaaggaatccgaagtctacatctccagggagaaaagaattttattgttgtcaagctatgtaaaagcttaccaaaaag

SEQ ID NO: 460922 - DNA, 201 bp, Homo sapiens
caatctttcttcccaaataactctaagttccttgatgatacagactgtcgttcatttaattccatgtcccagtgctttgcatggtgtccacattccagtaygagtttagtaagtactacctgaagttataaaagtcactgataacctgaaaacctattcatttttaggagagaaggaactatttgcaacacccatgttggt

SEQ ID NO: 460923 - DNA, 201 bp, Homo sapiens
ctgggactacaggtgcctgccaccacgcctggctaattttttgtatttttagtagagatgggatttcaccatgttagccaggatggtcttgatctcctgamcttgtgatcagccctcctcgacctcccaaagtgctgggattgcaggcgtgagccaccgcgcccagccgctatgaaatatttttataagatgttataatag

SEQ ID NO: 460924 - DNA, 201 bp, Homo sapiens; identical to SEQ ID NO: 123123

SEQ ID NO: 460925 - DNA, 201 bp, Homo sapiens
agggaggctgcaccctgcaaagccacaggggtggagcttcccaagaccataggaagccacctcttacatcagtgtgacctggatgtgaaacatggagtcartggagatcattttggagctttaagatttgactgccctattggatttcagacttgcatagggcctttagctcctttgttttagccaatttctcccatttaa

SEQ ID NO: 460926 - DNA, 201 bp, Homo sapiens; identical to SEQ ID NO: 123124

SEQ ID NO: 460927 - DNA, 201 bp, Homo sapiens
ctgccacaaggcttcacagacagtgtcaattacttcagtcaagcccaaatttcttcctcattcattacctatcttggcataattcttcgtgaaaacacacktgctctccctgctgattgtgtccagctaatctcccaaaccccaaccccttctacaaaacaacaactcctttccttcctaggcatggttaggtacttctgt

SEQ ID NO: 460928 - DNA, 201 bp, Homo sapiens; identical to SEQ ID NO: 123127

SEQ ID NO: 460929 - DNA, 201 bp, Homo sapiens
caaaagaatgcaaccgtttgtttctcacctacctgtaacctggaagcccccaaaccccctccctgctttgagttttcccacctttctggagcaaaccaatrttcattttacatatgttgattgatgtctcctgtctcccaggttaaaagtgaaagaactgagtacagtgaatggaataaatgttttaggtaaactttttgt

SEQ ID NO: 460930 - DNA, 201 bp, Homo sapiens; identical to SEQ ID NO: 123128

SEQ ID NO: 460931 - DNA, 201 bp, Homo sapiens
gtctcatgagatctgatggttttataaagggcagttcccctgcacatactgtcttgcctgccaccatgttaagacatgcctttgctcctcctttgccttcygccatgattgtgagtcctttccagccatgtggaactgagtccattaaaaatctttttctttataaattaccaagtcttgggtatgtatttattagcagca

SEQ ID NO: 460932 - DNA, 201 bp, Homo sapiens; identical to SEQ ID NO: 123130

SEQ ID NO: 460933 - DNA, 201 bp, Homo sapiens
tgaaacttacaccagcttcctgggttctgaggttactagacttagactgagccacactaccagcatctcagggtctccaacttgtagacgacctgtgctaygacttctcagccaccataaagatgttagccaattcttctaaaaatcccctcttgtgtatctatatacatatcctattgattgagtctctctgaagatccg

SEQ ID NO: 460934 - DNA, 201 bp, Homo sapiens
tgtatttcatcttcacatcatatcccatattagagatctaaattgtgtggagacttttagagagttctaatttgttttatgctgcaaatttgattccattraagtgcattatcacaatgttgactttatgtataagcactgcacatttatatagaaatgttgaaatttcctcactaaatgaagaaatgtcctttttgtaga

SEQ ID NO: 460935 - DNA, 201 bp, Homo sapiens
catatcccatattagagatctaaattgtgtggagacttttagagagttctaatttgttttatgctgcaaatttgattccattgaagtgcattatcacaatrttgactttatgtataagcactgcacatttatatagaaatgttgaaatttcctcactaaatgaagaaatgtcctttttgtagatctgcatttgtgaaagat

SEQ ID NO: 460936 - DNA, 201 bp, Homo sapiens
gttataaagctagacacacgtaattaccaactatagtatatatttcacttttgacctatttatatgaatacaacttgactgcttataactgttatacccaygcaactgtcattagtatgccaaagtgttaatgcttgcaaaaatatgcatgttattattgcctattttcttatgtaaaatggcctaggaagtgttttgttg

SEQ ID NO: 460937 - DNA, 201 bp, Homo sapiens
taggcccccttacacctcatacccattacgagtcaaaataataataataataataaataagtgaacaaacgacaaacgagaaaactaggctaccaggcacyggggcgatgggccacagcccggcggggtagtgggcccggaaggggcgcgggagtgggctctccccgccgggctcgcggcacgtggtcggcttgggcggga

SEQ ID NO: 460938 - DNA, 201 bp, Homo sapiens
tgaaggtaatatgttatcatgagatcaaatactgttttgattgtgggtatacatctgctgtctcctccttgaagtaaacttaagataataatggaagcaartgtaaggtgatctttcagccttttaatttaaaagccctcataagtggtcacttctttattggccgagtttcccagcatttgagttctctctacctgggga

SEQ ID NO: 460939 - DNA, 201 bp, Homo sapiens
gaggtaaagaattggggacatatgtcaacagctttccctcaacaacaacaacaacaaaaacaaaatctaggaacacctacatctggatttaacaaatccarcacttgcttggaaaattaagaactgtgctgtgctattcaattccacttaagtcctagaatccctgctgctgcttactttaaaaacccccatgataaccaa

SEQ ID NO: 460940 - DNA, 201 bp, Homo sapiens
agatattcagtttgcaattttaaattagtagtggtgagtagtcaaagtgcagacatatcttgaaggccaagaaaacagaatttcctgatgaattagatatwgatcttgtgagagaggttggtaagtcaaggatggcaccaaggtttttgactgagcaacctgatggggttgccaccaactgagaggaagaagactggaaat

SEQ ID NO: 460941 - DNA, 201 bp, Homo sapiens
gaaagaaatttctcaagtgaaactttgaaaatgtttcccagactcacatgcatgcactcatatgctcaggcagttctatgcacacatattagaaagagagmcaaaaataagaaaaggagatgtgaagtgagaattttaagaaaaacattatattcatacctatatatggattgtgtttatattgccttacaaagcacttct

SEQ ID NO: 460942 - DNA, 201 bp, Homo sapiens
cttcgtgtttagcaacaaaggaccccttcgagttaacttttccaaataatattttttttccaccagtggataaataccagatagctcctctcctctccttycacatactacatctgacattctggattttaacattgagatgttttgggtcatttcatttcattgagatatttttagatgggattaaaaacaaattgaaaa

SEQ ID NO: 460943 - DNA, 201 bp, Homo sapiens
atgtcccagtgctttgcatggtgtccacattccagtatgagtttagtaagtactacctgaagttataaaagtcactgataacctgaaaacctattcatttytaggagagaaggaactatttgcaacacccatgttggtttacacagatttaatcttcacaactgaataaggaaggtaatattactatctccattttagaaa

SEQ ID NO: 460944 - DNA, 201 bp, Homo sapiens
gatgatatttcttgggctcttttgctactacttctgtctttgtcaccaccacttttgttccatatataatctcctttgcttgctttcctcttctctctgcyttttttatttcttattttgttgggtccctatcatgtcatctgagcttcttggctacatctatatgaaaagactgacgtattttgtaaatctctattaaac

SEQ ID NO: 460945 - DNA, 201 bp, Homo sapiens
tttagtaaagactaaaaagattgccagtgtaatagagagtaagcggtgtgtgtgtgtgtgtgtgtgtgtgtgtatgtgtgtgctgaagctcaagaattgaygtaaaacaatttaagctgaattcagtgatgagctttgtgctggcaaagtatctaagaatctttatatcccccatggcttagaacaaggaagttatgctat

SEQ ID NO: 460946 - DNA, 201 bp, Homo sapiens
tcaccatatatctcgaagtaaaggaaattagcatcaccagaggggtaacctgattctcgaagtgattttcttaaatcattatagatagaggaggtagatcrataaatagaccaattatttgtggcaactcatagcaaaacatagtgagtttcggtcctggtattaaaaacttctaatacataggctttaatttgctagaag

SEQ ID NO: 460947 - DNA, 201 bp, Homo sapiens
gagttacctgctactgcaaactcaattaaatagagatgtgaaggaaagaaaaacactagaaaaatatctttgaggaagaatgagaaggggtttattgttgytattttgttgttgttgtgtaagatatagagttttatctatgtttacctgttgaagagaaacaagaagagagagagatagaaaatacatgagtgggtgggt

SEQ ID NO: 460948 - DNA, 201 bp, Homo sapiens; identical to SEQ ID NO: 123139

SEQ ID NO: 460949 - DNA, 201 bp, Homo sapiens
caatcatagcacactgcagccttgacctcctgggctcaagcaaccctcccacctcagcctcctgagtagctgggactacaggcatgtgacaccaagcccawatatattttttaatttttttgaagagatgggatctctccatgctgcccaggctggcctcaaactcgtggactcaagcagtccttctgcctcagcctccga

SEQ ID NO: 460950 - DNA, 201 bp, Homo sapiens; identical to SEQ ID NO: 123141

SEQ ID NO: 460951 - DNA, 201 bp, Homo sapiens; identical to SEQ ID NO: 123140

SEQ ID NO: 460952 - DNA, 201 bp, Homo sapiens
ttttgtcattgtgtgaacatcataaagtgtacttatacaaacctggatggtatagcctggtacacacttaggatatatgatatagcctatcatctctaggyttcaaacctgtatagcatgtgactatactgaatactgtaagcagtcgtaatacaatgttaaggatttgtgtatctaaacatagaaaaggtacagtaaaga

SEQ ID NO: 460953 - DNA, 201 bp, Homo sapiens
acaaacatagcctgctggtgaataaagccaatattgagaaaggcagagcagagaaatggaaagagagcgaatcccatgacatcctctaaaaccacctgtagctgaagctcgtgcaaaatccttggaattgccagtagcaaaagctaataaataccccttttgtttaaactagagttgggtttctattaatgcaagagaaca

SEQ ID NO: 460954 - DNA, 201 bp, Homo sapiens
cctacaatgttatattaagatgttttattcacagagaatataatatagctcatatacaagcattatgtgtgtagagtgctgtatcctgggttatagctgcygagaatttccaggctaggtccagtgtatgaaaaatcttattcagtttgcctgcattcaaagcctgaagatgtatcctgctccaccatttaagcttcagtt

SEQ ID NO: 460955 - DNA, 201 bp, Homo sapiens; identical to SEQ ID NO: 123143

SEQ ID NO: 460956 - DNA, 201 bp, Homo sapiens; identical to SEQ ID NO: 123142

SEQ ID NO: 460957 - DNA, 201 bp, Homo sapiens
tataacctcgacaaggcaacctgcaatgagagcattcttgctcaagaagggatataagaataactctctggagctaactcttttaaaacgaccttgaatartatctgcatatggcttttcccgaagttagtgaaatttccacatgtgtactcaagtacggagcagtttagaatacattcccttatcgggaactatttcccc

SEQ ID NO: 460958 - DNA, 201 bp, Homo sapiens
cctaaaatagattacactgacaagtagtaattactgacagctgcatttaattagcaaagcagattcctgctcatgacaataaagtattattacatgtttarcgttagcactgccagtgagaggtgactttgctaacacagagctagaagacctgttttctttatttaaaagcacacccagcttggctggaattgagcttgt

SEQ ID NO: 460959 - DNA, 201 bp, Homo sapiens
cataatgaatcagcatataaagactgtcatgcattagagagacattataaatttgaagatagagtctaagtttagaaattagagcgttgaggcacctagcstggctttaatacttaaactttgtaactttggtgaaattactaattcgacctgagtctcagtttcattagaaaaatggatgtaataaatacaccctgtcta

SEQ ID NO: 460960 - DNA, 201 bp, Homo sapiens; identical to SEQ ID NO: 123145

SEQ ID NO: 460961 - DNA, 201 bp, Homo sapiens; identical to SEQ ID NO: 123147

SEQ ID NO: 460962 - DNA, 201 bp, Homo sapiens; identical to SEQ ID NO: 123149

SEQ ID NO: 460963 - DNA, 201 bp, Homo sapiens; identical to SEQ ID NO: 123151

SEQ ID NO: 460964 - DNA, 201 bp, Homo sapiens; identical to SEQ ID NO: 123152

SEQ ID NO: 460965 - DNA, 201 bp, Homo sapiens; identical to SEQ ID NO: 123154

SEQ ID NO: 460966 - DNA, 201 bp, Homo sapiens
tccatcctcttcactgatattttcagcacctctggtagttcccagcacaaagaaagtgctgagtgaatgaagaacaaattatttaccctaattacactcamgagactgttgtgtgaggtcagaacatgaagttattaatttataacatgtgatacacctctctaatgtattaattatgtcaggtggctatccagggcactt

SEQ ID NO: 460967 - DNA, 201 bp, Homo sapiens
tggacgatgatgggggtccgcccgagggctgcagggaggaggtgggcccagccctgccccctgcagcgcctccggccccagccagtctgccctctgccatkgggggcggagaggacgaggaggaggccaccgactatggagggacctcagtgccgactgccggggaggccgtgcgggggctagaaacagctctgcggtggc

SEQ ID NO: 460968 - DNA, 201 bp, Homo sapiens
ttaccatccagtccttacttctgtgactgtaagggccccaccagtgtcagcagacttgtttgtgctttgggggaactctcttctcagctccctttgccagkcccaagcctggtggatctgcatctcacgcccactgcacaccgttcctctccatctgcccttccctcccaggcccccggtcgggggagcaggtgtggcaag

SEQ ID NO: 460969 - DNA, 201 bp, Homo sapiens
ttgctaatcactcctcaaaaataaaacatgcatgtaattgactcaaacgtgtaaataaaagcaaattttgaaaaatagtgttgtgcatatgcctttgaacmgagggaacatccatgtgccacttacgcaagcaccttcagcaagacttggaaactcaaggtgagtaattctatcagagctggtaactagtactgagtgatt

SEQ ID NO: 460970 - DNA, 201 bp, Homo sapiens
gcccttccctcccaggcccccggtcgggggagcaggtgtggcaagtgttaggaactcccttctggtgacagctggtcttcctagagtgttgctggtaactrtcgcctcttggtcttctgacatcattgccaggaacggggcactttttcgtcttgtagtttggccctcgggtttcctcactaggtattgtgtaactccctc

SEQ ID NO: 460971 - DNA, 201 bp, Homo sapiens
acagctggtcttcctagagtgttgctggtaactatcgcctcttggtcttctgacatcattgccaggaacggggcactttttcgtcttgtagtttggccctygggtttcctcactaggtattgtgtaactccctcaaaaaaaggtttatgaaatgctgaacctcaggtttcatagacgtctttgtacactaaaaattctgca

SEQ ID NO: 460972 - DNA, 201 bp, Homo sapiens
cccttccctcccaggcccccggtcgggggagcaggtgtggcaagtgttaggaactcccttctggtgacagctggtcttcctagagtgttgctggtaactaycgcctcttggtcttctgacatcattgccaggaacggggcactttttcgtcttgtagtttggccctcgggtttcctcactaggtattgtgtaactccctca

SEQ ID NO: 460973 - DNA, 201 bp, Homo sapiens
tttttttttttttttgagacggagtctcgctctgtcacccaggctggaatgcagtggcacgatcttggcccactgcaagctccgcctcccaggttcacgcyattctcccgcctcgggagctgggacaacaggtgcccgccaccacgctcggctaattttttgtatttttagtacagacggagtttcaccgtgttagccagg

SEQ ID NO: 460974 - DNA, 201 bp, Homo sapiens
tgtaagggccccaccagtgtcagcagacttgtttgtgctttgggggaactctcttctcagctccctttgccagtcccaagcctggtggatctgcatctcaygcccactgcacaccgttcctctccatctgcccttccctcccaggcccccggtcgggggagcaggtgtggcaagtgttaggaactcccttctggtgacagc

SEQ ID NO: 460975 - DNA, 201 bp, Homo sapiens
gtccttacttctgtgactgtaagggccccaccagtgtcagcagacttgtttgtgctttgggggaactctcttctcagctccctttgccagtcccaagcctsgtggatctgcatctcacgcccactgcacaccgttcctctccatctgcccttccctcccaggcccccggtcgggggagcaggtgtggcaagtgttaggaac

SEQ ID NO: 460976 - DNA, 201 bp, Homo sapiens
ctcccttctggtgacagctggtcttcctagagtgttgctggtaactatcgcctcttggtcttctgacatcattgccaggaacggggcactttttcgtcttvtagtttggccctcgggtttcctcactaggtattgtgtaactccctcaaaaaaaggtttatgaaatgctgaacctcaggtttcatagacgtctttgtacac

SEQ ID NO: 460977 - DNA, 201 bp, Homo sapiens
tcttttcctgtagctgttacagatttcttaagcagatttcttaagcagatggacatgtccagattcatgcctaaatatccagttgataactggaaaatgcyggttcacggttctttagtaaagattaataagggatccccatgtgctggggagtgtgcttccatttgagtggggatatcagaagaaaaagaggggcttgtg

SEQ ID NO: 460978 - DNA, 201 bp, Homo sapiens
agagaaaaataaattttaaaaaaaggtggaaaagttacggcaaacctgagatttcagcataaaatctttagtatgaagtgagagaaagaagagggaggctsgttctgttgctcgtatcaataggttatctgtgtccctcatcttggtgttacagtgttatttctgtcagtattatgaatatgtggttgacccatcctgtca

SEQ ID NO: 460979 - DNA, 201 bp, Homo sapiens
acagaacctgcatcctgtaaaaacacctttggggtagacgataaaagtcatttttaaggcaaatacttaccatgtgactttttattaccaaatgcatcagyagtggagctggtatgttgtttcataggatggaaacattagaagtccagagaaaaataaattttaaaaaaaggtggaaaagttacggcaaacctgagattt

SEQ ID NO: 460980 - DNA, 201 bp, Homo sapiens
taaaagtttctgtcgtctttaaaaaggaacgtgcagtatatttctatctggctgtttagataaccctttccttgtattaattgtgagcacggagctcactkgtgggggaggttctgaaactctctgccctcctgtggttgaatgaagatgttgcaagacttgcacaaaggaggttattcttctgacagcatcaacttttag

SEQ ID NO: 460981 - DNA, 201 bp, Homo sapiens
cttataatcagctgaaacagagttctcaaagaacagtaaactcaggttcagaggtattatggaataagaatggtttcatagtttggcttttctatataatkcctccctctcaaactgaaatattcatttttttagtggagtatttgactagagagaaggtaaggcagaaatacagtctacactggcttttaaaaatgtaaa

SEQ ID NO: 460982 - DNA, 201 bp, Homo sapiens
tcagaggtattatggaataagaatggtttcatagtttggcttttctatataattcctccctctcaaactgaaatattcatttttttagtggagtatttgaytagagagaaggtaaggcagaaatacagtctacactggcttttaaaaatgtaaagccaatttccaaccggaccccaaatagtacaggttgaacattccgtt

SEQ ID NO: 460983 - DNA, 201 bp, Homo sapiens
ttatgaaattctaaaagtttctgtcgtctttaaaaaggaacgtgcagtatatttctatctggctgtttagataaccctttccttgtattaattgtgagcayggagctcactggtgggggaggttctgaaactctctgccctcctgtggttgaatgaagatgttgcaagacttgcacaaaggaggttattcttctgacagca

SEQ ID NO: 460984 - DNA, 201 bp, Homo sapiens
taaaactaaaggagaaaagccaacctgaaataatttaaactttatatgaacatttcgataagagtttgtggattttttctgtagataatatatttgatccrgaactcaagtgcatggaaacatgattttgatttttaaaatctaaaaaaaaaaaaaattaaaatcatgcttccctctattgcagtatcagttatttagtca

SEQ ID NO: 460985 - DNA, 201 bp, Homo sapiens
tagaaggagaaaagtctcggtaaatcagttctgttccatgaatcagtcattactgccttctccatagcctttcctccgttcaagtaaatttagaaatttcytaagttttctttataacaggtagcctaaatctatatcatacttttaaaataaaaatctaggtgcaaatttgttcttatggttaaggttaacatgtacact

SEQ ID NO: 460986 - DNA, 201 bp, Homo sapiens
attgttacttcaccttgactttttatagaaggagaaaagtctcggtaaatcagttctgttccatgaatcagtcattactgccttctccatagcctttcctycgttcaagtaaatttagaaatttcctaagttttctttataacaggtagcctaaatctatatcatacttttaaaataaaaatctaggtgcaaatttgttct

SEQ ID NO: 460987 - DNA, 201 bp, Homo sapiens
gtttactaggaactagataagtatttacaacatcatgccttcttaaatgcaagaagaaaggagatgttatataaaagatgggttgactgtgtggcagatcytcttcagaagaaaattatagaaaaagtttgctcacataagaagattaaaaaaaggaggcaaggggaattagatggctttttaaaacatgtaaataaaaag

SEQ ID NO: 460988 - DNA, 201 bp, Homo sapiens
acacatgcacaaccttcaatagccgattcgatcaagtggaagaaagggtatcagtgattgaagatcaaattaatgaaataaagcaaataagacaaggttayaggaaaaagagtaaaaagacatgaacaaagcctccaagacaaatgggactatgtgaaaagaccaaatctatgtttgattggtgtacctggaagtgatggg

SEQ ID NO: 460989 - DNA, 201 bp, Homo sapiens
tgaaaaaagattagacgaatggctaactggaataaacagtgtagagaataccttaaatgacctgatggagctgaaaaccacggcacaagaacttcgtgacrcatgcacaaccttcaatagccgattcgatcaagtggaagaaagggtatcagtgattgaagatcaaattaatgaaataaagcaaataagacaaggttacag

SEQ ID NO: 460990 - DNA, 201 bp, Homo sapiens
gagattgaggctgtagttaactgtgatcacaccactgcactccagcctgggttatggagtgagaccctgtttcaaaacaaaaataaaaacaaaaaacaggscgggcacagtggctgaggcctgtaatcccaccactttgggaggcggaggcgggtggatcacctgaggtcaggagttcgaggccagcctgaccaacatggc

SEQ ID NO: 460991 - DNA, 201 bp, Homo sapiens
tcccgtttcccaatctcctgagatcgaatgtgttccctctccaggtgctagggtctccgtggccatgcagttggtgtgtcccatcccagtagccatgtctrtactttttctccaatcgtgccctacttgcttccagacatcttgtctggaagggtcagatgtaagagggacaggggcatttttgcaaaattaaagagaacc

SEQ ID NO: 460992 - DNA, 201 bp, Homo sapiens
cccagtagccatgtctatactttttctccaatcgtgccctacttgcttccagacatcttgtctggaagggtcagatgtaagagggacaggggcatttttgmaaaattaaagagaaccattatatcctatcttggcctgtgtagaaccctgtagagggatctagagaacagtgtacttaactaagtagtcattatcgtcatg

SEQ ID NO: 460993 - DNA, 201 bp, Homo sapiens
tctttttttaagtagtcgaaggtggtctctccccagggacatctgaagggtataccaaccaggctggcctgaggatgttgtcagggaaaaaaagatgcatyatgtttagcaatagtcagtgtagaatcttgaattttcaaaataggttctatagctctccacccttatggtccagattatcacctaggagaccaagaggag

SEQ ID NO: 460994 - DNA, 201 bp, Homo sapiens
ttgtcctaatgctcacctcccctcacccccagccctcgactggccctgatgtgtgttgttcccctccctgggtccatgtgttctcattgttcagctcccasttatgagtgagaacatgcggtgtttggttttctggttcctgtgttagtttgctgagtatgatggctttcagcttcatctatgtccctgcaaaggacatga

SEQ ID NO: 460995 - DNA, 201 bp, Homo sapiens
agtcagtgtagaatcttgaattttcaaaataggttctatagctctccacccttatggtccagattatcacctaggagaccaagaggagatgaactctttcyggggaagggtgcatttagtgaccatactgccttactaaggtgtgcagtgagagttagggttagagtcagaaatctttttgagttgatttttgagaaggcc

SEQ ID NO: 460996 - DNA, 201 bp, Homo sapiens
gtctgccgcggacccggcctccgccccgagctcctgcctgggaagtcctcggccgcctccagaccgatcccacccggaacacagatgggaacggcgggaaktgggatggcggtacagggctggatgcggcagagcaggacaacgccgaagaggatcaggcaaatcacactccctctgagttggaagcccccagcccgaccc

SEQ ID NO: 460997 - DNA, 201 bp, Homo sapiens
aagaatcgcttgagaggcggaggttgcagtgagctgagatcatgccattgcatcccaggctaagcaacaagagtgaaattccgtctcaaaaaaaaaaaaaagtcatgtctgcttcattttttggaagaatagaaataataagtaaatcaagtcttaggtccaaacttgttttttcttacattgaaacctggtgatgctaca

SEQ ID NO: 460998 - DNA, 201 bp, Homo sapiens
ttagggttagagtcagaaatctttttgagttgatttttgagaaggcctttccaatgttcaaaatgataccagatacctgcaaatgggagtgtgaaatgtcmattgaataccttgactagtggtccattgttgaatggcctttgcaatcccttctcccaagtctcacaggggtgatgtgagccagacagatgtcacacatgc

SEQ ID NO: 460999 - DNA, 201 bp, Homo sapiens
tttcataatacaatttttaaatggtcatagttcttcttcttctttttttttttttctcgagacagagtctcgctgtgacgcccaggctggagtgcaatggygctattttggctcactgcaacctccacctcctgggttcaggtgattctcctgcctcagcctcctgagcagcagggattacaggtacccaccaccacaccc

SEQ ID NO: 461000 - DNA, 201 bp, Homo sapiens
cttaattcattcttcttttttagtgccttctgtctagtgttttttcaaccataaaatattttttctttaggctcttcaattttcttctaaaataataaaaktgtctttcatgggcctctgatgacttaacttcctttttttcttaggtagtctcctgaaagcaaacacagcatggttattatttatgagctgcaaattatc

SEQ ID NO: 461001 - DNA, 201 bp, Homo sapiens
aggctggagtgcagtggcacgatctcggctcaccgcaacctctgcctctccgttcaagtgattctcctgtttcagcctcccaagtagctgggattacaggyacctaccaccacacctggtctaatttatgtatttttggtagaaatggggtttcaccatgttttccaggctggtctcaaactcctgtcgtcaaatgatcta

SEQ ID NO: 461002 - DNA, 201 bp, Homo sapiens
gtctatttaaaggttttctttaattaatattcatgcccctagaatctttcataatacaatttttaaatggtcatagttcttcttcttctttttttttttttctcgagacagagtctcgctgtgacgcccaggctggagtgcaatggcgctattttggctcactgcaacctccacctcctgggttcaggtgattctcctgcc

SEQ ID NO: 461003 - DNA, 201 bp, Homo sapiens
ctaacatagggaatgaagacaggaactaggaggccaacttacccaggctctctgtggcttccacacagatgctaggatacatgccctcagtgtaagttgcyaccagaagatacagatgggtcttcacgacaaccacaccagtgttctcctgtataaagaatataagagaatattctgctcttggttctaatcacaggacca

SEQ ID NO: 461004 - DNA, 201 bp, Homo sapiens
ctttgggaggccgaggcagaacgattgcttgagcccaggagttctagaccagcctgtgcaacatggtgagaccccatctttacaaaaaatttaaaaattarctgcacgtggcatgtgcctataaccctagctactcgggaggctgaagtggaagcatcgcttgagcttaggagattgaggctgtagttaactgtgatcaca

SEQ ID NO: 461005 - DNA, 201 bp, Homo sapiens
ctcagacttgcaactcagtgcttaaacaagtgcctctcttgtaggttaccatcccaccatttcatgaccctttgaaaaaagcacaatatgacaaggataaygaaaaaagaactcttcttcagtgtgagactggtacttagttcctaattgttatgtgatttcatagcccaagagcaatggcagatgcatttaaggatgtta

SEQ ID NO: 461006 - DNA, 201 bp, Homo sapiens
aaataggcaaaaagcatgtcccaaaactatgtgtcccctctcactttttatttttatttttattttattttactttaagttctgggatacatgtgttgaargtgcaggtttgttacgtaggcatacatgtgccatggtggtttactacacctatcagcctgtcatctaggctttaagcccctcatgcatcaggtgtttgtc

SEQ ID NO: 461007 - DNA, 201 bp, Homo sapiens
atgggcctggcaggcagaggttgcattgatcataccactgcactccagcctgggtgacagagtaagactctgtctcaaaaaaaaaaaaaaaaaaaaaaaaaggaatagtagtaggaaagacttatattaccagatgtcagaaaataaatcagccaagcatagtggctcaggcctgtaatctcaccactttgggaggccaag

SEQ ID NO: 461008 - DNA, 201 bp, Homo sapiens
gatcacttgaactcaggagttcaagaccagcctgggcaacatagcaaaaccccatccctacaaaaaattagccaggcatggtggcatgtgcctgtagttcyagctacttgggaggctgggagatggaaagatcacatgggcctggcaggcagaggttgcattgatcataccactgcactccagcctgggtgacagagtaag

SEQ ID NO: 461009 - DNA, 201 bp, Homo sapiens
caggcatctctaatccaccatgtggagcaaggaggccaggaatcactgaagaaagctgagcccaaaaagacaggcaggaatcttacaggtcatgctaaagsgtttggaatttatggggagaccctgaaggattttataatactctagttcttggcattttttcccttttatattacttcatcagtcaaaacagacttctag

SEQ ID NO: 461010 - DNA, 201 bp, Homo sapiens
cttgatatggctcaattgaacctcccacctcagcctcctcagtagctaggactacaggcttgagccaccacacccagatagtttttgtttgtttgtttatygtttgttttgtagatacgaggttatgccatgttgcccaagctgacattattatttaacattaattcggaagttttagtcaatacaataagataaaaaacg

SEQ ID NO: 461011 - DNA, 201 bp, Homo sapiens
taatcaagcatcatctttgcaggctacttgccacttggattaggttatgccacacttctgcctctttactcttgcctttttttttttctgaaggtcagttrtagtgaagggttttttttttttttttttccatagaatgtttttcttcctctttttctgccatcccttctcttcctggataacccttcttttttttttttt

SEQ ID NO: 461012 - DNA, 201 bp, Homo sapiens
gcagccttgatatggctcaattgaacctcccacctcagcctcctcagtagctaggactacaggcttgagccaccacacccagatagtttttgtttgtttgyttatcgtttgttttgtagatacgaggttatgccatgttgcccaagctgacattattatttaacattaattcggaagttttagtcaatacaataagataaa

SEQ ID NO: 461013 - DNA, 201 bp, Homo sapiens
ttagtttgtagcctaatcaagcatcatctttgcaggctacttgccacttggattaggttatgccacacttctgcctctttactcttgcctttttttttttytgaaggtcagttgtagtgaagggttttttttttttttttttccatagaatgtttttcttcctctttttctgccatcccttctcttcctggataacccttc

SEQ ID NO: 461014 - DNA, 201 bp, Homo sapiens
caactccatggggacagagactcctgcacttgggatccttctggacctcattctacatacctcttcacctggctgttcatccctttattatatatatatawctttttttgaggcagagtctggctctgtcgcctaggctggaatgcagtggggtgatctcggctcactgcaatctctgtctcctgggtttacgtgattctc

SEQ ID NO: 461015 - DNA, 201 bp, Homo sapiens
attttttgtattttagtagagacagggtttcaccagcccagggttttgcaacagtccaggctggtcgcaaactcctgagcttaggcaatccacctgcctcrgccttccaaagtgctgggattacaggcgtgagccactgggtccggcccatttttgtggttttagtagaaatgggatttctccatgttggccaggctggtc

SEQ ID NO: 461016 - DNA, 201 bp, Homo sapiens
tagctgggactatagatgcacgctgccacgcccagctaattttttgtattttagtagagacagggtttcaccagcccagggttttgcaacagtccaggctsgtcgcaaactcctgagcttaggcaatccacctgcctcggccttccaaagtgctgggattacaggcgtgagccactgggtccggcccatttttgtggtttt

SEQ ID NO: 461017 - DNA, 201 bp, Homo sapiens
aggaggccaacttacccaggctctctgtggcttccacacagatgctaggatacatgccctcagtgtaagttgctaccagaagatacagatgggtcttcacracaaccacaccagtgttctcctgtataaagaatataagagaatattctgctcttggttctaatcacaggaccagtggtcatgctccagctacgtttttca

SEQ ID NO: 461018 - DNA, 201 bp, Homo sapiens
tcagcctggaatactctttactctcttccatactcactcttcttccaaatgcacttcaaatgctagtttcaggttcctgaagacacagttagtcttcaggwctgtgctctgtagttgttttacacctgctccagcatttatcatgtggtcatgtgactcatttacaacttgccttccccactaaattgtgagcctgtcttg

SEQ ID NO: 461019 - DNA, 201 bp, Homo sapiens
agttaaagccaaagaaacgattgaattaatgaatgtctctgtgggttattcttaggagtaatttaaacttatgaagtttaagttttggaaaattttagaayaagaaagctttaggataatatatttgtcttttctaccactgtttactaggaactagataagtatttacaacatcatgccttcttaaatgcaagaagaaag

SEQ ID NO: 461020 - DNA, 201 bp, Homo sapiens
tccttcagcctggaatactctttactctcttccatactcactcttcttccaaatgcacttcaaatgctagtttcaggttcctgaagacacagttagtcttcaggactgtgctctgtagttgttttacacctgctccagcatttatcatgtggtcatgtgactcatttacaacttgccttccccactaaattgtgagcctgt

SEQ ID NO: 461021 - DNA, 201 bp, Homo sapiens
gctccttcagcctggaatactctttactctcttccatactcactcttcttccaaatgcacttcaaatgctagtttcaggttcctgaagacacagttagtcytcaggactgtgctctgtagttgttttacacctgctccagcatttatcatgtggtcatgtgactcatttacaacttgccttccccactaaattgtgagcct

SEQ ID NO: 461022 - DNA, 201 bp, Homo sapiens
tgaggagcccttcggggacagtgacgtactgagcctggcccccaccggggagcagagccatggctgtgtccccgatcttccagtgtccctggcagccaggycccagctctgccacatgtccagatgcctcaagtcccaaaatgttgctggctcctggaggtgggtcatactggccttgtctctgcagagaaagaagtgcac

SEQ ID NO: 461023 - DNA, 201 bp, Homo sapiens
aggggtattatgggaggcttggccatgatatcagccaggaaaggaaacagtttgctatgagacagaacaaagctgactcatttagaagtcaagacagaatsctagcagtgttccagtccctgaatctaccttccccatggctcagctgcaccctgtccttccagtggctatgtaaataacctcagcatccttccaataaat

SEQ ID NO: 461024 - DNA, 201 bp, Homo sapiens
actgctttccagccacatggaacctctcaccattctttccacacaacaggccttttcatcactctgtgccttggcatttggtgctccttcagcctggaatrctctttactctcttccatactcactcttcttccaaatgcacttcaaatgctagtttcaggttcctgaagacacagttagtcttcaggactgtgctctgta

SEQ ID NO: 461025 - DNA, 201 bp, Homo sapiens
gcctaatgggaggtatttggatcatgaatagactgatgccctccctgcgagctgggggaagctgtgagttttcactgtatttgttccaggagagctggctsttagaaagagcctggcacctctccacttgctctctcttgcttcctctcccccactgtgatctctgcacatgctggctccccttcacctctgccatgagtg

SEQ ID NO: 461026 - DNA, 201 bp, Homo sapiens
atttaaagacattcaaggtctcatagcatcatgctaaatgaacatagtggaatgtcaactctatgcattaaggctaggtaaggttaaaatgtatatattaygtgcatcaaaagagacctgaagaaaatctcaaaaccatcaccagaagctttcatctttttttttttttttttttttgaggtggagtttcgctcttgtcgc

SEQ ID NO: 461027 - DNA, 201 bp, Homo sapiens
acagctggaaggcggtgagccaggcctctgggatggctgcagcctgggtcagggtcaatccctctgggataggcatgaggagcccttcggggacagtgacrtactgagcctggcccccaccggggagcagagccatggctgtgtccccgatcttccagtgtccctggcagccaggccccagctctgccacatgtccagatg

SEQ ID NO: 461028 - DNA, 201 bp, Homo sapiens
ccagcttcaggtattcctttatatcaacagtaaaaagactaagcctagaaacctaaaatatttatgtagctctttacagaaaaagttcatttaaaagtcaygtctgggctgggcacggtggctcatgcctgtaatcccagcactttgggaggccgaggcaggtggatcacctgaggttaggagtttgagactagcctgacc

SEQ ID NO: 461029 - DNA, 201 bp, Homo sapiens
ctgaatcagttctctgaaatcgggttccctctttatcttcagagggggaggtttcttcatagaaactaacctccgtaatctaaggtagagcttcctttctyggggtaatgtaaatgaaccacacttttctgggttaaatcacatgttttcttttcattcatcactcaccttattgtccctagacctcagcaaactggtgat

SEQ ID NO: 461030 - DNA, 201 bp, Homo sapiens
ctggtttaataattatagtgtctttgtcattttgggggcagttttggttaattttccttcttattattggttaaattttcctatttctttgtatacctggygattattggttaaattttcctatttctttgtatgcctgatgatttttgattaaatgcaagactgtgaattttaaccatattgagtactagatatttttga

SEQ ID NO: 461031 - DNA, 201 bp, Homo sapiens
cagcacgttgggaggctgaggtgggagggtcgcttgagcccaggagttctatctagaccaggcagagcaatatactgagaccctgtctccacaaacgaacraacaataatagccaggtgtggtagcatacacctatagtcccagctgcttgagaggctgaggcaggaggattgcttgaccccaggaatttgaggctgcagt

SEQ ID NO: 461032 - DNA, 201 bp, Homo sapiens
tagaggttttccggtcctcccggcttgtcaaagtgcacggctaacatattgtctgaggacacagggcagggcagggcaggacaggacagggcagggcaggrcaggacaggacagggcagggcaggacaggacagggcaggggccgctgtatcctcgcggagcagcccagcctcaggctggcaccgcagcgccccctgccgg

SEQ ID NO: 461033 - DNA, 201 bp, Homo sapiens
ggacccaaagctgtttgattaagcagcacagagattacagctgaaactatgactagagcaaggcaatactatttatttgggtttattttcacacaaaaaaagtaaatacgtttattttcataaaaatacacaaattcacatagaactcatcaacttcaaatttaaataaaaatattaagtgctacagttgagttgagagtt

SEQ ID NO: 461034 - DNA, 201 bp, Homo sapiens
tcataccgccaggcgtggaggctcatgcctatcatctcagcactttaggaggccgaggcaggaggatcacttgaggccaggagtttgagaccagcctgggmaacatgttgagaccccatctctacaaaaaataaaaataaatcccttggcatggtggtgcatgcctgtagtcctagctgcttcggagggtggctgaagtgg

SEQ ID NO: 461035 - DNA, 201 bp, Homo sapiens
tttattctctgttgtgacagggcagaaccgaattcagcataagtcccctactcactgggctcaccctccccaaatgtacaaactctctctctgtaccacayggctatgactggggaataggagagaggtggcatcagtgattcaagactgtccctcctgctctcctcaatgcctcttttagtgatatgaagttaaaacgag

SEQ ID NO: 461036 - DNA, 201 bp, Homo sapiens
tggtctcgatctcctgacttcatgatctgcccgcctcggcctcccaaagtgctgggattacaggcgtgagccaccgggcgcccggccaagattcactactytaaagtgtacaattcagtgttttttatttttttttaaattcagaatttttattttcagtgttttttagtatattcacaaatccgtgcaactgtcaccact

SEQ ID NO: 461037 - DNA, 201 bp, Homo sapiens
acagggacctgtgcaagactgggaataggagaatcccactgggccccacacccacccatcgtgtttctagactgaggcagagagccactcagacgttttayagggccaactctcgagtccaaggggacctctataagccttgggccctggggcagaccagccagcgccgaagccccagcaaaggctgcagttgccatgcat

SEQ ID NO: 461038 - DNA, 201 bp, Homo sapiens
ctccacagggacctgtgcaagactgggaataggagaatcccactgggccccacacccacccatcgtgtttctagactgaggcagagagccactcagacgtwttacagggccaactctcgagtccaaggggacctctataagccttgggccctggggcagaccagccagcgccgaagccccagcaaaggctgcagttgccat

SEQ ID NO: 461039 - DNA, 201 bp, Homo sapiens
gaaacaaaaggactagcaaacactgagctgcaggccgatcatctgaaaaaccacgttgggacccatcagggcagtagaggaacacagagtgcagaaaggartgaagccaggcaccagctgtttgggctcagcatggagccaggagaacctctccagcacaggacagggtgagtgagtgagagcccccagggtgattcatgc

SEQ ID NO: 461040 - DNA, 201 bp, Homo sapiens
cgcccgtatgagttacttactcctggcccggctcccctcccatgcaccaggcggcgccgagtggttctggctcctgcgggtcccggtgacaaagcccgagmcccagagccccaggactgcctctgcctccaccggaatggacggctggacctggggtagccggaggggtggggctaagcagaaccaccctccccctctttc

SEQ ID NO: 461041 - DNA, 201 bp, Homo sapiens
cagaattgaattgtggaacacccagcctatgtcagagaattgattgatgtgggaataaaacctgcatatctagtgtcagaaacgaagtgttctgtgtgagrgtagaaacagtgtggtttcccagatatggggaaatagattatatttagtagaaatgtatccaattatgaaagttgagaaatgggctgggtgctgtggctc

SEQ ID NO: 461042 - DNA, 201 bp, Homo sapiens
agaattgaattgtggaacacccagcctatgtcagagaattgattgatgtgggaataaaacctgcatatctagtgtcagaaacgaagtgttctgtgtgagtktagaaacagtgtggtttcccagatatggggaaatagattatatttagtagaaatgtatccaattatgaaagttgagaaatgggctgggtgctgtggctca

SEQ ID NO: 461043 - DNA, 201 bp, Homo sapiens
ttgtctctgcagagaaagaagtgcactaagtggtgagcatgatcagaaatctgtatgtcactacccctggccccccttccaagatcccctcttttttttttcaaaaataaatttcagaatgaagtcaggtttttgtaagtaaggagaagaaaaaggagaggccattagttttatgcaaataaactggaggtcacatgatca

SEQ ID NO: 461044 - DNA, 201 bp, Homo sapiens
ttgtcaaagtgcacggctaacatattgtctgaggacacagggcagggcagggcaggacaggacagggcagggcagggcaggacaggacagggcagggcagsacaggacagggcaggggccgctgtatcctcgcggagcagcccagcctcaggctggcaccgcagcgccccctgccggccagcgcctcgctgccctggtctg

SEQ ID NO: 461045 - DNA, 201 bp, Homo sapiens
caggtttgttacataggtatatatatgccatggtggtttgctatcaacctgtcatctaggttttaagccctgcatgcattagctgtttgtcctaatgctcwcctcccctcacccccagccctcgactggccctgatgtgtgttgttcccctccctgggtccatgtgttctcattgttcagctcccagttatgagtgagaac

SEQ ID NO: 461046 - DNA, 201 bp, Homo sapiens
gttctggcggcttgtgtcacggctgacgctgtaactatacccagaatctccgtccctggaggggccctcaggttgagcgtcagctgatcgggcctcagtartccccgctgcgacgcccgtccggactcccacctcaaccccgccgcggcggccccagtccgcgtgccacccttccagttcactctttatttcctcatatca

SEQ ID NO: 461047 - DNA, 201 bp, Homo sapiens
ctgaagacaactactttcactgacagttaacttgagaatattttatttgtatgtaattacatgaggatctcaaaggcaattctgtgctagaaatcaactgyttccattttctggcaggtatttaataattgtggaacatttgttataaaaatggaaaaattaatgctgtcataattttgtcactaatatcactgttcccta

SEQ ID NO: 461048 - DNA, 201 bp, Homo sapiens
atgtaattacatgaggatctcaaaggcaattctgtgctagaaatcaactgcttccattttctggcaggtatttaataattgtggaacatttgttataaaartggaaaaattaatgctgtcataattttgtcactaatatcactgttccctaaagattgtgttatttcaaaatctgaaaatgtgacttgtatataaaaatag

SEQ ID NO: 461049 - DNA, 201 bp, Homo sapiens
gcctctgtgggattgaggaggaataaatgagtcaattggtcccttctgttgcactgggaccccagagagaagctcagtatgattctaagaagctgggactkctgctgggcgtccggtgttaacatgtacataggcctcctatctagtgttatccagaccctctatctgctaaccatgattctcagcctcaacattaaaccc

SEQ ID NO: 461050 - DNA, 201 bp, Homo sapiens
ccaggacgatcttgcctatgttcttgttggcctccatgtacttatgggcctcctggatttcggtcactgggtagattctgtccagaaccggcagcagacgytgggggccctccgtggagaagtgaggcagaatttgctccgtgaaagcattcaccagcatttgcttgtactaagacaagggaaaggagatcatcagcctgg

SEQ ID NO: 461051 - DNA, 201 bp, Homo sapiens
taacccagaaaagtaaaagcattttataggaagtgaaaaaagatggattgtaactaccatgtgactctggaaaagacatttgaacattttgggactcaaartgtctgtgagctgagttatattttggtgtagccaagagcagacagatcgaaatactgtttaaaaagcacttgatgggctgggcacagtggctcaggcctg

SEQ ID NO: 461052 - DNA, 201 bp, Homo sapiens
agggaaaggagatcatcagcctggggagagagcctcaccctgccctcctcatcctcctcagccttcttgctctctctgaagccacgtatctgaaaaagcasacagggacacttaacccctcacttcctagcatgtgtgtgaaatacccttgaaggagtcatgtgccatctcagaatatgtccgataggtatattgttaatt

SEQ ID NO: 461053 - DNA, 201 bp, Homo sapiens
tatgtctgtcatgctaaatataatgattccagatagcactaatagtttttaaagattttcttttcaaagtttaattctgtcctttcaggttttagctaaasaagatactgaggcagctattcaatcaatattatacaaagaaaattctgtaattaaggtaagaattggctacaaaatgcatctcagttaaaaattaaatgt

SEQ ID NO: 461054 - DNA, 201 bp, Homo sapiens
ttgttaattttgaggtgaaagcattggagaaattgtagtttcagaaaaggctagctgacctgtctcttcttgcatgtagcaagtcataaagattcctctgrgaggggtaccctccccatactagggcaaaaagcccttatcaccagagactggaaacggggctgcaatggaactgaataaatacacttaaggaagtaaccc

SEQ ID NO: 461055 - DNA, 201 bp, Homo sapiens
aagaattggctacaaaatgcatctcagttaaaaattaaatgtagtttttcctttttatatgtagcatattctataaaaactatttagaaaatatggaaaamagaattaaaagaacactcccttgcacctggaattaaccttaagggatctctgaaattgctctaatggacttcctcccttcctatactttgtgggaattcc

SEQ ID NO: 461056 - DNA, 201 bp, Homo sapiens
gggcaaaaagcccttatcaccagagactggaaacggggctgcaatggaactgaataaatacacttaaggaagtaacccttatcttccactagttttacacmccccacccccatatatctcctagtgacttccctagaaatttactatccctagccagattttgtcttatttcttctcaaatttattgttctttgtctaaaa

SEQ ID NO: 461057 - DNA, 201 bp, Homo sapiens
gttttacaccccccacccccatatatctcctagtgacttccctagaaatttactatccctagccagattttgtcttatttcttctcaaatttattgttctytgtctaaaaattacaaaagcatcttactttggccgaatcacttgagcctgggagtttgagatcagcctgggcaacatggtgaaaacctgtctctataaaa

SEQ ID NO: 461058 - DNA, 201 bp, Homo sapiens
agccacagataggactcatataggcttagtgaaaaaaggatgcttaagctctcctgtccctcagctggtgcaaaaccctatggtggaaacattcccaaagstggtacctgctagactgccagatggaatatttcaggagcatataatctttttttttttgagatgaggttttgctatgttgctcaggctggggtacagtgg

SEQ ID NO: 461059 - DNA, 201 bp, Homo sapiens
gagacttttgttttgttttctgggacaaggtcttgttctgtctcccagctggagtggatacaagcatggcttgcttcagcctcaacctcccggactcaagygatcctcccacctcagcttcctgagtagctgggactacaggtgcctgccaccatgcccagctaatttttaaacgttttgtagagacgcggtcccattgtg

SEQ ID NO: 461060 - DNA, 201 bp, Homo sapiens
aaaaattagctgggcgtggtggtgcgcctgtgatctcagctactcaggaggctaaggctggagaatcacttgaacctgggaggcggaggttgcagcgagcygagatcaagccactgcacgccatcctcagtgacagagtgagactccatctcaaaaaaaaaaaagaaagagaaacggaaagggatgagccaaaaatagaca

SEQ ID NO: 461061 - DNA, 201 bp, Homo sapiens
tctttacacactaagcaagtgtgtgccagaagtcattgaagaccatgcatatatatatatatatatatatatatattttttttttttttttttttttttttgagatggattttcgcgcctgttgctcaggttggattgcagtggcctgatcttggctcactgcaacctctgcctccccagttcaagcaattctcctgcctc

SEQ ID NO: 461062 - DNA, 201 bp, Homo sapiens
aaaatgtttactactcagacttgcaactcagtgcttaaacaagtgcctctcttgtaggttaccatcccaccatttcatgaccctttgaaaaaagcacaatrtgacaaggataatgaaaaaagaactcttcttcagtgtgagactggtacttagttcctaattgttatgtgatttcatagcccaagagcaatggcagatgca

SEQ ID NO: 461063 - DNA, 201 bp, Homo sapiens
agtttcaggacatatttttcttttgttctggaacttgattatttgcgaagctctaaaatatagctgttcttctagcatttttttaaaatctgagatgtttractagtaagcatttaaaaacaaattcccaaatcttttagtgttccaacattctttattaagatcttacaaattttaagtagattccttccttcactatac

SEQ ID NO: 461064 - DNA, 201 bp, Homo sapiens
aaaatcacagctcacacagaataggttatgaagctgagtttggaaaatcacagcctggtgattttctggctatgtcaatggtttacatcaggattatctgsgatttaaaaacaaacattacacactgagaaaaactctgtaaaataaaaaataaaaacaaaaaacaaaacccagccaggatggagagctaccctgctaagt

SEQ ID NO: 461065 - DNA, 201 bp, Homo sapiens
ctggtaccaaaacagatacatagaccaatggaacagaaaagaggcctcagaaataacaccacacatctacaaccatctgatctttgacaaacctgacaaayacaagcaatggggaaaggattccctatttaataaatggtgctgggaaaactggctagccatatgtagaaagctgagactggatcccttccttacacctta

SEQ ID NO: 461066 - DNA, 201 bp, Homo sapiens
gcttggccacctccttcacgtagaggttttccggtcctcccggcttgtcaaagtgcacggctaacatattgtctgaggacacagggcagggcagggcaggrcaggacagggcagggcagggcaggacaggacagggcagggcaggacaggacagggcaggggccgctgtatcctcgcggagcagcccagcctcaggctggc

SEQ ID NO: 461067 - DNA, 201 bp, Homo sapiens
taccagatacctgcaaatgggagtgtgaaatgtccattgaataccttgactagtggtccattgttgaatggcctttgcaatcccttctcccaagtctcacmggggtgatgtgagccagacagatgtcacacatgcagggagttgtattacaggaggggtaacactgagctcagggactccactgcttttatagcaaacagt

SEQ ID NO: 461068 - DNA, 201 bp, Homo sapiens
tcaggcagagcaaggaaatttggaggcaaattcttttcttttactcagctctcttcaaatcttgagcactcacatttttggcataaagagaatattcatckgcccggacacatctgtaatcttttcccttgaaatacagtccttctcttcgggcttgcaaagggttcttggcaaatccattcaccagtgttcggacatcac

SEQ ID NO: 461069 - DNA, 201 bp, Homo sapiens
tactttgtgggaattcctttgcagagaggcacagaaattttcctctactcacttgtttctttgtcttagtgggtttcagcagtcactataaatgagctaayccttaagagctgttagcagaacacactgactaattattactcagatatacatagaacagggtttaactgagccaggatgggcttaatgtgacaagaagaa

SEQ ID NO: 461070 - DNA, 201 bp, Homo sapiens
ggaatggctgaagtgtgctatggccagaggttagggagggactcggcctagcagacctctcagggttcttaatattttatttatttcattttgaatttcaygctcttcctagtagtcacatgactttatttgctatatgaaaggtgaatgagaaggtttagtgagaatgaattagtttgtagcctaatcaagcatcatctt

SEQ ID NO: 461071 - DNA, 201 bp, Homo sapiens
tctttcaaagagcatctcgcctgcttataaaggaggctggctctgaagccgtcatctggagtctgtagtgaaggcctcttgttagggaaactggatggttmgtgttcaaaatccattttgcgtgtgtgcaaggacacaggtggtattaaacagaagagaaaatcagatgactgtgaaatgttcaatactaaataagatgat

SEQ ID NO: 461072 - DNA, 201 bp, Homo sapiens
aaaaaaaaaaaagaaaaattttatggctgaaaaaatataattgcattgcattcaagtgaatttagtgacacaaattatttgttaataaggtttcttgcacrtataaaatagataccttttttttttttgacggagtctcactctgttgcccaggctggagtgcaatggcacgatctcggctcctgcaacctccccatcctg

SEQ ID NO: 461073 - DNA, 201 bp, Homo sapiens
aaattatttgttaataaggtttcttgcacatataaaatagataccttttttttttttgacggagtctcactctgttgcccaggctggagtgcaatggcacratctcggctcctgcaacctccccatcctgggttcaagcgattctcctgcctcagcctcccgagtaactgggattacaggcacacgccaccaggcctggct

SEQ ID NO: 461074 - DNA, 201 bp, Homo sapiens
ctatgagcccttttactgaatcttagtctttacacactaagcaagtgtgtgccagaagtcattgaagaccatgcatatatatatatatatatatatatatattttttttttttttttttttttttttgagatggattttcgcgcctgttgctcaggttggattgcagtggcctgatcttggctcactgcaacctctgcctc

SEQ ID NO: 461075 - DNA, 201 bp, Homo sapiens
cacccaggctggagtgcagtggcccaatctcggctcactgcaacctccgcctcccgggttcacaccattctcctgcctcagcctcccgagtagctgggacyacaggcgcccgccaccacgcccggctaattttgttgttgttgttgttgttgttttcagtagagatggggtttcatcgtgttagccaggatggttttgatc

SEQ ID NO: 461076 - DNA, 201 bp, Homo sapiens
gtgtttgcgggtgactggcttcttctatgagcccttttactgaatcttagtctttacacactaagcaagtgtgtgccagaagtcattgaagaccatgcatatatatatatatatatatatatatattttttttttttttttttttttttttgagatggattttcgcgcctgttgctcaggttggattgcagtggcctgatc

SEQ ID NO: 461077 - DNA, 201 bp, Homo sapiens
tgtaacctccgcctcctgggttcaggcgattctcctgcctcagttccctgacttagctggtattgcaggcatgcaccatcacacctggctaatttttgtayttttatttttatttatttatttattttgagacagagtctcgctctgtcagccaggctggagtgcagtggcatgatctcagctcactgcaacctccctctc

SEQ ID NO: 461078 - DNA, 201 bp, Homo sapiens
ctcccgagtagctgggaccacaggcgcccgccaccacgcccggctaattttgttgttgttgttgttgttgttttcagtagagatggggtttcatcgtgttrgccaggatggttttgatctcctgacctcgtgatccgcccgccttggcctcccaaaatgctgggattacaggcatgaaccatcatgcctggccactcctac

SEQ ID NO: 461079 - DNA, 201 bp, Homo sapiens
ggcctcattatgagattttttggtgatttttttttttttttttagctcattagctatcattaatgttagtgtattttatgtgtttctgtgtggcccaagasaatttttttttttgagtcggagtcttgctctgtcccccaggctgcagtgcagtggtgcaatctcggctcactgtaacctccgcctcctgggttcaggcga

SEQ ID NO: 461080 - DNA, 201 bp, Homo sapiens
ccatcttgagcatgggtgggcaagctgggtgctgctaagagaagagaaaggagccgttgggagtgggggtggggaaggaaggcaaaacgcagtcctgggayccttatcactcgcctcctcctgacagtcctgggggagaggttcagccccaggagaaggatgctggcgattgggtaaaagctgtatccgtaagctacatga

SEQ ID NO: 461081 - DNA, 201 bp, Homo sapiens
aaaatttggtctgggcatggtggctcatgcctgtaatcccaccactttagaggctgaggtgggaggatgacttgaactcagcattcgagaccagcctgggmaacatagggagacctgtctctacaaaaaaaattaaaaactagctggacatggcgcacacctgtggtcccagccactcgggaggtggaggtgggaggatgg

SEQ ID NO: 461082 - DNA, 201 bp, Homo sapiens
tgatccacccgccttggcctcccaaagttctgggaatacaggcatgagccactgcacccggcctcattatgagattttttggtgatttttttttttttttttagctcattagctatcattaatgttagtgtattttatgtgtttctgtgtggcccaagacaatttttttttttgagtcggagtcttgctctgtcccccagg

SEQ ID NO: 461083 - DNA, 201 bp, Homo sapiens
cactgtaactcaatataccccattaagatataattcacttgttagggcaaaaaacatgtctgaggatgtataaggattcagagacacatcatccggatacrcatctgtccaaaatcgaggaaaggtttgaaccaaataaatatcctagaacagagacagatggaaaggaaatagttgtaaataacaaactttgcaaaaatc

SEQ ID NO: 461084 - DNA, 201 bp, Homo sapiens
ttcgagaccagcctgggcaacatagggagacctgtctctacaaaaaaaattaaaaactagctggacatggcgcacacctgtggtcccagccactcgggagktggaggtgggaggatggcctgagcctaggaggttgaagctgcggtgagccactgcactccagcctggacgacagagcgagaccctgtcggagagcttcaa

SEQ ID NO: 461085 - DNA, 201 bp, Homo sapiens
gcagtggtgtgatcttggctcactgcaacctctgcctcttgggttaaggtgattctcatgcctcagcctcctgagtagctgggactacaggcacccaccaycacgtccggctaattttttgtatttttattagagatggggtttcaccatgttggccaggctggtctcaaactcctgacgtcaggtgatccacccgccttg

SEQ ID NO: 461086 - DNA, 201 bp, Homo sapiens
ctatcaccagtgagttttgtatcttgagatgatttcttcttgctcattaacatccctttctttcagattaaagaactccctttagcatttcatataggatrggtttggtgttgatgaaatccctcagcttttgtttgtctggaaaggtctttatttctccttcatgcttgaaggatatttttttttctggataatactatt

SEQ ID NO: 461087 - DNA, 201 bp, Homo sapiens
tttttttttttttttgagacagagtctcactctgtcacccaggcgatctcggctccctgcaatcctctcaagtagctgggactatagatgcacgctgccaygcccagctaattttttgtattttagtagagacagggtttcaccagcccagggttttgcaacagtccaggctggtcgcaaactcctgagcttaggcaatcc

SEQ ID NO: 461088 - DNA, 201 bp, Homo sapiens
gggtgatctcggctcactgcaatctctgtctcctgggtttacgtgattctcctgcctcagcctcccaagtagctgggattacaggcatgcaccaccaagcmcggctaatttttgcatatttagtagagacagggtttcgccatgttggccaggctggtcttgaacttttgggctcaagagatccacctgcttcggcctccc

SEQ ID NO: 461089 - DNA, 201 bp, Homo sapiens
gactacctggaaaaatgggacactcctgcccaaatactgcacttttcccaagatcttagccaccggcagacaaggagattctctcccatgcctggctcggygggttccacacccacggagccttgctcactgctagtgcagcagtctgagatcgaactgtgaggcggcagcctggctgggggaggggcgtccgctgttgct

SEQ ID NO: 461090 - DNA, 201 bp, Homo sapiens
caaggagggagtcatgagaatccctgatttatacagccagttggtcagaagtgtaggaggcttggatttgcagttggcatctttaatgggggcaaccttgygggactgagcccttaatctgtgggatctgacactaactccaggtagagagtgtcagaattgaattgtggaacacccagcctatgtcagagaattgattga

SEQ ID NO: 461091 - DNA, 201 bp, Homo sapiens
ggaatttcttgcatttgaagagttgagaagaagaatcatgaattatttagaggaattgcccagtgtctcaagcagcggggcataaagaagagctggcaccratgtctccagctgacaagtttgcagggcttgtactggactcctcatgaggccaactcaaggccaaggagcaaccctggccctatccttacagagaggccc

SEQ ID NO: 461092 - DNA, 201 bp, Homo sapiens
tatggtgttatttctgaggtctccattctgttccattggtctatatgtctgttttggtaccagtaccatgctgttgtgattactgtagccttgtagtataktttaaagttaggtagcgtgatgcctccagctttgttctttttgcttaggattgtctgggctatatgggctcttttttggtttcatataaaatttgaagta

SEQ ID NO: 461093 - DNA, 201 bp, Homo sapiens
atatgcaaattggccgggcacagtggctcatgcctgtaatcccagcactttgggaggcctagacgggcagatcacgaggtcatgagatcgagaccatcctrgctaacacggtgaaaccctgtctctactaaaaatacaaaaaattagctgggtgtggtggtgggtacctgtagtcccagccacttggaaggctgaggcagg

SEQ ID NO: 461094 - DNA, 201 bp, Homo sapiens
ctccttcacgtagaggttttccggtcctcccggcttgtcaaagtgcacggctaacatattgtctgaggacacagggcagggcagggcaggacaggacaggrcagggcagggcaggacaggacagggcagggcaggacaggacagggcaggggccgctgtatcctcgcggagcagcccagcctcaggctggcaccgcagcgc

SEQ ID NO: 461095 - DNA, 201 bp, Homo sapiens
gactgaaaatgtttactactcagacttgcaactcagtgcttaaacaagtgcctctcttgtaggttaccatcccaccatttcatgaccctttgaaaaaagcmcaatatgacaaggataatgaaaaaagaactcttcttcagtgtgagactggtacttagttcctaattgttatgtgatttcatagcccaagagcaatggcag

SEQ ID NO: 461096 - DNA, 201 bp, Homo sapiens
agtactctgcagggggctaggggattgccctgccccatccaccaccattggcgagagcccacaagcctgctgctaccaccacagctggcaacctcctgcaygcgccaactggtggtctggagactggcccacccagcctgttgtagccactgccaacacccgtgtggaccactctggagacaaagggttgtctcgtcactg

SEQ ID NO: 461097 - DNA, 201 bp, Homo sapiens
gaccactctggagacaaagggttgtctcgtcactgctactgccattgcccacaacatgaccagtgcccaggggttcaagaacctgcccatccacctggccraccgcagccactgcatgcacccaagcaagccacctggagacccaagaactggcccacctgaacccgtaacaccggtgccactgtatactgctctgaggac

SEQ ID NO: 461098 - DNA, 201 bp, Homo sapiens
ataacttctgtaaaagcaaaattatactgggcagtctgatcaccgtttaactctaatagtcatgatgtgtattgtaactacccctgaaaaactagcctgaygagcatgagaaagatacatgagtgaccttttaagcttgtggtagaatttcactgactaggcctaaatggtgaatgttgctgttcatgaatcctgttttca

SEQ ID NO: 461099 - DNA, 201 bp, Homo sapiens
gaaccttttggactttgaaaattcttcagactgatataacatttttcatagttatgattttttaaaattatcatttttctttttttttgagacagagtctyactctgaaaatttcatttttcaatgaaaaatccataattcttatctttgtttctctgtatgtgatgtttcttttttcttgggtactttcaagattttctg

SEQ ID NO: 461100 - DNA, 201 bp, Homo sapiens
aaaggcattgattaaacgtagaagccattcattataaaacctccaagcaaaataaggataaaaggaaagtatttatagtagactttttttaaaagacaagktctcattctgttgcccatgctggagtgcagtgttgtgatcacagctcactgcagccttgatatggctcaattgaacctcccacctcagcctcctcagtag

SEQ ID NO: 461101 - DNA, 201 bp, Homo sapiens
tttatagtagactttttttaaaagacaaggtctcattctgttgcccatgctggagtgcagtgttgtgatcacagctcactgcagccttgatatggctcaawtgaacctcccacctcagcctcctcagtagctaggactacaggcttgagccaccacacccagatagtttttgtttgtttgtttatcgtttgttttgtagat

SEQ ID NO: 461102 - DNA, 201 bp, Homo sapiens
gcatggtttatttcacttagcacaataacctccagttccatccatattgttgctaataacagggtctcattcttttttatggctgaatattactccattgygtgtaagtgcattttctttatccattcatctgttgatggacattgaggttgcttccaaatcttggctaatgtgaacaatgctgcagcaaacatgggagtg

SEQ ID NO: 461103 - DNA, 201 bp, Homo sapiens
tggagtgcagtggcccaatctcggctcactgcaacctccgcctcccgggttcacaccattctcctgcctcagcctcccgagtagctgggaccacaggcgcycgccaccacgcccggctaattttgttgttgttgttgttgttgttttcagtagagatggggtttcatcgtgttagccaggatggttttgatctcctgacct

SEQ ID NO: 461104 - DNA, 201 bp, Homo sapiens
aggtctcattctgttgcccatgctggagtgcagtgttgtgatcacagctcactgcagccttgatatggctcaattgaacctcccacctcagcctcctcagyagctaggactacaggcttgagccaccacacccagatagtttttgtttgtttgtttatcgtttgttttgtagatacgaggttatgccatgttgcccaagct

SEQ ID NO: 461105 - DNA, 201 bp, Homo sapiens
agtcttgctttatcgcccaggtcagagtgcagtggcccccacctcccaggttcaagcaattctcctgtctcagcctcctgagtagctgtgactacaggcayatgccaccacacccagctgatttttgtatttttagtagagacggggtttcaccatattggtcaggctggtctcaaactcctgatctcaggtgatccaccc

SEQ ID NO: 461106 - DNA, 201 bp, Homo sapiens
tttattttttgtaaatctgttactggttttttgatttgcggttaccatgaggcttgtaaatgctatcttgtaacccattatttttaactgatgacaacttragactgattgcatatacaaacgcacaaaaagaaaactagtgaaaactttaaactttgtctccctgctttttaacttcttgttgttcctctttgtgtctta

SEQ ID NO: 461107 - DNA, 201 bp, Homo sapiens
agtgaaaactttaaactttgtctccctgctttttaacttcttgttgttcctctttgtgtcttattatactattttttgaaaagttgttgtaattatttttkattggttcatcatttagtctttctatttaataagataagagtagtttgcacaccaccattgcagtgttatattattctgtgcttttctctgtgcttacta

SEQ ID NO: 461108 - DNA, 201 bp, Homo sapiens
ctgtctcaaaaaaaaaaaaaaaaaaaaaaaaaggaatagtagtaggaaagacttatattaccagatgtcagaaaataaatcagccaagcatagtggctcakgcctgtaatctcaccactttgggaggccaaggtgtgtggattatttgaggtcagaagttctagaccagcctggccaacatggtgaaaccccatctctact

SEQ ID NO: 461109 - DNA, 201 bp, Homo sapiens
ttgtgcctcagcctcccaagtagctgggattacagctgtgcaccaccatacccagctaatttttgtatttttaatagcgatggggtttctccacattggcyaggctggtcttgaactcctgacctcaagtgatccacctgcttcagcctcccaaaatcctcggattacaggcatgagccaccatgtctggccatgtcagca

SEQ ID NO: 461110 - DNA, 201 bp, Homo sapiens
attggtctatatgtctgttttggtaccagtaccatgctgttgtgattactgtagccttgtagtatagtttaaagttaggtagcgtgatgcctccagctttsttctttttgcttaggattgtctgggctatatgggctcttttttggtttcatataaaatttgaagtagttttctctaattctatgaagaatgtcaatggta

SEQ ID NO: 461111 - DNA, 201 bp, Homo sapiens
cctgtcatctaggctttaagcccctcatgcatcaggtgtttgtcctaatgctctccctccccttgcccctagccccccaacaggccccggtgtgtgatgtycccctccgtgtgtccacgtgttctcattgttcatctcccacttatgagtgagaacatgcgctatttggttttctcttcctgtgttagtttgctgaggatg

SEQ ID NO: 461112 - DNA, 201 bp, Homo sapiens
gctattgtaaatagtgctgcaataaacatacatgtgcagatgtctttatagtagaatgatttatattcctttaggtacatacccagaaatgggattgctgsgtcaaatggtatttttggttctaatatccttgaggaatcgccacactgtcttccacaatggttgaactaatttacattcccactaacagtgtaaaagtgc

SEQ ID NO: 461113 - DNA, 201 bp, Homo sapiens
tgagtatgatggctttcagcttcatctatgtccctgcaaaggacatgatctcattcccttttatggctgcatagtattccatggtgtatatgtacattttstttatccagtctatcattgatgggcatttgggttggttacatatctttgctattgtaaatagtgctgcaataaacatacatgtgcagatgtctttatagt

SEQ ID NO: 461114 - DNA, 201 bp, Homo sapiens
ccgaggtgcgcagatcacttgagttcaggagttggagaccagcctggccaacatggtgaaaccccatctctactaaaaataccaaaaaaattagcctggcrtggtggcacacactcatagtcctagctactcccaagggtgaggcaggagaatcacttgaacctgggatgcagaggttgcagtcagccaagattgcgccac

SEQ ID NO: 461115 - DNA, 201 bp, Homo sapiens
tgtcctgtagctcactgatattctggtaattttcttcagtttttcccccgtgcatttcattttggaaagctgctgttgctatgcttttaagttcactaacyttctgtaatgtctaatctgctaataaacctacctagcatatttttatctcaagtataatttgtgtccctagaagttttatctggattcttttgtttcgtt

SEQ ID NO: 461116 - DNA, 201 bp, Homo sapiens
ttcaggagttggagaccagcctggccaacatggtgaaaccccatctctactaaaaataccaaaaaaattagcctggcgtggtggcacacactcatagtccyagctactcccaagggtgaggcaggagaatcacttgaacctgggatgcagaggttgcagtcagccaagattgcgccactgcactccagccttatattagag

SEQ ID NO: 461117 - DNA, 201 bp, Homo sapiens
acgggcatgagtcactgtgcctggcctatttcttaaattattttttctattccctccatcttttgggaaatacaactgtatgtacaataacctgcttgaarttgtcctgtagctcactgatattctggtaattttcttcagtttttcccccgtgcatttcattttggaaagctgctgttgctatgcttttaagttcactaa

SEQ ID NO: 461118 - DNA, 201 bp, Homo sapiens
cattccttataagcaacagagagctgatttttttttaaattttttttttgagatggaatttcgctcttgttgcccaagccggagtgcaatggcacgatctyggctcactgcaacctctgccttctggattcaagaaattctcctgcctcagcctcccaagtagctgggattacaagggcgcaccacacctggctaattttc

SEQ ID NO: 461119 - DNA, 201 bp, Homo sapiens
atgtggatgaagcagcatgcctaacccataatatagggcatccaatgaatgattttcatctctttcattccttataagcaacagagagctgattttttttwaaattttttttttgagatggaatttcgctcttgttgcccaagccggagtgcaatggcacgatctcggctcactgcaacctctgccttctggattcaagaa

SEQ ID NO: 461120 - DNA, 201 bp, Homo sapiens
ttgggagagggatggtgcaagcactcccttagccatgccagctggtgtctccctaggtcacgtgccaccctagttttctggctctgagctcagcccaacaygaggaattgcctaggaattacagtccttgttcctagactgcctttcaaatttacctaggagcccagggtacttcagcccacaatggtgaggcttgtggag

SEQ ID NO: 461121 - DNA, 201 bp, Homo sapiens
acaggcatgagccaccatgtctggccatgtcagcactttaaatatgtcatgccactctctcctggcctgtaaggtttccactgaaaagtctgctgccagaygtggtggagctccattgtatgttatttgtttctttcctcttgatgcttttaggatcctttctttattcttgatctttaggtgtttgattattaaatgcct

SEQ ID NO: 461122 - DNA, 201 bp, Homo sapiens
gctggtctcaaactcctgacgtcaggtgatccacccgccttggcctcccaaagttctgggaatacaggcatgagccactgcacccggcctcattatgagaktttttggtgatttttttttttttttttagctcattagctatcattaatgttagtgtattttatgtgtttctgtgtggcccaagacaatttttttttttga

SEQ ID NO: 461123 - DNA, 201 bp, Homo sapiens
aatcacttgaacctgggaggcggaggttgcagcgagccgagatcaagccactgcacgccatcctcagtgacagagtgagactccatctcaaaaaaaaaaaagaaagagaaacggaaagggatgagccaaaaatagacacgtctggctttggaatacagaggtgtgcacatctacttactcatttagggtgctaccacccaa

SEQ ID NO: 461124 - DNA, 201 bp, Homo sapiens
ttagagcaatttgatatttattaatataatcatccactaagaaagacccaaactcttctttaacagttaaaagtttaacaaccggaacagctccagtctgyagctcccagcgtgatcgacgcagaagacaggtgatttctgcatttccgactgaggtaactgattcatctcactgggactggtttgacagtgggtgcagcc

SEQ ID NO: 461125 - DNA, 201 bp, Homo sapiens
aaatgctgggattatagctgtgagcccttgcgcccagccagttatattgtttttagattgtagtttcttttttctaaacagctttattaagatgtaattgwtatacagtaaactgcatatatttaaagtgtgtgtctggcactgtgcctcatgcctgtaatcccagcacgttgggaggctgaggtgggagggtcgcttgag

SEQ ID NO: 461126 - DNA, 201 bp, Homo sapiens
gggtgcagcccacggatggggagctgaagcagggcagggcgtcacctcaccctggaagtgcaaggggtcaggggatttccctttcctagccaagggaagcmgtgacagactacctggaaaaatgggacactcctgcccaaatactgcacttttcccaagatcttagccaccggcagacaaggagattctctcccatgcctg

SEQ ID NO: 461127 - DNA, 201 bp, Homo sapiens
cctcagctggtgcaaaaccctatggtggaaacattcccaaaggtggtacctgctagactgccagatggaatatttcaggagcatataatctttttttttttgagatgaggttttgctatgttgctcaggctggggtacagtggctatgcacaggtgcaatcatagctcactgcagccttgaaactcctggactcaagcaat

SEQ ID NO: 461128 - DNA, 201 bp, Homo sapiens
atgaaggtgggactgtattggaaagagttcaggcaaggctcagttaatagattctggaatgaacatttctcaaaaccaggctcttgataggactttctttcacatatgtcttcctggcactagactgctatctcaagacaatggctcaagacattaatggatttaatctgttttacagaaaggatcaggcagagcaaggaa

SEQ ID NO: 461129 - DNA, 201 bp, Homo sapiens
gtttctgtgtggcccaagacaatttttttttttgagtcggagtcttgctctgtcccccaggctgcagtgcagtggtgcaatctcggctcactgtaacctcygcctcctgggttcaggcgattctcctgcctcagttccctgacttagctggtattgcaggcatgcaccatcacacctggctaatttttgtatttttatttt

SEQ ID NO: 461130 - DNA, 201 bp, Homo sapiens
tatgaaggtgggactgtattggaaagagttcaggcaaggctcagttaatagattctggaatgaacatttctcaaaaccaggctcttgataggactttctttcacatatgtcttcctggcactagactgctatctcaagacaatggctcaagacattaatggatttaatctgttttacagaaaggatcaggcagagcaagga

SEQ ID NO: 461131 - DNA, 201 bp, Homo sapiens
aatttaagaccagtctggctaacatggcaaaaccctgtctctattagaagtacaaaaattagctgggtatggtggcaggtgcctgtagtcccagctactcrggaggctgaggcaggagaatcgcttgaaccctggaggtggaggttgcagtgagctgagatcatgccattgcactccagcctgggcaacagagtgagactc

SEQ ID NO: 461132 - DNA, 201 bp, Homo sapiens
gtatgaaggtgggactgtattggaaagagttcaggcaaggctcagttaatagattctggaatgaacatttctcaaaaccaggctcttgataggactttctttcacatatgtcttcctggcactagactgctatctcaagacaatggctcaagacattaatggatttaatctgttttacagaaaggatcaggcagagcaagg

SEQ ID NO: 461133 - DNA, 201 bp, Homo sapiens
cttcagaatagctattttgaattctctgtttgaaaggtcatatatctctgtttctccaggattggtccctagtgccttgttcagttcatttggtatgtctrtattttcctggatggtgttgatgcttatagatattcatcagtgtctgagcattgaagagttaggtaatgtagtctttacattctgggtttgtccttcttg

SEQ ID NO: 461134 - DNA, 201 bp, Homo sapiens
ggcaaaagcagtcctcactgttaaactaatcagccaaatcaaattactttgtatcagaaaaagtttctcattttttaattcaataatcatgttaatatgtrccttgtaacaatcattttgcttctgaaccttaagaaatatagatggacaaggcatgcagccctcctttcctggatgaattatgatacaaaagtgttcact

SEQ ID NO: 461135 - DNA, 201 bp, Homo sapiens
agtatgaaggtgggactgtattggaaagagttcaggcaaggctcagttaatagattctggaatgaacatttctcaaaaccaggctcttgataggactttctttcacatatgtcttcctggcactagactgctatctcaagacaatggctcaagacattaatggatttaatctgttttacagaaaggatcaggcagagcaag

SEQ ID NO: 461136 - DNA, 201 bp, Homo sapiens
gccccaagcccaataatactgtggtttttgcagactcatagaggtattgcctttgtggactttgataagatccagaagagttatctggttactaggcagaractcctgatatttacccccaccttctcccaaacaaacagtctctctctctgtgctgagccacctggagctgggggtgtcatgatgcaagcacccctgtgg

SEQ ID NO: 461137 - DNA, 201 bp, Homo sapiens
cagttggaagtttgtaatgagaattataggaggcaactggaatgctctacagaggaggctccagacagttattgccttgaggaagtttatgaaaaaggctyccactaggcacccagcaatgcagcgggtgtgtttaggaaaggctggccggccaggaggtgagctgccaagaggcttcaccaggcctgcagaacttcagag

SEQ ID NO: 461138 - DNA, 201 bp, Homo sapiens
cagcctcccaaagtgctgggattacaggtgtgagccactgtgcctggccactgagaaatgttttaagcacagaaatgattatctcttttttttttttttttaaaggaggatgtagagtatgaaggtgggactgtattggaaagagttcaggcaaggctcagttaatagattctggaatgaacatttctcaaaaccaggctc

SEQ ID NO: 461139 - DNA, 201 bp, Homo sapiens
tatttacccccaccttctcccaaacaaacagtctctctctctgtgctgagccacctggagctgggggtgtcatgatgcaagcacccctgtggccaccattrctggtgccgcattgggtcagacctgaagacgtctagtatagcaccgagtcttgcacaaggcccttcccttcagggtgtgagttccccaggtcccaggcat

SEQ ID NO: 461140 - DNA, 201 bp, Homo sapiens
ttaaaaggcatgtgaatacaaatgtccttaagacactgcagacagttctaagatcagcaagtgtactttgaaaaggtacagggtgaaaacggtggtccatsattcagggcccaccagtacccaaagaggaaaacagaatcatagaaaaatcacagctcacacagaataggttatgaagctgagtttggaaaatcacagcct

SEQ ID NO: 461141 - DNA, 201 bp, Homo sapiens
gagatagtggactagaggcagctcatgtgtgctgctgttttggagaagaaacaaaaggactagcaaacactgagctgcaggccgatcatctgaaaaaccaygttgggacccatcagggcagtagaggaacacagagtgcagaaaggagtgaagccaggcaccagctgtttgggctcagcatggagccaggagaacctctcc

SEQ ID NO: 461142 - DNA, 201 bp, Homo sapiens
agaatctcttgaacccaggaggtggaggttgcagtgagccgagatcgtgccattgcactccagcctgggcgacaaaagtgaaactcgtctcaaaaaaaaamaacaacaacaaaacaaaacaaaacaaaacaaaactgatgtaatggaaaggtcgtacattttggaattggacagctctgggcttgaattctagtgcctcct

SEQ ID NO: 461143 - DNA, 201 bp, Homo sapiens
ccactccacccacccccaccactggtagccaggcgggcaacacctgctagagcttccagcctaatagccctgcttctgtgtgaactcagctagagggtgcrgctttctgttgtcctgggaaacacccgaacagcagagtaagtgactctacctaccctgccactggtagccagttgggtaacaactgctagagctcctggc

SEQ ID NO: 461144 - DNA, 201 bp, Homo sapiens
gtatatagtttctgtgataaacttaatttctcaattggccctttaagattcagctctctggcgccttccctgactctgctaggccgaagtaattcattgayttattcatcaaacatgtactaattgcctacccaacatcagacactgtgttaggtaatggagaaaaagaaggattaagacaagacaaatgccttccaggga

SEQ ID NO: 461145 - DNA, 201 bp, Homo sapiens
cagtggctctacttctacctgaatttgtcaagggacgcagcctcctgttgcactggaaacacccagacagcagggcagccaactgcatccacccacccccrcgtcctgtagccagatgggccacacccagtagtttccaatccagtggtcctgattctgcctgaactctgcaggcagggacaacctcgtgtttccccagga

SEQ ID NO: 461146 - DNA, 201 bp, Homo sapiens
acaaacatcaattctatttcatggtaataagtgccatagtagaggtatttgagttgtcctggagtatgaattgggttcccatgcaaaaaaaaaaaaaaaaaggatgaataatgcatatggctgggcaaagggaacagggtgagagagggctcaggagaataaaagaaactgctgccctcctctcctatatgtattctatga

SEQ ID NO: 461147 - DNA, 201 bp, Homo sapiens
cacaaacatcaattctatttcatggtaataagtgccatagtagaggtatttgagttgtcctggagtatgaattgggttcccatgcaaaaaaaaaaaaaaaaaggatgaataatgcatatggctgggcaaagggaacagggtgagagagggctcaggagaataaaagaaactgctgccctcctctcctatatgtattctatg

SEQ ID NO: 461148 - DNA, 201 bp, Homo sapiens
atttgggtttattttcacacaaaaaaagtaaatacgtttattttcataaaaatacacaaattcacatagaactcatcaacttcaaatttaaataaaaataytaagtgctacagttgagttgagagttaagagaatcccttcctttctggttccttcctgcagaaacaaagggtcatcctttctagaaagagaaccgctgtg

SEQ ID NO: 461149 - DNA, 201 bp, Homo sapiens
ttctggcccagcagtcctgcttctgtgtgaactcagccaacaaatgcagccttctgttgtcccaggaagcacagacaccagagaaggcattcccaccaacmccagccactggtagccaggcaagccacacctgccagagctggcccagtggctctacttctacctgaatttgtcaagggacgcagcctcctgttgcactgg

SEQ ID NO: 461150 - DNA, 201 bp, Homo sapiens
tgtttgttttctatttctcaggggccactgttcttctttgcctgatgttcgatatcttggaaactgttgtttcatctattttatcttttttttttttttttagttgtttcaggtgggagagtaagtctgtttcctgctactctgtcttgttcaaaagtgaaagttctcatccagacattattttttcaaacagttgtttcc

SEQ ID NO: 461151 - DNA, 201 bp, Homo sapiens
tgtactatttgtccatttgtgtctgacttatttcactttggcatactcttttcaaagtacatccatgttgtagcatgtttcagaacttcattcctttttgkggctgaataatattccatattacacatataaataaatgtggtatgtatataccacattttatctgttcatctcttgatggatacttggatcgtttccacc

SEQ ID NO: 461152 - DNA, 201 bp, Homo sapiens
actttttaaatttctatcttgatttcattgttgacccaatgattactcaggagcaggctatttagtttccatgtatttgcatggttttgagggttcctttyggagttgatttccaattttattccactgtggtctgagagagtacttgatataattttgattttcttaaatttactgacacttgttttgtggcctattata

SEQ ID NO: 461153 - DNA, 201 bp, Homo sapiens
gtcttctctctgtgtctgtgtccaaattcccctcttctgataaggacacctatcagtgggttagggtccaacaccctaatctactgttacctcattttaasctgataacatctgcaaagaccctatttccaaataaggtcaaattcacagatgccagggattaggatttgaagatatttttttgggtgcacgtaattcatc

SEQ ID NO: 461154 - DNA, 201 bp, Homo sapiens
aacatcccatctgaagttaccaataggagttcggtacagttctgtagcagatataggtatgggagacagctacaaagaggaaggaatccatatgcatcccrtccctctttccattttataccaaatttctgggatcattttccttttttctgaagtttggcctttacaattcaatgtttgtttacctttgaagataatttg

SEQ ID NO: 461155 - DNA, 201 bp, Homo sapiens
cctcccggcttgtcaaagtgcacggctaacatattgtctgaggacacagggcagggcagggcaggacaggacagggcagggcagggcaggacaggacaggrcagggcaggacaggacagggcaggggccgctgtatcctcgcggagcagcccagcctcaggctggcaccgcagcgccccctgccggccagcgcctcgctgc

SEQ ID NO: 461156 - DNA, 201 bp, Homo sapiens
  misc_feature (1)...(201): n = A,T,C or G
acaagagcaaaactctgtctcaaaacaaacaacaacaacaaaacccccaaaagaatcaaactactgactaaataatggatgaacggactagtggcaaggcnaccaatcaaaaacaaaaacaaaaacaaaaaaacaaatctgtggtacttggccatccaagctcagaaaaggaatgatgttggaagtaagttctgtgtaagg

SEQ ID NO: 461157 - DNA, 201 bp, Homo sapiens
atggaatactatgcagccataaaaaaggatgagttcatgtcctttgcagggacatggacgaaggtggaaaccatcattctcagtaagttatcacaaggacwgaaaaccaaatagtgcatgttttcactcataggtgggaattgtacaatgagatcacttggacacagggtggggaacatcacacaccagggcctgttgggg

SEQ ID NO: 461158 - DNA, 201 bp, Homo sapiens
aaatgttagacctaaaaccataaaaaccctagaagaaaacctaggcaataccattcaggacgtaggcatgggcaaggacttcatgactaaaacaccaaagrcaatggcaacaaaagccaaaattgacaaaagggatctaattaaacgaaagagcttctgcatggcaaaagaaactaccatcagagtgaacaggcaacctac

SEQ ID NO: 461159 - DNA, 201 bp, Homo sapiens
gtcacacgatgagggtgccccctggtggagccacacgatgagggtgccccctggtgggtgggccacgctgtccaggatttccccagcccctctctcagtcygccatctccaccctgtctctaccatttaccacttagcatagccaagccaggccccacattttgttaaccttaaggcagtcaagataggtagaaaattttc

SEQ ID NO: 461160 - DNA, 201 bp, Homo sapiens
taaatgttagacctaaaaccataaaaaccctagaagaaaacctaggcaataccattcaggacgtaggcatgggcaaggacttcatgactaaaacaccaaaracaatggcaacaaaagccaaaattgacaaaagggatctaattaaacgaaagagcttctgcatggcaaaagaaactaccatcagagtgaacaggcaaccta

SEQ ID NO: 461161 - DNA, 201 bp, Homo sapiens
aatggggaaaggattccctatttaataaatggtgctgggaaaactggctagccatatgtagaaagctgagactggatcccttccttacaccttataaaaaattaattcaagatggattaaagacttaaatgttagacctaaaaccataaaaaccctagaagaaaacctaggcaataccattcaggacgtaggcatgggcaa

SEQ ID NO: 461162 - DNA, 201 bp, Homo sapiens
atgtgcttgcttgcttgcttcctcaaaattttaacaagcgccaactctgagccaggcagtgtttgaggggctggagacacagtgggaaacaaaacagagayggctccgatttcctggagcttacattttgatggggaaatagacagtagtcaaccaaataaacacataacatcacgtgagttagtaataaggaaaacaaag

SEQ ID NO: 461163 - DNA, 201 bp, Homo sapiens
ccccattaccaagacaatcctaagcaaaaagaacaaagctggaggcatcaagctacctgacttcaaactatactacaaggctacagtaaccaaaacagcayggtactggtaccaaaacagatacatagaccaatggaacagaaaagaggcctcagaaataacaccacacatctacaaccatctgatctttgacaaacctga

SEQ ID NO: 461164 - DNA, 201 bp, Homo sapiens
ccccatcgtctcagcccaaaatctccttaagctgataagcaacttcagcaaagtctcaggatacaaaatcagtgtgcaaaaatcacaagcattcctatacrccattaacagacagagagccaaattatgagtgaactcccagtcacaattgctacaaagagaataaaatacctaggaatccaacttacaagggatgtgaag

SEQ ID NO: 461165 - DNA, 201 bp, Homo sapiens
gcagatgacatgattgtatatttagaaaaccccatcgtctcagcccaaaatctccttaagctgataagcaacttcagcaaagtctcaggatacaaaatcartgtgcaaaaatcacaagcattcctatacgccattaacagacagagagccaaattatgagtgaactcccagtcacaattgctacaaagagaataaaatacc

SEQ ID NO: 461166 - DNA, 201 bp, Homo sapiens
ttgcagatgacatgattgtatatttagaaaaccccatcgtctcagcccaaaatctccttaagctgataagcaacttcagcaaagtctcaggatacaaaatyagtgtgcaaaaatcacaagcattcctatacgccattaacagacagagagccaaattatgagtgaactcccagtcacaattgctacaaagagaataaaata

SEQ ID NO: 461167 - DNA, 201 bp, Homo sapiens
ctcttgttcttgtgtatcgttttatttccttgctatagggaaatgcatttatagaacattatgatccaaaagagtatgatcccttttatatgagcaagaargaccccaattttctgaaggtagggtagatttcttttttttaactttggtattatgtgtttggttgttttgagcagccctaatatatgagcagtccttaag

SEQ ID NO: 461168 - DNA, 201 bp, Homo sapiens
ccttcaacaaaattcaacagtgcttcatgctaaaaactctcaataaactaaatattcatggagtgtatctcaaaataataagagctatttatgacaacccmcagccaatatcatactgaatggggaaaaactggaagcattccctttgaaaactggcataagacaaggattccactcctacgcaacatagtgttggaagtt

SEQ ID NO: 461169 - DNA, 201 bp, Homo sapiens
gacacataatcatcagattctccaaagtttacatgaaagaaaaaatgtcaaaggcagctagagagaaagggcaggttacctacaaagggaactccatcagrctaacagcagatctttcaacagaaaccctaaaagccagaagagactggtggcctatattcagcattcttttttttttttttttttttttgagacagagtt

SEQ ID NO: 461170 - DNA, 201 bp, Homo sapiens
ccacctgaggagtatttcaaagtacacgtgcctgggcccccatcacgtttcttttgtgccccgggggattctgatgcacatttctgaatgaccccaaccaatgcagctggcccaggtcagtaaatcagcatcagacagaagaaaattcttaagagtactgcccgctgtcagctccgggactctcagagtggaaagagttaa

SEQ ID NO: 461171 - DNA, 201 bp, Homo sapiens
cagtggcatgatctcagctcactgcaacctctacctcctgggttcaagtgattcttctgtctcagcctcccaagtagcagggattacaggcacccgccacyatgaccagctaatttttgtatttttagtagagacagggttttgctgtgttggccaggctggtttcaaactcctgacctcaggtgatctgcctgcctcagc

SEQ ID NO: 461172 - DNA, 201 bp, Homo sapiens
agtcattccagcaaattatcatgagtcatgggactccccccccaaatctgtagccaggtcagacagaagtgtgggtagtgcgggtagcctggggacctggractcgtgtttggcatctgtagtggggacaggcttgtgggaactgagctccttaacctgtgaggtctacactaactccagttagctagtgtcaaattgaat

SEQ ID NO: 461173 - DNA, 201 bp, Homo sapiens
gagccaccatgccgggcccagaaattttcacttaatgtgaaattatgactaacttattttcccaagttataaaagtgagtgtatattacttttgtaatcckaatttaatagttttctaaaagtactgtctaccccacagcactgcttgatgtcttctgagtgactccaaggagagtagccttttctattttggctctatcc

SEQ ID NO: 461174 - DNA, 201 bp, Homo sapiens
acttggattaggttatgccacacttctgcctctttactcttgcctttttttttttctgaaggtcagttgtagtgaagggttttttttttttttttttccawagaatgtttttcttcctctttttctgccatcccttctcttcctggataacccttctttttttttttttttttttttttttttgagacagggtctcactct

SEQ ID NO: 461175 - DNA, 201 bp, Homo sapiens
ctcatatcagctttaaacggctctggaggaagcaccgggtttcttggcctgtctattgtgaatcttctccaggtttgctctggaaaggcctggggtggccrcgtcctgtcctgccccatcctccttcactggggcagttccaggacgatcttgcctatgttcttgttggcctccatgtacttatgggcctcctggatttcg

SEQ ID NO: 461176 - DNA, 201 bp, Homo sapiens
tttttactcattcatgaaaatttactaaccttttcttttgtgtgtttagctccttttactgccatgttttggtatcctcccatgtgcttgcttgcttgctbcctcaaaattttaacaagcgccaactctgagccaggcagtgtttgaggggctggagacacagtgggaaacaaaacagagacggctccgatttcctggagc

SEQ ID NO: 461177 - DNA, 201 bp, Homo sapiens
ttatgaagacagtctgttcagtaactaatatggccagtctcgtataacataatgaccaaagcttcaatcttcatttaaggtctccctccccgcgtttgggrctgctgaagctggagctataagaaagaagagggaggtagatgtcttctctctttcccttcttactctcctattccttacccctgtttcttgccactgtga

SEQ ID NO: 461178 - DNA, 201 bp, Homo sapiens
tctggagttcaggggagactgggggtggagacaggtttttgagagtcatcctcatatagatgctatgtgaaatcatgcaatcacctgggggtgagtgtcaragagaagaaggccgagggttagtcctgcggaacgccaagatttagaggttggggcaaggaggcagagctggtgaaggaacattcatggagcgagaggttg

SEQ ID NO: 461179 - DNA, 201 bp, Homo sapiens
ttctcaagtgagatcatcagctgatcgcgaggcacagaatagagaatttagaggtttgaagagaaaagggaagaaaggaacctagtattttctaaatcacracaatccaagtggaaattagtactccaaacatgttgacatctgaaagctgagaccacaggggttccctcaaatcatgtcacacatcagtgatccacccca

SEQ ID NO: 461180 - DNA, 201 bp, Homo sapiens
gctttatattatcttgctttaaattatccatttttctctcattccatattcctcatcctctttaaattattctaccctgacagttatctagtctcccaacrtctcacccctaatcaatatatggttctaagtgaaactagattttctttctttctttctttttttttttttttgaaacagggtctcgttctgttgcccagg

SEQ ID NO: 461181 - DNA, 201 bp, Homo sapiens
caaatatctcacatttcctctgaagccttgtactatttctgtattatttgagatcatttgtattgcaagtaacaagctaaccagagctaacataagcacaratggtccctggtggtctagtggttgggattaaaaaaaaaaatttcattgaaagagtgccaaagcatcttacagaaccctgagaaaaaactgaattccaca

SEQ ID NO: 461182 - DNA, 201 bp, Homo sapiens
tgtcaaagtgcacggctaacatattgtctgaggacacagggcagggcagggcaggacaggacagggcagggcagggcaggacaggacagggcagggcaggrcaggacagggcaggggccgctgtatcctcgcggagcagcccagcctcaggctggcaccgcagcgccccctgccggccagcgcctcgctgccctggtctgc

SEQ ID NO: 461183 - DNA, 201 bp, Homo sapiens
aaggccttcaacaaaattcaacagtgcttcatgctaaaaactctcaataaactaaatattcatggagtgtatctcaaaataataagagctatttatgacaacccccagccaatatcatactgaatggggaaaaactggaagcattccctttgaaaactggcataagacaaggattccactcctacgcaacatagtgttgga

SEQ ID NO: 461184 - DNA, 201 bp, Homo sapiens
gaggccaacatcatccttatgccaaagcctggcagagacacaacaaaaaaagagaattttagaccaatatccctgatgaacatcaatgcgaaaatcctcartaaaatactggcaaaccaaatccagcagcacatcaaaaagcttatcaaccatgatcaagttggcttcatccctgggatgcaaggctggttcaacatacac

SEQ ID NO: 461185 - DNA, 201 bp, Homo sapiens
acaaagaggagctggtaccattccttctgaaactattccaatcaatagaaaaagagggaatcctccctaactcatttcatgaggccaacatcatccttatrccaaagcctggcagagacacaacaaaaaaagagaattttagaccaatatccctgatgaacatcaatgcgaaaatcctcaataaaatactggcaaaccaaa

SEQ ID NO: 461186 - DNA, 201 bp, Homo sapiens
gggatcaattcgccaagaagagctaactatcctaaatatatatgcacccaatacaggagcacccagattcataaagcaagtcctttgagacctacaaagaracttagacttgcacacaataataatgggagactttaacaccccactgtcaatattagacagatcaacgagacagaaggttaacaaggatatccaggactt

SEQ ID NO: 461187 - DNA, 201 bp, Homo sapiens
gaaacagtttgctatgagacagaacaaagctgactcatttagaagtcaagacagaatcctagcagtgttccagtccctgaatctaccttccccatggctcwgctgcaccctgtccttccagtggctatgtaaataacctcagcatccttccaataaattcctcctttctgccctagctggtttgagttggatctctgttac

SEQ ID NO: 461188 - DNA, 201 bp, Homo sapiens
ttgatgacacagcctaattttagcctgaagtattgatagctcagtctttgtttagctttgggccttggcatccctgtcctcttttggagttgtggctagaagtcctcaaatgcttcctggcttgtcgtgcaaacctcacaagtatctttatattgtacatctctggactgcagaggtgtgactgtccaacatcaccatgat

SEQ ID NO: 461189 - DNA, 201 bp, Homo sapiens
caggagacccagctcatgtgcaaagacacacatagactaaaataaagggatggaggaagatataccaagcaaatggaaagcaaaaaaaaaaaaaaaaaaaagcaggggttgcaatcctattctctgataaaacagactttaaaccaacaaagatcaaaagagacaaggccattacataatggtaaagggatcaattcgcca

SEQ ID NO: 461190 - DNA, 201 bp, Homo sapiens
gaccctcaggcatctcctttcccttcctgccttcctctcccttctcctctgctgcagcatgattttcttaatcttcagacactcactattttcatgaacarttaccctccggccccacaaccaaagacaactcatggcctcctttggcccttgtgtaacactgcaaacctgtggctttgcaaaatgtacccaggtcacaag

SEQ ID NO: 461191 - DNA, 201 bp, Homo sapiens
gattttcttaatcttcagacactcactattttcatgaacagttaccctccggccccacaaccaaagacaactcatggcctcctttggcccttgtgtaacaytgcaaacctgtggctttgcaaaatgtacccaggtcacaaggggatttttttttttagcaatgatatccctttctgggtcactttttaagcttataaccag

SEQ ID NO: 461192 - DNA, 201 bp, Homo sapiens
tattttcatgaacagttaccctccggccccacaaccaaagacaactcatggcctcctttggcccttgtgtaacactgcaaacctgtggctttgcaaaatgyacccaggtcacaaggggatttttttttttagcaatgatatccctttctgggtcactttttaagcttataaccagacttataatcttaaatgtatttttcc

SEQ ID NO: 461193 - DNA, 201 bp, Homo sapiens
caacattctagaaagatatagctaagaatgttgcttctacaattagaaaataaagtatcagactatattaaaaattaatagtacttcgttactactaaacragctagtacttcgttttcattggatacattttcagcatcatgagttgtcacagcctctgagcccctgatcttaagccacaagggctgagtgtattgtaaa

SEQ ID NO: 461194 - DNA, 201 bp, Homo sapiens
attcttgcatgttgctgtctgggaatagaccacactacagctggtagttctgggggcggtactgccgaaaggcctgaacacatgtattttggctgcaattraggaacttgggatgctgactattaattttgtatttcagcaactgccccttctcctatcccaaagaaccaattactgccctctgcctcagcagtaccagta

SEQ ID NO: 461195 - DNA, 201 bp, Homo sapiens
ggaccaagactagatttcctgagactttaaatacgcaagacaaatgcaaacaaaatctgccaacatacccaggctgcttttcaggagtgaatcactgaagygcatttggatttcctataacactactttcttttgggaatgtacagccctcccccagctccccatcccccatcataatgtaaaccattctaagagaaaata

SEQ ID NO: 461196 - DNA, 201 bp, Homo sapiens
cactgaagtgcatttggatttcctataacactactttcttttgggaatgtacagccctcccccagctccccatcccccatcataatgtaaaccattctaakagaaaatatggatgttttggctgggggtggtggcacatgcctgtagtcccagctacttgggaagctgaagcaggaggaccacttgagcccaggagtttga

SEQ ID NO: 461197 - DNA, 201 bp, Homo sapiens; identical to SEQ ID NO: 257696

SEQ ID NO: 461198 - DNA, 201 bp, Homo sapiens
gaggaccacttgagcccaggagtttgaggctgcagtaagacatgatggcaccactgcagtccagtctgggtgacagatgacagaaaaaaaaaaaaaaaaaraaaagaaaagaaaatatggacattttatttctggactttatccttaaatgcttagctttagaatagtgcacaggtacatccttaataaaaagtaaatttg

SEQ ID NO: 461199 - DNA, 201 bp, Homo sapiens
tgaaaagacaggaaaggactgtgcttttctcttccattttaccttttcattctgagaccactaaggtctttgcattaagtaggtgacgtgaaccctagtgrccactgcccaccaaaatgcccctcatctccagctctgtcaggagtacctttagttactcaaatggaaatatctcagtgtaatgatggggctacaacatat

SEQ ID NO: 461200 - DNA, 201 bp, Homo sapiens; identical to SEQ ID NO: 257628

SEQ ID NO: 461201 - DNA, 201 bp, Homo sapiens
cttgaacccaggagccagaggttgcagtgagctgagatcacgccactgcactccagcctgggcgacagagcaagactctttctctcaaaaaaaaaaaaaamaaaaaaaaaaaagatgatatggaaaaagtgttgtgaaagctcttacttttacattctaccaaccctgtataaggtcggtgtcagagtcaagcaattaata

SEQ ID NO: 461202 - DNA, 201 bp, Homo sapiens
tataaggtcggtgtcagagtcaagcaattaataatcacaattggggtggacaatttagcatctaggtcagtgattagcaagtaatagttttctcatccatktttgttgaattagcataagatattatggcttatgtactgatatggctggctactttatcaaggcagtaatttgtcctttattcttgctgctgtagatatt

SEQ ID NO: 461203 - DNA, 201 bp, Homo sapiens
tgtgctgagcaaaagtatcaccccaggattgcacagtctcaggctggtggactccaagaatatagtcctgggagcaatggcacagatatcccctgcctacygtcagaagaccatgtgggcagggatggtgaacttaacagagaccagcatggacagaggtctagaggactcttctccaactcctcccaccagctgttctct

SEQ ID NO: 461204 - DNA, 201 bp, Homo sapiens
tcaggaggctgaggcaggagaattgcttgaacccaggagccagaggttgcagtgagctgagatcacgccactgcactccagcctgggcgacagagcaagaytctttctctcaaaaaaaaaaaaaaaaaaaaaaaaaaagatgatatggaaaaagtgttgtgaaagctcttacttttacattctaccaaccctgtataaggt

SEQ ID NO: 461205 - DNA, 201 bp, Homo sapiens
aatatagtaattaataaatcaatcctttatcacaaacccttgtgatacaaatacaaaaatttgctgggcatagtgacacgggcctgtgatcccagctattyaggaggctgaggcaggagaattgcttgaacccaggagccagaggttgcagtgagctgagatcacgccactgcactccagcctgggcgacagagcaagact

SEQ ID NO: 461206 - DNA, 201 bp, Homo sapiens
aaagtgttgggattacaggcataagccaccacacctggcccatattatcttttaatcctgctgtcagagacgtgtgaaccagagcaactccattttgagtragggctagcaaaatgaagctgggacttgctgggctgtgtttctagaaagtttggtattcctagcctctagatgtttatggttaaaggaacaaattaataa

SEQ ID NO: 461207 - DNA, 201 bp, Homo sapiens
cgcctgggagaccacacagccgggagcaggaccagtgtggcccggggacactccccaagccgggactcggcgacaggcccgggggcctcaggatgtcgacrggcctcgtgttgccctcgctgcggccgtcctggctgtcctggcctatgtcgggcttgagtggggtggcaggttccgagatgaggaggaaccgcactgaga

SEQ ID NO: 461208 - DNA, 201 bp, Homo sapiens
caggctgccttctgcatccgtggagccccagtgcccgtgagggtgtccaggcctcaccctgtggggccgtgcatgaatccaggcatggaggaagtgtagcygggcttctctaagctgagacaagtaaagatgaagaggcccccaggtacccaattcctataggtgtgaggccagggcaccagacaaaggcgtgagctgcaa

SEQ ID NO: 461209 - DNA, 201 bp, Homo sapiens
cagagatgaaatcggttctgcagctcaccctatccccatcttgagcaccgcctgagggcgcaggtggggtccctccctgcccagcgggggatggggtgggsgtgggggggcgcgcacctggagctgcgcttccctctggcggcctccctgcccggtgaggggctgtgcctccggggtctgtctcccggcatttttcatatt

SEQ ID NO: 461210 - DNA, 201 bp, Homo sapiens
acagcacctcacctccgctgccctgcagggatctgccatcccaggtgctcccctcgggactcctcctggtgccagggaggaggggctgggccaggtgaggyggagcagccataggcttccctcagtgggagggaacactcacctccctgaagggtgggagttctactgaggattcgagagtaattttccaggtgtcaggtt

SEQ ID NO: 461211 - DNA, 201 bp, Homo sapiens
ggcgtgtggccacttaggcaggtaaggacagaggggaatagtcagggaaataaggacacttggaggtgtatttggtgaagcagagtgtttggcaagtcaargtcatgcctgttgaagagtctcctgtccggacagcgtggacagcacctcacctccgctgccctgcagggatctgccatcccaggtgctcccctcgggact

SEQ ID NO: 461212 - DNA, 201 bp, Homo sapiens
caggacccttctaacaaccagctccctcaggaactactagagtggatgttagttaccatgaggacagtgctggactgttcatgagggatccacccgtgacscaaacacgtcccagcaggcaccacctccatgttggttaaatttctacctgaaatttggaggggacaaacatccaatctacatcagcatgtcactgtgact

SEQ ID NO: 461213 - DNA, 201 bp, Homo sapiens
gctgaactccgactggtgacaacgggtcagcgtcctcactccctggagactcggagcctggacttgccaaatttggcacctgcccatttttttttttttttctttgagatggagtatcactctgttgcccaggctggagtgctgtggctcgatctcggctcactgcaacctccacctcccaggttcaagctatattctgcc

SEQ ID NO: 461214 - DNA, 201 bp, Homo sapiens
ggtgtaagtggctcacgggcctgcaggctctacaggaagcctggcaccaacatctgcttccgggaaggcctcagggagcttcttctcagagcagaggggaygtggtgagggagggagcagggagggcagtgccaggacccttctaacaaccagctccctcaggaactactagagtggatgttagttaccatgaggacagtg

SEQ ID NO: 461215 - DNA, 201 bp, Homo sapiens
cggtcctccatattaaatcccttttgtttgactggttggatcccacctgatacaattggggtggccccaaccaaggacctatggttacaaaacaggacacrgaagtccatgaggaggagtgattgtgccttacaggaagggacgtatccacatgtgtcaaagggtttaggggatcacggtggcttcagcacagcccacgga

SEQ ID NO: 461216 - DNA, 201 bp, Homo sapiens
aggaagcaacgactggggagtcccagaggaaggcgttgagcagaggggccgtgtggtgggtgggcaccccagcaggcagggtgctgggggaggaacatgagcccctgcgggctttggaaagagcagtgaagtacagccccattgcctctgcccagggctagcggaaagtgaagtgttcccagccccattgcctctgcccag

SEQ ID NO: 461217 - DNA, 201 bp, Homo sapiens
agtcaaagtcatgcctgttgaagagtctcctgtccggacagcgtggacagcacctcacctccgctgccctgcagggatctgccatcccaggtgctcccctygggactcctcctggtgccagggaggaggggctgggccaggtgaggcggagcagccataggcttccctcagtgggagggaacactcacctccctgaagggt

SEQ ID NO: 461218 - DNA, 201 bp, Homo sapiens
gagagtaattttccaggtgtcaggttttctgtgggatcctgtgtgggctatgaaccagccagctttgacttgcctgtcaatttgcctaatgaattggtgtrtgagcgagccgagtttgcacctgccatcctcttggtctaaactacaggcactgcacgttgcaagataagggacgttgcacatccttcacctgggaaactt

SEQ ID NO: 461219 - DNA, 201 bp, Homo sapiens
tttaattaactttggcctccagaggaggccattcttatctacaggacaagcaccgcggctgtaccagcctctgagttccgactcgggtcctgcaggtgtgrcttcctggcgcacgcgggctctctgagctcagggaggctccgagcctgcctccaggacgcagcctttgtcactctgtcttactccacctccatctcagac

SEQ ID NO: 461220 - DNA, 201 bp, Homo sapiens
ctctccaccacggaccgttccaggcgaccaacacgcagtctccaagcttggagttgcctgctgtaggccccccaccgactgccggaaccccagctcccagsccttccagcctgtgggtgttggtaggcggtttcggcagttgtgagcctggtcaaagcctcagctcttccctcacttgggcaatcggtcctccatattaaa

SEQ ID NO: 461221 - DNA, 201 bp, Homo sapiens
ggcttccctcagtgggagggaacactcacctccctgaagggtgggagttctactgaggattcgagagtaattttccaggtgtcaggttttctgtgggatcytgtgtgggctatgaaccagccagctttgacttgcctgtcaatttgcctaatgaattggtgtgtgagcgagccgagtttgcacctgccatcctcttggtct

SEQ ID NO: 461222 - DNA, 201 bp, Homo sapiens
gaggaacaggccaccggcagcagagacgggtcaggcccagcgagggaggaggtgggaggagccccggagccctcggaggaagccgggctggcacctgggcsttggactctgggactgtgagggaatcaattctgccatctgaagccacctgctgtggtcctgtgttacagcagcgctgggcacaaacatgggagggcctcg

SEQ ID NO: 461223 - DNA, 201 bp, Homo sapiens
aaaatattctagacatatacagacaatcttcacctctcccctcactttacaccttgcttttccactttgtgatagaccttagagattaagaaaacatgcckgttgcatggcaagagtgatgccatcttgatgcaaaaccactatgaccaccaatatctgactcccgcatcccaaagtgttgggtagcataaataattccac

SEQ ID NO: 461224 - DNA, 201 bp, Homo sapiens
tctttacccagcaccttcaaggccgccttctctggccacagggagcagcccggaactggggcagggagcactgttggaagtgggtcaggcttcccaaaagraaggatgcctccagcagggctgtgtgaactggcgacttcatggtccttggagtagaaactcactgcatgcacctgggccttgtcagtctggttcttttct

SEQ ID NO: 461225 - DNA, 201 bp, Homo sapiens
ggtctttacccagcaccttcaaggccgccttctctggccacagggagcagcccggaactggggcagggagcactgttggaagtgggtcaggcttcccaaargaaaggatgcctccagcagggctgtgtgaactggcgacttcatggtccttggagtagaaactcactgcatgcacctgggccttgtcagtctggttctttt

SEQ ID NO: 461226 - DNA, 201 bp, Homo sapiens
cctggagagctgggcaggtggtctttacccagcaccttcaaggccgccttctctggccacagggagcagcccggaactggggcagggagcactgttggaartgggtcaggcttcccaaaagaaaggatgcctccagcagggctgtgtgaactggcgacttcatggtccttggagtagaaactcactgcatgcacctgggcc

SEQ ID NO: 461227 - DNA, 201 bp, Homo sapiens
actagctaatcagcagcatccttggtatgccacaagtcatattcaaccaatgaagaaatattcacattaagaaagaaaactagggacaaaaatggaaaacratgttttcacccaattaatgtccactcttgtaggaggtaagcaaggacagactgggagctggactccagaaagagagcagcaagaaccaagtggaccacg

SEQ ID NO: 461228 - DNA, 201 bp, Homo sapiens
aacccctaccggcgtctccagccccacttacagaagaccgcggagaggaacatggtgaccacacctgggcagtctccgtcaccggccaaaaggcccccaamcaacaacaactgcttccggggcacggcccggttctggaagaggacatccggcagtcgcccgaggccacgccccccgcctggaacctgcctccagtcgtct

SEQ ID NO: 461229 - DNA, 201 bp, Homo sapiens
ggctatttttgaaatgcttataccatgaatgcaaaggattacaaaactcattaaaacagactatgatttaatcaaagcagagtttgttcttctggattccygtagtgagctccagacacatggcccctggtcctcgatttgaggaaatggaaatatggtggtagtccaaatacagcacagcccaatggtttgtttagaaac

SEQ ID NO: 461230 - DNA, 201 bp, Homo sapiens
tcaaatagtggggaaaaacatcactaagacacaatagcacaggctattttaatattttttattaagggctataaaaatacccagaaagataaataaatgtkatgcaatgatatctgtcctaatatgaagaactttctttcactgcattgttttccttcacaatggccttcaaatcacaggaggcagtgattccatgccatt

SEQ ID NO: 461231 - DNA, 201 bp, Homo sapiens; identical to SEQ ID NO: 426646

SEQ ID NO: 461232 - DNA, 201 bp, Homo sapiens
ggatccccttaggattttatagaaggaaggttaaaagatccaatcagaccaacacaattctagatttaatattttgcataatttcatgactgttggactgkctaccttttaaatctttctaaagtaatacctgctccattttttccctcttctaaggtgcaagtattcgcgctgcagcaagcttcttgtttgacaagttta

SEQ ID NO: 461233 - DNA, 201 bp, Homo sapiens
ctcaccagaatgtttctaagattaaaaagtacgctgttatgtacgagctgacgaaataaactaaaatcagtcacagggggatggcacattttgagaactcygtagggtaatattagttgtgagatatcacttggccctaaaaggttcagttgtaagacagcctaagttttccatgaaacagtttcaatggtttcaaatctc

SEQ ID NO: 461234 - DNA, 201 bp, Homo sapiens
aaatatggtggtagtccaaatacagcacagcccaatggtttgtttagaaacagacagtgagctcacaaatcctgggactagaaaagcagcaaaggttcctkcaagtatttcaatgctcacagaagtagctcagttcagcaggagggaaaatatttttgaaagagttcataaagaaaaaataatcaactaagtaatccacaa

SEQ ID NO: 461235 - DNA, 201 bp, Homo sapiens
ctgtgatttggtcttagttttctggtgagcccatacctctggactgtcactcctacattttattcatgtggacattttggttttttccacatctcagctattttattttattttattttattttattttattttatttttttaatctcagctattttaaacaactctgttaaaaaacatcattgccatgcaattctagtac

SEQ ID NO: 461236 - DNA, 201 bp, Homo sapiens
tgtgatttggtcttagttttctggtgagcccatacctctggactgtcactcctacattttattcatgtggacattttggttttttccacatctcagctattttattttattttattttattttattttattttatttttttaatctcagctattttaaacaactctgttaaaaaacatcattgccatgcaattctagtaca

SEQ ID NO: 461237 - DNA, 201 bp, Homo sapiens
cactattttgggatattacttagaaacttaaaatttttttcattttatttttatttttggagccagagtcttgctctgtcacccaggctggagtacagtgrcatgatcttggctcactgcagcctctacgtcccaagttcaagcgattctcctgcctcagcctcccaagtagctgggactacaggcacgcaccactgcgcc

SEQ ID NO: 461238 - DNA, 201 bp, Homo sapiens
acctactatccatattccagttttgtcatttgatctaatagtgtcctttatagcacccccccatcccttttttcttccagtacaggatctagtacatactrcatatattgcatttagtttttatttctctttcgtctcttttcatctggaatacttgtgctgcctttgtctataatgttgacatttttaaataatgtaact

SEQ ID NO: 461239 - DNA, 201 bp, Homo sapiens; identical to SEQ ID NO: 28804

SEQ ID NO: 461240 - DNA, 201 bp, Homo sapiens
tctcccattataatagcagaattccctatttttcagtttttcctgtttttcttgatatattttgaagttggttaattagatgcatgtataaaatgtgaatkaggttggattctccaaaggaaaaaaattccagatagtaaacatatttattacaagaaaatatgttttctggctgggcgtggtggctcacgcccataatcc

SEQ ID NO: 461241 - DNA, 201 bp, Homo sapiens
tttagtagagacggggtttcactgtgttagccaggatggtcttgacctcctgacctcgtgatctgccctcctcggcctcccaaagtcctgggattacaggygtgagcctctgtgccaggcctcatttatttttaaatgtctgaataatactccgttgtttggatatatatcacattggttatttatccatcaattgatgga

SEQ ID NO: 461242 - DNA, 201 bp, Homo sapiens
caatttggaataagagtacaaacccctccgtcaggtcctctgcaaaataaaaaggtaaaaaccccataggacagtaaacagtgtatcccagatgttagttsgcatgtatttgtgatttctggtaaatatcctaatgctcttttgtctttgttttgcttaaaggattgttcaagtttagaagaatacaacattgccgcagca

SEQ ID NO: 461243 - DNA, 201 bp, Homo sapiens
attcattaaacaataaatttagatgtaataactcttcaagtggctttttttttttttttgacagtgtctctctgtgtcacccaggctggggtgtcacggcrtgatcatagtttgctgcagcctcaaactcccaagctcaagcgatcctcccatctcagcctcccaagtagctgggactacatgcatgcaccatcatacctg

SEQ ID NO: 461244 - DNA, 201 bp, Homo sapiens
agaattatggtttccagcttcatccatgtccctacaaaggacatgaactcatccttttttatggctgcatagtattccatggtgtatatgtgccacatttkcttaatccgatctattattggtggacatatgggttcattctaagtctttcctattgtgaatagtgtcacaataagcatacgtgtgcatgtgtctttatag

SEQ ID NO: 461245 - DNA, 201 bp, Homo sapiens
tcgagatgttgtgaagattaaatgaaataatatctgtaaattcatacttcaaatatgtgtgatacttagtaaacacttaataagtgctaactaattattaycatatgccaggtgcagtgttctagtttccaggcatataaagttaaaagtgacttggtccattcactcaaataacttaaaataaagcttgatattatttgt

SEQ ID NO: 461246 - DNA, 201 bp, Homo sapiens
gtgatttggtcttagttttctggtgagcccatacctctggactgtcactcctacattttattcatgtggacattttggttttttccacatctcagctattttattttattttattttattttattttattttatttttttaatctcagctattttaaacaactctgttaaaaaacatcattgccatgcaattctagtacac

SEQ ID NO: 461247 - DNA, 201 bp, Homo sapiens
gaactcctaaccttgtgatttgcctgccttagcctcccaaagtgctgggattacaggcgtgagccaccgcacccagctaaaaaataacaaaaaaaatttayagtgtttttaaaaagtttatgaattgtgttgggcacattgaaagctgtcctgggctgcatgtggcctgtgggccgcgtgttggacaagcttggttagcgt

SEQ ID NO: 461248 - DNA, 201 bp, Homo sapiens
tctgctgatagtttcttttgctgtgcagaagctctttagtttaattagatcccatttgtcaattttggcttttgttgccattgcttttggtgttttagacrtgaagtctttgcccatgcttatgtcttgaatggtattggctaggttttcttctagggtttttatggttttaggtcttacgtttaagactttaggctgggc

SEQ ID NO: 461249 - DNA, 201 bp, Homo sapiens
aaatgttttgggatatacattgttgccttttgtatctgttaattggatcttacatggtcgtttgctctaaaaatgaacatcgaaggtatttttattttttwaaaaatggctgaaatcgtgtgtgtgtgtgtttgtgtttctcccattctgcagaagctgttttctttgggtgcaggagatagacagttgatccagactcct

SEQ ID NO: 461250 - DNA, 201 bp, Homo sapiens
ctatttgactcttttgtaataacacttagcttaaaagccacggtattgtatagccatacaaaaatattttctttcattatatctttataagtgttttcaatttttttttttttttgagacagagtctcgctctgtcacctaggctggagtgcactggcatgatcttggctcactgaaacttctgcctccttgaaacttcca

SEQ ID NO: 461251 - DNA, 201 bp, Homo sapiens
atggactctgccattccaagcttcactccctacaatttcctcttgatcgccttcatctcttgtttactgtcttgtgtttatttggtttttggtttttttgttttttttgtttttttggcagcctatgtgaactatttttgtttacctgaggattagtgttttaagtgtactaacaatgctgggatttttaatgttaataag

SEQ ID NO: 461252 - DNA, 201 bp, Homo sapiens
tcagctcactgcaacctcttcctcccaggttcaagcaattcccctgcctcagcctcctgagtagctgggactacaggcgtgcaccaccatgcccagctaatttttttttttttttttttgtattttagtagagacaaggtttcaccatgttggccaaatggtctcaatctcctgacctcatgatccacctgctttggcctc

SEQ ID NO: 461253 - DNA, 201 bp, Homo sapiens
ttaatctgtcttttgtcataagggtctgtcccaacaacaaacttatcagggttaaaaaaaaatttaaagaaaatatatttcctctcctatcataaaaacayagtttgcaaatttgagtacacaagattttaaactattactaataatggcatcttgtgccctattttactgtatctatgattaattattttttgacagttg

SEQ ID NO: 461254 - DNA, 201 bp, Homo sapiens
ttcccctgcctcagcctcctgagtagctgggactacaggcgtgcaccaccatgcccagctaatttttttttttttttttttgtattttagtagagacaagktttcaccatgttggccaaatggtctcaatctcctgacctcatgatccacctgctttggcctcccatggtgctgggattacaggtgtgagccaccgtaccc

SEQ ID NO: 461255 - DNA, 201 bp, Homo sapiens
cctgtaatctcagcactttgggaggccgaggcgggcagctcacgaggtcaggagatcgagaccatcctggctaacacggtgaaatcccatctctactaaaratacaaaaaattagccgggcatggtggcccgtgtctgcagtcccagctactcgggaggctgaggcaggagaatggcgtgaacccaagaggcggagcttgc

SEQ ID NO: 461256 - DNA, 201 bp, Homo sapiens
gtaggttaacttctgaaaataaacccacagactacagatgtttacaacttaacttctcactaagatttgagtgtttttaccacaaagtcgtcagggtatcttttttttttttttttttgagacagagtctcgctctgtcacccaggctggagtgcagtggcgcaatctcggctcaccgcaagctccacctcccgggttcat

SEQ ID NO: 461257 - DNA, 201 bp, Homo sapiens
ggagtcattaatagggtggcaaaagatttaccttcagagtaatatagtatgactgctcatagtcaactttgaagatagaaggaaaccacaagacaaggaaygtgagaagtcaccagaagctggaaaatttgatcacaggacttccacaacagtaaaataataaatttgtcttgttttaagccaccaaatttgtggtacttt

SEQ ID NO: 461258 - DNA, 201 bp, Homo sapiens
taggttaacttctgaaaataaacccacagactacagatgtttacaacttaacttctcactaagatttgagtgtttttaccacaaagtcgtcagggtatcttttttttttttttttttgagacagagtctcgctctgtcacccaggctggagtgcagtggcgcaatctcggctcaccgcaagctccacctcccgggttcatg

SEQ ID NO: 461259 - DNA, 201 bp, Homo sapiens
acccaggctggagtgcagtggagcaatctcggctcactgcaagctccgcctcccgggctcacaccgttctcctgcctcagcctcttgagtagctgggactmcaggcgcccgccaccaggcccggctaatttttttgtatttttagtagagacggggtttcactgtgttagccaggatggtcttgacctcctgacctcgtga

SEQ ID NO: 461260 - DNA, 201 bp, Homo sapiens
tcatgccattctcctgcctcagcctcccgagtagctgggactacaggtgcccgccaccacgcccggctaatttttgtatttttagtagaggtggggtttcmctgtgttagccaggatggtctcgatctcctgacctcatgatccacccgcctcggcctcccaaagtgctgggattacaggcgtaagccaccgcgcccagcc

SEQ ID NO: 461261 - DNA, 201 bp, Homo sapiens
acccgcctcggcctcccaaagtgctgggattacaggcgtaagccaccgcgcccagccgcctcagggtatcttatattgtaagtcaggttttttttaccttycttctaaggtcaaaaggaaaaaaaaaagagagaaagtatgggggtaaatacaaaaccaacagaatagaaaacaaaaaccttccaaaataagtggttaggc

SEQ ID NO: 461262 - DNA, 201 bp, Homo sapiens
aagtgctgggattacaggcgtaagccaccgcgcccagccgcctcagggtatcttatattgtaagtcaggttttttttaccttccttctaaggtcaaaaggaaaaaaaaaagagagaaagtatgggggtaaatacaaaaccaacagaatagaaaacaaaaaccttccaaaataagtggttaggctaaagtgagttccttaga

SEQ ID NO: 461263 - DNA, 201 bp, Homo sapiens
ttgccaagcttgtggtggagggggcaagccatgcaaggctttttcccatctgtcccattgatgcagttggccttccagtggcctggcttctcataccaatgcaattatttgggaagatattcctagggcaaattggagggagctggtggacttgtaagacagccaatagttggagctgccacttttccgtttgcctctcct

SEQ ID NO: 461264 - DNA, 201 bp, Homo sapiens
tgcagggcttcgttgtaattttttcctctgttttttttatgggatatgttaaaatttttttcctaataaaaactaaaaaacaaaataaaatctaaacagtgatgactaatagtgctgtaactagaatattatacctctaatatactgtttaatcaattgataatcataacatctgggaaattagttcatataaactagata

SEQ ID NO: 461265 - DNA, 201 bp, Homo sapiens
gtcaacagacacctgggtcactttcaccttttgcctattgtgaataatgcttctgtgaacatgagtatacaaaaacctgtttgagttcttgttttccattmttttgggtatatgcccagaagaagaataactgtaatatacagtaattctatatttattttttgcatgtgtggaatcgctatactgttttccacagtcact

SEQ ID NO: 461266 - DNA, 201 bp, Homo sapiens
taagtagttggtaatgtgttggaaatcttgggagaaagagatggctttagttatagaagcatggtaccatgccatagaatatgcagagaataagagaatamatattttttaaatgaatgtagccaaaatttttggaaaacagcctttagattcattctggggtggtgtgtgtgtgtgtgtttgtgtgttctaacagcttta

SEQ ID NO: 461267 - DNA, 201 bp, Homo sapiens
acaaacagtgtaagcattggtaacaaagattattgtaaaaaagatattgtaacagagattatcggcaacacctctatgcagcttctttccattcccaattsataatgtaggagttggcctacttttttggctttcagaatcttcagtgtctgcatgagaacacaagtaactacttccctgccctatccctatgattctttt

SEQ ID NO: 461268 - DNA, 201 bp, Homo sapiens
ctattatgtataacacaatcattgccctcaaaaggccttatgactaattagggaggatatgcagtatacataattttaatacaaagtaaagaataggctgrgtatgatggctcacatctgtaatcccagcactttgggaggctgaggtgagaggatcgcttgagctcaggagttcaagaccagcctgagcaacgtggcgga

SEQ ID NO: 461269 - DNA, 201 bp, Homo sapiens
agtcaggttttttttaccttccttctaaggtcaaaaggaaaaaaaaaagagagaaagtatgggggtaaatacaaaaccaacagaatagaaaacaaaaaccytccaaaataagtggttaggctaaagtgagttccttagaataaaactgcacatttgagaagtgatttcataaaaaggaatcactatactaatactttattt

SEQ ID NO: 461270 - DNA, 201 bp, Homo sapiens
tgtacaaattgtatgtgctatatttttatgagactggcagcacagtaggtttgtttacaccaacatcagcccaaatgtctgagtaatgtgttacactgtgmtctcttggatgttacaatggctaaaatgtcactaggcaataagaatttttcagctccattatagtcatatgtgaccaccatcatatatgcagtccatcat

SEQ ID NO: 461271 - DNA, 201 bp, Homo sapiens
gtcttccaccaccacatcttgtctcactggaagttcttcaggggcagtaacacacatggagctgtcatctcctgtgataacagtgccttctagaatacctrctgaaggacttgccttgggctattttaccattagctattttttttaataagtagaagtgtactctaaaataatgattaaaagtatagtgtagtaaataca

SEQ ID NO: 461272 - DNA, 201 bp, Homo sapiens
taaaaaaaagttgttttttttttactttttaaacttgttcattaaaaatgaagacacaaatccacacattagcctagacctacacagggtcaggatcatcmatatcactgtcttccaccaccacatcttgtctcactggaagttcttcaggggcagtaacacacatggagctgtcatctcctgtgataacagtgccttcta

SEQ ID NO: 461273 - DNA, 201 bp, Homo sapiens
attatgtttccacagactccatttttatattcagttcagtatcttacttgagaggcaagagaacgttgaggtttcaagcacaaatactggagtaagactayccaggttcaaattctggctctgccatttgtggctatataatcgcaagcaaataatttaacctctgagaggctcagtttcattatcaacaaaaaggacata

SEQ ID NO: 461274 - DNA, 201 bp, Homo sapiens
acaatgagataccatgtcatgccagctacaatggcagtcattaaaaaggaaacaacagatgctggagaggatgtggaaaaataggaattcttttacactcttgttgggagtgtaaattagttcaaccattgtggaagacagtgtgatgatcctccagtatctagaaccagaaataccatttgacccagcaatcccattact

SEQ ID NO: 461275 - DNA, 201 bp, Homo sapiens
ggtgtgagccaccgtacccagccccagctgtgttttctatttttaatagaaaagtagaaaaaagtaaaaaaaagttgttttttttttactttttaaacttrttcattaaaaatgaagacacaaatccacacattagcctagacctacacagggtcaggatcatccatatcactgtcttccaccaccacatcttgtctcact

SEQ ID NO: 461276 - DNA, 201 bp, Homo sapiens
caatgagataccatgtcatgccagctacaatggcagtcattaaaaaggaaacaacagatgctggagaggatgtggaaaaataggaattcttttacactcttgttgggagtgtaaattagttcaaccattgtggaagacagtgtgatgatcctccagtatctagaaccagaaataccatttgacccagcaatcccattactg

SEQ ID NO: 461277 - DNA, 201 bp, Homo sapiens
gcctcccatggtgctgggattacaggtgtgagccaccgtacccagccccagctgtgttttctatttttaatagaaaagtagaaaaaagtaaaaaaaagttkttttttttttactttttaaacttgttcattaaaaatgaagacacaaatccacacattagcctagacctacacagggtcaggatcatccatatcactgtct

SEQ ID NO: 461278 - DNA, 201 bp, Homo sapiens
aatgagataccatgtcatgccagctacaatggcagtcattaaaaaggaaacaacagatgctggagaggatgtggaaaaataggaattcttttacactcttgttgggagtgtaaattagttcaaccattgtggaagacagtgtgatgatcctccagtatctagaaccagaaataccatttgacccagcaatcccattactgg

SEQ ID NO: 461279 - DNA, 201 bp, Homo sapiens
agtgcagtggggcgatctcagctcactgcaacctcttcctcccaggttcaagcaattcccctgcctcagcctcctgagtagctgggactacaggcgtgcaycaccatgcccagctaatttttttttttttttttttgtattttagtagagacaaggtttcaccatgttggccaaatggtctcaatctcctgacctcatgat

SEQ ID NO: 461280 - DNA, 201 bp, Homo sapiens
gaggtcaaggctacagtgagccaaaatcacaccaccgcacttcagcctgggggacagagtgagaccctgccctttctaaaacaacaacaacagcaacaacaagattatgaacagatggcatttgggccaaaaatttaaataaagataagactttttttttttgagacggagtctcgctctgtcgcctaggctggagtgcag

SEQ ID NO: 461281 - DNA, 201 bp, Homo sapiens
aaaaaataacaaaaaaaatttatagtgtttttaaaaagtttatgaattgtgttgggcacattgaaagctgtcctgggctgcatgtggcctgtgggccgcgkgttggacaagcttggttagcgtattccacgcctaggttatatggtatagcctatcgctccaaggttacaaatctgtacagcacattactatactgaatac

SEQ ID NO: 461282 - DNA, 201 bp, Homo sapiens
caccggaaaactcagccctggaccgtaacaggaacaaaaagcatatggtaagtcataaggagctgactggggatccaattagtgtctgtcctggcaatgtrccaacagacagaggcaggattagaggtcatctgagctggtaaggtaaaaactagtgttaagtctctagatagccacaagggagcccatgtttttgctgct

SEQ ID NO: 461283 - DNA, 201 bp, Homo sapiens
aggtcaaggctacagtgagccaaaatcacaccaccgcacttcagcctgggggacagagtgagaccctgccctttctaaaacaacaacaacagcaacaacamgattatgaacagatggcatttgggccaaaaatttaaataaagataagactttttttttttgagacggagtctcgctctgtcgcctaggctggagtgcagt

SEQ ID NO: 461284 - DNA, 201 bp, Homo sapiens
atagaaaaagagtttataaataccatactaacagaggggatgaaagaagagacaggagaaattgaaaagaaggaaaaaagagaagatagaaaaaataaaawccaggccaggcgcggtggctcacacctgtaatcccagcactttgggaggccgaggcaggtgtatcaccaagtcaggagagcaagaccatcctgcttaaca

SEQ ID NO: 461285 - DNA, 201 bp, Homo sapiens
aaataaagataagactttttttttttgagacggagtctcgctctgtcgcctaggctggagtgcagtagcgtgatctcggctcactgcaagctccgcctccygggttcacgccattctcctgcctcagcctcctgagtagctgggactacaggcgcccgccaccacgcctggctaattttttttgcatttttagtagagacg

SEQ ID NO: 461286 - DNA, 201 bp, Homo sapiens
gtagccgtgcactggtaattctcaaagttgacaattactgcagggcttcgttgtaattttttcctctgttttttttatgggatatgttaaaatttttttcytaataaaaactaaaaaacaaaataaaatctaaacagtgatgactaatagtgctgtaactagaatattatacctctaatatactgtttaatcaattgataa

SEQ ID NO: 461287 - DNA, 201 bp, Homo sapiens
ttgagaggcaagagaacgttgaggtttcaagcacaaatactggagtaagactacccaggttcaaattctggctctgccatttgtggctatataatcgcaarcaaataatttaacctctgagaggctcagtttcattatcaacaaaaaggacataattacagtacctatctaatcgagatgttgtgaagattaaatgaaata

SEQ ID NO: 461288 - DNA, 201 bp, Homo sapiens
aggagaatcacttgaacctgggaggtggaggttgcagtgagtcaagattgcaccactatactccagcctgggcgagagtaagactctgtctcaaaaataaatacatacatacatacatacatacatacatacatacatacatacatacatacagtcactggaggtaggaccaaccaagtgttgccaaataaataaaaacag

SEQ ID NO: 461289 - DNA, 201 bp, Homo sapiens
ggagaatcacttgaacctgggaggtggaggttgcagtgagtcaagattgcaccactatactccagcctgggcgagagtaagactctgtctcaaaaataaatacatacatacatacatacatacatacatacatacatacatacatacatacagtcactggaggtaggaccaaccaagtgttgccaaataaataaaaacagt

SEQ ID NO: 461290 - DNA, 201 bp, Homo sapiens
ctgccaccacacctggctaattttttgtattttttagtagagacggggtttcactgtgttagccaggatggtcttgatctcctgacctcgtgatccgcctrcctcagcctcccaaagtgctgggattacaggcgtgagtcaccgcgcacggccaattgtttcccttttctgagtttctttttccacttcttttttgttttc

SEQ ID NO: 461291 - DNA, 201 bp, Homo sapiens
gagaatcacttgaacctgggaggtggaggttgcagtgagtcaagattgcaccactatactccagcctgggcgagagtaagactctgtctcaaaaataaatacatacatacatacatacatacatacatacatacatacatacatacatacagtcactggaggtaggaccaaccaagtgttgccaaataaataaaaacagtc

SEQ ID NO: 461292 - DNA, 201 bp, Homo sapiens
tttaaaatactcagtgaaactgggtttacaaatgctgtataccgaattcccttcatggagtcacagtttaaaatcctgccaaatcctgttttttttttttwaaaaaaaaaaaaaagaagaaaaggaaaaccttgtttaattttgtttacccagcatttccccaattccccccaagtaacagctatcagtactctacagagc

SEQ ID NO: 461293 - DNA, 201 bp, Homo sapiens
agaatcacttgaacctgggaggtggaggttgcagtgagtcaagattgcaccactatactccagcctgggcgagagtaagactctgtctcaaaaataaatacatacatacatacatacatacatacatacatacatacatacatacatacagtcactggaggtaggaccaaccaagtgttgccaaataaataaaaacagtcg

SEQ ID NO: 461294 - DNA, 201 bp, Homo sapiens
ttaaaatactcagtgaaactgggtttacaaatgctgtataccgaattcccttcatggagtcacagtttaaaatcctgccaaatcctgttttttttttttawaaaaaaaaaaaaagaagaaaaggaaaaccttgtttaattttgtttacccagcatttccccaattccccccaagtaacagctatcagtactctacagagct

SEQ ID NO: 461295 - DNA, 201 bp, Homo sapiens
ccaaggcgagcggatcacaaagtcaggagatcaagaccatcctggctaacacggtgaaaccgcgtctctactaaaaaaaaatagaaaaaattagccgggcrtggtggcaggcgcctgtagtcccagctactcaggaggctgaggcaggagaatggcgtgaactcaggaggcagagcttgcagcgagccgagatcacgccac

SEQ ID NO: 461296 - DNA, 201 bp, Homo sapiens
taaaatactcagtgaaactgggtttacaaatgctgtataccgaattcccttcatggagtcacagtttaaaatcctgccaaatcctgttttttttttttaawaaaaaaaaaaaagaagaaaaggaaaaccttgtttaattttgtttacccagcatttccccaattccccccaagtaacagctatcagtactctacagagcta

SEQ ID NO: 461297 - DNA, 201 bp, Homo sapiens
aaaatactcagtgaaactgggtttacaaatgctgtataccgaattcccttcatggagtcacagtttaaaatcctgccaaatcctgttttttttttttaaawaaaaaaaaaaagaagaaaaggaaaaccttgtttaattttgtttacccagcatttccccaattccccccaagtaacagctatcagtactctacagagctag

SEQ ID NO: 461298 - DNA, 201 bp, Homo sapiens
actttcccttctgactcttcctcctgttttctggagtgcttctcccgggcactagtgcacttaggcagctctaagccttctgctgctctcctggtcaggtyagttctcaccaccctcacactctaaaattagtgctggaagttcagacaatccatatgttctacctcaaaaattaaaggaaagcaagtacaaaaggcagtg

SEQ ID NO: 461299 - DNA, 201 bp, Homo sapiens
ttgaatttccattggggtttggggcttttgttgtgccttgctttgcttttatttgaaattagtttcaagccttgtattctgtaacccctaggcatattctyacttagcctaccaaagctgggggtagctgggcgtgctgcaggggggaggggtgctgcagaccagatgatgtgtgtatatgtcactttttcatgtctgaga

SEQ ID NO: 461300 - DNA, 201 bp, Homo sapiens
tttaattcaattcttgcaatccttatgtgtgttcagcattgtgtccccctcattaagatgcagtgggaagagctttagagtgcctgctgtgtgccaggcartttctagatgcagtaggtatacgtctactctcatggagctttattttatggagagaaggatagacaataaacaagttaaataaaatgtaaagtatgtgag

SEQ ID NO: 461301 - DNA, 201 bp, Homo sapiens
gtgaactagtgtgatttttggggggatgttgaagagccttgttttgtcatattaccagggttggttttctggttccttcttatttgggtaagctctgtcaragggaaggtctaggactgaaggctgttgttcagattattttgtcccacagagtgttctcttggtgtagtactctccctcttttcctatggatgtgactcc

SEQ ID NO: 461302 - DNA, 201 bp, Homo sapiens
atgttgttggatttggttagctagtattttgttaaggattttagcatctgtgttcatcaaggatattagtctgtagttttcttttttggttatgtcctttyctggtttgggtattagggtgatgctggcttcatagaataaattagggagagttccttctttctgtatcttgtggaatagtgtcaaaaggattggtactgg

SEQ ID NO: 461303 - DNA, 201 bp, Homo sapiens
attgtgctcttttttaaaagcatctttccttttatcatttaactctatattcacagcagcccactctggtggatagaacaagaatattattctcatttcartttttgaaagagtactatattagaaccaaaaatgtaaaaagtttcttgaaatctataaaagaacaacactcctagaacccaagatattggagaatcgtgg

SEQ ID NO: 461304 - DNA, 201 bp, Homo sapiens
ttctcagcatagcatcaaaaatcttagtagttgaaaatgattctgcaagaagaaaatttgctacatactgatataatttcatcttctctgtgcaagtcctwcacaggtccttctttcccagatgctccccaacctgctttccttcaaagcctaactcaaatgttactttgttttttgtttagtcttccctaagttgaatta

SEQ ID NO: 461305 - DNA, 201 bp, Homo sapiens
tttttctcattgaaacaaatttaaatttttttgcagttattttaccttagccaaattttgaaaacagtattttgttttactgatagccttttaggtgcttmtgatcagaaaattgaactgtagaaattctgcattgcttttcaagatatcactagaactaaggccttaatagtctactttaagaatattttattctgggct

SEQ ID NO: 461306 - DNA, 201 bp, Homo sapiens
tttgtgcacgttaaataatttcaaatacttgaattaatctgggaaacttgataagctctaacaatatcatattgatttgtctttcagtgctgagaccaatrcataggaaaaattttctttttcccaaggtggctgttgcctactttgaatttccattggggtttggggcttttgttgtgccttgctttgcttttatttgaa

SEQ ID NO: 461307 - DNA, 201 bp, Homo sapiens
tggagtcatgaattagagcagtggttctcaacaggagcaaccctcccaccctacttcatgaaattggtctggagacatttttggtggtcacagttggaggkactgtgctactgtcatctagtggataaaggccaaagatacttctaaacatcttacaatacacaagacacctactctttatcgcaaataattatcaagccc

SEQ ID NO: 461308 - DNA, 201 bp, Homo sapiens
aaaaaaatttatagagtgcagtggagtgatctcggctcactgcaacctccgcatcccaggttcaagctattctgcctcagcctcccgagtagctgagattrcaggcacccgccactatgcccagctaatttttgtatttttagtagagatggggtttcaccatgttggccaggctggtcttgaactcctaaccttgtgatt

SEQ ID NO: 461309 - DNA, 201 bp, Homo sapiens
actgtagatggtaccaggaatgtccaatcttttggcttccctgggccacattggaagaagaattgtggtgggccacagataaaatacactaaaaatagccratgagctaaaaattagaatttttttcttttgagacggagtcttgctatgtttgcccaggctggagtgcagtggagtgatctcggctcactgcaacctccg

SEQ ID NO: 461310 - DNA, 201 bp, Homo sapiens
agtctggataacagttatatgttttacaaatgtcttcttgtatgcaatatgcagtgacttgtcatttgactcttcatgatgccattttataaatttttaarttgacagtggggatacatgctgagaaatgtgtagcttgacaattttgttgttgtctacttaggcaaactaattttttaaaataagtaggagtgtactgta

SEQ ID NO: 461311 - DNA, 201 bp, Homo sapiens
aggctggtttgctgccagttaataatttcagtctaagggaaaaggaaagacagcataggagagctttacatatcccctgtcttgaaggacaggaaaacacrtgtcacttctcatgttttattggcagaatcttagccacatgccacacttaatttcaaaggaacctgggaaatacagggtaggtgggaacttgttagccca

SEQ ID NO: 461312 - DNA, 201 bp, Homo sapiens
taaattcctggtctgataatttcaacatacctccatatctaagtctgtttctgatacttgctgtctcttcagtctatgtttttggccttttagtatgcctyataattttatcttgatagccaaatgtgatatactatgtaaaaggaactgctataaggcctggtgtggtggctcataatgcctgtaatcgcagcactttgg

SEQ ID NO: 461313 - DNA, 201 bp, Homo sapiens
cccaccaccacgcccggctaatttttttgtatttttagtagagatggggtttcaccgtgttagccaggatggtctcgatctcctgacctcgtgatctgccygcctcagcctcccaaagtgctgggattacaggcgtgagccaccgcgcccggccgaacatgtttcaactgaatattttgtcttggagatctttctacaata

SEQ ID NO: 461314 - DNA, 201 bp, Homo sapiens
cttccatcctactgcctttgctcctttgtcaaagatcagtttactgtatctatgcagatctgtttcttggctctcagagattctttcctcagccatgaccrgtctaccactaagcccatcaaaggcattctttatttctgttaactgtgtttttgatctctagcattactttttggttctttctaggaatttccatctttc

SEQ ID NO: 461315 - DNA, 201 bp, Homo sapiens
acattttcattaataatgctcagcaggaacaattacattcttaaaatttaaaatttttctgccagtgtttgattttgaccattgacaataacatttcaggrtatttttcttgaaactgagagctagctaagcttttctctgatcttctattatcatctttttatgatataagtcataaagaaaattatccctagttatttg

SEQ ID NO: 461316 - DNA, 201 bp, Homo sapiens
cttggtgtagtactctccctcttttcctatggatgtgactccctgtgagccgaactgcagtgattgttgtctctcctggatctagccacccagcgagtctscctggctccaggctggtactgaggattgtctgcacagagtcctgtgatgtgaaccgtctatgggtctctcagctgtggataccagtgcctgttccggtgg

SEQ ID NO: 461317 - DNA, 201 bp, Homo sapiens
ccgcgcccagcctgaaagataaccctttttatataacaataagaaagaaaaaaatatctccagtcaattataagatgatccccatctcagaaatgttaaartgtgcaaaaaaatgtatcttagactcaatggaatacagttgctgaatatactaaaacttcctccaaaaaaaaatttgtgtaagttacacaacttttaaca

SEQ ID NO: 461318 - DNA, 201 bp, Homo sapiens
agaactgcttgaacccgggaggcagaggttgcagtgagccgagatcacaccactgcatccagcctagatgacagagcaagactctgtcttgaaaaaaaaamaaattacatgtggtgatggacacctatagtcctgcctgttcaggagactgaggtgggaggattgcttgagcccaggagttcagccaaggagtttgaggct

SEQ ID NO: 461319 - DNA, 201 bp, Homo sapiens
gtgtctacgttattttgcattttcaccagcagtatattagcattccatttgtgccacatctttactaacacttggtattgtcagttggtttctttttttcytttttttttttttttttttttttttttgagtcagagtttcgctgttgttgcccaggctggagtgccatggcacaatcttgactcatcacaacctctgcct

SEQ ID NO: 461320 - DNA, 201 bp, Homo sapiens
ttgtcccagctcctcgggagactgaggcaggagaatggtgtgaacccgggaggtggagcttgcagtgagccgagatcacgccactgccctccagcctgggygacagagcaagactgcgtctaaaaaaaaaaaaaaataggatatatgggatagtattgagtttaatctacagcatgaataacataagttcagtgggaataa

SEQ ID NO: 461321 - DNA, 201 bp, Homo sapiens
gatctgcaacctaattataaaattcctttaagtatatgttctgaaagacagactaggttttatgtaggcatatgctaatccatatgtgtggtaattaataktatatacttcttgcactggtgcctagaatatctagatcaggtctcataaactacacacaaagctggtagcttctctgtatcaggaacttggcctgactct

SEQ ID NO: 461322 - DNA, 201 bp, Homo sapiens
taaatgtgccatttactgatgtgaggaagactgaagaaagcagggatagaggtgggtgaagattaagagctgcattctggacataggtttagaattttttaaaaaatccaagtgaaaatattgtatagagagttaaacatgtgggtatggggtttaggagaaaacttgtttaaagaaaaaaacttgtgaattgttggtatt

SEQ ID NO: 461323 - DNA, 201 bp, Homo sapiens
ttagtagagacagagtttctccatgttagtcaggctggtctcgaactcccgacctcaggtgatccgcccaccttggcctcccaaagtgttgggattacagkcgtgagccactgcacccggcaagaatgtttttataacctaaatagaaacctcacacctattagcagtcactccccatttcctccccaaaccaccttctcc

SEQ ID NO: 461324 - DNA, 201 bp, Homo sapiens
cacaggagtacagggatgactttgagttttgtctgtcctttgtccacaaggaatttccttgtgggcaggttgtgagggaggtatgggaggtatgtagtttktttttttttttttttttttttaatttttgtagctatcttacttaggaataaaatggaggttggttttcctggtgcagttcctagcttgacttccctttgg

SEQ ID NO: 461325 - DNA, 201 bp, Homo sapiens
gggcagaggaagaaatcagatatgcatttgtctcacaggagtacagggatgactttgagttttgtctgtcctttgtccacaaggaatttccttgtgggcargttgtgagggaggtatgggaggtatgtagtttgtttttttttttttttttttttaatttttgtagctatcttacttaggaataaaatggaggttggtttt

SEQ ID NO: 461326 - DNA, 201 bp, Homo sapiens
tgtcccattgatgcagttggccttccagtggcctggcttctcataccaatgcaattatttgggaagatattcctagggcaaattggagggagctggtggasttgtaagacagccaatagttggagctgccacttttccgtttgcctctccttttcctgagccctttcttcttccttctggtccttgatgtaaaagaccaag

SEQ ID NO: 461327 - DNA, 201 bp, Homo sapiens
attttcttcatcaagatatatatgttgtctaaattttcttgcaagattcttattgcagctggaatttataactatacagtatattagaaatatccagtttyattttcttctgaaagaatggccagttattctggcaaaatttattaaataatttgtcattttcctactaaattgaactataatatttgtcatgtattggat

SEQ ID NO: 461328 - DNA, 201 bp, Homo sapiens
caggagtgaaagtttattaaaaagctttagagctagaacaaaaggaagtaaagtacacttggaattgggccaagcgggcaacttgagagagcaagtgcacrgtttggcttttcgacttgggattttataggttggcatgcttctgggtggttgcatttctcctcccctgattcttcccttgaggtaggctctctgcataca

SEQ ID NO: 461329 - DNA, 201 bp, Homo sapiens
ctcactcgtggatgctgatttttttcttttttctttttttcctttttctttttttgagacagagtcttgctctgtttcccaggctggagtaccgtgtcatratcgtggctcactgcatgcagcctccatctcctgggctcaaccagtcctcccacctcagcctcctgagtagctaggactgcaggtgcgcaccaccatgcc

SEQ ID NO: 461330 - DNA, 201 bp, Homo sapiens
gcttagtctctccattgtagaactcagcacgccttgtctgttttgttgttgttgttgttgttgttgtttttaactagggtgtaaccaaaatgcaggtttarttgctcgtcacttgcagagtccaattaacaagggagagatctagtataaagaaaatgattttttattccaaagctagtttggggaagaagtacaggcttc

SEQ ID NO: 461331 - DNA, 201 bp, Homo sapiens
taggtggccatttggggccgggaactagagattctttttttaaaagggtaaagaaaatcaattaggtacagatactttgccaataaggggttacattccawagtttactgctaaacccttcctcctgcaattcacagcatgatctccatgtgccaggaggagcctgcctagaaaatggtgaagatctacaaccattttttg

SEQ ID NO: 461332 - DNA, 201 bp, Homo sapiens
ccagtcccaatgagatgaaacaggtacctcacttggaaatgcagaaatcacccgtcttctgcatcgatcacgctgggagctgcagaccagagctgttcctkttcagccatcttgaaacggatctccccaagttaataactttttaacatgtatagacacctttgaaactatcacaacaatcaaaataatgaaccaatttat

SEQ ID NO: 461333 - DNA, 201 bp, Homo sapiens
aagatactaggtctggttgagggaaattctgtcttgctgcaaacaaggaggttgtgtgaatgccaaatattgagaatgccagtgggctttccccctttagyttccaggactctggcagcctgccttccaggcaagagattgtaaaactgttctctgagaaatgtgaccagccaaagagaaaaatactttattaaagatgtg

SEQ ID NO: 461334 - DNA, 201 bp, Homo sapiens
agaattatacaaaatgtaatcttttatgactggcttctttcatttagcataatatttccaatgtacgtctatgttgtagcatgtatcagcatttcgtttcttttttttttttttttgagacggagtctcgctctgtcacccaggctggagtgcagtggagcaatctcggctcactgcaagctccgcctcccgggctcacac

SEQ ID NO: 461335 - DNA, 201 bp, Homo sapiens
aatttttgtatttttagtagagatggagtttcaccatcttggccaggctggtcttgaactcctgaccttgtgatccacctgtctcagcctcccaaagtgcygggattacaggcataagccactgtgcccaacccaatatgccacagtttctttatccactcattgattgatgggcatttgggttggctccgcatttttgca

SEQ ID NO: 461336 - DNA, 201 bp, Homo sapiens
cgaattcccttcatggagtcacagtttaaaatcctgccaaatcctgttttttttttttaaaaaaaaaaaaaaagaagaaaaggaaaaccttgtttaatttkgtttacccagcatttccccaattccccccaagtaacagctatcagtactctacagagctagtattagcagaatagtttaaagagctctccccactcatcc

SEQ ID NO: 461337 - DNA, 201 bp, Homo sapiens; identical to SEQ ID NO: 154923

SEQ ID NO: 461338 - DNA, 201 bp, Homo sapiens
gcgcggtggctcatacctgtaatcccagcactttgggaggccgaggtcggcgtatcacctgaggtcgggagttcaagactagcctgagcaacatagagaamcgctgtctctactaaaaatacgaaattagccgggtgtggtggcgcatgcctgtaatcccagctacttgggaggctgaggcaggagaatcacttgaacctg

SEQ ID NO: 461339 - DNA, 201 bp, Homo sapiens
ggtgaaaccccgtctctactaaaaatacaaaaaattagccgggcgaggtggcgggcgcctgtagtcccagctactcgggaggctgaggcaggagaatggcrtgaaccccagggggcggagcctgcagtgagccgagattgcgccactgcactccagcctgggcgacagcgagactccgtctcaaaaaaaaaaaaaaaaaaa

SEQ ID NO: 461340 - DNA, 201 bp, Homo sapiens
tgagaggtggaggcagaaggaagcaggagtccaagaccagcttggacaacatagtgaaaccctgcctctacaaaaaaaaaattaaaaattagctgggtgcrgtgatgcgtgcctgtagtcccaactacttggaaggctgaggcaggaggatcgcttgagcccaggagttcagggctgcagtaaactatgattgtgccactg

SEQ ID NO: 461341 - DNA, 201 bp, Homo sapiens
gtgtttataatctggtatcttattgccacaaagagtctgttttgtcagatctgtaattttacctaaacaccaaaagggagagggcgtaatggggcgtgtcygacctcccttcctgttatggccaggaattcagtttttcaggtttcgctgggatccctttggccaggggtctattcatttggttgtagggctcaggatttc

SEQ ID NO: 461342 - DNA, 201 bp, Homo sapiens
caaagcccttattatgtagatgaagcctcataggtagtagccctcagagagaatagatggtacatgtctctttttagaccataaaagtgtcagactcccarctaatctctcccacagctgagaaagtcctagaaagggaaggcctggctgcattaatggagattctttacagatgcagatttctcccacaacagatgactt

SEQ ID NO: 461343 - DNA, 201 bp, Homo sapiens
gggagattatggctccctctgctgagtcatgcaagttgtcaggaaagtgggggaaagccggcagtcacaggcctcacccagctcccacgcaaacagaaggsccagtttctctcccgctgtgccccccagtagccctgagtctgtttccaggcagagggcaagacgggctgccagacgggcttgaaaacttgcccgaggcta

SEQ ID NO: 461344 - DNA, 201 bp, Homo sapiens
agagttaagctttgtataaatacttgatgtcagtagagtagaaagaaatgcttgagtcaagataagggagttgtggaggtcaaagcccttattatgtagaygaagcctcataggtagtagccctcagagagaatagatggtacatgtctctttttagaccataaaagtgtcagactcccagctaatctctcccacagctga

SEQ ID NO: 461345 - DNA, 201 bp, Homo sapiens
tggattcaaagattttctgattggctactgattgaaagagttaagctttgtataaatacttgatgtcagtagagtagaaagaaatgcttgagtcaagatamgggagttgtggaggtcaaagcccttattatgtagatgaagcctcataggtagtagccctcagagagaatagatggtacatgtctctttttagaccataaa

SEQ ID NO: 461346 - DNA, 201 bp, Homo sapiens
ctctatttctgtttctttcatgataatacagaaattcttaaaggcttacttaatttatcaaaatctatcaaaatctaactccaatccactcccttagaaartctatgctaccatggttgtatagtttagttgtatcttaactttctttgctatcaaaagacagtattgtcattgttttatacagtcaatgtgtgtttagat

SEQ ID NO: 461347 - DNA, 201 bp, Homo sapiens
ttgggttcaggtttgttgttttttttttttattttcctattattccattttttcctccactagtttggaagttgcaacccactctatttctgtttctttcrtgataatacagaaattcttaaaggcttacttaatttatcaaaatctatcaaaatctaactccaatccactcccttagaaagtctatgctaccatggttgt

SEQ ID NO: 461348 - DNA, 201 bp, Homo sapiens
ggtttttggaaaagagccaatttgagttgaaaaagcagaggaaaccccagacattgcatggttttaggctttagccctaccactctcatgaacctcttgtstaggagagccattgtgtctcaggtcaatgatcttacctgggaaggactccaaggtccttcctacccctgtgagctaccgtacatcagcaggagctgagag

SEQ ID NO: 461349 - DNA, 201 bp, Homo sapiens
aagtttttgtatacagtgttctatacatatctattagctctaacgtttacagtatttcttttaatcttcaatatgatgactgatttttctacctgcttgamctatcagttactgagagaggtatattaaaatattttagcatgattgtaaatttatctgtttttccttttacatctgtcagtttttgctttgtatactttg

SEQ ID NO: 461350 - DNA, 201 bp, Homo sapiens
ggttgtcctgacagacattgactcagatcgacattactgctcatgcctaaccttctatgaggcagagatcaatcttcaggtacaaaaacctttactagctmaagtacagtcgaaggtacaacatttaggaatgttttttatatgccatatttttgttacaactgcaagtttgagttttatgggctagcataagaagcatga

SEQ ID NO: 461351 - DNA, 201 bp, Homo sapiens
cagcctcccaagtagctgagactacaggcacctgccactacacccagctaatttttgtatttttagtagagatggggtttcaccatgttggccaggctggycttgaactcctgaccttgtgattcgcctgccttagccttccaaagtgctggaattacaggcgtgagccaccgcacccagctaaaaaataacaaaaaaaat

SEQ ID NO: 461352 - DNA, 201 bp, Homo sapiens
taaatgggagctaaataatgtgtacacatggacatcaagtgtggaataataagacgctggtgactcagaaggctgggagggtgggaagggagtgagggatragaaattacttaatggctacaatatacatcattttggttgatggatacactaaaagcccagacttcaccactatgcagtatgtccatgtgacaaggctgc

SEQ ID NO: 461353 - DNA, 201 bp, Homo sapiens
acttctgggctcaagcgatcctcccacctcacgctcccaagtagctgggactacagacacttaccaccatacctggctttgtctgacagttttagaaaaarttaaaggaaatattaaagaacttaaaattctgtgtaaaataatatcagatatctgggccaggcgcagtggctcacgcctgtaatcccagcactttggaag

SEQ ID NO: 461354 - DNA, 201 bp, Homo sapiens
taatgatagagattctattaataaaaagctcttatctctcttagatacccactgaagtgtattatatgggtaaacaatatgacatctggtatttgcttgaraataatacagtagagagaaaaaaagtgggtagaaatatatatgtagccgtgcactggtaattctcaaagttgacaattactgcagggcttcgttgtaatt

SEQ ID NO: 461355 - DNA, 201 bp, Homo sapiens
ggctgctttgggacccggcaagctcccagggcctttctgctgctttctctacccctgtatttcgcttggctctctaacttgactcagctttaggtaaagtyggaaacttctcccacaaacagaccttcagcttctccggtgtgtgttcgggagaggagggtctccctttcccacttagacagttggggcactcacagtatt

SEQ ID NO: 461356 - DNA, 201 bp, Homo sapiens
cagggatactaaaacatttgtttctttatgttattccattatttctgagttttaagttctacatttagaatgtgatctttctttgagggaataaatacttytttgaaagagaacaaagtaaagttcagaggtttcatattaaaacaaaaaaatccatcttttatgaattatgcttatctaaattttggtaaatagaaaatt

SEQ ID NO: 461357 - DNA, 201 bp, Homo sapiens
atatagaacaaaacatgcattatcagcacattgtcttcctgtcaccagatcttagtagaaagccatatcaaagtccggagttttgattatggaatcaaacygatatttgatgttaaatacttaaagactatcagactaacatagcctgttgcttctatttgaagttagagattactgtatgttatcaatggggacagaaaa

SEQ ID NO: 461358 - DNA, 201 bp, Homo sapiens
ctgtgatctcagcactttgggaggccgaggcaggaggattgcttggggctaggagttcgagaccagcctgggtaatatagtgagactccatctctacaaattttttttttttttttttttttttaattacaagaggctgggtatggtggctcatgcctgtaatcccagcatttgggaggctgaggcgggcagatcacttga

SEQ ID NO: 461359 - DNA, 201 bp, Homo sapiens
cagggtcttgctttgtcacccaggctggaaggccacgtgatacaatcatggctcactgtagcctccacctgctcggctcaagtgattctcccatctctgcytcccaagtatctgggagtacaggcacatgacaccacacccaactaatttttaataatttgtagagatgagctcttactatcactcaggctggtcttgaac

SEQ ID NO: 461360 - DNA, 201 bp, Homo sapiens
ttacttgttctgacttaaaaatctatctaaccagtaactgggctccaacaaaggtccccacagagacatcataaaagaacatcattgtcctctaatttaargatgtatcttattcagccatgaatttatctcatccctttaaaatgtgttcttatttgtcatccctatttcctcctgggataaagagattcctgagttcat

SEQ ID NO: 461361 - DNA, 201 bp, Homo sapiens
cacagatgacattcttgtgcatagcagtgtcctaagggggtgaggaataagtcaggaagaaaaagatgattcatactttttgctgcattctgggattattrtatataatccatagagaggatggagaccttgcagagataccacataggaaaaaggtgcggtgttttcctacatggcctgactgtattttaaaataaaaac

SEQ ID NO: 461362 - DNA, 201 bp, Homo sapiens
ctaaatgttttatgattgcctgttccctgctaattggtcatggattgaaattccccattgtttaatttttttaatttgtggaaaattattataaatgagtktgtagggcttcatatcacagctgttgtcatttaaagtttggacagtgtcattacaaatgaagccctgctgtgaaatcaaagtcaaaaggcatcttggcat

SEQ ID NO: 461363 - DNA, 201 bp, Homo sapiens
cactagtctaaatgttttatgattgcctgttccctgctaattggtcatggattgaaattccccattgtttaatttttttaatttgtggaaaattattatamatgagtgtgtagggcttcatatcacagctgttgtcatttaaagtttggacagtgtcattacaaatgaagccctgctgtgaaatcaaagtcaaaaggcatc

SEQ ID NO: 461364 - DNA, 201 bp, Homo sapiens
ttgagcagcacacaggtttgagacatgcactacaatgagtaaacattttgtaagataataaatagtgcccactagtctaaatgttttatgattgcctgttscctgctaattggtcatggattgaaattccccattgtttaatttttttaatttgtggaaaattattataaatgagtgtgtagggcttcatatcacagctgt

SEQ ID NO: 461365 - DNA, 201 bp, Homo sapiens
agctgggactacaggcgtatgccaccacacccagctactttttttgtattttttggtggagacggagtttcaccgtgttgcccaggctgatctggaactcytgggctcaagggatccactcgcctcggccaaggaggtcgaggcttgagcccagaaggttgaggctacattgagccgaagtcctgccaccacactccagca

SEQ ID NO: 461366 - DNA, 201 bp, Homo sapiens
ggccttattggaaatttttttcacaatctaattatatttcatttaatttaataaattctattagttaagtacttattagtgccaggcatattctaggtacrtaattctcctaatatccttcagaaaaggatacacagacatgacaagtaagaatttgtgactgtcccagtggattgtcattagattgtctgagattccttc

SEQ ID NO: 461367 - DNA, 201 bp, Homo sapiens
ttggacattctagttttctcattttgtttgtttgtttgagacagagtctcgccctgtcgcccaggctggagtgcagtggcgcgatctcagcccactgcaayctccactcaaatggtcctcccacctcaacctcctgaatagctgagactacaggcacatgccaccacaccgaggtaatttttgtatttttcatagaaacag

SEQ ID NO: 461368 - DNA, 201 bp, Homo sapiens
gatatccaggcctagatctttctttatgagaaggtttttaacttcaagttcaattattttgtagatgtaatgtatttgggttatttattttgtaagaggtmtttagcaattggtatcttaaaaggaatttgttcattttgtcaaaattgtccaatatatagatataacatgttaatcctagttctttattatctttttaat

SEQ ID NO: 461369 - DNA, 201 bp, Homo sapiens
acttgaaaccagaaggcggaggttgcagtgagctgagatcgtgccactgcactccagcctgggtgaaagagcgaaactccgtctcaaaaaataataataawtattattatttaagacagtgtagaattggcacacttataaacaaattgaccaacagaataaaatagaaagcccagaaacaaatgcacacatatatggaaa

SEQ ID NO: 461370 - DNA, 201 bp, Homo sapiens
aacccaggagttggaggttgcaatgagccgagatcatgccactgcactccagcctgggcgacagagcaagaatctgtctcaaaaaaaaaaataaaaacaaraagattatatatatagttttgtggcttatgtgtgttttgctaagggagaaacaacatacaggtcacgggataccaaattcaaagcaaataatctagacag

SEQ ID NO: 461371 - DNA, 201 bp, Homo sapiens
ctatatatgtactgatatggaaaaatttcttatatattgctaagtaggcaaaagggaagttacataaagtagatatgaatctatttttgacctaaaattadatgtatgtatgtatgtatatgatagtaaaaatctggaaggatatttacactaaaacctgttacgattatcctgataagagagataccaatgattacctct

SEQ ID NO: 461372 - DNA, 201 bp, Homo sapiens
aatatcagtgtcctattatctgcagtagtcattttaaaactttttcatgttcatttctgagccccatcatcagatgttctgatttgttaagtttgggaagkggggagatcagagctaacatttgaaacttttcaacagtgaaatgggcagctttgtagaaatgccatcctcatctcatacagtgtgccatcaaacactctt

SEQ ID NO: 461373 - DNA, 201 bp, Homo sapiens
tttgtcaggaaagctgtaaaggatttctacattgtcagggagattggactaaatgccctctaaagtgtctcctcctctgaatttcatgatctcaggacacttttttttttttaatccctgcttacgagaagcattcctggttctccagttcataacacagtatcatctttggtccctgcaaggtcccttccttattttatt

SEQ ID NO: 461374 - DNA, 201 bp, Homo sapiens
ctgttcagttccccgaaaaaaaaatccactggaattgagagtgcaaaccatttggaattgcattccatttatatgttaattttggaaatttaatattatcttttttttttcttttttttttctgagacggagtctcgctgtgtcgcccaggctggagtgcagtggctggatctcagctcactgcaagctccacctgccggg

SEQ ID NO: 461375 - DNA, 201 bp, Homo sapiens
attttaataattatgtttttattataatgtgtacttaaaatagcatatagaacctgtcattgctcaactatcatctaagaaaatactgggtttaagaaggygagtttggcagggtgcggtggctcacgcctgtaatcccagcactttgggaggccgaggcaggcagatcacgaggtcaggagttcgagaccagcctgtcca

SEQ ID NO: 461376 - DNA, 201 bp, Homo sapiens
ctccagcatctgttgtttcctgactttttaaagatcaccattctaactggtgtgagatggtatctcattgtggttttgatttgcgtttctctgatgaccartgatgatgagcattctttcataagtctgttggctgcataaacgtcttcttttgagaagtgtctgttgatatacttcacccactttttgatggagttgttt

SEQ ID NO: 461377 - DNA, 201 bp, Homo sapiens
attacaggcgtgagcctctgtgccaggcctcatttatttttaaatgtctgaataatactccgttgtttggatatatatcacattggttatttatccatcarttgatggatatttgagttggttctacattttggctattatgaataatgctgctgtgaacatttatgtgcaagattttgtgtagatatgttttcagttctc

SEQ ID NO: 461378 - DNA, 201 bp, Homo sapiens
atgggtagattgcaaaatttttctcccattctgtagattgcctattcactctgatggtagtttcttttgctgtgcagtagctctttagtttaattagatcscatttgtctattttggttttgttgccattgcttttggtgttttagtcatgaagtccttaccaatgcctgtgtcctgaatggtattgcctaggttttcttc

SEQ ID NO: 461379 - DNA, 201 bp, Homo sapiens
ggtattgcctaggttttcttctagggtttttatggttttaggtctaacatttaagtctttaatccatcttgaattaatttctatataaggtgtaaggaagkgatccagtttcagctttctacatatggctagtcagttttcccagcaccatttattaaatagggaatcctttccccatctgttgtttttgtcaggtttgtc

SEQ ID NO: 461380 - DNA, 201 bp, Homo sapiens
tcactaacatagaaatagatctcagaaaattacaaacaaatataaaccattattttggtacattgtttctcctaagaagaaaagaaaatctctaatgtatacctctttatactctgaagaaaaggacaagtagagaaaaccaagccctgagcagttaacagttgggacaatcagatttgtgagtacacccttggcctctat

SEQ ID NO: 461381 - DNA, 201 bp, Homo sapiens
agaaatggaagctccaggaggaagtgggaggaagccagaggaataatcatggaaagccttcttatgcttccaaaaacagcatcccttggatttgagagggyaacatttatttgtcttcttaacataaagtggtaacctctggaggacttagggcttgatgtaggaactcacaaatgggaaaggaagaatttcccctcctcc

SEQ ID NO: 461382 - DNA, 201 bp, Homo sapiens; identical to SEQ ID NO: 28803

SEQ ID NO: 461383 - DNA, 201 bp, Homo sapiens
cattgtgtctcaggtcaatgatcttacctgggaaggactccaaggtccttcctacccctgtgagctaccgtacatcagcaggagctgagagatgagcttgrggaacagagccactgtggccgagaagaattgttctgggggttggttagtaagcagaagaatgaaaagagcaaacgaaactgtgtacaggggttaaacacc

SEQ ID NO: 461384 - DNA, 201 bp, Homo sapiens
cttattttttagcctggggagactgacatttttcagttgccctataacaagttcagtaccctgatttgatgtcccctgccataattttctaaacagtattstaaaaatagcagccaaaagcctaaggaaagggcaattgtgggaagaaaagagatagaaaatcacactttctataactttaggactataagacctatattt

SEQ ID NO: 461385 - DNA, 201 bp, Homo sapiens
aagcaacttcctgggcatgagcattaagagacaaaatggcagagtatgacctcccaggggcacaccacccaaaaagggaagaaagccacagatgggcgtgyatacaacttcctaaacacactgcgcatgctcacctcccaagtgtaaggagggcactgcacttatgagtagcccagcctaagggaagaatcatgggaaagg

SEQ ID NO: 461386 - DNA, 201 bp, Homo sapiens
agactccagttgtggctctgtggctgacacctatgcctcttttctctagtctggaaagtggaggaattgcactggaataattgatgtctaaggtcccagcyctatgagtttaaaatcatttcatgcaaacttataacggatggatgaggagttttgatggagatagctacattgtctaaggtcagggctttaatcactatt

SEQ ID NO: 461387 - DNA, 201 bp, Homo sapiens
taagaatgcttgtgatttttgcgcatcgattttgtatcctgagacactgctgaagctgcttatcagcttaaggagattttgggctgagacgatggggtttyctaaatatacaatcatgtcatctgcaaacagggacaatttcacttcctcttttcctaatttaataccttttatttctttctcttccctgactgccctggt

SEQ ID NO: 461388 - DNA, 201 bp, Homo sapiens
ccttgtcttgtgccagttttcaaagggaatgcttccagtttttgcccattcagtatgatattggctgtgggtttgtcataaatagctcttattattttgakgtacgttccgtcaataccttgtttatcgagagtttttagcatgaagggctgttgaattttgtcaaaggccttttctgcatctgttgagataatcatgtct

SEQ ID NO: 461389 - DNA, 201 bp, Homo sapiens
agtatgatattggctgtgggtttgtcataaatagctcttattattttgaggtacgttccgtcaataccttgtttatcgagagtttttagcatgaagggctrttgaattttgtcaaaggccttttctgcatctgttgagataatcatgtctttttgttgttggttctgtttatgtgatagattacatttattgatttgcgta

SEQ ID NO: 461390 - DNA, 201 bp, Homo sapiens
ccagtagtcattcaggagcactttgttcagtttccatgtagttgagcggttttgagtgagtttcttaatcttgagttctaatttgattgcactgtggtctsagacacagtttgttgtgatttctgttcttttacatttgctgaggcatgctttacttccaattatgtggtcaattttggaataagtgtgatgtggtgctga

SEQ ID NO: 461391 - DNA, 201 bp, Homo sapiens
gttgtcatataaaatccactttttgtggcacatcacaatccaattgagaaatgtttccttgttgcatagagtaagagaagatgacacttcaaaacgatggkttttttttttttgttttttgttttttttggttcagctcatgaggcatccacttatcgagctttttcacctttccagtttgcttcaaatgccaaatgacca

SEQ ID NO: 461392 - DNA, 201 bp, Homo sapiens
tcaatttgccagtctgtatcttttaattggggcatttagcccatttaaatttaaggttaatattgttatgtgtgaatttgatcctatcattatgatgctasctggttattttgcccattaattgatgcagtttctttgtaacattgatggtctttacaatttgacatgtttttgcagtggctggtactggttgttcctttc

SEQ ID NO: 461393 - DNA, 201 bp, Homo sapiens
tatatatatatgttgtttataagcaacaaatatttagattctgtttttagattcagtgtcaatctttgtttttttaaccagaacatttggtccatttgtgytattgtatttgtatttgttacaagtagttagacaggcatgagcggggcaggagaaagctgtcccccaccctctaggaatgtcaggtgatagttgggcagt

SEQ ID NO: 461394 - DNA, 201 bp, Homo sapiens
aatgttggcctgccttgctaggttggggaagttctcctggatgatatcctgaagagtgttttccaacttggttccattttccccatcactttcaggtacacctatcaaatgtagatttggtcttttcacctagtcccgtatttcttggaggcttcgtttgttgctttttactcttttttctctaaccttgtcttctcactt

SEQ ID NO: 461395 - DNA, 201 bp, Homo sapiens
aagcattttctgcatcctgctggttgtggaagcattttccctgcaaaaagttgttgagatgcttgaagtggtagtcagttgaccaggggttgggtgcatayggtggatgaggcagcactttgtagcccaatttgttcaacttttgaagcattggttgtgtgacatgcattgtcatggagaagaattgggccctttctgttg

SEQ ID NO: 461396 - DNA, 201 bp, Homo sapiens
taaaatccactttttgtggcacatcacaatccaattgagaaatgtttccttgttgcatagagtaagagaagatgacacttcaaaacgatggtttttttttktttgttttttgttttttttggttcagctcatgaggcatccacttatcgagctttttcacctttccagtttgcttcaaatgccaaatgaccatagaatggt

SEQ ID NO: 461397 - DNA, 201 bp, Homo sapiens
ctcacgcctgtaatcccagcactttgggaggctgaggggggtggatcgcctgaggtcaggagtttgagaccagcttggccagcatcgtgaaacctcgtctytactaaaaatacaaaaattagcggggcggggtggtgcatgcctgtaatcccagctactcgggaagctgaggcaggagaattgcttgaacccaggaggcag

SEQ ID NO: 461398 - DNA, 201 bp, Homo sapiens
gggactagaggcgcccgccaccacgcccggctaattttttgtatttttagtggagacggggtttcactgtgttaaccaggatggtctcgatctcctgacckcgtgatccgcccgccttggcccccaaagtgctgggattacaagtgtgagctaccgtgcccgaccctgaaaatttaatattttcttataagtcttcccatc

SEQ ID NO: 461399 - DNA, 201 bp, Homo sapiens
aggcaggagaatcgcttgaacccgagaggtggaagttgcagtgagctgagatcaagccattgtactccagcctgggcaacaagagcaaaactccagctccaaaaaaaaaaaaaaaaaaaaaagaagttttcaggtcatactgatgcatatcatccagggaccacattttgaaaactattactataggcagtaggctgagaa

SEQ ID NO: 461400 - DNA, 201 bp, Homo sapiens
cttcccccttcccaattctgcctgtttttccatgccaaaaataagtaaataaatatacatatatgatatacatatatgtgtgtgtatatatatatatatayacacacacacacacacacacatatagtatttgcagttttgagccttatgagttatatgtagttgctgtactctcccagtatacctggcaacttactgagt

SEQ ID NO: 461401 - DNA, 201 bp, Homo sapiens
gatttgttaaactagtcacaactagtgccaatgttaaaagaaaagattgataaatttgactacattaaaattaagaacttctgttcattaaaagataccayagagagagggaaaacataaacctcagagagagaggttaatgctccgattacaagaactataagccaggcatggtggtgtgcatctatagtcccagctact

SEQ ID NO: 461402 - DNA, 201 bp, Homo sapiens
acctggcaacttactgagtcttatttctatttctttggactagaggtatatataagataagaaataagtaagttttttttaaaaaagaagaggccgggcayggtggctcacacctgtaatcccagcactttaggaggcccaggcaggcggatcacctgaggtcaggagttccagaccagcctgaccaacatggagaaaccc

SEQ ID NO: 461403 - DNA, 201 bp, Homo sapiens
aagaatcatttccacatgtattaaagacttaaatatgaagagccaaaaaaagctaatctataaagcttaaaagttttcaaacataatacaggaaatatccrtatgaatttggggtagggaaagatttgttaaactagtcacaactagtgccaatgttaaaagaaaagattgataaatttgactacattaaaattaagaact

SEQ ID NO: 461404 - DNA, 201 bp, Homo sapiens
agatcatccgtgggactccagacaaagtaaataaatgcatgttaaatattggtacattggaaagcaagaattataggatataattaatcaaatttatgaawgaaacaaggcctaaataaatgagaaaatgtatcatttgtatggaatggaagactcaatatgttaaagatatcaattctccccaaaacaatctacagagac

SEQ ID NO: 461405 - DNA, 201 bp, Homo sapiens; identical to SEQ ID NO: 154918

SEQ ID NO: 461406 - DNA, 201 bp, Homo sapiens
gaaaaggacatccaggattatcaagtatttagaaactatgttctgtaagggcctaaggaaattttctcaggtaataatctgatactatttgataggtaaargtaagtatttaagttactgtcatagaagaagggttgagattcattttttgtaactctaaaaggctgaaataaaatcagtggatgaagtggctatagaaac

SEQ ID NO: 461407 - DNA, 201 bp, Homo sapiens; identical to SEQ ID NO: 154919

SEQ ID NO: 461408 - DNA, 201 bp, Homo sapiens
cctgttgtaaagcgaaaagagttttaatgcatacacctagagatatctgtttttgcaactccgagtcctttttctttccttttttatgatatttaaatgasaagagattgtagaacttttcagtcataatttaaagctgaatagtgattaagcagccaaccagtttaaaagtatgaaatcacttgtatttcttattgtttt

SEQ ID NO: 461409 - DNA, 201 bp, Homo sapiens
cagctctatgagtttaaaatcatttcatgcaaacttataacggatggatgaggagttttgatggagatagctacattgtctaaggtcagggctttaatcamtattcttcacccactaggaaaatcaattgcagcttttgcagccattgtgggcactattctggattctggccacattggaccccactgctagacagaggaa

SEQ ID NO: 461410 - DNA, 201 bp, Homo sapiens
gcgattctcctgcctcagcctcccaagtagctgggactacaggcacgcaccactgcgcccgcctcatttttgtatttttagtaaagatggggtttcaccaygttggccagactggtcttgaactcctgccctcaagtgatccagccgcctcagcctcccaaagtgctgggattacatgtatgagccaacatgcttggccaa

SEQ ID NO: 461411 - DNA, 201 bp, Homo sapiens; identical to SEQ ID NO: 154922

SEQ ID NO: 461412 - DNA, 201 bp, Homo sapiens
tttattataatgtgtacttaaaatagcatatagaacctgtcattgctcaactatcatctaagaaaatactgggtttaagaaggcgagtttggcagggtgcrgtggctcacgcctgtaatcccagcactttgggaggccgaggcaggcagatcacgaggtcaggagttcgagaccagcctgtccaacatggtgaaaccccca

SEQ ID NO: 461413 - DNA, 201 bp, Homo sapiens
tttggtaatatcttagaaatattaacaatattactagttgtaaacaaagtttaaaatagatgtttgcctttgtttaatataattttactttgcaatgtgarttagtttgcataaaagttaagtgtctcattagaatctaccctgtgaaattattaatcagctagcctgatacttcaacactggaacatgtaatcaaaataa

SEQ ID NO: 461414 - DNA, 201 bp, Homo sapiens
ttttactttttaaacttgttcattaaaaatgaagacacaaatccacacattagcctagacctacacagggtcaggatcatccatatcactgtcttccaccrccacatcttgtctcactggaagttcttcaggggcagtaacacacatggagctgtcatctcctgtgataacagtgccttctagaatacctactgaaggact

SEQ ID NO: 461415 - DNA, 201 bp, Homo sapiens
gagctcggcttttgagacaggagtcttgccgatgcccccagccgaataaaccccttccttctttaactcggagtctgaggagttttgtctgtggctcgtcstactacaagccaagatggtgccattgcactccagcctgggcaacaagagcaaaactctatctcaaaaaaaaaaaagaagaagaagaagaagaaaggagag

SEQ ID NO: 461416 - DNA, 201 bp, Homo sapiens
cattgtattatgccagttgttttcctgatcctaataaagcataattatgaaagatgtcaccatagggggaagctgggtgatgagtacaaagatcttctttrtattacatttgcagcttattgtgagcatataattagttttattaaaaagtttaaggctgggcgcggtggctcatacctgtaatcccagcactttgggagg

SEQ ID NO: 461417 - DNA, 201 bp, Homo sapiens
gggggaaaacagagaagcaatctgatttgtactacagagctcccccaaaggctcaaaaatggataggagtaaaggttatagccatggtgagagtccaaaggtagtaagttagtaagagggagccgatgacaaatgtggcgaagatagaaataacagtacttgattaagcttcaagagggcaatgatcatataactgcttaa

SEQ ID NO: 461418 - DNA, 201 bp, Homo sapiens
ggggaaaacagagaagcaatctgatttgtactacagagctcccccaaaggctcaaaaatggataggagtaaaggttatagccatggtgagagtccaaaggtagtaagttagtaagagggagccgatgacaaatgtggcgaagatagaaataacagtacttgattaagcttcaagagggcaatgatcatataactgcttaat

SEQ ID NO: 461419 - DNA, 201 bp, Homo sapiens
aaatttagaactcgtatctaacattttggttggaattctttcataggatttttgatgatcttaaatcatcattttccaaaatatattctacaactgctttyttttaaaatactcagtgaaactgggtttacaaatgctgtataccgaattcccttcatggagtcacagtttaaaatcctgccaaatcctgttttttttttt

SEQ ID NO: 461420 - DNA, 201 bp, Homo sapiens
cattcagttatatattacttaatgtctatagtcacatcagcccttttcagtcagttttcagttgtccaagcagaggacaatgaatggtggataatccaaaygataaatgaattacttaattaagtatttaagtactttgtgtttgtaaagcacaacaacaaaatttccacttggcttcaaaatgtgtgtatgatctttcag

SEQ ID NO: 461421 - DNA, 201 bp, Homo sapiens
gggaaaacagagaagcaatctgatttgtactacagagctcccccaaaggctcaaaaatggataggagtaaaggttatagccatggtgagagtccaaaggtagtaagttagtaagagggagccgatgacaaatgtggcgaagatagaaataacagtacttgattaagcttcaagagggcaatgatcatataactgcttaatt

SEQ ID NO: 461422 - DNA, 201 bp, Homo sapiens
tacatgattaaaaatgatttgaagaaaactggtaaaattcaagtaaggtctatagtctcattcattgtattatgccagttgttttcctgatcctaataaakcataattatgaaagatgtcaccatagggggaagctgggtgatgagtacaaagatcttctttgtattacatttgcagcttattgtgagcatataattagtt

SEQ ID NO: 461423 - DNA, 201 bp, Homo sapiens
aaaacagagaagcaatctgatttgtactacagagctcccccaaaggctcaaaaatggataggagtaaaggttatagccatggtgagagtccaaaggtagtaagttagtaagagggagccgatgacaaatgtggcgaagatagaaataacagtacttgattaagcttcaagagggcaatgatcatataactgcttaattcgt

SEQ ID NO: 461424 - DNA, 201 bp, Homo sapiens
gaggatcacttgagcccagtagttcaaggttgcagtgagccatgactgcaccactgcactccagcctgggcaacagagcaagaccctgtctcaaaaaaaaraaaaaaaaggaaaagaaagaaaaagatgtaagttcaggacttgcacattgtttcttagtatttccaaggccgctttcatgttactatcctgaccacctgt

SEQ ID NO: 461425 - DNA, 201 bp, Homo sapiens
ttctgtgatttggtcttagttttctggtgagcccatacctctggactgtcactcctacattttattcatgtggacattttggttttttccacatctcagctattttattttattttattttattttattttattttatttttttaatctcagctattttaaacaactctgttaaaaaacatcattgccatgcaattctagt

SEQ ID NO: 461426 - DNA, 201 bp, Homo sapiens
tctgtgatttggtcttagttttctggtgagcccatacctctggactgtcactcctacattttattcatgtggacattttggttttttccacatctcagctattttattttattttattttattttattttattttatttttttaatctcagctattttaaacaactctgttaaaaaacatcattgccatgcaattctagta

SEQ ID NO: 461427 - DNA, 201 bp, Homo sapiens; identical to SEQ ID NO: 323218

SEQ ID NO: 461428 - DNA, 201 bp, Homo sapiens
aatgtgggagaaaagaagagtggccagttccaggggtagctccaaaagagactgcagagctgtccgagaccctgacaagggaggcccaaggcaacagttcygcaggagtggaggcagcagagcagaggcctgtggaagatggcgagaggggcatgaagccaacagaagggtggaaatggaccctgaactccgggaaggctc

SEQ ID NO: 461429 - DNA, 201 bp, Homo sapiens
gagaggggcatgaagccaacagaagggtggaaatggaccctgaactccgggaaggctcgagaatggacacccagggacatagaggctcaaactcagaaacyagaacctccagagtcagcagagaagcttctggaatctcccggtgtggaggctggagaaggggaggctgagaaggaggaggcgggggctcagggcaggcct

SEQ ID NO: 461430 - DNA, 201 bp, Homo sapiens
ccccccactcccatgcaggctgtgcatttctgagaagcccagtcagaagttggtggggggtgaggagacaggcagggtagggggggagatataaacatagrccgagagcaaataaaataagtcattttcagagtagaaaataaagtacagaggttattattccaaaagaggatatgagaagaaaacaaaaatgggttccca

SEQ ID NO: 461431 - DNA, 201 bp, Homo sapiens
cggtactggaggagctgggcccggagcctgaggtccccagtgcccccaaccctccagcagcccaacccgacgacgaagaggatgaggaagagctgctgctsctgcagccagagctccagggcgggctgcgcaccaaggccctgattgtgggtaagcggaggctccgccggcccgagggcgccccctgctgtcagagcgggc

SEQ ID NO: 461432 - DNA, 201 bp, Homo sapiens
gtccgagggagaccagagagaggaggctggggatagggggagcccaagagttgagcctgaggcctctggaggctcgggactggaggcaaagcccaggagargtgggagacaggagctcccgactgtcagaggcatggaaatggaggctgagtcctggagaaactccagagcggagtctgagactagcagagtctcgagagc

SEQ ID NO: 461433 - DNA, 201 bp, Homo sapiens; identical to SEQ ID NO: 323227

SEQ ID NO: 461434 - DNA, 201 bp, Homo sapiens
agttatggtgagattaaacagttataaggatgcctggcacagagtccgagctaaatgagtgatggatgtggttactggtggtaacatgctttagatatggragatattataggacttcctgcatgccaactgcccttcaatttgtgtgggggggaagggtgggcagaaggcagaggctctcactcattctctaacattatt

SEQ ID NO: 461435 - DNA, 201 bp, Homo sapiens
ataaggaagcagccgctgcttgggtgggggtggggaggaggcagcacagagttcctctgacccagacgcctcaccctccaccctctaccccctgtcagcamcctgttcttcagggactgggtgccttgtcccagctctgctgcaacacactggctcaggaataggagataggaggaccctgccaccaacccccgcttcacc

SEQ ID NO: 461436 - DNA, 201 bp, Homo sapiens; identical to SEQ ID NO: 323208

SEQ ID NO: 461437 - DNA, 201 bp, Homo sapiens
atggatgtggttactggtggtaacatgctttagatatggaagatattataggacttcctgcatgccaactgcccttcaatttgtgtgggggggaagggtgrgcagaaggcagaggctctcactcattctctaacattattgccccctctcccacagatgagtcctgccggcggtgaccatcttccaacatagggatatacc

SEQ ID NO: 461438 - DNA, 201 bp, Homo sapiens
tgagtcaccccctctctacccccccactcccatgcaggctgtgcatttctgagaagcccagtcagaagttggtggggggtgaggagacaggcagggtaggsggggagatataaacatagaccgagagcaaataaaataagtcattttcagagtagaaaataaagtacagaggttattattccaaaagaggatatgagaaga

SEQ ID NO: 461439 - DNA, 201 bp, Homo sapiens
caagcttgggctgtcccctggggagcctagccctgtgctagggactgtagaggctggacctccagacccggatgagtctgcggtccttctggaggccatcrggccagtgcaccagaaccgattcatccggcaggagcggcagcagcagcagcagcaacaacaacggagtgaagagctgctagcagagagaaagcctgggcc

SEQ ID NO: 461440 - DNA, 201 bp, Homo sapiens
tctgtgcctgtccctttgggcacactgtggacccccaccccaggtttgtgtggactttcctttctgcccttgtcatctcccccagccttcagggtgtcagyggctcatctttcccctgtgtgttgctggagtctcttggttcctctcggcctttctgttcatctcccatctcttcctaggccctagactccctttgctatg

SEQ ID NO: 461441 - DNA, 201 bp, Homo sapiens
ggatatacctccctccttcttataactgaagatcctggagcccggaagattcagggcagacagaccctgataatgagcctggcagggaagggcaaccaacwtcttgtaacttgctttccccaccctgtttctgggggcagagccaattgcccaatttctaccctaatccaaagtccctggtgtgggtggggttaaacgtgc

SEQ ID NO: 461442 - DNA, 201 bp, Homo sapiens
ccaccattctactttctgtctctatgatcctgactaccctatctcatataagtggaatcattcagtatttgtccttttgtgactggcttatttcactgagkataatgttctcacagttcatccatgttatagcatgtgtcagaatttcttaaggctaatattccattgtatgcatgtgccacatttcgctttcagtagtca

SEQ ID NO: 461443 - DNA, 201 bp, Homo sapiens
ttgccttctgctccacagccagggacaatagtgggttccataccctggaacagacaactggaggccccaccactcatacattccatgtttccttgtagcgkgtgcatctcgacatccaggttggggagcatgccaacaactaccctgagattgctgcaaaagataagctgacggagctacagctccgcgcccgccagttgc

SEQ ID NO: 461444 - DNA, 201 bp, Homo sapiens
gcctgtccctttcttggggcagcctcagtggggagaccatagcactcctaatggagtcacagatagtattccaaaaggagtttggtcctggagttgagtarttacacgcagggagggacctcacaacagccagactgtttctcctgctcacttaaccctgtgttgccccacacagtatcgtgaagagcgcttccgactgac

SEQ ID NO: 461445 - DNA, 201 bp, Homo sapiens; identical to SEQ ID NO: 196528

SEQ ID NO: 461446 - DNA, 201 bp, Homo sapiens
agaattggggagacagatgttgccttctgctccacagccagggacaatagtgggttccataccctggaacagacaactggaggccccaccactcatacatyccatgtttccttgtagcgtgtgcatctcgacatccaggttggggagcatgccaacaactaccctgagattgctgcaaaagataagctgacggagctacag

SEQ ID NO: 461447 - DNA, 201 bp, Homo sapiens
gcgattctcctgcctcagcctcctgagtagctgggattacaggcatgcgccaccatgcctggctaattttgtacttttagtagagacgggggtttctccaygttggtcaggctggtctcgaactcccgacatcaagtgatccgcccgcctcagcctcccaaagtgctgggattacaggtgtgagctaccgcgccctgcctg

SEQ ID NO: 461448 - DNA, 201 bp, Homo sapiens
ggcgggggctgccaagtttgggcctatcctctgttcctctccttatttggaccttcaggtgataaggctgagacataaaggaggctgggccctgccaccaygacagcagccacacctctgcagagagaatggtgagtgcctgctggggaagaaaggctagcggtctcccaggtgctggcctttgggctgggggagcagagt

SEQ ID NO: 461449 - DNA, 201 bp, Homo sapiens
tgaaccccacctgaaccctgcctgaaccccacctgaaccttacatgaaccccacctgaaccctaactgaaccccacctggacccacctggactcttcctgsccatgacccattccaagcacatcctctgccccagaatcccatgtgcactggtcaccccagtgctgacttggagccaggaaatgtgccttcagcccccacc

SEQ ID NO: 461450 - DNA, 201 bp, Homo sapiens
ggcccctagtgaggggggctgcctgtgcttcggggccttacactgctctttggggtgcagccaacccttccctgcgccatgggagcctccgtacccacctwccctgtgcagtcactcccccgcagtctcctgctcagaccctcctcaccccccaggttcaagcagcttctcctgacccaggcagacaagttctctccagct

SEQ ID NO: 461451 - DNA, 201 bp, Homo sapiens
ccagccaagctgcccgcctcaggaggatgaccattcccagccccactgatccccgagaaacattttatgttagggaatacccccacctcttctgggatgtrggaggctcctcatgcagcccagttcctcctgcgggggacctgggatgctggagacatggatgctcacctggctgcctcggccttccagggacagaccccg

SEQ ID NO: 461452 - DNA, 201 bp, Homo sapiens
gggtgaggcccctagtgaggggggctgcctgtgcttcggggccttacactgctctttggggtgcagccaacccttccctgcgccatgggagcctccgtacycaccttccctgtgcagtcactcccccgcagtctcctgctcagaccctcctcaccccccaggttcaagcagcttctcctgacccaggcagacaagttctct

SEQ ID NO: 461453 - DNA, 201 bp, Homo sapiens; identical to SEQ ID NO: 139604

SEQ ID NO: 461454 - DNA, 201 bp, Homo sapiens; identical to SEQ ID NO: 139538

SEQ ID NO: 461455 - DNA, 201 bp, Homo sapiens
gggcgtcctttgccccttggcccacatttgcactgactcctcactctgcccagagtcagccaagagaaaaacattaacccagagtctggggtctagggttraaaagctaaggcaaaaagcacagatgcagggggcagacagaaaggccacaggactcaggtgaggtctctgccgggctgggccaggagccaggggactgcc

SEQ ID NO: 461456 - DNA, 201 bp, Homo sapiens
taattcattacaattttaggccagaaacagcctgaggcttgtttaaaaagaaaaaaactagatggaaaatgttattttataatgcttgtcctggtttttaraataaatgtatttcatctttgtttttaacagaatttatgtattaataatttggggattttctgtaaagattgttttgttttgtcttggcaaataatcttc

SEQ ID NO: 461457 - DNA, 201 bp, Homo sapiens
ccacactgcagttttggggattgaattctggaggaggagaataagatgtttagaaacagtctaccagattttgaactcattgtggataaacaacaatgttkttatgtacaggaaattttatgctttggatccttcattcccaaggatgaatttgttaactcggactacagaagggaagaaaaggcagctctacatggtttc

SEQ ID NO: 461458 - DNA, 201 bp, Homo sapiens
acaaaaaggaaacagttccgcaaagagctccagcctttttctggggcacggtttgtgcagtttaacgttggaacgtacagcctcagacgggcaaagggggygactgcacttctgccgccaccagggtttttctgtcaggttagaaagtatttcactttgaggctaaaagtctcacaaggtatcttaacgctgatggaatgt

SEQ ID NO: 461459 - DNA, 201 bp, Homo sapiens
tgtttttaacagaatttatgtattaataatttggggattttctgtaaagattgttttgttttgtcttggcaaataatcttcctatctttggagtgaatgaraatcaccatttgtcacctttgagagaatggatactcctgccctgtgatttttgttggtattggatagtgctagtaatctggaatgtaccctgtggttctg

SEQ ID NO: 461460 - DNA, 201 bp, Homo sapiens
actacagaagggaagaaaaggcagctctacatggtttctaaggagttgcggaatgtgctgctgaataacagtgagaagatgaaggtgccagccgcacagaygctgagtgctgtgtgatgcgggatgcgtgtggcttttcacagcggcttagatttcatttggagcagaccgtgacatctgccctccccacctgtagcgttg

SEQ ID NO: 461461 - DNA, 201 bp, Homo sapiens
gcctaccaccgtcagtagtactcaaacaaacacactcataccatgggggagctttattttagaattatgtgtgttttctataaaaacgaatggcatttctttttttttttttttgagatggagtctcactctgttgcccaggctggagtgcagtggcgtgatgttggctcactgcaagttccacctcctgggttcacgcca

SEQ ID NO: 461462 - DNA, 201 bp, Homo sapiens
atttgtaaaagtctattaaaaaataagtctcagccgggcacatcccagcacttggggaggctgaggcaggcagatcatgaggttaggagtttgagaccagyctgaccaatgtggtgaaaccccgtctttactaaaaatacaaaaaaaattaggtgtggtggcgtgcacctataatcacagctactcaggctgaggcaggag

SEQ ID NO: 461463 - DNA, 201 bp, Homo sapiens
tgtaagcttttggctgggaccaaaagccaggtctcctgagttcttaggtgagagaggctcttgtccacacaagcctgtcctcactcgtggctggagtcacyctttgtaggcaggacttgctggcctgagtccaccgggctttctttcctcacattggagatacttgctgtttgcctgtctcattaccgcaaaattgtcccc

SEQ ID NO: 461464 - DNA, 201 bp, Homo sapiens
atctaggtcagagtcccgtatgaaagaaatcagataagttgagagagggcgtgtgcaggttggaaatggtggcgtccatctctgctggggcgtcgatgccwcctggctggacaggtggagcctggaaggtagggaggctcggagcatgttcagagaggcagggatgtttttgactgtgggtaacactgcatgctgggaacg

SEQ ID NO: 461465 - DNA, 201 bp, Homo sapiens
cttttggctgggaccaaaagccaggtctcctgagttcttaggtgagagaggctcttgtccacacaagcctgtcctcactcgtggctggagtcaccctttgyaggcaggacttgctggcctgagtccaccgggctttctttcctcacattggagatacttgctgtttgcctgtctcattaccgcaaaattgtccccgctcag

SEQ ID NO: 461466 - DNA, 201 bp, Homo sapiens
catcccagcacttggggaggctgaggcaggcagatcatgaggttaggagtttgagaccagcctgaccaatgtggtgaaaccccgtctttactaaaaatacaaaaaaaattaggtgtggtggcgtgcacctataatcacagctactcaggctgaggcaggagaaccgcttcaacccgggaggcagaggttgcagtgagctga

SEQ ID NO: 461467 - DNA, 201 bp, Homo sapiens
ggggaggggccatagtgagggctcgaccaccatagccgctaagagcatagcccctgagagcaggctgttgtcgttcatgaatgacatcatggtatctgttytctcattctctttattcacacagggaatatatacattgtatccatttattaactcaagaattattactgtatcaatggaagatgttaagatactgttgac

SEQ ID NO: 461468 - DNA, 201 bp, Homo sapiens
cacagccccatcttgtgctgcttagcttcaaatgtttgtagattctttaagcatttgctactctcctaagtctgtgttggctagttaagtactctaggtgkttaattttgctcctttttctcttgtaagcttttggctgggaccaaaagccaggtctcctgagttcttaggtgagagaggctcttgtccacacaagcctgt

SEQ ID NO: 461469 - DNA, 201 bp, Homo sapiens
cccaacagcccagatgcagaagaggccaacagtccagacgtgacagcaggctgtgacccggcgggggtccatccaccccggtgagcaggcccaaggcagcrggggcccacacccctcacacgcaaaactggcttcttctggtcactggtgtctgaaaccaaatccagagcagcctgtggcctgtaaagcatatatttctaa

SEQ ID NO: 461470 - DNA, 201 bp, Homo sapiens
ttgagctgtcgtttacatattgttaatgtttgctcattttaagtgtacggttcagtgatttttagtaagtttactcagttggcagcgccttaccacagtcyagctttaggccgttcccgtcaccctagcagacctttcctgcccaacagcacttgctccccattccagctgagccccatcggccactcatccaccccgtcg

SEQ ID NO: 461471 - DNA, 201 bp, Homo sapiens
tctgaaacctttcttgattgtggattttcattggtctttctgattttcagactggctggctggttctttttcttgtatttagaatgttactgctggttttytgagtgaacgcttgcagatcttttcagacttcaccaaatttgtggctctagttggctttatgtctgtctatatgtgtgtttgtgaggtgggagggttttt

SEQ ID NO: 461472 - DNA, 201 bp, Homo sapiens
aaagcagattgcagttggtgaaaatggagattgtttcctaactgatatttgtaacacttgttttgtaacttagcttgtatgtgacatatctgttaaagtgyggtcatccacctgtagggagctttgcactcataaatatcttttttccagtggagacggcactatgagaaaaaacattgatgtttggaaaaagtggaccac

SEQ ID NO: 461473 - DNA, 201 bp, Homo sapiens
acggtgattgtaagaaaaatttagctattagtaagaaaaatttagctattatattagcttaattgaaattactatggaaaatttattagtcattattcatrtaattctgattaaaatgccattgttgattaactgagtttttcaatagtattttaggttctgaaaaacatgaaaataacttccattaaataaaagtagaaa

SEQ ID NO: 461474 - DNA, 201 bp, Homo sapiens
tgactgaggcatgagaattacttgaatccaggaggcagaagtcacagtgagctgagattacaccactacactccagcctaggtgacagtgagactgtctcaaaaaaaaaaaggcagtgtttttagtatcccccatttctcccctaattaaaaaaaataaaaaaaataaaaataacattgatgtcatcatttatagaaagtt

SEQ ID NO: 461475 - DNA, 201 bp, Homo sapiens
aatcccttttttagaaaactcagcagtgagacctacagtcaagcaaaggacctgggtgagtagttggaaatgcatagagacataacttgtattccctttayaaggccagcaaaaatgcaggtggtgtgcgttggggcatatttatcaatcatagttttcagtttatttatggctacatcaatttccagagggttctgtaga

SEQ ID NO: 461476 - DNA, 201 bp, Homo sapiens
aggctctggtggtgccctgctgctgcccagcagcctgtggtgtgtctgtgtggcgtgcagggctggcctttgctcaccttgctgggccagagagtccgggragaggaggggtcagcctgtgagcagccctggcaagcctcccagccagagctcttgacccacttgcctgtcagcaggtcgggggtgggtggaagcaggtct

SEQ ID NO: 461477 - DNA, 201 bp, Homo sapiens
cctcctgagttcaggcaattctcctgcctcagtctcccaagtagccgggattacaggtgcgcaccaccacaccctgctaattttgtatttttagtagagayggggtttctccatgttggtcaggctggtctcgaactcccgacctcaggcgatccgcctgccttggccttccaaagtgctgggattacaggtgtgagccac

SEQ ID NO: 461478 - DNA, 201 bp, Homo sapiens
ttttgttttgagacagagtctcgctctgtcacccaggctggagtacagtggcacgatctcggctcactgcaagctccgcctcccaggttcagccattctcytgccccagcctcccaagtagctgggactacaagcacccgccaccacgcccagctaattttttgtatttttagtagagacggggtttcaccgtgttagcca

SEQ ID NO: 461479 - DNA, 201 bp, Homo sapiens
cttttcaccatctagatccttgaagccaagaatgtagattatttgttgttttctttcttcagaatacttaacacatcactaggtgcagaaatgtgctcagsgcatgcatccactacctggaaaacctggcaaatgtgtgtctgtttcttttccagcaaagggaagcatcgtgctgaagtatgaaccagattctgcgtaagt

SEQ ID NO: 461480 - DNA, 201 bp, Homo sapiens
cctggcaaatgtgtgtctgtttcttttccagcaaagggaagcatcgtgctgaagtatgaaccagattctgcgtaagtcagtacacgccctgcccttagacrcacacgccttgtcattagctacagtgttctcgttggtgaggaaagtgacttgggaaggtgggaaccttcttcaggccttttgtgattgttcctcagaagt

SEQ ID NO: 461481 - DNA, 201 bp, Homo sapiens
aggagcctaaaatctaggtcagagtcccgtatgaaagaaatcagataagttgagagagggcgtgtgcaggttggaaatggtggcgtccatctctgctgggrcgtcgatgccacctggctggacaggtggagcctggaaggtagggaggctcggagcatgttcagagaggcagggatgtttttgactgtgggtaacactgca

SEQ ID NO: 461482 - DNA, 201 bp, Homo sapiens
ctttacatgagatcaacagccttcacaattataaatactgtagaattttaatcttgtaatagtacgtttacattttgactatcagaaatttgacgaaaaaracatataaggctatatttgttcaaagtatatctagactgcttatctatatttgaaaatgaaaattcagctctttacaataagtctaaatggcatgtggtg

SEQ ID NO: 461483 - DNA, 201 bp, Homo sapiens
ggacgcggaggatggcgccgagggtggtggaaagcgcggcgaggcggtaggagccgggacccggcgggcgggccaggggctcctcctgggcttcccggacmccgaggcctgcgaggcggcggcgagggggcggttccttgggcctcggggtagacgtctctttccttcctcagggctgggaaggaggctaccccgagatcg

SEQ ID NO: 461484 - DNA, 201 bp, Homo sapiens
gcgcggcgaggcggtaggagccgggacccggcgggcgggccaggggctcctcctgggcttcccggacaccgaggcctgcgaggcggcggcgagggggcggytccttgggcctcggggtagacgtctctttccttcctcagggctgggaaggaggctaccccgagatcgtcaaggagaacaagctgttcgagcactactacc

SEQ ID NO: 461485 - DNA, 201 bp, Homo sapiens
catttagatccctggaaggttttttttaagtataattgtgttataaaagcttgtaatgaatatgtgacataaggaggtgcttctaatatgtgcacttcatkgatacatttggccttgcagtcatctgatatctccccttagcttacagctgcggattgcaacacgcggggctgaacagctggctgaaggtggaaggatggt

SEQ ID NO: 461486 - DNA, 201 bp, Homo sapiens
gttctcccctcctccgcgccccccctccatctttgtagttacatctttctaaatgagtcgcaagtaaaacttaacggtaggatatgcttaggagagaaggmatgcagtgttgctcttagggctcaaacagtgtggattgcttaaattttgaaggcatacagtgtaaaagtagtgactaaagaatgtttactctccatgcaa

SEQ ID NO: 461487 - DNA, 201 bp, Homo sapiens
ctgcattattttgattctgtgtgatctgcacattaagtaagtcatcttgtatcttttttttctgatgaccttaccattgttaccttataatggtgaagagyagaggagtgtccgctttttcatctgatctcgagcgtttcatcattataattttacagtaatatgcataatcttgtaacccccatggctctcctgtttctg

SEQ ID NO: 461488 - DNA, 201 bp, Homo sapiens
tcaggaaatgttagctgttatagtgacaccacgcccctttctcttaagtggaaacaaatacccatcgtgatgttttagagtcagctttcatctcgtcctayctttgttcaggcaaacttctctagttctgttttaataggcatatttgttaggtctgttttttgaaatcctcttttttacattgtttaaagataatgcctt

SEQ ID NO: 461489 - DNA, 201 bp, Homo sapiens
gtgcggcctcatcataaggtagcatatagcaactagaaacgtgggggcgggcagcttgttaccagtgtcatgcctgtttgttttgatgaaaccattttttyttaatataattagtcctttttttcttcttttcactttggatagagagtgatatgtacgtatcttagtttcttttttttttttttttcttttttgtcctac

SEQ ID NO: 461490 - DNA, 201 bp, Homo sapiens
caggtgggtttccagcatggacctgtgtacagtatgatgtcacagccaactttttgcatgtgggtggcttcagaccgtattgtagatgcttcctccctttyctctgtcagaggcggtgtgcatggatatggctttatgcaggaaggagcagaccttggctgagccttagagtgggtggttgctggtgattttgactggagg

SEQ ID NO: 461491 - DNA, 201 bp, Homo sapiens
acaaaaacatgaaaataacttccattaaataaaagtagaaagtcagaaatttaacggtgattgtaagaaaaatttagctattagtaagaaaaatttagctrttatattagcttaattgaaattactatggaaaatttattagtcattattcatgtaattctgattaaaatgccattgttgattaactgagtttttcaatag

SEQ ID NO: 461492 - DNA, 201 bp, Homo sapiens
aagaacagaaaggggtggttgcaatagcctgcagaaagataaagagaaaacaaaacaaaacagagaaaatacgtaagaggaaaatagaatcgtagactctyattgtggtgtgttttaggatgttattgcttggaacaatttgtgcaccccaactattttgtattagttcttccagtgagtacagtatataaaaaactttgt

SEQ ID NO: 461493 - DNA, 201 bp, Homo sapiens
ccccgaaaggaccaggcccggacacgtggggccttggtttccggccggaagtcccgggaggtgtagggctagagttctggccgtggcgggccggtttctgmgtgctgcgtgcgcggccgcgtgggctatggggcggcggtcgcggggtcggcggctccagcaacagcagcggccggaggacgcggaggatggcgccgaggg

SEQ ID NO: 461494 - DNA, 201 bp, Homo sapiens
caaatccactaaagaaatcaagtcaaatagagactaaaatgaagttgtgcatgaatatgacacaattgtacataagtcttggggtgcggagaaagatagcrtgagcctaaaccaaaagatggacacgtagatacgtcttaatgagaagcagcacagcagatgctggataaagaacagaaaggggtggttgcaatagcctgc

SEQ ID NO: 461495 - DNA, 201 bp, Homo sapiens
cttaacgtaattctggaaaaccttgactgtgggtcttaagtttggtggattgctgcttctcactggctgacctttggaggtcgcatatttcaggatgtgaytccacttaggctccatttcacctgacactgcaattctgtgccttcagagggatttgttattgcgaatgatgtggacaacaagcgctgctacctgctcgtc

SEQ ID NO: 461496 - DNA, 201 bp, Homo sapiens
ttggagtgaatgagaatcaccatttgtcacctttgagagaatggatactcctgccctgtgatttttgttggtattggatagtgctagtaatctggaatgtwccctgtggttctgcaggtaatgacgaaagatgggcagtggtttacagactgggacgctgttcctcacagcagacacacccagatccgacctaccatgttc

SEQ ID NO: 461497 - DNA, 201 bp, Homo sapiens
aaaaactttgtcataaaataatacgtaatcacattggattttatgttatttagttgaatgaaagaaatttcggagttcaagcccttaagaaattcattttrcttgtgtttttatacctttcttgagataatacatcaacattttagatatttagagtttagatataaaataatactcatggtataactgagtaacaagttt

SEQ ID NO: 461498 - DNA, 201 bp, Homo sapiens
gcttatttaacttactgcagcgtccttgaggctcacttgtgttgttgtctgtgtcaaaattgcattgcttattaaggctgaacactattctgttgtttatrtaaaccgcattttgtttacccatccatctgttgatggacatctgggtttcttccactttttggctgttgtgagccatgctgctgtgagcatggtatacaa

SEQ ID NO: 461499 - DNA, 201 bp, Homo sapiens
gtgagggaacaacagatggatgggctggagaggtcagcgaggccgagcgcatgagcaccctggggacctgctggaggcggatggtgtctggatggtgaacsggcaggagcatctagtgattgatggcttctgggtgtttttaacgagagtttgaacaaagactcagaaatggtttttaaaataacagtcccatgtggccca

SEQ ID NO: 461500 - DNA, 201 bp, Homo sapiens
catcatggtatctgttctctcattctctttattcacacagggaatatatacattgtatccatttattaactcaagaattattactgtatcaatggaagatrttaagatactgttgacccaggaaaatcccttttttagaaaactcagcagtgagacctacagtcaagcaaaggacctgggtgagtagttggaaatgcatag

SEQ ID NO: 461501 - DNA, 201 bp, Homo sapiens
tatttgcctttttgctgggggtgtgagaagaaccagagatgagcagaggtacacccagtagacttcccagcctgcagagcctcccgggaagagcttccgtkttcaggtgcttggggccccaccctaggagcctgactcacagtcagagcagggtcccggcttgtgttcaggattttgaaacatttgtaaggtgattttgtt

SEQ ID NO: 461502 - DNA, 201 bp, Homo sapiens
ctctcaggagcttcagtccacttaggaaacttgaggtgagctgcagggagcctgtggagaaacgcttctcatttagtggggtgaggtgacacggggtggcrgggacagtaagttaagtttgagaaggaagtatgtagaaagtgtatgtgaaatctgtagatttggggcctctactccattgtgaacttaaagaggcagggc

SEQ ID NO: 461503 - DNA, 201 bp, Homo sapiens
gagcaggcccaaggcagcgggggcccacacccctcacacgcaaaactggcttcttctggtcactggtgtctgaaaccaaatccagagcagcctgtggcctrtaaagcatatatttctaatgactgcagactggtgggatcataggagccttctgaatgaccaggactgctttctttggagctgatgaaaatgtactctttt

SEQ ID NO: 461504 - DNA, 201 bp, Homo sapiens
cgaggtgctcaggaaatgttagctgttatagtgacaccacgcccctttctcttaagtggaaacaaatacccatcgtgatgttttagagtcagctttcatckcgtcctacctttgttcaggcaaacttctctagttctgttttaataggcatatttgttaggtctgttttttgaaatcctcttttttacattgtttaaagat

SEQ ID NO: 461505 - DNA, 201 bp, Homo sapiens
tggccgtggcgggccggtttctgcgtgctgcgtgcgcggccgcgtgggctatggggcggcggtcgcggggtcggcggctccagcaacagcagcggccggargacgcggaggatggcgccgagggtggtggaaagcgcggcgaggcggtaggagccgggacccggcgggcgggccaggggctcctcctgggcttcccggaca

SEQ ID NO: 461506 - DNA, 201 bp, Homo sapiens
ttctgagatgccaggggagataccttgggggtggagggagttcttggtcaggggctggcttctgcctccacataggagatttcaaagaacagccagcaccrtttggccagtgggttttaagtataagggcattcatatttagaaaaaaagtacatggattcttttccttcaagtaactgcattgctttttgcaacttttcc

SEQ ID NO: 461507 - DNA, 201 bp, Homo sapiens
acttgtgttcaaaatggtaggaatgccactttggcagattgtagacaaggaaaagactctaactttgcctgctaatttggctctaaagtctcctatgacamgcagttgggttttccgtctaccggaagtagaactggacatcttgcctaccaccgtcagtagtactcaaacaaacacactcataccatgggggagctttat

SEQ ID NO: 461508 - DNA, 201 bp, Homo sapiens
cgtttggccagtgggttttaagtataagggcattcatatttagaaaaaaagtacatggattcttttccttcaagtaactgcattgctttttgcaacttttyctctagtcttcactgtgttgaatagttttgattgtgttgtgtatatcttaaataccctgctttttcacctaacattccaatatgtcatagtagtttttcc

SEQ ID NO: 461509 - DNA, 201 bp, Homo sapiens
tagggggggtgggttccacacctgtccaaggggaggggccatagtgagggctcgaccaccatagccgctaagagcatagcccctgagagcaggctgttgtygttcatgaatgacatcatggtatctgttctctcattctctttattcacacagggaatatatacattgtatccatttattaactcaagaattattactgta

SEQ ID NO: 461510 - DNA, 201 bp, Homo sapiens
tggcaggctttcttttgaaagcccagtaaataacaccctctttccctgtccagcttctgaaccaattgacaaggtaatggagcaaggcagaccaaggccaraatcgcacctttattaccaatagagcagatgatatgctttcagatacttacctttaaaatgaggcttatctcctcattgtcacaggtcacagaaggtgtt

SEQ ID NO: 461511 - DNA, 201 bp, Homo sapiens
tggttgtcttcttgcggagttagtctcgcgtctgtggcaggactcctcaatgccctgtcattggaacaactttattgagctgtcgtttacatattgttaaygtttgctcattttaagtgtacggttcagtgatttttagtaagtttactcagttggcagcgccttaccacagtccagctttaggccgttcccgtcacccta

SEQ ID NO: 461512 - DNA, 201 bp, Homo sapiens
tatagagaatgcataaaaccccttggttctcccctcctccgcgccccccctccatctttgtagttacatctttctaaatgagtcgcaagtaaaacttaackgtaggatatgcttaggagagaaggaatgcagtgttgctcttagggctcaaacagtgtggattgcttaaattttgaaggcatacagtgtaaaagtagtgac

SEQ ID NO: 461513 - DNA, 201 bp, Homo sapiens
ccaacagcacttgctccccattccagctgagccccatcggccactcatccaccccgtcggccactcatccactttctgtcgacgggtttgccttccctggrcattttctgtacatggaatcatataatatgtgatctgtgtctggtttttttcactgagcatagtgtgttaatacttttttgaaaaacaaaagacgtccat

SEQ ID NO: 461514 - DNA, 201 bp, Homo sapiens
ggaatccagacgctctgcagtgtcccatcgtcttatgcggatggcggggaaaggcctccattcgaacttttgtgcccaagaatgaacggcttcattatctyaggatgatggggctggaggtattgggagaaaagaagaaggaaggggttatcctcacaaatgagagtgcagccagcaccggacagccagacaatgacgtga

SEQ ID NO: 461515 - DNA, 201 bp, Homo sapiens
ctgggactacaggtgcccgccaccacgcccggccaatttttttgtatttttagtggagacgggtttttaccttgctagccaggatggtctcatctcctgayctcatgatccgcccacctcggcctcccaaagtgctgggattacaggcgtgagccactgcgccctgccaaattaagcgttttgcatcaacttttgaggttt

SEQ ID NO: 461516 - DNA, 201 bp, Homo sapiens
accctagcagacctttcctgcccaacagcacttgctccccattccagctgagccccatcggccactcatccaccccgtcggccactcatccactttctgtygacgggtttgccttccctggacattttctgtacatggaatcatataatatgtgatctgtgtctggtttttttcactgagcatagtgtgttaatacttttt

SEQ ID NO: 461517 - DNA, 201 bp, Homo sapiens
atctcaggatgatggggctggaggtattgggagaaaagaagaaggaaggggttatcctcacaaatgagagtgcagccagcaccggacagccagacaatgaygtgactgagggacagagagcaggagagcccaacagcccagatgcagaagaggccaacagtccagacgtgacagcaggctgtgacccggcgggggtccatc

SEQ ID NO: 461518 - DNA, 201 bp, Homo sapiens
tgctcagatttttgtgttcattagctaggaatttaggaaaccatgattccaggcagcttgagcagcacagacacctcctgtttcccttgccacagtctgcyttcagatccctgagaaagaaaatggactgcatttattaatttgcatgcctagttgccatttacgactcagacttgagggtgggccccagttcctgggcgc

SEQ ID NO: 461519 - DNA, 201 bp, Homo sapiens
tgtattgtttttctgtttacagggattttttaagtactttttccaaatacttttgatcatgctgtctgtagagcagtgtattctttttttcatttgacatracaaatgccatggtcttgcatgcaggactgtactgtgcctgagccacagaatactaattagcatccaccacaaccaactatagcaggaggcctcgtctcc

SEQ ID NO: 461520 - DNA, 201 bp, Homo sapiens
ccatgctgctgtgagcatggtatacaaatacctctccaagatcctggttacgattctttggatatacactcagaagttgaatggctggatcatatgatcayatagtaattctgtgtttaattttggggggaccccaccatgctttttttcacagtggctgcgtcattttgtatttctacccccagtgcacaagggttccaa

SEQ ID NO: 461521 - DNA, 201 bp, Homo sapiens
ttgatggacatctgggtttcttccactttttggctgttgtgagccatgctgctgtgagcatggtatacaaatacctctccaagatcctggttacgattctytggatatacactcagaagttgaatggctggatcatatgatcacatagtaattctgtgtttaattttggggggaccccaccatgctttttttcacagtggc

SEQ ID NO: 461522 - DNA, 201 bp, Homo sapiens
gcctttcctgggcagtgcccacctgctgctgtccttccagtgaggctccccttggcggctggctggtctgggttgtgccctcagccctgcggttgttgatgccttcacggtcctttaagctggaatgtaatgttgtgtttattttcctgtgctcatgtagacctctgtaaagatgtcatttctgggtgatgttttcttgca

SEQ ID NO: 461523 - DNA, 201 bp, Homo sapiens
agctcttatcgcattgtttttaaaactgggctgactgtgtcccgatgggcaattttaggaaacttcctgggaccacgaacttgaggtttaaaaattcccayagttcattttcagcattgctctgggatgtttgttagacatgcctgcgtgaagacctgcagcatcgccctggtgtgcattggaatggggagacggagcagg

SEQ ID NO: 461524 - DNA, 201 bp, Homo sapiens
cagctttaggccgttcccgtcaccctagcagacctttcctgcccaacagcacttgctccccattccagctgagccccatcggccactcatccaccccgtcrgccactcatccactttctgtcgacgggtttgccttccctggacattttctgtacatggaatcatataatatgtgatctgtgtctggtttttttcactgag

SEQ ID NO: 461525 - DNA, 201 bp, Homo sapiens
aattcccacagttcattttcagcattgctctgggatgtttgttagacatgcctgcgtgaagacctgcagcatcgccctggtgtgcattggaatggggagayggagcaggcgtcctgcagcccagccttctggttgtcttcttgcggagttagtctcgcgtctgtggcaggactcctcaatgccctgtcattggaacaactt

SEQ ID NO: 461526 - DNA, 201 bp, Homo sapiens
cactcatccactttctgtcgacgggtttgccttccctggacattttctgtacatggaatcatataatatgtgatctgtgtctggtttttttcactgagcayagtgtgttaatacttttttgaaaaacaaaagacgtccatgcttttgctgcacaggtgctttggagcttgctgatgtgtctaatgaactgccagggctgaa

SEQ ID NO: 461527 - DNA, 201 bp, Homo sapiens
taaagtattagatactttgcattcattcatactaggtttcagtagcttgtgttttagactttgcgcttgtcacattttaagtggtcagtgaccacaggctygtggctgcccagctgcagagcacagtgcagtcacagaggagcctgtcttagagacgcgtgctttaggttggcctgcattagggcttacattgatgtttct

SEQ ID NO: 461528 - DNA, 201 bp, Homo sapiens
tgatgttttcttgcatggtcataattgccatggtgttggtgatactttattccaaaaggtgtgtgagggggagtatggggcacataatagtttagttgtartgaaattacaccttcaagtgtgatttggggtcagttgttaggactgttgaatcctgctcagatttttgtgttcattagctaggaatttaggaaaccatga

SEQ ID NO: 461529 - DNA, 201 bp, Homo sapiens
tcttattcacttagttcaacagatctagtgctagcatggcctgtgctgctgttggtcctactgggaacgcaggtagagtctccatggtcaggatgccgtgwtctgttgtggtgctgaggcctgtaagcacttggctagaagttaggccagggaagctcacactgaccttggtatttgaaggtcccagaatgaggttgttga

SEQ ID NO: 461530 - DNA, 201 bp, Homo sapiens
gttgttgaggtagaacagagatgggagaacatgcccttggagctggactcaacaagaaggcccctctgggggaagctgaggttggacaggaagggcgtgtkccctcactgacttgctcacaggcttggggttcatctgttttggtttttgcttttttacattatattaacatggaaataaaaggtgttccctgggatgctc

SEQ ID NO: 461531 - DNA, 201 bp, Homo sapiens
tcagaagttcattctttggcaggtgtttccttggtgcctggggcactctctctttctcccagttcctgtggcagtttgtccaggtgcccaagaacaattcrtaccctcctttctcgttatttatatacttgtctttttgcccctgccgggtattttagaaatcgtgcttggtgcactttgtgtccttcagtgtgccttacc

SEQ ID NO: 461532 - DNA, 201 bp, Homo sapiens
accccaccatgctttttttcacagtggctgcgtcattttgtatttctacccccagtgcacaagggttccaatttctctacacattcagggacacttattayctggggctctttgttgttagtagccatcctaatgggtgtgaggtcacctcatacagttttatactgaggaactgacagatagtacagaatattctgaaac

SEQ ID NO: 461533 - DNA, 201 bp, Homo sapiens
aaacgggaatgctggtgatcaggattgtgaggagggatgagcagatgtgggattgtcctggggtactgatgggttcgtcttcatccggtctgaaacctttyttgattgtggattttcattggtctttctgattttcagactggctggctggttctttttcttgtatttagaatgttactgctggttttctgagtgaacgct

SEQ ID NO: 461534 - DNA, 201 bp, Homo sapiens
ttttctgagtgaacgcttgcagatcttttcagacttcaccaaatttgtggctctagttggctttatgtctgtctatatgtgtgtttgtgaggtgggagggtttttttttttttttttttttttttccgagacagtctcgctctgttgcccaggctggagtgcagtggcgccatctcggctcactgcaacctccatctcccg

SEQ ID NO: 461535 - DNA, 201 bp, Homo sapiens
tcatccaccccgtcggccactcatccactttctgtcgacgggtttgccttccctggacattttctgtacatggaatcatataatatgtgatctgtgtctgktttttttcactgagcatagtgtgttaatacttttttgaaaaacaaaagacgtccatgcttttgctgcacaggtgctttggagcttgctgatgtgtctaat

SEQ ID NO: 461536 - DNA, 201 bp, Homo sapiens
gccatgttggacaggctagtcttgaactcctgacctcaagtgatccgcccaccttggtctcccaaagtgctggtgttacaggcatgagccactgcacctcrcctgttacgtgctttttaatgtctagattgaggatggtttgtcatagatgttgtatatatttacagagtccttaccacttgagaatttttaatatgcaaa

SEQ ID NO: 461537 - DNA, 201 bp, Homo sapiens
aaaaaagaaaaatacaaaaactggccaggcagtgtgttgcatgcctgtagtcccagctccttgggaggctgaggcaggaggatctcctgagcccaggaggyggaggctacagtgggttgagatcacaccactgcactccagcctaggcaacagatccagaccttgactcaaaaaaaaaaaaaaaatttaagtttacatatt

SEQ ID NO: 461538 - DNA, 201 bp, Homo sapiens
caaaaactggccaggcagtgtgttgcatgcctgtagtcccagctccttgggaggctgaggcaggaggatctcctgagcccaggaggcggaggctacagtgrgttgagatcacaccactgcactccagcctaggcaacagatccagaccttgactcaaaaaaaaaaaaaaaatttaagtttacatattggccattctatgag

SEQ ID NO: 461539 - DNA, 201 bp, Homo sapiens
aggcagtgtgttgcatgcctgtagtcccagctccttgggaggctgaggcaggaggatctcctgagcccaggaggcggaggctacagtgggttgagatcacrccactgcactccagcctaggcaacagatccagaccttgactcaaaaaaaaaaaaaaaatttaagtttacatattggccattctatgagtgagggtcgaag

SEQ ID NO: 461540 - DNA, 201 bp, Homo sapiens
gagctccagcctttttctggggcacggtttgtgcagtttaacgttggaacgtacagcctcagacgggcaaagggggcgactgcacttctgccgccaccagdgtttttctgtcaggttagaaagtatttcactttgaggctaaaagtctcacaaggtatcttaacgctgatggaatgttattttcatggaatcagtataaga

SEQ ID NO: 461541 - DNA, 201 bp, Homo sapiens
gggcaaagggggcgactgcacttctgccgccaccagggtttttctgtcaggttagaaagtatttcactttgaggctaaaagtctcacaaggtatcttaacrctgatggaatgttattttcatggaatcagtataagaaattatattgtaaagtattagatactttgcattcattcatactaggtttcagtagcttgtgttt

SEQ ID NO: 461542 - DNA, 201 bp, Homo sapiens
tgggatgctcccggcttctctgctcagtagctttgtggctctgagtaaaatgaacttgcctgtgttgaaatatcctaatttttaaacttacttcatagggrctgaggaattacgacttttatcaattttgtgacctgttaaaatgttaaaaaggacatgtattttttaaagatctttaagtaaaacattttgctcattccc

SEQ ID NO: 461543 - DNA, 201 bp, Homo sapiens
tttgaggctaaaagtctcacaaggtatcttaacgctgatggaatgttattttcatggaatcagtataagaaattatattgtaaagtattagatactttgcrttcattcatactaggtttcagtagcttgtgttttagactttgcgcttgtcacattttaagtggtcagtgaccacaggctcgtggctgcccagctgcagag

SEQ ID NO: 461544 - DNA, 201 bp, Homo sapiens
tttgaaggtcccagaatgaggttgttgaggtagaacagagatgggagaacatgcccttggagctggactcaacaagaaggcccctctgggggaagctgagkttggacaggaagggcgtgtgccctcactgacttgctcacaggcttggggttcatctgttttggtttttgcttttttacattatattaacatggaaataaa

SEQ ID NO: 461545 - DNA, 201 bp, Homo sapiens
agagaacatgctgtgtgctctgtgggctggctgtgctgtcagaccgggttacttgcctggagctctggatgcttctgccaccctcacccatttcctgaacrtgccaacgtttgaaggagtggcttcgtgaggggttgtcatctgaaagcaggttgaatccaagttctagttctcattcccatgggtctctctttccagcag

SEQ ID NO: 461546 - DNA, 201 bp, Homo sapiens
gacgctgagtgctgtgtgatgcgggatgcgtgtggcttttcacagcggcttagatttcatttggagcagaccgtgacatctgccctccccacctgtagcgytggctgtgggtccctgagcctgccctttgatttcagagctgttgactgacacagggctgaatggttcctgccagagtcctgaatctggtggcctgtgtct

SEQ ID NO: 461547 - DNA, 201 bp, Homo sapiens
ttccatatttaaacacttgtttctacttggtgaaatacacaggtgacaggtcaacttcaggaataatggttttttttttttaagaagatgggagttgggartttcttatattttcctctcacttcttaaaaccacctttgtgcccctgctttacattaggaaaaatggaaaggtgattaaacacggccgttaggagcctaa

SEQ ID NO: 461548 - DNA, 201 bp, Homo sapiens
cctgctctgacgccctgctaagggcagagtctcccagcctctcaggagcttcagtccacttaggaaacttgaggtgagctgcagggagcctgtggagaaaygcttctcatttagtggggtgaggtgacacggggtggcggggacagtaagttaagtttgagaaggaagtatgtagaaagtgtatgtgaaatctgtagattt

SEQ ID NO: 461549 - DNA, 201 bp, Homo sapiens
cacgccattctcttgtctcagcctcccgagtagctgggactacaggtgcccgccaccacgcccggccaatttttttgtatttttagtggagacgggttttyaccttgctagccaggatggtctcatctcctgacctcatgatccgcccacctcggcctcccaaagtgctgggattacaggcgtgagccactgcgccctgcc

SEQ ID NO: 461550 - DNA, 201 bp, Homo sapiens
ttcagcctttttaattattcatttaaagaaatttactatagagtatcaaatgtacaactgatcacatgtaaccattgttttgtatgtagttctgtctagcttttttttttttttaacctttttaactgcatattagagcaggatgaaactttagaggttactcaatcttttaatttaaggagaaagtaaacttttactttg

SEQ ID NO: 461551 - DNA, 201 bp, Homo sapiens
tcagcctttttaattattcatttaaagaaatttactatagagtatcaaatgtacaactgatcacatgtaaccattgttttgtatgtagttctgtctagcttttttttttttttaacctttttaactgcatattagagcaggatgaaactttagaggttactcaatcttttaatttaaggagaaagtaaacttttactttgt

SEQ ID NO: 461552 - DNA, 201 bp, Homo sapiens
gctggcattgagcatttattaatagtgaaattggctagaatctaaatggtaatgcttagggtacttcatgaactttttttttttttttttgagagagagtmtcactctgtcatccaggctggagtgtagtagctcgatctcggctcactgcaacctctgcctcctgggttcaagcaattctcgtgcctcagcctcccaagt

SEQ ID NO: 461553 - DNA, 201 bp, Homo sapiens
tatcttagtttcttttttttttttttttcttttttgtcctacttaatttttatggtttagaaaattttctcccctttagttttactgatttgtttaccatrtggattgtcttcagtgatggtgattggctaaattaggttgaaaatgatagtgaacatgtattgagagctcattgtatggcaagcattactctgtgctctt

SEQ ID NO: 461554 - DNA, 201 bp, Homo sapiens
catccactttctgtcgacgggtttgccttccctggacattttctgtacatggaatcatataatatgtgatctgtgtctggtttttttcactgagcatagtrtgttaatacttttttgaaaaacaaaagacgtccatgcttttgctgcacaggtgctttggagcttgctgatgtgtctaatgaactgccagggctgaagtgg

SEQ ID NO: 461555 - DNA, 201 bp, Homo sapiens
ttcatttaaagaaatttactatagagtatcaaatgtacaactgatcacatgtaaccattgttttgtatgtagttctgtctagcttttttttttttttaacytttttaactgcatattagagcaggatgaaactttagaggttactcaatcttttaatttaaggagaaagtaaacttttactttgtgaacatgatagataaa

SEQ ID NO: 461556 - DNA, 201 bp, Homo sapiens
tgcctaccaccgtcagtagtactcaaacaaacacactcataccatgggggagctttattttagaattatgtgtgttttctataaaaacgaatggcatttctttttttttttttttgagatggagtctcactctgttgcccaggctggagtgcagtggcgtgatgttggctcactgcaagttccacctcctgggttcacgcc

SEQ ID NO: 461557 - DNA, 201 bp, Homo sapiens
tagaatcagctttaactccaaagaaactgtccatgaattttgtttataatagcaagtagatttaaaatgacactttaaaaaaattctgttgtctttctctmcatataatgctgtagaaaaatataactgatggattttgtgaacgtggtatttttaacttttcgtagcagcacaaagaatgctcctctttgtgtgtcaatg

SEQ ID NO: 461558 - DNA, 201 bp, Homo sapiens
cattgtttaaagataatgccttggctaaaaagcctgcttcacttttccctgtttttagttgttttctccacattggcagtaaagagccttggcgtcccagyagcagcaggttctcctttttgtattgtggatgttttgcatttcatactgttgtgaagagtggctttgatcatacatgttgttggtatatttgcctttttg

SEQ ID NO: 461559 - DNA, 201 bp, Homo sapiens
agccagatggtctgagtggctcagggcttggctggcacctaccagccacttgaccctcacaggttatagagctctcccagagtgctggtttcccctcctagggggggtgggttccacacctgtccaaggggaggggccatagtgagggctcgaccaccatagccgctaagagcatagcccctgagagcaggctgttgtcgt

SEQ ID NO: 461560 - DNA, 201 bp, Homo sapiens
agtggcacgatctcggctcactgcaagctccgcctcccaggttcagccattctcctgccccagcctcccaagtagctgggactacaagcacccgccaccaygcccagctaattttttgtatttttagtagagacggggtttcaccgtgttagccaggatggtctcaatctcctgaccttgtgatctgcctgtctcagcctc

SEQ ID NO: 461561 - DNA, 201 bp, Homo sapiens
gctgggaacggaaatgagcactgtgtgcccagcagggctcagactgccatgtggggtccctggagaagaaatcacgctaacactgagtatcaaaaggatgrgtggtcctgggttctgctctggcagccctgctaagggcagagtctcccggtggtcctgggtcctgctctgacgccctgctaagggcagagtctcccagcc

SEQ ID NO: 461562 - DNA, 201 bp, Homo sapiens
tttcttactggacaggtgggtttccagcatggacctgtgtacagtatgatgtcacagccaactttttgcatgtgggtggcttcagaccgtattgtagatgsttcctcccttttctctgtcagaggcggtgtgcatggatatggctttatgcaggaaggagcagaccttggctgagccttagagtgggtggttgctggtgat

SEQ ID NO: 461563 - DNA, 201 bp, Homo sapiens
tcacgctaacactgagtatcaaaaggatgagtggtcctgggttctgctctggcagccctgctaagggcagagtctcccggtggtcctgggtcctgctctgrcgccctgctaagggcagagtctcccagcctctcaggagcttcagtccacttaggaaacttgaggtgagctgcagggagcctgtggagaaacgcttctcat

SEQ ID NO: 461564 - DNA, 201 bp, Homo sapiens
cgggcaaagggggcgactgcacttctgccgccaccagggtttttctgtcaggttagaaagtatttcactttgaggctaaaagtctcacaaggtatcttaasgctgatggaatgttattttcatggaatcagtataagaaattatattgtaaagtattagatactttgcattcattcatactaggtttcagtagcttgtgtt

SEQ ID NO: 461565 - DNA, 201 bp, Homo sapiens
tgtgcaggttggaaatggtggcgtccatctctgctggggcgtcgatgccacctggctggacaggtggagcctggaaggtagggaggctcggagcatgttcrgagaggcagggatgtttttgactgtgggtaacactgcatgctgggaacggaaatgagcactgtgtgcccagcagggctcagactgccatgtggggtccct

SEQ ID NO: 461566 - DNA, 201 bp, Homo sapiens
gatcgaattttatgtgatgtcccttgcaggtatttatcttattggccaaaaagcccaaatccactaaagaaatcaagtcaaatagagactaaaatgaagtygtgcatgaatatgacacaattgtacataagtcttggggtgcggagaaagatagcgtgagcctaaaccaaaagatggacacgtagatacgtcttaatgaga

SEQ ID NO: 461567 - DNA, 201 bp, Homo sapiens
agaaattatcctaaagcattcttatagaagcattgttttgacaaccaattgttcagagtgcaccttattatcattctatttatgtgctgtttacttatatwtttttttgagacaaggtctctgttgcccaggttggagtgcagtggcatgatctcagctcactgcaacctccacctcctgggctcaggtgatcctcccacc

SEQ ID NO: 461568 - DNA, 201 bp, Homo sapiens
aagcagattgcagttggtgaaaatggagattgtttcctaactgatatttgtaacacttgttttgtaacttagcttgtatgtgacatatctgttaaagtgcrgtcatccacctgtagggagctttgcactcataaatatcttttttccagtggagacggcactatgagaaaaaacattgatgtttggaaaaagtggaccacc

SEQ ID NO: 461569 - DNA, 201 bp, Homo sapiens
ggcctcaggaagcttaaaatcatggcggaagatctctctgcacagggtggcaggagagagaatgagtgctgagcaaaggaagaagcccctaataaaccatyagatctccccctgagaacgaactcactgttgtgagaacaacatgagggaaacggcccggggatttaattatctccacctcgtcctgcccttgacacgtgg

SEQ ID NO: 461570 - DNA, 201 bp, Homo sapiens
cagccagacaatgacgtgactgagggacagagagcaggagagcccaacagcccagatgcagaagaggccaacagtccagacgtgacagcaggctgtgaccmggcgggggtccatccaccccggtgagcaggcccaaggcagcgggggcccacacccctcacacgcaaaactggcttcttctggtcactggtgtctgaaacc

SEQ ID NO: 461571 - DNA, 201 bp, Homo sapiens
tgtttgtagattctttaagcatttgctactctcctaagtctgtgttggctagttaagtactctaggtgtttaattttgctcctttttctcttgtaagcttktggctgggaccaaaagccaggtctcctgagttcttaggtgagagaggctcttgtccacacaagcctgtcctcactcgtggctggagtcaccctttgtagg

SEQ ID NO: 461572 - DNA, 201 bp, Homo sapiens
gtgagctggtgagtcttgttggggtgagttggaggcagcaggtgacattgctgtgaggcttgggttatgccagggtcaaccccatgtgtgtgaacttcccrgccagtatggctcttgtgcctgttgctggcattgagcatttattaatagtgaaattggctagaatctaaatggtaatgcttagggtacttcatgaacttt

SEQ ID NO: 461573 - DNA, 201 bp, Homo sapiens
ctgaggcaggagaaccgcttcaacccgggaggcagaggttgcagtgagctgagactgcgccactgcactccagcttggaagacagagcaagactccatatmaaaaaaaaaaaaaaagtctcaaaagtagtgttatcaggtcattatcattggagtagcggctgagggagagaagctgcacttgttaatttaggtttctgat

SEQ ID NO: 461574 - DNA, 201 bp, Homo sapiens
cccttgaaccacactgcagttttggggattgaattctggaggaggagaataagatgtttagaaacagtctaccagattttgaactcattgtggataaacarcaatgttgttatgtacaggaaattttatgctttggatccttcattcccaaggatgaatttgttaactcggactacagaagggaagaaaaggcagctctac

SEQ ID NO: 461575 - DNA, 201 bp, Homo sapiens
ctgctgccccgacccttgggatttgtcctttgaggtacttcccttagaatttggccatttgggggcccttctttcatttgctttactgtcctccaaacgaygtaatcacaagttgtgagtatcagttcgttcttaaccgaggtttctcggtgggtttctgcttctcctctcctttcccattccgtgacggttgctccatgt

SEQ ID NO: 461576 - DNA, 201 bp, Homo sapiens
ggatttgtcctttgaggtacttcccttagaatttggccatttgggggcccttctttcatttgctttactgtcctccaaacgatgtaatcacaagttgtgartatcagttcgttcttaaccgaggtttctcggtgggtttctgcttctcctctcctttcccattccgtgacggttgctccatgtggcccggcatccttacag

SEQ ID NO: 461577 - DNA, 201 bp, Homo sapiens
tcccttagaatttggccatttgggggcccttctttcatttgctttactgtcctccaaacgatgtaatcacaagttgtgagtatcagttcgttcttaaccgrggtttctcggtgggtttctgcttctcctctcctttcccattccgtgacggttgctccatgtggcccggcatccttacaggagatggtcctgtcttcatct

SEQ ID NO: 461578 - DNA, 201 bp, Homo sapiens
gtgacggttgctccatgtggcccggcatccttacaggagatggtcctgtcttcatctctctgtgtttcatcttatttttttacttacaggttattaacacrgggatcaaagtctggtgtagaaataacagcggtgaagagtttgactgtgctttccggctggcacaggaggtaattttggaagtggatttgaacagcagta

SEQ ID NO: 461579 - DNA, 201 bp, Homo sapiens
gcaactaatgaaccaataatgataaattattaactaaggtccatagtttattcctacttcctcacattttacctaaagtcctttttctgttccaggatgcyagctaggatatcacattacatttagttgttgtatattcttaggctgtatattcttggctgtgacagtttctcaggcttaactagtttttgatgactgtta

SEQ ID NO: 461580 - DNA, 201 bp, Homo sapiens
tatgtgctgaaacatatataaaagtttaagtatttcctagttttaaaacaagtctttactacaatctgtctcttttctacaaaattttaatgtaagtgcamattttgttttcatgaccagagttacctgttttggataagattatcaaaatttactctaaatcatataagaaaatgagacagagaacatttgcccaatgca

SEQ ID NO: 461581 - DNA, 201 bp, Homo sapiens
actaaagaattctttcaaagataaagtgaaacctctgtaagttttagattgcttctggaaaagaaaatggagttgagcagaagtgggttggcttgatcactttttttttttttttttttttgagatggtgtttcgctcttgtcgcccaggctagagtgcaatggcacaatctcggctcactgcaacctccgcctcccagat

SEQ ID NO: 461582 - DNA, 201 bp, Homo sapiens
atttcagttttttaccctgtggtggatagtatcgtcatctgaacaaattgagcattagacaaatttgtttgtgggttgttaaattaacattctagcttaarattttaattcaacattaatcttttacatctttttacttccccctgcccccaagtaaaacaaaataaacttagaattcctcatttgagtgcagcagggcga

SEQ ID NO: 461583 - DNA, 201 bp, Homo sapiens
ctaaagaattctttcaaagataaagtgaaacctctgtaagttttagattgcttctggaaaagaaaatggagttgagcagaagtgggttggcttgatcactttttttttttttttttttttgagatggtgtttcgctcttgtcgcccaggctagagtgcaatggcacaatctcggctcactgcaacctccgcctcccagatt

SEQ ID NO: 461584 - DNA, 201 bp, Homo sapiens
taaagaattctttcaaagataaagtgaaacctctgtaagttttagattgcttctggaaaagaaaatggagttgagcagaagtgggttggcttgatcactttttttttttttttttttttgagatggtgtttcgctcttgtcgcccaggctagagtgcaatggcacaatctcggctcactgcaacctccgcctcccagattc

SEQ ID NO: 461585 - DNA, 201 bp, Homo sapiens
cccggtgttgaccagagtagagatggttttgcccacaaaaaaaatggcgccgaaacatgtcaatccgcacaatcacgtgttcacaaacctggatgagagayggtatggcttcagatgacaaacggatgttattattctttacttccgggtgagacaaatcgggcgccatcttgtcttgttcccgaagaagtagaagcatcg

SEQ ID NO: 461586 - DNA, 201 bp, Homo sapiens
tcccaaacattatattacttgaatagtagcttccatcaaaactttggggaagaaaagcttctaaaaatatagcaaaagtagaagtggctgttctaaacatwcagaaaaatgatcataggtgatacaaatcaaacccttgaaaatatgcaaattaaaacctctgttcataggaaaacttttttttttttttttaataaaagc

SEQ ID NO: 461587 - DNA, 201 bp, Homo sapiens
aactgcgctaagcaactggccagaattggtttggtttggtttgaccctggggttcctccgtagtctgtaagtggagttgcgaactcaaccccttctccaargcgggagtgtttctaggagggaacatacttccccttaaaggaagatcacgttgctaaagtaaaaaatttgaaggcgccctatgtgtagaacacttacgtt

SEQ ID NO: 461588 - DNA, 201 bp, Homo sapiens
gccagacatgatactggtttaaaatgaatgttatgtttttaatgtttcttctctccccaaaaagcagcaatagtagtagatttaacaataccatagactcwtgactatgaaatcgtggctatttgtgttaacatgttgttcctgttgttgatgtgatacaaagctcctgcaaaacagctggcacagtccagtgcactggct

SEQ ID NO: 461589 - DNA, 201 bp, Homo sapiens
gcctgaatatgggttatttgctaagtaccctttcagacacagtatgctttaatatttaagatctcattcaaaaaaaatttttctaatttccctcatacccyctctgtctgaaatatttaagatctaaggaatagttgagctgcttattttacatagaggcactattcttttaactcctacattctgaatgctgaagtcagt

SEQ ID NO: 461590 - DNA, 201 bp, Homo sapiens
tcctacccctagatttttagtaacaccttaaaaatgtattgaaaacaaaaattaagttacatgtcataatctcagaagtagacatacagatatacctgtcracattttttctcattataaaccaatttcagctcacatcagagttataatttcaaagccagacatgatactggtttaaaatgaatgttatgtttttaatgt

SEQ ID NO: 461591 - DNA, 201 bp, Homo sapiens
tttgaggaatggcattgcatgcgtccttttgagaagccatcttgtagttgaaggaaagcagcaggacggaaaccagacttcccccccacggttccctaaargtcacggataaagaatgaaaaaccgggactagttaagccaaggagagaagagcaagtgttcccggaagggggcgcgatgtgttgaggttaacaaagagaa

SEQ ID NO: 461592 - DNA, 201 bp, Homo sapiens
caatatatgcattttatatatatataattatatatgaacacctatagtttgtacttaataattcataatttagccatgatagtatctaagctcactttcaraattattgcatacatgccttagggaagaacctatccactaatgcttttaataacttacatagattgtgttgcggcaagtcaagttttaatatagaggaaa

SEQ ID NO: 461593 - DNA, 201 bp, Homo sapiens
tgattcctttacagtgagaaaaatatgaaatagtccagaaagaataagatattaagtaacctttgcctgaaggttctgtgaactccttaagcgtttgaatrtatacttctccccaccccgaataagcgtattcttctgggaaaaggcaatgaaaaaagaaatgaactttcttctcagaccttgaaaagtttttagtgcata

SEQ ID NO: 461594 - DNA, 201 bp, Homo sapiens
ttaggaattgacactttattttttatggtcataaagcttaaaattacaaaaatgatactggtctgaaattaaaaggtttaaataattttatttaaaccttyacattaaattccagattttgtgatgaagtgaaaatttatgctagccatagcatgttggtattttcttcagtgtaggcatttcagtacattatacagatat

SEQ ID NO: 461595 - DNA, 201 bp, Homo sapiens
aaagaaaaagaacagcagctattacatgataaacagatggaaggtgtagtataccttttagacttaattttggtccagttttgtatttctttttattttttaactaacctaaaaatatcaaaggataaaataaaggctatattataaataatatgtgatataactgaaactaaagtcacaatttttgtttggttgttttag

SEQ ID NO: 461596 - DNA, 201 bp, Homo sapiens
tcaacagaatgtggcaaccaggtttgttgtttatgttttcacaattttaagacttttaaaaaacagaatgaagattattattaaattttttaatttgcttwgttgtatgacttctggaaattaatgcttcttaaagaataggcagttttcaatttgatttgactttgacattttgtggttaaaattattctgtactcattc

SEQ ID NO: 461597 - DNA, 201 bp, Homo sapiens
ttgaaagtgtcctttctctctctctttaataaactcagtttggtacttgataaataatcatagtcttaaatgttagaaatcctatataatattatttattwaaaattgcagatttttaatttaaaatacatttttatttttaaattttgtcttttcccttttttttcagatcaacaacccctccccgtcgtaaacgctgag

SEQ ID NO: 461598 - DNA, 201 bp, Homo sapiens
tcaatttcctgacattaaaattgtctgattttgtccgtttcttaaaattatgattagtgagtggtctaacagtttaaggcattgataacttacaagtagartggggctctcaaagcattttaactcagttgctttagggtccatttttttatgtaatcacttactcagtgataaatgaatctctgaaaacaaatgctttta

SEQ ID NO: 461599 - DNA, 201 bp, Homo sapiens; identical to SEQ ID NO: 111964

SEQ ID NO: 461600 - DNA, 201 bp, Homo sapiens
tacccatggacttttgccagattccaactttaagggtatgaaagagggctagaaatagacctttacttttcatttggaagtatttgacaactttctaaacwtttcttcctattttggggattttcaagtaatatattctctgtgtgtataacgtgtggttcactcctgtaaaatgaaattgctggaatcaatcaagccagt

SEQ ID NO: 461601 - DNA, 201 bp, Homo sapiens
agaaatgaaatcacttttttcctacaatcttcaaaataattacatatccagaaatttatattgtacaaaaaatagagttttttttaaagtcttttttgagstaaattcattgtgttatgcttgccaccaaattctgagaccagcattaacataaaattttctacctcgtttggtaccctaaaaattctagttgcctctggc

SEQ ID NO: 461602 - DNA, 201 bp, Homo sapiens
tgttaaaatcataagacatgattctagacaggatagtaagaaaagtactaccaaagatagtaaaaaacattcaggctctgattctagtggaaggagcagtyctgagtctccaggaagtagcaaagaaaagaaggctaagaagcctaaacatagtcgatcgcgatccgtggagaaatctcaaaggtctggtaagaaggcaag

SEQ ID NO: 461603 - DNA, 201 bp, Homo sapiens
tttttaatagataacatggcattgttgtgtgacttctgatacagtttattttgactaatgaattttgaattatctacctacaatttttagtttaccacttatctcttacagaagcaagtgatttcctacccctagatttttagtaacaccttaaaaatgtattgaaaacaaaaattaagttacatgtcataatctcagaag

SEQ ID NO: 461604 - DNA, 201 bp, Homo sapiens
cctgtctcagcctcccaagtagctgggattacaggagcccgccgccacgcccggctaatttttgtattttttagtagagacgggggtttcaccatgttggycaggctggtcctgaatgcctgacctcaggtaatccacctgccttggcctcccaaagtgctgggattacacacgtgagctaccgcgctcggccgatcacct

SEQ ID NO: 461605 - DNA, 201 bp, Homo sapiens
tagttattaacataaagtaccttccctcccatcttttccatgctatttatatgttaagaaaccaggtcttggaggctgtcttactttctggatttaatacygtttatctcatttctttatcctttaaaattgctttatattggaagtaaaatccaaaagctcagttggactcagttaaacatttttgatgagaattcttag

SEQ ID NO: 461606 - DNA, 201 bp, Homo sapiens
cagtaggcactttatagagctgttgataatgtctgtattatatgagtttacaacttaagacagaaaaattatgcattgaactctgataagctgttaaagcrttggaaagcacagcaagctttttggttctcataagtagaagttaacagcttcctcatcattagcctttaaacagaaagtaatagctagacactgattatt

SEQ ID NO: 461607 - DNA, 201 bp, Homo sapiens
ggacaggacaaaaaggggaggaagaaggaaacactgaacagaggttagaaaaaaatatatttaacttggaactgatacccaaaccagttgttggcctcatytgtgctatgtagtgcctattttgccatattctaataatgtcattgtaattgattacattagtgtaacttgaagacaggtacatttgactcataagtaaat

SEQ ID NO: 461608 - DNA, 201 bp, Homo sapiens
ataccatctcctaaattaatagttattaacataaagtaccttccctcccatcttttccatgctatttatatgttaagaaaccaggtcttggaggctgtctyactttctggatttaataccgtttatctcatttctttatcctttaaaattgctttatattggaagtaaaatccaaaagctcagttggactcagttaaacat

SEQ ID NO: 461609 - DNA, 201 bp, Homo sapiens
tgtttgttttatttcacagtatgatgtagatttcttgatgctaattcagtcttccatggcttgtgttattcctttttaatagtcacttgaaactatggagkaatcagcctctcatttgggtatgctgatggtgaagtcataacctcctttccctattaatactttttgtttctccttataagaatggagacctcagtcgag

SEQ ID NO: 461610 - DNA, 201 bp, Homo sapiens
ttgcagtgagcccagactgcaccactgcactccagcctgggcgacagagcgagactgcctctcaaaaaaaatataataataataataacaataaaagtttsaacccatgaaacaggaagacaaatttagactaaagaattctttcaaagataaagtgaaacctctgtaagttttagattgcttctggaaaagaaaatggag

SEQ ID NO: 461611 - DNA, 201 bp, Homo sapiens
tttttttctttgatccgtatgatttcggaatatttatttatttatttatggagatggagtctcgctctgttgcccaggctggagtgcaatggcaggatctyggctcactgcaacctctgcctcctgagttcaagcagttctcctgcctctgcctcccgagtagttgggattgcaggtgcccaccaccatgcctggctaatt

SEQ ID NO: 461612 - DNA, 201 bp, Homo sapiens
actagcaaatcacttaattttttcgagtctcagtttcctcacctgtggaaaaaagtggagtaatagtagtgatctctgagggcttttgtaaggattaaatyagatgatggtttaacatgctttcattgtgtcctggcagattgtaagcactagagcagtggtccctgctgttactaaaagtgatggcattgaagaaaggca

SEQ ID NO: 461613 - DNA, 201 bp, Homo sapiens
tcattaataaatattcagatacttgtatacttggtatacagatacaacagtttttatgttgtttgaagaaatataatggcagggagcatctgcttaccctmcttttgcatggtagatcccatgtaaacaagacaaagagctgtattggcagctggcctagaaaagcctctgaaaatagcaaaattgcagaaaatatttaat

SEQ ID NO: 461614 - DNA, 201 bp, Homo sapiens
aagaaaaagaacagcagctattacatgataaacagatggaaggtgtagtataccttttagacttaattttggtccagttttgtatttctttttattttttaactaacctaaaaatatcaaaggataaaataaaggctatattataaataatatgtgatataactgaaactaaagtcacaatttttgtttggttgttttagg

SEQ ID NO: 461615 - DNA, 201 bp, Homo sapiens
agcctgggcgacagagtgagaatttctcaataataaataaatgattgtcatttaaacaagttgttttaggacctcaaagcgatgaagttctaatatagatmcatttaagaaaaggataaaatagatgatggccatttctggttgtattagttttctagggatattgtagcaaattaccacaaactggctgatttcaaacaa

SEQ ID NO: 461616 - DNA, 201 bp, Homo sapiens
tttatattattttttagcctgaatatgggttatttgctaagtaccctttcagacacagtatgctttaatatttaagatctcattcaaaaaaaatttttctratttccctcataccctctctgtctgaaatatttaagatctaaggaatagttgagctgcttattttacatagaggcactattcttttaactcctacattct

SEQ ID NO: 461617 - DNA, 201 bp, Homo sapiens
agaaaaagaacagcagctattacatgataaacagatggaaggtgtagtataccttttagacttaattttggtccagttttgtatttctttttattttttaactaacctaaaaatatcaaaggataaaataaaggctatattataaataatatgtgatataactgaaactaaagtcacaatttttgtttggttgttttagga

SEQ ID NO: 461618 - DNA, 201 bp, Homo sapiens
aggataatagagaacctagaagttttttacttaagatactttacctaatactaggaataacaaaagagaaaatttacttagaatttcttctttgaaaaatstaaggtaattaagagttagcagctaagacttctctataaaccacttacttacctttaaaattttgctttagttggacaaaagggaagtcttttcctactt

SEQ ID NO: 461619 - DNA, 201 bp, Homo sapiens
cacttttaaaatagtcttttgagctacaagctgcaagtatttcagtatatactaaaatgcatgtcacataaagtagcaaaatttctgttttccgtatttcraatgattacaagattaatttttaccagtgccatttccacctaatctgaattaaacaaataaattcttttttgactttgaggtcagtcaactcatgtaaga

SEQ ID NO: 461620 - DNA, 201 bp, Homo sapiens
gaaaaagaacagcagctattacatgataaacagatggaaggtgtagtataccttttagacttaattttggtccagttttgtatttctttttattttttaactaacctaaaaatatcaaaggataaaataaaggctatattataaataatatgtgatataactgaaactaaagtcacaatttttgtttggttgttttaggag

SEQ ID NO: 461621 - DNA, 201 bp, Homo sapiens
ggtaaagattagagatagaaggagatctaatagaaatagcattgaaagagaaagacgacgaaatcggagtccttcccgagagagacgtagaagtagaagtygctcaagggatagacgaaccaatcgtgccagtcgcagtaggagtcgagataggcgtaaaattgatgatcaacgtggaaatcttagtgggaacagtcataa

SEQ ID NO: 461622 - DNA, 201 bp, Homo sapiens
tcttgcatgttttaactcttaaagattagattcgtagacaccatattaaagctatacaaatatttttgttttatctgacctacatgagtacaaattagcartcatgctgttttcctctaaaatgtattgtggaaaattccaggtgttcagtttatttcacctgattttttttaatagataacatggcattgttgtgtgact

SEQ ID NO: 461623 - DNA, 201 bp, Homo sapiens
ctatttctttaaagatctctgattccttttattgaagaatggtattaaaaccaagttctcgtgcctaggtgtgcttgttgctactagggtgtcattttggrcgctctcgctacatttatttttaaattattattgggggggtatttataaccgactctccaattctccagttttttttttttttttttttttgagacagag

SEQ ID NO: 461624 - DNA, 201 bp, Homo sapiens
caacagcaaccagactactaaagattttacttgtggaatttttttgtaaagtggcaaagggcttatagagaaaacagttctttaaagatgttcttgagagtttttttttttaacttactaatagactttatgttttagaacagtttttgtttacgttgagcacatacgacgtccccactacacacacagtttatcttctta

SEQ ID NO: 461625 - DNA, 201 bp, Homo sapiens
acaatggatgcagtcattccagcaccaacaggatccaagtaaggaaacaaattgaatttgaaagggcggggttggatatgtggaaatgggtagaagacacrtgatgggattaagggatatggaattgagattggtgtactggatcattttatggtcagaatttaatcttctcataaatagccttgccatagcatatatagc

SEQ ID NO: 461626 - DNA, 201 bp, Homo sapiens
ttggcagctcttcgagttgtctactgttctcctttgacatgttcctatcaatttttttttttttagcactttattgcttcctggcagtatacatgccccaractcatcttttatatttcctgtcgcagtcctagagtcagctatttctttaaagatctctgattccttttattgaagaatggtattaaaaccaagttctcg

SEQ ID NO: 461627 - DNA, 201 bp, Homo sapiens
tattagtcctactcagtttataaaaacctaggtcttagggttatgtcatcctgtctaaaaaggtttgcctatttttttgactaacgcattcacagtgagaratttataaatgtgatggttaattcatagtttattggggcaggttatattggaagatttccttattgctccaatatatgcattttatatatatataattat

SEQ ID NO: 461628 - DNA, 201 bp, Homo sapiens
ttatgttttcacaattttaagacttttaaaaaacagaatgaagattattattaaattttttaatttgcttagttgtatgacttctggaaattaatgcttcwtaaagaataggcagttttcaatttgatttgactttgacattttgtggttaaaattattctgtactcattctgctagctttgtggcactcagtttgattct

SEQ ID NO: 461629 - DNA, 201 bp, Homo sapiens
caggaagctttttggagaaaagaaaaagaacagcagctattacatgataaacagatggaaggtgtagtataccttttagacttaattttggtccagttttrtatttctttttattttttaactaacctaaaaatatcaaaggataaaataaaggctatattataaataatatgtgatataactgaaactaaagtcacaatt

SEQ ID NO: 461630 - DNA, 201 bp, Homo sapiens
taatttaatgtcactgaaaccagatgtttactgttacaaaatatgctgccaatttttgaattatggtatgaatattcacattcatggtttaggaccctgcrgtggaattgctgggtcagagggatgtgcatgtacgttttgttaagatgccataatggtaaattgcctttttttttttttttttttttttttttttttttt

SEQ ID NO: 461631 - DNA, 201 bp, Homo sapiens
ggtggcatgcacctgtagtcccagctactcgggaggctgaggcatgagaattgcttgaacctgggaggtggaggttgccgtaagccgagatcacactgctkcattccagcctgggcgacagagtgagaatttctcaataataaataaatgattgtcatttaaacaagttgttttaggacctcaaagcgatgaagttctaat

SEQ ID NO: 461632 - DNA, 201 bp, Homo sapiens
cgaagaagtagaagcatcgaaagcgttggagaggtgttaccggaacggcggcgacaagggtgttcccgaactagagtgggtaagtgatggagaacaattayacgtgggcacttgccggaccattacaacgttcttggtttctgtggcgaaggtagcataacttaaaataggctgcgtacgctgcttggcgcgaccgctgga

SEQ ID NO: 461633 - DNA, 201 bp, Homo sapiens
aagtagctgggactacaggtatatgccaccatgcccagctaatttctgtattttcagtagagtggaggtttcgccatgttggccaggctggtctcgaattcctggcctcaagtgatgaacccaccttggcctgccaaagtgctgggtttacaggcatgagccgccatgcttgtcctccacttttaaaatagtcttttgagc

SEQ ID NO: 461634 - DNA, 201 bp, Homo sapiens
attcatggtttaggaccctgcggtggaattgctgggtcagagggatgtgcatgtacgttttgttaagatgccataatggtaaattgccttttttttttttttttttttttttttttttttttttttgagacggagtctcgctctggcacccaggctggtggagggcagtggtgctatctcagctcactgcgacttccacct

SEQ ID NO: 461635 - DNA, 201 bp, Homo sapiens
gctcaaattgtaccagctttggccattggcagctcttcgagttgtctactgttctcctttgacatgttcctatcaatttttttttttttagcactttattrcttcctggcagtatacatgccccagactcatcttttatatttcctgtcgcagtcctagagtcagctatttctttaaagatctctgattccttttattgaa

SEQ ID NO: 461636 - DNA, 201 bp, Homo sapiens
gggtctcactctcttgctaggctggagttcagtggcatgatcacagctcactgcaacctccgcctccctggttcgagcgatcctcttgcctcagcctcccragtaactaggatcacagacatgtgccaccatgcctggctaatttgtgtattttttgtagagacaggggtctcactattttgcccaggctggtcttgaact

SEQ ID NO: 461637 - DNA, 201 bp, Homo sapiens
gtgtattttttgtagagacaggggtctcactattttgcccaggctggtcttgaactcctgaattcctcccaactcagcctcccacagtgctgggattatasgcatgagccaccgtgcctggctgatttatctctttcctcttacatttactataagcagcaagaaaaaaccaagcctcactttcaatactttgcttggaag

SEQ ID NO: 461638 - DNA, 201 bp, Homo sapiens
atcctccagatcctttctctctgttaacatggcagaaatgcaggatggtggccgctctgtgatcctgggtctctgcatgccggtgacagacatgaacccckttgtgactttaagcctctgggatttgagattgttactgcagcatgatatagcctatcctaaacaactcattagccattattagtatttctaagatacgct

SEQ ID NO: 461639 - DNA, 201 bp, Homo sapiens
ccccacatctcagacgatgggcggccgggcaaagacactcctcacttcctagatgtggtggcggccgggaagaggtgctcctcacttcctagatggggtggcagctgggcagagacgctcctcactttccagactgggcagccaggcagaagggctcctcacatcccagacgatgggcggccaggcagagacgctcctcac

SEQ ID NO: 461640 - DNA, 201 bp, Homo sapiens
tcctcacttctcagacggggcggccgggcagagacgctcctcacctcccagacgaggtcgcggccgggcagaggcgctcctcacatcccagacggggcggyggggcagaggcgctccccacatctcagacgatgggcggccgggcaaagacactcctcacttcctagatgtggtggcggccgggaagaggtgctcctcact

SEQ ID NO: 461641 - DNA, 201 bp, Homo sapiens
accaggagacgcagctcatccacgtctacctgcccctcacctcccacatcctccgcgccttcgtcaactctcagatccaagggcacaaggaggtgagtcckccctgccccggccgccgtctcggccacggcctttctttgtccctccgcccttccttcaagcccggcagcgcggtggccggccgccctagagaggttcttt

SEQ ID NO: 461642 - DNA, 201 bp, Homo sapiens
gacggctgggcagaggcactcctcacctcccggacggggcggctggccgggcggggggctgacccccccacctccctcccggacggggcggctggccgggyggggggctgacctccccacctccctcctggacggggcggctggcctggcgggggctgacccccacctctgtcccggacggggtggctgccgggcggagac

SEQ ID NO: 461643 - DNA, 201 bp, Homo sapiens
tctcctgcctcagcctcccgagtagctgggactacaggcgcccgccaccacgcctggctaatttttttgtattttttttttttaagtttttattttttttwattttttatttattattattatttttttaattgatcattcttgtgtttctcgcagagggggatttggcagggtcataggacaatagtggagggaaggtcg

SEQ ID NO: 461644 - DNA, 201 bp, Homo sapiens
ggaggggattatggaagatgtctttaacggaggtgattaaagtgaccactcacgtggttcccaggactcccgatggaaacaagcagatctgtggttttccytggcagctcctggacccaagtgtgtgtggctggagggggcctctgggggtgaggttattgctctgggcggccttttcagacccattgtctgagcagcact

SEQ ID NO: 461645 - DNA, 201 bp, Homo sapiens
catgccattctcctgcctcagcctcccgagtagctgggactacaggcgcccgccaccacgcctggctaatttttttgtattttttttttttaagtttttawttttttttattttttatttattattattatttttttaattgatcattcttgtgtttctcgcagagggggatttggcagggtcataggacaatagtggagg

SEQ ID NO: 461646 - DNA, 201 bp, Homo sapiens
aggcgcccgccaccacgcctggctaattttttgtatttttagtggagatggggtttcaccctgttagccaggatggtctcgatctcctgacctcgtgatcygcccaccttggcctcccaaagtgctgggattccaggcgtgagctgccgtgcccggccggggagatggatttatgtgtagtcggtccttctttgcagagca

SEQ ID NO: 461647 - DNA, 201 bp, Homo sapiens
tcccgagtagctgggactacaggcgcccgccaccacgcctggctaattttttgtatttttagtggagatggggtttcaccctgttagccaggatggtctckatctcctgacctcgtgatctgcccaccttggcctcccaaagtgctgggattccaggcgtgagctgccgtgcccggccggggagatggatttatgtgtagt

SEQ ID NO: 461648 - DNA, 201 bp, Homo sapiens
gttgtgtgtagcaggggtttaatgggggtctttttagctccctataagcattttgaagtttgtgtgttatggaaatctgaagtgaaattacacaaagtaatttgatttaccccaggaagtactgtaggggccggagaaactcaggttaggtaatatctttcaagaagcccagttacgttattttccaggaatcttccaaaa

SEQ ID NO: 461649 - DNA, 201 bp, Homo sapiens
tgttgtgtgtagcaggggtttaatgggggtctttttagctccctataagcattttgaagtttgtgtgttatggaaatctgaagtgaaattacacaaagtaatttgatttaccccaggaagtactgtaggggccggagaaactcaggttaggtaatatctttcaagaagcccagttacgttattttccaggaatcttccaaa

SEQ ID NO: 461650 - DNA, 201 bp, Homo sapiens
ctgttgtgtgtagcaggggtttaatgggggtctttttagctccctataagcattttgaagtttgtgtgttatggaaatctgaagtgaaattacacaaagtaatttgatttaccccaggaagtactgtaggggccggagaaactcaggttaggtaatatctttcaagaagcccagttacgttattttccaggaatcttccaa

SEQ ID NO: 461651 - DNA, 201 bp, Homo sapiens
actaaaaatacaaaaattacctgggcgtgctggtgcatgcctgtaatcccagctacccgggaggctgaggcaggagaattgctggaacctgggaggctgckgttgcagagagccgagattgcaccactgcactccagcctgggggacagaatgagactccgtctcaaaaaacaaaacaaaacaacccaaaccaaaaataaa

SEQ ID NO: 461652 - DNA, 201 bp, Homo sapiens
ggagggggcctctgggggtgaggttattgctctgggcggccttttcagacccattgtctgagcagcactgggggcccagccagtgccctctgctagccgcygggccctctgccacctctagggagagttttgagaactcgcccagagcagaagatgggggccggcgccctggactctgtccagtgaccccgtgtgctcctc

SEQ ID NO: 461653 - DNA, 201 bp, Homo sapiens
tccaagttgctgcaaaagacatgatttcattcttttctatgactgagtagaattccatgatgtatatgaaccacattttctgcatctactcatcggttgaygggcacttaggttgattccatatctttgcaactgtgaattgtgctgcgataaatgggcatgtgcaggtatttttttttttttttttttttttttttgcgg

SEQ ID NO: 461654 - DNA, 201 bp, Homo sapiens
catctgtaaaatgagatcacaaatgtacctacttacagtgtttttaggaacaaagagatggtctatgaagtgtccggtagacttccagacaccagcactgyatgagggctccaatctccaagtccttgccagtactggtgactgcctgtctttgtgattatagccattgtggtgggggtggtgacatctcactgtggttga

SEQ ID NO: 461655 - DNA, 201 bp, Homo sapiens
acccagctaatttttgtatttttgtatttttagtagagatggggtttcaccatgttggccagggtggtctcgatctcctgacctcatgatccacctgcctyggcctcccagagtgctaggattccaggcgtgagccaccgcacccgactgagcatcttttcaggtgctcattggccatttctgcatcttatttagataaat

SEQ ID NO: 461656 - DNA, 201 bp, Homo sapiens
aagacagcaaccttcttctctgactgtaggttggttgttctgacgatgcggcagtgtttcctcacctgggttcctcctcctgttctcctgggggaaaaggytgtagctgagaattggcagagaggccgtggtggaggagggaagattctctgctttgtgcggaggtcactctcgggactcagtgtggcagggtctgttgac

SEQ ID NO: 461657 - DNA, 201 bp, Homo sapiens
cctcagcctcccaaagtgttggcattacaggtgtgtgctatcacgctggccttatttttattttttgaaatggagtcttgctctgttgcccaggcaggagygtagtggctcgatcatggctcactgtagcctccgcctcaccctcccgaatagctgggactataggtgcgtgccacggtgcctggcccgaatggctttgtt

SEQ ID NO: 461658 - DNA, 201 bp, Homo sapiens
cagtttgttaatttcagaataacatagtagcttagagaaagtttttttgttttgagactgagtctcgctctgttgcccaggctggaatgcagtggcgcgawcttggctcaccgcaacctctgcctcccgggttcaagcaattctcctgcctcagcctcccaagtagctgggactacaggcgcccgccaccatgcctaacta

SEQ ID NO: 461659 - DNA, 201 bp, Homo sapiens
gtggtggctcacgcctgtcatcccagcactataggaggctgaggcgggtggatcacctgaggtcaggagttcgagactagcctggacaacatggtgaaacmccatctctactaaaaatacaaaaattagccgggcgtggtggcgggtgcctgtaatcccagcaatttgggaagcagaggcgggtagatcacttgaggtcag

SEQ ID NO: 461660 - DNA, 201 bp, Homo sapiens
gccaccctttctcccgggctcccagggtccccacaggccactctttgagcagcagggtcctaggacggggtcacgcaggttgccgtggaggacatctgtcrggggggatgccagactcgactgccaggtgagctccaggccttgagtgtctcctctcctgtgtgcttgctccctcagtgcaatagggtctgacacgacccc

SEQ ID NO: 461661 - DNA, 201 bp, Homo sapiens
aaaaaaatttgttcattttatggtgattaaattatgccccacagtattgtttgcattagggacaaaaccttctgccccatttcgctcccttccatgacccytttttttttttttttttttttgagacagagtctcactctgttgcccaggctggagtgcagtggtgccatctagcctcactgcaacctccatctcctaggt

SEQ ID NO: 461662 - DNA, 201 bp, Homo sapiens
ttcacattttattcatatgtgtactcaggaaacatatacttccttatataagtgtgctcatgtttccctagcgtagtatattctctagctttcttttgttycttttatttttatttatttatttttttgagacgtagtttcactcttttgcccaggctggagtgcagtggtgcgatcttggctcactgcaagctccacctc

SEQ ID NO: 461663 - DNA, 201 bp, Homo sapiens
aagagacgcagcaggtcctgaggtgcagccccagggccaccctttctcccgggctcccagggtccccacaggccactctttgagcagcagggtcctaggayggggtcacgcaggttgccgtggaggacatctgtcgggggggatgccagactcgactgccaggtgagctccaggccttgagtgtctcctctcctgtgtgct

SEQ ID NO: 461664 - DNA, 201 bp, Homo sapiens
gaccgttttagttctgttttcacattttattcatatgtgtactcaggaaacatatacttccttatataagtgtgctcatgtttccctagcgtagtatattytctagctttcttttgttccttttatttttatttatttatttttttgagacgtagtttcactcttttgcccaggctggagtgcagtggtgcgatcttggct

SEQ ID NO: 461665 - DNA, 201 bp, Homo sapiens
gagtctcgctctgtcgcccaggctggagtgcagtggtgtgatctcggctcactgcaagctctgcctcccgggttcatgccattctcctgcctcagcctccmgagtagctgggactacaggcgcccgccaccacgcccggctaattttttgtatttttagtagagacggggtttcaccatgttagccaggatggtctcgatc

SEQ ID NO: 461666 - DNA, 201 bp, Homo sapiens
tctttttttttttttcttgagacggagtctcgctctgtcgcccaggctggagtgcagtggtgtgatctcggctcactgcaagctctgcctcccgggttcaygccattctcctgcctcagcctcccgagtagctgggactacaggcgcccgccaccacgcccggctaattttttgtatttttagtagagacggggtttcacc

SEQ ID NO: 461667 - DNA, 201 bp, Homo sapiens
ctggccgcgttccgaggcgctttcccggggctctcagaggcgtcctcggggacagtttcctcctcgccccgttcctggtgccctgctcttctgccctgccyggtcacgctgagcgatggcactgggggccacttccccggacttgggcgcctttcctagccacatcctctctcccaagctcctgtcggttgtgtggtcttg

SEQ ID NO: 461668 - DNA, 201 bp, Homo sapiens
cttccatcaggaggctttgcaggacagagaccttgtctggctgtccctgcagtgcctcccaccggctacacacatttcgtttttgtttttatttttatttwacttatttatttattgtgagacagagtttcactgtcacccagactggagtgcagtggcgcgatcttggctcactgcaacctccacctgccgggttcaagc

SEQ ID NO: 461669 - DNA, 201 bp, Homo sapiens
cgcgattatggctcactgcaacatccacctcctgggttcaagcgattctcctgcctcagcctcccgagtagctgggattacaggcgtgcgccaccacaccragttaattttgtatttttagtagagatggggtttcatcatgttagccaggctgatctcgaacccctgacctcaggtgatccacccgccttggcctcccaa

SEQ ID NO: 461670 - DNA, 201 bp, Homo sapiens
atgttgcccaggctggtcttgaactcctggccacaggtgatccacatacttcagcctcccaaagtgctgggattacaggcgtgacccatagcacctggccyacagcatttattttattttattctattttattttacttttgagatggagtctcaatctgtcacccaggctggagtgcagtggcgcgattatggctcactg

SEQ ID NO: 461671 - DNA, 201 bp, Homo sapiens
tatggtggcacatgcctgtaatcccagctactcgggaggttgaggcatgagaatcgctggaaccctggacactgaggttgcagtgagccaagattgtgccrctgcactctagcttgggtgacagagtaagactccggcaccccctccaaaaaaagcagattcccagtccccaccccagccctcctgttggagagacgctgg

SEQ ID NO: 461672 - DNA, 201 bp, Homo sapiens
tgctcacctgctctgtgttgttactgtctgaagttcctggtgaaagacactgggcgggagatgggtgtgtgtgtttgaagtttcgttaccttctgatttgyggataactcgcttggagattcacagacttgtgaggctgaaaggatcttgaatgttgcttgtgggttgtttcccctttttttgttgcaaagaggggtcaca

SEQ ID NO: 461673 - DNA, 201 bp, Homo sapiens
ggaggagtggggctcccggggtggctcatggacctgctgggtctcccgtggctcagcttctgggggaccggctgctgccgtctgacaggtgctccccagcractaacacagtgtctctccccccatcatgatgtcaggacttcctcccagctgacatccaggctcagtttgccatcagccgggagctgatccggaacatct

SEQ ID NO: 461674 - DNA, 201 bp, Homo sapiens
cctgttgctgggcatcccgatattgggcaggtgagacacagacaccgagtgcctgatgcccgtctggagcaacaccgtggctctctctgtcccttgcttcrttgtctcagttccattacgacagattctgatgggagttttcattgttcatcctgggcattgagtaattgatgagctaacactgtccttgggaggtgtgga

SEQ ID NO: 461675 - DNA, 201 bp, Homo sapiens
accaccatgcccagctaatttttgtatttttagtagagatgggattttgccatgttggccaggctggtctctttaactcctgacctcaggtgattcacccrcctcaacctcccagaatgctgagattacaggcgggagccaccgcacccggcctaagagctatacaaagtttaaaagttgtatttccatatacgaaggcgt

SEQ ID NO: 461676 - DNA, 201 bp, Homo sapiens
ccatgttggccaggctggtctctttaactcctgacctcaggtgattcacccgcctcaacctcccagaatgctgagattacaggcgggagccaccgcacccrgcctaagagctatacaaagtttaaaagttgtatttccatatacgaaggcgtcacagggtttctccatttagtaaaggcctggtgagagaagatgcacttg

SEQ ID NO: 461677 - DNA, 201 bp, Homo sapiens
caggaatgacatggacaagacttctttcctttccagataacagtctgaatgtgattttcagaggtgtccctggtgttgactttgcaggattttgtaaatcygcgtggagatcatggatctctgtggtcactttgaggatttaggctggatggtttggagggtttagggaggtgccagagactccagatgggaagaagtgtt

SEQ ID NO: 461678 - DNA, 201 bp, Homo sapiens
ttaacttgttgtacatgcactccgtcagaggtctgagtggggcttccctcctcccagctgctgcggcacagccttattgtgtgtcaagaagctacagttcrcaggtacagtggcccacgcctctaatcccagcgctcggagaggccgaggctggatggtcccttaagcccaggcgtttgagaccagcctggacaacatagc

SEQ ID NO: 461679 - DNA, 201 bp, Homo sapiens
tgctgggattacaggcgtgagccactgcgcccggcaagattattattcgagtgttttgttggtttgtttgttttgagacagagtctcgttctgtcgcccaractggagtgtggttgcgcgatctcagctcactgcaacctctgcctcccggattcaagcaattctcctgtctcagcctctggagtagctgggattacaggt

SEQ ID NO: 461680 - DNA, 201 bp, Homo sapiens
gtgagccactgcgcccggcaagattattattcgagtgttttgttggtttgtttgttttgagacagagtctcgttctgtcgcccaaactggagtgtggttgygcgatctcagctcactgcaacctctgcctcccggattcaagcaattctcctgtctcagcctctggagtagctgggattacaggtgcatgccgccatgccc

SEQ ID NO: 461681 - DNA, 201 bp, Homo sapiens
tggtctcgaattccctacctcaggtgatctgcctgcctcagcctcccaaagtgctgggatcacaggtgtgagccaccgtgcccagccctttttttttttttctcgagatggagtttcacactgtcacccaggctggagtgcagtggtgtgatcttgactcactgcaacctctgcgtccagggttcaaacaattctcctgtc

SEQ ID NO: 461682 - DNA, 201 bp, Homo sapiens
atatgactaaaagtaggatttgcgggtcacaggatatctgcattccaatttattagacattaacaagttgttctccaaagtatctgtaccaatttacactycctccagcagtgtgggaatattgctgtttcttcctatctgctgtgcgtgaaagggtatcgtgttgtttgaatttgcatttctctgatgtaagtagatgtc

SEQ ID NO: 461683 - DNA, 201 bp, Homo sapiens
tgtggtcctggctcagggatggaccccactgtagaccggggcaggtgcagggctgcggggaaactccagccttttggcatctgggacagagctgtggcttsagcccagccttggtgcaggcagggagactggcacccggcagccttggcccaccagagccttcagctgcatgactgacaggtggggaagcccttgctgtgc

SEQ ID NO: 461684 - DNA, 201 bp, Homo sapiens
actcattagccattattagtatttctaagatacgctaaacaatgcattacccattattagtttttttgtttgtttggttgtttttttttttttttttttttgagacagactctcactctgtcgccgtggctggagggcagtggcacaatctcagctcactgcaacctccacccccaaagttcaagcgattttcatgcctca

SEQ ID NO: 461685 - DNA, 201 bp, Homo sapiens
ttttgtgtgtttagtagagatggaatttcgccacgttggccaggcaggcctcaaactcctgaccttaggtgatccacctgcctcggcctcccaaagtgctrggaattcaggcgtgagccactgcgcccggccaatccttttttgtttctaaagctgcggtctctggggtgggaggcccgagatgtcagctgtgaaaagaat

SEQ ID NO: 461686 - DNA, 201 bp, Homo sapiens
aactcattagccattattagtatttctaagatacgctaaacaatgcattacccattattagtttttttgtttgtttggttgtttttttttttttttttttttgagacagactctcactctgtcgccgtggctggagggcagtggcacaatctcagctcactgcaacctccacccccaaagttcaagcgattttcatgcctc

SEQ ID NO: 461687 - DNA, 201 bp, Homo sapiens
gatatagcctatcctaaacaactcattagccattattagtatttctaagatacgctaaacaatgcattacccattattagtttttttgtttgtttggttgkttttttttttttttttttttgagacagactctcactctgtcgccgtggctggagggcagtggcacaatctcagctcactgcaacctccacccccaaagtt

SEQ ID NO: 461688 - DNA, 201 bp, Homo sapiens
cgcctgtcaatcccagcactttgggaggccaaggcgggcggatcacgaggtcaggagatagagaccatcctggctaacacggtgaaaccccgtctctactwaaaatacaaaaaattaggccgggtgcgatggctcacgcctgtaatcccagcactttgggaggccgaggcgggcggatcatgaggtcaggagatcgagacc

SEQ ID NO: 461689 - DNA, 201 bp, Homo sapiens
tggccaggcgcggtggctgacgcctgtcaatcccagcactttgggaggccaaggcgggcggatcacgaggtcaggagatagagaccatcctggctaacacrgtgaaaccccgtctctacttaaaatacaaaaaattaggccgggtgcgatggctcacgcctgtaatcccagcactttgggaggccgaggcgggcggatcat

SEQ ID NO: 461690 - DNA, 201 bp, Homo sapiens
agcctgggtgacaaatggggaccttgtttcgaaaagaaaaaaaaaggaaataagaaaaagaaaatgctggccaggcgcggtggctgacgcctgtcaatccyagcactttgggaggccaaggcgggcggatcacgaggtcaggagatagagaccatcctggctaacacggtgaaaccccgtctctacttaaaatacaaaaaa

SEQ ID NO: 461691 - DNA, 201 bp, Homo sapiens
gtgccgctgcactccagcctgggtgacaaatggggaccttgtttcgaaaagaaaaaaaaaggaaataagaaaaagaaaatgctggccaggcgcggtggctsacgcctgtcaatcccagcactttgggaggccaaggcgggcggatcacgaggtcaggagatagagaccatcctggctaacacggtgaaaccccgtctctac

SEQ ID NO: 461692 - DNA, 201 bp, Homo sapiens
gttcaagcaattcttgtgcctcagcctgcggagtatctgtatttcctgttttttaatgctatggtatttatttatttatttatttatttatttatttattttgagacggagtctcactctgttgcccaggctggagtgcagtggtgtgatcttggctcactgcaagctctgacttctgggttcacaccattctcctgcctc

SEQ ID NO: 461693 - DNA, 201 bp, Homo sapiens
ggttcaagcaattcttgtgcctcagcctgcggagtatctgtatttcctgttttttaatgctatggtatttatttatttatttatttatttatttatttattttgagacggagtctcactctgttgcccaggctggagtgcagtggtgtgatcttggctcactgcaagctctgacttctgggttcacaccattctcctgcct

SEQ ID NO: 461694 - DNA, 201 bp, Homo sapiens
gggttcaagcaattcttgtgcctcagcctgcggagtatctgtatttcctgttttttaatgctatggtatttatttatttatttatttatttatttatttattttgagacggagtctcactctgttgcccaggctggagtgcagtggtgtgatcttggctcactgcaagctctgacttctgggttcacaccattctcctgcc

SEQ ID NO: 461695 - DNA, 201 bp, Homo sapiens
tgtccaccaccatgcctggctaattttttgtatttttagtagagatgaggtttcaccatgttcgtcaggctggtcttgaactcctgaccttaggtgacctrcccgcctcggcctcccaaagtgctgggattacaggcgtgagccactgtgcccggccggcttcccagttctgagccgagtgaatgacagctgtgccctggg

SEQ ID NO: 461696 - DNA, 201 bp, Homo sapiens
catgttcgtcaggctggtcttgaactcctgaccttaggtgacctgcccgcctcggcctcccaaagtgctgggattacaggcgtgagccactgtgcccggcyggcttcccagttctgagccgagtgaatgacagctgtgccctgggtgggagctgcccgtccacatctgttcctggtggctccctgggagcgtttacgcttt

SEQ ID NO: 461697 - DNA, 201 bp, Homo sapiens
aagtggacatagttgtgaatgtgggagcttgctgcctagttcctatttcttgggaaagtggcctccaggctactcatattagtttgaagagagtgatcagmgtgtgcccgtgagggctgtgcttcccctgagccccggagctcctgagtggcttggtgaatggtgaacccacctgctgtggagtcggggctttttaagctg

SEQ ID NO: 461698 - DNA, 201 bp, Homo sapiens
gatcagagtgtgcccgtgagggctgtgcttcccctgagccccggagctcctgagtggcttggtgaatggtgaacccacctgctgtggagtcggggcttttyaagctggaaacggggcgctcaggtgcccgtgacgtttttcgtgctgaagaggaaattcgatgtctttgctggtgtggaaagtcttgggttttcttcctct

SEQ ID NO: 461699 - DNA, 201 bp, Homo sapiens
agcacgtccttcctgcagctgctgtctctcctacctaccctgcgcccccttccctgtgcccccttcctaggcctgcgtttctctctcctgttactgatgcrgagacaacacccttgttctcctccgtgcccctcctgggcgtgcccgttttgcacacggctcacagcgttatatgggaactcgggttttctgcagtgcttg

SEQ ID NO: 461700 - DNA, 201 bp, Homo sapiens
gattccacactgtccccgggaggtgcttggtgccgtgggtgccgtccagcactttgggaatggcaggctggaggcggccgtggtggggctggagaggcggtagacagccgccgtgttaggagcatcactgtgagatggccagggtctcagggaccaggttggacttggacatgtgagtggccgggtgtgtcctcagtgaag

SEQ ID NO: 461701 - DNA, 201 bp, Homo sapiens
cagcttctgggggaccggctgctgccgtctgacaggtgctccccagcgactaacacagtgtctctccccccatcatgatgtcaggacttcctcccagctgwcatccaggctcagtttgccatcagccgggagctgatccggaacatctacaatagctttcacaagcttcgcgacagggccgagcggatcgcgtcgcgggcc

SEQ ID NO: 461702 - DNA, 201 bp, Homo sapiens
gacgcagctcatccacgtctacctgcccctcacctcccacatcctccgcgccttcgtcaactctcagatccaagggcacaaggaggtgagtccgccctgcyccggccgccgtctcggccacggcctttctttgtccctccgcccttccttcaagcccggcagcgcggtggccggccgccctagagaggttctttagtggag

SEQ ID NO: 461703 - DNA, 201 bp, Homo sapiens
acctcgccaccttccaaatgcctggtgaaggctgaaggagaaggggccgccctggctcagggagcacgctggtgatcgggccttggtgctcccgtcgccgkctgggccgggtgcgaaaggcggctgtttgctccgcagcaggagaacgcgattcagacgatggagctgcggaactacttctccctgtactgcctgcaccag

SEQ ID NO: 461704 - DNA, 201 bp, Homo sapiens
tgagatcatgccactgcactccagcctgggtaacagagcaagactctgtctcaaaaaaaaagccaaatctgtaaactttctgaaaacattatgagatttasacacagacctacctaccttccttccttcctctctctctctttctttctctctctctttcttttttccttttttgttttttttagttcatcagctatcata

SEQ ID NO: 461705 - DNA, 201 bp, Homo sapiens
agcactttgggaggctgagatgggcagatcacctgaggtcaggagtttgagaccagcctggccaacatggtgaaaccccatctctactaaaaatacaaacwttagccaggcgtggtggcgggcacctgtaatctcagctactcgggaggctgaggcaggagagaatcgcttgaacctgggaggcggaggttgcagtgagct

SEQ ID NO: 461706 - DNA, 201 bp, Homo sapiens
ggaggagccccggccccgcctgctgatcttgttctcttcgcttccctttcagatgagcaaggtgtggaacgacctgaggcccaagctcagctgcctctttscgggaccacacagcaccctgaccccaccgtgctccccgccggaggacggcctgtgtcctcactagcgcctgaggctgaggtggtgctccctgcggccgca

SEQ ID NO: 461707 - DNA, 201 bp, Homo sapiens
tcacgattccacggcaggcagatttgcagccctttggtcctgggtgcagggatcgaagcgtgggtgtctgtgaccacaggtcacatgtcgctggtccactyctcatttgggcttcctctgtgcaggatgggcagcactggttctgccagaggtttgaggagctggcgcacctgagggcccctccctccctgtcactggcag

SEQ ID NO: 461708 - DNA, 201 bp, Homo sapiens
tgggttcaagcaattcttgtgcctcagcctgcggagtatctgtatttcctgttttttaatgctatggtatttatttatttatttatttatttatttatttattttgagacggagtctcactctgttgcccaggctggagtgcagtggtgtgatcttggctcactgcaagctctgacttctgggttcacaccattctcctgc

SEQ ID NO: 461709 - DNA, 201 bp, Homo sapiens
ctgctgagtagtatccattgtatgagcatagaacaatttgtttatccgttggctgttcatgaacctctggcttgtttccaacatctggctattttttttttcttttttcttttgagacagagtctcactctgttgcccaggctggagtgcagtggcatgatctcagctcactgcaaactccgccttcagggttcaaatggt

SEQ ID NO: 461710 - DNA, 201 bp, Homo sapiens
catgatttcggctcactgcaacctctgcctcccgggttcatgccattctcctgcctcagcctcccgagtagctgggattacaggcacctgccaccacgccyggctaatttttggtatttttagtagagtcagagtttcaccatgttagccaggatggtcttgatctcctgacctcgtgatccgcccgcctcggcctcccaa

SEQ ID NO: 461711 - DNA, 201 bp, Homo sapiens
gtggcatgatttcggctcactgcaacctctgcctcccgggttcatgccattctcctgcctcagcctcccgagtagctgggattacaggcacctgccaccaygcctggctaatttttggtatttttagtagagtcagagtttcaccatgttagccaggatggtcttgatctcctgacctcgtgatccgcccgcctcggcctc

SEQ ID NO: 461712 - DNA, 201 bp, Homo sapiens
agtggcatgatttcggctcactgcaacctctgcctcccgggttcatgccattctcctgcctcagcctcccgagtagctgggattacaggcacctgccaccrcgcctggctaatttttggtatttttagtagagtcagagtttcaccatgttagccaggatggtcttgatctcctgacctcgtgatccgcccgcctcggcct

SEQ ID NO: 461713 - DNA, 201 bp, Homo sapiens
acgcctggctgattttttttgtatttttttagtagagacgaggtttcaccgtattagccaggatggtctcgatctcctgaccttgtgatccgcctgcctcrgcctcccaaagtgctgggattacaggtgtgagccaatacgcctgggagtatgttttttctacatatgcatgcttacaatagggcacagtaagagattaac

SEQ ID NO: 461714 - DNA, 201 bp, Homo sapiens
tttccaaatacattggagatttttggctagaaatgtattactgatttttattaaagtgtaatttacataagggaaatgcacagacttttgttttgttttgkgacagggtcttgctctgtcacccaggctggagtgcaggggtgcaattacacagctcactgctacctctgcctcctgagctcaagtgatcctccctcctca

SEQ ID NO: 461715 - DNA, 201 bp, Homo sapiens
agcgggccctgcacaagtacagcctgatgaagaggcagatgatgagcgccaccgcgcagaaccgcgagccggagtccgtggagcagctggagtcccgcatygtggaggtgggtggcggggcggccgagcaggcccgtgggagcctttcccctcccggccatggtgggacccggagccgtcctggtgggctcccctgggttg

SEQ ID NO: 461716 - DNA, 201 bp, Homo sapiens
tgggaggtaaagccaggcgtgctgcccaccgggggcggagggagcgagcccatctcctggaccctgtggtcctggctcagggatggaccccactgtagacyggggcaggtgcagggctgcggggaaactccagccttttggcatctgggacagagctgtggcttgagcccagccttggtgcaggcagggagactggcaccc

SEQ ID NO: 461717 - DNA, 201 bp, Homo sapiens
gaaggcagacgtgtcggtgcacattcccaaggcactctccaaacactagagggatccagcagcggagctgacgatgtatgaagactgccttttctctcctstcggcattctggattagagctgattattccccccaccgtttcctgccacagccctcacgttcccacctgtagccctggctttattctgcgtgtgtgagaa

SEQ ID NO: 461718 - DNA, 201 bp, Homo sapiens
tccggcctagtttctttttttttttaaacagggtgtcttctgctccccaggctagactgcagtagcgcaatcatagcttactgcagccttgaacttctgggctcaaaggaccctcctgcctcagctttggaagcagctggaactacagattcacaccaccacgcctgactggttttttttcttttttttggtagaaatagg

SEQ ID NO: 461719 - DNA, 201 bp, Homo sapiens
tcccgggttcaagcaattcttatgcctcagtctccgcacagctgggactacaggcttgcgccaccacgcccgccaattttttgtattttttttttttttttgagacacagtctctctctgtcgcccaggctagagtgcagtggcatgatttcggctcactgcaacctctgcctcccgggttcatgccattctcctgcctca

SEQ ID NO: 461720 - DNA, 201 bp, Homo sapiens
cagacggggtggtggccgggcagaggctgcaatctcggcactttgggaggccaaggcaggcggctgggaggtggaggttgtagccagccgagatcacaccrctgcactccagcctgggcaccattgagcactgagtgaactagactccgtctgcaatcccggcacctcgggaggccgaggctggtggatcactcacggtta

SEQ ID NO: 461721 - DNA, 201 bp, Homo sapiens
aaattagccaggcatggtggtacgtgtctgtagttccggttacttgggaggctgaggcaggaggatcgcttgagcccaagagactgaggctacagtgagcyaagatcgtgccactgcactccagcctaggtgacaacagatcaagactctgtctccaaaaaaaagagagaaagctttgcaacgtgtctactgaaaatattt

SEQ ID NO: 461722 - DNA, 201 bp, Homo sapiens
cccaccgggggcggagggagcgagcccatctcctggaccctgtggtcctggctcagggatggaccccactgtagaccggggcaggtgcagggctgcggggraactccagccttttggcatctgggacagagctgtggcttgagcccagccttggtgcaggcagggagactggcacccggcagccttggcccaccagagcct

SEQ ID NO: 461723 - DNA, 201 bp, Homo sapiens
gcgtcctaggtgcagtcatctgttaccgaggcagggtccagcagctatagccagaggaagtaactaccttgtgagaaggggacgcttcctaggaactgacrtggttctgggctcttggttctgtaatcaactccccggacattgtgtgacatcagcgttagaaggtccaggatggccgggcacggtggctcacacctgtaa

SEQ ID NO: 461724 - DNA, 201 bp, Homo sapiens
tcccagctgacatccaggctcagtttgccatcagccgggagctgatccggaacatctacaatagctttcacaagcttcgcgacagggccgagcggatcgcrtcgcgggccatcgacaatgcggcagatcttctcatattcgggaaggagctaaggtaggtgacctttcagcttctgcaggggcacgcgcggtgggacggga

SEQ ID NO: 461725 - DNA, 201 bp, Homo sapiens
  misc_feature (1)...(201): n = A,T,C or G
agcgcgggtcacgtgggggcgggggcgggtcctcgccgcgtggagctcgaggctgactccggagggaccggagcggttcgctctgcgcgggtgctcacggnacgggcattgggtgcatgtggcttctatcttgttttttgccggagtggaggacaaccactggttgggggatgtcttaatcatcctagaaaacaacccagt

SEQ ID NO: 461726 - DNA, 201 bp, Homo sapiens
catgcaggtgatgatggtttttgtttcttttttggacacacagagtgatccctgcaggcctggaggagtggggctcccggggtggctcatggacctgctgkgtctcccgtggctcagcttctgggggaccggctgctgccgtctgacaggtgctccccagcgactaacacagtgtctctccccccatcatgatgtcaggac

SEQ ID NO: 461727 - DNA, 201 bp, Homo sapiens
tgggggagagtgtctcactgttagcccaagctggtcttgaactcctggcttagagcaaaccttctgcgttggcctcccaaagtgctgggattataggcatragccaccgcgctcggcccaggggtaagctttaatttccctcaaaactctttctaaagaaacgtgacttcattttaaggccaaatttatagtttccgtgaa

SEQ ID NO: 461728 - DNA, 201 bp, Homo sapiens
aactcctggcttagagcaaaccttctgcgttggcctcccaaagtgctgggattataggcatgagccaccgcgctcggcccaggggtaagctttaatttccmtcaaaactctttctaaagaaacgtgacttcattttaaggccaaatttatagtttccgtgaaattataagttttatgggtttgttgcatttctattgatat

SEQ ID NO: 461729 - DNA, 201 bp, Homo sapiens
atttattagacattaacaagttgttctccaaagtatctgtaccaatttacactccctccagcagtgtgggaatattgctgtttcttcctatctgctgtgcrtgaaagggtatcgtgttgtttgaatttgcatttctctgatgtaagtagatgtctgattcaagcagaaaatgaaattattaaaaggatctaaaaggccaag

SEQ ID NO: 461730 - DNA, 201 bp, Homo sapiens
accactgtgcctgcaccactgtgcctggctaattttgtattttttagtagagacaggatttctccatgttggtcaggctggccttgaactcccgacctcargtgatcggccccctttggcctcccaaagtgctaggattacaggtgtgagccactgcatttggctcatatctggcatttttaccttctacagtgggaagat

SEQ ID NO: 461731 - DNA, 201 bp, Homo sapiens
aagaggtcttttgcatacttgttttttttttaatgtaataaaggggttgactctgtgattctttaactaacatctaaaattgaccctgagctaattaattytcaatctttcatgttttctcgtatttgcatttcagattatacgtttccctccaggcattgctctctgtctgcttcccttgagttctgataagtagaactt

SEQ ID NO: 461732 - DNA, 201 bp, Homo sapiens
aggtttcaccatgttggccatgctactctcgaactcctgacctcaaatgatctgccctccttggtctcccaaacagctgggataacaggggtgagccactstgcccaggcttatttatttatttttttgagaaggagtctcgctctgtagccaggctagagtgcagtgacgcaatctcggctcactgcaacctccgcctcc

SEQ ID NO: 461733 - DNA, 201 bp, Homo sapiens
cggctcacagcgttatatgggaactcgggttttctgcagtgcttgatggagccttaggggtcggggggtctggggcatctggctctcccagcatatgtgtygggagagtcgccggctttgcgaaggcctgagaaaggcaaggcaggccgggctgatgagcaggagggcgggcagctgtcccgcgggaacgcaggccttgtt

SEQ ID NO: 461734 - DNA, 201 bp, Homo sapiens
gagtctcaggcgggaccctttccgaggggtcacttgggaacaggtaggctgtgattggatcggaatgctgctgctatctcagcttgtaaagcaatttggcrttgctggaggggtcctctgcaggtgtaggggactgtgtttccttcaggcttcacagaagtagactccagaggctaccataatggtgtaatttagagatag

SEQ ID NO: 461735 - DNA, 201 bp, Homo sapiens
gattatggaagatgtctttaacggaggtgattaaagtgaccactcacgtggttcccaggactcccgatggaaacaagcagatctgtggttttccttggcakctcctggacccaagtgtgtgtggctggagggggcctctgggggtgaggttattgctctgggcggccttttcagacccattgtctgagcagcactgggggc

SEQ ID NO: 461736 - DNA, 201 bp, Homo sapiens
catcctaattgccatcatctcctgtctgtacctgagaggtgaccattgttctcagtttgggatggaccgttttagttctgttttcacattttattcatatrtgtactcaggaaacatatacttccttatataagtgtgctcatgtttccctagcgtagtatattctctagctttcttttgttccttttatttttatttatt

SEQ ID NO: 461737 - DNA, 201 bp, Homo sapiens
gctgctgtgcccagctgctagccatacaaattttgataaacagtaaatactctggaaatgttcacaggaagaagacaaacttttcaacttagagcaggggwcttccaactgggctgcacatttgaattatctgaggaactttaaaaaaaatcctcccccacaacctccgcctcccaggttcaagcaaatctcctgcctcag

SEQ ID NO: 461738 - DNA, 201 bp, Homo sapiens
tccttatataagtgtgctcatgtttccctagcgtagtatattctctagctttcttttgttccttttatttttatttatttatttttttgagacgtagtttcactcttttgcccaggctggagtgcagtggtgcgatcttggctcactgcaagctccacctcctgggttgacgccattcttctttctgcctcagcctcctga

SEQ ID NO: 461739 - DNA, 201 bp, Homo sapiens
cggtgctccctccccggccctctcttacctcgccaccttccaaatgcctggtgaaggctgaaggagaaggggccgccctggctcagggagcacgctggtgwtcgggccttggtgctcccgtcgccgtctgggccgggtgcgaaaggcggctgtttgctccgcagcaggagaacgcgattcagacgatggagctgcggaact

SEQ ID NO: 461740 - DNA, 201 bp, Homo sapiens
ccctagcgtagtatattctctagctttcttttgttccttttatttttatttatttatttttttgagacgtagtttcactcttttgcccaggctggagtgcrgtggtgcgatcttggctcactgcaagctccacctcctgggttgacgccattcttctttctgcctcagcctcctgagtagctgggactacaggtgcctgcc

SEQ ID NO: 461741 - DNA, 201 bp, Homo sapiens
gactacaggtgcctgccaccacacctgactaattttttgtatttttagtagagatggcatttcaccgtgttagccaggttggtcttgatctcctgacctcrtgatctgcctgcctcggcctaccaaagtgctgagattacaggggtgaaccactgcgcccagccacgcctggccaatttttaaaattttttgtagagacag

SEQ ID NO: 461742 - DNA, 201 bp, Homo sapiens
tacacacatttcgtttttgtttttatttttattttacttatttatttattgtgagacagagtttcactgtcacccagactggagtgcagtggcgcgatctyggctcactgcaacctccacctgccgggttcaagctattctcttgcctcagcctcccaagtagttgggattacaggcacccaccaccaggcccggctaatt

SEQ ID NO: 461743 - DNA, 201 bp, Homo sapiens
agcttgtctctactaaaaatacgaaaattagctggacatggtggcgggcgcctgtaatcccagctactcaggaggctgaggcaggagaattgattgaaccygggaggcagaggttgcagtgagccgagatccgagatcgcaacattgcactccagcctgggtgacaagcgtgagactctgtctcaaaaaaaaaaaaaaaaa

SEQ ID NO: 461744 - DNA, 201 bp, Homo sapiens
cgcacctcactctggcccagccacgtccccacctggtcacccctggtccagtttgtcctccccaccactgtgctctggagtcctgtttcttttttttttttccccgatgtggagtctcgctctgtcgcccaggctggagtgcagtggcatgatctcggctcactgcaaactctgcctcccgggttcaagcgattctcctgc

SEQ ID NO: 461745 - DNA, 201 bp, Homo sapiens
agttcgagaccagtttggccaatatggtgaaagcttgtctctactaaaaatacgaaaattagctggacatggtggcgggcgcctgtaatcccagctactcrggaggctgaggcaggagaattgattgaacccgggaggcagaggttgcagtgagccgagatccgagatcgcaacattgcactccagcctgggtgacaagcg

SEQ ID NO: 461746 - DNA, 201 bp, Homo sapiens
cttcaagggtctaactcctgggggacggaagaggagctgagaagccagggctgcaggggaagacggggccttccgtctggcgggggtgcttccctcggccrgctccgcagggccctggcgcaggcatccagacagcgggcgaatgcctcccccggccccgcaggacctgtgcgagcggcatgagaagggcgtgttgcacaa

SEQ ID NO: 461747 - DNA, 201 bp, Homo sapiens
gtgacgcaatctcggctcactgcaacctccgcctcccgggttcaagcaattctcctacctcagcctcccaagtagctgggtttacaggtgcgcaccaccaygcccagctaattttttgtatttttagtagagaagggatttcactgcgttaggcaggctggtttcaaactcctgacctcatgatctgcctgccttggcctc

SEQ ID NO: 461748 - DNA, 201 bp, Homo sapiens
atccacccgcctcagcctcccacaatgttgggattataggcgtgagccactgcgcccagccaaattttattttttgtaaagagggggcctcactatcttgsccaggctggtctcaaactcctgggcttggctgggtacggtggttcacacctgtaatcccagcactttgggaggctgaggcaggaggattgcttgaggtca

SEQ ID NO: 461749 - DNA, 201 bp, Homo sapiens
tagctcataaatatctgtggaaaaatcatgctaggattaggactagaactgcactgaggatatagattcatttgggaagagctgacgtcctaatatgtcartgtaaatatctgtcatctttagtttctctcagcaatgttttgtaatttattttattatatatgtgtatatattatatatacatatatatatatttttttc

SEQ ID NO: 461750 - DNA, 201 bp, Homo sapiens
tttggataggtcctccagtgtgatgagatttcagtggactctgtggtcctcatcccatgggatcatttgtctttgtgtttgtggcatgcaggtgatgatgrtttttgtttcttttttggacacacagagtgatccctgcaggcctggaggagtggggctcccggggtggctcatggacctgctgggtctcccgtggctcag

SEQ ID NO: 461751 - DNA, 201 bp, Homo sapiens
ctcccggacggggcggctggccaggtggtggggctgacccccccatctccctcccggacggggtggctggccgggcagagacgctcctcacctcccagacrgggtctcggccgggcagaggcgctcctcacatcccagatggggcggcggggcagaggcgctccccacatctcagacgatgggcggccgggcagagacgct

SEQ ID NO: 461752 - DNA, 201 bp, Homo sapiens
ttggtgagaaaaacatctaagggagagtcaagagattgcagaatactaatgtcaaagccaacatatggaaatgtgtttctcctgaggaaagacgacctccygctccacagtgacccataccccacagcagctttcttgctgctagtagaagagggtgaagctgtgtgttttccttttgcaggatgtgcagaacaagttaaa

SEQ ID NO: 461753 - DNA, 201 bp, Homo sapiens
ttattctttttatataggtattttttaaagtttattttccaatagtacatcgctagtatatagaaatataattgaattttatatttgatgttgtatcttayaatatggctaaatcagattattagtctagtagcttttctggatttgatggaattttctatgtatattattatattgatattggttatgaattaattttct

SEQ ID NO: 461754 - DNA, 201 bp, Homo sapiens
gcccaccgggggcggagggagcgagcccatctcctggaccctgtggtcctggctcagggatggaccccactgtagaccggggcaggtgcagggctgcggggaaactccagccttttggcatctgggacagagctgtggcttgagcccagccttggtgcaggcagggagactggcacccggcagccttggcccaccagagcc

SEQ ID NO: 461755 - DNA, 201 bp, Homo sapiens
cccgcctcaacctcccagaatgctgagattacaggcgggagccaccgcacccggcctaagagctatacaaagtttaaaagttgtatttccatatacgaagscgtcacagggtttctccatttagtaaaggcctggtgagagaagatgcacttggtgctgtcgttttcccgggctctgttgaggggaagtgacgcgacagca

SEQ ID NO: 461756 - DNA, 201 bp, Homo sapiens
gtcctgggtaaaagttgtgtctttttgtttgcttgtttttaaagagacagggtattgctctgtcaaccaggctggagtgcagtggcacgatcatagctcactacagcctcaacctcccaggctcaagcaaccctcccacctcagtctcctgagtagctggaaccacaggcggatgccaccacaccaggcagttttttaaat

SEQ ID NO: 461757 - DNA, 201 bp, Homo sapiens
ggtcctgggtaaaagttgtgtctttttgtttgcttgtttttaaagagacagggtattgctctgtcaaccaggctggagtgcagtggcacgatcatagctcactacagcctcaacctcccaggctcaagcaaccctcccacctcagtctcctgagtagctggaaccacaggcggatgccaccacaccaggcagttttttaaa

SEQ ID NO: 461758 - DNA, 201 bp, Homo sapiens
ggtcaggagatcgagaccatcctggctaacatggtgaaaccccatctctactaaaaatacaaaaaattagccggatgtggtggtgggcgcctgtagtcccrgctactcaggaggctgaggcaggagaatggcgtgaaccccgggaggtggaggttgcagtgagccgagatcgtgccactgcactccagcctgggcgacaga

SEQ ID NO: 461759 - DNA, 201 bp, Homo sapiens
cccaggcaggagtgcaatggtgttatcctggctcactgcagtcccaaagtgttgggattacaggcatgagccactgcgcccagcctctatatagagttttkttgttgttgttgttgtttatttttgtttttgtttgagacggagtctcactctgtcgcccaggctggagtgcagtgtggtgcgatctcagctcagtgcaac

SEQ ID NO: 461760 - DNA, 201 bp, Homo sapiens
tcccagacggggtggtggccgggcagaggctgcaatctcggcactttgggaggccaaggcaggcggctgggaggtggaggttgtagccagccgagatcacrccactgcactccagcctgggcaccattgagcactgagtgaactagactccgtctgcaatcccggcacctcgggaggccgaggctggtggatcactcacgg

SEQ ID NO: 461761 - DNA, 201 bp, Homo sapiens
tttgtttatatagttttgttacttttttctttttttaattctggctctctccagaaaacagaaacctatttttctttaaccacagtatctagaatactatstgctatgtagcagagtctcaaatatttgaatagaattacatttttataaatttttgtattatatttcttatgtgataagacttgacaacactgcaaatat

SEQ ID NO: 461762 - DNA, 201 bp, Homo sapiens
tttttttttttttttttttttttggagacaaagtttttgctcttgttgcccaggctggagtgcaatggtgcgatctcggcacactgcaccctccgcctccygggttcaagcgagtcttctgcctcagcctcccgagtagctgggattacacgtgtccaccaccgcacctggctaatttttgtatttttagtagagatgggg

SEQ ID NO: 461763 - DNA, 201 bp, Homo sapiens
ccgatggaaacaagcagatctgtggttttccttggcagctcctggacccaagtgtgtgtggctggagggggcctctgggggtgaggttattgctctgggcrgccttttcagacccattgtctgagcagcactgggggcccagccagtgccctctgctagccgctgggccctctgccacctctagggagagttttgagaact

SEQ ID NO: 461764 - DNA, 201 bp, Homo sapiens
gtagcaggggtttaatgggggtctttttagctccctataagcattttgaagtttgtgtgttatggaaatctgaagtgaaattacacaaagtaatttgattwaccccaggaagtactgtaggggccggagaaactcaggttaggtaatatctttcaagaagcccagttacgttattttccaggaatcttccaaaacctgatt

SEQ ID NO: 461765 - DNA, 201 bp, Homo sapiens
ttttctacctagtgtctgtataatagtgcattaaggaatataaagttgtgcttcgaaagtgctaatatgataaaatttcagttaaaaaaaatttcagttaragatattcttgccacatgttttccagaaaatgatttgttaaatggaatccatattaaaatttgtcccggaggctgggcacggtggctcacgcctgtaatc

SEQ ID NO: 461766 - DNA, 201 bp, Homo sapiens
cctcctctctaataaaagtataaacattagccaggtgtggtggcgggtgcctgtaatcccagctacttgggaggctgagacaggagaatcacttgaacccrggaggcagaggttgcagtgagctgagattgcaccactgcactcaagcctgggcaacagagcaagactttatctcaaaaacaaacaaacaaacaaaaatac

SEQ ID NO: 461767 - DNA, 201 bp, Homo sapiens
gaagtttaaagtgaccctgtgttatgtgcaaatgggcgtgcttccctccaaggtgggctactcagtgaggggaccgtattcccatctgcccctgtccttgrggagatggaattttttttttttttgagatggagtctcgctctgtcgcccaggctggagtacagtggggcaatctccgctcgctgcaagctccgcctcccg

SEQ ID NO: 461768 - DNA, 201 bp, Homo sapiens
attgcttgaacccaggaggcggaggttgcggtgagccgagatcgcaccactgcactccagcctggggaacagagcgagactttgtctcaaaaaaaaaaaaaggacattgcaaaaaatatggatgaagagctgactagggccaggtctggggcaggggcggtggagcttccatacccctccccgtgccactttccaggaacc

SEQ ID NO: 461769 - DNA, 201 bp, Homo sapiens
caccacgcccggctaattttttgtatttttagtggagacggggtttcaccgtgttagccaggatggtcttgatctcctgacctcgtgatctgccctcttgrcctcctaaagtgctgggattacaggcatgagccaccgcgcctggcctatttattctttttatataggtattttttaaagtttattttccaatagtacatc

SEQ ID NO: 461770 - DNA, 201 bp, Homo sapiens
tgccctggtaagggggtggttctgctctgcaaggagcaggacctctgttgctgctgtgcgtgctgctgcttcaataaaagttgctaacaccatcggctcarccttgaattccttcctagacaaagcctagaagcctctgggctaagcccgaatttgggggctggcctgccttgtattcatatgcccatgagcacacggcca

SEQ ID NO: 461771 - DNA, 201 bp, Homo sapiens
ttttcttggagggaccttatttggtggccaatgaaggttcttctccatttggcctctatgaggatcaagacagacttagccccgtcagatattttggaatmttttcactttcatgtcaggagaccctagaaaaaaaccggagtcactttcagaccaaaccaaccaccagccaggaggagggttaaaaaagaaaacgcaaga

SEQ ID NO: 461772 - DNA, 201 bp, Homo sapiens
cctgccttggcctcccaaagtgctgggattacaagcatgagccactgtacccgagtactgattagctttagagttttttttttttttttttttttttttttgagaagcagcctccctctgttacccaggctggagtgcagtggcgcaacctcgggtcactgcaacctccgccctccgggttcaagcgattctcctgctaca

SEQ ID NO: 461773 - DNA, 201 bp, Homo sapiens
ttccaagagcccccgggggtcaacaccacagagctgccatccttccccaagacccagatccttgagtgggcagctgagaggggccccatcacctctgctgmtgagctgaatgacccccagagcatcctcctccgactgggccaaggtcagtttccccagcaacctctctgggctcatgatactgctcaggaggaatctgag

SEQ ID NO: 461774 - DNA, 201 bp, Homo sapiens
aaaggtgcactgcctcaacatggacagcctctctttccagctgggcctctacctcagcccacacttcctccaggcctccaacaccatcgagccggggcagyagagctttgtgcaggtacctggcatgcctgtcacccctcgggcctcccagctcctggaacttcctctccgcctttcttcccaccatgactccagaggaga

SEQ ID NO: 461775 - DNA, 201 bp, Homo sapiens
tctctaaaaaattataataaaaaatatttttaaatccaacccgaagcccttttgcccttctgctgctgctgtttcattcagctcaatgcccttggctttgragactgtacactaagagctcagtcagtggccccaacagcttcctctgaatccttcagctttccagagtcactcttccaggaagtcttccctgtctgcttt

SEQ ID NO: 461776 - DNA, 201 bp, Homo sapiens
gctgagggaagggactgaggtgcgcgtgtctctgcagcccaggggtcactgtccttctgcatgctggaagccagccaggacatgggccgcacgctcgagtrgcggccgcgtactccagccttggtccggggctgccacttggaaggcgtggccggccacaaggaggcgcacatcctgagggtcctgccgggccactcggcc

SEQ ID NO: 461777 - DNA, 201 bp, Homo sapiens
gtttctccaacaggtcttgcagaaacagtccattgtgaccttcagcctgtgggccccgagaggggcgaggtgacatataccactagccaggtctcgaaggdctgcgtggctcaggcccccaatgccatccttgaagtccatgtcctcttcctggagttcccaacggtgagtgtcccatggcagggtcgggtgggggctcag

SEQ ID NO: 461778 - DNA, 201 bp, Homo sapiens
tctcttccgacccagcatttgaagtgcaccatcacgggcctgaccttctgggaccccagctgtgaggcagaggacaggggtgacaagtttgtcttgcgcartgcttactccagctgtggcatgcaggtgtcagcaagtatgatcagcaatgaggtaagagctggggccaaaaaggtatcaggaccagcctggttggtgccc

SEQ ID NO: 461779 - DNA, 201 bp, Homo sapiens
aaggatgaatagaagttcgctaggggctgggcatggtggctcatgcctgtaatcccaatgttttgggaggctaaggtgggaggatcacttgcggccaggcrttcaagaccagcctgggcaacatagcaagactctttctccacaaatatttttaaaatttagttgggcataatgactcatacctgtagctgctcgggaggc

SEQ ID NO: 461780 - DNA, 201 bp, Homo sapiens
agcctggctccagggagcttgcttttaaccaaaatgccactatgtccaggcactccagagtccctgggacatgtaggatagggtcagagagacgacatatraggcctgggcccccgtggcagccagaagtcctcatccagatcttctccttcccaagacagagctgggaatggcgttgccatggcaaggggtgaccatctc

SEQ ID NO: 461781 - DNA, 201 bp, Homo sapiens
caatatttgcaatatactaatacttaaaaaaatgcactcattgtttatctgaaatttaaatttagctgggtgtccttctattcatcgaccctatacgtagyagcgctgtgaccttgggcaggagacgtttcctctcctagccttggttttttttaatccatggaacgaatataatgatatccacctcataaggtggctgtg

SEQ ID NO: 461782 - DNA, 201 bp, Homo sapiens
agaacacaggttctggagccaggcagccctccagctgaactgtggctccgcctctgagagccacatcgccttgggccacctccgagctttgattttcccaygggaaacctggacccattagcagcacctacctcacaggtgtgttgtaagaatccagcaggacggtgcaagcaaaacaccaagcgcaggacctgcctggag

SEQ ID NO: 461783 - DNA, 201 bp, Homo sapiens
tttgccagggttgttaccgtttacagaatgtcttcgtatcagttgaataatttgaacctcaatggttattgctacaagatcaatggggcaggtcaggcgcrgtggctcacacctgtaatcccagcactttgcgaggctgaggcaggcagatcacttgaggtcaggagttcgagactagcctggccaacatggcgaaaccgc

SEQ ID NO: 461784 - DNA, 201 bp, Homo sapiens
tacctgccctcaagcctgcagggaaggacttggtgacaactgagtggtagctttggttcgtgagctctgggatgagagctgagtgtcccaagaaacattcygaagttccagcctcctcgtcacccctcacagacagcatgaccaggctgtgacctgcacttcccttttttttcacttcctttatccatagcccaacctggt

SEQ ID NO: 461785 - DNA, 201 bp, Homo sapiens
gggcaacagagggagaccctgtcttaaaagaaaaaaattatatatatatatattttattcaaaactgatgaaacaatatattttgaaaaccaaaagttatraacccactagaaaacattaatcaaaacatgaacttatacaaacataaatttgaaacatatcttatcccataaattagcataaaataattatttaaaaata

SEQ ID NO: 461786 - DNA, 201 bp, Homo sapiens
gcagcccatccctcggccgcccagaaggggaatcgaggtcccagagggggcgtggcctttaccatggatcctcccccttcccgatctgagtccgtgcagcycagggtgaggcaggaacatgaaacgcgcccgccagccggaaggtcgcagtagccgccggctctggcctcggccgcgccgccttcctcctggggccgcgct

SEQ ID NO: 461787 - DNA, 201 bp, Homo sapiens
aggcccttgcacagacaggcctccaggattacaaacttctctggtcataggaagctagggaagccttcaactcccctaagtgggcctctccctccagccasagtgagcctgggactctgggctgacctggctcatagctccaaagtgttcacaagggtgagggatgcatagtgcttccacagtgctcctgggcatcaaggc

SEQ ID NO: 461788 - DNA, 201 bp, Homo sapiens
cctcttactgctgaatctttggtgttaagctcgaagtcagcccaggaatcaatatctgttggatggatggatggatggatggatggatggatggatggatdcattcatgcatggatgagaggatggatggataagggcgggagggagagagaataaaagaaaggaaggaaaaactgtacattcttataagcatttggtgat

SEQ ID NO: 461789 - DNA, 201 bp, Homo sapiens
gcttgaaccagtgagttggaggttgcagtgagcttgagattgtgccactgcactctggcctggtgacagagtgagactctgtctcaaaaaaataaaaaatwaaaaaataaaaataaaataaaaatacaaaaattagctaggcatagtggcgcatgcctgtaatcccagctgtacttgggaggctgaggcaggagaatcgct

SEQ ID NO: 461790 - DNA, 201 bp, Homo sapiens
tcacaggaaacatttcagcagcagccagggatcgtccactaggcaccctcccacagcacagatcttccaggactcacccagaggcatccagctacgaagcrgtggagatgggattcaaagccaaggctctagggtgggctggggtcacggagccagggagtaaacctggaagccgcctcccaaaggtgccacatactgctc

SEQ ID NO: 461791 - DNA, 201 bp, Homo sapiens
actttaggaggccgaggcgggtagatcacgaggtcaggagatcgagaccattctggccaacatggtgaaaccccatctctactaaaaatacaaaaattagytgggcgtggtggtgagcgcctgtaatcccagctacttgggaggctgaggcaggagaattgcttgaaccagtgagttggaggttgcagtgagcttgagatt

SEQ ID NO: 461792 - DNA, 201 bp, Homo sapiens
agcaagcgggagcccgtggtggcggtggctgccccggcctcctcggagagcagcagcaccaaccacagcatcgggagcacccagagcaccccctgctccaycagcagcatggcatagccccggccccccgcgctcgcccagcaggagagactgagcagccgccagctgggagcactggtgtgaactcaccctgggagccag

SEQ ID NO: 461793 - DNA, 201 bp, Homo sapiens
caggaggcggaggttgcggtgagccaagatcacaccattgcactccagcctgggcaagaagagcaaaactccatctcaaaaaaaaaaaaaaaaaaaaatawaatatatatatatatatatatatgtggatgtgtgggtgtatatatgtatatctatatatgtatatatatgtatgtatatatgtagatctatgtatatgtg

SEQ ID NO: 461794 - DNA, 201 bp, Homo sapiens
cccaggaggcggaggttgcggtgagccaagatcacaccattgcactccagcctgggcaagaagagcaaaactccatctcaaaaaaaaaaaaaaaaaaaaawataatatatatatatatatatatatgtggatgtgtgggtgtatatatgtatatctatatatgtatatatatgtatgtatatatgtagatctatgtatatg

SEQ ID NO: 461795 - DNA, 201 bp, Homo sapiens
aacccaggaggcggaggttgcggtgagccaagatcacaccattgcactccagcctgggcaagaagagcaaaactccatctcaaaaaaaaaaaaaaaaaaawatataatatatatatatatatatatatgtggatgtgtgggtgtatatatgtatatctatatatgtatatatatgtatgtatatatgtagatctatgtata

SEQ ID NO: 461796 - DNA, 201 bp, Homo sapiens
tgaacccaggaggcggaggttgcggtgagccaagatcacaccattgcactccagcctgggcaagaagagcaaaactccatctcaaaaaaaaaaaaaaaaawaaatataatatatatatatatatatatatgtggatgtgtgggtgtatatatgtatatctatatatgtatatatatgtatgtatatatgtagatctatgta

SEQ ID NO: 461797 - DNA, 201 bp, Homo sapiens
cctacgggctagtgttggaccgcacagtctaagctaattccagttagctattttagagagagcaggggtatgagccagagtggcggggtgagtagtttggmgggaaggatggttaggaacaggtaactaaaggtgacttaggtcaaagcaggtgaccaggggtttgtgaggtcaaagcacatgaccaggatgagtcaggat

SEQ ID NO: 461798 - DNA, 201 bp, Homo sapiens
gccccgagaggggcgaggtgacatataccactagccaggtctcgaagggctgcgtggctcaggcccccaatgccatccttgaagtccatgtcctcttcctrgagttcccaacggtgagtgtcccatggcagggtcgggtgggggctcagaggaagctccaaggcagatggggtgaggggtgccttccttgtggctgtccct

SEQ ID NO: 461799 - DNA, 201 bp, Homo sapiens
ggtctcgaagggctgcgtggctcaggcccccaatgccatccttgaagtccatgtcctcttcctggagttcccaacggtgagtgtcccatggcagggtcggktgggggctcagaggaagctccaaggcagatggggtgaggggtgccttccttgtggctgtccctggggcagtggctgagtcctcgttaggccccctgccaa

SEQ ID NO: 461800 - DNA, 201 bp, Homo sapiens
cgccagattgaccaagtctccctcccgtcctcccccagaaaaaggtgcactgcctcaacatggacagcctctctttccagctgggcctctacctcagcccrcacttcctccaggcctccaacaccatcgagccggggcagcagagctttgtgcaggtacctggcatgcctgtcacccctcgggcctcccagctcctggaac

SEQ ID NO: 461801 - DNA, 201 bp, Homo sapiens
gccaggcctggctgtgatgagcccgtttgctgcaagaggagactgaggttcagagaagtcgagggtccatggctgagcagagctggcaccaaagcccacaygggccagcacaacagggtaggggatggggcaggggcagagtggcagtgctgatggcgtcggccctctctaggttgcacaagcaaaggcctcgtcctgccc

SEQ ID NO: 461802 - DNA, 201 bp, Homo sapiens
acccccgagctgagctgaaggacaaatcacctatgcccatacgtgagggaaggggccaggcagaagacgcagcaggagtggggacacagcaggaccgaggmctggcataaccctggctggcctgctgtggcacagactgtgtccatggccccctgttctgcctctctccccaccattagaccactggagaatactccttca

SEQ ID NO: 461803 - DNA, 201 bp, Homo sapiens
tgtttccgggctctgcggtctgctctggcagcctccaaacctgggccgccttctcggctcgccctgtcccttggggctagggaactctcaaccccttcagmccattcctcccaccaccttgaggcaagagaggggaagctttgtctcctgagctcagctcctgccttacctggagggagacttgggttcacacctaggccc

SEQ ID NO: 461804 - DNA, 201 bp, Homo sapiens
cagccgcctggcctgcctctgctaccccacaggtggtaggctgcagacctcacccgcaccgatccagaccactcctcccaaggacacttgtagcccggagytgctcatgtccttgatccagacaaagtgtgccgacgacgccatgaccctggtactaaagaaagagcttgttgcggtaagggaactcctgcccctctggct

SEQ ID NO: 461805 - DNA, 201 bp, Homo sapiens
aggagggactggcttcagtgagattttcaggacagggttttgaaggatgaatagaagttcgctaggggctgggcatggtggctcatgcctgtaatcccaaygttttgggaggctaaggtgggaggatcacttgcggccaggcgttcaagaccagcctgggcaacatagcaagactctttctccacaaatatttttaaaatt

SEQ ID NO: 461806 - DNA, 201 bp, Homo sapiens
aaatctgactggactgtgtgtgtctctcctctgtgtcccccagggcccgtcacagctggagctgactctccaggcatccaagcaaaatggcacctggcccygagaggtgcttctggtcctcagtgtaaacagcagtgtcttcctgcatctccaggccctgggaatcccactgcacttggcctacgtgagtgtgttccctcc

SEQ ID NO: 461807 - DNA, 201 bp, Homo sapiens
ttcagcttcttttccccacaacttttgtgacctgaatgctggagacctaaagaactgtttacccttggctctgggaccctgcttcctagttccagcccagkctttggggcaccagccttggaggctgaagggaccctcagccagggttcagctggcttcaacccctgtggcaggagtgggggtgggataaagagataatat

SEQ ID NO: 461808 - DNA, 201 bp, Homo sapiens
acaggtggtaggctgcagacctcacccgcaccgatccagaccactcctcccaaggacacttgtagcccggagctgctcatgtccttgatccagacaaagtrtgccgacgacgccatgaccctggtactaaagaaagagcttgttgcggtaagggaactcctgcccctctggctcaggatgacatggacatctggttcctcc

SEQ ID NO: 461809 - DNA, 201 bp, Homo sapiens
taggctgcagacctcacccgcaccgatccagaccactcctcccaaggacacttgtagcccggagctgctcatgtccttgatccagacaaagtgtgccgacsacgccatgaccctggtactaaagaaagagcttgttgcggtaagggaactcctgcccctctggctcaggatgacatggacatctggttcctcccctagccc

SEQ ID NO: 461810 - DNA, 201 bp, Homo sapiens
tgagcgttggtctgggaaagggcatggcagaggcaggagcgaggtgtgtttaggggaagagcccacatatccccactgactgggcataaataattgtgatrgtagtcaccagttcctgagcaacccccacttagcaggagccggcctagcgctgtgcaggtgtaatttactggcctgcttgccgactccatgggaagctgt

SEQ ID NO: 461811 - DNA, 201 bp, Homo sapiens
ctggttctccaaggacacccaaggacggatgcacctaagaaaggagggactggcttcagtgagattttcaggacagggttttgaaggatgaatagaagttygctaggggctgggcatggtggctcatgcctgtaatcccaatgttttgggaggctaaggtgggaggatcacttgcggccaggcgttcaagaccagcctggg

SEQ ID NO: 461812 - DNA, 201 bp, Homo sapiens
tggtgcgggcacacagtgatcacacagtgaccagccgcctggcctgcctctgctaccccacaggtggtaggctgcagacctcacccgcaccgatccagacyactcctcccaaggacacttgtagcccggagctgctcatgtccttgatccagacaaagtgtgccgacgacgccatgaccctggtactaaagaaagagcttg

SEQ ID NO: 461813 - DNA, 201 bp, Homo sapiens
gctgggaatcagtgcccggtagcacctggcggttggttctccagagtctctgcaggcgcagatcacaccgagagcagagatgacagtcaggggtgtaaaaygattagaaagaaatgagtttggacattcatgaccttttaaaaatatatagtaatagctatgtaacagccagttggaaaaactcctggaaacgtatccgtc

SEQ ID NO: 461814 - DNA, 201 bp, Homo sapiens
ttctccaacaggtcttgcagaaacagtccattgtgaccttcagcctgtgggccccgagaggggcgaggtgacatataccactagccaggtctcgaagggcygcgtggctcaggcccccaatgccatccttgaagtccatgtcctcttcctggagttcccaacggtgagtgtcccatggcagggtcgggtgggggctcagag

SEQ ID NO: 461815 - DNA, 201 bp, Homo sapiens
cacactgttggtgaagcacctctgtgtgagcttgggcaaggtacatcagcctctctgagcctcatttttctcatctgcacatgggaacaatgggagtagcwaatcatagaagagcctgagaatcgcttgaacctgggagatggaggttgcagtgagccaagatcgtgccactgcactccagcccgggtaacagagcaaaac

SEQ ID NO: 461816 - DNA, 201 bp, Homo sapiens
actaaaaatacaaaaaattagccgggcgtggtggcgggcacctgtaatcccagctacttgggaggctgaggtaggagaatggcatgaacccgggaggcggmgcttgcagtgagctgagatcgcaccactgcactccagcctgggcgacagagcgagactccgtctcaaaaaaaaaaaaaaagagagtcaggcaactccaca

SEQ ID NO: 461817 - DNA, 201 bp, Homo sapiens
gcagaattgcactgaaacctcataagtcaatgaagtgggaataccattttccaaatcaggaaactgaggcccagagaggcatagtgactgtccaaggtcayaggctaatgactgagcccccatctgaattcaggttggtctggctttgatcctttcccctgccaccctgcctgtaggaccatctgagttttctggggtgga

SEQ ID NO: 461818 - DNA, 201 bp, Homo sapiens
cgggtccccgtgcgagcccacgccggccccggtgcccgcccgcagccctgccactggacacaggataaggcccagcgcacaggcccccacgtggacagcayggaccgcggcacgctccctctggctgttgccctgctgctggccagctgcagcctcagccccacaagtaggtgtccagggacccagggtggggagactcgg

SEQ ID NO: 461819 - DNA, 201 bp, Homo sapiens
tccacaaattacttcctgacctcctacatgggatagagagggcacagggccaggaacagcgtgctgagcctccacatgtctccccagaattccagcctggwcaccttccaagagcccccgggggtcaacaccacagagctgccatccttccccaagacccagatccttgagtgggcagctgagaggggccccatcacctct

SEQ ID NO: 461820 - DNA, 201 bp, Homo sapiens
ggccccctgttctgcctctctccccaccattagaccactggagaatactccttcaagatctttccagagaaaaacattcgtggcttcaagctcccagacasacctcaaggcctcctgggggaggcccggatgctcaatgccagcattgtggcatccttcgtggagctaccgctggccagcattgtctcacttcatgcctcc

SEQ ID NO: 461821 - DNA, 201 bp, Homo sapiens
gctgccatccttccccaagacccagatccttgagtgggcagctgagaggggccccatcacctctgctgctgagctgaatgacccccagagcatcctcctcygactgggccaaggtcagtttccccagcaacctctctgggctcatgatactgctcaggaggaatctgagctcctctggcccacacctcaaacttgggcacc

SEQ ID NO: 461822 - DNA, 201 bp, Homo sapiens
acacagtgaccagccgcctggcctgcctctgctaccccacaggtggtaggctgcagacctcacccgcaccgatccagaccactcctcccaaggacacttgwagcccggagctgctcatgtccttgatccagacaaagtgtgccgacgacgccatgaccctggtactaaagaaagagcttgttgcggtaagggaactcctgc

SEQ ID NO: 461823 - DNA, 201 bp, Homo sapiens
gcttgaacccaggaggtggaggttgcagtgagccaacattgcaccactgcactccagcctgggtgacagagtgagaccctgtctcaaaaaaaaaaaaaaaagaaaagaaaaagagaagtgcttttcagttgagcccagatctttctccctggaatgtcccctgctgaatatctgtgaccctcagagatccaaaggctgctg

SEQ ID NO: 461824 - DNA, 201 bp, Homo sapiens
acatgtctccccagaattccagcctggtcaccttccaagagcccccgggggtcaacaccacagagctgccatccttccccaagacccagatccttgagtgsgcagctgagaggggccccatcacctctgctgctgagctgaatgacccccagagcatcctcctccgactgggccaaggtcagtttccccagcaacctctct

SEQ ID NO: 461825 - DNA, 201 bp, Homo sapiens
accactggagaatactccttcaagatctttccagagaaaaacattcgtggcttcaagctcccagacacacctcaaggcctcctgggggaggcccggatgcycaatgccagcattgtggcatccttcgtggagctaccgctggccagcattgtctcacttcatgcctccagctgcggtgagcacccttcccctgcccctccc

SEQ ID NO: 461826 - DNA, 201 bp, Homo sapiens
agcctagctcctgccacatggagccccctctgccggtcgggcagccagcagagggggagtagccaagctgcttgtcctgggcctgcccctgtgtattcacyaccaataaatcagaccatgaaaccagtgatgggttgggctgggagaagggcagtgacattcaaagccagggtggggtgagggcacaggacagggctgctt

SEQ ID NO: 461827 - DNA, 201 bp, Homo sapiens
cgccaccccagaaggctggagcagggacgccgtcgctccggccgcctgctcccctcgggtccccgtgcgagcccacgccggccccggtgcccgcccgcagmcctgccactggacacaggataaggcccagcgcacaggcccccacgtggacagcatggaccgcggcacgctccctctggctgttgccctgctgctggccag

SEQ ID NO: 461828 - DNA, 201 bp, Homo sapiens
tgctgccagcccctactgctgtgaccactgaggaccctgtggtttccctgggaggcaccttcctccccaggcatcccctaagagtggggtctagagctcayagtccccattgcgcagccctcaccaggtgccactctgtgcccagcctgtgttgatgatgcagacagaaggtagagccagggaggcagaggtggcatcagc

SEQ ID NO: 461829 - DNA, 201 bp, Homo sapiens
taatatatatatatatatatatatgtggatgtgtgggtgtatatatgtatatctatatatgtatatatatgtatgtatatatgtagatctatgtatatgtrtgtgtatgtatatatacacacacacatatatacatggggcccagtgaaatccgaatttcagataaacaatgaaaatttagtataagtacgttccatgcaa

SEQ ID NO: 461830 - DNA, 201 bp, Homo sapiens
agccaagatcacaccattgcactccagcctgggcaagaagagcaaaactccatctcaaaaaaaaaaaaaaaaaaaaatataatatatatatatatatatadatgtggatgtgtgggtgtatatatgtatatctatatatgtatatatatgtatgtatatatgtagatctatgtatatgtgtgtgtatgtatatatacacac

SEQ ID NO: 461831 - DNA, 201 bp, Homo sapiens
ggtgcaggccaggttaggggttctgtggggctccttggcctgggggctcttccaaggggtcatggcctctgctgctttctgaaactgaccagaggaggggyggtgaggagcaagggacccccagccccatgtcccactccctatccctcggccacctcaagccgctggccggtcctgtggacatcctttgacccacctgtg

SEQ ID NO: 461832 - DNA, 201 bp, Homo sapiens
aggtggaagaatcaggacctgaacctttggcatctgtcaaatcgctgtgcttttcacctctactgtaggctgcagtgcaggaacttgaccctgcaggcatygtagaaccaggggggagcccggggccaaggcatgctgagacctcctggtggctgggggcagtggctgggctggatgctgggaaacctgtgaggctgtaat

SEQ ID NO: 461833 - DNA, 201 bp, Homo sapiens
ctgatcttctccccgcaggcactcagccttttctctggtccccataacggccctcccatccggggtacaacccctgggaccctgcctttaccttcagcagycccatctatgccctgctctgtcttcctcctgccttcatccttaggtgaaatctcagactgtcagacccctagtagaacttagaatatgtcctatccaccc

SEQ ID NO: 461834 - DNA, 201 bp, Homo sapiens
gctggatgctgggaaacctgtgaggctgtaattgggcctgaaaagggtaaagagtggcccgggggtactgaacaagacggggcaggcattgcagcaagaargacccttgttgaaacgtatcttccttgggaggctgagatgggtggattgcttgagcccaggagtttgagaccagcctgcgcaatacggcgaaaccccgtc

SEQ ID NO: 461835 - DNA, 201 bp, Homo sapiens
ggccaccccatcccgccacttcaccccaccccttagaacagtcaattctacagtgactgaagtcagtcaaataattgtaattaagagaaagctgccggccmggcatgctggctcactcatggtggctcacacctgtaatcctagcactttgggaggctgaggcgggaggactgcttgagctcaggagtttgagaccagcct

SEQ ID NO: 461836 - DNA, 201 bp, Homo sapiens
tcacaagggtgagggatgcatagtgcttccacagtgctcctgggcatcaaggcctccaggaactcacaggaaacatttcagcagcagccagggatcgtccrctaggcaccctcccacagcacagatcttccaggactcacccagaggcatccagctacgaagcagtggagatgggattcaaagccaaggctctagggtggg

SEQ ID NO: 461837 - DNA, 201 bp, Homo sapiens
ggaggactgcttgagctcaggagtttgagaccagcctgagcaacatagtgagacccagtctctactgaaaatttaaaaaattagccaggcgtggtggcgcmcaactgtagtcccaactactcgggaggctgaggcaggaggatcgcttgaacccagcagctcaaggctgcagtgagctgttatcacaccactgcactccag

SEQ ID NO: 461838 - DNA, 201 bp, Homo sapiens
cgagcccacgccggccccggtgcccgcccgcagccctgccactggacacaggataaggcccagcgcacaggcccccacgtggacagcatggaccgcggcaygctccctctggctgttgccctgctgctggccagctgcagcctcagccccacaagtaggtgtccagggacccagggtggggagactcggcctccggtgcac

SEQ ID NO: 461839 - DNA, 201 bp, Homo sapiens
ccatctcacttcctttgctgacttctggggcccagagcccaacgtgctgtgggaaggtgaggaaggaggccggtgaggctccagacagcccagggttcagmagaagcctccctgccccctcctctgagccggccttggctggacatgaagccagtctctccgcgcccatctttgatctccaagaaaacaggaagtgagcgc

SEQ ID NO: 461840 - DNA, 201 bp, Homo sapiens
tggcagactatgcagctgccactgtccatctatccatccatccatcctttcacttacccgtccgtccatccatccatccaccctcccacccaggaatctarccacccgcacatccatgtagtatggtcaccagtgtaatctcaaagaacaggagacctgagggaagagaggcggacaaaggacacacactcctggctttct

SEQ ID NO: 461841 - DNA, 201 bp, Homo sapiens
tcccatggtgcatgacagtatttactatctggctctttataggaacacttcgcccacgccaggcctgagactggattatgcttgcagggtttgcatgcccytggggctgtgagtgatgattatatgtggaacttgaaggaatatatatatatatattttttttttttgagacggagtctcgctctgttgcccaggctggag

SEQ ID NO: 461842 - DNA, 201 bp, Homo sapiens
tgcatgtctagtttctgaatggtaatatcccctagggcagggaccactgatatctgtctttaattcattaattcattcatccatccctttcttctttcttycctttctccctgtcttcccataggcggggagcacccatcacatgctgggtgtcagggtgacgctggcatgtcaggatcctgtgatgggcccagggcccag

SEQ ID NO: 461843 - DNA, 201 bp, Homo sapiens
ctaccgctggccagcattgtctcacttcatgcctccagctgcggtgagcacccttcccctgcccctcccttcccttcccctcccttggatcagtggccacwctgttggtgaagcacctctgtgtgagcttgggcaaggtacatcagcctctctgagcctcatttttctcatctgcacatgggaacaatgggagtagctaat

SEQ ID NO: 461844 - DNA, 201 bp, Homo sapiens
ctcccgggttcaagcaattctcctgcctcagcctcccgagtagctgggattacaggtgcccaccaccactcttggcttattttttgtatttttttttttttagcagagacggggtttcactatgttggtcaggctggtctcgaactcctgaccttgtgatccgcccacctcggcctcccaaagtgctgggattacaggtgt

SEQ ID NO: 461845 - DNA, 201 bp, Homo sapiens
cctcccgggttcaagcaattctcctgcctcagcctcccgagtagctgggattacaggtgcccaccaccactcttggcttattttttgtatttttttttttttagcagagacggggtttcactatgttggtcaggctggtctcgaactcctgaccttgtgatccgcccacctcggcctcccaaagtgctgggattacaggtg

SEQ ID NO: 461846 - DNA, 201 bp, Homo sapiens
tgggagatggaggttgcagtgagccaagatcgtgccactgcactccagcccgggtaacagagcaaaactccgtctcaaaaaaaaaaaaaaaaaaaaaaaaagcctggtgcgggcacacagtgatcacacagtgaccagccgcctggcctgcctctgctaccccacaggtggtaggctgcagacctcacccgcaccgatcca

SEQ ID NO: 461847 - DNA, 201 bp, Homo sapiens
accgaggcctggcataaccctggctggcctgctgtggcacagactgtgtccatggccccctgttctgcctctctccccaccattagaccactggagaatastccttcaagatctttccagagaaaaacattcgtggcttcaagctcccagacacacctcaaggcctcctgggggaggcccggatgctcaatgccagcattg

SEQ ID NO: 461848 - DNA, 201 bp, Homo sapiens
ttctctagctttggcctcaagctctggtgtgacatgggtgctgttttcacctgtggagggaggtatgtcgcctggaataaaggctcgccagagggcagggycttgtggggcttttaccatgttctcagcacctagatagtgcctggcacacatgagtctctgggatacagtggagtgagtgcagtgaacagatggctgagg

SEQ ID NO: 461849 - DNA, 201 bp, Homo sapiens
catggaagcagaaatcaagagacaaggctttgtggggtgcgggtgtgggtccaagtgccaagggccagggagctttgtagagtgtgtggttatgtttctcrgtgtttcctcatagttggttaactaatacatttgttcatgcaattaagccatcttttcattttctaacatttttaaaaatacatatattttttagagatg

SEQ ID NO: 461850 - DNA, 201 bp, Homo sapiens
aacaaggtgggggccagagctgggaggaggacccaggcttgggctggtcttggctcccactcccgggtggatgtcactaaaggacccactcttgcccttcytgcagatcctgcatagggacatgaaggctgctaatgtgcttatcactcgtgatggggtcctgaagctggcagactttgggctggcccgggccttcagcct

SEQ ID NO: 461851 - DNA, 201 bp, Homo sapiens
atggaaaacaacaaagtggggtaaggggaaaagtagtggggagctgagggggtcagcatgacatggaagcagaaatcaagagacaaggctttgtggggtgygggtgtgggtccaagtgccaagggccagggagctttgtagagtgtgtggttatgtttctcggtgtttcctcatagttggttaactaatacatttgttcat

SEQ ID NO: 461852 - DNA, 201 bp, Homo sapiens
acaaggcttctgagacagctggtttcagagcccatgatcttgctctgtctcccaacttggctgtcagtacagaccccagggctgggctctgtactgcgctyactcttgaccactttcccctctttctcacccagttccccattacagccttgcgggagatcaagatccttcagcttctaaaacacgagaatgtggtcaact

SEQ ID NO: 461853 - DNA, 201 bp, Homo sapiens
ccttgctggttttctggatggttcccagagggtttccatggggtaggaggatgggctcgcccaccagtgactttttctaagagctcccggcgtggtggaaraggggacaggtccctcacccacccacaatcctattctcgggctgagaaccctgcgtggggacagggctcgcctcaggaatgggctgtttttggcctaacc

SEQ ID NO: 461854 - DNA, 201 bp, Homo sapiens; identical to SEQ ID NO: 198087

SEQ ID NO: 461855 - DNA, 201 bp, Homo sapiens
gcgccggaagggcagccagatcacccagcagtccaccaaccagagtcgcaatcccgccaccaccaaccagacggagtttgagcgcgtcttctgagggccgrcgcttgccactagggctcttgtgttttttttcttctgctatgtgacttgcatcgtggagacagggcatttgagtttatatctctcatgcatattttattt

SEQ ID NO: 461856 - DNA, 201 bp, Homo sapiens
ggatctctccaagggacgcccaagtgaggagaagggactgagggaaggaagcagaggctccgaacgagacaggctgccgggtggcggggtagccgcgtgcmctgggtacctagcccagccccgcccgggaatctctttgctgctgcccctcctcctgtagtgggggaggggcgggccctgcggaaatggcctgatgagttc

SEQ ID NO: 461857 - DNA, 201 bp, Homo sapiens
ttttgcgtaatgtgcattagcaaggacatttttaaatcatcatgtttgttgccaacgaaacagccatagagctgaaatttgaagactgaaaccgccgagcrtttagtggctaatagcaaagtattgctgtttcagtttgttgtctcaaaccatcatcttgaagtgtgcatgctactaatatccattttatagacaaggctt

SEQ ID NO: 461858 - DNA, 201 bp, Homo sapiens; identical to SEQ ID NO: 198090

SEQ ID NO: 461859 - DNA, 201 bp, Homo sapiens
gcccaccagtgactttttctaagagctcccggcgtggtggaagaggggacaggtccctcacccacccacaatcctattctcgggctgagaaccctgcgtgrggacagggctcgcctcaggaatgggctgtttttggcctaaccctcagaaacactggggctggcacaaactcttggtttcttcaacaggagaattttactg

SEQ ID NO: 461860 - DNA, 201 bp, Homo sapiens
gaggggtcgagtagcagtctgggagcctccgagtggagcaggtattttagtccttttaggcctttatgaagggataagccacgcacctcctgaccggactscatattctctcaacgccccctccctcccaggtgtggccaaacgtggacaactatgagctgtacgaaaagctggagctggtcaagggccagaagcggaagg

SEQ ID NO: 461861 - DNA, 201 bp, Homo sapiens
aggagggcactggagctgtcttgtccttgctggttttctggatggttcccagagggtttccatggggtaggaggatgggctcgcccaccagtgactttttytaagagctcccggcgtggtggaagaggggacaggtccctcacccacccacaatcctattctcgggctgagaaccctgcgtggggacagggctcgcctcag

SEQ ID NO: 461862 - DNA, 201 bp, Homo sapiens
aaggaacagacagatgctctggagggcatgggtgcccgtgggttggagcaggaagaaagaagctggttgtgggaaagtgtgttgggtgtggttttcttgastttttcttctttctattcctgcctcagcttccccctataaccgctgcaagggtagtatatacctggtgttcgacttctgcgagcatgaccttgctgggct

SEQ ID NO: 461863 - DNA, 201 bp, Homo sapiens
tgcggctccatcacccctgaggtacggggccccggtccccacggggtgcagagatcgaggtcccccggcagaggaggagtggggagtagaatggaaggagygctcctctctggaagggaggctggtttggtgacagggcctgtcttggggtggggagtgtgtgggagaaaaaaacacctgacacaggctgtgcgccagtct

SEQ ID NO: 461864 - DNA, 201 bp, Homo sapiens
tgggagcagcccgctgagtggactggagtggagcattggctgagagaccaggagggcactggagctgtcttgtccttgctggttttctggatggttcccaragggtttccatggggtaggaggatgggctcgcccaccagtgactttttctaagagctcccggcgtggtggaagaggggacaggtccctcacccacccaca

SEQ ID NO: 461865 - DNA, 201 bp, Homo sapiens
ggtgcttcctcggggcctgccctggcccagaagaggcactcagaaaatatttgaccggtgaaggaaggaacagacagatgctctggagggcatgggtgccygtgggttggagcaggaagaaagaagctggttgtgggaaagtgtgttgggtgtggttttcttgactttttcttctttctattcctgcctcagcttccccct

SEQ ID NO: 461866 - DNA, 201 bp, Homo sapiens
ctcccaacttggctgtcagtacagaccccagggctgggctctgtactgcgctcactcttgaccactttcccctctttctcacccagttccccattacagcmttgcgggagatcaagatccttcagcttctaaaacacgagaatgtggtcaacttgattgagatttgtcgaaccaaaggtaagttatttggttcttacgaga

SEQ ID NO: 461867 - DNA, 201 bp, Homo sapiens
tcttcttcccaggggagcgggactacggcccccccattgacctgtggggtgctgggtgcatcatggcagagatgtggacccgcagccccatcatgcagggyaacacggagcagcaccaactcgccctcatcagtcagctctgcggctccatcacccctgaggtacggggccccggtccccacggggtgcagagatcgaggt

SEQ ID NO: 461868 - DNA, 201 bp, Homo sapiens
cacttacaggaattttttaagagcaattacacaatgatagtctttatctcattgaacactcactgcaatttcgatggtctcattcgttcattgagcatatwtattaggtgtgtcttccaagggtcatcccattcgggacttaatacagctggaaacagtggtggcccgcccccaccccagtggagctcaccttccagtagg

SEQ ID NO: 461869 - DNA, 201 bp, Homo sapiens
caggagaattttactgtgtttcttttggttccattgtttggagacattcctgggcacagtttggtccgttagaattaaaagttgaattttttttttttttwaatttttttttttcctccaggacttgtgtgttttgttctgcgcacacaccgccaactgttcccccacagtcagcagcaggttgggcctgaccattgggac

SEQ ID NO: 461870 - DNA, 201 bp, Homo sapiens
aaacttggaactaggcacacctaaactgcctcttcttaactcagatggacccatggtgactgctttttctggtcctctttcatcgtagctggtgcttcctyggggcctgccctggcccagaagaggcactcagaaaatatttgaccggtgaaggaaggaacagacagatgctctggagggcatgggtgcccgtgggttgga

SEQ ID NO: 461871 - DNA, 201 bp, Homo sapiens
attacaggtgtgagccactgtgtccagccaaggaaaaaattcttgattggtgtatttgttttcctgagacttctataactaattgctacaagcatgctagyttaaattaacagatttattctgttggttcccaaagtcattggtggcagggttggttccttctggaggatctgagggagagagaatccttcccgtgactcc

SEQ ID NO: 461872 - DNA, 201 bp, Homo sapiens
ccttcatttacagaaactgacccagaccacaacacaaaaggccagtaaaagtaagaaaaaaaaattttttttttttttttggagacggagtctcactctgytgcccaggctgaagtgcagtggtgagatctcggctcactgcgacttctgcctcccgggttcaagtgattctcctgtctcagcctcctgagtagctgggat

SEQ ID NO: 461873 - DNA, 201 bp, Homo sapiens
gccaaggcgggcggatcacgaggtcaggagtcggaggttgcagtgagccaagattgagccactactccagcctgggtgacaacagcaagactctgtctcawaaaaaaaaaaaaaaaaattagctgggcatggtggtgcacgcctgtagtcccaggtacatgcctgtagtcccagctgctcaggaggctgaggcaggagaat

SEQ ID NO: 461874 - DNA, 201 bp, Homo sapiens
ccagctgctcaggaggctgaggcaggagaatcacttgaactagggaggcggaggttgcagtgagctgagatcgtgccactgcactccagcctggtgacagygagactcccgtctcaaaaaaaaaaaaaaaaaaatccaggctgggtgtggtggctcaggcctgtaatcccaacactgggaggccaaggtgggtggatcacc

SEQ ID NO: 461875 - DNA, 201 bp, Homo sapiens
gggagaaaaaaacagactgaaggtagaatccttgggaacctttgaggagcggcacattctggcaggcacgttttctgtgagcctgaagttaggaagagacrttctggaggtcaatttcctacatcctcttacaggcggagaccttgaagtggggccaggaaggaaggttggcaaaacctttgaccagaactgtccttcatt

SEQ ID NO: 461876 - DNA, 201 bp, Homo sapiens
tgcagtgaacagatggctgaggaggctgtgtagatgggaaaggccttcgccagctcgcggggatgagctcaggccgggggactgagttctgtgtcctggctttgtttgttttttaagagcctggagtcacatcctgccctttttttttttttaaaggaaaaatggtggttttattcatttgtacttaaaccagccaaagta

SEQ ID NO: 461877 - DNA, 201 bp, Homo sapiens
aaggccttcgccagctcgcggggatgagctcaggccgggggactgagttctgtgtcctggctttgtttgttttttaagagcctggagtcacatcctgccctttttttttttttaaaggaaaaatggtggttttattcatttgtacttaaaccagccaaagtagtactgatgtgattatgattcagcaaatacaagatctct

SEQ ID NO: 461878 - DNA, 201 bp, Homo sapiens
ttggcctcaagctctggtgtgacatgggtgctgttttcacctgtggagggaggtatgtcgcctggaataaaggctcgccagagggcagggtcttgtggggmttttaccatgttctcagcacctagatagtgcctggcacacatgagtctctgggatacagtggagtgagtgcagtgaacagatggctgaggaggctgtgta

SEQ ID NO: 461879 - DNA, 201 bp, Homo sapiens; identical to SEQ ID NO: 198125

SEQ ID NO: 461880 - DNA, 201 bp, Homo sapiens
gtctatgcaatgtcagtttggaatcttcttgaaagtttaatgtttttattaggagatttaaagaaaataaaggtctacaatatctttaggtttttttttttcctgtttaccgcacaaactgaccacatggcatgtctatcaggatggagggtgtccatgttctcctctgtctttagggaggtgataaggagatgggcggag

SEQ ID NO: 461881 - DNA, 201 bp, Homo sapiens
aaccacccccatgatccaatcacctccccccaggcccttcccttgacatgtggggatcacaatttgagatgagatttgggtgaggacacagagccagaccrtatcatcctccatccctggcagccaccaatctagttcctgtcactatggatttgcctattctggacatttcatataaatgagataatcaactctatagtt

SEQ ID NO: 461882 - DNA, 201 bp, Homo sapiens
ctcaagtcccctgtattagtctgttctcacactgccataaagaaataccgaagactgggtaatttacaaaggaaagaagtttaattgactcacagtcccayatgggtgccgaggcctcaggaaacttaaaatcatggcagaaggcgaaggggaagcgaggaccttcttcacatggcagcaggagacagaagcagcagcaaa

SEQ ID NO: 461883 - DNA, 201 bp, Homo sapiens
gtgaggacagctgtgcagccaggaaaggaattaccagcaaacacctgggagcatctcacctccactggcaaacatttaccaggcacccagcacgtggcaggcactgccaggccccttcccttctgttctgtaattgaactcccactgcaggctttactcccattatacagaggaggaaactgaggccctgagaagtggctg

SEQ ID NO: 461884 - DNA, 201 bp, Homo sapiens
cacacgggtgaggacagctgtgcagccaggaaaggaattaccagcaaacacctgggagcatctcacctccactggcaaacatttaccaggcacccagcacrtggcaggcactgccaggccccttcccttctgttctgtaattgaactcccactgcaggctttactcccattatacagaggaggaaactgaggccctgagaa

SEQ ID NO: 461885 - DNA, 201 bp, Homo sapiens
gcgggaaagaggggctggctggcctgggagggagcttgaagtcaggaggagtcaaggggaggggtttggactgtacctggaggggtgggagccacagaagstgtgaatccgagtcacatttgtagtttagaaccaccaagggcagccatggggttgattgcttgggactgcaggttgcagaagggcaggtgactgtcagct

SEQ ID NO: 461886 - DNA, 201 bp, Homo sapiens
gcaacacgtccaccagcagcagcgcctctgggggccttggcatgaccgtggagggccctgagggcagtgagcgggagcaccggcccccggagaagccgcckcggccaccccggcccctgcatctgtccgatcgctctttcaggtgaggcctactgcttggtgccccctggagaacagacctctcccggtggtgccttgaac

SEQ ID NO: 461887 - DNA, 201 bp, Homo sapiens
ctcccctcctcagctcctgaggcttagcccagtggcaggagggtgggcttcatcagccgggaggggaaatgcctttgcctcacctctcacccgagggaggygctatacagggcgtggcccttcccactgaccagagctcaggaactcagccggctgggcagtgcactctgccctggcccggggcgctgacgtccctctcca

SEQ ID NO: 461888 - DNA, 201 bp, Homo sapiens
cctgaaccctgcagtagagacttgcaggcagcagttacttgacactcatccctgattggttcggttgggttcaaacattggttcaaacatttcattatctrtctcttctgagcctgttgtatctggagcagagctgggcaggaggtggtaagcagaggctctggggcctcctagaccctttgcagagggaaccggagatgt

SEQ ID NO: 461889 - DNA, 201 bp, Homo sapiens
ctccttgcaggaggaggtcctggccatgctaggactgtgagctgctccccctgaacccctggcaggagccagacgctgctgtgctgccacgctggctcttyagcccctggacggacgccttggctggtccccagggcaggctcctcccaggcggctgtattctcttctcttcggggaagcacaaggcagatgttgtcgatt

SEQ ID NO: 461890 - DNA, 201 bp, Homo sapiens
agtggctttgccagagcccccaagccaggagggggcagagagacaggattggaatccgagcccttctgaggccagagccgaaaggctgcagggggccctgygcctgggcaggctgtgggtggccagggcatagctgattgctcccctcgccacaggtcaccattggtatgttcctgctctctggagatccctgcttcaaga

SEQ ID NO: 461891 - DNA, 201 bp, Homo sapiens; identical to SEQ ID NO: 198134

SEQ ID NO: 461892 - DNA, 201 bp, Homo sapiens
cctgcctccccccggcaaatgtcctcccgctgccttgcagcctgcactttgcacatgctcacccccagcacagtcccactggcccctcacctccccttccstgagctccttcccaaggactcctggtcactgcctgctgtgcagtcagaggcccagggtccagcagcccggcgggaacgggtgctgcctcttcctccagtt

SEQ ID NO: 461893 - DNA, 201 bp, Homo sapiens
ccaggtggctgagggttcagatcccttttgcttataagcagccttcctaacccatacccttttctcattttcaatttaaatttcaattatggaaacaactyttggacagaaacgaagaaagagtctctgataacccttccaccccacctttggtcagacctgctctgagctccctgcctgccttctggccattatcccttc

SEQ ID NO: 461894 - DNA, 201 bp, Homo sapiens
agtggggacagggtcttggatcccattgaggaatataaattttgagccccaggctgaggacttgcctggcctccaggccctggagccactgtctccctacstgttggcctttccattgcccaaacctgcttccccattagggaaagtgtgggaagttccaggtcttagtccacagggtctggatttcacctctgttttccc

SEQ ID NO: 461895 - DNA, 201 bp, Homo sapiens
tagaaaatgaatgttagaaggtgcctgccgaggcgggacagagtgtttgctcgcgctggagaaggctctgctcagccctgagagtcccttcctgccccacygatactggcactttaaaaaggaagctgaccgcacagtgtccagacgaattggcccccagaagatggggagttctgtcctgcccttctgtgtctgcgtgac

SEQ ID NO: 461896 - DNA, 201 bp, Homo sapiens; identical to SEQ ID NO: 198135

SEQ ID NO: 461897 - DNA, 201 bp, Homo sapiens
gtgtttgctgtgggcatggatcctggggaggggaagctgctaccacagcccagtgtgacacccattgtgtcttcttgctttgaactgctggggtcttgggyccaaccctggcatgggagcccagcttgcagctctggggtcagacagccctggctttaggtcacagccctctcccggccagtagaccttgggcaggtgact

SEQ ID NO: 461898 - DNA, 201 bp, Homo sapiens
agacatttccatcctgcttctgctacttgctgcctgtgtgaccttgggcaagggacttggcctccaagcctcagtgaccgcccctgtgaagcagggctgcyggtgcctgcctcctggtgctctcagaggacatggtgagataatgtctgtcagacgcccagcgcggctcctggcatacagtgcacacgctgcatgtgctta

SEQ ID NO: 461899 - DNA, 201 bp, Homo sapiens
cttgggtgaaatgggttaatgcctattatgtgcccatcgtagtctctggcatggagtacgggctcagtaaaggctggcagcattggtattcatccagggcmgttattgtaagggccctaggggtgagagcagaaaggaaaggtccatattcctccctctgtccctgtaattgtttctcttctctcttcctgtggttcacct

SEQ ID NO: 461900 - DNA, 201 bp, Homo sapiens
ccatctctgtcctccacacagggaaactgggctcagagaggttagtggctttgccagagcccccaagccaggagggggcagagagacaggattggaatccragcccttctgaggccagagccgaaaggctgcagggggccctgcgcctgggcaggctgtgggtggccagggcatagctgattgctcccctcgccacaggtc

SEQ ID NO: 461901 - DNA, 201 bp, Homo sapiens
ccgcacccccagctgaaaatggggtgagttgctctgcccgttgccctcctcccctcagatctggggggattgtgggagatgcatgaggtccctgggattcygcagtcaacttgctgcttgtgtctccctccctgtgcaggagctgaaaggcgggaaggcttattccaaggtaagaggggctgtgtgaaggggcagtgggat

SEQ ID NO: 461902 - DNA, 201 bp, Homo sapiens
aggaacccaggagcacagctggaacctggagttccacacgcctgtcagagcgctactgtctcttagctgggtgcccagctccctgcatcagaatcacctgrgagctcgtttaaaatgcccttttaagacctgcagcagtgactctcaaccagggttgatttggcgatctctggagacattttcggttgtcacacctggggc

SEQ ID NO: 461903 - DNA, 201 bp, Homo sapiens
cctgtcagagcgctactgtctcttagctgggtgcccagctccctgcatcagaatcacctgagagctcgtttaaaatgcccttttaagacctgcagcagtgrctctcaaccagggttgatttggcgatctctggagacattttcggttgtcacacctggggctgtgctactggcagggtgctgctgaacatcccacagtgcg

SEQ ID NO: 461904 - DNA, 201 bp, Homo sapiens
agagatgcctgtggctgagggggcctctctacctgtgtccccactcactccaggagcactggctttggtcacgtcttagcagcagggccttgctccgttgytcccttgccctggtggtgggggggccagaccgcctccggaatcctgccacctgtgactgtctgactgcttagtgcttcagctgtcccttccttgtgtcct

SEQ ID NO: 461905 - DNA, 201 bp, Homo sapiens
agccttgtggagcctggagggggctcctcatagaaagtgaggcttaggggctttcattggctaaggaaacgggactccctcattcatgctgtttcctctcyttggaactgtctcctccacctggctactccccaggctcattctatcctgagcttgaatgtcaccttccctgattcatctgttcccccgccctctcctggt

SEQ ID NO: 461906 - DNA, 201 bp, Homo sapiens
agccaggagggggcagagagacaggattggaatccgagcccttctgaggccagagccgaaaggctgcagggggccctgcgcctgggcaggctgtgggtggycagggcatagctgattgctcccctcgccacaggtcaccattggtatgttcctgctctctggagatccctgcttcaagacgtgagtgctggcacaggccta

SEQ ID NO: 461907 - DNA, 201 bp, Homo sapiens
tgaggatgaacaagctgctgccactcacagcaggaagcagtctgacaaacaacgttgagcaaagaaagccggagacaaaagagtgtatgatgcggccaggygcagtggctcactcctgtaatcccagcactttgggaggccgaggcaggaggatcatttgaggtcaagagttcaagaccagcctgaccaacaaggtgaaac

SEQ ID NO: 461908 - DNA, 201 bp, Homo sapiens
aatgctggttgaatccacctccgggggaggcctgctcacaggcacagtgtggagctccaggagggcaggatggagatggacacagaattctgtcccttggrgctgagtggagcaggggccgtggaggttcgatgggattcttagattggcagggcacccactttccttcacagagcaggagctctggaggctgagcacact

SEQ ID NO: 461909 - DNA, 201 bp, Homo sapiens
tgggaacagagcatttccagcatttgttgttgttgttttactcacctaacccttagaaaatgaatgttagaaggtgcctgccgaggcgggacagagtgttygctcgcgctggagaaggctctgctcagccctgagagtcccttcctgccccaccgatactggcactttaaaaaggaagctgaccgcacagtgtccagacga

SEQ ID NO: 461910 - DNA, 201 bp, Homo sapiens; identical to SEQ ID NO: 198133

SEQ ID NO: 461911 - DNA, 201 bp, Homo sapiens
ctgctgggttgagctctgtggtccttacacagggccggggtgagtgtgtggcttcaccatggagaagctcattgtctaggcctgtagctgatggcagtccrctcactctgccaggcgcagggctgagcccaggcctcaccttgctatgccctcccctctggtctgccaggcaggccttggttccatctctgtcctccacac

SEQ ID NO: 461912 - DNA, 201 bp, Homo sapiens
cccctcccctcatgagtccgcacccccagctgaaaatggggtgagttgctctgcccgttgccctcctcccctcagatctggggggattgtgggagatgcawgaggtccctgggattccgcagtcaacttgctgcttgtgtctccctccctgtgcaggagctgaaaggcgggaaggcttattccaaggtaagaggggctgtg

SEQ ID NO: 461913 - DNA, 201 bp, Homo sapiens
tatgccagccagcagtccaagatctccggtgagtggctgcctggccctgcccccgtggcctcctccttcctcgggatcccccattgtgatgctcccctgcrtcgcccctgacaggctacagcacagagcactcgcgctcctccagcctctcagacctgacgcaccgccgcaacacgtccaccagcagcagcgcctctgggg

SEQ ID NO: 461914 - DNA, 201 bp, Homo sapiens
tggctgcctggccctgcccccgtggcctcctccttcctcgggatcccccattgtgatgctcccctgcgtcgcccctgacaggctacagcacagagcactcrcgctcctccagcctctcagacctgacgcaccgccgcaacacgtccaccagcagcagcgcctctgggggccttggcatgaccgtggagggccctgagggca

SEQ ID NO: 461915 - DNA, 201 bp, Homo sapiens
ctatcagggatttgtaccctgagcgattgtgcaggggaggggtgttcaggccaccttgcacccgaactggccactggggctgtcatatgattcaagagtcyaggccagccacgggttccccggcacccccaggcgcctgggaaggcccgatcgcaggcactccctagtctggctggagggaggtggctggattttggccta

SEQ ID NO: 461916 - DNA, 201 bp, Homo sapiens
cagtggctcactcctgtaatcccagcactttgggaggccgaggcaggaggatcatttgaggtcaagagttcaagaccagcctgaccaacaaggtgaaaccycgtctctactaaaaatacaaaaaaattagccgggcatggtggcgcatgcctgtaatcccagctactcaggaggctgaggaggcaggagaatcacttgaac

SEQ ID NO: 461917 - DNA, 201 bp, Homo sapiens
tgctgtctttgctgaggggagtcatgtctggaaggaccttctgggggcctgtaatattctgctgcttgggggctggtttcatgggtatgttctctctgagwatctgtgagttctgcacgtctctgtgccagaaacaagactcgagatgccccacacttttggttggtgctgggtggatgcctgagtcctctagacaaaaat

SEQ ID NO: 461918 - DNA, 201 bp, Homo sapiens
tgcttgggggctggtttcatgggtatgttctctctgagaatctgtgagttctgcacgtctctgtgccagaaacaagactcgagatgccccacacttttggktggtgctgggtggatgcctgagtcctctagacaaaaatgaggcacctttttgggtgcccggaagcctggaggagatccctgggtgttttccttggtcttt

SEQ ID NO: 461919 - DNA, 201 bp, Homo sapiens
agggttgccagccaggcatgcacttttgctccaactctgaggagagcccctgatgggcccatttgacccctgtctgtaggaatcctgtgagcctggcagcytgaggccaggaggtggctcccacagccctacggcacctggccccacgtcaccctggtgatggagacctggggttgtcaaggctctgggatcttcttgttg

SEQ ID NO: 461920 - DNA, 201 bp, Homo sapiens
ttctgtcctgcccttctgtgtctgcgtgacctcacccagcctaggagggaggtgcattcagggtagatttgcctctcattcaaagttctggggctttgggyggaaaacagccagctttggcgctgttggggagactcctccagaccaggaaccccagaaggagacagagcctgccacatcctcccacgccaggccctgggc

SEQ ID NO: 461921 - DNA, 201 bp, Homo sapiens
gtctaattgtatatcttaaagctaaaaatgaaacccagtctctgtaattacctgttcctggcagcggggagcgggggaagcacgccctgcaaccccaggcycgggagggccgttcatcactgtctcttcccaggcgggcggccagccctgccagcaggtcccatgtactgcatggggtgactccacttggtaacttgggag

SEQ ID NO: 461922 - DNA, 201 bp, Homo sapiens
ggcaggccaggcgggcccgtgcagcttgtgggcaagaaggagctggcaaggaccggcgctgctggagactgacccagccctctggctgaggacatgcagcrgctcctaaatgtagagatgcctgtggctgagggggcctctctacctgtgtccccactcactccaggagcactggctttggtcacgtcttagcagcagggc

SEQ ID NO: 461923 - DNA, 201 bp, Homo sapiens
aggaggaaccaggcttcaggcccagctcagctatctactggctgggaggtgtggggcagcttgcctagcctcggtctcttcatctttgaaatgggctgagyagtccagcctaagactattgtgagggtcatgaggcggttggcagagcctggctttggaggaggtaatggcagtgcagggaactgcccaaggtctcagagc

SEQ ID NO: 461924 - DNA, 201 bp, Homo sapiens
ccaggcggaagaaggactcggtggagagccacccgacctgggtggacgacacgcggatcgatgcggatgccatcgtggagaagatcgtgcagagccaggayttcacagatggcagcaacaccgagggtgagccgtgctgggctggtgggggcgaggccacctgctccaagggctggccctgccgcgctcagcctccatcct

SEQ ID NO: 461925 - DNA, 201 bp, Homo sapiens
gatgttgtcgatttaaattgtttccttattagactctcgctctctggcctgggctgggtttcatcagccgggaactctgattgcatcactttgccgctcaytcctccaggaaccaggccaagggctgggagagcaggcagggtgggagtgagcgtggctgagggaggggcagacggatggcaggcaagggacttaagtgat

SEQ ID NO: 461926 - DNA, 201 bp, Homo sapiens
ccgctcactcctccaggaaccaggccaagggctgggagagcaggcagggtgggagtgagcgtggctgagggaggggcagacggatggcaggcaagggactyaagtgatggacttaagtgatggggccctgttctgggggaccagcactgtcaggaacccaggagcacagctggaacctggagttccacacgcctgtcagag

SEQ ID NO: 461927 - DNA, 201 bp, Homo sapiens
ctcttctccatggtggactcttggcctcccctcctcagctcctgaggcttagcccagtggcaggagggtgggcttcatcagccgggaggggaaatgccttygcctcacctctcacccgagggaggtgctatacagggcgtggcccttcccactgaccagagctcaggaactcagccggctgggcagtgcactctgccctgg

SEQ ID NO: 461928 - DNA, 201 bp, Homo sapiens
cgcacttactcccacttccctccccatccctcgatcctctgtccagaggtcccaagggcctgttcagaccctgaactctgcccagcagcccctcactctgkcctctaccagggcgccttccctggggctcctgctcatcctgcagtgcccctcccctcccaacccctgtgggggtgtcccatcactttccccagcacccac

SEQ ID NO: 461929 - DNA, 201 bp, Homo sapiens
tgggattataggcatgagcacaatgcctagcagcagtaagttttaacaaaggaagaaaagaggcacaacattctgaagagtgattttaagaatgatttgcrtaataattataaactaaatatatgattcctttgtttaactgctctaaactgtgatcctgtaggtccagataagactacaaggacatgctgtgggagaaaa

SEQ ID NO: 461930 - DNA, 201 bp, Homo sapiens
aattgtattgaaacaaatttataaggatgtaattaataagacagaaaactcatttgtaacttataggtgaaagtacttgtgctcactttctagggatccttttttttttttttttttttttgaaacagagtctcgctctgtcgcccaggctggagtgcagtagttcaatcttggctcactgcaacctttgcctcctggact

SEQ ID NO: 461931 - DNA, 201 bp, Homo sapiens
tatctggattccttgttggtgacttggttccctggcagtactcatggttgattgtctgaggaagcccctgagatgttaataaataaggagcacttaagacytgagtcttcctgttcagtggttattcaggcaagctgagaaggggtctgagcccttctgtagttcaactcagtcaaggttcccaggcacaggtccccagaa

SEQ ID NO: 461932 - DNA, 201 bp, Homo sapiens
acagaggttaatgcctgaaggcctctacgcacaggacaaggtatgccgtaatgaggagcagctcctgagccaactccaagagctgcagctggacgatgagmtagtgcaaacactgcaaaaacaatgcatcttactgctggaaggtaagtagaaaagagtctcttgtcacggtgtctttggcccatgaccctgagctcccct

SEQ ID NO: 461933 - DNA, 201 bp, Homo sapiens
tgtttctacactatagatgaaaagcccttcttaaactgtaaaataaatgttactataatcccctaaagagtcactgttgtaagtatcagttccttttttcttttttttttttttttgtttgagacggagtttcactcttgttgctcaggcttgagtgcaatggcgggatctcagctcactgcaacctccgcctcccagatt

SEQ ID NO: 461934 - DNA, 201 bp, Homo sapiens
agaaagcatgtttattgttacaaacagagcagcattcagacttttgtgggccccttcctatgtaaactttttatttatttatttttttgagacagagtctygccctgtcatacaggctggagtgcagtggcgcgatctcagcttaccacaacctccgcctcccgcgttcaagcgattctcctgcctcagcgtcctgagtag

SEQ ID NO: 461935 - DNA, 201 bp, Homo sapiens
cccctcaaattcacatatgtctcatgtgcaaaatacattcatcccatctcaacatatccagaagtcttaactaattccagcaccaactgttttttttcccttttttttttaacaatctttctctttctttcttctttcttttctttctctctctctttctgtcttctttctttccttccttccttctctctttctttttct

SEQ ID NO: 461936 - DNA, 201 bp, Homo sapiens
ttatctttgtgtttctagcacttagtggaggacctgacatttaacaatctttcataaatacttattggatagatgagggagaaaagaaaagaaaccaagaytttgacttttaaaccgtgcttacttcctgaaattgtgcacccactggtggagcatatgagataatagtaacataaaggttgcaaatgttacaaaagttaa

SEQ ID NO: 461937 - DNA, 201 bp, Homo sapiens
tccatctaaaaaaaaaaaaaaaagttactagaaaagtgtgagtaaatatacatgacactggaaagagtgattatttctgatttttattttatatttctttrtatgtattttcaaattttccgcaattctataatttttaattttatctttaagaaaaaaagcacaaaataaaccataaagcttgttatagttactcaccta

SEQ ID NO: 461938 - DNA, 201 bp, Homo sapiens
tatttagcatgctacattacaatttatttacaaatagttctctcttactagactgtcagctacttgaaaacagaaattatgacttctttatctttgtgttyctagcacttagtggaggacctgacatttaacaatctttcataaatacttattggatagatgagggagaaaagaaaagaaaccaagactttgacttttaaa

SEQ ID NO: 461939 - DNA, 201 bp, Homo sapiens
aagttactagaaaagtgtgagtaaatatacatgacactggaaagagtgattatttctgatttttattttatatttctttatatgtattttcaaattttccrcaattctataatttttaattttatctttaagaaaaaaagcacaaaataaaccataaagcttgttatagttactcacctatttgtaagtctttggtttggt

SEQ ID NO: 461940 - DNA, 201 bp, Homo sapiens
ctatctggagatgtcaggtacaggggtcagcctgaggcaaaccaagactgcccttgttggttagcatggtggctcacacctgtaatcctagcattttgggwggccaaggtgggtggattacttgagttcaagagttcaagccagcctgggcaacatggcaaaaccctgtctctacaaaatattagccaggtgtggtcagtc

SEQ ID NO: 461941 - DNA, 201 bp, Homo sapiens
cacattgcctttgaggcagcctaccagattgccattgatgctgctgctggtggtatgacccattcacagctgttcaccatcgcccgctacatggagctccrtggctacccgctacgtgccttcaagctggcctcattggccatgagccatcttaacctggcctacaaccaggatactcacccagccatcaatgatgtgctc

SEQ ID NO: 461942 - DNA, 201 bp, Homo sapiens
tcagcatattcatgaacaattttttgttttcttttggttggcattaccttcatgcattttgtgttgttatcccagaataccacagactgggttattttatwttattttattttattttattttattttattttatttattttattttattttattttatttgagacagagtctcactctgttgcccaggctggaatacagt

SEQ ID NO: 461943 - DNA, 201 bp, Homo sapiens
tcacccctactgaggctactagtattgtagctgccacagccgtatcccacaccactatcctgcgcctcagtcttgactatccacagcgggaggaactggcyagctgtgctcgcacactggctctacagtgtgctatgaaggatccacagagctgtgccctgtcagcccttacactctgtgagaaagaccacattgcctttg

SEQ ID NO: 461944 - DNA, 201 bp, Homo sapiens
tggccacggctgagctcaggctccccctgacaggtgtgcgggccctggtgagcatcttgcagagctggtacacactcttcacccctactgaggctactagyattgtagctgccacagccgtatcccacaccactatcctgcgcctcagtcttgactatccacagcgggaggaactggctagctgtgctcgcacactggctc

SEQ ID NO: 461945 - DNA, 201 bp, Homo sapiens
gctccccttgccctggtttgcctcatatcatctcaaggttgctgaggaggaagaattcatctctgcaggccaagttcaaaccccaaatggtaatctgggtygacctgaatcaggacccagatggccacggctgagctcaggctccccctgacaggtgtgcgggccctggtgagcatcttgcagagctggtacacactcttc

SEQ ID NO: 461946 - DNA, 201 bp, Homo sapiens
accttcaactctctgacctggggaaagaagggataggaagagaccccaaacagggtctggccatctgggatgctccccttgccctggtttgcctcatatcrtctcaaggttgctgaggaggaagaattcatctctgcaggccaagttcaaaccccaaatggtaatctgggtagacctgaatcaggacccagatggccacgg

SEQ ID NO: 461947 - DNA, 201 bp, Homo sapiens
gatgaccttatcaacccttaactggagacgcagggagatggtacgatggttggtgacctgtgctacagaagtgggtgagtctcccacctccctctacccccaggggaaaggagtttctaggccctactcttgggacaggacaatcaatccttagagctctcatattcctatgagatcttaggtccatcaggagatggccta

SEQ ID NO: 461948 - DNA, 201 bp, Homo sapiens
atgtttatcagcggagagaccactgtttaaagcaccagaaaatatttgtcgcataaatgaatgcaaggggagggagaggtcacaacagttaggcatagcccactggaaaggcctcttttgtgcccaggtgatgcggatgaccttatcaacccttaactggagacgcagggagatggtacgatggttggtgacctgtgctac

SEQ ID NO: 461949 - DNA, 201 bp, Homo sapiens
aaaaatacaaaaatgagtcactgtgcctggctcgtttttcattagcctttcctttattttcctgtatttttgcacttgaggctgagagtgggaggatcacytgagcccaggagacagaggccgaagtgagccaagattgcaccactgcactccagcctcggtggcagagcaagaccccagagataaaaataataataaagc

SEQ ID NO: 461950 - DNA, 201 bp, Homo sapiens
aaaggatacatttcttttatgtaagtactgcatcagaagtagtattccttttaaaaggggaaaattgcaaattagtctcttcagggatgtctgtaagtttraagctatgtcaatagacttacagtctgatctcagtattgtaaaggttagagtatgaactctattgaaaacatatgaatgttttcagcatctgcattttta

SEQ ID NO: 461951 - DNA, 201 bp, Homo sapiens
tacttatattagctttctacaacaggttccatagtattctacaggctctttcctgatctatttctgtaaccagtactggtataagcaatgatacaaaaagrggagacatcacagagataaaatggactggactgaagatccaagtgtattggatgagtgaggactgaataagaagaagacatagaactgagttccaacatg

SEQ ID NO: 461952 - DNA, 201 bp, Homo sapiens
tgtgattctcagccttccccaggaactactacttctgtatacatgtttatcccatacttatattagctttctacaacaggttccatagtattctacaggcyctttcctgatctatttctgtaaccagtactggtataagcaatgatacaaaaaggggagacatcacagagataaaatggactggactgaagatccaagtgt

SEQ ID NO: 461953 - DNA, 201 bp, Homo sapiens
ccagcttggatgacagagcaagtctctgtctctaccaaaaaaaaaaaaacaaaaaaagaaaaaaaaagcagccagtgcaagtgaggggttttgaaacttawgcttcattataatcatgttatatctatttttattcagagatcaaaccttctcctcttatttaaagtccagtaactgggtctttgcgtctctgtgtctgag

SEQ ID NO: 461954 - DNA, 201 bp, Homo sapiens
cttccaccatgattgtaatgttcctgaggcctcccaagccatgcttcctgtacagcctgcagaaccatgagccaattaaacctcttttttaaaaataaatyaccgattctcaggtatttttttatagcagtgcaagaatgtaccaatacagaaaattggtactgggaagtcaggcattgccataaagatacctgaaaatgt

SEQ ID NO: 461955 - DNA, 201 bp, Homo sapiens
cacgaactccagggtgaggactctttctatattgtgtgtttcttcagagcagtaactgaatttcattgacctctgtgtctgtggcaaagcctatcatgtaygtgtgtaggagatacccaatacataatttatgaattgatgaatttacatgtaaaatgagaatctaagtttattactctagaatctctaaacacagtttct

SEQ ID NO: 461956 - DNA, 201 bp, Homo sapiens
tatttttatctttttcttgctctggaaattaatctgaatgttttcagtaatgtgtacctttctttggattagacctaaatgtggctttatgtgataatttygctaggttttatgagtgtacttgtaaatttgggtcttattttaattaaccataactgtctgaaacttgaatcttgtaaagttttctctgcatttgttaat

SEQ ID NO: 461957 - DNA, 201 bp, Homo sapiens
acctgtaattaatctttacctataattaatttgaatgtaactttttgattttgctttaaacaaatgatagtaaatatttttaaacctgcagcttgttttgstgagaaaaaacctctgtggggtttaaccaaacctggaggctatgaagttagtgaatttatttttatctttttcttgctctggaaattaatctgaatgttt

SEQ ID NO: 461958 - DNA, 201 bp, Homo sapiens
gtttcaagccattaccaatgctgtaaaaactgaaattttagaattttaataaacctgatcattattttctaataatatttctagttatattgttttatagwttataattccattagttaaatgtggtattaattgcctacagtacaatattatggagaggcagtatggtataagagttaagagtttgagcttcagaaccag

SEQ ID NO: 461959 - DNA, 201 bp, Homo sapiens
taaggatacaggtcatctcatgaaactccagggctaggaagtggtagaacctcaggaataacctggagccaaggattgcagtgctaaagagaacttaggawgccctcttgccagctctcactctttctctctccttcattctttctcattactaactgtaaggaatacggctgtgctttggtcaaaaataggccaaggtaa

SEQ ID NO: 461960 - DNA, 201 bp, Homo sapiens
attagactgtgcaaagacaatttaaacactcttgtgactttatccccagccaatcgatagtttcagttccctagacccctgtctgccaaaatgcccttaamaccctagcctccaaattgttggggacatgaatttgagaaatgcctcctgtcctgcttggctggtcctgtgatattaaactctttcttttcagcattatct

SEQ ID NO: 461961 - DNA, 201 bp, Homo sapiens
cactgcaacctccgcctcctgggttcaagtgattctcctgccccagcctcccgagtagctgggactacaggcatgagccaccatgcctggttaatttttgsatttttggtagagacggggtttcactatgttggccaggctggtctcaaactcctgacctcaggtgatccaccacctcggcctcccaaagtgcataagcca

SEQ ID NO: 461962 - DNA, 201 bp, Homo sapiens
cctcacttctcagatggggcggccgggcagagacgctcctcacctcccagacggggtggcggtcgggcagagacgctcctcagttcccagacgaggtcgcrgccgggcagacgtgctgctcacatcccagatggggcggcggggcagaggtgctccccacatctcagacgatgggcggccgggcagagacgctcctcactt

SEQ ID NO: 461963 - DNA, 201 bp, Homo sapiens
tgaagagattcccattagccaaatatgggatgaattgagtgtcaaaataatgataataatggatataaccaacccattgaatgaaatagaaacccatgagktcattgtgtcaatggttttttttttttaaaggccaggtgccatggttcatgcctataatcccagcacttcgggaggctgaggagggaagatcacatgagc

SEQ ID NO: 461964 - DNA, 201 bp, Homo sapiens
agcatagtacccaataggtattttttttcaaccctaaccctctcccttccctatgttgtattcatcagtgtctgttgttcccatttttacaaccacatatrcccagtgtttagcaccttcttgtaagtgagaacatttagtctttgaatttctgtttctgcattaattaacatagcataatggtttccaggtgcatccatg

SEQ ID NO: 461965 - DNA, 201 bp, Homo sapiens
tcattgtcaatgacctgtcagcctcccagggccactggaagatctaatgaagtgatgactaagatagagctgaactccttacagatataagagttggtgattttttttcagtgccctggtaaaagataggcagtccaaagtgattctcaggcctttaagctcacatacatcctgttagctatgcaggtttcaccacaaaca

SEQ ID NO: 461966 - DNA, 201 bp, Homo sapiens
agaaggctgggtgtctgcctccaacaaataaccatttcagccctgggtttttataaaaaaatacaaaacaaaattttgtctcaaaccaagacaccatgaayctcccttgccaaagaaagtagcttgtcttcctgtgtttgcgtacactagccttgctttggttgaaaactggtaacaacctaactgggatagttttgcaaa

SEQ ID NO: 461967 - DNA, 201 bp, Homo sapiens
ctgaggcaggagaatggcgtgaacccgggaggcggagcttgcagtgagctgagatcttgccactgcactccagcctgggcgacaaagagagactccgtctaaaaaaaaaaaaaaaaaattacccaggcatggtggcgtgcacttgtagtcccagctacccaggagtttgaggcaggagaatcgcttgaaccctgggaagaa

SEQ ID NO: 461968 - DNA, 201 bp, Homo sapiens
atacattacaaaggacaaaaaaacaagtatgggaacagatttctcattagaaacaatgtaagccagaaaacagtgggaaaaaaaacccttaaagtactttaaaaaaaaaaaaaattatcaggccaggcacggtggctcacacctataatcctagcactttaggaggccaaggcgggcagatcacttgagatcaggagtttg

SEQ ID NO: 461969 - DNA, 201 bp, Homo sapiens
tggtgcagctacattggaaaacaatgtcctttatagctaatcatatacttaagcaaaagattcagcaatcctactcttaggtatttacctgagataaatgraagtgtataaggggatttcaaaagctcatggaaaaatggaattaaaggataaaaattaaaagtataaactttatttctcaacataaactccatcaagttc

SEQ ID NO: 461970 - DNA, 201 bp, Homo sapiens
gtttcattgtgagtttaaaccctcctctgaaatagtttcctggctttccctcaatcaacctgtccctgactttatcaaaggatacccatttcaaaagagayattctttttaaaatattcattttccaagccttacagcaatgacatacattttcattgtcttctcccaattccctgcctccatctctcacaccatatcttt

SEQ ID NO: 461971 - DNA, 201 bp, Homo sapiens
atcgcttgaacctgggaagcagaggttgcggtgagccgagttgcaccactgaactcctgcctgggtgacagagtgagactctgtctcaaaaaaaaaaaaamcaaaaactgtcaaactagaattttataccaatgaaaatatatttcagaaacaaagatgaggccaggtgcagtggctcacacctgtagtcccagcacttta

SEQ ID NO: 461972 - DNA, 201 bp, Homo sapiens
ccaggaagatgcagctgttggtgtaaaacaaaggtgcattccagagaacaagggatttggcttttatactgaaagttcctgtccaggttcccaaacaggtycatgtatgcaaataaaggagtcaaactttcttagttctgattggtcaacacagctgagttctgattggttgatgcaagccacagcctattggttgttttg

SEQ ID NO: 461973 - DNA, 201 bp, Homo sapiens
aaaaacactctcatgactccacgtgcctctctgggtggtagaaatgggtggtagagttaggaaaaatcattaaaaagaatagtacagatttgccatctccrtttcttctgttcttagtctcccttgaattcactccaagtcaggctttcaatccctaccattactgaaacagctcttgtaccggttacttatgctaactgt

SEQ ID NO: 461974 - DNA, 201 bp, Homo sapiens
aaaaaaaaaaaagaggagatctaaattactcatatcataaatgaaagaggggccatcagtactgatccccatgaacattaaaaggataataaaaaaaaaattttgaacaactctatgcccaccaatttgataacttagataattagatggaccaatttcttgaaaaaaacaatctaccaaaactcacagaaggagaaataa

SEQ ID NO: 461975 - DNA, 201 bp, Homo sapiens
gatcttggctcactgcaacctctgcctccagggttcaagcaattctcatgcctcagcctcccgagtagctgggatttcaggtgtgagagccaccacgcccrgctaatttttgtatttttagtagagatggggttttgccatgttggccagcctggtcttgaactcctgaccccaggtgatctgcccaccgtcagcctctca

SEQ ID NO: 461976 - DNA, 201 bp, Homo sapiens
ttaacccaggaggcggaggttgcagttagccaagatcgcaccattgcactccagcctgggcgacagagtgagacttggtctcaaaaaataaataaataaawaataataataattctagaggataatctaggagaaaatctaggtgatttggggtttgacaatgactttttagatacaacaccaaaagcacaatcatgaaag

SEQ ID NO: 461977 - DNA, 201 bp, Homo sapiens
aataataataattctagaggataatctaggagaaaatctaggtgatttggggtttgacaatgactttttagatacaacaccaaaagcacaatcatgaaagaaaaaatgagtagttggaattcattaaaattcaaaacttaaacccatgaaaaactgtaaagaggccgggctcagtggctcacgcctgtaatcccagccctt

SEQ ID NO: 461978 - DNA, 201 bp, Homo sapiens
tccttgcgatagtttgctcagaatgatggtttccagcttcatccatgtccctacaaaggacatgaactcacccttttttatggctgcatagtattccatgstgtatatgtgccacattttcttaatccagtctatcattgatgggcatttgggttgcttccaagtctttgctattgtgaatagtgccacagtaaacatacg

SEQ ID NO: 461979 - DNA, 201 bp, Homo sapiens
cggcctcccaaagtgctgggaccatagacatgagccaccacgcccaggccaaatttatttttattgatttactttgagacaggatctcactgtcccctagrctggaatacagtggtgtgatcataactcactgcaactcaaactcctgggatcaagaaatacttccacctcagcctcccaagtagctgggattacaggcag

SEQ ID NO: 461980 - DNA, 201 bp, Homo sapiens
aaaaaaaaaaaaaaaaaaaaaaaaaaaaaaaaagacctgcagcaggaatgaaatactccaaaaagtctaaacatgaatttgatcctgccctcttagtatcwgtatctcctataaattttctgagaagaaagtgcaaggggaagaaaggtggctccagaaacatccagagattagccattcccctataagtcagtaagaacg

SEQ ID NO: 461981 - DNA, 201 bp, Homo sapiens
gatagtttgctcagaatgatggtttccagcttcatccatgtccctacaaaggacatgaactcacccttttttatggctgcatagtattccatgctgtatakgtgccacattttcttaatccagtctatcattgatgggcatttgggttgcttccaagtctttgctattgtgaatagtgccacagtaaacatacgtgtgcat

SEQ ID NO: 461982 - DNA, 201 bp, Homo sapiens
cctcatcaaggcagtcctctgtggccatcatttctctttagcattcccttgctctaagaccagttttgcaatgctaatacttcttgccctgctttcagaakcttccataccctgaactcagggtcacacactagtaagttttggctctaacactggaagcccaatctgtctgactttaaatcaaatatccctctgtaacat

SEQ ID NO: 461983 - DNA, 201 bp, Homo sapiens
gtaagggctgtgtcccgtgcatttcatggctatcacactgggcacttggaggttacagttttgagcttcacccaatctggtttgattccagcaccaaagctttatcatgtctcagtgaatcaatatttctattaatatttatgtttaaaattcttaaatatttaggccctataaggaaaccacacagcaaaaatctgcact

SEQ ID NO: 461984 - DNA, 201 bp, Homo sapiens
tatacccagtaatgggatggctgggtcaaatggtatttctagttctagatccttgaggaattgccacactgtcttccacaatggttgaactagtttatagwcccaccaacagtggaaaagtgttcctgtttctccacatcctctccagcacctgttgtttcctgacttctaatgatcaccattctaactggtgtgagatgg

SEQ ID NO: 461985 - DNA, 201 bp, Homo sapiens
aaactatgtttagaataagacatttgaagaaaagtagcatagaatagatacaataaagtggcagatcatatgtgttaatttgtatttgtggaatgagtgamtatgtgagccctcctaattccctagagaataagatatactacaaaaaagcatagcaaaggagtagctttgttgtgctgacccaaattttatttaagcaga

SEQ ID NO: 461986 - DNA, 201 bp, Homo sapiens
tttattaatattaattttagtaattctttgtatattttgaatacaagtcccttgtcaaatatatgttttgtggatatattcttccagtttgtggttttgcmtattattttctttttgttgttgttttcattttgtttttgtttttcggagacagggtctcactctgtcatccaggctggagtgaaatggcacaatcatagc

SEQ ID NO: 461987 - DNA, 201 bp, Homo sapiens
attgccctggccagaacttccaacactatgttgaataggagtggtgagagagggcatccctgtcttgtgccagttttcaaagggaatgcttccagtttttrcccattcagtattatattggttgtgggttttgtcataaatagctcttattattttgagatacatcccatcaatacctagtttattgagagtttttagcat

SEQ ID NO: 461988 - DNA, 201 bp, Homo sapiens
ttttttgtatttttagtagagactgtgttagccaggatggtctcgatctcctgacctcatgatccgcccgcctcagcctcccaaagtgctgggattacagrtgtgagccactgcgccttcctatggtttctgtttctcattgcggccctgactctggagctgaagtaatattaacaatgagaacggttgggttttttggtc

SEQ ID NO: 461989 - DNA, 201 bp, Homo sapiens
tgtttttcggagacagggtctcactctgtcatccaggctggagtgaaatggcacaatcatagctcactgcagcctcaacctcccaggctcaagtgatcctyctgccttagtctcctaagtagctggaactacaggcacatgccacaatgcctggttaatttttaaaaatgtttgtagagacagggtcttgctttgttgccc

SEQ ID NO: 461990 - DNA, 201 bp, Homo sapiens
atccatctggtcctggactttttttggttggtaggctattaattattgcctcaatttcagagcctgttattggtctattcagggattcaacttcttcctgrtttagtcttgggagggtgtatgtgttcaggaatttatccattttttctagattttctagtttatttgtgcagagatgtttatagtgttctctgatggtac

SEQ ID NO: 461991 - DNA, 201 bp, Homo sapiens
caggtggcaatggagtatatggctaattcagtgagaaggttaaaaaagaaatctgttgccaagtaaactggcaatacatgaacctcagcagtgttagcctytctgtacactaattttatgatttctttttttttttttctgagacagagtctcactctgtcgcccaggctggagtgcagtggcgcaatctcggctcactgc

SEQ ID NO: 461992 - DNA, 201 bp, Homo sapiens
cttccctttatgggtaacccaacctttctctctggctgccctcaacattttttccttcatttcaactttggtgaatctgacaattatgtgtcttggagttsctcttctggaggactatctttgtggcgttctatgtatttcctgaatttgaatgttggcctgccttgctaggttggggaagttctcctggataacatcctg

SEQ ID NO: 461993 - DNA, 201 bp, Homo sapiens
gttgctcttctggaggactatctttgtggcgttctatgtatttcctgaatttgaatgttggcctgccttgctaggttggggaagttctcctggataacatsctgaagagtgttttccaacttggttccattctccctgtcactttcaggtacgccaatcagacgtagatttggtcttttcacattgtcccatatttcttgg

SEQ ID NO: 461994 - DNA, 201 bp, Homo sapiens
acccacatgatatcactaatgacgttaactttcatcacttggttaaagtggtatctgctagctttccatgcagtaaagttactatttctccctttccctgmtttatccttttatagagagttactctgcatagctcatctttagaagggagagggtagaaattaagctccaactcctcaaattgagaatatctatatgtat

SEQ ID NO: 461995 - DNA, 201 bp, Homo sapiens
tatgaaaacggattaatacaggtgtgctgagaaacagaaccattctattccctgtaagggctgtgtcccgtgcatttcatggctatcacactgggcacttkgaggttacagttttgagcttcacccaatctggtttgattccagcaccaaagctttatcatgtctcagtgaatcaatatttctattaatatttatgtttaa

SEQ ID NO: 461996 - DNA, 201 bp, Homo sapiens
atcatctaaaaattactgttacatttagcaatgtgatagacatttaaatactttctcactttgcttattgtttttgaggagaaaaataatcatcttggacyacagtttatttcttaatgattgtctggcaatgcgtgtggagttagttgtactttaaagcatttaagtacaaatcttcaaatgtgagtatcatgataggga

SEQ ID NO: 461997 - DNA, 201 bp, Homo sapiens
actgtgctaggtttggagatacaaaggtaaatgataatcataagacaaaactcctactgttgggtaacttatagttagtgtgacaaaatttaagacagctrctgacgatgagtgaaagaaagtcagagtttctcagagaaactgagattggaaaccatgaatttgtaacagcatacattgacaagtttgtaatatttcttt

SEQ ID NO: 461998 - DNA, 201 bp, Homo sapiens
ctgggtagtgaaagtcctgattttccactgggcttcatctgacaccactgcagcagggagaggaggacatagggggcaccttgttatagcctgacagatayagaaggctccccactcagccttggtgggggtttggtttcagtgttctctgtgctgtttgtctggagtagaactgttattgtctaaaagtgcctttgtctt

SEQ ID NO: 461999 - DNA, 201 bp, Homo sapiens
tgaagtatagaaaccttacttttctttatatctctttactttctccatttataattggcttaaatattttctctacatacatttagaagcagatcagacartgttataatttttttttccaagtgtcaaatacaatttagaaaactcaattggagaaggaaaacctatttaatttactcatatttttgtttactgcctttt

SEQ ID NO: 462000 - DNA, 201 bp, Homo sapiens
aggcaggagaatcgcttgaaccctgggaagaagaggttgcagttagcagagatcatgccattaccgtccagcctgggcaacaagaacgaaactacttctcaaaaaaaaaaaaaaagtggtacatatatacacaatgaaatactattcggccataagaatgaatgaaatcttgtcacttgcagcaacatgggtgcagctgga

SEQ ID NO: 462001 - DNA, 201 bp, Homo sapiens
attccatccagctgcaagaatacattataaaaccttctctaggccttatccaaagagaccttcgccatttgctagagtggctgtaagctaggaaaaaaaawaggaatatccagacctttaaggtattaacaggcactgtctctgaattgatgctaagtaattgggatccaaaatgacacaggtggctcacagtggggctat

SEQ ID NO: 462002 - DNA, 201 bp, Homo sapiens
gtagggctttgcatgggtgatccttaatccagttcctaataacttctcaatttccatctgaggcttcatcagcctggccttcactctctctctctctctcttttttttttttttttttttgagatggagtctcactctctcgcccaggctggagtgcaatggagcagtcttggctcactgcaacctctgcctcccaagttc

SEQ ID NO: 462003 - DNA, 201 bp, Homo sapiens
agcttcaggggacctaaaaccaactagtgaatccagcggtatgagactgaaggccaaagtatagccttgtagtaaagagacaggctttggaaagagaccartatatatatcctggctgatatactttacatctaagttaccttgtctaaactttagtttcttcattttaaaattaggagaataatatggcctcatagagtt

SEQ ID NO: 462004 - DNA, 201 bp, Homo sapiens
tagggctttgcatgggtgatccttaatccagttcctaataacttctcaatttccatctgaggcttcatcagcctggccttcactctctctctctctctctyttttttttttttttttttgagatggagtctcactctctcgcccaggctggagtgcaatggagcagtcttggctcactgcaacctctgcctcccaagttca

SEQ ID NO: 462005 - DNA, 201 bp, Homo sapiens
agggctttgcatgggtgatccttaatccagttcctaataacttctcaatttccatctgaggcttcatcagcctggccttcactctctctctctctctcttttttttttttttttttttgagatggagtctcactctctcgcccaggctggagtgcaatggagcagtcttggctcactgcaacctctgcctcccaagttcaa

SEQ ID NO: 462006 - DNA, 201 bp, Homo sapiens
ggtacgccaatcagacgtagatttggtcttttcacattgtcccatatttcttggaggctttgttcatttctttttactcttttttctctaagcttctcttytgacttcattcatttgatcttccatcactgataccgtttcttccagttgattgaatcagctactgaagcttatgcatgcgtcacatagttctcgtgccat

SEQ ID NO: 462007 - DNA, 201 bp, Homo sapiens
gaagatgtagcattgagtttcaaaaagtgaatggtcaacagtgtggaatactgtggaagatagaactaacaaacatggaaagacaatttgggggaaatacraactatgcagaaagaataaaactttgaaaaattattagtatcagaaataaaaagatattgcaacctatgaaataacaactagatactacaaaaacaaatg

SEQ ID NO: 462008 - DNA, 201 bp, Homo sapiens
catgatctcagctcaccgcgacctctacgtcttgggttcaagtgattctccagcctcagactcccaagtagctgggattataggtgcatgccaccatgtcyggctaatttttgtatttttagtagagacagggtttcaccatgttggccaggctgatctcaaactcctgacctcaggtgatccacccacctcggactccca

SEQ ID NO: 462009 - DNA, 201 bp, Homo sapiens
tctcttctgacttcattcatttgatcttccatcactgataccgtttcttccagttgattgaatcagctactgaagcttatgcatgcgtcacatagttctcrtgccatggttttcagctccatcaggtcatttaaggtcttctctatgctgtttattctagttagcaattcgtccaatcttttttcaaggttttcaacttct

SEQ ID NO: 462010 - DNA, 201 bp, Homo sapiens
atagaattgcatgaaattgaactactaaaatggtgctgacatgctgacttggggtaaattaaattgtttatatgggtaggggccctagaaaattttttttccagtatcctttactttttaggggcagccctaaccaggtgtgtggttgtcccccttcggggaggagagaaatagcatatcaggagagttctgttctcctct

SEQ ID NO: 462011 - DNA, 201 bp, Homo sapiens
aagaggcactctgatttttagaattttcagcttttctgccctggtttctgcccatctttgtggttttatctacctttggtctttgatgatgatgacgtacrgatggggttttggtgtggatgtcctttctgtttgtttcttttccttttaacagtcaggaccctcagctgcaggtctgttggagtttgctggaggtccact

SEQ ID NO: 462012 - DNA, 201 bp, Homo sapiens
aaaatttctctcttttgtactctgtccctttatttctcaagccagccgacgcttaggaaaatagaaaagaacctacgtgattattggggcaggttccccartagacaggtacaaacaagcccaggctgagaagactacaacaaatacctaactcttcaatgcccagacactgacgaacatctacaagcatcaacaccattc

SEQ ID NO: 462013 - DNA, 201 bp, Homo sapiens
gatatcagtgccatcaaaggcttgaaacagctcagatgctgataactttcatgtccacattcaaaatacctgtttcagccaagtgcaatggctcatgcctrtaatcccagcattttgggaggccgaggcaggcagatcacttgaggtcaggagtttgagaccagcctgaacaacatggtgaaacccctgtctctaccaaaa

SEQ ID NO: 462014 - DNA, 201 bp, Homo sapiens
atgtcctttctgtttgtttcttttccttttaacagtcaggaccctcagctgcaggtctgttggagtttgctggaggtccactccagaccctgtttacctgrgtatcaccagcagaggctgcagaactgcaaatattgcagaatggcaaatgttgctgcctgatcctccctctggaagcttcatctcagaggggcatctggc

SEQ ID NO: 462015 - DNA, 201 bp, Homo sapiens
ccaattgttccctacctcctcacatgaggacaccaatctaagaaccatctacacacaaaaaaagtacccacataagaaccaaaaatcaggtgagcactcayaatatctggttttaacttcatattgctaaaagaggcactgaggaagtaggaaaaacagtcttgaatcaccagtgccacacctccccaatcgcccagcagt

SEQ ID NO: 462016 - DNA, 201 bp, Homo sapiens
tctcagcctcctgagtagctggaattacatgcacctgccaccactcctggctaatttttgtatttttggaagagatggggtttcaccatattgggcaggcyggtctcaaactcctgacctcaagtgatctgcccacctgggcctcccaaagtgttgggattacaggcgtgagccactgcgcccggctacttttaatacttt

SEQ ID NO: 462017 - DNA, 201 bp, Homo sapiens
gcccctcccccagcctggctgctgccttgcagttcgatctcagagtgctgtgctggcagtgagcaaggctccgtgggcgtggaaccctccaagccaggcaygggatataatctcctggtgtgctgtttgctaagatcgttggaaaagcacagtattagggtgggagtgacctgattttccaggtgccatctgtctccgctt

SEQ ID NO: 462018 - DNA, 201 bp, Homo sapiens
gtgtacctttctttggattagacctaaatgtggctttatgtgataatttcgctaggttttatgagtgtacttgtaaatttgggtcttattttaattaaccwtaactgtctgaaacttgaatcttgtaaagttttctctgcatttgttaattctgccaggtcacaatgatggctctgaaacttatatatgtaccttttatta

SEQ ID NO: 462019 - DNA, 201 bp, Homo sapiens
agcaagtaatgtcatcagcaaaataaataaataaataaataaagcgagagtgtccattaaaataatgtataacataaccacatttatttgagagtgtatcscaatatcaaaaggcaaattccaacaatgcaaaaactgctgttccttttgcgtcattagtataactaatgatggatataatgaccggactatgtgtctcct

SEQ ID NO: 462020 - DNA, 201 bp, Homo sapiens
ctcgccctgctttggcttatggtccatgggctgcacccactgtctgacaagccccagtgaaatgaacccggtacctcagttggaaatgcagaaatcacccrtcttctgcattgctcaccctgggagctgtagactggagctgttcctattcggccatcttggaacctcctctcccaatttttgtatttttagtagaggtgg

SEQ ID NO: 462021 - DNA, 201 bp, Homo sapiens
ttgctctggaaattaatctgaatgttttcagtaatgtgtacctttctttggattagacctaaatgtggctttatgtgataatttcgctaggttttatgagygtacttgtaaatttgggtcttattttaattaaccataactgtctgaaacttgaatcttgtaaagttttctctgcatttgttaattctgccaggtcacaat

SEQ ID NO: 462022 - DNA, 201 bp, Homo sapiens
ttagtagagatggggtttcaccatcttggccaggctggtcttgaactcctgaccttgtgatccacccgcctcggcctcccaaagtgctgggattacaggcktgagccactgcacccggtcgttctcgtcttatatatgattctggtaattattccttattacttttcagaaattgaggcaggtccaagttttgtgggacca

SEQ ID NO: 462023 - DNA, 201 bp, Homo sapiens
aaatacaaaaaataacagatgcttgcaaggatgcagagagaaggtaactcttacacactaataatgggaatgtaaattagtacaaccactattgaaaacartatggagatttctcaaaaaactaaaatagaactaccatttgatccagcaatctcactactaggtgtttatccacaggaaaataaatctctatgtcaaagg

SEQ ID NO: 462024 - DNA, 201 bp, Homo sapiens
gcagaagaattgcttgaacctgggatggggagattacagtgagccgagatcgcaccaatgcactccagcttggatgacagagcaagtctctgtctctaccaaaaaaaaaaaaacaaaaaaagaaaaaaaaagcagccagtgcaagtgaggggttttgaaacttaagcttcattataatcatgttatatctatttttattca

SEQ ID NO: 462025 - DNA, 201 bp, Homo sapiens
aaaaaaagtattctggggtgataaggcagtacgttgacaacttactctccaataactcatttaaaaattatttgaactgtacttgcaacttttctgtaagkttgagattgtttcaaaataaaaagggataaatatgataatctttttcttttttttgagacagaatcttgctctgtggcccaggctgtagtgcagtggcgc

SEQ ID NO: 462026 - DNA, 201 bp, Homo sapiens
gggaggccgaggaaggaggatcacctgaggtcaggggttgaccagcctggccaacatggtgaaacaccgtctctactaaaaaaaaaaaaaaaaatttagcygggcatggtggcaggcgcttgtagtcccagctacttgggaggctgaggcaggagaatggcgtgaacccgggaggcggagcttgcagtgagctgagatctt

SEQ ID NO: 462027 - DNA, 201 bp, Homo sapiens
aaaaaaagtggtacatatatacacaatgaaatactattcggccataagaatgaatgaaatcttgtcacttgcagcaacatgggtgcagctggaggtcatcrtattaagcaagataagccaagcacagaaagacagataccacatgttctcactcaaaggtagaagctaaaaaagttgatctcatggaaatagtaaaatgat

SEQ ID NO: 462028 - DNA, 201 bp, Homo sapiens
gatccagtttcattctcctacatgtggcttgtcaattatcccagcaccatttgttgagtagggtgtcctttcctcactttatgtttttgtttgtttcgtcraagattagttggctgtaagtatttgggtttatttctgggttctctattctgttccattagtctttgtgcctatttttataccagcaccatgctgttttgg

SEQ ID NO: 462029 - DNA, 201 bp, Homo sapiens
gaggtaggggatcagagaattctaccaaaaaacacgcaaaagtgttttgtattctaggatgcaaggtgctaaaccctccaaaagaccccaccaggatgcarcccccgtggcgataagatcttgatgccccattgtcaaggggtggtgcgactttgtcccactctggggtggggtgaccgccggctttatcctacattgttg

SEQ ID NO: 462030 - DNA, 201 bp, Homo sapiens
gtatgtttgtggccagccgtatcaacccaaggcaagacaatagagaagcttttatttgactctcagggtcaaggctggagagactgataagaagacccagrcagggacagacagcagtttgtctctatcactgtctaaaattttaacctgcttgtttccagaactgttgcagagaggaaccacaaccatcacaaacctgga

SEQ ID NO: 462031 - DNA, 201 bp, Homo sapiens
tcttttcccactatttctcaccacaaacttatggtccaattaatctagcattcttgttattcacaaccacatattgcatattcccaaatgtcttatttgcygtgttattaccatctgtatttatatatttatgtgcttattttttattttttatttatgtttttgagacacagtctcactctgtctcccaggctggcagtg

SEQ ID NO: 462032 - DNA, 201 bp, Homo sapiens
ctccagcctggacgacagggcaagattgtgccttaaaaataaaaacttgttttggtaaaatacacataatatttaccatatgtactttttttttttttttwaatggagtctggttctgttgcccagactggagtgcagtggcacaccactgggttcaagcgattctcgtgtctcagccacccatgtagctgggattacagg

SEQ ID NO: 462033 - DNA, 201 bp, Homo sapiens
taataataaaccagacataaaataatttatgccatattattccatttaaatgaataattggtatctctgggaggtgggtatcaagctgaaagggacataakggacttttctggaatgacagaaacattctacattttttctatgtaaagacctcatgggtgtatacatttgtaaaaagtcttcctagaaagcagactcagg

SEQ ID NO: 462034 - DNA, 201 bp, Homo sapiens
cccgagaagctgggaagctgggaccacagacacaccaccatgcctggctaattttccttttttttttttttttttttttgagacggaatctcgctctgtcmcccaggctggagtgcagtggcgtggtctcagctcgctgcaagctccgcctcccgggttcatgccattctcctgcctcagcctcctgagtagctgggacta

SEQ ID NO: 462035 - DNA, 201 bp, Homo sapiens
tatgttcatcttatgtcatgtgacctgactgaactcactgattcaccactgctttgtacagtaagagtggtgagggctcaagcctgtaatcctagcacttyaggaggctgaggcggaaggatggcttgaggccaagagtttgagaccagcctgggcaacaaagcaagaccccatctctaaaaaaaaaatttttttttttaa

SEQ ID NO: 462036 - DNA, 201 bp, Homo sapiens
ctagtatatagaaatacagtttatttttcatatgttcatcttatgtcatgtgacctgactgaactcactgattcaccactgctttgtacagtaagagtggkgagggctcaagcctgtaatcctagcactttaggaggctgaggcggaaggatggcttgaggccaagagtttgagaccagcctgggcaacaaagcaagaccc

SEQ ID NO: 462037 - DNA, 201 bp, Homo sapiens
acatggaatgtctcttcatttatttagatctatgttttctttcaccagtagtattttatagtttccagcataaaagttctgtatatgttttgttagatttwtattatactccctcgtcttttcttcttttttcagtgactctaaatagtattaagtttttagtttgggtttctatatgttcattactagtatatagaaata

SEQ ID NO: 462038 - DNA, 201 bp, Homo sapiens
aggctacatactgtatgattccaagtatatgacatttgggaaaaggtaaaactttagacagtaaaaaaaagaagaaaaacctagtggttgccagaggtttrtggagtagtagcagggaaaggatgaataagtggagcactagggatatttgaggcagtgaaactattctgtatgatactgtaatagtagatacatggcatt

SEQ ID NO: 462039 - DNA, 201 bp, Homo sapiens
tatgaatgtacactacagtttaactgttcacccactgaaggacatctgaatgacttccagtttttagctgaatatgaattatgaataaagctgctttcaasaggtttatgtgttcagttttaattttcctgaatgcccaggagtgcaattgctaagtcatttgttagttgtatgtttagttttttaagacactctgaatct

SEQ ID NO: 462040 - DNA, 201 bp, Homo sapiens
aagtcaaagaaaaaaaatggcttatagtcttcagttttcttatcaggattattaaattcactaatcttaattcttagtagacatgtgtctctttgaaaatraaagactttttcagaagtaatcaagaaatgtcagagtataattggaggctgtaaatcacacagttcaagctgttaagacattccataagcatagataacg

SEQ ID NO: 462041 - DNA, 201 bp, Homo sapiens
actcattttccacaaacttcacaaactttttgaagaccctcatatgttcacataaagacttgtacttgaatatttatagtagttttattcataatagcccraaactagaaatgacccaaatgcttaccaaatgggggaatggataaggaaattgttgtatatccatacagatggaatactgttcagcaataaaaaagaaca

SEQ ID NO: 462042 - DNA, 201 bp, Homo sapiens
ggctagcaacacggatgaatctcaaaagtattatgctaaataaaagaaaccatacccaaaagactatatacaatttcatatgtatgaaattctagaaagcygagatataatgacaaagtagatcagtggtttgatcagtagatcaaagtagaagggaatggagtttgtgaataaaagttctctgaaatggaatttagagga

SEQ ID NO: 462043 - DNA, 201 bp, Homo sapiens
cccagcactttgggaggccgaggcgggcggatcacgaggtcaggataaggagcgggcggatcacgaggtctctactaaaaatacaaaaaattagccgggcscggtggcgggcgtctgtagtcccagctactcgggaggctgaggcaggagaatggcgtgaacctgggaggcgcagcttgcagtgagaggagatagcgccac

SEQ ID NO: 462044 - DNA, 201 bp, Homo sapiens
aaatacaaaaaattagccgggcgcggtggcgggcgtctgtagtcccagctactcgggaggctgaggcaggagaatggcgtgaacctgggaggcgcagcttscagtgagaggagatagcgccactgcactccggcctgggcgaaagagcgagactccgtctcaaaaaaaaaaaaaaaaaaaaaaaaaaaaaaaaaaaaaatt

SEQ ID NO: 462045 - DNA, 201 bp, Homo sapiens
aagggatttttagaaaggggaaaaataagaaatgttgagattatttctcctatccccattttttcctttccatattatatatgtccaactggtttcttccttttttttttttttttttttgcatgtgtaaaccacttaactaacaatggaacagattaagagatctttcttagaactgtatttgaatgtacagttgtgttc

SEQ ID NO: 462046 - DNA, 201 bp, Homo sapiens
tatcagatgtatacgttaacgtcattaaagaagaccttccatgtctgtagtaggagcaaaaaaaagggataaaaagttaaagaaaacccaaatgggccggrtgcggtggctcacacttgtaatcccagttgcttttattttcgctatgaaattttgtaaccatgataaattatattttatatattatgaatttgatgtatt

SEQ ID NO: 462047 - DNA, 201 bp, Homo sapiens
aagttgatttatagagctggccaatggagcttatagtcaatatgagtacgtacgtatacaattgtgtgtgtgtgtgtagtctataaagtctggaaacaactttggaaggctgaggcgggtggatcacttgaggccaggagttcgagaccagcctggccaacatggtgaaaccctgtctctactaaaaatacaaaaattagc

SEQ ID NO: 462048 - DNA, 201 bp, Homo sapiens
ccataaagcttgttatagttactcacctatttgtaagtctttggtttggtagtcttccattatccctaaggtaaattcaaactccatagaatggcattcamagctgtttacattccagactctaccttttccaggctatcttaggccacataacataattctaactacatggaactatttgccatactctgaagatggatg

SEQ ID NO: 462049 - DNA, 201 bp, Homo sapiens
acttgccaatatggcccctgtagaatctagaaagtttccaaaggatgcctgtagattaccacaatctcaaccaagtagcagccctgattgtatggcagtarcaactgccatactggacatggtatcatcactagattagattaatatggcctcaggtacatagcatgtagccattttgttggcaaatgcatttcttttctg

SEQ ID NO: 462050 - DNA, 201 bp, Homo sapiens
atgaacaaatcagcatattcatgaacaattttttgttttcttttggttggcattaccttcatgcattttgtgttgttatcccagaataccacagactgggwtattttattttattttattttattttattttattttattttatttattttattttattttattttatttgagacagagtctcactctgttgcccaggctg

SEQ ID NO: 462051 - DNA, 201 bp, Homo sapiens
gcatattcatgaacaattttttgttttcttttggttggcattaccttcatgcattttgtgttgttatcccagaataccacagactgggttattttattttwttttattttattttattttattttattttatttattttattttattttattttatttgagacagagtctcactctgttgcccaggctggaatacagtggc

SEQ ID NO: 462052 - DNA, 201 bp, Homo sapiens
gccaggcaggtctcaaactcctggcctaaagtgatccgcccacctcggcttcccaaagtcctgggattacaggtgtgagccacctcactgagctgataatsaacttgaatgaactttgattaatagtgagtactcctccaattacctatttattttgaattgtttaagagaatatgtttttcttagcttacattaaaaatc

SEQ ID NO: 462053 - DNA, 201 bp, Homo sapiens
gtgttttgtagttttccttgcaggggtctttcacctccttggttaggtatattcctaagtattttattgttttcccagctattgtaaaagcggctgagttsttgatttgattctcaccttggtcactgttggtgtatagtagagctattgatttgtgtacattaattttgtatcctaaagcttagctgaattcattaatca

SEQ ID NO: 462054 - DNA, 201 bp, Homo sapiens
catgaacaattttttgttttcttttggttggcattaccttcatgcattttgtgttgttatcccagaataccacagactgggttattttattttattttatwttattttattttattttattttatttattttattttattttattttatttgagacagagtctcactctgttgcccaggctggaatacagtggcatgatca

SEQ ID NO: 462055 - DNA, 201 bp, Homo sapiens
attcctttgtttaactgctctaaactgtgatcctgtaggtccagataagactacaaggacatgctgtgggagaaaaagatatatagcaatctttgtagttycttttgggggaggatatttttccccaaagagttcagctgcaagaggtagtgtatctgaggcacctattaaaatataaagctctgtattgttgatgttatt

SEQ ID NO: 462056 - DNA, 201 bp, Homo sapiens
ttctttttttttttttttttaactttttaatagtagccattctgattggtgtgaaatggcacttcattgtagttttggtttgcatttctctgatgattagygatgttgagtattttttcatgtttgctggctgtttgtatgtcttcttttgagaagtgtctgtttgcatttttgcccattttttaatggggttatttgttt

SEQ ID NO: 462057 - DNA, 201 bp, Homo sapiens
tattgtgaaaaactcttatttttgtctcactgaatattatattattgtagtctttaccatcacatgtatttggatttatctaccatatgtgcatgtatgtrtatatatatatatatacacatatgcacacatatgtacacatacgtactatcacaaatatgtaattctggctccttcaaagtctcagttttttcaactgta

SEQ ID NO: 462058 - DNA, 201 bp, Homo sapiens
gtcctcccaccctaccctttggcctactttatttagtgttcaaatctgaatcataatgtgcatctggagggatcctgaatcatgtgattgaagtgtctcatcatttatgaacactctttgaaggcctaattttgatgtagtatttggttatatcatgaataaatgtgttccctctcttgatggctttatgggtttgtgcat

SEQ ID NO: 462059 - DNA, 201 bp, Homo sapiens
aggttagttacatatgtatacatgtgccatgctggtgtgctgcacccattaactcgtcatttagcattaggtatatctcctaatgctctccctcccccctycccccactgcacaacagtccccagagtgtgatgttccccttcctgtgtccatgtgttctcattgttcaattcccatctatgagtgagaacatgcggtgtt

SEQ ID NO: 462060 - DNA, 201 bp, Homo sapiens
ggagcttatagtcaatatgagtacgtacgtatacaattgtgtgtgtgtgtgtagtctataaagtctggaaacaactttggaaggctgaggcgggtggatcmcttgaggccaggagttcgagaccagcctggccaacatggtgaaaccctgtctctactaaaaatacaaaaattagccaggcgtggtaatgtacacctgtaa

SEQ ID NO: 462061 - DNA, 201 bp, Homo sapiens
tgccgcaataaacatacgtgtgcatgtgtctttatagcagcatgatttacaatcctttgggtatatacccagtaatgggatggctgggtcaaatggtattkatagttctagatccctgaggaattgccgcactgtcttccacaatggttgaactagtttacagtcccaccaacagtgtaaaagtgttcctatttctccaca

SEQ ID NO: 462062 - DNA, 201 bp, Homo sapiens
aaggctgaggcgggtggatcacttgaggccaggagttcgagaccagcctggccaacatggtgaaaccctgtctctactaaaaatacaaaaattagccaggsgtggtaatgtacacctgtaatcccagctactcaggaggctgaggcacgagaattgcttgaaccggggaagcggaggttgcagtgagccaagattgcacca

SEQ ID NO: 462063 - DNA, 201 bp, Homo sapiens
gccgcaataaacatacgtgtgcatgtgtctttatagcagcatgatttacaatcctttgggtatatacccagtaatgggatggctgggtcaaatggtattgmtagttctagatccctgaggaattgccgcactgtcttccacaatggttgaactagtttacagtcccaccaacagtgtaaaagtgttcctatttctccacat

SEQ ID NO: 462064 - DNA, 201 bp, Homo sapiens
aggcgtggtaatgtacacctgtaatcccagctactcaggaggctgaggcacgagaattgcttgaaccggggaagcggaggttgcagtgagccaagattgcmccactgcactccagcctgggtgagagcaagactctgtctcaaaaaaaaaaaaaaaaaaaaaaaaaaaagtctagaaacagatacttgtattttatacttt

SEQ ID NO: 462065 - DNA, 201 bp, Homo sapiens
atactgcactctaagacccccccattcaaccttccttcctttcttttctctttcatctgcattgagatctgatgtctcttacagtcttccctagcttctascttcctctccatgttccctattaagcataacgtctaataaatctcttgcacatctaatcccatcttgactaattcacaccctaaatgtccattagaggga

SEQ ID NO: 462066 - DNA, 201 bp, Homo sapiens
tagccctttgtcagatgagtaggttgcaaaaattttctcccattctgtaggttgcctgttcactctgatcgtagtttcttttgctgtgcagaagctctttmgtttaattagatcccatttgtcaattttggcttttgttgccattgcttttggtgttttagacatgaagtccttgcccatgcctatgtcctgaatggtaat

SEQ ID NO: 462067 - DNA, 201 bp, Homo sapiens
ggagtgcagtggcgtggtctcagctcgctgcaagctccgcctcccgggttcatgccattctcctgcctcagcctcctgagtagctgggactacgggcgccygccaccacgcctggctaattttttgtatttgtagtagagacggggtttcactgtgttagccgggatggtctcaatctcctgaccttgtgatccgcccacc

SEQ ID NO: 462068 - DNA, 201 bp, Homo sapiens
atagttttatatcttcctttccaatctgtatatttttattacattttcttcttgtgttgcaccagctaagattttcagtacagtgttcaataggaatggggagagtgtacatcattgccttattcccgatattagaaaggaggcattgagtctttcaccatttagtattttgttagatggaggatttttgtagataccctt

SEQ ID NO: 462069 - DNA, 201 bp, Homo sapiens
attgcttttggtgttttagacatgaagtccttgcccatgcctatgtcctgaatggtaatgcctaggttttcttctagggtttttatggttttaggtctaayatttaagtctttaatccatcttgaattaatttttgtataaggtgtaaggaagggatccagtttcagctttctacatatggctagccagttttcccagcat

SEQ ID NO: 462070 - DNA, 201 bp, Homo sapiens
tttcactgtgttagccgggatggtctcaatctcctgaccttgtgatccgcccacctcggcctcccaaagtgctgggattacaggcgtgagccgctgcgccsggccaattttccattatttcttaccaacggtcacctttcttttcctccctttgtccccaccaccttctgtaccacctggacactgcaatgatattctaat

SEQ ID NO: 462071 - DNA, 201 bp, Homo sapiens
tagttttatatcttcctttccaatctgtatatttttattacattttcttcttgtgttgcaccagctaagattttcagtacagtgttcaataggaatggggagagtgtacatcattgccttattcccgatattagaaaggaggcattgagtctttcaccatttagtattttgttagatggaggatttttgtagatacccttt

SEQ ID NO: 462072 - DNA, 201 bp, Homo sapiens
ataactgtatgagccatttccttataataaatctcattgtactctctctctctctctctgtatatatctgtgtatatatatatatatatatatatatatahacacacacacacacacacacacacacatacatacacacactatgccaggccatgttttgtttcttctgatctacagacgattaattgcctatttaatatt

SEQ ID NO: 462073 - DNA, 201 bp, Homo sapiens
tggacaataataactgtagttatttgatatttactatgtatagggtgctttacagaggaagaaactgagccatagagcttaagtaacctgcccaaagtcamacagttattaatacacaactgggacttcaatccagtttactgtcacaggctgacccaactacactttgggtccatctgtaactgtatttgatggcggtcc

SEQ ID NO: 462074 - DNA, 201 bp, Homo sapiens
taactgtatgagccatttccttataataaatctcattgtactctctctctctctctctgtatatatctgtgtatatatatatatatatatatatatatatmcacacacacacacacacacacacacatacatacacacactatgccaggccatgttttgtttcttctgatctacagacgattaattgcctatttaatattg

SEQ ID NO: 462075 - DNA, 201 bp, Homo sapiens
aaaggaagtgttagttttttatgacctgttgtgaacttcaatatttcaaggttttctaaataataaaaagccctaccaagacttcacacattgaggctggrcacagtggctcacgcctgtaatcctagcactttgggaggctgaggcaggtggatcccttgagctcaggagttcgagaccagcctgggcaacatggcgaaa

SEQ ID NO: 462076 - DNA, 201 bp, Homo sapiens
tatagtgtgaatgtcccttctaaaactcatgttgaaatttaattgccattataacagcattgacagtcaggacctttaagaggtgattaggtcatgagggycctgccgtcattatcatgagagtaggttagttatcacaggagtgggttcctgataaaaggatgatgtttggctcccatcctctgtctcacaggctcactt

SEQ ID NO: 462077 - DNA, 201 bp, Homo sapiens
ggtgtatatgtgccacattttcttaatccagtctatcattgttggacatttgggttggttccaagtctttgctattgtgaatagtgccgcagtaaacataygtgtgcatgtgtctttatagcagcatgatttataatcctttgggtatatacccagtaatgggatggctgggtcaaatggtatttctagttctagatccct

SEQ ID NO: 462078 - DNA, 201 bp, Homo sapiens
catttatcctttttgttcctatttttccacagccatggcaacaaagggccttgtgctcactctagcagagcgtcctgcctttgtctgtgatccagcctggygcgtcagtctttgcaaacaaaagatgtgaccacccggccgcctatccctgcccccaccaaagcagtaatggaggctgaggcctctccagttgagccgagc

SEQ ID NO: 462079 - DNA, 201 bp, Homo sapiens
accataaaaaccctagaagaaaacctaggcaataccattcaggacataggcatggtcaaggacttcatgtctaaaacaccaaaagcaatggcaacaaaacscaaaattgacaaatgggatctaattaaactaaagagcttctgcacagcaaaagaaactaccatcagagtgaacaggcaacctacagaatgagagaaaatt

SEQ ID NO: 462080 - DNA, 201 bp, Homo sapiens
catctgatttaaacatttaattatggaaaagagaataagatccagaaaagtgaaatgatttgcatgaggctccatcaccaaggagatgtgaattagcacamcctcaattgcaaatattagaaaccccacatcagaatagctttaatgaaaaagacttctggttaactataatgggttgaacatttgcatttatttctgctc

SEQ ID NO: 462081 - DNA, 201 bp, Homo sapiens
tggagtagggctgaataaagactagctattatgattattgtaatttagcattaagtgctttttatatccatggtgctaagtgttaattattagcatatttkgatgcaacatttatcctttttgttcctatttttccacagccatggcaacaaagggccttgtgctcactctagcagagcgtcctgcctttgtctgtgatcc

SEQ ID NO: 462082 - DNA, 201 bp, Homo sapiens
agtttctgccgagaaatcagctgttagtctgatgggcttccctttgtgggtaacccgacctttctctctggctgcccttaacattttttccttcatttcawctttggtgaatctgataattatgtgtcttggagttgctcttcttgaggaatatctttgtggcattctctgtatttcctgaatttgaatgttggcctgcct

SEQ ID NO: 462083 - DNA, 201 bp, Homo sapiens
tctctgcattggttattctagttagccatttgtctaatttttttaaaaggtttttaacttctttgccttgggttcgaacttcctcctttagctcggagtartttgatcgtctgaagccttcttctctcaactcgtcaaagtcattctccatccagctttgttcctttgctggtgaggagctatattcctttggaggaggag

SEQ ID NO: 462084 - DNA, 201 bp, Homo sapiens
gtgcactgcacccactctcctgcacccactgtccaacactccccagagagatgtacccggtacctcagttggaaatgcagaaatcacccgtcttctgtgtygctcacactgggagctgtagacgggagctgttcctattcggccatcttggctccaccaaccagtgtcattaactttaaaaaagatggtcaaaagagaagt

SEQ ID NO: 462085 - DNA, 201 bp, Homo sapiens
aagatggtcaaaagagaagtaggggtagttcttgacttaattacaacctgtaattttgtacattacactttgatatctctaaataaagctttttttttttkgggatggagtctggctctgtcgcccaggctggagcgcagtggcacgatctctgctcactgcaagctccgcctcctgggttcacgccattctcctacctca

SEQ ID NO: 462086 - DNA, 201 bp, Homo sapiens
tctttttttttttttttttttgagacagagtctcactctgtcgcccaggctggagtgcagtagcacaatctcagctcactgcaacctctgcctcccaggtrtaagcgatcctcccacttcagcctcctgagtagctgggaccataggcatgcaccacacccagctaatttttttttttttttttggtagagacagggtttc

SEQ ID NO: 462087 - DNA, 201 bp, Homo sapiens
cactgttttatagttttcagtctatagatgcctacatgttttgttagacttatacctaaatattttacttttttgaagttattataattgttttttttttwaatttatgtttgtatttgtatattgctagcataaagaaatatgtttggtttttttatgatgatcttgtaactgagtccttgctaactgcacttttttgta

SEQ ID NO: 462088 - DNA, 201 bp, Homo sapiens
tcctcgcttcattgaattgattttatttcttttgcaaaatcgattggccatatttgtgtggagacagggtctcacgctgttgtccagcctagagtccagtrgcacgatcatagctcacttgcagcctcaaactcctgggctcaagcaaacctcctgtctcaacctcccaaggagctgggacacaacagttgtgcaccatca

SEQ ID NO: 462089 - DNA, 201 bp, Homo sapiens
tccagtcctatatattgaaaagactgtcctcgcttcattgaattgattttatttcttttgcaaaatcgattggccatatttgtgtggagacagggtctcaygctgttgtccagcctagagtccagtagcacgatcatagctcacttgcagcctcaaactcctgggctcaagcaaacctcctgtctcaacctcccaaggagc

SEQ ID NO: 462090 - DNA, 201 bp, Homo sapiens
gtctttgtcagagcaagagtttttaatgttaatgaaatccaacttaccagtttcttcttttatggagtctgcttttggttacatgtataaaaactctttgmctaatcccaggtcacaaagatatcctgctgtgttttattctaaacagtttaaacatttttgtacaaaatgtgaggtttagattgaggtttgtttattcat

SEQ ID NO: 462091 - DNA, 201 bp, Homo sapiens
tctccatcattatagttttggtttttttttaagaatgttatataaatggaaatatatagtgtgttacctttctagatggctttttttactcagcataatgsctttgatatattcctctaagttgttgcctgtatctatagtttattctttctttttgctgggtagtattctgttatataaatgtactacaaattgtttatc

SEQ ID NO: 462092 - DNA, 201 bp, Homo sapiens
tcaatagggagttctggagaaacactgcaaggccatagaagaagaaagatacttcatttcctggttccactgagctggtttttgacatcatgaaggaggcmtggtattgctctcctcagcagccagctttgccctgcatcctttagcatatttctctgctacctagcaggttgcttttactgaccagctacggccaacctg

SEQ ID NO: 462093 - DNA, 201 bp, Homo sapiens
gtgaaaaaagccataaaattatattcaccaatagagtactctgtctcaaaacattccacatgattgttcacaatactaatacaattaaatcagtcatttaygttaaagtataacagtgataaaaaatgcaaaatctaatataaattacattaaaacttttgttatatcaaatcagaaatgcaaatttcttactaaatacag

SEQ ID NO: 462094 - DNA, 201 bp, Homo sapiens
tttttaaaacttttttgtagagatggggtcccactgtgttgcccaggctgttcccaaactcctggcctcaagcaaaccctcctgccttgaccttccaaagkgctgggattacaggcatgagccactttgcccagcttaaattatttcattgatgattccctcccctttgatttttttgggtgactgctattattctgatgt

SEQ ID NO: 462095 - DNA, 201 bp, Homo sapiens
atagacctttcaaatctagaaatttgtgtgcctcaattctgggaaattttattgagttcttcctttcctttttctttttttagagacaggatctcactctrtaactcaggctggagcgtagtggtgtgatcatagctcactgtaacctcaaattcctgaactcgagagatcctctaaccttagcctcctcagtagttagaa

SEQ ID NO: 462096 - DNA, 201 bp, Homo sapiens
ttgcttttggtgttttagacatgaagtccttgcccatgcctatgtcctgaatggtaatgcctaggttttcttctagggtttttatggttttaggtctaacrtttaagtctttaatccatcttgaattaatttttgtataaggtgtaaggaagggatccagtttcagctttctacatatggctagccagttttcccagcatc

SEQ ID NO: 462097 - DNA, 201 bp, Homo sapiens
tttaaagtagttttttccaattctgtgaagaaagtcattggtagcttgatggggatggcattgaatctataaattaccttgggcagtatggccattttcaygatattgattcttcctacccatgagcatggaatgttcttccatttgtttgtatcctcttttatttcattgagcagtggttggtagttctccttgaagaag

SEQ ID NO: 462098 - DNA, 201 bp, Homo sapiens
atggaatgttcttccatttgtttgtatcctcttttatttcattgagcagtggttggtagttctccttgaagaagtccttcacatcccttgtaagttggatwcctaagtattttattctctttgaagcaattgtgaatgggagttcactcatgatttggctctctgtttgtctgttattggtgtgtaagaatgcttgtgatt

SEQ ID NO: 462099 - DNA, 201 bp, Homo sapiens
aattgtatataacttttatatcacttgttagctactaattgtaagaagtcactagacagctctatacttcagtttggtcatccataaaataataataatartagtactaccttttagtagctactatcatcattaattaattgtgattgtgatttttttttttttttttttttttgagacagagtcttgctttgtctccca

SEQ ID NO: 462100 - DNA, 201 bp, Homo sapiens
atgttcttccatttgtttgtatcctcttttatttcattgagcagtggttggtagttctccttgaagaagtccttcacatcccttgtaagttggatacctargtattttattctctttgaagcaattgtgaatgggagttcactcatgatttggctctctgtttgtctgttattggtgtgtaagaatgcttgtgatttttgt

SEQ ID NO: 462101 - DNA, 201 bp, Homo sapiens
cagatgaaaaggtggagagaataggattcacatgggggtctggggaaggaaggagcctcaaatgtgattagtggagacagctcgataacccagaaggggcrgtagcattcagaagcattcaatgaattgatagcagccatttcaatgagtatctattgcagtcagctgactgtttagtaaaactttaaaatagaccctgcc

SEQ ID NO: 462102 - DNA, 201 bp, Homo sapiens
ttagtggggactgggtttcgccatgttggcgaggctggtttcaaattccggagcttaagtggtccacccacctcagcctcccaaagtgctagaattacagrcatgagccacagcacccggctgtgattttgatttaaatgcctgacttccccaccactgctctgtgagttcattggctcaccaggggcaagaatattatat

SEQ ID NO: 462103 - DNA, 201 bp, Homo sapiens
gaccatgtgagttgctgccattgaaatgaactcccagatttcactagaaatgatgtgagcccaagtagcagatatcaaatgacagcacttaactgtgaaaracaaggtgggtggctgcattactgtaaagggcagcagagatgttatcagtaataaagatgctgtgaccctgtcttggtttcttttggctgctataacaaa

SEQ ID NO: 462104 - DNA, 201 bp, Homo sapiens
ttgattggaatagtttcagaaggaatggtaccagtttatccttgtacctctggtagaattcagctgtgaatccatctggtcctggactctttttggttggyaagctattgattattgccacaatttcagctcctgttattggtctattcagagattcaacttcttcctggtttagtcttgggagagtatatgtttccagga

SEQ ID NO: 462105 - DNA, 201 bp, Homo sapiens
cttgcccgaggtcacagagttagtaaatagcagagccaggatttggacccaagcacttaggctctagctcacacatactaagctaccaaaccatggtgccrtatggagtagggctgaataaagactagctattatgattattgtaatttagcattaagtgctttttatatccatggtgctaagtgttaattattagcatat

SEQ ID NO: 462106 - DNA, 201 bp, Homo sapiens
ctaaaaatacaaaaattagccgggcatggtggcaggcacctgtaattccagctactcaggaggctgaggcaggagaatcacttgaacccgggaggcggagrttgcagtgagctgagatcacactgctgcactgcagcctgggtgacagagcagaactccatctcaaaaaaaaaaaaaatttccttttatggattatgtttt

SEQ ID NO: 462107 - DNA, 201 bp, Homo sapiens
gtggtagctttaaaggaaggggcatgatctacacaataattgcccctcttaccagacttaatggagggtgcatcttggacaagatgcaaactgcatgtagrgtatccctgaacaacaaaataaaagaaggctgggtgtctgcctccaacaaataaccatttcagccctgggtttttataaaaaaatacaaaacaaaatttt

SEQ ID NO: 462108 - DNA, 201 bp, Homo sapiens
tgtgtctctgcacgtgagatgggtttcctgaatacagcacactgatgggtcttgactctttatccaatttgccagtctgtgtctttttgtttgtttgtttkttttttttttttttttttgagacggagtctcgttctgtcgcccaggcgggagtgctgtggcgcgatctccgctcactgcaagctccgccttctgggttca

SEQ ID NO: 462109 - DNA, 201 bp, Homo sapiens
tgccttgtactcgggactcctgtgtccttcattctgaaaacacctagtgtgttccaactgtgactaaagggaagagggaactgtgagacagtcatcaacartgtacccttacactgacctggggcttcttgccagaagctcatggaagacagtcacctggtgcggtggaaagcacaggactttatagtcagacacaactgg

SEQ ID NO: 462110 - DNA, 201 bp, Homo sapiens
atggtggcaggcacctgtaattccagctactcaggaggctgaggcaggagaatcacttgaacccgggaggcggagattgcagtgagctgagatcacactgstgcactgcagcctgggtgacagagcagaactccatctcaaaaaaaaaaaaaatttccttttatggattatgtttttggtgtcaagtctagggactcttag

SEQ ID NO: 462111 - DNA, 201 bp, Homo sapiens
atttttcccatacctaccagtactacaatacatgttgctgtacacaggtgaacttgtctgattattccttcgcaatatatatctacagctgaaaattgctsagttgaagatatatgaataattcttaactttttgatacaggttctcaacttggcctccagaaaggtgggtgaaagtttctatttccccatattctcaccc

SEQ ID NO: 462112 - DNA, 201 bp, Homo sapiens
ggagtgctgtggcgcgatctccgctcactgcaagctccgccttctgggttcacgccattctcctgcctcagcctcccgagtagctgggactacaggcgccmgccactgcgcccggctaattttttgtatttttagtagagacggggtttcaccgtggtctcgatctcctgacctcgtgatccgcccgcctcggcctcccaa

SEQ ID NO: 462113 - DNA, 201 bp, Homo sapiens
agagaactgggccttgcacattctagggcaggctgagcataatgcagggctggagtggacagaaacgactgatgatgctgccttgtactcgggactcctgygtccttcattctgaaaacacctagtgtgttccaactgtgactaaagggaagagggaactgtgagacagtcatcaacagtgtacccttacactgacctggg

SEQ ID NO: 462114 - DNA, 201 bp, Homo sapiens
atgttagccagggtggtctcaaactcctgacctcgtgattccccctgcgttggcctcccaaattgctgggattataggcgtggccttttgtttttttttgttttttttgatgtaaagcagttcctgctataaatttccctctcagcattgctctacctgcattccacaaatttttgtctgttatattttcatttttattca

SEQ ID NO: 462115 - DNA, 201 bp, Homo sapiens
gaatctgacaattatgtgtcttggagttgctcttctcgaggagtatctttgtggcgttctctgtatttccagaatctgaatgttggcctgccttgctagaytggggaagttctggataatatcctgcacagtgttttccaacttggttccattctccctgtccctttcaggtataccaatcagatgcagatttggtctttt

SEQ ID NO: 462116 - DNA, 201 bp, Homo sapiens
gcttttgaatagtgaacaaaagttgcttttgtacaggtatggaccaaggcctgactgtgatgggcagtggcctggcagccagatgtcccctccacaggaartgtaataagccagactctgggattccttcatattaaaaaacaaaatacaaacatccttcaggaatcttaagttccctagcagggagctgctattgaaatg

SEQ ID NO: 462117 - DNA, 201 bp, Homo sapiens
gatagctataattaatgtattagtgtcaatttgcagtgttgtgtggtttttgttgttgttgttgttttttcgccctgtcacccaggctggagtgtggtggyggctcactgcgacctccccctccggggttcaagtgattctcctgcctcagcctctcgagtagctgagactacaagcatgtgccaccacgcccagttaatt

SEQ ID NO: 462118 - DNA, 201 bp, Homo sapiens
catttcattcatttcatcttccatcactgataccctttcttccagttgatcgcatcggctcctgaggcttctgcattcttcacgtagttcttgagccttgsctttcagctccatcagctcctttaagcacttctctgtattggttattctagttattcattcgtctaaatttttttcaaggttttcaacttctttgccttt

SEQ ID NO: 462119 - DNA, 201 bp, Homo sapiens
aagcagagataaggggaacacgagatttttccaaggaatatacaaaacacaaagttttttagcacagacttccacattgtgtgggacagggcttgagtaatttttttttttttttttttttgacactgtgtcttgctttgtaacacaagcaggagtgcagtagcatgatcatggctcactgcagtctcaaactcctgggct

SEQ ID NO: 462120 - DNA, 201 bp, Homo sapiens
actgggtataacacacttacacatattgtttctaatccttatagaaatcctaagagtacagtttactccctttttggaaatgagaaaactgagactcagarattaagtaaccagcccaagtcacacaggtgttaagtggtgaaattcaaacccatgtctgttcaaccacagagctcctgtgattttccctgaacctgcagc

SEQ ID NO: 462121 - DNA, 201 bp, Homo sapiens
acctaaaacagtgtctagtacatagtagtgctcaataaatattggataagtgattaattcgtccaataaaataattttttcttttcttttcttttcttttytttttttttttttgagacaggttctctgtcacccaggctggagtgcagtggcttcatctcagctcactgcaacctccacctcccaggctcaggtgatcct

SEQ ID NO: 462122 - DNA, 201 bp, Homo sapiens
aatctgagagctagaagagaccataaaagatcatctgatttaaacatttaattatggaaaagagaataagatccagaaaagtgaaatgatttgcatgaggytccatcaccaaggagatgtgaattagcacaccctcaattgcaaatattagaaaccccacatcagaatagctttaatgaaaaagacttctggttaactata

SEQ ID NO: 462123 - DNA, 201 bp, Homo sapiens
agcagagataaggggaacacgagatttttccaaggaatatacaaaacacaaagttttttagcacagacttccacattgtgtgggacagggcttgagtaatttttttttttttttttttttgacactgtgtcttgctttgtaacacaagcaggagtgcagtagcatgatcatggctcactgcagtctcaaactcctgggctc

SEQ ID NO: 462124 - DNA, 201 bp, Homo sapiens
tcccctgggttcctcccacaacatgtgggaattctgggagatacaattcaagttgagatctgggtggggacacagccaaatcatatcacttgacctggtgrgatgtaatattcattattccctgttgtaatccagcacagaagtaatgcctgatacacacacagcagacactcaaaaatattattgaataaacaagtgagt

SEQ ID NO: 462125 - DNA, 201 bp, Homo sapiens
atttcattcatttcatcttccatcactgataccctttcttccagttgatcgcatcggctcctgaggcttctgcattcttcacgtagttcttgagccttggstttcagctccatcagctcctttaagcacttctctgtattggttattctagttattcattcgtctaaatttttttcaaggttttcaacttctttgcctttg

SEQ ID NO: 462126 - DNA, 201 bp, Homo sapiens
gcagagataaggggaacacgagatttttccaaggaatatacaaaacacaaagttttttagcacagacttccacattgtgtgggacagggcttgagtaatttttttttttttttttttttgacactgtgtcttgctttgtaacacaagcaggagtgcagtagcatgatcatggctcactgcagtctcaaactcctgggctca

SEQ ID NO: 462127 - DNA, 201 bp, Homo sapiens
gccagccgccccatccaggagggaggtggggggcagcccccgcccccgcccggcagccacctcgcccgggaggtggggggcacctctgcctggctgccccrtctgggaagtgaggagcccctctgcccggcggccaccccgtctgggaggtgtacccaacagctcactgggaaccggccatgatgacgatggcggttttgt

SEQ ID NO: 462128 - DNA, 201 bp, Homo sapiens
tctgttacataatccctttaatatgtggctgaatttggttcactggtattttgttgagaatttctgtgtcaatattcataagggatattggtctgtggtgttttttttttgtgatgtctttatctaattttggtatctgggtaatgctggcctcataggatgagttaggaagtattccttcaccctgaatttttaatgaaa

SEQ ID NO: 462129 - DNA, 201 bp, Homo sapiens
tgggaggtgtacccaacagctcactgggaaccggccatgatgacgatggcggttttgttgaatagaaaagggggaaatgtggggaaaagaaagagaaatcrgattgttactgtgtctgtgtggaaagaggtggacatgggagactccattttgttctgtactgagagaaattcttctgccttgggatgctgttgatctatg

SEQ ID NO: 462130 - DNA, 201 bp, Homo sapiens
tgggtaatgctggcctcataggatgagttaggaagtattccttcaccctgaatttttaatgaaagtttgagaagcactgatattagttcttctttaaataygtggtagaattaaccagtgaagccattatatctagggattttctttctttccttctttctttctttctttctttctttctttctttctttctttctttct

SEQ ID NO: 462131 - DNA, 201 bp, Homo sapiens
gtgtctgtgtggaaagaggtggacatgggagactccattttgttctgtactgagagaaattcttctgccttgggatgctgttgatctatgaccttaccccyaaccccgtgctctctgaaacatgtgctgtgtccactaagggttaaatggattaagggcagtgcaagatgtgctttgttaaacagatgcttgaaggcagca

SEQ ID NO: 462132 - DNA, 201 bp, Homo sapiens
gaacaaaagactagagctagagggtgatatacggccttgaccaaaatgctgtaaatgtttggaatggcattcttactaggatatgaaatctttaaataaarcatgtaatgggaaatatgcattcatctccatattaaaaaggccatgttggaaataaaatatcatggagtttttaaaagatgaggattaagatcacctgaa

SEQ ID NO: 462133 - DNA, 201 bp, Homo sapiens
ggtgctccacgcctggcccatgaaactattctttcctcctaggcctctgggcctgtgatgggaggagctgcctggcagatctctgaaatgccttcaaggcmcttttcccattctcttggctatcagcacctggttcccttttagtgatgcaaatctctctagcaattggttgctctgcagcctgcttgacttttttctctc

SEQ ID NO: 462134 - DNA, 201 bp, Homo sapiens
tacagtctgatctcagtattgtaaaggttagagtatgaactctattgaaaacatatgaatgttttcagcatctgcatttttaacttgtttcagaagcccayggatatagtagtagtataaactttgggaaaatacttattcaggagtctgcagatggcataagaataagacacctataatttactaacggttttaacattt

SEQ ID NO: 462135 - DNA, 201 bp, Homo sapiens
tgtttgtcatttgtatatcttcttttgagaattgtctattcatgtccttagcccactttttgatgggatttttttttcttgctaatttgtttgagttcctygtagactctggatattagtcctttgtcggatgtatagatcgtgaagattttctcccactctgtgggttgtctgtttactctgctgtttcttttgctgtgc

SEQ ID NO: 462136 - DNA, 201 bp, Homo sapiens
agggttttctacatataaaatcacattatttgcaaacagatgattttactcctcttgtccaatttggatgcgttttctttttcttgcctaattgctctggytagaacttccaccattatgctgaaaagaagtggtgaaacagacatggtgaaagtgggcatcccttcctgctgcagatctggaaaaaaaaaaaagtgggaa

SEQ ID NO: 462137 - DNA, 201 bp, Homo sapiens
cttatcaggccccacttcccaagactgttgccttaaatttttttttttgagacagagtttcactcttgttgcccaggctggagtgcagtggcacgatctcrgctcactgcaaactctgcctcctgggttcaagcaattctcctgtctcagcctcccaattagcggggattacaggtgtatgccaccattcctggctaattt

SEQ ID NO: 462138 - DNA, 201 bp, Homo sapiens
tatcagcagcggtgtctgcagaaccgcagattttcgtgatccgtgaatgctgctgtctgatcgttcctctggaagctttgtctcaggggagtacccagccrtgtgaggtgtcagtctgcccctactggggggtgcctcccagttaggctgctcgggggtcagggatcagggacccacttgaggaggcagtctgcccgttct

SEQ ID NO: 462139 - DNA, 201 bp, Homo sapiens
aaaaaaaaaaaaagtctagaaacagatacttgtattttatacttttttttttttcaaatcagttaagtttttgatgacatgatatttgcttttgttttcaractatggttacaacatggtaggtatctgtataaacgaatagttataagtgctgaaaaaagctggactacatcatcagctttttattctctattggatatt

SEQ ID NO: 462140 - DNA, 201 bp, Homo sapiens
tcctctggaagctttgtctcaggggagtacccagccatgtgaggtgtcagtctgcccctactggggggtgcctcccagttaggctgctcgggggtcagggrtcagggacccacttgaggaggcagtctgcccgttctcagatctccagctgcgtgctgggagaaccactgctctccttaaagctgtcagacagggacattt

SEQ ID NO: 462141 - DNA, 201 bp, Homo sapiens
ttatacttttttttttttcaaatcagttaagtttttgatgacatgatatttgcttttgttttcagactatggttacaacatggtaggtatctgtataaacraatagttataagtgctgaaaaaagctggactacatcatcagctttttattctctattggatattcccattagcataaaaacatacttttatttcttagta

SEQ ID NO: 462142 - DNA, 201 bp, Homo sapiens
cgcccctcccccagcctcgctgctgccttgcagtttgatctcagactgctgtgctagcaatcagtgagactccgtgggtaggaccctccgagccaggtgcrggatataatctcctggtgtgccgtttcctaagcccgtcggaaaagcgcagtattcgggtgggagtggcccgattttccaggtgccgtctgtcacccctgt

SEQ ID NO: 462143 - DNA, 201 bp, Homo sapiens
ttttagtagagacaggatttcactgtgttagccaggatggtctcaatcacctgacctcatgatccacccgcctcagcctcccaaagtactgggattacagrtgtgagccaccacgcccagcctaaatcactatttttaaagtaattgttttatgcatgttagattttttaatgaattttccagacaaatgcctctcatttt

SEQ ID NO: 462144 - DNA, 201 bp, Homo sapiens
gcaatcagtgagactccgtgggtaggaccctccgagccaggtgcaggatataatctcctggtgtgccgtttcctaagcccgtcggaaaagcgcagtattcrggtgggagtggcccgattttccaggtgccgtctgtcacccctgtccttgaccaggaaagggaactccctgatcccttgggcttcccgagtgagtcagtgc

SEQ ID NO: 462145 - DNA, 201 bp, Homo sapiens
cctcacttcatcccagacggggcggccaggcagaggcgctcctcacttcccattcggggcggccgggcagaggcgctcctcacttcccagacggggcggcygggcagaggcacacctcacatcccagacgatgggcggccgggcagagacgctgctcacttcctagacggggtggcaggcaggcagaggctgtaatcttag

SEQ ID NO: 462146 - DNA, 201 bp, Homo sapiens
gaaaagcgcagtattcgggtgggagtggcccgattttccaggtgccgtctgtcacccctgtccttgaccaggaaagggaactccctgatcccttgggcttyccgagtgagtcagtgcctcgccctgcttcggctggcgcacagtgcgctgcacccactgtcctgtgcccactatctggcactccctagtgagatgaacccg

SEQ ID NO: 462147 - DNA, 201 bp, Homo sapiens
agtttttttttttttattatactttaagttctagggtacatgtgcacaatgtgcaggtttgttacataggtatacatgtgccatgttggtttgctgcactyattaactcgtcatttacattaggtatttctgctaatgctatcccttcccctgccctccaccccacgacaggccctgggatatgatgttccccgccctgtg

SEQ ID NO: 462148 - DNA, 201 bp, Homo sapiens
ggagaaaaggtgaatgaactctgggttttggattgtaattggagatacccacgtgaactcatggtttttagtatatattggaatatatatataatatatawtatatatatatatggcattcagttaactgagagggccttagagcagtaatatcccaatagcaataagcacacctaatgcccatatcttggtttccaagta

SEQ ID NO: 462149 - DNA, 201 bp, Homo sapiens
agatgagtagattgcaaaaattttctcccattctgtaggttgcctgttcactctgatggtagtttcttttgctgtgcagaagctctttagtttaattagakcccatttgtcaattttggcttttgttgccattgcttttggtggtttagtcatgaagtccatgcctatgtcctgaatggtattgcctaggttttcttctgt

SEQ ID NO: 462150 - DNA, 201 bp, Homo sapiens
gctaggattacagacgtgagccaccatgcccagcctcaattatgtttgtaatgctgcttttcccatgctgccaaatagcactgtttcaccatgctatttcsacctaaggcacccactatttatcatcaaggatcattgccaatgatcttaagaactgtcttttctttttttttttgagacagggtctcgctttattgccca

SEQ ID NO: 462151 - DNA, 201 bp, Homo sapiens
cagctcactgcaaactccaccttgcaggttcaagcaattctcctgtcccagctccccgagtaggagagtattttgtattgggtgtgtcatgcccagctaattttttttttttttttttttagtagagttggggtttcaccatgttggccaggcaggtctcaaactcctggcctaaagtgatccgcccacctcggcttccca

SEQ ID NO: 462152 - DNA, 201 bp, Homo sapiens
ttcaagcaattctcctgcctcagcctcctgagtagctgggaatacaggtgtatgacaccatacttggctaatttttatattttttgtagaaatggggtttyaccttgttggccaggctggtctcaaattcctgacctcaagtgatccacccaccttggcctcccaaagtgctggcattacagtcgtgagccactgcaccca

SEQ ID NO: 462153 - DNA, 201 bp, Homo sapiens
gcaatgcaggctcttttttggttccatatgaactttaaagtagttttttccaattctgtgaagaaagtcattggtagtttgatggggatggcattcaatctataaattactttgggcagtatggccgttttcatgatactgattcttcctatccacgagcatggaatgttcttccatttgtttgtgtcctcttttattttg

SEQ ID NO: 462154 - DNA, 201 bp, Homo sapiens
ctgagtagctgggaatacaggtgtatgacaccatacttggctaatttttatattttttgtagaaatggggtttcaccttgttggccaggctggtctcaaaytcctgacctcaagtgatccacccaccttggcctcccaaagtgctggcattacagtcgtgagccactgcacccagccttcatgttcattttaaaggttaaa

SEQ ID NO: 462155 - DNA, 201 bp, Homo sapiens
tcacatcccttgtaagttggattcctaggtattttattctctttgaagcaattgtgaatgggagttcactcatgatttggctctctgtttgtctgttattkgtgtataggaatgcttgtgatttttgcacattgattttgtatcctgagactttgctgacattgcttatcagcttaagaagattttgggctgagacaatgg

SEQ ID NO: 462156 - DNA, 201 bp, Homo sapiens
ctgttgaattttgttgaaggccttttctgcatctattgagataaacatgtgggttttgttgttggttctgtttgtgtgacggattatgtttattgatttgygtgtgttgaaccagccttgcatcccagggatgaagccgacttgatcatggtagataagctttttgatgtgctgctggattcggtttgccagtattttatt

SEQ ID NO: 462157 - DNA, 201 bp, Homo sapiens
cttctagattttctagtttatttttgtagaggtgtttatagtattctctgatggtagtttgtatttctgtgggattggtggtaatatcccttttatcattytttattgtgtctatttgattcttctctcttttcttctttactagtcttgctagcggtctatcaattttgttgatcttttcaaaaaaccagctgctggatt

SEQ ID NO: 462158 - DNA, 201 bp, Homo sapiens
actttgggaggctgaggcaggaggatcagttgaggccaggagttcaagaccagcctggacaacacattgagaccccatctctacaaaaaataaaaaaaaaytagagatggtagcacatgcctgtagttccaacttttcaggaggctgaggtgggaggttcacttgagcccaggaggttgaggctgcagtaagccatgatca

SEQ ID NO: 462159 - DNA, 201 bp, Homo sapiens
gaggcaggcggatcacgaagtcaggagatcgagaccatcctgaccaacatggtgaaaccccaactctactaaaaatacaaaaattagctgggcgtggtggygcgtgcctgtaatcccagctacttgggaggctgaggtgggagaatcacttgaaccaggaagttggaggttgtggtgagccaaaattgcgccactgcactc

SEQ ID NO: 462160 - DNA, 201 bp, Homo sapiens
ttatggtgtgactttctgaaatgcagagactgaaaagttaaactacgtttcccaggttcctttactgttagagttctaaatgagacttaggttccttcaawcaaatgcattcacatgggacctgaaaaggaactgggctcctaataattccctcatacagtatatggtaatttcccctacctgcagactcaccttccccta

SEQ ID NO: 462161 - DNA, 201 bp, Homo sapiens
ttctattttctactccttcagctcaaagcttctcaaggaagctttctctagtctaggtcaagtatcattaactatgtggcattaggcaagtttcttttatytatttatgtatttaatgagacaggggccttcctctgtcgcttaggctggagcgcaatgatgcgattgtgactcacttcagccttgaactcctgggcttaa

SEQ ID NO: 462162 - DNA, 201 bp, Homo sapiens
tctactccttcagctcaaagcttctcaaggaagctttctctagtctaggtcaagtatcattaactatgtggcattaggcaagtttcttttatttatttatrtatttaatgagacaggggccttcctctgtcgcttaggctggagcgcaatgatgcgattgtgactcacttcagccttgaactcctgggcttaagtgatgct

SEQ ID NO: 462163 - DNA, 201 bp, Homo sapiens
tgttttagtaggcagtctatctggttgggttcagaccccaagtttcaacctggctgctatggcctataattccaatgaatgtcacttctgtttattatatrctgaattggacagatctacatgttctctacttgggctggggccaggagttcataaaccagtttatgggcttgctctcctgagttcttcatctctgtgatc

SEQ ID NO: 462164 - DNA, 201 bp, Homo sapiens
gtacaactaaaaaatcctgaaaattttctaccattaggaagtaggtgaatgggaggagtagatgtgtccaatggacaatgagaattggtttgttctgatamtggaagattaaaagtcaaagaaaaaaaatggcttatagtcttcagttttcttatcaggattattaaattcactaatcttaattcttagtagacatgtgtc

SEQ ID NO: 462165 - DNA, 201 bp, Homo sapiens
agtcaaagaaaaaaaatggcttatagtcttcagttttcttatcaggattattaaattcactaatcttaattcttagtagacatgtgtctctttgaaaatgraagactttttcagaagtaatcaagaaatgtcagagtataattggaggctgtaaatcacacagttcaagctgttaagacattccataagcatagataacga

SEQ ID NO: 462166 - DNA, 201 bp, Homo sapiens
tcttaaccatttttaagttcagtagtgttaagtatattcacattgttatgcagcagttctctagaactttttcatcttgcaaaacagaaactccatacccrttaaacactaatttcctctcctccctacctcatcccttagcaaccccttttctgctttctgtttctatgactgatgcagaaaaattggaacccacatgca

SEQ ID NO: 462167 - DNA, 201 bp, Homo sapiens
tctagtattgcatagagaaaagtactgtgcctacagtgtcccagtaatttgtttaactttcaatgctaccagcatagaatcatagactgtatgaactagamgggacttcagagataaaatagttttaactgcttattttatgagggagaaaattgagagccagggaagctattataaatgacatctctttgagtagcatct

SEQ ID NO: 462168 - DNA, 201 bp, Homo sapiens
caagtacatatataaatatatagtgatattcaattacatatatacatagtgaaattattataaaattataaaatgtttgtaaaattatatattattatatmatttattattataaaattctaaaattttttgatctttctgcttagaatacctgatcaactccttagtatccgtcaagtttcagttattcagtgagacttt

SEQ ID NO: 462169 - DNA, 201 bp, Homo sapiens
attattaaagtattagtgccatagtgcatagttacctgtttttaccttaagaccacatctcgataaatgtgagcattcctttctctaaatttgctacttaygatgtgaaagcagctcttttccaaatgatctagagtataatttttaagaaatcagaagaattgtgttgttagctattagctactattgaagctatttcac

SEQ ID NO: 462170 - DNA, 201 bp, Homo sapiens
acaaatgttgagcaaatgccaaaatgccaaaaaggtcttacaaaatggtacagagaccacagggaaacagctgtgtttctgacaagcagcgtgctccatcytggaaatacaggaattaaaggagttaatgaacatgaggaaggaaagggaagtatgatccagtcttggctaactttcaccttggaggagctaataacaatt

SEQ ID NO: 462171 - DNA, 201 bp, Homo sapiens
ttttgtccaaatacttttcctgtgtcaactgatatgattatatgattattgggtgatttttttttagcctgttaatatgatggagcgcattagttgatttycaaatattatatcagctttgcagccctggactgaattctacttggtcatggtgtactattctttttatatatcgttgacttctgagtgctcatgttttgt

SEQ ID NO: 462172 - DNA, 201 bp, Homo sapiens
gagaatcacttgaaccaggaagttggaggttgtggtgagccaaaattgcgccactgcactccagcctggcgacagggtaagactccgtctcaaaaataaataaataaataaataaataaataaataaataaataaatataaaaataaaaattagccaggcatagtggcatgcacctgtagtttctgctacttggggaaatt

SEQ ID NO: 462173 - DNA, 201 bp, Homo sapiens
cagacaagtgcaggcagctctgggatgagctaggtaagttcccatcattcagagaagtgctttgttctaccatcttgccctgtggcaacagtgtttatgarcccttgccatcagtcgttgcatggatcttgctaagtccagctggtagaagacttaggttctacagaggccacccagagtaacactgaactcacttttgtt

SEQ ID NO: 462174 - DNA, 201 bp, Homo sapiens
ttctgctacttggggaaattaatttgggagaattccttgagcccaggaggtcaaggttgcagcaagccgtggtcgcaccactgcactccagcctgggtaayggagcaagaccctgtctcaaaaaaaaaaaaaaacaagcttctacatgtttgcttaaattaatagattattgatggacatgtttatggctgttaggtttgc

SEQ ID NO: 462175 - DNA, 201 bp, Homo sapiens
taatttgggagaattccttgagcccaggaggtcaaggttgcagcaagccgtggtcgcaccactgcactccagcctgggtaacggagcaagaccctgtctcaaaaaaaaaaaaaaacaagcttctacatgtttgcttaaattaatagattattgatggacatgtttatggctgttaggtttgcaatgggaaagaaacactac

SEQ ID NO: 462176 - DNA, 201 bp, Homo sapiens
aaggagaagttgggctcagagactgtgctgcaagccaagtgtgcctgaagcattgaacggataaagcagaaatgtttctatgtttcattttgtttgtttgkttggttggttggttgttttttgtttgtttgtttttattttgagacagaatcttgctctgtcactcaatctggagcacagtggtgtcatcatggcttattg

SEQ ID NO: 462177 - DNA, 201 bp, Homo sapiens
taatgtgctctttgctatatattactctgctggcaatgtctggtgggtataggtctggagaggagctgcttcccaaccctacagttctcttctttagttctttttttttttctttttcttaaagagacagggtctcaccccgtgtcccaggctagagtgcagtggcaccatcatagctatctagcaacctcaaactcctgg

SEQ ID NO: 462178 - DNA, 201 bp, Homo sapiens
attttctctttgtttactatatgtatgtttacttgtatatttaactattttatcattcactctctttttccccttattattttatataccagttgttggargttaactttacaattgtgtctttaggtggaagaatattcagtgggaccatgactaaatttgaggctaaattattaggttggtgcaaaagtaattgcagtt

SEQ ID NO: 462179 - DNA, 201 bp, Homo sapiens
tgagccaagattgcaccactgcactccagcctcggtggcagagcaagaccccagagataaaaataataataaagcataattaatattatagaattgatttkctattgattttatcttttaattttgttacgttaaaaatgggttctccctacatttcaaaattattgttactgtgtgcctagtgagtagaggtgtaacact

SEQ ID NO: 462180 - DNA, 201 bp, Homo sapiens
tcctcactttccagacgatgggtggccaggcagagacgctcctcacttcccagacggggtggcggccgggcagaggctgcaatctcggcactttgggaggycaaggcaggcggctgggaggtggaggttgtagcaagccgagatcacgccactgcactccagcctgggtgccattgagcactgagtgaaccagactccgtc

SEQ ID NO: 462181 - DNA, 201 bp, Homo sapiens
tactcctcgtgggcctgtggcaatggtggccatgggaggctcctctgcctttggaaaggggcaggaagagtggaagtgtcatgcgcgtccatgtgaagagwccaccaaacaggctttgtgtaagcaacaaggctgtttatttcacctgggtgcaggcgggctgagtccgaaaagatagtcagtgaagggagataggggtgg

SEQ ID NO: 462182 - DNA, 201 bp, Homo sapiens
ctgtcacccacatctattcgcacactccctccccgtttgaaaatccctaataaaaacttgctggtttttgtggcttgtggggcatcacggatcctaccaaygtgtgatatctcccccagacgcccagctttaaaatttctctcttttgtactctgtccctttatttctcaagccagccgacgcttaggaaaatagaaaaga

SEQ ID NO: 462183 - DNA, 201 bp, Homo sapiens
aacattgtaaccgtgatgtgtaaactactcttaagtagaaagactaaactatgaaccaatcacaaataataactacaactttcaagacatagcataataarataaaagtagtaacaacaaaaagttaagaagcaggggcacgaagttaagttgtagagtttttattaggtttcttttggctcgtttgtttgcttatttaaa

SEQ ID NO: 462184 - DNA, 201 bp, Homo sapiens
atatgatggagcgcattagttgattttcaaatattatatcagctttgcagccctggactgaattctacttggtcatggtgtactattctttttatatatcrttgacttctgagtgctcatgttttgttaaggatttttgtctcatatttatgagggatatttgtccttagttttcttacttgatactgtctttggttttgg

SEQ ID NO: 462185 - DNA, 201 bp, Homo sapiens
ctgggattataggcatgagccattgtgccggccttcctttttttttttttttgtgaaacggagttttgcttttgttagccaggctggagtgcaatgacgcratctcggctccgcctcccaggattaagagattctcctgcctcagcctcccgagtagctgggattacaggcgcttgccaccatgcccggctaatttttgta

SEQ ID NO: 462186 - DNA, 201 bp, Homo sapiens
aaggaggagaaaagagattgctcatgaagcattcctcaggatgaaaaaactgacaaccgtatcgatagctcaggtgctgattaaaatctcctatattctcyagggagaaaagtctggggaattgcaaccagttccttatttccaattttataagttatgaaagcaatgaaactcattgctgtaatatacggcattttgttg

SEQ ID NO: 462187 - DNA, 201 bp, Homo sapiens
tctatctcaaaaaaaaaaaaaaaaagaaagaatgaaaacataaatcaaatttaaatccctgtctagactgatcaagaaaaaaggagataaaaggcagaaaygaccaatatcaggaatgagaaaggtgatatcactacagattctaaagacatcaaaatggtaataggagaatattacaaacagctttatgccagtaaattc

SEQ ID NO: 462188 - DNA, 201 bp, Homo sapiens
ttgccccagggtgctgtagtgagaagcagacagtgggactgccgttcttttttggcagtaatgtgactttctgtctactgtataagtagctctggaaattmaggtgttcaagaaaattatttctggtacctaaagatcctgagggttgcccggcgcagtagatcatagggtcagagatcgagaccatcctggctaacacgg

SEQ ID NO: 462189 - DNA, 201 bp, Homo sapiens
ttcaagcgattcccctgctcaccactacacccggctaatttttgtactttagtagagttgtggtttcaccatgttggccaggttggtcttgaactcctgayctctagtgatctgcctgcctcagcctcccaaagtgctgggattacaggtgtgagtgactgtgcccagctgcattttattaataagcagaaatggattaat

SEQ ID NO: 462190 - DNA, 201 bp, Homo sapiens
cagaaatgtttactgggtgcagctgtttaattatgcttttaatttcagaatagtttcaaatgtaaacaaaagttgtgaagatagggcagagaattctcacrtacccctcactcagtttcccctattgttaacatcctatattaccatgggacatatatcacaactaagaaatcaacattggtacgtgactataaattaaac

SEQ ID NO: 462191 - DNA, 201 bp, Homo sapiens
cctacttattcattcaattataacagatatttattgagggcatactctgtgctaggcattggaccacaataatgaacaaattggcacaattccagccttcmtgttgttgtggagctttcatgtatcatcttatctatttctttttaaaagcttttaggtggatatattaatctccatgaggaaactgaggtgcagagaggc

SEQ ID NO: 462192 - DNA, 201 bp, Homo sapiens
tggagtacagtggtatgatcatagtgtactgcagccttgaactcttgggcttaagcaatcctcctgcctcagcctcccaagaagttgggaccacaggcacrcaccaccatgcccggctaattttttttattttttgtagagactgggtctcactgtgtttcccaggctggtctcgaattcctggtcttaagcaatcttccc

SEQ ID NO: 462193 - DNA, 201 bp, Homo sapiens
gtatataaatttttaaatagagatggaatcttgctatgttgcccaggcctgtcttgaactgatggcctcaagcaaccctcacactttggtctcccaaagtkttgggattacaggtatgggccactgcgcccagcctaaatacatttctgatacatcaattttttctctacctgtatgtctacacactagtatttagttgcc

SEQ ID NO: 462194 - DNA, 201 bp, Homo sapiens
aaaactccagatttgtgcatataataaactgatagcattaagtagtatgagtgttacaacttaggtgtatcttctgtgtttaaccatctattttgtgtgaygaatggtgatttatcaatttcttcaaatgaaagctttaaatgaatttttctaaaggtgactttctcaaggatagagctttggattttaaagatgatggat

SEQ ID NO: 462195 - DNA, 201 bp, Homo sapiens
taggcagcatgcttcttggacacttttagcctatcatggagctagtagactaagaaaatcatacttatttaaatattagctgtagtattatgtgattataygctaaattactctgcgatagtttttgtaatcatatatagtcaactgattaatttttggttttcagtgtaattgttctcccccttaggatgtataatgtgg

SEQ ID NO: 462196 - DNA, 201 bp, Homo sapiens
tataggaaagaaaatagtgtgtgttatggaagcctgtaaatgtggtaccagattcaaggtggagtagggattatgctattttgcagtaatctatttatagwtatttacagatataaatccatttaccaatataaacagatttctttttctttctttttttgtttttttagagagggtcttgctctgttgcctgggctagag

SEQ ID NO: 462197 - DNA, 201 bp, Homo sapiens
ctgcagaaatttgcttaagtaaagccaagacaatgaggaaaatgtctcaaaagcatttcagacaccttcatggcagcccctcccatcacaggcccagagayctaggagggaagaatggtttcataggccaggcccagggctccgctaccctgctccttaggacactgctccctgcatcccagccactccagctctggctgt

SEQ ID NO: 462198 - DNA, 201 bp, Homo sapiens
acatcctatattaccatgggacatatatcacaactaagaaatcaacattggtacgtgactataaattaaacactttattagcatttcaccagttttccccscaaagtccatttgctgtttgaggatcctcttcaggacaccacattacattctgtcatcatgtctccctagcttcttctggtctgtgatagtttctcatac

SEQ ID NO: 462199 - DNA, 201 bp, Homo sapiens
gaggaagaggttgaacacatggctggttgagggaagaaggaagagcaggaatgacaggcatggagcaggatgctctctgatggagcatgaggaaaaggatrgcaccgagaagctagcagcgatgggccaaaaacaacagcaacatcatcattcccatccccatctctatctctataatagtgaccatatgaagtaagtact

SEQ ID NO: 462200 - DNA, 201 bp, Homo sapiens
tcatctgtaaagtgaagctagtgataatacatatcatatagagttattgcaaggatttagtgagataatgtatggtcctacccgataccaagtatcactayaagacggggtttctcaacctcatccctgttgacattttcagctggatagttcgttgctgtggggtactgtcctgtgcattgtggtttagcagcatctctg

SEQ ID NO: 462201 - DNA, 201 bp, Homo sapiens
tatctactcaagcctcggcaatggcaggtgcccctcccccagcctcgctgctgccttgcagtttgatctcagactgctgtgctagcaatgagggaggctcygtgggtgtaggaccctcccagccaggcgcaggatatattctcctggtgtgccgtttgctaagaccgttggaaaagcacagtattagggtgggaatgaccc

SEQ ID NO: 462202 - DNA, 201 bp, Homo sapiens
tgtgaaaacacttcaaaatgttttttataaaatactgaaaagggaaacaacaaaaatgaccaatatgttaggggttaaacatatgacattttctagaagaytggggctgatgaaatatttactttgctaatctgcaatgtatatgggaatgctatgggaaaatagcattagaatcaacaacacaaataattattaaagtat

SEQ ID NO: 462203 - DNA, 201 bp, Homo sapiens
ggctttttaattctattttttggtggacatttaggtccttatcttactagacttcttggcattggatcctgttgaccctctcctaaacattgtactctccwgacttcaacaatggttcttgtctttcctcctttctctgactgccttgtaaatgttggttttcctcaggggccattctctctacacagcttttctcactct

SEQ ID NO: 462204 - DNA, 201 bp, Homo sapiens
ttcccatctatcaagatttatctagctattgctgccttgaatgtccaacctgttggcaaccaaaatgaacaactaacctcctgatatagcattgttcctgmtacaggccaactgtatcacacagcacaccagtccctttcattctaaaagggtcaagagtttgttttcaaaaggagagatacctgcatatgagtttgcctt

SEQ ID NO: 462205 - DNA, 201 bp, Homo sapiens
agctagtgcaaacactgcaaaaacaatgcatcttactgctggaaggtaagtagaaaagagtctcttgtcacggtgtctttggcccatgaccctgagctccyctctccaatagagtacaagtacaggaacatttatgacattaaaatgtagtgaatgaaggttcccatgattagcaaacatgcatgagatactggggctcaa

SEQ ID NO: 462206 - DNA, 201 bp, Homo sapiens
ctcttttcctctcagaataagagagtttgtacatactggaagggaaagtgaaaatcctcagcggagagacagaaattgagaaggtctgaaaaataggggckaattatgacaggaagatcctgaaggacccagagaaggtgagttggagggcataggcaaagagcttaaatttggtaggaggcaggataaaaagaaggcagg

SEQ ID NO: 462207 - DNA, 201 bp, Homo sapiens
aggagatactggtgaagacatagagatctttatatctagaccacttattcaaatatgacaatgaaaagagagtgtgaaatataacacaagtcagagagaaytgaggggtcaaacagagactcttttcctctcagaataagagagtttgtacatactggaagggaaagtgaaaatcctcagcggagagacagaaattgagaa

SEQ ID NO: 462208 - DNA, 201 bp, Homo sapiens
ttctgatttttaaagcattacatagataaaaattatccttgaagcttattattaacttgttcttggttcagtcattgaattaacgtttagtcacttattaygtgtaaggctcagtaaataattgtttacctgtttttggtggaagtctttctgtagtactttgcattttcctatcttagagtacaaagttaggttgggcat

SEQ ID NO: 462209 - DNA, 201 bp, Homo sapiens
gtgtcttgctttgtaacacaagcaggagtgcagtagcatgatcatggctcactgcagtctcaaactcctgggctcaagtgatcctcctacttcagcctccrgagtagctgggaccacagacacccaccaccatgcccagctaattttgtatttgtttttttgtggagacagagtctcattatgttgcccagtctggttttg

SEQ ID NO: 462210 - DNA, 201 bp, Homo sapiens
ggggattatatttaacatcttaatgtaataacactctaatttgattttgcactagcttagcctcaataacacacaaaaactctgctcctttacagcttttcccccactcttttcagttactgattccacaaaattacatctttatatccttatgccccaaaacataatcatttttaaatgcatttatctgttaaattatgt

SEQ ID NO: 462211 - DNA, 201 bp, Homo sapiens
tagcttgttataattgcctacatatttacttttaatgaagtatttatttcttcatataccttcaagttattgtctagtgtttcttcatttcaccttgcagractcccttaagcatttctggcaaggctggtctagtggtaattaactccctcagcttttgttcatctaggaatatcttaatttctccctcacttttgaagg

SEQ ID NO: 462212 - DNA, 201 bp, Homo sapiens
tccaggtctttggtccagcggcggggttttccactcaagggccacaggtacagacaagcagagcagaaacagcccccccggcctttcacttcccacctgcycccgagggagagagtaaggtttctgggggtaagtgggggctatctgaaagaaaagggtgattttggctggggctcggtgccctacaagagcccttgcttg

SEQ ID NO: 462213 - DNA, 201 bp, Homo sapiens
ctgattcacgggctgtctcagcagcagagatctgcttcatctgaggtcatacttttctaagggcagcctgcaaatgactgagcaaggtaggagcgtaaagmtccagctatttcggccgggcgcggtggctcacgcctgtaatcccagcactttgggaggccgaggcgggcggatcacgaggtcaggataaggagcgggcgg

SEQ ID NO: 462214 - DNA, 201 bp, Homo sapiens
gtactattcaattgtaagactatgccacaatttgtttatccattcgactgctgaagaatgtttgggttgttggctgttttatgctattgtgaataaagctrctacaaacattctgtacaattctttttgtggatatttgtttttatttctcttggctgaatacctaggagtgaaattacttgagtaaataccccggagtga

SEQ ID NO: 462215 - DNA, 201 bp, Homo sapiens
cctctgcttcccggactcaagtcatcctcccacttcagcctcccaaatagctggaactataggcacatgctaccatgcctggctaattttcattgttgttwttctagagacaaaatgtttttaaaaagttagccagtcatggtggcatgcacctatcctagctattagggaggctgaggtgggaggagcacttgaacctag

SEQ ID NO: 462216 - DNA, 201 bp, Homo sapiens
gtttagatagaagtgcaggttccactctaagaaaaccttggggatgtaggtatctgagggagtttgtaggtcttagagtggaagttcaagaagatacagargaatgattggggaccaaaacaaagaaggaggctgggtcagttgagaggatgtatagaacaggtagagagttacaaggagagttagaaaggtaaggtgaca

SEQ ID NO: 462217 - DNA, 201 bp, Homo sapiens
ggtaggaaaggagttggtaaacggtaggttaaagaaatttgtctttgtgttgataattgttgaagttaagtgatgcatacatggggactcaacatactgckgtctctgtcttttgttttttttttttttgcttgccttgttctggagtacagtgatatgatcttggctcactgtaacctcgatctcccaggctccagtgat

SEQ ID NO: 462218 - DNA, 201 bp, Homo sapiens
tactacaggggtccttaacttatttaggattccttattagtctttctgagactatgatgatagctatgaactatccccacccccagaaaaatgtatacacstacaaactaaagttttcatatcagtgtgagttcaggaggttcacgaactccagggtgaggactctttctatattgtgtgtttcttcagagcagtaactga

SEQ ID NO: 462219 - DNA, 201 bp, Homo sapiens
ctctaagcagatgattcactcatgtcctgatacattttcttgtacagatgagttcatgagcccaccttcattccaactatgagagcatcacagcacttgtmagtttcagttaccttgaacatttgcccaggaaaacaggcaaatgtcagagtttactgacttgttattagtgcaggactctctgtctttgtagaattacac

SEQ ID NO: 462220 - DNA, 201 bp, Homo sapiens
aatgttatccagtatgttagtgtagttttatttagaactttatttagtagtgaatggtttttcagtacctattcccttttatctattcccttggagattasaattgaaaaggagttggattttaactttcctcagttatatatctgtgtgataaatatgctgtctagcacaccatcaaaacaggttagccttgctagggtt

SEQ ID NO: 462221 - DNA, 201 bp, Homo sapiens
caaaaatacaaaaattagccgggcgtagtggcgcaggcctgtggtcccagctactcgggaggttgaggtgggaggatcgcccgagctgggggaggttaagsctgcagtgagctgtgatcgcgccactgcactccagcctggacgacagggcaagattgtgccttaaaaataaaaacttgttttggtaaaatacacataata

SEQ ID NO: 462222 - DNA, 201 bp, Homo sapiens
tttttaaaagatgaggattaagatcacctgaaaattagtcttttgattactatgagaatttgattatagtttttatgatatttatgcataggcatttttcrttagattatttgaggtttgactctgcttgaaatgagttttttaagtatttgaataaaggagctagctggaattataggcagaacattaacataataatat

SEQ ID NO: 462223 - DNA, 201 bp, Homo sapiens
gagatccgcctggccaacatggtgaaaccccgtctctacaaaaatacaaaaattagccgggcgtagtggcgcaggcctgtggtcccagctactcgggaggytgaggtgggaggatcgcccgagctgggggaggttaaggctgcagtgagctgtgatcgcgccactgcactccagcctggacgacagggcaagattgtgcct

SEQ ID NO: 462224 - DNA, 201 bp, Homo sapiens
ccgagcagccgccgccgcctcagtcagtcagtcagtccccagcaatggcggacggaggtgagcgagaggagctgctctcgccgtcaccggtctctccggcyaagcggcagtgttcgtggcccagcccgcaggctcatcaccctcgcggttcgcctggggcagccggcggaggggcagggggcgtcggcagcagctgcctgg

SEQ ID NO: 462225 - DNA, 201 bp, Homo sapiens
aatacagtccagcctcggctaggcatcaaagggagaccgtggaaaggggagatgagggagagggagaccgtagaaaggaaagaggtagaggtagaggtagrggtaggggtaggggtaggggtaggggtaggggtaggggtagaggtagaggtctttgtcttaatctgtttagctactgtaacaaaatatcataccatagaa

SEQ ID NO: 462226 - DNA, 201 bp, Homo sapiens
ggaatgcagcgacaagatcatggcttactgcagcccctaccttctaggctcaggtaattccctcacctcagcctcccgagtggctgggactgcaggtgcaygccgccatgcctggctaactttttgtgttttttgtagagataaggttttgccatgttgccccactggtcctgaactcctgggctcaagtgatccacctac

SEQ ID NO: 462227 - DNA, 201 bp, Homo sapiens
gcactgctaatttggttctgcgttcttcagttattataatattgcctttaaccaatatatttgctgtttattaccaattgaagttgatattttatcttccyttttggacaagttaactttttgagagacgagtacaactattaatatttgctcagcaaatacggtcaaaacaaagtatagggaagccgccaaccagaatca

SEQ ID NO: 462228 - DNA, 201 bp, Homo sapiens
acctgtcttttagatagggtggccaatgagctataagcagtaaggcttccagaaaagccctttaactttaactttaactttcatcttcctgcccagaactrtgatatgatggctggagtgccagtagccacattttaaccttgaagatagaagctgcttaaagaatggtgaagcacaaaaatagaatcctaggtgactttc

SEQ ID NO: 462229 - DNA, 201 bp, Homo sapiens
aagaagctttgctttttctcaggaaaatctgaattgattgaaggaaaaaaaattaacagtttttctcacttaaacacagaaatgttatatttacttggatrtttagttttaaaaattggctaaaggcatgcaggggccttctgcgcctggtacatcttagttatgtacgtatttatccagaaattttaagtagattttgac

SEQ ID NO: 462230 - DNA, 201 bp, Homo sapiens
atcacatgacctgtcagtgatgatgttaaccttgataaccaagctgagttagtatttgacaggtttccttactatatagttgtcctccacctctcctctcytgttgcatttaaaaatttttaaatggaataaaaaatgaaatggaaaactaaatgaagctttattaaataccatgggggagtgtgcaggtgcagtggctca

SEQ ID NO: 462231 - DNA, 201 bp, Homo sapiens
ggattgcagtggctcgatcttggctcaccgcaacctctgcctcccaggttcaagtgattcttctgcctcagcctcccgagtagctgggactacaggcgcgygccaccatgcccagcaaattttttgtatttttggtagagacagggtttcaccatgttgggcgggctggtcttgaactcctgacctcgtgatctgcccacc

SEQ ID NO: 462232 - DNA, 201 bp, Homo sapiens
atatagttgtcctccacctctcctctcttgttgcatttaaaaatttttaaatggaataaaaaatgaaatggaaaactaaatgaagctttattaaataccaygggggagtgtgcaggtgcagtggctcatgcctgtaatcccagcactttgggacaccaaggcaggtggatcactcgagctcaggagtttaatcccagcctg

SEQ ID NO: 462233 - DNA, 201 bp, Homo sapiens
tcttgatgtctgtatactttctgagctatagtctgctttaattctgagaacagaccagggtaaattgagcttcagctcagaatatgactgttttataaacraatttaaacattgtttaaatacaagggcaggtgtggtggctcacatctataatcccagcactttgggaggccaaggtgggaggattgtttgagcccagaa

SEQ ID NO: 462234 - DNA, 201 bp, Homo sapiens
ataagaagacccaggcagggacagacagcagtttgtctctatcactgtctaaaattttaacctgcttgtttccagaactgttgcagagaggaaccacaacsatcacaaacctggagggctgggtgggccaccccctggatcccatcgactgcctgtttctcactttgactgaggcctgccgcctgaatgatgatggctatc

SEQ ID NO: 462235 - DNA, 201 bp, Homo sapiens
ttgcatcacatactgtactatatttcttgttgccaggccttcccactgctgttttgtttctatgtataacagtctgcctcctttacccacttctggagaamctttcctggccccctcttcagtctggattagttggttcacctttgtgtttttaacttactctgtagccattctcatattgcatgtcaaataatgcagatc

SEQ ID NO: 462236 - DNA, 201 bp, Homo sapiens
tcctcaggatgaaaaaactgacaaccgtatcgatagctcaggtgctgattaaaatctcctatattctctagggagaaaagtctggggaattgcaaccagtkccttatttccaattttataagttatgaaagcaatgaaactcattgctgtaatatacggcattttgttgaacagagtgatacaggattgattaatgtttgg

SEQ ID NO: 462237 - DNA, 201 bp, Homo sapiens
ctgagattggaaaccatgaatttgtaacagcatacattgacaagtttgtaatatttctttagcatgcttctaaggcctgaggaaacttaactagttgaccrtccttaccccgcaagataatagcacttgaaataaggctgcatagtcatcttaggtatctttaaagaaggaatttttgaaattgaattttaatgctcagaa

SEQ ID NO: 462238 - DNA, 201 bp, Homo sapiens
ctttagttagagagagcaggcttttttgttggggttggattttttgtgtttttctgtgttttttggtctgcatctgttggcatttcttggttgcaggcttmttcacacctccaactctgagatatatgaaacaaaaagaaaacccagggaaatcctcactgtgtcattccttgggtcctgaagttcctaaccagtctgcct

SEQ ID NO: 462239 - DNA, 201 bp, Homo sapiens
gtcctggttctccactcaggcccctccatgcttagagaattaggaatccttcattactgttccttgcatggcctctactgacaccagaggtggaagggtgktggcctcgttaccactgggtagtgaaagtcctgattttccactgggcttcatctgacaccactgcagcagggagaggaggacatagggggcaccttgtta

SEQ ID NO: 462240 - DNA, 201 bp, Homo sapiens
ttctcatcttagtatcctgtatacccagcttaaagggtactgtactgtaagggcttaaatgtttgatgaatgagtaaatgaatcaatcagtcagtcaccaratcgatatcttgggattgctgttggaatattacattcatcctgagcttaaaagtcaatgtttttctccatcagggtacagaaattaagataaagagctct

SEQ ID NO: 462241 - DNA, 201 bp, Homo sapiens
tgagagacgagtacaactattaatatttgctcagcaaatacggtcaaaacaaagtatagggaagccgccaaccagaatcatgtttgtttagtttcgcaacygtgagtcacattttggttctaacactaaatggattatctttcctttttttttgaacattacatctgagttcacacctctgagcattcttacaatattatt

SEQ ID NO: 462242 - DNA, 201 bp, Homo sapiens
tggccctgcagaatatagcccttacctacctccccagacattgttgccctgcctttcttttgcttccttgaattagacatctattgaactgtaaaagggcwgggatcatacaccaatgcatactcaagacctgacacatggtagataccaataagtaccagttgagtaaataaaaattatgtgccaaggtggagatggata

SEQ ID NO: 462243 - DNA, 201 bp, Homo sapiens
gagattggatggtgaaattaaagaatgaacataggatggctgttgtaatagaaaaagcgagagcagaggagtgactaacctaaaaagtggcattagagctrgaagtgggagatggattgaatagataatttcagtgcagtgattcctaatattttcactttcatggagcagtgtggatttactgtttggaaatatttttat

SEQ ID NO: 462244 - DNA, 201 bp, Homo sapiens
aattttcatatggatcatactggtctcagtgtagagattggatggtgaaattaaagaatgaacataggatggctgttgtaatagaaaaagcgagagcagargagtgactaacctaaaaagtggcattagagctggaagtgggagatggattgaatagataatttcagtgcagtgattcctaatattttcactttcatggag

SEQ ID NO: 462245 - DNA, 201 bp, Homo sapiens
ggcataaaaaacaagtgaatttaatataaatacaaagtattagtttggtgcaaaagtaattgcagtttttgccattacttttaatgaaaaaccgcaattayttttgctccaatctaataattagctggctaggcatattttctagtgaggagtcccgatgtcctcatggtcaggactccactcaccatatgaataaggtgt

SEQ ID NO: 462246 - DNA, 201 bp, Homo sapiens
tgtcagctacttgaaaacagaaattatgacttctttatctttgtgtttctagcacttagtggaggacctgacatttaacaatctttcataaatacttattrgatagatgagggagaaaagaaaagaaaccaagactttgacttttaaaccgtgcttacttcctgaaattgtgcacccactggtggagcatatgagataata

SEQ ID NO: 462247 - DNA, 201 bp, Homo sapiens
aatatccttcaaccatctgagcctgtacccaatgggatgtattaaattctaaagaaatgaccagattccaaggacttttcccgaatggttgaatatgttargttctttcatattcagtatgaattctctgacattccctcataatttttttgcacagaatcagtaggtacacacctcatttgggcatctctggaaatgtcc

SEQ ID NO: 462248 - DNA, 201 bp, Homo sapiens
cccaagtgggcaatcctggagcctccaggtctttggtccagcggcggggttttccactcaagggccacaggtacagacaagcagagcagaaacagcccccscggcctttcacttcccacctgctcccgagggagagagtaaggtttctgggggtaagtgggggctatctgaaagaaaagggtgattttggctggggctcgg

SEQ ID NO: 462249 - DNA, 201 bp, Homo sapiens
ctcttaaaacaagttgttgttgtttttctaataaaatgatttggggagtgttctcttctcttacatttctataagcaattatgtagaattgatataaattyattttttttttcctttttgtggagaacagagtctcactatgttgtccaggtaggtgttgaactcctgagctcaagctatcctcctgcttctgcctctcta

SEQ ID NO: 462250 - DNA, 201 bp, Homo sapiens
tagaactttttgaaaagacaacagaggaatgtatttggcgtttgtattacttttttgaaataagcttgattttagagaattgaaaatgtacctggaggaayatatgctattctggaaaccaacaaagagtagttattccagtggtagaatttttcagtaactgatcaggcagttaattatttgaataaatcctcatgttga

SEQ ID NO: 462251 - DNA, 201 bp, Homo sapiens
ttcctatatgtcagcaatgaacaactggaatttgaaatttaaaataacactatttatattaggacttctccccaccaaaaaaagaaagagaaacatatacrtaactcttaaaaaaaaatgcaagatctggctgggcatggtggctcacgcctgtaatcccagcactttgggaggctgaggcgggcggatcacgaggtcagg

SEQ ID NO: 462252 - DNA, 201 bp, Homo sapiens
cagtcttggctcactgcaacctccacctcttgagtttaagtgattctcgtgcctcagcctcccgagtagctggggctatgggtacacaccaccgtgcccarctaattttttgtatttttagtggggactgggtttcgccatgttggcgaggctggtttcaaattccggagcttaagtggtccacccacctcagcctcccaa

SEQ ID NO: 462253 - DNA, 201 bp, Homo sapiens
actattcaacccgatagctcttgaacggcctttcacatccatttgtagtggaaactattcagcgttgagtactcttaagtgcccaggcactcacctcatayagtgtatagtaccataggtttaaaaaccttcaaagctcttagttaatcctttcctctccccagttcctccccagcaaagagcaagcttctctaaggtggc

SEQ ID NO: 462254 - DNA, 201 bp, Homo sapiens
cacaaaagattattcattaacttttctcttcaagacctacagccctttccaagcctgagtctaacatttttaaaggactcatctttttcctttctctttarcaaacattttagaatacatttggagtatggatagtttttaaacaattgctttatatgccatatttagtttaaaagttatttatttatattaatgtaaatt

SEQ ID NO: 462255 - DNA, 201 bp, Homo sapiens
actgcacctgaccgctagagactatttctgttctgtttttcttcccagctcaggttttgcttgccttccagtatctttcagcatcatgcttttttccaatstaaaccaaaaagaaggaaatgattctgtttacatatgcactgttttcctgggattaccctctgctgctttttccagtctggatggaaattttctcttgaa

SEQ ID NO: 462256 - DNA, 201 bp, Homo sapiens
gatcactccattgcactccagcctgggcaatagagcaagactcggtctcaaaaaaaaaaaaaaagaaaaagaaaaagaaaaacgaaatttctactattgawgaattatttcagcttttcataagtccttgtcatccacacgtgagttaatgttagtgaggataggagctggttgccaggagaatcactcatgagattagtg

SEQ ID NO: 462257 - DNA, 201 bp, Homo sapiens
attccagttttattttgattagtgtttacatggtaatatattttccatgtttaaacttttaatcgttttagtctacctatatcattgtatttgaagtgagktttttgtagtcagctggtttttgataaatcttacggattatgttgatagttgttgttttagtaggcagtctatctggttgggttcagaccccaagtttca

SEQ ID NO: 462258 - DNA, 201 bp, Homo sapiens
atattccttatataaagaagtaaatatagatatttacttctcacagttctagaggctgagaagtccaaaatcaaggcgttggcagatttggtgtttggtargggcttggttcctggttcataaatggtatctttaagctgtatccccatccccatatgatggaaagagctagctagctctctggggcttcttttataaagg

SEQ ID NO: 462259 - DNA, 201 bp, Homo sapiens
aaaaaaatcccaagaaagtaatggttttaaggcatcacaagttatcagcagtttgaaaatccaagtccaaataaattatttttcttggataagcaaatacyaagattctactatgtgctaggtaatatgctagaccctttacaaaggttatctcattaaattctcacaatatccctacaaagtaggtatttttatgatctc

SEQ ID NO: 462260 - DNA, 201 bp, Homo sapiens
gctcctcacctcccagacggggcggccgtgcagaggcgctcctcacctcccagacggggcggccgggcagaggcgctcctcacctcccagacggggcggcygggcagaggcgctcctcacttcccattcggggcaaccgggcagaggcgctcctcacttcccatttggggcaactgggcagaggcgctcctcacttcctcc

SEQ ID NO: 462261 - DNA, 201 bp, Homo sapiens
gcactaccagcaggcaacccaaatgcagaccacgtgaccttatagctggctggtatgtttgtggccagccgtatcaacccaaggcaagacaatagagaagmttttatttgactctcagggtcaaggctggagagactgataagaagacccaggcagggacagacagcagtttgtctctatcactgtctaaaattttaacct

SEQ ID NO: 462262 - DNA, 201 bp, Homo sapiens
attttttgtatttttagtagagatggggtttcaccatgttggccaggctggtctcgaactcctgacctcaagcaatccacctgcctccgcctcccaaagcrctgggattacaggaatgagccaccgcacccggccaggatccccttcttaatatcaaaatgcctaggaaattggaactcctccaggactagaattagcacc

SEQ ID NO: 462263 - DNA, 201 bp, Homo sapiens
tgtactgaaaaaacaggaagcatattgaagcttggcctagaatttattcttggtattaaagagacaagtttatcacagtatttttttttcctgctgacctwttgctatgccagcgatgttgagtggcattttcttcttagtttttcatttcttaaagaaaatatactctatatctacaactataatatcaaataaagtgat

SEQ ID NO: 462264 - DNA, 201 bp, Homo sapiens
agacaagttatgtaacctgctgaagatcacaaaactaattataaagatggcagaacatgatgaatctcaaaataactatgctgggtaaaagaagcataacwacatactgtgtggcttcatttatgtaaaattctgagaaatgaaaattaatgtatagtgacagatcagttgttgtctggaatggggaacagggagccaggg

SEQ ID NO: 462265 - DNA, 201 bp, Homo sapiens
gacatgagacatcaatcgatatatgtaagaagtacgttggttccgtccagaaaggcggggacaactcgaagtggggagggggcttccaggtcgcaggtagstgagagacaaatggttgcattattttgtttctgacaagcctctccaaaggaggcaatcaggtatgtgtctatctcagcgagcagaggagtgactgaataa

SEQ ID NO: 462266 - DNA, 201 bp, Homo sapiens
ccattcagtcttcctcactagattgtaagttcctgagggtagggaccatatacggttcatctgtttgtttgtttgtttttgagatgtagtctcaccctgtygcctaggctagagtgcaatggcatgatctcggctcactgcaacctccgcctcctgggttcaagtgattctcctgccccagcctcccgagtagctgggact

SEQ ID NO: 462267 - DNA, 201 bp, Homo sapiens
cttgttggtgggagatgggtagctgctcctgtggtaacagttgaaatttactgaaattaactacaatttatcaccaagtcttcccctggaagttgcaagcyttcaatagactctggatttccaaaactgttacatcagacagaatctgacagtgcaattgttgtctaggtggggagatatattcttggttcttcctactct

SEQ ID NO: 462268 - DNA, 201 bp, Homo sapiens
gagcatctgtcccagggtcacatggtcactcagacccagggcccagtttgtggggggtccctgcctccctctccagtcttcattgcactctgctgcagacmcaatagcctccttttagaccctccatcatgccacgttcttccctaccataggaggcacatgctctctgcctgggatgcccttagtcttccttcggatctt

SEQ ID NO: 462269 - DNA, 201 bp, Homo sapiens
acctccgcctcccgcgttcaagcgattctcctgcctcagcgtcctgagtagctgggactataggcacacgctaccatgcctggctaatttttgtatttttrgtagagatggggtttcactatgttggccaggttggtcttgaactcctgacctcgtgatccacccaccttggcctctcaaagtgctgggattacaggcctg

SEQ ID NO: 462270 - DNA, 201 bp, Homo sapiens
aaccctgtctctactaaaaatacaaaaattagccaggcgtggtaatgtacacctgtaatcccagctactcaggaggctgaggcacgagaattgcttgaacyggggaagcggaggttgcagtgagccaagattgcaccactgcactccagcctgggtgagagcaagactctgtctcaaaaaaaaaaaaaaaaaaaaaaaaaa

SEQ ID NO: 462271 - DNA, 201 bp, Homo sapiens
tggtaattggagggaattttatagaaaattgtctcttgaattagtatgacattttatttaaattagtatctacgtagaagtttagccatgttttgatttaraatttcccactttcagaatttagatttttaggtataatgtttagcccttttaaaagttgatagtgctagccgggcatgatggtgaatgcctgttggtccc

SEQ ID NO: 462272 - DNA, 201 bp, Homo sapiens
aagctccgcctcccgggttcatgccattctcctgcctcagcctcctgagtagctgggactacgggcgcctgccaccacgcctggctaattttttgtatttktagtagagacggggtttcactgtgttagccgggatggtctcaatctcctgaccttgtgatccgcccacctcggcctcccaaagtgctgggattacaggcg

SEQ ID NO: 462273 - DNA, 201 bp, Homo sapiens
ttttcgagtcttggcacattctttttgtcttgtcttttttacccttctttgcttacctaattcctgcttatccttcagtttttgcttcagtgtattttgtygggccttcctaatcccactaggttaggtatccctgttatatgtcctatactttccttgagaacatttgtcataattatatataataattatatgcaatta

SEQ ID NO: 462274 - DNA, 201 bp, Homo sapiens
ctgcctcagcctcctgagtagctgggactacgggcgcctgccaccacgcctggctaattttttgtatttgtagtagagacggggtttcactgtgttagccrggatggtctcaatctcctgaccttgtgatccgcccacctcggcctcccaaagtgctgggattacaggcgtgagccgctgcgccgggccaattttccatta

SEQ ID NO: 462275 - DNA, 201 bp, Homo sapiens
attcaagattgctactcccaccgacagtagtactgacagcaccctgctcaacgttgccctggaacttgggttacaggtatggaggaagagtaggccatccrcagtttagaccgctgacctagtgacagttggcagaagataagatctctgggagactgggcataggccaagtctggctcttcctttgggcccagaacacaa

SEQ ID NO: 462276 - DNA, 201 bp, Homo sapiens
agaaattggtatttaagatagctaaagaatgctaacaactcaattataaaaagaaaactcaataagatatggacaaaagatgtgaacaaacacatcacaawagattatatacaaatggatattaaacacatgaaaaaacattcaatcattagtcatcagggaaatgtaaattaaaaccacaacgagataatactacattcc

SEQ ID NO: 462277 - DNA, 201 bp, Homo sapiens
cctgtaaacctgaaactactctaaagacacagtctattaacttaaaaaactgtttttaaagatgatagaagaataaagggaatctcttgcataatcctggyacccaaaaacaactattaataagacattggcataaatattcctggagattttctattcatatatatgcacacacactatgtatctttttttataaaaata

SEQ ID NO: 462278 - DNA, 201 bp, Homo sapiens
cagaccaggcacgatggctcacatctgtaatcccagcactttgggaggccaaggcaggtggatcacttgaggccaggagtttgagaccagcctgggcaacrtggcaaaaccctgcctctactaaaaatacaaaaattagccaggcatggtggcacacacctgtaatcccagctactctggaggccaaggcatgagaattgc

SEQ ID NO: 462279 - DNA, 201 bp, Homo sapiens
ctaataattatgtacaatcagccctctgtatctgtgggttctgcatctgtggattcaaccaaccatggatcaaaaatattcaggaaaaaaaactcctcagygttccaaaaagcaaaacttcaatttgctgggcacaagccactatgttgaatccacgtgtaatgatgtataggcattgtattagatattataagtaatcta

SEQ ID NO: 462280 - DNA, 201 bp, Homo sapiens
tttctcaagccacacacactcaaaaaaaaaaaaagagacatggaagttttgggtgtaaactctgagggaaaaaaaaaaaagatatggaggaaacttaaatrcgtattgcatgttgtaagaagccaatctgtattatcacactagtctttaagttaaaaaaaagaagaagaaagaaaaaagccagtctgaaaaggctactta

SEQ ID NO: 462281 - DNA, 201 bp, Homo sapiens
gtggatcacctgaggtcaggagtttgagaccagcctggtcaacatggtgaaaccctgtctctaataaaaatttaaaaagtagccaggagtggtggcgcacrcctgtaatcccagctactcgggagactgaggcaaaagaatcgcttgaacccaggaggcagaggttgcagtgagcccagatcacggccattgcactccagc

SEQ ID NO: 462282 - DNA, 201 bp, Homo sapiens
aatatataacttttaagtatatatatattaactcaataatcagatggtagtaaatactatggtgaaaaataaggcagagaagtgggggaaataagtagtgytgaggcatatggagaatttgtctcattgtccatagagacatatgtggattagaacctgggcactgagggatgacctggaagctctggactccttggagtg

SEQ ID NO: 462283 - DNA, 201 bp, Homo sapiens
tgttggatacacttcccagatggggcagcctggcggaggcgctcctcacttcccagacggggcggccgggcagaggcgcgcctcacttcccagacggggcrgccgggcagaggcacctcacttcccagacagggtggcagctgggcagaggcgctcctcacatcccagatgatgggcggccgggcagaggcgctccccacc

SEQ ID NO: 462284 - DNA, 201 bp, Homo sapiens
aacatggagactttgtaccatgtcccgttctttgtgctcgaatgtcctaacctgaagctgaagaagccaccctggctgcccatgccgttggccatgactgygtatgctctggtggtggcgtcttacttcctcatcaccagaggaataatttatgatgttattgttgaacctccaagtgttggttctgtgactgatgaacat

SEQ ID NO: 462285 - DNA, 201 bp, Homo sapiens
atttgaaattaaaaacacagtaccatttacattagcaccccaaaaatgaagtacttaggaataaatctaacaaaatatgtataagattgatatgaggaatwctgtaaaacttggatgaaaaaaaatcaaagatgatttaaataaatagaaatggtccatgttcatggataataagaatgtgtattaggaggttagttcttc

SEQ ID NO: 462286 - DNA, 201 bp, Homo sapiens
acaagtcttaaaacagtcaaaaaaaattgaaataagcatcttctctgaccacaatggaataaaactagaaatcaataacaagaggaattttggaaactatrcaaatacatggaaattaaacattatgctcctggatgaccagtgggtcaataaagaaattaagaggaaattgaaaattttcttaaaaccaatgataatgga

SEQ ID NO: 462287 - DNA, 201 bp, Homo sapiens
acatggtgaaactctacctctactaaaaatacaaaaattacccaggcgtgatggtgggcaccagtaatcccagctacttgggaagctgaggcaggagaatygcttgaacccaggaggcagaggttgcagtgagctaagatcgtgccactgcaactccagccagggcaacaacagtgagactccaccaaaaaaaaaaaaaaa

SEQ ID NO: 462288 - DNA, 201 bp, Homo sapiens
ttccactatccaccgccaaagattagttggcatacaaggcacaacgcttatggatcatgaaatcatgatgaaattttggtcaagaaaggtttttttttttwaaaaaaaaatcttaaatgtagatttttacccaatctttaaggcagtagttgatttacattttattacatgctttaaccaaaagtttgtactttttgggtt

SEQ ID NO: 462289 - DNA, 201 bp, Homo sapiens
cttctgtcttctgggttcaagcgattgtcctgcctcagcctcccgagtagctgggattacaggcatgcgccaccacacccagttaatttttgtattttttwaaaaaaatatatatatatttattatactttaagttctagggtacatgtgcacaacatgcaagtttgttacatatgtatacatgtgccatgttggtgtgct

SEQ ID NO: 462290 - DNA, 201 bp, Homo sapiens
tggcttggaccctggaggcggaggttgcagtgagctgagatcacaccactgcactccagcctgggcaatagagtaagactccatctcaaaaaaaaaaaaargaaaaaaaaaaaaaaagaaaaattgcttccttagacttaataaccccctcaggacaggtctcattatataagcctcaatgcttacgtggaggctgaaccc

SEQ ID NO: 462291 - DNA, 201 bp, Homo sapiens
ttttcaaaaattacatacttatttataaatcaaacaatatataaaaattcagagaaaaaaggtaaaagtccaccttgacattattctagctttcagatggytttttcggaatgtaggtacagcagtgtatccatacaatgttatataaataggctataataaggcattattctgcaacttttaaaatgttttagaactttc

SEQ ID NO: 462292 - DNA, 201 bp, Homo sapiens
ctggccaacatggtgaaaccctgtctctactaaaaatacaaaaaactggccgggcacagtggctcacacctgtaatcccagcactttgggaggccaaggcrggcggatcacgaggtcaggagattgagaccatcctggctgacacggtgaaaccccatctctactaaaaatacaaaaaattagccaggcatggtggtgggc

SEQ ID NO: 462293 - DNA, 201 bp, Homo sapiens
aattactatttattacatttttactattactatttattacaataattatgtgtaaattcagtgctgtgccaaatattggtaatattctagtcatttttaakttaataaaaagtcatttcagccaagtgtggtgcctcattcctattttcccagccctttgggaggctgaggcaggaggatcacttgaggccaagagtttga

SEQ ID NO: 462294 - DNA, 201 bp, Homo sapiens
cccagatgagaagcagcagtgatgggtcagcctaaggaccagccccagaccaaagaacagattggatggaatttagacctctaggttctgggatcctaaaraactgaagtaattagccagacatggtggtgttcacctgtagtcccagctacaggttgaggtgggaggatcacttgaacccaggagttttagaggctgcag

SEQ ID NO: 462295 - DNA, 201 bp, Homo sapiens
gcactccagcctgggtaacagaacaagaccctgtctcaaaaaaacaaaaatttagatatagatatagatatagatatagatatagatatagatatagatadttcttcctgcatatggttgttgtgaagattgaaatatgtttttggccaggcgtggtggctcacacctgtaatctcagcactttgggaggctgagacagga

SEQ ID NO: 462296 - DNA, 201 bp, Homo sapiens
tgcactccagcctgggtaacagaacaagaccctgtctcaaaaaaacaaaaatttagatatagatatagatatagatatagatatagatatagatatagatwgttcttcctgcatatggttgttgtgaagattgaaatatgtttttggccaggcgtggtggctcacacctgtaatctcagcactttgggaggctgagacagg

SEQ ID NO: 462297 - DNA, 201 bp, Homo sapiens
actgcactccagcctgggtaacagaacaagaccctgtctcaaaaaaacaaaaatttagatatagatatagatatagatatagatatagatatagatatagatagttcttcctgcatatggttgttgtgaagattgaaatatgtttttggccaggcgtggtggctcacacctgtaatctcagcactttgggaggctgagaca

SEQ ID NO: 462298 - DNA, 201 bp, Homo sapiens
ccactgcactccagcctgggtaacagaacaagaccctgtctcaaaaaaacaaaaatttagatatagatatagatatagatatagatatagatatagatatagatagttcttcctgcatatggttgttgtgaagattgaaatatgtttttggccaggcgtggtggctcacacctgtaatctcagcactttgggaggctgaga

SEQ ID NO: 462299 - DNA, 201 bp, Homo sapiens
gccactgcactccagcctgggtaacagaacaagaccctgtctcaaaaaaacaaaaatttagatatagatatagatatagatatagatatagatatagatatagatagttcttcctgcatatggttgttgtgaagattgaaatatgtttttggccaggcgtggtggctcacacctgtaatctcagcactttgggaggctgag

SEQ ID NO: 462300 - DNA, 201 bp, Homo sapiens
cactttgggaggctgagacaggaagatcacttgagcctaagagtttgagaccagccctggcaacatagtgagatcccgtctctacaaaaaaaaaaaaaaaagaagaagaagaagaaattaaaattagtggacatagtggcatgtggtgcctgtagtcccagctacttaggaagccgaggtggtaggatgcttgagtccaag

SEQ ID NO: 462301 - DNA, 201 bp, Homo sapiens
aattccagcactttgggaggctgagacaggaagatcacttgagcctaagagtttgagaccagccctggcaacatagtgagatcccgtctctacaaaaaaamaaaaaaaagaagaagaagaagaaattaaaattagtggacatagtggcatgtggtgcctgtagtcccagctacttaggaagccgaggtggtaggatgcttg

SEQ ID NO: 462302 - DNA, 201 bp, Homo sapiens
catgagttccatatgggcaggggtggcatgcaggctggtgatttggatcatagccattatttgtggaagcactgggtgagtagagaagcatggtagttaccttgccctgacagtttttttccaagggagtaaatgtgtttttctttctccttgtcataagaaatcggttgccagattgtgttatttataacaatctgtcat

SEQ ID NO: 462303 - DNA, 201 bp, Homo sapiens
acctcggggggcggaggttgcagtgagccgtgatcgtgccattttactccagcctgggcaatagcctgggcaatagagcgagactctttctcaaaaaaaaagaaaagaaaagaaaagaaaaagttaacattggctatgtggaggggagttgggggagagaagactgaattaggtaggtggagtcatattttgaagaccctt

SEQ ID NO: 462304 - DNA, 201 bp, Homo sapiens
ggttgggtgtttgttctgaagatatctacagttttataaaagaagccaatacactgaacctggctccctatgatgcctgctggaatgcctgtcgaggagasaggtgggaagacttgtccagatcacaggtgcgctgctatgtccacatcatgaaagaggggctctgctctcgagtgagcacactgggactctacatggaag

SEQ ID NO: 462305 - DNA, 201 bp, Homo sapiens
tttgccaagacaacattgttaccacttctgaggcatctgcattggagtcattttcttgattttggagtatacttaatagttcaatttattgtagatcagtmaacttgcaaaaaaacagccatcttattagagaaacttagaaaaatagaaaggggatttttttcctcagcaaattgtcattttcattctgatgaaatgggg

SEQ ID NO: 462306 - DNA, 201 bp, Homo sapiens
tgtttagcttcttgggttcatatgcaaagtaggcagagagttaggatataactagcatctttacctggtgagtacaagggatgagagtagtaaggaagacrgtgatgtatattaaggagtatttatagtgatggaccaccataagctgtgtaaacgagaccaccaaaggaattagggtgctataaatcagtgtaacaaatg

SEQ ID NO: 462307 - DNA, 201 bp, Homo sapiens
aataatttatttttgagacagaatgtcactccagtgcccaagctgaagtgcagtgatgtgatcatggctcactgtagcctcgacctcctgggctcaagcartcttcccacctcagcctccttggtagctgggactacaggcacacaccaccacacctggctaaatttttgtattttttgtagagatggctaagtctttgtg

SEQ ID NO: 462308 - DNA, 201 bp, Homo sapiens
gaaatacaggcacacgtcaccatacccggctaattttttttcttttttgtggagacagggtctggatgttgcctaggctagctagtctcgaactcatgagytcaagtaatcctcccaccttggtctctcaaaatgctgggattacaggcatgagccaccactcccagccttgtttttatatttatgtagtcaaatttaaca

SEQ ID NO: 462309 - DNA, 201 bp, Homo sapiens
atttgattttcagggggtctgtagataggccagttctggactggcacacagggtgctgaagacccaggccttcccttctcagtggatttcatcttcaaccrgcccaccaaaatggaaaggaaaaaaagtcattgtacatattttactcaaccaactcctatggttgggtttttaggtagcttccaatattttgctgcaatg

SEQ ID NO: 462310 - DNA, 201 bp, Homo sapiens
taccatagctttatatttctctgatggattgagttctgtgcggacaatatctagctttccagaaagggtactgtttcaggcagcacagatagctggtgagygactaaactcaccactgccatgctgatcacagaatatgtgagagcaggcagtgacccatgcatagccatagagtttgatgccacacttttgataattaca

SEQ ID NO: 462311 - DNA, 201 bp, Homo sapiens
agagcttaggaaaagaggtcagacccagagataaagtctttgtctctttcccaaatcattcgtgtgatattctctctctctctctctctctctctctctcttttttgagacggggtctctctttgtcccctgggctggagtgcagtgatgttatcatggctcaccgcagcctcaacaccctgggcttaggtgatccgctca

SEQ ID NO: 462312 - DNA, 201 bp, Homo sapiens
tagagcttaggaaaagaggtcagacccagagataaagtctttgtctctttcccaaatcattcgtgtgatattctctctctctctctctctctctctctctcttttttgagacggggtctctctttgtcccctgggctggagtgcagtgatgttatcatggctcaccgcagcctcaacaccctgggcttaggtgatccgctc

SEQ ID NO: 462313 - DNA, 201 bp, Homo sapiens
ggagaatggcttgaacccaggaggcagaggttgcagtgagctgagatcgcaccactgcactccagcctgggtgacagagcaagactctgtctcaaaaaaawaaataaataaataaaaaataaaacacttctggtcccaagtatttcagataagggatacataacctgtataagaaatgaaaagaccatagtttgctatgga

SEQ ID NO: 462314 - DNA, 201 bp, Homo sapiens
ggaggctgaggcaggtgcatcacctgaggtcaggagttcgagattagcctggccaacatggtgtaaccccatctctactaaaaatacaaaaaaaaaaaaaattagccaggtgtggtggtgtgcacctgtagtcccagctactcaggaggctgaggcaggagaatggcttgaacccaggaggcagaggttgcagtgagctga

SEQ ID NO: 462315 - DNA, 201 bp, Homo sapiens
ctgtctgtactaaaaatgtaaaaattagctgggcatggtggcatgtacctgtaatcccagctacttgggaggctgaggcacaagaattgcttgaacctcgsggggcggaggttgcagtgagccgtgatcgtgccattttactccagcctgggcaatagcctgggcaatagagcgagactctttctcaaaaaaaaagaaaag

SEQ ID NO: 462316 - DNA, 201 bp, Homo sapiens
tggcgtgaacccgggaggcggagcttgcagtgagccgacatcacgccactgcactctagcctgggtgacagtgaggctctgtctcaaaaaaaaaaaaaaaattggagaaaagacatttaatttattgtacaggcagaatgtataatatgtaatgcatatagattaattaattttgtgtcagaaagatgtttgctgcttcta

SEQ ID NO: 462317 - DNA, 201 bp, Homo sapiens
caagtgaacaaaggtctctggttttcctaggcagaggaccctgtggccttccgcagcgtttgtgtccctgggtacttaagatcagggagtggtgatgactyttaacgagcatgctgccttcaagcatctgtttaacaaagcacatcttgcaccgcccttaatccatttaaccctgagtggacacagcacatgtttcagaga

SEQ ID NO: 462318 - DNA, 201 bp, Homo sapiens
tgaacccaggagttttagaggctgcagtgagctatgatcacaccactgcactccagccccagggccacagtgagaccctgtctcaaaaaaaaaaaaaaaamaaggaactgaagtgaagtcagaatatcttcttttcaggccttagagaaagatcgttatgagcatagtcccaaatctggatttctctgaagccaggtcctc

SEQ ID NO: 462319 - DNA, 201 bp, Homo sapiens
gaaaaatttcatacctataaaagaatgtgatataaataagtgcttccttgcccagcttataaaaataaattgtgtgttttctggtttttttttttttttttacacttatggaggcaagttgggttttttttaaggtaggtatttttgtatgttctatactgacgggagtgatcccaaagaggagaggaataaattgatgat

SEQ ID NO: 462320 - DNA, 201 bp, Homo sapiens
cccgccttggcctcccaaagtgctgggattacagatgtgagccatcgcgcccggccttcataaagtctttaaataaaaatattgaaatctttttagaagcrtctgcatatcagtaagcatccctagatgagtctcaatgcacttcagtgcattgttcattcggaacgttctactgtaagttatctttagtaagatttcgcc

SEQ ID NO: 462321 - DNA, 201 bp, Homo sapiens
gagggaatgtcagcagataaacaagtgaacaaaggtctctggttttcctaggcagaggaccctgtggccttccgcagcgtttgtgtccctgggtacttaaratcagggagtggtgatgactcttaacgagcatgctgccttcaagcatctgtttaacaaagcacatcttgcaccgcccttaatccatttaaccctgagtgg

SEQ ID NO: 462322 - DNA, 201 bp, Homo sapiens
gtcagatggatagattgcaaaattttctcccattctgtaggttgcttgttcactctgatgatagtttcttttgctatgcagaagctctttagtttaattarattccatttgtcaattttggcttttgttgccattgcttttggtgttttagtcgtggagtctttgcccatgcctatctcctgaatggtattgcctaggttt

SEQ ID NO: 462323 - DNA, 201 bp, Homo sapiens
cagagggggatttggcagggtcataggacaatagtggagggaatgtcagcagataaacaagtgaacaaaggtctctggttttcctaggcagaggaccctgyggccttccgcagcgtttgtgtccctgggtacttaagatcagggagtggtgatgactcttaacgagcatgctgccttcaagcatctgtttaacaaagcaca

SEQ ID NO: 462324 - DNA, 201 bp, Homo sapiens
ttataatcctttgggtatatacccagtaatgggattgctgggtcaaatggtatatttctggttctagatccttgaggaatcaccacactgtcttccacaayggttgaactattttacactaccaccaacagtgtaaaagcattcctgtttctccacatcctctccagcatctggttgtttcctgactttttaatgatcgcc

SEQ ID NO: 462325 - DNA, 201 bp, Homo sapiens
ccccctcactcagacaggaagctatggctgagaactccctgtatctctgattgagcactgggttctacctaaggtgttttttttttttttttttttttttktttttattgatcattcttgggtgtttctcgcagagggggatttggcagggtcataggacaatagtggagggaatgtcagcagataaacaagtgaacaaag

SEQ ID NO: 462326 - DNA, 201 bp, Homo sapiens
gatggtttccagcttcatccatgtctctgcaaaggacatgaactcatccttttttatggctgcatagtattccatggtgtatatgtgccacattttctttwtctagcctatcatcaatgggtatttgggttggttccaagtcttagctattgtgaacagtgccgcagtaaacatacgtgtgcatgtgtctttatagtagaa

SEQ ID NO: 462327 - DNA, 201 bp, Homo sapiens
tgctccccctcactcagacaggaagctatggctgagaactccctgtatctctgattgagcactgggttctacctaaggtgttttttttttttttttttttktttttttttattgatcattcttgggtgtttctcgcagagggggatttggcagggtcataggacaatagtggagggaatgtcagcagataaacaagtgaac

SEQ ID NO: 462328 - DNA, 201 bp, Homo sapiens
gttagtttgctaagaatgatggtttccagcttcatccatgtctctgcaaaggacatgaactcatccttttttatggctgcatagtattccatggtgtatawgtgccacattttctttatctagcctatcatcaatgggtatttgggttggttccaagtcttagctattgtgaacagtgccgcagtaaacatacgtgtgcat

SEQ ID NO: 462329 - DNA, 201 bp, Homo sapiens
ctcaggttcaagtgattatcctgcctcagcctccaaagtagctgggattacaggcacatgccaccacgcccagctgatttttgtatttttagtagagaccrggttttgtcatgttggccaggctggtctcgaactcctgagctcaagtgatctgcctgcctctgcctcctaaagtactgggatcacaggtgtgagctgcat

SEQ ID NO: 462330 - DNA, 201 bp, Homo sapiens
aaatcaagttgaaccacaggatctatcaattacctaggatcatctgtgtaatgaagagaacttaaggcagcgtatcttgatcaaaattcaagtaccaggcyttaggtcccatcagcctttaaccctttttattgagaatgtccaaatccaagcccatttgattttcagggggtctgtagataggccagttctggactggca

SEQ ID NO: 462331 - DNA, 201 bp, Homo sapiens
tttccaagacaaagcttatccagaagcctggaaaataaaattaataaaagaggagctgccttggttgattcacgaagggcaaatcagaacctgcctttccytgaggcacctctgggattacaggcatgtgctactgtgcctggccctaaactatgtttcttttttttctttctttggagatagagtcttgctctgtcaccc

SEQ ID NO: 462332 - DNA, 201 bp, Homo sapiens
ctgagtatatattttctccgtctgtttcagatggccctcagccttgatgaaattgtgttcttgatagagatgttcctgatgtacctgatatgtccagaagsccactgctcaggagctaacgtccaacacgatctcttgtcgcagtcctgccaataccatagctttatatttctctgatggattgagttctgtgcggacaat

SEQ ID NO: 462333 - DNA, 201 bp, Homo sapiens
aaaagaggagctgccttggttgattcacgaagggcaaatcagaacctgcctttccctgaggcacctctgggattacaggcatgtgctactgtgcctggccytaaactatgtttcttttttttctttctttggagatagagtcttgctctgtcacccaagctggagtgcagtggtgctatctcggcccactgcaatttccac

SEQ ID NO: 462334 - DNA, 201 bp, Homo sapiens
cctcatgatccgcctgcctcggcctcccaaagtgctgggattacagatgtgagccaccacgcccggcccagtattggtttttaaacagtattagtttttartttgtattttttattgttatattattatttttattttttctcgaatatttttgatatgtggttggctgaatctgcagatgcagtacctgcagatacagag

SEQ ID NO: 462335 - DNA, 201 bp, Homo sapiens
ttttttattttttgtagaaagggggtcttgctttgttgtccaggctgctcttgaagtcctggcctcaagcaatcctcctgcctcagcctcccagactgctrggatgacaagtgtaagaaactgcttgaccagattttttttttttaacagctacatagtacctcattgtacatatatttttaaaaatcttttaaattattt

SEQ ID NO: 462336 - DNA, 201 bp, Homo sapiens
agactgttactttttggaactctgatctgtgggataggacttctgtagccctgtacttaatttgacagccaaaaaacttgcaagccctgtgtttgagtctrattcttttaagtcattttccttccttaggaccctgtcaggggatgaagggctatagggtagagggaaaagttactagctagcaactgtgataacacagac

SEQ ID NO: 462337 - DNA, 201 bp, Homo sapiens
gatataaaaattttggagtcttttttttttttttttggccaagaaatctcaatggagcttttcttttgatactaacctattttgatactaacctagtataygtatctacaacattgaaatgttttcaccttactttttcagactgttactttttggaactctgatctgtgggataggacttctgtagccctgtacttaatt

SEQ ID NO: 462338 - DNA, 201 bp, Homo sapiens
cttttcatatcttactgtgaatagataaggggactgagtcttcagagtttaatggaagagttagtgattgaaccggttctcttccttcagaggctatgctyttaactacgctttacagtctaggagagaagtaagaatatggtatacacttttggccaggcatggtggctcacacctgtaatcccagcactttgggaggct

SEQ ID NO: 462339 - DNA, 201 bp, Homo sapiens
gctatgacatgaatcccagaattcctgttccctggaaggaagagaccgagagacattatggccacatggttacaaggtcaagttgccaaggacataaaacmagatggagacctcacccagtttttttgtttgtttcaaggacctgcagtaaaatttattaccagcttgctgggccgtcttgagcagtttatggggtcctaa

SEQ ID NO: 462340 - DNA, 201 bp, Homo sapiens
acatgattatctggttgtctttcattttgtgatgttagcagccgttgatgatcactgcacacgagtccccattccttgtgtctccagtcatttgtctgaarcttatttctaatagattcctaaaggagggcgcatataatgttcaacaagtaatctgccaccgttatgtttcaaagccaatttatttggatatagaatccg

SEQ ID NO: 462341 - DNA, 201 bp, Homo sapiens
ccctgttctatcctaaggtacccttctttatgacagaacaacacagacaaattcatagcacaaaatacattagattcgttacaacttaatatgagcctcaraattttttctcattaatcaaaactttacagaggagataaacagtgatttttaccattcattcagccaatttgcacagagagagagagagagagagagaga

SEQ ID NO: 462342 - DNA, 201 bp, Homo sapiens
ctcctgctccccctcactcagacaggaagctatggctgagaactccctgtatctctgattgagcactgggttctacctaaggtgttttttttttttttttktttttttttttttattgatcattcttgggtgtttctcgcagagggggatttggcagggtcataggacaatagtggagggaatgtcagcagataaacaagt

SEQ ID NO: 462343 - DNA, 201 bp, Homo sapiens
agcctcctgctccccctcactcagacaggaagctatggctgagaactccctgtatctctgattgagcactgggttctacctaaggtgtttttttttttttkttttttttttttttttattgatcattcttgggtgtttctcgcagagggggatttggcagggtcataggacaatagtggagggaatgtcagcagataaaca

SEQ ID NO: 462344 - DNA, 201 bp, Homo sapiens
ttcaaggaggagcattcaaagctaagagactgacaataaggccatctagaagctgctgcataaataatcttggtcctagggggaatgcagcagcctcctgstccccctcactcagacaggaagctatggctgagaactccctgtatctctgattgagcactgggttctacctaaggtgttttttttttttttttttttttt

SEQ ID NO: 462345 - DNA, 201 bp, Homo sapiens
agtgcctcccagccaagggacatggcattactttcaaggaggagcattcaaagctaagagactgacaataaggccatctagaagctgctgcataaataatyttggtcctagggggaatgcagcagcctcctgctccccctcactcagacaggaagctatggctgagaactccctgtatctctgattgagcactgggttcta

SEQ ID NO: 462346 - DNA, 201 bp, Homo sapiens
tgggtatctcaaagactggtctcagtgcctcccagccaagggacatggcattactttcaaggaggagcattcaaagctaagagactgacaataaggccatytagaagctgctgcataaataatcttggtcctagggggaatgcagcagcctcctgctccccctcactcagacaggaagctatggctgagaactccctgtat

SEQ ID NO: 462347 - DNA, 201 bp, Homo sapiens
aattctgaggctagggtttttcaaggatggtttggtgggcaggggtctagggaatgagtgctgctgattggttggggatgcaatcataggggtgtggaaamcagtcctctgctgagcccagttttggatgggggccacagaggggtcactggtcccagtggagtcatccagtcatcagaaatgcaaaagtcagaaaagaca

SEQ ID NO: 462348 - DNA, 201 bp, Homo sapiens
actcctcagtgggttcatcttacctgctgccgagatagagacgatttatcaagatgggagaattgcaataaagagtttaatacacatagaggcagctaaaygggaaaccagaattttattattactcaaatcagcctcccccagaattctgaggctagggtttttcaaggatggtttggtgggcaggggtctagggaatga

SEQ ID NO: 462349 - DNA, 201 bp, Homo sapiens
ttgattttcagggggtctgtagataggccagttctggactggcacacagggtgctgaagacccaggccttcccttctcagtggatttcatcttcaaccggyccaccaaaatggaaaggaaaaaaagtcattgtacatattttactcaaccaactcctatggttgggtttttaggtagcttccaatattttgctgcaatgaa

SEQ ID NO: 462350 - DNA, 201 bp, Homo sapiens
tgaggctgggagttcaagattagcctaggcaacatggtgaagccccatacaaaaatacaaaattagccaggtgtggcagcttgctcctgtggtcctagctkcttgggaggctgaggtagggggattgcttgagctcaggagttcaagaccagcctgggcaacatagcgagaccttgtctctaccaaaaataaaaaaaatta

SEQ ID NO: 462351 - DNA, 201 bp, Homo sapiens
tcacactttaaaaataatcggggtcgggcacagtggctaacgcctgtaatcccagcactttgggaggctgaggcaggtcagatcatgaggtcaggagttcragaccagcctggccaacatgttgaaaccccgtctctactaaaaatacaaaaaattagcccaacatggtggcaggtgcctgtaatcccagctactcgggag

SEQ ID NO: 462352 - DNA, 201 bp, Homo sapiens
aagtgggtccttgcaggtaccttgcttgttcactcagcgctcctggggttgttaaagctctacttcagatcccacttctgacaccatctgtagaaagaaamgctgaattaagtttaaaggagtttaattgaacaattaatgattcatgaattaggaagcccccagaatcacagcaaattcagaaagactccaaggatgcct

SEQ ID NO: 462353 - DNA, 201 bp, Homo sapiens
ttacaaccagtttctttctgacccagtcagatgtaagaagccaagtaattagctggatccaagccagctaattactggatcaagtccaatcctggacccastcaagtttctcttgtgacttccaaacctagtttggatcagaaatttgctcaaagaaacttggacagctcaaaacacaaatccttggagctctgaaatctg

SEQ ID NO: 462354 - DNA, 201 bp, Homo sapiens
tcatttgtaattgtttacattcacaaacatcaaacagtaaagacgacacatagagaatttcagtgacaccgtatatgcatatatatcttaaacttgcaatratatgtaaaaatttgttttccatcccttgttagaaactttccttttctcaatttcagtgagaagataatatatttatattgctttattgcagataatatg

SEQ ID NO: 462355 - DNA, 201 bp, Homo sapiens
ataagaacattccctaaaagtttgaggtttattggcttttggttttatctttacccacttcctccagattgagtttcccagctattattgtgaggtcttcrtgtttgacttctgttctcagacaaaggccagagtagtacattcactttatttggcttttttttgttaaaacaatttttaacttataatctttttccttta

SEQ ID NO: 462356 - DNA, 201 bp, Homo sapiens
agcccaggaggtcaaagctgcagtgagccatgataacaccactgcactccagcagcctgggtgacagaatgagaccatctttaaaaaaatttaaaaatttwaaaaaagtctcttttttttcccatctaccgtatgaaggatagattttgtggataaaactagagggagagagaccaattaaaagcaggtacaggaatccag

SEQ ID NO: 462357 - DNA, 201 bp, Homo sapiens
ggcctcccaaagtgctgggattacaggcatgagccaccgtgcctggatatatatatatatgtgtgtgtgtgtatatacatgtgtgtgtttgtgtgtgtatrtgtgtatatgtgtgtgtgtgtgtgtttgtgtgtgtgtgtgtatttttttttagagacagagtctcactatgttgcccaggctggtctcgaactcctgggc

SEQ ID NO: 462358 - DNA, 201 bp, Homo sapiens
tttttatatatagagagaaaggatctcactgtattgcccaggcctggtctggaactcctggacagaagtgatacccccaaccttgccctctcaaaatgctrtgattacaggcatgagccaccatgcccagctctttaaaaaaaaaaaaaattgtctcattgccctggccagcacctccagtacaatgtatataggcatttc

SEQ ID NO: 462359 - DNA, 201 bp, Homo sapiens
ctggagtgcagtggctcgatcacggctcactgtaacctcgacctccccaggctcaggtgatcctcctacctaagcctcccaagtagctgagactacaggcwtgcaccaccacacctggactttttttatatatagagagaaaggatctcactgtattgcccaggcctggtctggaactcctggacagaagtgataccccca

SEQ ID NO: 462360 - DNA, 201 bp, Homo sapiens
gtaactggtattttttctattttcaattgtttattgcttgtacatagaaatacaattgatttttgtattttggcattatgcgctgtgaccttttaaattayagattcgtttaggaccttatcatcatattgcctgcaaataaaaacagtattatatcttccttcttaatctttattctttttaaaaattaaattacattaa

SEQ ID NO: 462361 - DNA, 201 bp, Homo sapiens
gtgaattggagaaagggctggaacagcattatttgcaccacattcttcagatcaaagcagtcataagcccagcccagagtcatgagatgcaaaatagactytacctcatgatgggaggagctgcaaagttactttacaaaaggatatgagtacagagaggggaataattgtggccatcttttttttttttttttttttttt

SEQ ID NO: 462362 - DNA, 201 bp, Homo sapiens
ttttcatgtgtttattggccatttatatatgttcatgaagtgtctgttcaaagcatttgtctattttttaattgagttgtttgcctttccattattgattrtaggaattcttaatatagtccagatgcaagtcgtttgtgagatatgtgttgtgaatattttccaccagtctgtggctttttatttaatggtgtctcttga

SEQ ID NO: 462363 - DNA, 201 bp, Homo sapiens
ttctgacagtgttataaatcccctttaaaaaaaaaagtggtaaaaaaaacacatgacataaaatgtaccattgtaacctttgtttttttgttttgttttgktttggtttggtttggctttggtttttgttttaagttttttgagactgagtctcactctgtcacccaggctggagtacagtggtgcaatcttggctcactg

SEQ ID NO: 462364 - DNA, 201 bp, Homo sapiens
tttttctcattaatcaaaactttacagaggagataaacagtgatttttaccattcattcagccaatttgcacagagagagagagagagagagagagagagattgagaagccataagtctgactggcaagaaatttttacccctttgccggcatgtcccgtttctgggttccccttccctgagcggccctagcgaccctgct

SEQ ID NO: 462365 - DNA, 201 bp, Homo sapiens
ttttttctcattaatcaaaactttacagaggagataaacagtgatttttaccattcattcagccaatttgcacagagagagagagagagagagagagagagattgagaagccataagtctgactggcaagaaatttttacccctttgccggcatgtcccgtttctgggttccccttccctgagcggccctagcgaccctgc

SEQ ID NO: 462366 - DNA, 201 bp, Homo sapiens
gacattatggccacatggttacaaggtcaagttgccaaggacataaaaccagatggagacctcacccagtttttttgtttgtttcaaggacctgcagtaawatttattaccagcttgctgggccgtcttgagcagtttatggggtcctaagcccctgttctatcctaaggtacccttctttatgacagaacaacacagaca

SEQ ID NO: 462367 - DNA, 201 bp, Homo sapiens
tctcctgcctcagcttcctgagtagcagggattacaggcacaggccaccacacccggccggtgttttgtatttttagtagagatgccatttcaccatgttsaccaggctggtcttgaactcctgacctcaagtgatccacccgcttcagcctcccacagtgctgggattacaggcgtgagccaccactcctagccatagga

SEQ ID NO: 462368 - DNA, 201 bp, Homo sapiens
tttaccaataatctttaacattttttatttcccaaagattactaaagttacgtgaactaaaaggcattacagtttttatttttttcaaaatattttatttaagtgcttatttttctttatgccaattaattagagcttttacataagcatcacacacataacatatgtataaactacacagacagacagaagaagatccag

SEQ ID NO: 462369 - DNA, 201 bp, Homo sapiens
ttttaccaataatctttaacattttttatttcccaaagattactaaagttacgtgaactaaaaggcattacagtttttatttttttcaaaatattttatttaagtgcttatttttctttatgccaattaattagagcttttacataagcatcacacacataacatatgtataaactacacagacagacagaagaagatcca

SEQ ID NO: 462370 - DNA, 201 bp, Homo sapiens
attttaccaataatctttaacattttttatttcccaaagattactaaagttacgtgaactaaaaggcattacagtttttatttttttcaaaatattttatttaagtgcttatttttctttatgccaattaattagagcttttacataagcatcacacacataacatatgtataaactacacagacagacagaagaagatcc

SEQ ID NO: 462371 - DNA, 201 bp, Homo sapiens
tattttaccaataatctttaacattttttatttcccaaagattactaaagttacgtgaactaaaaggcattacagtttttatttttttcaaaatattttatttaagtgcttatttttctttatgccaattaattagagcttttacataagcatcacacacataacatatgtataaactacacagacagacagaagaagatc

SEQ ID NO: 462372 - DNA, 201 bp, Homo sapiens
gtccggcctgggcgacagagcgagactccgtctcaaaaaaaaaaaaaaaaaaaaaaagatggacattattttgtctgctttacgtagaataacaaatttartcttaacaacaactctgtgaagtgaaactataattatccccatcataaaatgcaaaaattgaggcatagaaaatttacgtagtttgccctagttcacaca

SEQ ID NO: 462373 - DNA, 201 bp, Homo sapiens
aggctggagtggagtgcagtggtgtgataacagctcactgcagcctccacctcctgggcttaagtgatcctccctcctcagcctcccgagtaactgggacyacaggcactcaccaccatgactggctaattttcttattttttgtagagatggggtctcaatatgttgcccaggctggtctcaaactcctcggctcaagag

SEQ ID NO: 462374 - DNA, 201 bp, Homo sapiens
agaacaaaacaggtattttttcaactcttgctctcctccctccccctggttgtgtatccttgttgtctgttgttcccttttttttttttttttttttttgwgatgattctcgctctgttgcccaggctggagtgcagtggcatgttatcagctaactgcaacctctacctcccgggtgcaagcaattatcctgcctcaccc

SEQ ID NO: 462375 - DNA, 201 bp, Homo sapiens
cttttggctcttttttattttattttattttttttgagacggagtctcactctgtcgcccaggctgaagtgcgagtggtgtgctctcagctcactgcagcygctgcctcccgggttcctgtgattctcctgcctcagccacctgagtagctgggattacgggtgcctgacaccatgcctggctacttttaaaaatgttttt

SEQ ID NO: 462376 - DNA, 201 bp, Homo sapiens
caggctgaagtgcgagtggtgtgctctcagctcactgcagccgctgcctcccgggttcctgtgattctcctgcctcagccacctgagtagctgggattacrggtgcctgacaccatgcctggctacttttaaaaatgtttttggtagaggccgggcgcagtggctcatgcctgaaatcccagcactttaggaggccaaggc

SEQ ID NO: 462377 - DNA, 201 bp, Homo sapiens
ctcaaagactggtctcagtgcctcccagccaagggacatggcattactttcaaggaggagcattcaaagctaagagactgacaataaggccatctagaagstgctgcataaataatcttggtcctagggggaatgcagcagcctcctgctccccctcactcagacaggaagctatggctgagaactccctgtatctctgat

SEQ ID NO: 462378 - DNA, 201 bp, Homo sapiens
atggcattactttcaaggaggagcattcaaagctaagagactgacaataaggccatctagaagctgctgcataaataatcttggtcctagggggaatgcarcagcctcctgctccccctcactcagacaggaagctatggctgagaactccctgtatctctgattgagcactgggttctacctaaggtgtttttttttttt

SEQ ID NO: 462379 - DNA, 201 bp, Homo sapiens
tctatagtaaatagctaatacgtagagctgaagtcataataacttaagcattgattattgagctgaccaaaataatataacaattattgggaaggtaaaasgcataaggaagtatgggtgtatatgatgggagcagggttgatgatgaaaataagttaaatcctgttttccacaatggaaaatcagattattcctgaaatg

SEQ ID NO: 462380 - DNA, 201 bp, Homo sapiens
gaggggctctgctctcgagtgagcacactgggactctacatggaagcaaacagacaggtgagagcatgagttagaaaatcatggggctcttgtcctagaawcagactgagccacttgtctgtttcttcattaggtacatagtaacttgttaagaatccctgtcattcccaaggttgagcaagacctggcacgtcaagggag

SEQ ID NO: 462381 - DNA, 201 bp, Homo sapiens
ggaaaaggttaacaaacaatagcaagggatatcagatactgaacagttatgtccaacagacagtgttctaagaattcaaaggaggtatctaatcctaggcrctgaggtggtcagggaaacagaatagaataattcagacttgaaggattgatttggtccggatatggaaagggacatgggaagccagctgaatcctatatg

SEQ ID NO: 462382 - DNA, 201 bp, Homo sapiens
gcagtggctcttgcaggtaatcccagcattttgggaggccaaaccaggtggattgcttgaaccaggagttcaagaccagcctggggaacatggcaaaaccygtctctacaaagaaaatgcaaaaagtagccaggtgtggtgtcacgtgcctatagtcccagctactcaggaggctgaggagggaggatcacctgagcccag

SEQ ID NO: 462383 - DNA, 201 bp, Homo sapiens
acagtctaacccaaattatgatttaattactttggaatgatgagatgaggttagtatgttggaagcatgagggaataaaagagtgaaatcgtccttttctrtagtaaatagctaatacgtagagctgaagtcataataacttaagcattgattattgagctgaccaaaataatataacaattattgggaaggtaaaacgca

SEQ ID NO: 462384 - DNA, 201 bp, Homo sapiens
ttgggagctttcttttttttttttttttttttttttttttttaaagaaagagtctcttttctgttgcccaggctggagtgcagtagcacgttcatggctcrcagcagcctcgagctcctgggctcaaacagtcctcccacctgagacacccgagtagctgggaccacaggcacatgccaccatgcctggctagtttttctt

SEQ ID NO: 462385 - DNA, 201 bp, Homo sapiens
gaactactcgaaatttaaaagtaatctgcccaaagcaggcagccgcttctttgggagctttcttttttttttttttttttttttttttttttaaagaaagrgtctcttttctgttgcccaggctggagtgcagtagcacgttcatggctcgcagcagcctcgagctcctgggctcaaacagtcctcccacctgagacaccc

SEQ ID NO: 462386 - DNA, 201 bp, Homo sapiens
cttggttcttgaactactcgaaatttaaaagtaatctgcccaaagcaggcagccgcttctttgggagctttcttttttttttttttttttttttttttttttaaagaaagagtctcttttctgttgcccaggctggagtgcagtagcacgttcatggctcgcagcagcctcgagctcctgggctcaaacagtcctcccacc

SEQ ID NO: 462387 - DNA, 201 bp, Homo sapiens
ctcaagggtggggaatgtctgagctaggttgtttcataatatcttttatcccgggcacggtggctcatgcctgtaatcccagcactttgggaggccgaggygggcggatcacctgaggtcaggagttcaagaccagcctgaccaacataatgaaaccctgtctctactaaatacaaaaaatgagccgggtatggtggcgca

SEQ ID NO: 462388 - DNA, 201 bp, Homo sapiens
gagtttcgctcttgttgcccagactggagtgcaatggcgtgatctcggctcactgcaacctccacctcctgggttcaagcgattctcctgccttagccacygagtagctggcatgcaccaccatgcccggctaattttgtatttttaatagagacagggtttctccatgttggtcaggctggtcttgaactcctgacctca

SEQ ID NO: 462389 - DNA, 201 bp, Homo sapiens
ttgaacctgggaggcggaggttgcagtgagccaagatcacgccattgcattccagcttgggcaacaagagtggaactctgcctcaaaaaaaaaaaaaaaaattcccaatttaaaaagttttaaaagcaagtaaggctgggtgcggtggctcacaccactaatgtccactttgagagaccaaggcaagagaataacttgagg

SEQ ID NO: 462390 - DNA, 201 bp, Homo sapiens
tattatttttttctttgtacttttctgtattttaaaaaattttctggctgggcacagtggctcacgcctataatcccaacactttgagaggccgaggtggrcggatcacctgaggtaaggaatttgagaccagcctggctaacacagtgaaacccatttctactaaaaatacaaaaaattacccaggcatggtggcgcaca

SEQ ID NO: 462391 - DNA, 201 bp, Homo sapiens
ccgcatctctactaaaaatacaaaaaattagctgggcgtggtggcgggaacttgtagtcccagccacttgggaggctgaggcaggagaatgtcgtgaaacmgggtggcggagctagcagtgagccaagaccgtgctactgcactccggcctgggtgacagagcgagactccgtctcaaaaaaggaaggaagggagggaggg

SEQ ID NO: 462392 - DNA, 201 bp, Homo sapiens
tccttcatttttactttttcttttttcttttgttaaataccagtaaaattgaatagtcatttttatattaaaaataaaatttttaaaatagcattttgttytttataacagtacatctatttgtatatgtacataaagaaatgtctataatgattgttattcctgggtaataagaattaaagccaggcacagtggctcact

SEQ ID NO: 462393 - DNA, 201 bp, Homo sapiens; identical to SEQ ID NO: 437051

SEQ ID NO: 462394 - DNA, 201 bp, Homo sapiens
attctgatacagttttcttatctatttacaactggaaaaggcatgagtgctatgatgcaggcaagtctgagatgcggtgaacaccctctccaaagcttggraggcagcgagactcgttgccatgattcccgtcagccatagtcgtggcagtgacatgagcatttgacagtctgcctggtagcatgattagttatgttcatg

SEQ ID NO: 462395 - DNA, 201 bp, Homo sapiens
gccatgattcccgtcagccatagtcgtggcagtgacatgagcatttgacagtctgcctggtagcatgattagttatgttcatgattactattcatgcttcstaggttgcctttcttcacccagggcctccttgagagctggaacctcagttcctagtgacctgggttctaatgcccttatgcacatgtttgagtttgactc

SEQ ID NO: 462396 - DNA, 201 bp, Homo sapiens
agacacaagagaaaggcagactaggaagcaacagtagcagtgcagagaccagaattatgaagcagcatggctcaattagtacgaaggttttccataatctrgtctctgtctagtaaagcaaatacaaatatagtgcttctcataagatggacattattggccaggcgtggtggctcacgcctgtaatcccagcactttggg

SEQ ID NO: 462397 - DNA, 201 bp, Homo sapiens
tttctgtttctacattactttgcttaggatagtggcctccagctgcatccatgttgctgcaaaggacatgattttgttcttttttatagctgcatagtatktcatgatatatattgcactacattttctttatccagtccactgttgatgggcacctaggttgaatccatgtctttgctattgtgactagtactgtgatga

SEQ ID NO: 462398 - DNA, 201 bp, Homo sapiens
ttacactttgaggcaatgcttgctagaatctacatgaccatatctttacattgtgaatgttatgcaggagccttcactttgtgccttgggtatagtaggtrttaagtgctgcactttagatgttgatgtgctgggcccaggagtaataataattatagtaaagttgcaacattatttggcaatttgatgttgaatagattg

SEQ ID NO: 462399 - DNA, 201 bp, Homo sapiens
tgtgggaggttcctgaagaccccaatcagatccactaagcctaaggaaaaccaggctgtttattgctatggaaatctgacctcagttattcttgtctcttycttccagaaatctctcccacttatatcccagattccaaaatagacatttaattgtctctaattatggctgcttgagttcctgttggctgtttcttgtctg

SEQ ID NO: 462400 - DNA, 201 bp, Homo sapiens
gggactatgggcgtgtgccactacacggcaaatttttttttttttttttttttttagagacagaatctctgtgttgcctaggctggctacttctttttttwaaaataaaaaagttgaggtaaagctatagacagcccacacaaggctaatgactgggaaggccattagcaattacccaatcctgcgaatgagttcctgctg

SEQ ID NO: 462401 - DNA, 201 bp, Homo sapiens
taaggaccagccccagaccaaagaacagattggatggaatttagacctctaggttctgggatcctaaagaactgaagtaattagccagacatggtggtgtkcacctgtagtcccagctacaggttgaggtgggaggatcacttgaacccaggagttttagaggctgcagtgagctatgatcacaccactgcactccagccc

SEQ ID NO: 462402 - DNA, 201 bp, Homo sapiens
ccttctcatgaactcagtcactgtggaggaagggtatgtttccccctgtacccacttgaggcaaagataatggaaaaatgccttcaaaattctgaaggaargttaattttaacctaaaattgtatacccaggcaaagtgctaatcaagagggcaatagaataaaaacattttcagatatcaaaagtctcaaaaactttact

SEQ ID NO: 462403 - DNA, 201 bp, Homo sapiens
cagattggatggaatttagacctctaggttctgggatcctaaagaactgaagtaattagccagacatggtggtgttcacctgtagtcccagctacaggttraggtgggaggatcacttgaacccaggagttttagaggctgcagtgagctatgatcacaccactgcactccagccccagggccacagtgagaccctgtctc

SEQ ID NO: 462404 - DNA, 201 bp, Homo sapiens
gaaaatataattgcaggtgtagaccagggtggcagtggagcgcagaataatataaaagaaattgttgaaaattgggattgaggccgggcacagtggctcaygcctgtaatcccagcactttgggaggctgagacgggtggatcgcctgaggtcaggagttcgagaccaggctggccaacatggtgaaaccctgtctctact

SEQ ID NO: 462405 - DNA, 201 bp, Homo sapiens
gatggaatttagacctctaggttctgggatcctaaagaactgaagtaattagccagacatggtggtgttcacctgtagtcccagctacaggttgaggtggraggatcacttgaacccaggagttttagaggctgcagtgagctatgatcacaccactgcactccagccccagggccacagtgagaccctgtctcaaaaaaa

SEQ ID NO: 462406 - DNA, 201 bp, Homo sapiens
cttaccctcctcagcctctgcctctgtcttgccttcctttctacctacactccatctgtttggttttgtgtcagcatgcagagctttgaatgggggctggkagaggtggtgggaagtatgcagcaagtcaggtttatagagctgcccatactttcacccctctctcaggcctcattatctcatctctcagaatattgtaac

SEQ ID NO: 462407 - DNA, 201 bp, Homo sapiens
ttatagaaatggaattacagggtgaaattatatgaatatcttcaagtcttttgctataatgttgccaattatttttcagagattttatcagtttatactcygactcccattatgtgacagtaacggttctcaaagcactcttatcagtaatgaaaattgttttgaatcagttaatttagttggaggagaaattgcatctta

SEQ ID NO: 462408 - DNA, 201 bp, Homo sapiens
atgcttagcacccaatattgaactggcaaggcccaaacttgcccccagttgggccctgtcatctgtatccatttttaaccaagagggactttattgagggragggcctctcacccaatcccatcctttactcaggtaaaatgtatccccattacgtatccaaagtcagccaattggtgctgcagactgtttcttttgggtc

SEQ ID NO: 462409 - DNA, 201 bp, Homo sapiens
cacaaagcaacccccaaatgcagaaggagctgagaaaccaaagaagaaggcagacaaatctagtttgacagttttggatgatttattagggcaacttataracagagtcgtggtcttgggtgggtgcaagacaggtagatctccacactgcaaccccccagacccagagcctataccttggggaaaaaaaacatatatgct

SEQ ID NO: 462410 - DNA, 201 bp, Homo sapiens
ttgaatagattgtttcttctgaacgttacattttaacacatttgttcttaaaattacatcattgtaagagaaagtactttcagtttaaatcagtaaagatyggtcaggtgcagtggctcatgcctctaatctcagcactttgggaggcccaggcaggaggcctgaggccaggagtttgagaccagcctgggcagcatagtg

SEQ ID NO: 462411 - DNA, 201 bp, Homo sapiens
aggttggggcaggaggattgctttagtgcaggaggttgaggctgcagtgagccatgatcttaccactgcacttccagactgggcaatggagcaagactctrtctctaaataaacaataaataaataggatgggcacgtggctcacacctgtaatcccagcactttgggaggccgactccggtggatcacctgaggtcagga

SEQ ID NO: 462412 - DNA, 201 bp, Homo sapiens
ccatgactccccatagcagaactacacattccttccactgtgtccttgagctttgccacacctttattaaagtatgtttcacaagccatggcaattatccrtgaatcagccttccctactaagatcctcaaggtcagctgggcatgatggctcacacctgtaatcctagcactttgggaggccgaagtgggcggatcacct

SEQ ID NO: 462413 - DNA, 201 bp, Homo sapiens
aatctcaatctcggctcactgcaacacctgcctcccaggctcaaatgatcctcccacttcagcttcccaagtagctggaaccataggcacaagccaccacscctggctaattttttgtatttttggtagagatggggtctcgccatgttgcccaggctggtctcgaactcctgagctcatgtgatccacacacctcagcct

SEQ ID NO: 462414 - DNA, 201 bp, Homo sapiens
ttttgagacagagtcttgctctgtcgcctaggctggagtacagtagtgctatctcagctcactgcagcctcctcctcctggatccaggtggttcttgtgcytcagcctcccgggcagctgagactacaggggcacaccaccacccttggctaatttttgtgtttttagtagagacagggttttgcaatgtcacccaggctg

SEQ ID NO: 462415 - DNA, 201 bp, Homo sapiens
gctgaagttatctgcctgccttggcttcccagagtgttttttatatttcttcccatttgtatttttgattaatgttcttctgaattcttcatatcaaggaraagtggcatataatatattaaagtgtgggcaccattcatatagacctgaggtttttttttgtttgtttgtttgttttgagacagactcactctgttaccc

SEQ ID NO: 462416 - DNA, 201 bp, Homo sapiens
aattagctgggcatggtggcttgtgagcctctagtcccagctacctgggaggctgaggtgagaggatcacttgagcccgggatgtcgaggctacagtgaaycatgatcatgccactgcactccagagtctcactctgtcccaaaaaaaaacagagagagagagagagagagagaaattaggtctcattatgttgcccaggc

SEQ ID NO: 462417 - DNA, 201 bp, Homo sapiens
ttttgtagagatggggtctcaatatgttgcccaggctggtctcaaactcctcggctcaagagatcctcccacctaggcctcccaaagagctgggattacargtgtgagctaccaggcccagccaagaaagctctaccttctgtatccaaaaatctgtgtgtttatgggtaaagagacagcaagcagagaattctaaatcct

SEQ ID NO: 462418 - DNA, 201 bp, Homo sapiens
ggcagtagtagtcttggtttcttactgttcagttcaggcatccattgatttggctgtacttggtttccttacatatccttagatgtcctagagattgcacratgtgtcctttacttcaataacaacaaaattaagctaagagtatgtgacttacacaccttctcaacagggctgttattgggtggctgcatactgatatct

SEQ ID NO: 462419 - DNA, 201 bp, Homo sapiens
tagagaaagatcgttatgagcatagtcccaaatctggatttctctgaagccaggtcctcccttggcttaccattctgtcttccactgataacttgaggcaygtagccattaactggactgcccagctgttcctggcctagggaggagccagaacccccaaccaatagtaatgaggatggtgatgcgagccttgggtcctcc

SEQ ID NO: 462420 - DNA, 201 bp, Homo sapiens
ggaaagagtaaacctaggagacacagcttcaagaaaggactgttgtagcaatcctttgttatattttacctctgagagttaacatattctaccctgtgttmtttatgtagaaaagcatcatgttttcaataaagtcacacttaggttttgttatttgtttacatgttaacattttccactcaaattctttgagaatggata

SEQ ID NO: 462421 - DNA, 201 bp, Homo sapiens
gggtcttgtggatgcccacctctactgtttgaaaaaatacatcgtggatttcctaatggaaaatgggtaagaaaaagggtggtagagtcaaacctacagtrcttaacaagctactttgtgaattccttaaattttaaaccttcataatttagataaccagtttctaaaattagcacaatagcacagttagttctcattttt

SEQ ID NO: 462422 - DNA, 201 bp, Homo sapiens
ggagttcgagaccagcctggccaacatggtgaaaccccatctctactaaaatacaaaaattagctgggcatggtggtgtacaactatagtttcagctactyggtaggctgaggcacaagaattgcttgagcctgggagacggagcttgcagtgagccgagatcacgccactgcactccagcctaggcaacaaagcaagact

SEQ ID NO: 462423 - DNA, 201 bp, Homo sapiens
cagttggcttctgctgtacttaggcagtgagcaggataaaaacaactcagttcctcccacacacatgatgatgctgggaacggggaagaagggagcagacytcaagaacatttggcattgccctgagcctggggacctttgtagatttgaagggaatgaggatctgaaaatccctggagatcttttgggggaaaattaaag

SEQ ID NO: 462424 - DNA, 201 bp, Homo sapiens
tgtcttaaaacaaaataaaaccacccagtggatgggaaagagggaatgaaaactagactatactgtgtgaaattgacaaaagtatgtgaatatttttcccrtgagacaggatgaaggcttttcttcactgcataagcctgtttccctgtcttttcttgccaaggtagagccaaatcctgcaaaagagtaaagcaaagcagc

SEQ ID NO: 462425 - DNA, 201 bp, Homo sapiens
aatagaggtagataccaagttttgtgggagcacaaacttcactgttgtcagtgaaggattcctagaggaagtgtatcctggggtgagtcctgaggaataartaagagtagcaagttaggattattcatagaattttactccatcttctgtgaagatggagaatacataccaaattgtggaggcaaaagaaagcatggcatg

SEQ ID NO: 462426 - DNA, 201 bp, Homo sapiens
gttggccagactgttctcaaactcctaacctcaagtgatccacccaccttggcttcccaaagtgctgggattacaggtgtgagccactgttcccagacttytgttcccatcttaatgtccatgtgtattcagtgtttagctcccacttataagtgagaccatgtaatatctggttttctgtttctacattactttgcttag

SEQ ID NO: 462427 - DNA, 201 bp, Homo sapiens
aaatcaagctgcttcttagctttccttatagatggtttaggattcacctttcttggatatgctaaatctgttaccaccaccatccttttgttttccagctkccaaaattttgttgtcatctcttcttgtggtctttgtccttgtgggtttatgtctttaaaaaaaaaaaaaatctgtactgacacttcagtgagttttcag

SEQ ID NO: 462428 - DNA, 201 bp, Homo sapiens
tttaaaaaaaaaaaaaaaaaaaaaaaaaagcattacttgggggggtggggagggataaaatgtttgcttgatttcaaagacacctgttagaatatggtcakgtgcagaggcagcctccccagcaagctagtcatcagtcagtactagtaactttacctcaaagggcccagattcttatgaccttgttggatttaaacaaag

SEQ ID NO: 462429 - DNA, 201 bp, Homo sapiens
gttgggaaacttgaggagataaggctgagatgttaagttggtctaaaaatagagagccttgaataccagggaattattaaaaacttttgaggaaggaaatkattattcaaatataggattctgaaaaaaaataatctgacagaagtatgtaggatagatttaaggtatataagacttgaaaagtatcacagtgttggattg

SEQ ID NO: 462430 - DNA, 201 bp, Homo sapiens
tgggcatgttgacgcgtgcctgtagtcccagctacttgggaggctgaggctgcagaatcacttgaacccgggaggcggaggttgcagtgagccgagattgygccattgcactccagcttggacaacaagagtgaaactccatctaaaaaaaaaaaaattcccaatttaaaaagttttaaaagcaagtaaggctgggtgcgg

SEQ ID NO: 462431 - DNA, 201 bp, Homo sapiens
acagctggatttttcttttcatctagtctcttaccatccagggggttagcccaggcttgtttacaaggtagcagcagcaggttctaagcatgacagcagargctacaaagtctcttgaagtctaaactcaaaacacacactgtcacttcagctgctgcgctctgttagttcaaagctagttatggagcaagcccagatata

SEQ ID NO: 462432 - DNA, 201 bp, Homo sapiens
ctaagtgtagccaagatggctcatctctgttcaagtgatatcagctagtgttttaacaattaattacttataaaagttgccacacatttaacagtttaaarcaacactgtgggccaagaatccaggcatgacttagctggtccaccagtctttcagaaggctgcagtcaagatgtcagctagggctggagtctcatctgaa

SEQ ID NO: 462433 - DNA, 201 bp, Homo sapiens
caagtagctgggactataagtgcatgccaccacacctggctaacttttaaaaaattttatttgctaatttaaaaaatgttttatgtatttttagagatggsgtcttactgtgttgttcaggctggcctcaaactcctggcctcaagtgatgctcctgcctcagcctccagagtagcttggcttacaggtgcaagacactgt

SEQ ID NO: 462434 - DNA, 201 bp, Homo sapiens
gatcacttgagcctaagagtttgagaccagccctggcaacatagtgagatcccgtctctacaaaaaaaaaaaaaaaagaagaagaagaagaaattaaaatkagtggacatagtggcatgtggtgcctgtagtcccagctacttaggaagccgaggtggtaggatgcttgagtccaagaatttgaggttacagtgagctatg

SEQ ID NO: 462435 - DNA, 201 bp, Homo sapiens
aagaaaagaaaagaaaaagttaacattggctatgtggaggggagttgggggagagaagactgaattaggtaggtggagtcatattttgaagacccttaaartcatgctaaggaattccaacttaatcttgttgagcagcaatctccaaaataggctgtactcaaagccaggtggtgtacagaattaagtaccagaggaaaa

SEQ ID NO: 462436 - DNA, 201 bp, Homo sapiens
aataggatgtaagctttttgaggtcagggatttttgtttgtttgttcattgctgtatctctataatgcctggccatattcagggttcaatatatgtgtgtyacatgaattaatatgatattttaaagtgagattttggagttggtgcaatttttggtaatgccaaggagtagagtataacaaagtggttgagtgactaagg

SEQ ID NO: 462437 - DNA, 201 bp, Homo sapiens
cattagccgcccacctccagcctcccaaagtgctgagattacaggcgtgagccaccatgcctggctaaatatagaaatatttttatatgtctttatatccyctaacttcttaatactgcactttttacgtagtagatatcttataagcatttactaaatgaaaaatggagatctctgatttaacccctctactataactgg

SEQ ID NO: 462438 - DNA, 201 bp, Homo sapiens
aacccttgctggagtggtagggacaaaagcctgattagagagaatgggagaggaatgagaaaatgaagacagtgagacagctaactttttttgagaaattrtgatatgaaggaagaagaaaaacagggcagaaattggaccagaaattggaccagagtgaggctggttcttttttttttcttttttttcaatgaaaaattt

SEQ ID NO: 462439 - DNA, 201 bp, Homo sapiens
tctcaaactcctgacctcgtgatccacccacctcagcctcccaatgtgctgggattacaggcatgagccacctcacccagcctatttttttcttaatagtrgtcatcccaataagcatgagttagtatcttactgtagttttgatttgcaaagagcttgggatttttggtggtcttctcagagctgtattagctaccatct

SEQ ID NO: 462440 - DNA, 201 bp, Homo sapiens
agcctatttttttcttaatagtagtcatcccaataagcatgagttagtatcttactgtagttttgatttgcaaagagcttgggatttttggtggtcttctyagagctgtattagctaccatctaaaagtttagaatggatgtgtaaactttctttgctctataatctctgaattttagaaaagttatttttggcccagtaa

SEQ ID NO: 462441 - DNA, 201 bp, Homo sapiens
atattggggaatagaactcccagttggcttctgctgtacttaggcagtgagcaggataaaaacaactcagttcctcccacacacatgatgatgctgggaayggggaagaagggagcagacttcaagaacatttggcattgccctgagcctggggacctttgtagatttgaagggaatgaggatctgaaaatccctggagat

SEQ ID NO: 462442 - DNA, 201 bp, Homo sapiens
cgatctcttgtcgcagtcctgccaataccatagctttatatttctctgatggattgagttctgtgcggacaatatctagctttccagaaagggtactgttycaggcagcacagatagctggtgagcgactaaactcaccactgccatgctgatcacagaatatgtgagagcaggcagtgacccatgcatagccatagagtt

SEQ ID NO: 462443 - DNA, 201 bp, Homo sapiens
tttccacaatggaaaatcagattattcctgaaatggaaaacctgaaaaataccaatataagaatgctattggttaggtgcagtggcttacgcctgtaatcmcagcactttgggaggcagaggcaggtggatcacctgaggccaggagtttgaaaccagcctggctaacttggtgaaaccctgtttctactaaaaatacaaa

SEQ ID NO: 462444 - DNA, 201 bp, Homo sapiens
cccggctaattttttttcttttttgtggagacagggtctggatgttgcctaggctagctagtctcgaactcatgagctcaagtaatcctcccaccttggtstctcaaaatgctgggattacaggcatgagccaccactcccagccttgtttttatatttatgtagtcaaatttaacaatctttaattcatctggattttga

SEQ ID NO: 462445 - DNA, 201 bp, Homo sapiens
tattttctccataataatgtttcatatttgttgataaatcattcattcttatctatgtctaaactcattcatttagtaaatattcagagtcaactaataakaataatgataattgccattgttaaacacaagttgtagaccagacatagttaatattttaacttcttatatggaaattttaaaacttgtacaaaagtaatc

SEQ ID NO: 462446 - DNA, 201 bp, Homo sapiens
gtgaggtcttcgtgtttgacttctgttctcagacaaaggccagagtagtacattcactttatttggcttttttttgttaaaacaatttttaacttataatstttttcctttaccttatatttgctaaatgtattgcagtcctacttatatgtggaaacctccatcacatgtgcttataggatattgaagttagataccata

SEQ ID NO: 462447 - DNA, 201 bp, Homo sapiens
cggacacttgggttgcctccacattttagctattgtgaataatgcagctgtgaatatggatgtacaaatatttctttgagaccctctttcagttcttttgrtttatactgagaaatgtagttgctggattatatgctatttctgtgtttaattttttaatgaactgccatactgttttccacagtggctataccattttac

SEQ ID NO: 462448 - DNA, 201 bp, Homo sapiens
ttaaaaagatactggggggcaccatggctcaggaccgtaatcctagcactttgggaagctgaggcaaacagatggcttgagcccaggagtttgagaccagyctgggtaacatggtgaaaccccatctctacaaacaattttttaaaaattagctgggcatggtggcttgtgagcctctagtcccagctacctgggaggctg

SEQ ID NO: 462449 - DNA, 201 bp, Homo sapiens
tgcccaccttggcctccagtatttattttttgtgattggcttacttagcataacatcctcaaggttcatccatattgtagcatactgcagaatttacttcstttttaaggctgaggaatattctattttatggatatgccacattttgcttagccattcatccatccacggacacttgggttgcctccacattttagctat

SEQ ID NO: 462450 - DNA, 201 bp, Homo sapiens
gtcctagaaacagactgagccacttgtctgtttcttcattaggtacatagtaacttgttaagaatccctgtcattcccaaggttgagcaagacctggcacrtcaagggagactactagggtactcaggtgcagcaaaaagggaagcagggggcctggtccatagtcagggcctctatggctccagggaaaggctaagatct

SEQ ID NO: 462451 - DNA, 201 bp, Homo sapiens
tattctgcatgtttggtcccctggtcccaagcaacctctcctgcatttccccctaatccaaggcacatgacccaagcagcagtctagagtagcatcttcasatgctgacaggctagaaagccaggttctcacctaggttttccatgctttttgcagttagcaagtgtagacctcagagccaggtaagaaattactacttct

SEQ ID NO: 462452 - DNA, 201 bp, Homo sapiens
gatggtagcaacagcatgattaaactaaggaatatagtaaggatatttagctgtgagcccaaggattatcacatttcttacttactgactgagttggtcayttcccttcctagagctactgccccaacctcagtgaaaacaatgtggcagttggcccttggccttgcactttgaggactatagactggaatcttttccaag

SEQ ID NO: 462453 - DNA, 201 bp, Homo sapiens
gatcctaaagaactgaagtaattagccagacatggtggtgttcacctgtagtcccagctacaggttgaggtgggaggatcacttgaacccaggagttttaraggctgcagtgagctatgatcacaccactgcactccagccccagggccacagtgagaccctgtctcaaaaaaaaaaaaaaaaaaaggaactgaagtgaag

SEQ ID NO: 462454 - DNA, 201 bp, Homo sapiens
tgtcttaagtatcattataaatgcacagattttcacaattccttttcttttattgtaaatttaacaatttataattgtataaatttatgggatacaaagcratgttataatttatgtatacaatgtggaataattaaattaaacaggttaacatatccatccctcaaatacttaacatttttcatggtgagaacatttgaa

SEQ ID NO: 462455 - DNA, 201 bp, Homo sapiens
tacccccaaccttgccctctcaaaatgctatgattacaggcatgagccaccatgcccagctctttaaaaaaaaaaaaaattgtctcattgccctggccagsacctccagtacaatgtatataggcatttccattcacttttggccttccttctacttttctgtattttctctcaagtggattttgggtgcttctgattaga

SEQ ID NO: 462456 - DNA, 201 bp, Homo sapiens
gatctcactgtattgcccaggcctggtctggaactcctggacagaagtgatacccccaaccttgccctctcaaaatgctatgattacaggcatgagccacyatgcccagctctttaaaaaaaaaaaaaattgtctcattgccctggccagcacctccagtacaatgtatataggcatttccattcacttttggccttcctt

SEQ ID NO: 462457 - DNA, 201 bp, Homo sapiens
acccaccttggcctcccaaagtgctgggattacacacatgagcgacctcacccagctcagatttgacatcttaatattgaatcttttgatccttgaacatsgtatatatagtaatgtgccacataacgatttttggtcaatgactggccacatatgtggtcccataagattgtaataccatatttttactgtaccttttct

SEQ ID NO: 462458 - DNA, 201 bp, Homo sapiens
aatggaaacatacaattttgttctggcttcttttgttcaacatatttttcagattctttcatgttattgaaagtataactaatctgttccttttcatgctkagtagtattccattgaatgaatatactactatttatttatctatcctcctattgacagttatttgggttgtttctaatttttggctatcatgcataaagc

SEQ ID NO: 462459 - DNA, 201 bp, Homo sapiens
agtgggtccttgcaggtaccttgcttgttcactcagcgctcctggggttgttaaagctctacttcagatcccacttctgacaccatctgtagaaagaaaarctgaattaagtttaaaggagtttaattgaacaattaatgattcatgaattaggaagcccccagaatcacagcaaattcagaaagactccaaggatgcctc

SEQ ID NO: 462460 - DNA, 201 bp, Homo sapiens
cgctcctcacttcccagacggtgtggcggccgggcagaggctgcaatctcagctctttgggaggccaaggcaggcggctgggaggtggttgtagctagccsagatcacgccactgcactccagcctgggcaccattgagcactgagtgaaccagactccgtctgcaatcccggcacctcgggaggccgaggctggcggatc

SEQ ID NO: 462461 - DNA, 201 bp, Homo sapiens
tagccatagagtttgatgccacacttttgataattacaaagtagcatgtcttcacacaaagacataataggatagtgaggtctccagaagctaaagacagkccataaaagaaaaacgcagtaatcatctactgtatatccaggatttacagcaccaaagaggtccagactggaacagtgagactccgatctggtttcggtc

SEQ ID NO: 462462 - DNA, 201 bp, Homo sapiens
tcagaatctttactaagtccttctgcagtctaatttctgttcctccgttacccgttcccccacatcatttacacagaatctcttacatataatcctacctstgagccatcttccaagctgtgactttggccagcaagtctttgctatctttacttggttttttcttactacaatagcccctgaaatcctggcttcatatca

SEQ ID NO: 462463 - DNA, 201 bp, Homo sapiens
aataggtttgtttattaccttgagtttgaaaaaaggaattaacagtttggtttgtttttataattgtgttctgtaaatctaggttcagatacaagcctacrtttgtgtttatagtgatatctttaaaaattggaggaataagatgagccgatggctgaattattggaggagtcttaagtcatttcatacttttcagaagcc

SEQ ID NO: 462464 - DNA, 201 bp, Homo sapiens
gcattcacttacctttaactcattgaattctcacaacaaccctatgcagtaggtgtcattatttccatattatatatgaggtattgccctttcttatctcygtttatccttttagcctcatttcttacccttatcccctcatttcctattctctggccacaccacagtatttcatggtcccctttctcccatctcactgtc

SEQ ID NO: 462465 - DNA, 201 bp, Homo sapiens
agaggccttggagcttttgatgctgaagatggcgttccataagtttctcagatgtcactgaactttttcttgtattcttctagcactttcttcatggaggygacttcccctttcatagaggtcaattctacatcctcgctttgtatttgctgagtatatattttctccgtctgtttcagatggccctcagccttgatgaaa

SEQ ID NO: 462466 - DNA, 201 bp, Homo sapiens
aaaccagactctaaaccattccccattgccaatgagtttgttatgttgataatttgatgacaacttcagagacttaaaagcacagggaggctggggagtcstatctagataaaagatttgctaaatgaaattactgaaggtgaacctggaaacattctgtaaagttagctaaattatctttacgttttttagaaatagggt

SEQ ID NO: 462467 - DNA, 201 bp, Homo sapiens
agtagctgggaatacaggcacacaccaccacacctgcctaatttaaaaaattatttttgtggagatgaggtcttgctatgttacccaggctggtctcaaayttctgggctcaagcagtcctcctgcctctgcctcctaaagtgctaggattacaggtgtgatgagccaatgcacccggccctgtttttcacttgacagtat

SEQ ID NO: 462468 - DNA, 201 bp, Homo sapiens
cctgagcctgggagacagaggttgcagtgagctgagatcagccactgcacttcagcccgagcaacagagtgagaccctgtcaaaaaaaaaaaagatttccyccctggttttctggggtttttttttgttttgttttttttgtttttgtttttgttttttgagtccagatctcactcttgcccaggctggagtacagtggca

SEQ ID NO: 462469 - DNA, 201 bp, Homo sapiens
gatgccttcctggagtctactggtggcgtagtgaaaagcccaacattactggcagaaacgagttggatataaaaattttggagtcttttttttttttttttggccaagaaatctcaatggagcttttcttttgatactaacctattttgatactaacctagtatatgtatctacaacattgaaatgttttcaccttacttt

SEQ ID NO: 462470 - DNA, 201 bp, Homo sapiens
acccgccaccacgcctggccaattttttgtatttttagtagagacagggtttcaccgtgttagccaggatggtctcgatctcttgaccttgtgatcctccytcctcagcctcccgaagtgctgggattacaggcctgagccactgcgcccggccttcatttttaaagacagtgttggtttgttagttttgagagttcatag

SEQ ID NO: 462471 - DNA, 201 bp, Homo sapiens
gccattctcctgtctcagcctcccaagtagctgggactacaggcacccgccaccacgcctggccaattttttgtatttttagtagagacagggtttcaccrtgttagccaggatggtctcgatctcttgaccttgtgatcctccttcctcagcctcccgaagtgctgggattacaggcctgagccactgcgcccggccttc

SEQ ID NO: 462472 - DNA, 201 bp, Homo sapiens
taatgggatttacaggcaagagtcactgcaccaggccttttcttttatatttttatttttatttttatttatttattttcaaaatggagtctcactctgtygcccaggctggagtgcagtggcacaatctcggctcactgcaacctccacctcccaggttcaagcgattctcctgtctcagccccctgagtagctgggatt

SEQ ID NO: 462473 - DNA, 201 bp, Homo sapiens
ctggagtgcatggcgcaatctcaactcactgcaaccttcgcctcccaggtttaagcagttctcctgcctcagccttccaagtagctgggattacaggcacrcgccaccatgcctggctaatttttgtatttttagtagagacggggcttcaccatgttggccaggctggtctcgaactcctgacctcatgatccgcccgcc

SEQ ID NO: 462474 - DNA, 201 bp, Homo sapiens
ttgagtatattaaatgtatcttttttttttttttgagatggagttttgctcttgtcacctaggctggagtgcatggcgcaatctcaactcactgcaacctycgcctcccaggtttaagcagttctcctgcctcagccttccaagtagctgggattacaggcacgcgccaccatgcctggctaatttttgtatttttagtag

SEQ ID NO: 462475 - DNA, 201 bp, Homo sapiens
agcactttgggaggctgaggctggcagatcacctgaggttaggagttcgagaccagcctggccaacacggtgaaaccccatctctactaaaaatacaaaarttagccaggcgtggtggcgggcgcctgtaatcccagctactcaggaggctgaggcaggagaatcgcatgaacctgggagatggaggttgcagtaagccga

SEQ ID NO: 462476 - DNA, 201 bp, Homo sapiens
cgcgcccagcgccctcaatgttcttatagtgaagtagaggagagtggtataatgatgtaggaatagagatatatattaggtacagtggtttcacaaagcargaaatggacagtgcaaaagggaaggcatcgcatattagaggtgctacgttagggcacatagggtagtaagagtgcaacaggaaaaaatggagggggaagc

SEQ ID NO: 462477 - DNA, 201 bp, Homo sapiens
tacctttcaccgcatcattgatcagcttccagggtacttccctacatttattaagagctttagcctgtggttcacagtcttcctctcctctccctcacttstccataacatcttggacaacttaaacatattcatcagtaaactgtccagctctccggcttcatgattccctgaacttctctaccaaccttcatctgcatt

SEQ ID NO: 462478 - DNA, 201 bp, Homo sapiens
taactctgatttgagcacactctttaagagagcacatctgtatacacaagtgcatgagtgtgtatatgtgtctgttgttttattttgttttcttggcaagrgaggagggcccatgcttcaaataggtttgagttggtctcagaggtgttgtatgaccttgtggccctgagaaatactgatcatggtccctcttgctgaagt

SEQ ID NO: 462479 - DNA, 201 bp, Homo sapiens
ttctttttccttgaaagttttctatagctcttcttacctttcaccgcatcattgatcagcttccagggtacttccctacatttattaagagctttagcctrtggttcacagtcttcctctcctctccctcacttgtccataacatcttggacaacttaaacatattcatcagtaaactgtccagctctccggcttcatgat

SEQ ID NO: 462480 - DNA, 201 bp, Homo sapiens
ttagccgggcgtggtagtgcatgcctgtaatcccagctacttggaaggctgaggcagaagaattgcctgaacctggaaggcagaggttgtggtgagctgakatcacgccatcacactccatcttgggcaacaagagcgaaactccatctcaaaaaaaaaaaaaaagacataatgcagtctcctctccaaattctaatcatt

SEQ ID NO: 462481 - DNA, 201 bp, Homo sapiens
tagacttatagaaatggaattacagggtgaaattatatgaatatcttcaagtcttttgctataatgttgccaattatttttcagagattttatcagtttayactccgactcccattatgtgacagtaacggttctcaaagcactcttatcagtaatgaaaattgttttgaatcagttaatttagttggaggagaaattgca

SEQ ID NO: 462482 - DNA, 201 bp, Homo sapiens
ggtaaatgctcagaaggggaaaagagtgaatgaatgaatgttggatccatgaaacatattttgggggatttcagggtataaagttagggttccaagaaagrcctctgtgcgatggttgcaatcatcatgagatgggcttcataaactcctgggctttctggctttaattaacactatgtgtccaccttttagcaaggagac

SEQ ID NO: 462483 - DNA, 201 bp, Homo sapiens
agccatggcaattatccgtgaatcagccttccctactaagatcctcaaggtcagctgggcatgatggctcacacctgtaatcctagcactttgggaggccraagtgggcggatcacctgaggtcaggagttcgaaaccagcctgaccaacatggtgaaaccccgtctctactaaaaatacaaaaaatagccaagtgtggta

SEQ ID NO: 462484 - DNA, 201 bp, Homo sapiens
gggactttattgaggggagggcctctcacccaatcccatcctttactcaggtaaaatgtatccccattacgtatccaaagtcagccaattggtgctgcagwctgtttcttttgggtcagatagtaactaagctaaaagattagtaaatctaattttttaatcaattagtcatttaggtgcctttcataaagtctttttttt

SEQ ID NO: 462485 - DNA, 201 bp, Homo sapiens
gagccactgcgcccagccccagattttcttaattagacaattgggacaataatagctaccttggagaattgtgagaattacatataattaaatgacaggtrtatgcactactccttgagtgtaccaaaagacttagaattcctcatacataccgtgccattatacctctccatgcttttacatgtgctctctctagatttc

SEQ ID NO: 462486 - DNA, 201 bp, Homo sapiens
ggcccaggttggcaccaatactgtacagtgattcttgaagcctaggcacagtggttcatgccaataatcccaacactttgggaggctgaaatgtgaggatygcttgagcctagacaacatagcaggaacccatctctacaaaaaaattaaaaattagccaggcacagtggcacacacgtgttgtcccagctactcaagagg

SEQ ID NO: 462487 - DNA, 201 bp, Homo sapiens
aatttttttactttgacttaacagtttcatttctagaaattaatcttatagataagcttatacatgtatgcacccttaatctcaaaaccttgaaaacataycaatagatctaatggcccaggttggcaccaatactgtacagtgattcttgaagcctaggcacagtggttcatgccaataatcccaacactttgggaggct

SEQ ID NO: 462488 - DNA, 201 bp, Homo sapiens
gtagtcccagcacattgggaagccaaggcgggtggatcacttgaggccaggagttcaagaccatcctggccaacatggtgaaaccctatctgtactaaaawtacaaaaattagccaggtgtagtggctctgtagtcccagctacttgggaggctgaggcaggagaattgcttgaacccaggaggtggaggctgtagtgagc

SEQ ID NO: 462489 - DNA, 201 bp, Homo sapiens
actacaacctccgccagggttcaacctctcccgggttcaagtgattctcctgcctcagcttcctgtgtagctgggactacaggcattttccaccatgcccrgctaagtttttgtatttttagtagagacagggtttcaccatgttagctagaatggtctcgatctcaggacctcgtgatctgcccacctcggcctcccaaa

SEQ ID NO: 462490 - DNA, 201 bp, Homo sapiens
actgtagccttgacctcccgggctcaagcgacctccctccctggcccctgagtagctgagaccacaggcatatgccaccacatccagctaatatttttatwttttgtagagatggtgtctaactattgcccaggctggtctcaaactcctgggctggggcaatccacccaccttggcctcccgaagtgctggattgcagga

SEQ ID NO: 462491 - DNA, 201 bp, Homo sapiens
actaagtccttctgcagtctaatttctgttcctccgttacccgttcccccacatcatttacacagaatctcttacatataatcctacctctgagccatcttccaagctgtgactttggccagcaagtctttgctatctttacttggttttttcttactacaatagcccctgaaatcctggcttcatatcagattgccttcc

SEQ ID NO: 462492 - DNA, 201 bp, Homo sapiens
tcttctgcctcagcctcccgagtagctgggactacaggtgcctgccaccaagcccgactaatttttttgtatttttagtagagccagggtttcaccatgtkggccaggatggtctcgatctcctacttcgggatccgcccgcctcggcctcccaaagtgctgggattataggcgtgagccactgcgcccggccatgacttt

SEQ ID NO: 462493 - DNA, 201 bp, Homo sapiens
ctgcctcctgggttcacgccattcttctgcctcagcctcccgagtagctgggactacaggtgcctgccaccaagcccgactaatttttttgtatttttagwagagccagggtttcaccatgttggccaggatggtctcgatctcctacttcgggatccgcccgcctcggcctcccaaagtgctgggattataggcgtgagc

SEQ ID NO: 462494 - DNA, 201 bp, Homo sapiens
gtaccttttctatgtttagatatgtttaaatacacaaatacttaccattgtgttacaattacctatggtatataataacatacaggtttgttacctaggarcaataggctataccatatagcctaggtatgtagtaggctatactatctaggtttgagtaagtacattctatgatgttcgcacaacgaaatcacctaacaa

SEQ ID NO: 462495 - DNA, 201 bp, Homo sapiens
ccacatatgtggtcccataagattgtaataccatatttttactgtaccttttctatgtttagatatgtttaaatacacaaatacttaccattgtgttacarttacctatggtatataataacatacaggtttgttacctaggagcaataggctataccatatagcctaggtatgtagtaggctatactatctaggtttgag

SEQ ID NO: 462496 - DNA, 201 bp, Homo sapiens
actctaggccaggcacagtggcttatgcctgtaatccctttgggaggccaaggcaggtggatcacttgaggtcaggagtttgagaccagcctggtcaacgwggtaagaccctgtctctactaaaaagacaaaaattagctgggcatggcggtgcacatctgtaatcctagctactggggaggctgaggcaggagaatcgct

SEQ ID NO: 462497 - DNA, 201 bp, Homo sapiens
ggagtgcagtagtgtgatctcaattcactgcaacctccacctcccgggttcaagcaattctcctgcctcagcctcccaagtagctgggattacaggcataygccaccgtgcctggctaattttgtatttttagtatagatgggatgttggccaggctagactcgaactcctgacctcaggtgatccaccctcctcggcctt

SEQ ID NO: 462498 - DNA, 201 bp, Homo sapiens
ctttggtttttttgttttttagagacagagtcttgctctgtcgtccaaggctggagtacagtggcatgatttcagctcattgcaacctctgcctcctgggmtcaaacgatcctcccatcttagcctcctgagtagctgcaactacatgcatgccaccacacctggataatttttctttcctcctttttttttttttttttt

SEQ ID NO: 462499 - DNA, 201 bp, Homo sapiens
tatgaaggatagattttgtggataaaactagagggagagagaccaattaaaagcaggtacaggaatccaggcaaatgatgacagtagtctggaccaggcartggcagtaaagatgaagagaagttgaaagtcttgacagagatttaggggatagaatcagcagtgcttggtgattgattatatgtgaggagtggaagaaga

SEQ ID NO: 462500 - DNA, 201 bp, Homo sapiens
tacaaaacataaaataagaatagtaatacctatcataagcattgctataagaacttgaaatgatctgtattattttcctagcatagtacctcagacatgayacctcctcacacatgatcaaaaagcagtacatataactgtctttactgtgagagcatagaagcctacaaatgttataaaaggcttccaagcagagatcat

SEQ ID NO: 462501 - DNA, 201 bp, Homo sapiens
gttcctgcccttgtggcatttttagagtagatgagagggactgtgatctggtgcacgagtggatgggtttcccttaaattggagaaaggacggccaggcgyggtggctcatgcctgtaatcccagcactttgggaggccgaggcgggcggatcacgaggtaaggagatcgagaccatcctggctaacacagtgaaaccccg

SEQ ID NO: 462502 - DNA, 201 bp, Homo sapiens
atacagagaaataaggataggacccacaaagtgaagtcaagagttggggataggcagccatggcaaggtcagaatcaaggtaataattaaagccacatacraaatgaagttatgttagctgggcatgatggcatatacctctagtctcacctactcaggaggctgaggcaggaggaccacttgagcccatgaggttgatgc

SEQ ID NO: 462503 - DNA, 201 bp, Homo sapiens
tttcttaatactatcaaagaggattgtggcttttggtgtctgtatatgcaggcagttttacagcaaacctagtcatctcatcctggttgttatagcttatktgtagttcatttggccactaccagttagttattcccacacctggcaagtgtaacacaatggtgtgtgtaccttgaggacaagcctgaagtttgtgatatg

SEQ ID NO: 462504 - DNA, 201 bp, Homo sapiens
tggctgatggacttgaatatatatcggaatattaagaggaaggaggattgctcccctgcccagtatgatctttcttgcagtgtcctacctgtcaccccccyacaacacttgctaagttcctgtggagaggcccatgtagagccaatggtaaaacaaatcatttggacttttagaaagctttcccaaggattgttatagctc

SEQ ID NO: 462505 - DNA, 201 bp, Homo sapiens
caaatagaagaaggtagattatcagtgatatgatgtctcaccagatttctttagaatcgtaaaagcctcagaaagtatgccatagggtttctagggaaaasaccttttatgtggtagagtcagggctggggtccactgtcctggtctccccagaaagagatgtaggcagcatgcctctgaccctcataaacttaccagtgc

SEQ ID NO: 462506 - DNA, 201 bp, Homo sapiens
atgttaaagtcactgaagtaatttttttaaaaaacagagataagaaaatagtcctaatgtcttttttaaaaaactcatactggtcaggtgcagtggcttaygcctgtaatcccaacacttcgggaggccaaggtgggtggatcacttgaggctaggagtttgaaaccagcctggccaacatggcataatcctgtctctact

SEQ ID NO: 462507 - DNA, 201 bp, Homo sapiens
tactttttgcttgggtagctaggtagatagttatgccattaagtaggaaaaggaataggagacaaggaacaggtgttttttttttgagacagagtctcackctgccacccaggctggagtgcagtggcacgatcttggctcactacaacctccgccagggttcaacctctcccgggttcaagtgattctcctgcctcagct

SEQ ID NO: 462508 - DNA, 201 bp, Homo sapiens
taggagtactctattgctgtgtgaaaaaggttgagaggatagcactaagtgttgttgttatggagctgatgtccacaatgatccaagacgaactctgtaargatatcagaaagagcagattgagactcttaaatgcctcatagtcagtacttactgagaatctattatgtaccaggtaatatttatattatctgatattca

SEQ ID NO: 462509 - DNA, 201 bp, Homo sapiens
cctgtctctactaaaaatccaaagaattagccaagtatggtggcggatgcctgtaatcccagcaacttgggaggctgaggcaggagaatcgcttgaacctrggaggcagaggttgcagtgagccaagatcatgccattgcactcaacctggggaacaagaactctgtttcaaaaaaaaaaatttttttttagtagagacag

SEQ ID NO: 462510 - DNA, 201 bp, Homo sapiens
agaggccgggcgcagtggctcatgcctgaaatcccagcactttaggaggccaaggcaggtggatcacctaaggttaggagttcaagaccagcctggccaayatggtgaaaccctgtctctactaaaaatccaaagaattagccaagtatggtggcggatgcctgtaatcccagcaacttgggaggctgaggcaggagaatc

SEQ ID NO: 462511 - DNA, 201 bp, Homo sapiens
cagcatggctcaattagtacgaaggttttccataatctggtctctgtctagtaaagcaaatacaaatatagtgcttctcataagatggacattattggccrggcgtggtggctcacgcctgtaatcccagcactttgggaggccgaggcgggtggatcatgaggtcaggagatcgagaccatcctggctaacaaggtgaaa

SEQ ID NO: 462512 - DNA, 201 bp, Homo sapiens
caggaaattacattggtaccatactttaacatacagaccttgtttaaacgtcaccaattaataatatcctttagagcagtacaaaacaaatttgatcaccyatgttttaaacaccatggcatgtgctataggacactcattggtatagtttggatgttcccccaaatctcttgttgaaatgtaatccccagtgttggaggt

SEQ ID NO: 462513 - DNA, 201 bp, Homo sapiens
ttttttaagtgacagaaaaagcaaatctataaatctatagagacaggaggcagattaatgattgcctgagatgtgataagaaaggggattggttttttttwaattattatttcaactgttatttagatgtgcaagtatgttacatggtatattgtgtgatggtgagatttgggtgcgattgaacccatcacccaggtagtg

SEQ ID NO: 462514 - DNA, 201 bp, Homo sapiens
acagacctaacatgagagctaaaactgtaagagttgtatagattttatttcttaaaaattaaagattttgaaccccaaagacactattaagaaaatgaggrccgggtgcagtggctcttgcaggtaatcccagcattttgggaggccaaaccaggtggattgcttgaaccaggagttcaagaccagcctggggaacatggc

SEQ ID NO: 462515 - DNA, 201 bp, Homo sapiens
cttagttttttgtttttttgagacagggtcttactctgtcacccaggctgaagtgtaggtggcacagtcacagctcactgtagccttgacctcccgggctsaagcgacctccctccctggcccctgagtagctgagaccacaggcatatgccaccacatccagctaatatttttattttttgtagagatggtgtctaacta

SEQ ID NO: 462516 - DNA, 201 bp, Homo sapiens
tgtgtttggtctcagtgactcttacatggtgcattctctgggaacagaggcaggagaggggctgatggaacagcacctccgtctgtatgctaggccctgtkctttcagacccacgcctttcttttcacactaagaacagatggcaaccagacattgagtggaggggtctgttccttgtgatccttggggattttgcattca

SEQ ID NO: 462517 - DNA, 201 bp, Homo sapiens
agcccaaagattttccagtgtatttactggaccctactcccatccctgaccaagcatcactagctttgcttagttttttgtttttttgagacagggtcttrctctgtcacccaggctgaagtgtaggtggcacagtcacagctcactgtagccttgacctcccgggctcaagcgacctccctccctggcccctgagtagct

SEQ ID NO: 462518 - DNA, 201 bp, Homo sapiens
gcctgaacctggaaggcagaggttgtggtgagctgagatcacgccatcacactccatcttgggcaacaagagcgaaactccatctcaaaaaaaaaaaaaaagacataatgcagtctcctctccaaattctaatcattttcatgctccagagtcaccacatccatagcagtctttttccccaaaagtatggctcgtaactca

SEQ ID NO: 462519 - DNA, 201 bp, Homo sapiens
cttcagtcaagacctcaaagatcatggccagatctgtatttctgggactacagatgatgagaaatggtttaaacccttgattattttcccaatggtgtggragtcttgaaatactatttatgtaagttagtacctctgctgctcctaaccagccctaattcccaaaatacctctcttaatttgcagtttgggatgggggca

SEQ ID NO: 462520 - DNA, 201 bp, Homo sapiens
ttagattcagattttcaagcactttctgattatgagaatacagtacttccttctgtttttatcttttttaaaacgctgaatttccaaagatggaggttagytcctagtgagcaaacaccagttatcttggatacggccttcatgtatataggaaaatcagaaacttcttgtaaagtttttttaacttttgtaaattgggtt

SEQ ID NO: 462521 - DNA, 201 bp, Homo sapiens
aagtagccaggcatgttgtcgcatgcgtgtaatcccagctacttgggaggctgaggcaggagaatcgcttgaacccgggaggtggagattgcggtgagccragattgcaccactgcactgcagcctggtgacagagtgagcctccgtctcaaaaaaaaaaaaaaaaaaaaggacattcaattaagatgaaatgaatcccca

SEQ ID NO: 462522 - DNA, 201 bp, Homo sapiens
aacccaggagttttagaggctgcagtgagctatgatcacaccactgcactccagccccagggccacagtgagaccctgtctcaaaaaaaaaaaaaaaaaaaggaactgaagtgaagtcagaatatcttcttttcaggccttagagaaagatcgttatgagcatagtcccaaatctggatttctctgaagccaggtcctccc

SEQ ID NO: 462523 - DNA, 201 bp, Homo sapiens
aggttgcagtgagctgagattgcgccattgcactccagcctgggtgacagagcaagactccatctcaaaaaaaaataaataaaataaaataaaataaaaawatatatatatatggaattacagaagacccagaatagccaaagttatcctaagcaaaaagaacaaagctacaggaatcatattacctgacttcaaattata

SEQ ID NO: 462524 - DNA, 201 bp, Homo sapiens
catggtggtatgtgcctgtagtcccagctacttgggaggctaacgcatgagaagtgcttgaagctgggaggcagaggttacagcgagccgagatggtgccrctgcactccagcctgggcaacagagcaagactcagtctcaaaaaaaaaaaaaaaaaaaaaaaaaaatctgaaaaagaaatcaagaaagtaattctattac

SEQ ID NO: 462525 - DNA, 201 bp, Homo sapiens
acaatcaaagagcatatattgaaaattgatatatttcaatatattggaaaaagtaaaaaggcacagcagggcaaattagaatgttacttgagggacagtckttactcctggctggaatagtgaaggtctttgaaaggttgtgggagatgggattgaattggttggtggtaggtagcagcatgtagaaggtcttgaaagctg

SEQ ID NO: 462526 - DNA, 201 bp, Homo sapiens
ggcaggtggatcacaaggtcgggagatcgagactatcctggctaacacagtgaaaccccgtctctactaaaaatacaaaaattagccaggcgtggtggcakgtgcctgtagtcccagctacttgggaggctgaggcaggagaattgcttgaacccaagagtcaggggttgcagtgagcctagattgcgctgggcgacagag

SEQ ID NO: 462527 - DNA, 201 bp, Homo sapiens
cgcccagctaatttttgtatttttagtagagacggagtttcaccatgttggccaggctggtctctagctcctgacctcaagtgatccgcccacctcggccycccaaagtgctaggattacaggcgtgagccaccgtgcggcccattctaagtggcctttttttttggagagggagtcttgctctgttgcccaggctggaat

SEQ ID NO: 462528 - DNA, 201 bp, Homo sapiens
attccctctcttgccatgtgaccagcctgctctcgctttaccttctgccatgagtaaaaagttccctgaggcttccccagaaacctcctgtatgcttcctrtataccctgcagaaccatgagacaattataaattataaatctttctttgtaaattacctagttgcagattctttatagtaacgcaaaatggcctaacgca

SEQ ID NO: 462529 - DNA, 201 bp, Homo sapiens
gggctggagtctcatctgaaggctcaactgggaagggatttggttccaagcttacttggttattgggagaatttcatttccctaggactgttggactgaayctcagtttccaccatgctgttggccagaagctaccctcctttctttatcacttgggcctttccaacttggaaacttacttcatcaaagccagcaagggag

SEQ ID NO: 462530 - DNA, 201 bp, Homo sapiens
agccactgtgcccagcctgtttcactcttgttgcccaggttggagtgcaatggcacgatcttggctcaccgcaacctccacctcctggattcaagtgattmtcttgcctcagcctccctagtagctgggattacaggcatgtgccaccatgcctggctaattttgtatttttagtagagacggggtttctccattttggtc

SEQ ID NO: 462531 - DNA, 201 bp, Homo sapiens
ccacctgcctcagcctcccaaagtgccgggattacaggtgtgagccactgtgcccagcctgtttcactcttgttgcccaggttggagtgcaatggcacgawcttggctcaccgcaacctccacctcctggattcaagtgattctcttgcctcagcctccctagtagctgggattacaggcatgtgccaccatgcctggcta

SEQ ID NO: 462532 - DNA, 201 bp, Homo sapiens
gatctcggctcactgcaagctccgcctcccgggttcacggcattctcctgcctcagcctcccgcgtagctgggaccacaggcgcccgccaccacgcccggstaattttttgtgttttttagtagagacggggtttcactgtgttagccaggatggtctcgatctcctgacctcgtgatccgcccgcctcggcctcccaaag

SEQ ID NO: 462533 - DNA, 201 bp, Homo sapiens
tgataacttgaggcacgtagccattaactggactgcccagctgttcctggcctagggaggagccagaacccccaaccaatagtaatgaggatggtgatgcragccttgggtcctccctaacttggctactgtgttacagaagcaatatccaaggcagtgtcatctgcaacaatgctgtgatcgagaagggtgcagacatca

SEQ ID NO: 462534 - DNA, 201 bp, Homo sapiens
ttttttaaaaacaacatttatgctgagatagtaacaattctggaatgtggaagtattgatgattattatttttttctttgtacttttctgtattttaaaamattttctggctgggcacagtggctcacgcctataatcccaacactttgagaggccgaggtggacggatcacctgaggtaaggaatttgagaccagcctgg

SEQ ID NO: 462535 - DNA, 201 bp, Homo sapiens
tcaaaatatctcatgtaacccatcagtgtatgtacctagcatgtactcacaaaaattaaaaattaaattaaaaaaggaaagctgctagagtttatatagcmccaaaaccttagcataaactaagaaagaggaagacacaggatataagaaaaagggcactgatgcttgaacctgggaggcagaggttgcagtgagcctaga

SEQ ID NO: 462536 - DNA, 201 bp, Homo sapiens
taatatttgctagcacaacagggtgactataataaaaaataatttaattgtacattttaaaataactaagagagtataattggattgtttgtcacacaaargataaatgcttgaggtaatggatacccccatttaccctgatgtgattattacgtattgcatgcctgtgtcaaaatatctcatgtaacccatcagtgtatg

SEQ ID NO: 462537 - DNA, 201 bp, Homo sapiens
agagtcaggggttgcagtgagcctagattgcgctgggcgacagagtgagactcggtctcaaaaaacaaacaaaaacaaacaaacaaaaaaaggattaaatkattacagagttaataaattttaaaatagctaaagaatggcatagacaccactgaaaatcaaattattgacaaagaggaatggtctgagatatcagtgatc

SEQ ID NO: 462538 - DNA, 201 bp, Homo sapiens
cgcaaaatggcctaacgcacttattatagctcctctctcatctcaatcctgttttttttttttgagatggaatctcactctgtcacccaagctggagtgcmctacagtggcacgatctcagctcactgcaacctccacctcccgggttcaagtaattctcctgcctcagcctcccaagcagctgggactacagggcgtaac

SEQ ID NO: 462539 - DNA, 201 bp, Homo sapiens
tataatgcatacataatataatatatatgattattattttctgagctatctgagaataagttgcagatatgattttcctttgcctttaaatacgtcaatawgtatttcctccctctcctccaaaaatgatagtctctcaaaacaggaaattacattggtaccatactttaacatacagaccttgtttaaacgtcaccaatt

SEQ ID NO: 462540 - DNA, 201 bp, Homo sapiens
gatgcttctgcctcagcctcccaaagtgctggaattacaggcaggaaccactgcccagccactctctctttctttgtaatatatattcaatatatataatrcatacataatataatatatatgattattattttctgagctatctgagaataagttgcagatatgattttcctttgcctttaaatacgtcaataagtattt

SEQ ID NO: 462541 - DNA, 201 bp, Homo sapiens
cgttcttactgacttataggggaatggctaatctctggatgtttctggagccacctttcttccccttgcactttcttctcagaaaatttataggagatacwgatactaaagagggcaggatcaaattcatgtttagactttttggagtatttcattcctgctgcaggtctttttttttttttttttttttttttttttttg

SEQ ID NO: 462542 - DNA, 201 bp, Homo sapiens
ctgcagtccactgtttcccagatattgtttaatagtctagatcttctagacccaacttcctcaaatggcgttcttactgacttataggggaatggctaatmtctggatgtttctggagccacctttcttccccttgcactttcttctcagaaaatttataggagatacagatactaaagagggcaggatcaaattcatgtt

SEQ ID NO: 462543 - DNA, 201 bp, Homo sapiens
aattagccaggcgtggtggcgggcgcctgtaatcccagctactcaggaggctgaggcaggagaatcgcatgaacctgggagatggaggttgcagtaagccragattgtgccactgcactccagcctgggtgacaagagcgaaactcggtctccaaaaaaaaaaagcagttgggtttgaaatgtcatcttgctgccagttct

SEQ ID NO: 462544 - DNA, 201 bp, Homo sapiens
ctcccgagtagttgggattacaggcgtgtgccaccacgcccagctaatttttttgtatttttaatagagatggagtttcaccatgttggccaggctggttycgaactcctgacctcaagtgatccacccacctcagcctcccaaagtgctaggattacaggcattagccactgagcccggcctgtaactaatatttaaata

SEQ ID NO: 462545 - DNA, 201 bp, Homo sapiens
agtctgttgcccaggctggagtgcagtgccgtgatctcagctcactgcaacctccacctcctgggttcaagtgattctcctgcctcagcctcccgagtagytgggattacaggcgtgtgccaccacgcccagctaatttttttgtatttttaatagagatggagtttcaccatgttggccaggctggtttcgaactcctga

SEQ ID NO: 462546 - DNA, 201 bp, Homo sapiens
ctctgcaaaatttagcttcagattggcagcatttgctcttccttttttggatttcatttggttattgaactaaaaaaccccaacatataattttttataaktgtttttcctcatttatattaaaacactgcatataagatgaccagagaccatctgattggtgatcttgaatactttcaagtacctgagctaaacgtattg

SEQ ID NO: 462547 - DNA, 201 bp, Homo sapiens
aaggtctcacaatagttttttgtttgtttgtttgtttgtttatcacatggtattcctaagcagacttccatgcaagtactaactaggcctgaccctgcatmgatcagatgagatcagatgccttcagggtgatatggctgtagacttcccacccccacccagtagtctaagtttctggtttctttttcttgtcttactgtg

SEQ ID NO: 462548 - DNA, 201 bp, Homo sapiens
tcatcagagaatgcaaataaaaacaatgagatgtcatctcaccttaggtaaaatgccttttatccaaaagtgaggtagtagcaaatgctggcaaggttgtrgagaaaggggaactctcatatactgtttatgggaatataaattagtacagccactatggagaacagtttggaggttcctcaaaaaagtaaaaaatagagc

SEQ ID NO: 462549 - DNA, 201 bp, Homo sapiens
gcctttttgactattgtattgcctccaaaagcattagtactttagtactaattagtacttttagtacattagtagtattagttgcctccactaagcattartagtctttataatcactctaactctagacttttggctttagaacacgtttagttctaaacctgttctaaagattctaccaggtttacttggtctgctatt

SEQ ID NO: 462550 - DNA, 201 bp, Homo sapiens
aatatatttcagcatgtatagttaaaatataaggacgcttccaggataaggatatttaaaatagatatatattttatgtatatgtacatatatatatatakagagagagagagagaggctttttttaaataaataccttaatatcattatcacaccttcaaaaaactgacagtgctttcttaatactatcaaagaggattg

SEQ ID NO: 462551 - DNA, 201 bp, Homo sapiens
tgtcattattatatgttggcatattttgttacaattattagactatgtatagcttattaatttcttactattattaatagagccactgagagccttcatasttaggatttgaataatctagttaatattttaggacgtttggttaaattataattttccagtataacattgaaacttgtttctagttgctttttgtgttca

SEQ ID NO: 462552 - DNA, 201 bp, Homo sapiens
gagaagtgtctgtttatgtcctttgcccaccctttaatggggttgttttttgcttgttgatttaagttctttatagatgcttgatattacacctttgtcakttgcatagtttgagaatatttcctcccatttctgtaggttgtctgtttacagaacagtagtttcttttgctgtgcagaagctctttaatcagatggaaag

SEQ ID NO: 462553 - DNA, 201 bp, Homo sapiens
ctgtattctgcatgtttggtcccctggtcccaagcaacctctcctgcatttccccctaatccaaggcacatgacccaagcagcagtctagagtagcatctkcacatgctgacaggctagaaagccaggttctcacctaggttttccatgctttttgcagttagcaagtgtagacctcagagccaggtaagaaattactact

SEQ ID NO: 462554 - DNA, 201 bp, Homo sapiens
gatagttgttaatcatgcttatcttcctaggattataacatacttattttgattgtaacatacttattttgatacttattttcctaggattctagtagtcyttttatgggtttaaattttcctgaatgatgtgtttttttccttgaagttttcctctggaatgatgtattctttaggttttgctttgccagcattatgtaa

SEQ ID NO: 462555 - DNA, 201 bp, Homo sapiens
tctcagcactttgggaggctgagacaggattgtttgagcccaccagttcaagaccaacctggactacatagtgagaaacatagtgagaccctgtctctatwttttttttaatttaaaaataaaattaaaataaaaaataaggccgggcgtggtggctcacacctgtaatcccagcactttgggaggccaaggcaggtggat

SEQ ID NO: 462556 - DNA, 201 bp, Homo sapiens
cctgccatgctctcaccctgcatatcctaggtttgaagagaaacgctcagatccgcttatttctgccagtatattttggacactttataatcattaaagcmctttcttggcaggagaggctcttgtccttcctggggtccttgcgaggcgctggcattggagacgacaccaccccacttggcttctctccctgcctaaggg

SEQ ID NO: 462557 - DNA, 201 bp, Homo sapiens
gctggcgtccgtgtgctgtgccagggcctgaaggactccccctgccagctggaggcgctcaagtaggcactgggccttgggggggtgcggggtgtgggctrgggggggtcccgtgctgcctcacgtgtgacccgtgtccccaggctggagagctgcggtgtgacatcagacaactgccgggacctgtgcggcattgtggcc

SEQ ID NO: 462558 - DNA, 201 bp, Homo sapiens
gatgcccaggcagaagactgaggggagatgagacaccagcacaccccgtgctccctggtatcacacccttggctggtgcacattcctgtgtggtgctgagytctgctgtcccccaggctggagtattgcagcctctcggctgccagctgcgagcccctggcctccgtgctcagggccaagccggacttcaaggagctcacg

SEQ ID NO: 462559 - DNA, 201 bp, Homo sapiens
cttccaccccggagcctcaggagcccccagcactgccctgactgccccccagcccagcccagcccagcccagcccagcccagcccagcccagcgcggcccagcgcggcccgggttcctgcccggagcccagtgctcgccccagctctgtgtgggatgatggggcagcccatcttgcccacgggtggacagctgaccaaggt

SEQ ID NO: 462560 - DNA, 201 bp, Homo sapiens
tccgggaccaccgggggaccggacgccgggccgcgaagctgccgcctggggctgcggggaggagagcaacataactggaatggcacttaggggccggtgtmagggttgtcaccggggttggcggaaatgacgaaggggccccaggcacgtcgtgttactgggcgaggttccagccaaggtgcccacgcgccttgggggaaa

SEQ ID NO: 462561 - DNA, 201 bp, Homo sapiens
aaagttacattaggctgggtgcgctggtgcagcctgtaatcccagcactttgggaggccgaggcgggcggatctcttgagcccaggagtttgcgaccaacrtactgagtttggccaaaatagtgagacccccgtctctacaaaagatagaaaaaattagccagttgcggtagtgaacgcttgtagtcccagctacttggga

SEQ ID NO: 462562 - DNA, 201 bp, Homo sapiens
cccgcagcgctagttgcagatggtcacgggagcactggccaccctgagctcccaccaagctttcccaggaggaggacaccctggggccacctttcatctgrctgcagaggacacaggagtgtcaggctggatttggggagcgtgtgcaccctgggcagccccctgaggctctccttccacccgccctcccgcccacagtgc

SEQ ID NO: 462563 - DNA, 201 bp, Homo sapiens
gccactgtccttgcaggccgggcgcccaggcgtgtggacccgagcccagccttgcgtctttcctcccagttggtaccaggggcctcttgcctccactcatscagagtggaccagccgcctctgaagcagccccggggagaggagtgccaggcacacagactcaggaagctgggggtgtcagggcaccaggagcctctcaag

SEQ ID NO: 462564 - DNA, 201 bp, Homo sapiens
gaggagttacgaggaccggacggggctccctggtgaggtggtcctgtgtacctgcggacgctagctctggcccagcacctccaggcagggtctgcttttcygccctgcccttttcgtcttcctcactggtccaggattgcgtggccctcagccctctgtctccttagccctctcccgtctgtgactgtcccctcgtctctc

SEQ ID NO: 462565 - DNA, 201 bp, Homo sapiens
ggtcctgtgtacctgcggacgctagctctggcccagcacctccaggcagggtctgcttttccgccctgcccttttcgtcttcctcactggtccaggattgygtggccctcagccctctgtctccttagccctctcccgtctgtgactgtcccctcgtctctctgggttcttggtggtctgagggtctggccaggctcctgc

SEQ ID NO: 462566 - DNA, 201 bp, Homo sapiens
tgtgagcacgagtgtccgtgtgtatgtgagcacacatgggtgaggcgagtgtgagcacgtgtgtgagcatatgagtgtgagcatgggtgtccgtgagcatrtgagagtgagcacgtgtccgtgtgagcacgtgagtgagcacgagggtccgtgtgtgagcacatgggcaagaatgagcacgagtgtccgtgtgtgagcaca

SEQ ID NO: 462567 - DNA, 201 bp, Homo sapiens
ccgagcacaggtgtccgtcgcgccccccaggcccaggcctgctctgccggtcagtgcggtgccaggcacgcccggcaccctgacccccgccctgcttcacmcaggttggccgactgcgatgtgagtgacagcagctgcagcagcctcgccgcaaccctgttggccaaccacagcctgcgtgagctggacctcagcaacaac

SEQ ID NO: 462568 - DNA, 201 bp, Homo sapiens
tgtgaggggattcggccaagacgtcctcttccctctgcctcccacccaggccactcttcacctccaccatgagcctggacatccagtgtgaggagctgagygacgctagatgggccgagctcctccctctgctccagcagtgccaagtggtcaggtacgcttgctctcggggtggccttggggtgctggtggggcaggctg

SEQ ID NO: 462569 - DNA, 201 bp, Homo sapiens
acgctagatgggccgagctcctccctctgctccagcagtgccaagtggtcaggtacgcttgctctcggggtggccttggggtgctggtggggcaggctggygggtggcggctccctctgaagggtgcattgctctggaacgccttgtttgtggacatgaagtatgaattctgtgcagctaccacgtgcatgagatgtgatt

SEQ ID NO: 462570 - DNA, 201 bp, Homo sapiens
ctgccccacccctgatgtctgctccagagacaaaggtggggagggtgctgaagaggaagtgtttgcccagggagaggctgcggctcctcctgaaacatcakccctgtgggtcctgtttgcagaatctccggcctgtgaaactgtgaggggattcggccaagacgtcctcttccctctgcctcccacccaggccactcttca

SEQ ID NO: 462571 - DNA, 201 bp, Homo sapiens
gagggtgtgtccaaagttttgaggacggccgagcggcgctccaaaacccgtcctcacagcctcgccccgttcgcctcagctacaacaaatcatcgtcaacstgttccaccttctccagtctggtagcaaaaaggggtgtctcaggtttgctttattttattgtttgggcaattcctggaatccggcctgcttgtgggagga

SEQ ID NO: 462572 - DNA, 201 bp, Homo sapiens
tgcagctaccacgtgcatgagatgtgattcttgtgtttctttttgacaatttaggaatgtaaaacccattccaggctcatgcagcatgggctgaggtgggygggccgaggtgggcggccactggccagtgggtctctggctccggtgtctcagctcctctccctcccttggagacacgagggcaggacacagcttgggtcc

SEQ ID NO: 462573 - DNA, 201 bp, Homo sapiens
gggtgaggggtttccagaaggaatgccggtgtccacagaggcccgggcctctggatgagtctgtgggggtccctcagcactgacacctgatgcccaggcagaagactgaggggagatgagacaccagcacaccccgtgctccctggtatcacacccttggctggtgcacattcctgtgtggtgctgagctctgctgtcccc

SEQ ID NO: 462574 - DNA, 201 bp, Homo sapiens
ctcaggaggcggaggttgcggtgagccgagatcgtgccactgcactccagccggctgacaagagcgaaactccttctcaaaaaaaaaaaaaaaaaaaaaaagttacattaggctgggtgcgctggtgcagcctgtaatcccagcactttgggaggccgaggcgggcggatctcttgagcccaggagtttgcgaccaacata

SEQ ID NO: 462575 - DNA, 201 bp, Homo sapiens
cttgatgggggtcttggttctttgtgctggatacttggttctactaagaaaatatacctttggtgatttttttctctctcctttcttatgtttcttttttsgtgtgcccatgagcctgtcctgatgtcttgtggagtgaccctctaattatgttctccaaattttcttttcgatgttttgttttatttttgggagatgttc

SEQ ID NO: 462576 - DNA, 201 bp, Homo sapiens
cggagcctcaggagcccccagcactgccctgactgccccccagcccagcccagcccagcccagcccagcccagcccagcccagcgcggcccagcgcggcccgggttcctgcccggagcccagtgctcgccccagctctgtgtgggatgatggggcagcccatcttgcccacgggtggacagctgaccaaggtgggccagcc

SEQ ID NO: 462577 - DNA, 201 bp, Homo sapiens
ccccggagcctcaggagcccccagcactgccctgactgccccccagcccagcccagcccagcccagcccagcccagcccagcccagcgcggcccagcgcggcccgggttcctgcccggagcccagtgctcgccccagctctgtgtgggatgatggggcagcccatcttgcccacgggtggacagctgaccaaggtgggcca

SEQ ID NO: 462578 - DNA, 201 bp, Homo sapiens
gacaggcagtggcagcagacatttccaacatcagccagaggcacacaggcctggcggtctcacagcgggggggacagggcccttcctgccttatcccagcycccgcacccaagatctggccctgcccgccatccctagccttccagcatcaccacagacccccactgaaaggtgtgtctgcagacaaggtttccctgggtc

SEQ ID NO: 462579 - DNA, 201 bp, Homo sapiens
ggcagtggcagcagacatttccaacatcagccagaggcacacaggcctggcggtctcacagcgggggggacagggcccttcctgccttatcccagcccccrcacccaagatctggccctgcccgccatccctagccttccagcatcaccacagacccccactgaaaggtgtgtctgcagacaaggtttccctgggtcgagc

SEQ ID NO: 462580 - DNA, 201 bp, Homo sapiens
ccagaggcacacaggcctggcggtctcacagcgggggggacagggcccttcctgccttatcccagcccccgcacccaagatctggccctgcccgccatccytagccttccagcatcaccacagacccccactgaaaggtgtgtctgcagacaaggtttccctgggtcgagccacatgcgtgccctccttcactcggcctgg

SEQ ID NO: 462581 - DNA, 201 bp, Homo sapiens
aggtttccctgggtcgagccacatgcgtgccctccttcactcggcctggagaccccagaccccagagccccgtccagggaaggagcaggtatagacctgcygcctgaagagtgctgctccgggctctgggctctggcaggcgaagggcgtggcagcttggctcaggggagccctgctgacagccaggtatgctccagcctc

SEQ ID NO: 462582 - DNA, 201 bp, Homo sapiens
accctggggcccaccagcccctgccatgctctcaccctgcatatcctaggtttgaagagaaacgctcagatccgcttatttctgccagtatattttggacmctttataatcattaaagcactttcttggcaggagaggctcttgtccttcctggggtccttgcgaggcgctggcattggagacgacaccaccccacttggc

SEQ ID NO: 462583 - DNA, 201 bp, Homo sapiens
tcggcctggagaccccagaccccagagccccgtccagggaaggagcaggtatagacctgccgcctgaagagtgctgctccgggctctgggctctggcaggygaagggcgtggcagcttggctcaggggagccctgctgacagccaggtatgctccagcctccagaactgctgcctgacgggggccggctgcggggtcctgt

SEQ ID NO: 462584 - DNA, 201 bp, Homo sapiens
attcctgtgtggtgctgagctctgctgtcccccaggctggagtattgcagcctctcggctgccagctgcgagcccctggcctccgtgctcagggccaagcyggacttcaaggagctcacggttagcaacaacgacatcaatgaggctggcgtccgtgtgctgtgccagggcctgaaggactccccctgccagctggaggcg

SEQ ID NO: 462585 - DNA, 201 bp, Homo sapiens
ccagctgcgagcccctggcctccgtgctcagggccaagccggacttcaaggagctcacggttagcaacaacgacatcaatgaggctggcgtccgtgtgctrtgccagggcctgaaggactccccctgccagctggaggcgctcaagtaggcactgggccttgggggggtgcggggtgtgggctagggggggtcccgtgctg

SEQ ID NO: 462586 - DNA, 201 bp, Homo sapiens
ctggccggcaacgagctgggggatgagggtgcccgactgctgtgtgagaccctgctggaacctggctgccagctggagtcgctgtggtgagtgtggctgtyggggcagggccctgtcgcccaagagagggccagggtgaccgaggagaccaggggaggagtgagcgactccagggaagctgctgggctcagctccgacctt

SEQ ID NO: 462587 - DNA, 201 bp, Homo sapiens
ggaagtgtttgcccagggagaggctgcggctcctcctgaaacatcagccctgtgggtcctgtttgcagaatctccggcctgtgaaactgtgaggggattcrgccaagacgtcctcttccctctgcctcccacccaggccactcttcacctccaccatgagcctggacatccagtgtgaggagctgagcgacgctagatggg

SEQ ID NO: 462588 - DNA, 201 bp, Homo sapiens
ttacaggcgtgagccaccgcgcctggccacgtgcgagcatcttaaacaaaactttcatggaacagttcctcctttttgtttcatttctgaaatgtcttgtrtgacttgccttgctgtcttctgggcccactgataggttgtaacctgcacgtggggtggtggtggaggctgaggccagtgctgtctgcgtggtccacatga

SEQ ID NO: 462589 - DNA, 201 bp, Homo sapiens
gtctcacagcgggggggacagggcccttcctgccttatcccagcccccgcacccaagatctggccctgcccgccatccctagccttccagcatcaccacagacccccactgaaaggtgtgtctgcagacaaggtttccctgggtcgagccacatgcgtgccctccttcactcggcctggagaccccagaccccagagcccc

SEQ ID NO: 462590 - DNA, 201 bp, Homo sapiens
accccggagcctcaggagcccccagcactgccctgactgccccccagcccagcccagcccagcccagcccagcccagcccagcccagcgcggcccagcgcggcccgggttcctgcccggagcccagtgctcgccccagctctgtgtgggatgatggggcagcccatcttgcccacgggtggacagctgaccaaggtgggcc

SEQ ID NO: 462591 - DNA, 201 bp, Homo sapiens
tccaccccggagcctcaggagcccccagcactgccctgactgccccccagcccagcccagcccagcccagcccagcccagcccagcccagcgcggcccagcgcggcccgggttcctgcccggagcccagtgctcgccccagctctgtgtgggatgatggggcagcccatcttgcccacgggtggacagctgaccaaggtgg

SEQ ID NO: 462592 - DNA, 201 bp, Homo sapiens
gcttccaccccggagcctcaggagcccccagcactgccctgactgccccccagcccagcccagcccagcccagcccagcccagcccagcccagcgcggcccagcgcggcccgggttcctgcccggagcccagtgctcgccccagctctgtgtgggatgatggggcagcccatcttgcccacgggtggacagctgaccaagg

SEQ ID NO: 462593 - DNA, 201 bp, Homo sapiens
atgtgctgtagcctggtgcagagtccccaaccccagaagggggccatggaagctgacaccccaagtggccgcccccctgctctgtcttgcttcggacactrtggccgggtccaggatcctggcatcctgggaggtctctggctttgtgggcagcctgcctggcccgcacagtctgcctgtcctgagggtgagacacaggtc

SEQ ID NO: 462594 - DNA, 201 bp, Homo sapiens
gcagcttccaccccggagcctcaggagcccccagcactgccctgactgccccccagcccagcccagcccagcccagcccagcccagcccagcccagcgcggcccagcgcggcccgggttcctgcccggagcccagtgctcgccccagctctgtgtgggatgatggggcagcccatcttgcccacgggtggacagctgacca

SEQ ID NO: 462595 - DNA, 201 bp, Homo sapiens
cgcagcttccaccccggagcctcaggagcccccagcactgccctgactgccccccagcccagcccagcccagcccagcccagcccagcccagcccagcgcggcccagcgcggcccgggttcctgcccggagcccagtgctcgccccagctctgtgtgggatgatggggcagcccatcttgcccacgggtggacagctgacc

SEQ ID NO: 462596 - DNA, 201 bp, Homo sapiens
tcccgcagcttccaccccggagcctcaggagcccccagcactgccctgactgccccccagcccagcccagcccagcccagcccagcccagcccagcccagcgcggcccagcgcggcccgggttcctgcccggagcccagtgctcgccccagctctgtgtgggatgatggggcagcccatcttgcccacgggtggacagctg

SEQ ID NO: 462597 - DNA, 201 bp, Homo sapiens
gctcccgcagcttccaccccggagcctcaggagcccccagcactgccctgactgccccccagcccagcccagcccagcccagcccagcccagcccagcccagcgcggcccagcgcggcccgggttcctgcccggagcccagtgctcgccccagctctgtgtgggatgatggggcagcccatcttgcccacgggtggacagc

SEQ ID NO: 462598 - DNA, 201 bp, Homo sapiens
cagctgctcccgcagcttccaccccggagcctcaggagcccccagcactgccctgactgccccccagcccagcccagcccagcccagcccagcccagcccrgcccagcgcggcccagcgcggcccgggttcctgcccggagcccagtgctcgccccagctctgtgtgggatgatggggcagcccatcttgcccacgggtgg

SEQ ID NO: 462599 - DNA, 201 bp, Homo sapiens
cccagctgctcccgcagcttccaccccggagcctcaggagcccccagcactgccctgactgccccccagcccagcccagcccagcccagcccagcccagcscagcccagcgcggcccagcgcggcccgggttcctgcccggagcccagtgctcgccccagctctgtgtgggatgatggggcagcccatcttgcccacgggt

SEQ ID NO: 462600 - DNA, 201 bp, Homo sapiens
gcccagctgctcccgcagcttccaccccggagcctcaggagcccccagcactgccctgactgccccccagcccagcccagcccagcccagcccagcccagyccagcccagcgcggcccagcgcggcccgggttcctgcccggagcccagtgctcgccccagctctgtgtgggatgatggggcagcccatcttgcccacggg

SEQ ID NO: 462601 - DNA, 201 bp, Homo sapiens
ggtagtagctgggacgaggcccgggggctgagcccagagggtcgagtgggcgacgactagcgggcgcggcccccagggtggactccccgccagccccggcmtggaggctccgcccgcccccgcctgggcggaaggaacgcggagcggctctggccttgggtctgcggcggcggcgtcgggtgagcgtcccgggcggagcgg

SEQ ID NO: 462602 - DNA, 201 bp, Homo sapiens
gactagcgggcgcggcccccagggtggactccccgccagccccggcctggaggctccgcccgcccccgcctgggcggaaggaacgcggagcggctctggcyttgggtctgcggcggcggcgtcgggtgagcgtcccgggcggagcgggcgcgggcgggggcagagaggcaggggagacccccttcgtgtttttgtgaggtt

SEQ ID NO: 462603 - DNA, 201 bp, Homo sapiens
cgcggcccccagggtggactccccgccagccccggcctggaggctccgcccgcccccgcctgggcggaaggaacgcggagcggctctggccttgggtctgsggcggcggcgtcgggtgagcgtcccgggcggagcgggcgcgggcgggggcagagaggcaggggagacccccttcgtgtttttgtgaggtttcctcccagc

SEQ ID NO: 462604 - DNA, 201 bp, Homo sapiens
gggcggaaggaacgcggagcggctctggccttgggtctgcggcggcggcgtcgggtgagcgtcccgggcggagcgggcgcgggcgggggcagagaggcagrggagacccccttcgtgtttttgtgaggtttcctcccagccctttagtctgcagcagggtgtccagaactagcaggttcgagggactcgacgcgggcgcgg

SEQ ID NO: 462605 - DNA, 201 bp, Homo sapiens
gcggcggcggcgtcgggtgagcgtcccgggcggagcgggcgcgggcgggggcagagaggcaggggagacccccttcgtgtttttgtgaggtttcctcccasccctttagtctgcagcagggtgtccagaactagcaggttcgagggactcgacgcgggcgcgggcgggggtcccagggaccgggaacttttgcgcgtcgcc

SEQ ID NO: 462606 - DNA, 201 bp, Homo sapiens
acctggctgccagctggagtcgctgtggtgagtgtggctgtcggggcagggccctgtcgcccaagagagggccagggtgaccgaggagaccaggggaggartgagcgactccagggaagctgctgggctcagctccgaccttcagaatgcataggccagggagcagcctgtggtttgatgggaacagtgcttggggccaag

SEQ ID NO: 462607 - DNA, 201 bp, Homo sapiens
catgagtgtccgtgtgtgagcacatgggcgagagtacgtgagcacatgggtgagagtgagcacgagtgtccgtgtgtgagcacatgggtgagagtgagcaygagtgtccatgtgagtgtgagcacatgggcgagtgagcacgtgagtgtggcacatgggcgagagtgagcacgagtgtccatgtgagtgtgagcacatggg

SEQ ID NO: 462608 - DNA, 201 bp, Homo sapiens
ggaggtgcccacagaggctgggtggtgatagccaggagatgggctggcatctgcattacccaagctctgctgcccatggtggcctttctgggggtgggtgmtggtccctgccccctgccccacccctgatgtctgctccagagacaaaggtggggagggtgctgaagaggaagtgtttgcccagggagaggctgcggctcc

SEQ ID NO: 462609 - DNA, 201 bp, Homo sapiens
ctgggaaaggcgggctggcggcaccactctggcttagttctcattttaactctgaaagtcagaggtcatgtttcatgaagcctgagagcttcacggagctscagcctacctggccaccctgtggtccatcttcctggaagccccgcccacctttctcccttgcgggaaccccgcctgtgtcaggatgtttttccagatttg

SEQ ID NO: 462610 - DNA, 201 bp, Homo sapiens
tgatagccaggagatgggctggcatctgcattacccaagctctgctgcccatggtggcctttctgggggtgggtgctggtccctgccccctgccccacccstgatgtctgctccagagacaaaggtggggagggtgctgaagaggaagtgtttgcccagggagaggctgcggctcctcctgaaacatcagccctgtgggtc

SEQ ID NO: 462611 - DNA, 201 bp, Homo sapiens
ccaaagtgctgcgattacaggcgtgagccactgtgaccttgtgtgcacgatctgctttttctcgttggcagcttttcaagctctctttgttcactgtgttmggggttccatgtgcttggccttgatgggggtcttggttctttgtgctggatacttggttctactaagaaaatatacctttggtgatttttttctctctcc

SEQ ID NO: 462612 - DNA, 201 bp, Homo sapiens
aagctctctttgttcactgtgttaggggttccatgtgcttggccttgatgggggtcttggttctttgtgctggatacttggttctactaagaaaatatacytttggtgatttttttctctctcctttcttatgtttcttttttggtgtgcccatgagcctgtcctgatgtcttgtggagtgaccctctaattatgttctcc

SEQ ID NO: 462613 - DNA, 201 bp, Homo sapiens
tgtgctggatacttggttctactaagaaaatatacctttggtgatttttttctctctcctttcttatgtttcttttttggtgtgcccatgagcctgtcctgatgtcttgtggagtgaccctctaattatgttctccaaattttcttttcgatgttttgttttatttttgggagatgttctcatttaccagccagtctactg

SEQ ID NO: 462614 - DNA, 201 bp, Homo sapiens
tttatttttgggagatgttctcatttaccagccagtctactgaatttccaccctcagtgttttgtcttttgtttgctgtttcccgtgtgcctctcgccagsggctttccgtgggtggctggtcatcctgggctgggcaccaggtgcagagtgaggcccgggagccctggacagtgagccctgcaggccgagtcatggctgc

SEQ ID NO: 462615 - DNA, 201 bp, Homo sapiens
gctggagtgcagtggtgcgatcttggctcactgcaagctccgcctcccaagttcatgccattctcctgtctcaacctcccgagtagctgggaccacaggcrcccgtcaccacaccaggctaattttttgtacttttagtagagatggggtttcaccgtgttagccagtatggtcttgatatcctgacctcgtgatccgcct

SEQ ID NO: 462616 - DNA, 201 bp, Homo sapiens
atttagccgggtatagcatgcaccattatgcccggctaattttattttgtttgtttttttgagagagtcttgctctgtcgcccaggctggagtgcagtggygcgatcttggctcactgcaagctccgcctcccaagttcatgccattctcctgtctcaacctcccgagtagctgggaccacaggcgcccgtcaccacacca

SEQ ID NO: 462617 - DNA, 201 bp, Homo sapiens
gtgtccgtgagcatgtgagagtgagcacgtgtccgtgtgagcacgtgagtgagcacgagggtccgtgtgtgagcacatgggcaagaatgagcacgagtgtccgtgtgtgagcacatgggtgagcacgtgtgtgtgagcacatgggtgagagcacgagtgtccgtgtgtgagcacgtgagagtgagcacgagggtcagtgtg

SEQ ID NO: 462618 - DNA, 201 bp, Homo sapiens
gagcacatgggcgagagtacgtgagcacatgggtgagagtgagcacgagtgtccgtgtgtgagcacatgggtgagagtgagcatgagtgtccatgtgagtgtgagcacatgggcgagtgagcacgtgagtgtggcacatgggcgagagtgagcacgagtgtccatgtgagtgtgagcacatgggcgagagtgagggtgcat

SEQ ID NO: 462619 - DNA, 201 bp, Homo sapiens
tgagcacatgggcgagagtacgtgagcacatgggtgagagtgagcacgagtgtccgtgtgtgagcacatgggtgagagtgagcatgagtgtccatgtgagtgtgagcacatgggcgagtgagcacgtgagtgtggcacatgggcgagagtgagcacgagtgtccatgtgagtgtgagcacatgggcgagagtgagggtgca

SEQ ID NO: 462620 - DNA, 201 bp, Homo sapiens
ctgaagagtgctgctccgggctctgggctctggcaggcgaagggcgtggcagcttggctcaggggagccctgctgacagccaggtatgctccagcctccaraactgctgcctgacgggggccggctgcggggtcctgtccagcacactacgcaccctgcccaccctgcaggagctgcacctcagcgacaacctcttggggg

SEQ ID NO: 462621 - DNA, 201 bp, Homo sapiens
gtgagcacatgggcgagagtacgtgagcacatgggtgagagtgagcacgagtgtccgtgtgtgagcacatgggtgagagtgagcatgagtgtccatgtgagtgtgagcacatgggcgagtgagcacgtgagtgtggcacatgggcgagagtgagcacgagtgtccatgtgagtgtgagcacatgggcgagagtgagggtgc

SEQ ID NO: 462622 - DNA, 201 bp, Homo sapiens
tgtgagcacatgggcgagagtacgtgagcacatgggtgagagtgagcacgagtgtccgtgtgtgagcacatgggtgagagtgagcatgagtgtccatgtgagtgtgagcacatgggcgagtgagcacgtgagtgtggcacatgggcgagagtgagcacgagtgtccatgtgagtgtgagcacatgggcgagagtgagggtg

SEQ ID NO: 462623 - DNA, 201 bp, Homo sapiens
tggtctgaggagatggaggaccggctgcaggccctggagaaggacaagccatccctgagggtcatctcctgaggctcttcctgctgctgctctccctggaygaccggcctcgaggcaaccctggggcccaccagcccctgccatgctctcaccctgcatatcctaggtttgaagagaaacgctcagatccgcttatttctg

SEQ ID NO: 462624 - DNA, 201 bp, Homo sapiens
tttgtttgctgtttcccgtgtgcctctcgccaggggctttccgtgggtggctggtcatcctgggctgggcaccaggtgcagagtgaggcccgggagccctrgacagtgagccctgcaggccgagtcatggctgcgtttctcgagggcttcctcctgatgggggattttcagttccctgccaggggacaccatcctggctgc

SEQ ID NO: 462625 - DNA, 201 bp, Homo sapiens
gggacggtgagccttggggacggccccacctgagggtcctgagttgccgagcacaggtgtccgtcgcgccccccaggcccaggcctgctctgccggtcagygcggtgccaggcacgcccggcaccctgacccccgccctgcttcacccaggttggccgactgcgatgtgagtgacagcagctgcagcagcctcgccgcaac

SEQ ID NO: 462626 - DNA, 201 bp, Homo sapiens
gcgatgtgagtgacagcagctgcagcagcctcgccgcaaccctgttggccaaccacagcctgcgtgagctggacctcagcaacaactgcctgggggacgcsggcatcctgcagctggtggagagcgtccggcagccgggctgcctcctggagcagctggtgtatgtgcacgcgctgggcgggtggtgcggccagggctgcc

SEQ ID NO: 462627 - DNA, 201 bp, Homo sapiens
ccggctgcaggccctggagaaggacaagccatccctgagggtcatctcctgaggctcttcctgctgctgctctccctggacgaccggcctcgaggcaaccytggggcccaccagcccctgccatgctctcaccctgcatatcctaggtttgaagagaaacgctcagatccgcttatttctgccagtatattttggacactt

SEQ ID NO: 462628 - DNA, 201 bp, Homo sapiens
gcgaaggactcctggacccccagtgccgcctggaaaagctgcagtgagtttgtgtcctgccccagggcccatgctggccgctgcctgtcccccagccagcmccctacatagaacatcgcctgccaggagccgtgaggaggggactcaggtcacaggggccttgtggtgctctcctttccccatgatgctgggtctggggcc

SEQ ID NO: 462629 - DNA, 201 bp, Homo sapiens
cgtgtgtgagcacatgggcgagagtgagcatgagtgtccgtgtgtgagcacatgggcgagagtacgtgagcacatgggtgagagtgagcacgagtgtccgwgtgtgagcacatgggtgagagtgagcatgagtgtccatgtgagtgtgagcacatgggcgagtgagcacgtgagtgtggcacatgggcgagagtgagcacg

SEQ ID NO: 462630 - DNA, 201 bp, Homo sapiens
gtgagcacatgggcaagaatgagcacgagtgtccgtgtgtgagcacatgggcgagagtgagcatgagtgtccgtgtgtgagcacatgggcgagagtacgtkagcacatgggtgagagtgagcacgagtgtccgtgtgtgagcacatgggtgagagtgagcatgagtgtccatgtgagtgtgagcacatgggcgagtgagca

SEQ ID NO: 462631 - DNA, 201 bp, Homo sapiens
agtgtgtgtgagcacatgggcgagagagcatgagtgtccgtgtgtgagcacatgggtgagagcacgagtgtccgagtgtgagcacatgggtgagtgagcaygagtgtccgtgtgtgagcacgtgagagtgagcacgagggtccgtgtgtgagcacatgggcaagaatgagcacgagtgtccgtgtgtgagcacatgggcga

SEQ ID NO: 462632 - DNA, 201 bp, Homo sapiens
gagtatctgtgtgagcacgagtgtccgtgtgtatgtgagcacacatgggtgaggcgagtgtgagcacgtgtgtgagcatatgagtgtgagcatgggtgtcygtgagcatgtgagagtgagcacgtgtccgtgtgagcacgtgagtgagcacgagggtccgtgtgtgagcacatgggcaagaatgagcacgagtgtccgtgt

SEQ ID NO: 462633 - DNA, 201 bp, Homo sapiens
tgtgagcacatgggcgagagggagcacgagtgtgtgtgagcacatgggcgagagagcatgagtgtccgtgtgtgagcacatgggtgagagcacgagtgtcygagtgtgagcacatgggtgagtgagcacgagtgtccgtgtgtgagcacgtgagagtgagcacgagggtccgtgtgtgagcacatgggcaagaatgagcac

SEQ ID NO: 462634 - DNA, 201 bp, Homo sapiens
gtgtgagcacgagtgtccgtgtgtatgtgagcacacatgggtgaggcgagtgtgagcacgtgtgtgagcatatgagtgtgagcatgggtgtccgtgagcaygtgagagtgagcacgtgtccgtgtgagcacgtgagtgagcacgagggtccgtgtgtgagcacatgggcaagaatgagcacgagtgtccgtgtgtgagcac

SEQ ID NO: 462635 - DNA, 201 bp, Homo sapiens
tgagtgtgagcacatgggcgagagggagcacgagtgtgtgtgagcacatgggcgagagagcatgagtgtccgtgtgtgagcacatgggtgagagcacgagkgtccgagtgtgagcacatgggtgagtgagcacgagtgtccgtgtgtgagcacgtgagagtgagcacgagggtccgtgtgtgagcacatgggcaagaatga

SEQ ID NO: 462636 - DNA, 201 bp, Homo sapiens
cctgcatatcctaggtttgaagagaaacgctcagatccgcttatttctgccagtatattttggacactttataatcattaaagcactttcttggcaggagrggctcttgtccttcctggggtccttgcgaggcgctggcattggagacgacaccaccccacttggcttctctccctgcctaagggaccccgcaccagggaa

SEQ ID NO: 462637 - DNA, 201 bp, Homo sapiens
tgtccgtgtgtgagcacatgggtgagcacgtgtgtgtgagcacatgggtgagagcacgagtgtccgtgtgtgagcacgtgagagtgagcacgagggtcagwgtgtgagcacatgggcaagaatgagcacgagtgtccgtgtgtgagcacgtgagagtgagcacgagggtccgtgtgtgagcacatgggcaagaatgagcac

SEQ ID NO: 462638 - DNA, 201 bp, Homo sapiens
tgtccgtgagcatgtgagagtgagcacgtgtccgtgtgagcacgtgagtgagcacgagggtccgtgtgtgagcacatgggcaagaatgagcacgagtgtcygtgtgtgagcacatgggtgagcacgtgtgtgtgagcacatgggtgagagcacgagtgtccgtgtgtgagcacgtgagagtgagcacgagggtcagtgtgt

SEQ ID NO: 462639 - DNA, 201 bp, Homo sapiens
cacgagggtccgtgtgtgagcacatgggcaagaatgagcacgagtgtccgtgtgtgagcacatgggtgagcacgtgtgtgtgagcacatgggtgagagcaygagtgtccgtgtgtgagcacgtgagagtgagcacgagggtcagtgtgtgagcacatgggcaagaatgagcacgagtgtccgtgtgtgagcacgtgagagt

SEQ ID NO: 462640 - DNA, 201 bp, Homo sapiens
gagcacgagggtccgtgtgtgagcacatgggcaagaatgagcacgagtgtccgtgtgtgagcacatgggtgagcacgtgtgtgtgagcacatgggtgagadcacgagtgtccgtgtgtgagcacgtgagagtgagcacgagggtcagtgtgtgagcacatgggcaagaatgagcacgagtgtccgtgtgtgagcacgtgag

SEQ ID NO: 462641 - DNA, 201 bp, Homo sapiens
ctcccccagctctgcctccattgccgcctcccattttgactcgatggaactgcttcccccagagttgcccccccgcatccccattgaagagggacccccarcagggacagttcatcccctctcagccccctaccctcccttggacactccggaaacagccacaggtaccggaggtgtgagtgtgcacgtctccaggcctgg

SEQ ID NO: 462642 - DNA, 201 bp, Homo sapiens
tcaccagcttaggagtcgcagggtcagcgggcctgaagggggctgggtctgtctgcggtgcggaggattgggtgggcctgtgtgagccgaggtggccgctrgctggagattggtttgcacttcttggctgggttcccccgtgctccatgactcctgcatctcctgattgtttctcgttggtttggagttgtccctgcggtt

SEQ ID NO: 462643 - DNA, 201 bp, Homo sapiens
gaggccgaggtgggaggatcacttgaggtcaggagttcgagaccagcctggccaacgtggtggaacctcatctgtactaaaaatacaaaaattagctggaygcggtgatgcacacctgtaatcccagctacttgggaggctaaggcaggaggattgcttgaacccgggagatggaggttgcagtgaaccgagattgcatca

SEQ ID NO: 462644 - DNA, 201 bp, Homo sapiens
gctaaggcaggaggattgcttgaacccgggagatggaggttgcagtgaaccgagattgcatcactgcactccagtctgggcaacagagtgactctgtctcaaaaaaaaaaaaaaagatagttgagaggtggcctaggtggaccagccatgcatggcttcccagaggaggctacactgtcccccatcaggttcagcagttca

SEQ ID NO: 462645 - DNA, 201 bp, Homo sapiens
cattcctcaaaccactaccatttggcctctgctgaaactactctcaccaagtcacgcagcagtctcttagttatcaacgccttctagagaccatggcagcrcaccctgtgatcccccacggatccctttatatcatttgtgtttgtgtttgcccatttccccccgacacacacacatcttatactcactcccacactccct

SEQ ID NO: 462646 - DNA, 201 bp, Homo sapiens
ctcccacttctttaccttccactcattcctcaaaccactaccatttggcctctgctgaaactactctcaccaagtcacgcagcagtctcttagttatcaaygccttctagagaccatggcagcacaccctgtgatcccccacggatccctttatatcatttgtgtttgtgtttgcccatttccccccgacacacacacatc

SEQ ID NO: 462647 - DNA, 201 bp, Homo sapiens
tgccatgttggccaggcgggtctcaaactcctgacctcaggtgatccgcctgccttggcctcccaaagtgctggaattacaggcgggagccaccgtgcccrgcctcctcccacttctttaccttccactcattcctcaaaccactaccatttggcctctgctgaaactactctcaccaagtcacgcagcagtctcttagtt

SEQ ID NO: 462648 - DNA, 201 bp, Homo sapiens
tgatccaccccacttggcctcccaaagtgttgggatcacaggcgtgagccactgtgcctggccttattttattttattatttatttattttttttgagacrgagtctcgctctgtcgcccaggctggagtgcagtggcgcgatctcgactcactgcaagctccacctcccgggttcatgccattttcctgcctcagcctcc

SEQ ID NO: 462649 - DNA, 201 bp, Homo sapiens
tggcacgatcttggctcactgcgacctccacctcccaggttcaagcgattctcctgcctcagcctcccaagtagctgggattacaggtgcgtgccaccacrcctggctaattttagtagagacagggttttgccatgttggccaggcgggtctcaaactcctgacctcaggtgatccgcctgccttggcctcccaaagtgc

SEQ ID NO: 462650 - DNA, 201 bp, Homo sapiens; identical to SEQ ID NO: 198447

SEQ ID NO: 462651 - DNA, 201 bp, Homo sapiens
gttgggggagtaatagaaggagcatctttgatgcctcttaagagttaggggctttgtcctatagttcaacaaaggacacctttttttttttgtttgtgtgtttaatttttttatttttaaaaaattattgtttgtgtttttgtttttgagatagggtcttgttatgtctcccaggctggagtgcagtggtgcagtcacagc

SEQ ID NO: 462652 - DNA, 201 bp, Homo sapiens
ttagtaagtttcctgaggttttcaatggaaagcaaattttatattcacattcatttttataaataaagatgggtcactgtaccttcttggccctcagcttyattatctacaaattgggggtggaggttaaatcatatgatgatctctaagatttcttgtagctctaaaacttctaagaggaggatggggtctggtgcaatg

SEQ ID NO: 462653 - DNA, 201 bp, Homo sapiens
attcacaccgtcttcggtctcctggggtcggcgccgagtgggaggatggcggaagtaagtatgaaggtgcccttccctcccgccgctgttctctatggtckcttccttcagcgacgggaaagggggtcctgacgcctgcgcggaaccgggctgggcgctcgtcgcgtagtgggtgggggcgcagggagcgggagccgccgc

SEQ ID NO: 462654 - DNA, 201 bp, Homo sapiens; identical to SEQ ID NO: 198450

SEQ ID NO: 462655 - DNA, 201 bp, Homo sapiens
ttgggggagtaatagaaggagcatctttgatgcctcttaagagttaggggctttgtcctatagttcaacaaaggacacctttttttttttgtttgtgtgtttaatttttttatttttaaaaaattattgtttgtgtttttgtttttgagatagggtcttgttatgtctcccaggctggagtgcagtggtgcagtcacagct

SEQ ID NO: 462656 - DNA, 201 bp, Homo sapiens; identical to SEQ ID NO: 198451

SEQ ID NO: 462657 - DNA, 201 bp, Homo sapiens
tgggggagtaatagaaggagcatctttgatgcctcttaagagttaggggctttgtcctatagttcaacaaaggacacctttttttttttgtttgtgtgtttaatttttttatttttaaaaaattattgtttgtgtttttgtttttgagatagggtcttgttatgtctcccaggctggagtgcagtggtgcagtcacagctt

SEQ ID NO: 462658 - DNA, 201 bp, Homo sapiens
gggggagtaatagaaggagcatctttgatgcctcttaagagttaggggctttgtcctatagttcaacaaaggacacctttttttttttgtttgtgtgtttaatttttttatttttaaaaaattattgtttgtgtttttgtttttgagatagggtcttgttatgtctcccaggctggagtgcagtggtgcagtcacagcttc

SEQ ID NO: 462659 - DNA, 201 bp, Homo sapiens
gtactttttggtctgaccaaacacacatacccgacccacacacacaaacacacaaagatgtgtcacccagtcccaactcatatttctagattcggcctccmctatagccttttctcctgaccctctgttctgagttccagctgcacagtgcctagcacacaggctgtattcagtgaatgaacacatgaatcatggaatctt

SEQ ID NO: 462660 - DNA, 201 bp, Homo sapiens
ggggagtaatagaaggagcatctttgatgcctcttaagagttaggggctttgtcctatagttcaacaaaggacacctttttttttttgtttgtgtgtttaatttttttatttttaaaaaattattgtttgtgtttttgtttttgagatagggtcttgttatgtctcccaggctggagtgcagtggtgcagtcacagcttcc

SEQ ID NO: 462661 - DNA, 201 bp, Homo sapiens
acgcaggccccaagcaaaccttagccaggcttctgcacccagcctcgccactttttcagtcagcgtcctgccagccaccgctctggctggaaataatggtkgttttctccaagcttctggaacactttgtagaaatctttgttttgttcttactctgcatctctgtgtctgtcaggggcaatcacgttttctcttgactct

SEQ ID NO: 462662 - DNA, 201 bp, Homo sapiens
caagttggtcttgaactcctgggctcaagtcattctcacacctcagcctcccaaaaggctgggattacaggcgtgagccactgtgtgcagccagaattccktgtgtgtgtgtgtgtgtgtgtgtgtgtgtgtgtgttttgagacagaggcttgctctgtcgcccaggctgcagtgcagtgaaacaatctcggctcactgca

SEQ ID NO: 462663 - DNA, 201 bp, Homo sapiens
gtgtgtgtgtgtgtgtgtgtgtgtgtgtgttttgagacagaggcttgctctgtcgcccaggctgcagtgcagtgaaacaatctcggctcactgcaacctcygcctcccgggttcaagcaattcttctgcctcagcctcccaggtagctaggattacaggtgtgcaccactacgtccagctaatttttgtatttttagtaga

SEQ ID NO: 462664 - DNA, 201 bp, Homo sapiens
acgcatgtggggagcaggcgccttgaggggaaggcaaggcttttttctcccaggatgggggaggctgccctgacaccccggtttccctccctctctccttcctgaagggtccttcctgttccagggggagccagagggcggtgagggggaccagcccctctcagggtatccttggttccacgggatgctctctcggctcaa

SEQ ID NO: 462665 - DNA, 201 bp, Homo sapiens
agactgagaccaagttcaaatcaacattgtttgagcctctggctccagccatgcctgaagtcatcctatctctgatttttcaattatttaaaccaatagaccccccccccccggctgttttcatgtttaagttagctggaattagggtttctagtagttatagcggaaagcatcccgagttttacatccctgcttatgagg

SEQ ID NO: 462666 - DNA, 201 bp, Homo sapiens
atacatacatatatatttatatatacatacatatatatttatatatatacatatatatttatatatatacatatatatttatatatatacacatatatatktatatatatacacatatatatgtatatatatacacatatatatgtatatatatacacatatatatttatatatatacacatatatatttatatatatatt

SEQ ID NO: 462667 - DNA, 201 bp, Homo sapiens
atatatttatatatttacatatatatttatatatatatttacatatatatttatatacatacatatatatttatatatacatacatatatatttatatatmtacatatatatttatatatatacatatatatttatatatatacacatatatatgtatatatatacacatatatatgtatatatatacacatatatatgta

SEQ ID NO: 462668 - DNA, 201 bp, Homo sapiens
actgagaccaagttcaaatcaacattgtttgagcctctggctccagccatgcctgaagtcatcctatctctgatttttcaattatttaaaccaatagaccscccccccccggctgttttcatgtttaagttagctggaattagggtttctagtagttatagcggaaagcatcccgagttttacatccctgcttatgaggaa

SEQ ID NO: 462669 - DNA, 201 bp, Homo sapiens
ctgagaatgaagacagtccagggagccaggcgtgggtcatgcctgtggtctcagctactggggaggctgaggtgagaggactgcctcagcccaggagttcraagctgcagtaagctatgattgtaccactgcactccagcccaggtgacagagcaagaccctgtatcaggaaaaaaaaaaagagagagagaaaaagaaaga

SEQ ID NO: 462670 - DNA, 201 bp, Homo sapiens
gccgaggcaggaggatcgcctgagctcaggagttcaaggctgtggtgaggtatgatcatgacactgcaccccaccgtgagtgacagagaaagaccccatcttttttttttttttttttttttttttggagacagagtctcactctgtcgcccaggctggagtgcaatggggcgatctcggctcactgcaacctccacctcc

SEQ ID NO: 462671 - DNA, 201 bp, Homo sapiens
ctcgggtgattcgcctgcctcagcctcctaatgtgttgggattacaggtgtgagccaccatgcccagcctatttatttaagttttattttaggtttggggrtacatgtgaaggtttatcacatagatagacacctgtcatgggggtttgttatacatgtcatcactcaggtattaagcccagtacccaacagataaattcc

SEQ ID NO: 462672 - DNA, 201 bp, Homo sapiens
cagcctcccaagcagctgggattacaggcacgcgccaccacacgtggctaattttttatatttttggtagagatgaggtttcgccatgttggctaggctgstctcaaactcctgacctcaagtgatctgcccaccatagcctcccaaagtgctgggattgataacagtgggattgattacaggactgagccaccatgccca

SEQ ID NO: 462673 - DNA, 201 bp, Homo sapiens
ggctggagtgccgtgggacgattttggctcaccacagcctccgcctcccagattcaagtgattctcctgcctcagcctcctgagtagctgagattacaggyatgtgccaccatgtccagctaatttttgtatttttagtagaggtggggtttcactatgttggccaggatggtcttgaactcctgaactcatgatgcgccc

SEQ ID NO: 462674 - DNA, 201 bp, Homo sapiens
atgatgcgcccgcctcagcctcccagtgttgggattacaggcgtgagccactgcgcccggccatcttagaacatttttttttttgagacggagtctcgctstgtcgcccaggctggagtgcagtggtgcgatctcggctcactgcaagctctgcctcccaggttcacgccattctcctgcctcagcctccccagtagctgg

SEQ ID NO: 462675 - DNA, 201 bp, Homo sapiens
ccgctgttctctatggtctcttccttcagcgacgggaaagggggtcctgacgcctgcgcggaaccgggctgggcgctcgtcgcgtagtgggtgggggcgcwgggagcgggagccgccgccgccgccgccgccgccggagctaacctcggggaccgagatgcaggtgggaccggaaccggaacccccctcttcaagtacctt

SEQ ID NO: 462676 - DNA, 201 bp, Homo sapiens
atgcatagggaaggcagaaccagagatggtgagccacaggttcctgatatcttctggcccctgtgttcacctgtctgaatctgtccgctctggacttttcrattacttgggccatagcttcctttactgtttaggccagctggagccgggtcaatcagacactggatgggtggaggatctcactgtgctcatgctttcaac

SEQ ID NO: 462677 - DNA, 201 bp, Homo sapiens
aggcactcggccccggagagtgcagcagacagggctggtcccgaggtggatgcggccccggaaaatgggcggctggggggtgtccagggagtagggtcggrtcggagtatatggaccaccgggcccggagggtccgagccgagagcggagcctgcaccctccacctcccgcccttcgggaaatatcagaactgagccagga

SEQ ID NO: 462678 - DNA, 201 bp, Homo sapiens
cctcaagtgatccgcccgcctcggcctcccaaagtgctgggattacaggcgtgagccactgcgtccggccttgacctcaattctttttttttttttttttkttgatagggagtctagctctgttgcccgcgctggagtgccgtggcgccatctcggctcaccgcaacctctgcctcccgggttcaagctgttctcctgcct

SEQ ID NO: 462679 - DNA, 201 bp, Homo sapiens
agttcaaatcaacattgtttgagcctctggctccagccatgcctgaagtcatcctatctctgatttttcaattatttaaaccaatagaccccccccccccggctgttttcatgtttaagttagctggaattagggtttctagtagttatagcggaaagcatcccgagttttacatccctgcttatgaggaagaagggtttc

SEQ ID NO: 462680 - DNA, 201 bp, Homo sapiens
gccagaattccgtgtgtgtgtgtgtgtgtgtgtgtgtgtgtgtgtgttttgagacagaggcttgctctgtcgcccaggctgcagtgcagtgaaacaatctyggctcactgcaacctctgcctcccgggttcaagcaattcttctgcctcagcctcccaggtagctaggattacaggtgtgcaccactacgtccagctaatt

SEQ ID NO: 462681 - DNA, 201 bp, Homo sapiens
gagcagggatggtgcagagggaagagctgctgagtttcatgggggctgaggaggcagcccctgacccagccggagtgggccggggaggaggggtggctggrcctccttcagggggaggagggcagcctcagtggcagaagtgtcgcctgctgcttcgaagtgaaggagaaggaggaggaggaagtcgcctggagttctttg

SEQ ID NO: 462682 - DNA, 201 bp, Homo sapiens
aagagggacccccaacagggacagttcatcccctctcagccccctaccctcccttggacactccggaaacagccacaggtaccggaggtgtgagtgtgcaygtctccaggcctgggtgcctaccttcctgaccacctctcctgggatcccgagggagctggcccaggggagttggggacgcatgtggggagcaggcgcctt

SEQ ID NO: 462683 - DNA, 201 bp, Homo sapiens
ctatataacaaacactcttctaaaactgagaagaggctgggcacggtggctatagtgccagcctatagtcccagcagtttgggaggctgaggtgggaggayggtttgaagccaggagttcaagaccagcctgggcagattaggagaccctatctctacaaaaaaaaatttaaaattagccaggcacagtagcatgcagcta

SEQ ID NO: 462684 - DNA, 201 bp, Homo sapiens
gccaagtatggtggctcatgcctgtatgtaatcccagcactttaggaggccgaggagggtggattgcttgagcccaagagtttgagaccagcctgggcaayatggcaagaacccgtctctacaagaaatagaaaaattagctgggcatggtagtgcacccctggagtcccaactacttggaaggctgaggcaggaggatca

SEQ ID NO: 462685 - DNA, 201 bp, Homo sapiens
  misc_feature (1)...(201): n = A,T,C or G
catctaaatgcccaaaattatcttactattttgcttgttttcttcccatctcaccagctcgtggcactaagaacttatttatttatttatttatttatttwttttttgagacagagtcttgttnnnnnnnnnnnnnnnnnnnnnnnnnnnnnnnnnnnnnnnnnnnnnnnnnnnnnnnnnnnnnnnnnnnnnnnnnnnnnn

SEQ ID NO: 462686 - DNA, 201 bp, Homo sapiens
cccgccccatgaccctccctctggcccctgggacctcattccttacaagggagaacacagacagcctggagctgtcctgcctgaatcactcggagagtctmcccagccaggacctgctgcttggacccagcgagagcaatgaccgcctgtcgcagggtaagggtggagccttagagagctcggagcctcggaacctgccat

SEQ ID NO: 462687 - DNA, 201 bp, Homo sapiens
gcaccagcactagtttcagcagtgaagccagcattagctttggtggcatgccttgtaccagtgccagctttagtggtggagtcagctctagttttagtggyccactcagcaccagtgccactttcagtggtggagccagctctggctttggaggcacactcagcaccacggctggctttagtggtgtactcagcactagca

SEQ ID NO: 462688 - DNA, 201 bp, Homo sapiens
tgtttggggctttgtctggccctgaagtgttctgggtatactgatctggttcagaaagtgcttagtcagtgcctttcttatactagctttagagggatggrcatcctgtgtcctagaactgatactgtctaaaattcccatgggcagacctttccaggactgggccagactcaacacaaggcccttgcagtggggtgcgct

SEQ ID NO: 462689 - DNA, 201 bp, Homo sapiens
gcagatgtgggattgagctggttagaaactgtccggtttaccaaggcgcatgcgcgcggagggcattgaagaatggttcttttgggatagaggtgggcctragatggggggtgggggcgcctctagtcggtgcgcatgcgcactatcgagttgcggagggggcgtgtaaaggggtggggtcgtagaactgactctctcgga

SEQ ID NO: 462690 - DNA, 201 bp, Homo sapiens
ggctcttatcttgagttgttcctggcctggcagaggaacgaaactccttcctggaagacagtgaaagataagctcaggactcagggtggccaatggcaagrtcaggatcaggctccactacagcaaggctgagggagggggttagagggactttctgtctggagcaggcaaggtgaggagacagagccatctctttcacct

SEQ ID NO: 462691 - DNA, 201 bp, Homo sapiens
attttcatttgaaattgaggccagagcccaagaaaatgcagatgccagcaccaacgtcaacttcagcagaggagctagtaccagggctggcttcagcgatsgtgctagtattagcttcaatggtgcacccagctccagtggtggcttcagtggtggacctggcattacctttggtgttgcacccagcaccagtgccagctt

SEQ ID NO: 462692 - DNA, 201 bp, Homo sapiens
ctggatcagtatgcatgaagcgcaagagtgtcagtggggctgaaggttctgggagagaaagaagggactcacattgactgagtgcttgtgttgtaccaggwtgacagccattcttccatcttcttggcaacctgaggaagggagaatatgattttcccattttactgaataatagaccaaggcttgcaaggtctaagtgcc

SEQ ID NO: 462693 - DNA, 201 bp, Homo sapiens
aagagcccaaatggggattggagaggaagctgtggctgggccctggaattgggatgacatggatatcgactgcctaacaagggaagagttaggcgatgatkctcaggcctggagcagattttcatttgaaattgaggccagagcccaagaaaatgcagatgccagcaccaacgtcaacttcagcagaggagctagtaccag

SEQ ID NO: 462694 - DNA, 201 bp, Homo sapiens
ggaaagttgaaagtaggtatggaggggaggagactgacaggcaggaacggagacccccctctggaggcggaaagaggcaggaccacttccggccagggagrgggataggctcagacacaaggagaggcttggagagagcagacgccttctggattcaagaagacgaggtgagctgaggtacctggctttagtgaagaccct

SEQ ID NO: 462695 - DNA, 201 bp, Homo sapiens
gacattcctgctgtcaggtttgctgtctctgtagaagcttcccaggaaagcaggcctgtcattgcttgcctcttccgatggagtgcctggcctggctttgrcagagtggttctcaaggagggcttcctggtgtggctggatcagtatgcatgaagcgcaagagtgtcagtggggctgaaggttctgggagagaaagaaggg

SEQ ID NO: 462696 - DNA, 201 bp, Homo sapiens
acctgttactcggcctcccagaaagatggataggagaaatgactacggatatagggtgcctctatttcaggtgaggcctctctgcattctctctaggccayctgccccatcctgagttcacttactgctcttcagaccccttccaccgtgtagtttcataattccctgcctaactcgtctcagtcctcccttacatggtga

SEQ ID NO: 462697 - DNA, 201 bp, Homo sapiens
ctggtgtatcttttgcggatggctgctgaaacataaaccttctttctgtcctgttgaaacataaaccttctttctgtcctgttattcccttaggaccaagracacacccaagctgggtctcctcatggtgattctgagtgtcatttttatgaatggcaacaaggccagtgagggtgagtggctgggcatgcagctgaatgg

SEQ ID NO: 462698 - DNA, 201 bp, Homo sapiens
agtgccagcttcagcaatacagccagcattagctttggtggtacactgagcactagctccagcttcagcagcgcagccagcattagctttggttgtgcacmcagcaccagcactagtttcagcagtgaagccagcattagctttggtggcatgccttgtaccagtgccagctttagtggtggagtcagctctagttttagt

SEQ ID NO: 462699 - DNA, 201 bp, Homo sapiens
gaaaattatatctagaatgtaagaagaactcttccaattccataataagaggcaaataatccaattaaaaatgagccaaagatctgaatagatattccccycacgaagatacacaaatggccaatatgcacatggaaagctgttcaatgtcattagtcatcaggggatgcaaatcaaaaccaccaggagataccactttat

SEQ ID NO: 462700 - DNA, 201 bp, Homo sapiens
caagttcgtggcttctggaggggaagtcaatgcattcaatgtacagaatacagctggaaactgctcacattgggcctgtgtcctcatttgtacagtgacargtttgggctatgatttgattccctgataacctccaagacttcagaggatcaagggaaaacatgcatttaacacctttgcagcacttggcacacttgctat

SEQ ID NO: 462701 - DNA, 201 bp, Homo sapiens
gacaatcgtgagtgggagagaaagggcggagtctctcctccaggggcagcttagctctggagctaccagaatcagcagcatggtacctgatccaaaggcayagcatggatatggacttccctggattcctgggctctttgacttgggggccacttggttggggataggggctttctgggctgggccaccactgggtagaaa

SEQ ID NO: 462702 - DNA, 201 bp, Homo sapiens
acaacagtgcttagctcctagggttgtggagagaaatcaattaaacagtaaatataaagtgtttgtaacaatgtctgccatatgggaaatacatgagaaaygttagctgctcttcttgttaaatacaggctatcgacaccagcccatttaaagttttacgcaatgtagagtgattcaggtgtgactaggctgcagactgat

SEQ ID NO: 462703 - DNA, 201 bp, Homo sapiens
tcatttattattattttaatgcttgtatttcccacttgtctgtaacaccctacaggagccatttctattttgtctgatgctttgtctttggtgacaatacscaagcttggtgcagaataggtaacacctatttctggtggagaacctgactcttgcccctggcctggcctggccatccctgccccacctgctgctgcccct

SEQ ID NO: 462704 - DNA, 201 bp, Homo sapiens
ggcaatcaggagagcaatgccccacccctctcacaggcagtcaagcactgtcctgctctactcaccacagcccctgtccagatggcagctcccgaggtgaygaggagggtgtagtcgcggatgtagaaaaatcctcctaggactgcactcaagatccccagcacgatctgcatcacctgaaagacaaaggacccaagatcc

SEQ ID NO: 462705 - DNA, 201 bp, Homo sapiens
acaccctacaggagccatttctattttgtctgatgctttgtctttggtgacaatacgcaagcttggtgcagaataggtaacacctatttctggtggagaamctgactcttgcccctggcctggcctggccatccctgccccacctgctgctgccccttccccttggccacctaccttcagcatgtccatgaaggaggtaca

SEQ ID NO: 462706 - DNA, 201 bp, Homo sapiens
gcctgcaacagggcaggagattggggtgacctccagcctgaacctggtcccctcccatgcccttccctgaacttacccagtatgtaccaccccgtttctcrtaaatgaaggcagcagctccagccagcacagcctggggagagattgagccaggagcaggcttagcacaggaaatgcaactcctctcccacgagagagcct

SEQ ID NO: 462707 - DNA, 201 bp, Homo sapiens
tagtcgcggatgtagaaaaatcctcctaggactgcactcaagatccccagcacgatctgcatcacctgaaagacaaaggacccaagatcccggctcctagktggacctgccactgcagggattaaccgctaaaaccccaaaaagagagggagaggtagagagagagagaaagaaagaagagaagagaagagaagagaagag

SEQ ID NO: 462708 - DNA, 201 bp, Homo sapiens
agtcgaagccgaagtgagctgtgattgcgccactgcactccagcctgggcaacagagcgagaccctgtctcaaaacaacaaccaccaccaccaccaccacmacaacaacaacaaacaaagactgcacaatttccttcaagatatagcaattggctccttgtcagtatctaactggttttgaagttcttcctgttctaattc

SEQ ID NO: 462709 - DNA, 201 bp, Homo sapiens
ctgggggcagcacctggtcggccatggagtggatctgcaggcggtagctgcgcttgtggccccaggggttctcctgggggctggtaaagagcaggtacttrggcagcttccttttgaagcggaaggccgcctggcgctcccaggagtactgcgtctgctccagagttggctggaccacgcggtgtcttgggctccaggggt

SEQ ID NO: 462710 - DNA, 201 bp, Homo sapiens
cctggaaaagggcttttgtgtctatgctaggatgtgtgtttgagaaaaaagactcactgtgtcagggagcatgccatgcttacgtgtgtgttcgtgtaaattttttttttttttttttttgcgatggagtctgttacccaggctggagtacagtggcgccatctcagctcactgcaacctctgcctcccgggttcaaacta

SEQ ID NO: 462711 - DNA, 201 bp, Homo sapiens
agagcaggtacttaggcagcttccttttgaagcggaaggccgcctggcgctcccaggagtactgcgtctgctccagagttggctggaccacgcggtgtctygggctccaggggttggtgatgttttctagcttcatctgcagtgtctggaagctgttcttggtgcctggaggtatgcagggagaaggagaacgagaatcaa

SEQ ID NO: 462712 - DNA, 201 bp, Homo sapiens
ccgaggtgcaggcaagactcagagccattcatggagcagctccattgataaaaaagaactcaatgcaggcactgatggtgctcagagaaatctgctttgcttttttttttttcatcttttttttttttttacttgacataacttgtatgtttttcttgggtgaaacatgatgttttgatatacatatacattgtagagtgg

SEQ ID NO: 462713 - DNA, 201 bp, Homo sapiens
tctaaagttcctctcatctgttgcccggcctccaaacccggtggtcctttattaattcagctgtggcatgggcgttcatactctcagcttcctttactgcrtttcctactgtttctggcttcaagttgttgaagtcaaaataaaaaagtagagactgagctctaaatttaaccgtttatttgggaagaaaggattgccact

SEQ ID NO: 462714 - DNA, 201 bp, Homo sapiens
actcagagccattcatggagcagctccattgataaaaaagaactcaatgcaggcactgatggtgctcagagaaatctgctttgcttttttttttttcatcttttttttttttttacttgacataacttgtatgtttttcttgggtgaaacatgatgttttgatatacatatacattgtagagtggttaaatttagctaatt

SEQ ID NO: 462715 - DNA, 201 bp, Homo sapiens
tgcaggtgtgtgtcctccatacagcgccactgcctcttgcacgctgacctcataggcaatgcgctctccgccgaagtgcacgttcaggacctgcagcccgraggaggagcgcagccggaaggcaaagctccagccgccgtagagcacagcgttgccctccagcctgaagcgagggccgtggggctggaccaagcgggggcc

SEQ ID NO: 462716 - DNA, 201 bp, Homo sapiens
ggtaatttcatttttctgtttgtggatatccagtttttctaacaccattctattgaagcaattgtcctttttccactgtgctatcttcgcactgctgttgaaaatcaggtggctatgaaggtgtagatttatttctgggctctctatcctgttccattggtttatgcatctgtttttatgccagtaccacgctgttttagt

SEQ ID NO: 462717 - DNA, 201 bp, Homo sapiens
ctgctgtggctgcaatcctagagcaggggcacccatttttctccaggcatgggaggctctgtccagagaggtgactggggctgaggggtaggagccgcccrtgtggtcctggtggccttgttgggtctggcagcattagttattctacccatgccattcttttatggtgatatcatccaggagacaccctgaatattccca

SEQ ID NO: 462718 - DNA, 201 bp, Homo sapiens
ttccactcgttactcttgttgatggagcagcctggtcaggatcaagtatcaccagcacctagtgaggcgctgtcatgggctgaactgtgtcccccaaaatkcatatgttgaagtcgtacccctagtacctcagaatgtgactatatttggaaatagggtctataaagaagtaattaagttaagatgaggtcattagatgag

SEQ ID NO: 462719 - DNA, 201 bp, Homo sapiens
caggctgtctgagtcaagtcccagtgactcatgccactaggacttgctgtgtggccttgggcacgctgcttaaactctctgggccttcatgttcttagttwtaaaatgaaaataatgacaacagtgcttagctcctagggttgtggagagaaatcaattaaacagtaaatataaagtgtttgtaacaatgtctgccatatg

SEQ ID NO: 462720 - DNA, 201 bp, Homo sapiens
cacgaggtcaggagttccagaccagactgctaacatgatgaaaccctgtctctactaaaaatacaaaaattagccgggcgtggtggtgcgtgcctgtaatcccagctactcaggaggctgaggcaggagaattacttgaacccgggaggatgatgtggcagtgagccaagattgagccactgcactccggcctgggtgaca

SEQ ID NO: 462721 - DNA, 201 bp, Homo sapiens
tcttagttttaaaatgaaaataatgacaacagtgcttagctcctagggttgtggagagaaatcaattaaacagtaaatataaagtgtttgtaacaatgtcygccatatgggaaatacatgagaaatgttagctgctcttcttgttaaatacaggctatcgacaccagcccatttaaagttttacgcaatgtagagtgattc

SEQ ID NO: 462722 - DNA, 201 bp, Homo sapiens
atgctctgtgcagccttcatgggagggagagctcagcgagtctgtgccctgacccctccagaccccgctgtgtccttgctgtgtgttggccgtgggtatamctgtctgcttagtctggtgagtcctagtgaagctctgacagcagaggtgccatgaggtgtcacgggtgttcagagaggtgtcctgcaggcgttggcggca

SEQ ID NO: 462723 - DNA, 201 bp, Homo sapiens
tcatggattgcagagccaagagtcactacttgtctgtcctccacattcaggtcagttttcagaaaaaggagatttctcactccaacgagaatgcaaagaawccaaggcggccattgtgtcattatttaacaagttccttcatccatttatgccccagttgaatcagatgcagattctgtgcccggcactgtgctaagtgcc

SEQ ID NO: 462724 - DNA, 201 bp, Homo sapiens
aatcaattaaacagtaaatataaagtgtttgtaacaatgtctgccatatgggaaatacatgagaaatgttagctgctcttcttgttaaatacaggctatcracaccagcccatttaaagttttacgcaatgtagagtgattcaggtgtgactaggctgcagactgatggctttgggggtgaggtagaggtgcccagtcctg

SEQ ID NO: 462725 - DNA, 201 bp, Homo sapiens
ccttgctgtgtgttggccgtgggtataactgtctgcttagtctggtgagtcctagtgaagctctgacagcagaggtgccatgaggtgtcacgggtgttcasagaggtgtcctgcaggcgttggcggcaagtggtgacccagtgtgttccagtggggcacatgctcaggggaaaacagagcaggggcatgtggtgggggcag

SEQ ID NO: 462726 - DNA, 201 bp, Homo sapiens
tttcagaaaaaggagatttctcactccaacgagaatgcaaagaatccaaggcggccattgtgtcattatttaacaagttccttcatccatttatgccccarttgaatcagatgcagattctgtgcccggcactgtgctaagtgcctcacgtgtatattttattcactcctcacaatgaccctgtgagggtcatcagattac

SEQ ID NO: 462727 - DNA, 201 bp, Homo sapiens
gaagcttgcttgcaattccagaaggtctttggtgtttctgaggaaggggatttgccttccatgttaaaatgatgattgatacaaagacaatgaatgctaaygtctttcaccctcagtgttcaagaggactgtgagttatgtattctcagttatgggctcaccaactccgcagagaattggggggatttggattagaagaga

SEQ ID NO: 462728 - DNA, 201 bp, Homo sapiens
agacagaatgcaaaagagtgaaggctgcaatgatggcaggagcagagagcaggccggggggtggttgcaatagtcttggggggcaaggctggttgccaggycagggttgcaggggtggaagtgatgagaagtggccacattctggatgtagctggaagggaggctgggggagatttgctgagggctgggatatgagactcc

SEQ ID NO: 462729 - DNA, 201 bp, Homo sapiens
tccaaggcggccattgtgtcattatttaacaagttccttcatccatttatgccccagttgaatcagatgcagattctgtgcccggcactgtgctaagtgcytcacgtgtatattttattcactcctcacaatgaccctgtgagggtcatcagattacatatgaagaagtgagaaccggctgggcgcggtggctcacgcctg

SEQ ID NO: 462730 - DNA, 201 bp, Homo sapiens
tccgcagagaattggggggatttggattagaagagagtttcaggaacaacctgattttgaggactacaatctgtttccattccacaaaggaaactgcgacraagttaatggagtgaggatggatcgagaaaagagacttgcaaagatttaaagggaaaggggccacatgcacatgatggagttagaccctttcacacacgg

SEQ ID NO: 462731 - DNA, 201 bp, Homo sapiens
atatccactaggatggctagaattcaaaagcaaggtaataacaggtggggccaggaggcagagaaactggaagcctcacaggcagttcatggtgagatgaygcagccacttcggaaaactgtctggctgttcctcaaatgacttaacgttgttatcatataacccagcaatcccactcctgggtatatgctcaagagaaag

SEQ ID NO: 462732 - DNA, 201 bp, Homo sapiens
ggcagagagaaatctttgtgtttcagtctctctcagagtccagtcgggggaaaaaagggcaaggcccagagaagcctgcaacagggcaggagattggggtracctccagcctgaacctggtcccctcccatgcccttccctgaacttacccagtatgtaccaccccgtttctcgtaaatgaaggcagcagctccagccagc

SEQ ID NO: 462733 - DNA, 201 bp, Homo sapiens
gggacagctgatgacaggggctggccctgggctggcatctgggaacttaactttcaggatcctgccccgctgtgccggcctgctgactgtttttacagacwatgtgattagtgaacacctgctttcctattgggaatctggaatcttgttagttgtggtgggcagagagtgtgcctacgtgaccagccccaacctctgccc

SEQ ID NO: 462734 - DNA, 201 bp, Homo sapiens
cagcccagggccggcatctctcgctccacggctctggaatgcaatagaggagatgaacttagttgtcttatgggcagagatgggcttccctcaggttaggrccatggaattttcccatggactgagcttcctccccttgccctgccccaagctggaggctgtcctggggcagctggggccccatgcatagtccccagcgcc

SEQ ID NO: 462735 - DNA, 201 bp, Homo sapiens
tctggtgtctttatgagaagaggtaattggaacacaaacacacacagagggatgaccatgtgatgaggagaacacaggcagaacacagacatccgtgagcstaggagaggtctcagagggaaccaaccttgcagatgccttgggctcaggcttccagcgtccagaactgtgataaataaatgtgtgcgtttcagcctccca

SEQ ID NO: 462736 - DNA, 201 bp, Homo sapiens
ggtgagtctatacagagtgggcactgttaggtctagaagcctgtcctaacagtgcccaataatccactcagctgggcttgaagaacaggaaatctagtatrtcccagtggacaggtggacctgaatcctgtttggctaattctgtaattaagctgggtattttgccacaggctgggtgaaggtaattactctcggcttctg

SEQ ID NO: 462737 - DNA, 201 bp, Homo sapiens
tcagtaaatatgagtgttttagtgctattctgagagtgtaggtaccatgaccagcctacccagctcctgtgcaaactgcacacacccatctgttgacaacmattcctgggtttccattgtgtgcagggcctgtggaggacaatgggaataaccagggggtgatgcttcctgggggaccacatactatctggaacgctctgc

SEQ ID NO: 462738 - DNA, 201 bp, Homo sapiens
ggtcttgaactcctgacctcaggtaatccacccacctcagcctcccaaagcactgggattacaggcgtgagctattgtgcccagctgggatcttgacaaaracactatttctctcctttcacctgtgctgtgtatttttccctcgcctagttcccagacctcactgctatatgtcttctccctggcaggcaggatgacgca

SEQ ID NO: 462739 - DNA, 201 bp, Homo sapiens
ttatttgggaggagagaattgcaatttggggcatacacacagaccaggtggtctccagtatgtctttagaacaaagagaaggttagaggcttataaaaagkagaaatgttacatattgcccttcatgaaagatcataggttttggggagctggtgagctctgatgggtgagcgatggcatgagtaaaactaatcctagagt

SEQ ID NO: 462740 - DNA, 201 bp, Homo sapiens
gaaatgagaaccaagatctcaacccaccctggcagtgctttcagagctgcacagccctaccacactatactgcccttgctgtgcagacacagatatgaaawgccctggctgtgccctggggggcatgaactagagtgagtagagtcagatgtcctcaagtaagggtcaagtaaacaagtaagggtcataaaagggccaggt

SEQ ID NO: 462741 - DNA, 201 bp, Homo sapiens
tgtgccctggggggcatgaactagagtgagtagagtcagatgtcctcaagtaagggtcaagtaaacaagtaagggtcataaaagggccaggtgcagagagygaggtatgtacagggcatggaggagggagtggtccagtcacccagggtggggcagtggtttgggaaatgtttcccagagcaggtggcctttgtactgggt

SEQ ID NO: 462742 - DNA, 201 bp, Homo sapiens
caaggcccagagaagcctgcaacagggcaggagattggggtgacctccagcctgaacctggtcccctcccatgcccttccctgaacttacccagtatgtaycaccccgtttctcgtaaatgaaggcagcagctccagccagcacagcctggggagagattgagccaggagcaggcttagcacaggaaatgcaactcctctc

SEQ ID NO: 462743 - DNA, 201 bp, Homo sapiens
ttgtgaggggaacagatgctagtggtgaggttattacaggccaaaggagcaacctcagcagcaggttgggaagcacaaagattgacccccactctcagcaytggacatatatcatctaggcagaaagtcaacaaagagacattagatttaaactgcactatagacaaagggacctaacaatttgcagaacattctatccaa

SEQ ID NO: 462744 - DNA, 201 bp, Homo sapiens
tgctcttcaatgaatggatactattcctaaatcacatcatggcccaagatagcttgctctagatccacgtttttttttttgttttgttttgttttgttttkttttttagacggagtttcgctcttgttgcctaggctggagtgcaatggtgtgatctcggctcactgcaacctccgcctcctgggttcaagcgattctcct

SEQ ID NO: 462745 - DNA, 201 bp, Homo sapiens
cagggcattatttaaataggtttcccacagggagttttagttggtggatttagagcaagcaggcctgagttccaggagcatgcagaggtggtcactgcagmatgtctgcacggtcgatacagggtgtgggcgtcagcagggccagtggaacagggtgtatccagttgacccatagtgagctggtcaccaggaggcagttgt

SEQ ID NO: 462746 - DNA, 201 bp, Homo sapiens
ctttgtatcttcactgaccatgcctggcagtgctggccagctgacagcttccccgtcaaatcccacattcctccctccagctgcagctgtgtctggcagcyggggctgggcagtagacacagcagaattcttccttcctcctggctctctttagtagctacctcacgaaatgtgcattggattcttaaagaagaaaaaaat

SEQ ID NO: 462747 - DNA, 201 bp, Homo sapiens
ttaaataggtttcccacagggagttttagttggtggatttagagcaagcaggcctgagttccaggagcatgcagaggtggtcactgcagcatgtctgcacrgtcgatacagggtgtgggcgtcagcagggccagtggaacagggtgtatccagttgacccatagtgagctggtcaccaggaggcagttgtataaggcagct

SEQ ID NO: 462748 - DNA, 201 bp, Homo sapiens
cattcctccctccagctgcagctgtgtctggcagccggggctgggcagtagacacagcagaattcttccttcctcctggctctctttagtagctacctcaygaaatgtgcattggattcttaaagaagaaaaaaatcaagaggccagaaaatcaggaagcagaagttaaaatatgttgctgatctttgaaataaagaattt

SEQ ID NO: 462749 - DNA, 201 bp, Homo sapiens
aaatggtatttctagttctagatccttgaggaatcaccacactgtcttccacaatggttgaactagtttacactcccaccaacagtgtaaaagtgtttctrtttctccacaccctctccagcatctgttgtttcctgactttttaatgacgaccattctatctggtgtgagatggtatctcactgtggttttgatttgcat

SEQ ID NO: 462750 - DNA, 201 bp, Homo sapiens
tgtgcagaagctcttttgtttaattagatcccatttgtcaattttggcttttgttgccattgcttttggtgctttagtcttgaagtccttgcccatgcctrtgtcctgaatggtattgcctaggttttcttctagggcttttatggttttaggtctatcatttaagtctttaatccatcttgaattaatttttgtataagg

SEQ ID NO: 462751 - DNA, 201 bp, Homo sapiens
tttatttctttctcttgcctgattgccctggccagaatttccaacactatgttgaataggagtggtgagagagggcatccctatcttgtgctagttttcarggcaatgcttccagtttttgcccattcagtatgatattggctgtgggtttgtcataaatagctcttattattttgagatacgttccatcaatacgtagtt

SEQ ID NO: 462752 - DNA, 201 bp, Homo sapiens
cagcaggcatcaggaagagaggccccaggcagactggtggcagcagcaaaaatgtaacaggtaactgaggccaaagtcttggatgctggttctgagcttarcccttgctggctccaattccttcctgttatgattttctcttttagtccccttcctcttctacagctccccattggcagaaggaaggagtgctagacaggg

SEQ ID NO: 462753 - DNA, 201 bp, Homo sapiens
agaatgcaaaagagtgaaggctgcaatgatggcaggagcagagagcaggccggggggtggttgcaatagtcttggggggcaaggctggttgccaggtcagkgttgcaggggtggaagtgatgagaagtggccacattctggatgtagctggaagggaggctgggggagatttgctgagggctgggatatgagactccagag

SEQ ID NO: 462754 - DNA, 201 bp, Homo sapiens
tttctcttgcctgattgccctggccagaatttccaacactatgttgaataggagtggtgagagagggcatccctatcttgtgctagttttcagggcaatgyttccagtttttgcccattcagtatgatattggctgtgggtttgtcataaatagctcttattattttgagatacgttccatcaatacgtagtttattaaga

SEQ ID NO: 462755 - DNA, 201 bp, Homo sapiens
tgtaggtcctagcgcagcagggtgacgctgggccaggagggccccgggagtggggtgggggagggccactgggtggaggtgcccttcagggctgcatctcstggcgccggctccagttccacttcggctcctgaccctcaattcccgtctgcggcccggggacctcggccttctccccagccaccttgctggctggccctg

SEQ ID NO: 462756 - DNA, 201 bp, Homo sapiens
ttttgtaggacaggtctggtgttgatgaaattcctcagcttttgtttgtctgggaaagtatttctccttcatgtttgaaggatattttcaccagatatatrattctagagtaaaagttttttccttcagcaccttaaatatgtcatgccactatctcctggcttgtaagatttccactaaaaagtctgctgccaaatgtat

SEQ ID NO: 462757 - DNA, 201 bp, Homo sapiens
ttgagcctgtcctccttgggaacagtttccaggtattcaaaaggacttgggtgctatgatctaagctgtatctgctttagtgggcacccctagcccagtarcaccgtggttcttgcacacttgtagaggtatcacgttggtggtctttgataaggtccagaagaattctccggattaccaagcagagactcttttttcttc

SEQ ID NO: 462758 - DNA, 201 bp, Homo sapiens
aatcaacagagggcaacggggtgagaactaggggcagtaggaacacaggaacaagagtggacaagtgctcttggggatggacagggaaggctcattccacygaagctggtgggaagcacaggggcttttgaatgttgtggcctggggcttttcctcctagttgtgaaggagccctgttgcagtgtggttggaaggttgtgt

SEQ ID NO: 462759 - DNA, 201 bp, Homo sapiens
tcaagagaaccaatggcagaaggaggagtgtagagcttacatgcagatgctgagggtgagcaggaagagtccagtcttcggggacccatcacagctctttkttcccagggagctgggggccctggaggacagagatgtaggctctttgagcttggacttcatgctgggtctttcattcaggaggttttaatgtaagctaca

SEQ ID NO: 462760 - DNA, 201 bp, Homo sapiens
tctggtttctcatcctgtcttgcaggtgactcagatattgctgggggttgtgagttgtgttcttggagtgtgtctcagcttggggccctggactgtgctgmgtgcctcaggctgtgccttctgggcggggtctgtggtgagtaaggaacaggctgtgagcctggagggaggcaagtggtgatgggcaagaaggcgcttatg

SEQ ID NO: 462761 - DNA, 201 bp, Homo sapiens
aagagtctttagcatgaagggccgttgaattttgttgaaggccttttctgcatctattgagataattgtggttttttaccttggttctgtttatgtgatgkattatgtttattgatttgcatatgttgaaccagccttgcatcccagggatgaagctgacttgattgtggtggataagctttgtgatgtgctgctggattc

SEQ ID NO: 462762 - DNA, 201 bp, Homo sapiens
ggataagctttgtgatgtgctgctggattcagtttgccagtattttattgaggatttttgcatcaatgtttatcaaggatattggtctaaaattctctttktttgttgtgtctctgtcaggctttggtatcagagtgatgctggcctcgtaacatgagttagggaggattccctctttttctattgattggaatagtttca

SEQ ID NO: 462763 - DNA, 201 bp, Homo sapiens
agggcccccactcctggctcctcacacttgcctcccctatggccgctctccagaccctcctcctttcttctccccacatccgcacctgctgttcccactcyggggttctcaagtccatgaacagatattgttgcattttccacaatgctgattaaacataataaacaatccagaaaagcagttttgcccagaaagatatgg

SEQ ID NO: 462764 - DNA, 201 bp, Homo sapiens
tgattattgcctcaatttcagagcctgttattggtctattcagagattcaacttcttcctggtttaatcttgggacagcgtatgtgtccaggaatttatcygtttcttctagattttctagtttatttgcatagaggtatttatagtattctctgatggtagtttgtatttctgtgggatcagtggtgatatcccctttat

SEQ ID NO: 462765 - DNA, 201 bp, Homo sapiens
cccgcatgtccctgtctagggcagcccagggcccccactcctggctcctcacacttgcctcccctatggccgctctccagaccctcctcctttcttctccycacatccgcacctgctgttcccactctggggttctcaagtccatgaacagatattgttgcattttccacaatgctgattaaacataataaacaatccaga

SEQ ID NO: 462766 - DNA, 201 bp, Homo sapiens
gctaagactgttggaaaagcacagtatttaggcgggaatgtcccatttttccaggtatagtctgtcatggcttcccttggctaggaaaggaaaatcccccraccccttgcgcttccctggtgaggcaatgccctgccctgcttcggctcaccctctgtgggctgcacccactgtccaaccagtcccaatgacatgaggcag

SEQ ID NO: 462767 - DNA, 201 bp, Homo sapiens
tgaggaagggagcaccagagaggaacggctgtcagaagattttcgcagatttcattggagttggggaggtcaggggccagtggtggctcaaagtcacccartgaatggctgtcctggtcacagggccgcacccctggcccctcacgaggggaatgtgtgtagcagagggggtgctgaccatgctggaactgcggcgactac

SEQ ID NO: 462768 - DNA, 201 bp, Homo sapiens
tggctcacacctgtaattgcagcactttgggaggctgaggtgggaggattgcttgagtccaggagtttgagaccaccctgggcaacaaagcaacaccccayctctctctctaaaaaaagagaactggccgggcgcggtggctcacgcctgtaatctcagcactttgggaggccgaggcgggcggatcatgaggtcaggaga

SEQ ID NO: 462769 - DNA, 201 bp, Homo sapiens
gggtgtagctaaaaccctgtcacttccatttttctcttgaagacagatgggaggggtggggcaggtataggtggaatcctggtctgtgtgtcagagttctttgtctgtccctgggatcctgcttcacattggctattctgggaactgctggtgggagggtgatgatagaccaattcagaagagtaaactggaggccttttt

SEQ ID NO: 462770 - DNA, 201 bp, Homo sapiens
ggtgtagctaaaaccctgtcacttccatttttctcttgaagacagatgggaggggtggggcaggtataggtggaatcctggtctgtgtgtcagagttctttgtctgtccctgggatcctgcttcacattggctattctgggaactgctggtgggagggtgatgatagaccaattcagaagagtaaactggaggcctttttc

SEQ ID NO: 462771 - DNA, 201 bp, Homo sapiens
gtgtagctaaaaccctgtcacttccatttttctcttgaagacagatgggaggggtggggcaggtataggtggaatcctggtctgtgtgtcagagttctttgtctgtccctgggatcctgcttcacattggctattctgggaactgctggtgggagggtgatgatagaccaattcagaagagtaaactggaggcctttttct

SEQ ID NO: 462772 - DNA, 201 bp, Homo sapiens
gtagctaaaaccctgtcacttccatttttctcttgaagacagatgggaggggtggggcaggtataggtggaatcctggtctgtgtgtcagagttctttgtctgtccctgggatcctgcttcacattggctattctgggaactgctggtgggagggtgatgatagaccaattcagaagagtaaactggaggcctttttctgg

SEQ ID NO: 462773 - DNA, 201 bp, Homo sapiens
tggttgggaacattctccagcagtacagccacagaggggtcagagatgccagaagcagcagaatccagacacccaagagcatggcctgaagggttctgaamaaggcctggggacagagggccaaggccataagcaccaggatgacagctgccttcctgctctgtccccatgctccttattgacctgggaaaatctctaccc

SEQ ID NO: 462774 - DNA, 201 bp, Homo sapiens
ccaagatgctatcagcttccgagtcctcccagctgaagccccagacatcatggatcagagagaagccatctccagggtgtcctgtctgaatccttgtcccrttgagttcatgagcataataaaatagttgttgttttgtgccactgagttgaggtggcttgttatgtagcaatggataactgtaacgtggaatcagctctc

SEQ ID NO: 462775 - DNA, 201 bp, Homo sapiens
ggaaaaagctgccagacaattgctgcctccagtattagcatccaagatgctatcagcttccgagtcctcccagctgaagccccagacatcatggatcagaragaagccatctccagggtgtcctgtctgaatccttgtcccattgagttcatgagcataataaaatagttgttgttttgtgccactgagttgaggtggctt

SEQ ID NO: 462776 - DNA, 201 bp, Homo sapiens
aataatttcttaataccatcaaatatccagtgttctaattttccaattgtcttataaatatttctattctctttacttaaattaggatcctaatgagattyataccttagaattagctgatatgcttcttgagtttcttttcatctatagatataacatatctctatctcttttgatatttcctggctatgaattctattt

SEQ ID NO: 462777 - DNA, 201 bp, Homo sapiens
tccattactgaattaaaaaccacaccaaaatgtagtggcttaaaatgacaacttattatttctcacggtgctgtgagttggctggattcagatgagccatyctcactcacgggttttctcatgcagttacagtcagatgggggtgaagttatccaagtgctcgccgaggctggaggtctgagatgatgtagttgcatggtc

SEQ ID NO: 462778 - DNA, 201 bp, Homo sapiens
ataatatttgatttaaactgtgatacttagccaggatgtccattagaattgcctatgcaggatttattttagagccaggcaagctgattctaaagtgcacrtgaagaagtagtctagcaaaaatggccatgacaattctgaaagaaaaaccacacgaggggatcatgaaacagcccaattagcattaagctccatgttaaa

SEQ ID NO: 462779 - DNA, 201 bp, Homo sapiens
agggccggcatctctcgctccacggctctggaatgcaatagaggagatgaacttagttgtcttatgggcagagatgggcttccctcaggttagggccatgraattttcccatggactgagcttcctccccttgccctgccccaagctggaggctgtcctggggcagctggggccccatgcatagtccccagcgccgtcggg

SEQ ID NO: 462780 - DNA, 201 bp, Homo sapiens
tctttcatcaagatatactatacctctttcaagctgatacagaagtagagagaaggatataatgaaccctctcaaatccatcatccagcttcaactactcrtggctactcttattttatccatactacacaaactcttccacaccccttctactggattattttgaggtaatggcaaacataatatcatttaaaaagtaaa

SEQ ID NO: 462781 - DNA, 201 bp, Homo sapiens
attaacaataatttcttaataccatcaaatatccagtgttctaattttccaattgtcttataaatatttctattctctttacttaaattaggatcctaatragattcataccttagaattagctgatatgcttcttgagtttcttttcatctatagatataacatatctctatctcttttgatatttcctggctatgaatt

SEQ ID NO: 462782 - DNA, 201 bp, Homo sapiens
tttgggcttcctcttatgtacagtgtcagatctttggcaattttttctgttgggttgtccgccttaatgatttttaagaattcttcatgtgaaattgctgrcacttgaccatttttgacttacaaaaaatggcagtttcatatgattcaatttaacaccttctggaattggtcctttgttatttatgtgttgactaatatt

SEQ ID NO: 462783 - DNA, 201 bp, Homo sapiens
actgtccacagcagctaacagaggtctggacaaaagagcagcaggacatccacctgcatgggtccctttggggaagccttgccataggggtcagatttcargcatggcttcaatgacacaaccacaatgtgacaatttaagagattttagtacttgcagaccctgggggctacatggcatgcctggaggtcaggcagcaca

SEQ ID NO: 462784 - DNA, 201 bp, Homo sapiens
cttgggctcaggcttccagcgtccagaactgtgataaataaatgtgtgcgtttcagcctcccagttgtggtactttgctatggcagctctagcaaacaaayatgggcaccaaccaaacaaccaactatcatagtcacatggaatcaaggctcaggtgaaaggacctgacagggatctaggaggaaggggaagggggagcag

SEQ ID NO: 462785 - DNA, 201 bp, Homo sapiens
acgtcaaggttaattttttgcatatagatgtccagttgttccaacaccattagtgttgttgtctttccttatcaactccaggacacacaatttgggaaacrggttttccagctctgagctggagtcaacccctgttcacattagttgaaaagactatcctttctccattgaattgctttggtacctttatcaaaaatcact

SEQ ID NO: 462786 - DNA, 201 bp, Homo sapiens
accctgtctctactaaaaatacaaaaattagccgggcgtggtggtgcgtgcctgtaatcccagctactcaggaggctgaggcaggagaattacttgaaccygggaggatgatgtggcagtgagccaagattgagccactgcactccggcctgggtgacagagcgagactccatttcaaaaacaaaacaaaacaaacaaaca

SEQ ID NO: 462787 - DNA, 201 bp, Homo sapiens
aaggacatttgtgttgcttccagttttttggtaattataaatggagctgctataaacattcacatacagatttttgtgtaaacatgagctttaattttttrgggtaaatatcatggagtgtgatcactgagtcataagatgtagggttaaatttggaagaagctgccaaagcattttctagagtgactgtaccattttgca

SEQ ID NO: 462788 - DNA, 201 bp, Homo sapiens
aaaaatacaaaaattagccgggcgtggtggtgcgtgcctgtaatcccagctactcaggaggctgaggcaggagaattacttgaacccgggaggatgatgtkgcagtgagccaagattgagccactgcactccggcctgggtgacagagcgagactccatttcaaaaacaaaacaaaacaaacaaacaaacaactaggcttg

SEQ ID NO: 462789 - DNA, 201 bp, Homo sapiens
taattattggtgtttttccacttgtgggaaaaatgtgcctaatgcatttgtatgtcagtctacttatttgtttatctatctatcactagtgaaaagatcayacaaaaatattaacagtggttatctctggggtgtgaaattatgggtaatttttgtctttttgttatacttttccatttttcccagctttctccaatgggc

SEQ ID NO: 462790 - DNA, 201 bp, Homo sapiens
ctccaatgggcatgtatttatttttataatcataaaaaagcaataaaaaagtctataaccaaaatatagtgttcgagaagctcaagttcttgatgaatagygtactctgaaaaaaggcatataatatatggcaaagacaaggagaaattccatcaaaatattcttcttcgttgttgctggattgttaacctctttaggctc

SEQ ID NO: 462791 - DNA, 201 bp, Homo sapiens
gcagggcctgacctttcagaaaggggactcctcttctcctcaatgtggtgaaggagtgggccacaaggatgcctggtggcgggggcatttcaggctgaagkagcaaggaatgcaaagtccctgatgcagagtgaggggactgctgtcgccaggggcaagtggtggcaggtggattcagagagtgaccaaacgccctcgcct

SEQ ID NO: 462792 - DNA, 201 bp, Homo sapiens
tataaccaaaatatagtgttcgagaagctcaagttcttgatgaatagtgtactctgaaaaaaggcatataatatatggcaaagacaaggagaaattccatyaaaatattcttcttcgttgttgctggattgttaacctctttaggctccagattagctcagaatgagaacatttagcaatctcaaggtctatgttggagcc

SEQ ID NO: 462793 - DNA, 201 bp, Homo sapiens
attgtggggtgttctccccgctggctgcatgttggaatcacccaggcagtgttcctaactattggtgcccagaggtcccacctccggattctgatttagayaggggggcctgggtttgtagggggtggggttaaaagctccccagttgattccgaggtgcaggcaagactcagagccattcatggagcagctccattgata

SEQ ID NO: 462794 - DNA, 201 bp, Homo sapiens
gtgttcgagaagctcaagttcttgatgaatagtgtactctgaaaaaaggcatataatatatggcaaagacaaggagaaattccatcaaaatattcttcttmgttgttgctggattgttaacctctttaggctccagattagctcagaatgagaacatttagcaatctcaaggtctatgttggagccagtttcacagtgaag

SEQ ID NO: 462795 - DNA, 201 bp, Homo sapiens
ggggtgttctccccgctggctgcatgttggaatcacccaggcagtgttcctaactattggtgcccagaggtcccacctccggattctgatttagatagggrggcctgggtttgtagggggtggggttaaaagctccccagttgattccgaggtgcaggcaagactcagagccattcatggagcagctccattgataaaaaa

SEQ ID NO: 462796 - DNA, 201 bp, Homo sapiens
ctctagggggtgagggtgagactgggacagactgggaaggggcatgagaatgttctgggggtgatggtaaggctatcttgctgggagtttgagtcacacaratgtatgcatttgtaaaaactcattagatgtgcatgtggtaggctgaataattgctctccaagagggtcacatcctgattcctggaagctgtgaatatgt

SEQ ID NO: 462797 - DNA, 201 bp, Homo sapiens
tcctgattcctggaagctgtgaatatgttgtttcacatggcaaaaaggactctgcagatgcgattaaactaagaatcttgagatgggagattatcctgcgytatccatgtggaactgatgtaatcacagtctttataagaagaaggcaggggatcagagtgagtaggagaggtaactatgaaagcaagaggttggtgatgt

SEQ ID NO: 462798 - DNA, 201 bp, Homo sapiens
ttataagaagaaggcaggggatcagagtgagtaggagaggtaactatgaaagcaagaggttggtgatgtgaggaaggggtcatgagccaaggaatgctttygaaggtgaaaaaggcaaggaaacagattgtcccttcagagataccagaagaagccagccctgattacaccttgactttggcccagccagactgattttgg

SEQ ID NO: 462799 - DNA, 201 bp, Homo sapiens
tagtaaaatgttgaagggaaaaaggcagaggcttgatcctcgatggtgtttaggaattgtgagtagttctgcaaagttaggttgtctgtactggggtaagrgtagttggctcagccagtcagaatgctggaggagtagggaaggagatgtggagggaatatagactttatcctgaaggcaacgaggagccagtgcaatgct

SEQ ID NO: 462800 - DNA, 201 bp, Homo sapiens
cacccaatgccccagcaagttctatttcctgagaattccttcacctatctcctgcattccatttcctcctgtattattttggattgtgcttttgctatgtyttacctaaattcctgcagtagactcctactggctttcctgctcccaaacttgtctcctccaaatatagcctgtctgcctctgctagaatgacctttccac

SEQ ID NO: 462801 - DNA, 201 bp, Homo sapiens
gttgggaagaaggctcaaaaatgaatcctctcaagcagacccgctttggtttccacccctctattctgagaacccaagctcaacccatgtgttctgccttyaggtagaaaatgtcagaatcatagggaagactaagctgaaaaaagaatttggagttccaaaggaattctgtgccacctgccgtccggcaattccctttgc

SEQ ID NO: 462802 - DNA, 201 bp, Homo sapiens
tgaatgtactaaaatgcattgaattatacactttaaatgggtgaattgtaaggtgtgtctcaataaagctgttttcaaaaagtgacaggactaatatctakaatacacaaggagctcttgcaaatcggtcagaaagaggcagcagtccccatggaaacctggtaaagaatcccaagggtaacttgcagaagaggcacccca

SEQ ID NO: 462803 - DNA, 201 bp, Homo sapiens
ggtgttctccccgctggctgcatgttggaatcacccaggcagtgttcctaactattggtgcccagaggtcccacctccggattctgatttagatagggggrcctgggtttgtagggggtggggttaaaagctccccagttgattccgaggtgcaggcaagactcagagccattcatggagcagctccattgataaaaaaga

SEQ ID NO: 462804 - DNA, 201 bp, Homo sapiens
tttgtagggggtggggttaaaagctccccagttgattccgaggtgcaggcaagactcagagccattcatggagcagctccattgataaaaaagaactcaaygcaggcactgatggtgctcagagaaatctgctttgcttttttttttttcatcttttttttttttttacttgacataacttgtatgtttttcttgggtgaa

SEQ ID NO: 462805 - DNA, 201 bp, Homo sapiens
gtgaagcaaagcccctaccccagggcacagcaaagtctttgtgctgagaggaaaacaatggcacatatgtcccagagaaagaggcagctcataattctttwccctggcagcctattaaagcttctcagacattggactaaattctgtccttcctccaagaagaagtggacttctgtgtccttgaataaaactcaaaataag

SEQ ID NO: 462806 - DNA, 201 bp, Homo sapiens
tggggttaaaagctccccagttgattccgaggtgcaggcaagactcagagccattcatggagcagctccattgataaaaaagaactcaatgcaggcactgrtggtgctcagagaaatctgctttgcttttttttttttcatcttttttttttttttacttgacataacttgtatgtttttcttgggtgaaacatgatgttt

SEQ ID NO: 462807 - DNA, 201 bp, Homo sapiens
gaagaaaggattgccacttgggacacacatgcacaccgtaagaacaaagagaaggctggaggttttaccgaatgttacccattgctctttgagaaagttcrttggcactaataaggttctagggagctggcaagttccaactggtgggcaatggcattgggcaaaattagtcctagagttgcagcaagttatctcagcagg

SEQ ID NO: 462808 - DNA, 201 bp, Homo sapiens
cgtaagaacaaagagaaggctggaggttttaccgaatgttacccattgctctttgagaaagttcattggcactaataaggttctagggagctggcaagttycaactggtgggcaatggcattgggcaaaattagtcctagagttgcagcaagttatctcagcagggtagataaaactggtctcaggttacaacagttggtt

SEQ ID NO: 462809 - DNA, 201 bp, Homo sapiens
tgggctctttgtagggtagcactcatgttttcaagaagatcctttcctgtagattgtttccacactgttctttcaagtgcagagggtcttcctaatgaatyggcagccctgcatctcactgggccagggttggggcaggagtaggccagcatcacggtggatgttcagctagggtgggctgtgacgggggttggctccagc

SEQ ID NO: 462810 - DNA, 201 bp, Homo sapiens
tgcttggattacaggggtgccctgtgggattataggcagaagccaccatgtgaggccttcccccactttttaactcttgatgtttccatttatatcttacygtactgtctatgttttgaaaagttgttatgatttttgattggttcatattttggtctttctacttaaaagtagtttacacaccacagttacagtgttgta

SEQ ID NO: 462811 - DNA, 201 bp, Homo sapiens
gggagggacagtgtgagatcccccatctgttcgcttgtctgctttcctctgtcagtggttccccatgatagaaaactccacatccattgtattagctcctrtggctgctataaacacagtaccacaaacttagtggcctcaaacaacaccattgcattctcttaccatctgaggtcttcagggccttgttcctaatggagg

SEQ ID NO: 462812 - DNA, 201 bp, Homo sapiens
attactttctcaggctaaagaaggtatgaatttttcttctaagtgcttctaaatcagtcctttaatggttaggttggatgtaaattcttaccattcttcastcagataaatgaatgtcaacccagtttttccttctgctggaaaatggtcttttactctcagaatctggcaacctcctttgtgtctcgtgtctggagggtc

SEQ ID NO: 462813 - DNA, 201 bp, Homo sapiens
tggagtgaattaataaacagatgacatggacaaggaagatggaagaggtgttaggtacctagacgtcagaaaacttttaatttccctgtggcattttaagraaaaaacatgctaggtaacctggtttcaaaggatgctattaactctcaactcaagggaagagtctttatacaacatcgcaggctccttaggccgaggcca

SEQ ID NO: 462814 - DNA, 201 bp, Homo sapiens
catgcaaatatttttacataactttaaaaatcttcaaacaactattagaccctgagtatatcttttaccatctcaatggcattataacttattctagaagkgagggctccagtatgataaattagctttttgtggggcttaaaaatgttttgcaccccaatagttgtgctatctctgatttgaagccattggaacctgtcc

SEQ ID NO: 462815 - DNA, 201 bp, Homo sapiens
tgtgtacaatttgtgaattttaacatatgtacagattcatgtaaccaacaccatgatcaggataaagaacagtattgtcaccccacaaatcttccttgggsggtccctttttcagtcacatgctcttcccagccctaaccacagggaaccattgagttgttttccatcactataatttttccattttgagagtatcatatc

SEQ ID NO: 462816 - DNA, 201 bp, Homo sapiens
gggacaatccttgtccatcgagatggggtcagagtgactgcacgaaaatatggctaccccgagttaccatggctaccaacacttgccctccttccatgccyaccaggcagggtggaggagcttgttctttctgcagcctgacccaggagaggaggtaaagcagagggctcccagaggccgcccttgtaggtcctagcgcag

SEQ ID NO: 462817 - DNA, 201 bp, Homo sapiens
atatcagtggaatcatgcagtacgtaacctttggggactggcctctttacctcagcataatgatgttaagattataatctgtaaactcctactcaggtcaytgcaccactttgatggaatttccattccctttgtcctcaagatttgtctaaagatatttgactttgacagaattttgggttcttcagttttctttttaat

SEQ ID NO: 462818 - DNA, 201 bp, Homo sapiens
gatttgaggcggggacctcatgactcttccaccgattgaaggagcgtgtgtcatgaccctctttctcttccagggctatatatccagcctgctcaccctgrcaggctttgctacagctatggctgctgttgtcctctgcgtgaatagcttcatctggcaaactgaaccctttttatacatcgacactgtgtgtgatcgctc

SEQ ID NO: 462819 - DNA, 201 bp, Homo sapiens
atcttctttataattttctttcttctattttgctttgagtcaattttgagtttattttgctctttttttagtttcttaagctaagaactttcttattcttytctcatacaagtacttaatgctatgaatttacctctaagcacttctttagctgtattctacaaattttgttaggaaaaaatttcatttttgttctgttca

SEQ ID NO: 462820 - DNA, 201 bp, Homo sapiens
atacacctgatatgttttcatgagatatcaggttcatcctggccttagccattagaaattccaggttatgggatgtagccaccttgaagtggccccaggayggggaatccatgcagtccaaagtagcaggtcaattaccaaatgtatgaccaaaaattatgaatgtctccccctaactgggagaggcacagcaaattaaga

SEQ ID NO: 462821 - DNA, 201 bp, Homo sapiens
tccaccaggtcacctgagggacggtgttgactgcacagtgcaggagaagaatggacattgcccagcatgagcatctaagtgccttagcaggttgtcattgytatggacgtgattcaaggcttctcttgagtgacagaaggagctgatgagctggtgttggcttaggagatttgtgagcactcagggtagaaaggcctctgc

SEQ ID NO: 462822 - DNA, 201 bp, Homo sapiens
tagctgggactacaggcgcccgccaccacgcccggataatttttttgtaatttttagtagagacggggtttcaccgtgttagccaggatggtctcgatctmctgacctcgtgatccaccttcctcagcctcccaaagtgctgtgattacaagtgtgagccaccgtgccggtccggtccgtgttttaagtgaaactcttcat

SEQ ID NO: 462823 - DNA, 201 bp, Homo sapiens
gccacggggctccaaaactttccacagaagcagggtcttggctaggctgtgcctctgggttattaggtcagctcatcccacttaggttcctgtgccaccamtgtctccctgagtttcactgatccctgggcttttctgttgctctgggaatgggccatgatgctgcttctcctggtttttcctgtctgtgactgatgtggg

SEQ ID NO: 462824 - DNA, 201 bp, Homo sapiens
ccggataatttttttgtaatttttagtagagacggggtttcaccgtgttagccaggatggtctcgatctcctgacctcgtgatccaccttcctcagcctcscaaagtgctgtgattacaagtgtgagccaccgtgccggtccggtccgtgttttaagtgaaactcttcattcaaaacagtttttttccatcagcttggctg

SEQ ID NO: 462825 - DNA, 201 bp, Homo sapiens
gggtgaggcttgctggaactcatgctctgactgctgggctgggtgagtaccctctggccagggctggtccacatgttccctccgtggtgtcagctgagtayagctcagttttgctttccgctgtgacatagcagcactgagttcaatgcaaagcctcacagtcatggcattctccctctctcaagtgtatatacagattct

SEQ ID NO: 462826 - DNA, 201 bp, Homo sapiens
aaaaagtcatattttgatgctgaattttgtcaaatgatttttctgcatcaattgatacgatcatgtggtcttttttctttatacttttcatgggggatggyctgtagtttttcttatttttactgtctgattttggtctcagggtgatgttgagcccataaaataagtttggaagttctcctcttctattttctggaagag

SEQ ID NO: 462827 - DNA, 201 bp, Homo sapiens
aggaacttcagtcagcttgtggtgaatgttgccaggcataggaactcatccttcaagacaatgggctcccttggcccatggtgtgtccagaaatgttgtckgggagctagggcctggaatgggggcctcacagcctttatcagtgccctaacatactgtggctgagctggtatccaaaatgcgagacaaaatcctctttac

SEQ ID NO: 462828 - DNA, 201 bp, Homo sapiens
aacagaggtctggacaaaagagcagcaggacatccacctgcatgggtccctttggggaagccttgccataggggtcagatttcaagcatggcttcaatgamacaaccacaatgtgacaatttaagagattttagtacttgcagaccctgggggctacatggcatgcctggaggtcaggcagcacaggcagagacagagaga

SEQ ID NO: 462829 - DNA, 201 bp, Homo sapiens
gaagccttgccataggggtcagatttcaagcatggcttcaatgacacaaccacaatgtgacaatttaagagattttagtacttgcagaccctgggggctayatggcatgcctggaggtcaggcagcacaggcagagacagagagaaaaggatccctttattgggtccagggcattatttaaataggtttcccacagggagt

SEQ ID NO: 462830 - DNA, 201 bp, Homo sapiens
aggccctagggctctacaatcagcaaaggtggtgacgccagccaggcttacatccttcccttcaggttggtgaggtcccctaggtcctgagtgggtccagrgatgccatctggagccatggatgggaatctaaaatcttagaagtctacctgttgttctattctactgcagctgagctggaactcaaaccacaggatgcag

SEQ ID NO: 462831 - DNA, 201 bp, Homo sapiens
tttagatacaattatccacattttacaaatacaaagactgttgctcaggaggttttgtaggtaggtcaaggagctaggaagtggcagtgctgagatttgtrctcatgtctctgactgcaagctcagagctcttacagagcaccatgccagctttattccccctgtcgtccttgggacagctttgccaattggggccatagt

SEQ ID NO: 462832 - DNA, 201 bp, Homo sapiens
acaaagactgttgctcaggaggttttgtaggtaggtcaaggagctaggaagtggcagtgctgagatttgtgctcatgtctctgactgcaagctcagagctsttacagagcaccatgccagctttattccccctgtcgtccttgggacagctttgccaattggggccatagtctggtttaactccctgctttgtctaactat

SEQ ID NO: 462833 - DNA, 201 bp, Homo sapiens
gctgagatttgtgctcatgtctctgactgcaagctcagagctcttacagagcaccatgccagctttattccccctgtcgtccttgggacagctttgccaaytggggccatagtctggtttaactccctgctttgtctaactatttatttggatttcgggggacgtggaaattttctttgacattcttgattttttttgtgg

SEQ ID NO: 462834 - DNA, 201 bp, Homo sapiens
ggggtctttcttggaggggaggagagggtttcctggacaagggctggggaagaggagagggatttgaggcggggacctcatgactcttccaccgattgaargagcgtgtgtcatgaccctctttctcttccagggctatatatccagcctgctcaccctggcaggctttgctacagctatggctgctgttgtcctctgcgt

SEQ ID NO: 462835 - DNA, 201 bp, Homo sapiens
acaagggctggggaagaggagagggatttgaggcggggacctcatgactcttccaccgattgaaggagcgtgtgtcatgaccctctttctcttccagggcwatatatccagcctgctcaccctggcaggctttgctacagctatggctgctgttgtcctctgcgtgaatagcttcatctggcaaactgaaccctttttata

SEQ ID NO: 462836 - DNA, 201 bp, Homo sapiens
agggccatggaattttcccatggactgagcttcctccccttgccctgccccaagctggaggctgtcctggggcagctggggccccatgcatagtccccagmgccgtcgggccgctgcctgtgcatccatccatttatttctgccctctcctcactcctctgtaaatgtccttcagtcctgcagccttccttactcagggga

SEQ ID NO: 462837 - DNA, 201 bp, Homo sapiens
cctccatcaccccgttggggtagaagataaagtcccaaatgtaatcataattgtagacagttgaagttgtccgcagcaccagcacctggcccttcagcccygcatagaagttgaagccacctttaaagttggaattaaagtgccgccgaaggggcacccctgtgggcatttcaaagaggcagagggctcggggataatgga

SEQ ID NO: 462838 - DNA, 201 bp, Homo sapiens
tatctttgtggtgttctctgtatttcctgaatttgaatgttggcctgctttgctaggttggggaagttctcctagatgatatcctgaagagtgttttccartgtggttccattctccctgtcactttcaggtacgccaatcaaatgtagatttggtcttttcacatagtcccatatttcttggaggctttgtttgtttcct

SEQ ID NO: 462839 - DNA, 201 bp, Homo sapiens
tttgttagttttccttctaacagtcaggtccctcagctgcaggtctgttggagtttgctggaggtccactccagaccttgtttgcctaggtatcaccagcrgaggctgcagaacaggaaatattgcagaacagcaaatattgctgcctgatccttcctccggtagctttgtcccagaggggcacctgcctgtacgaggtgt

SEQ ID NO: 462840 - DNA, 201 bp, Homo sapiens
gcgtccagacagcggtggctctgggaaagctgattgttttcttagccagaggaggaagagaaggttggtcctcagcgcctggacgcctggtagacgatagrggatgacatgatgagtaaaataaggacaggaacacgccgaatcccctttcataatgataggaccacgccaaatcccctttctttttaaaatttgacatat

SEQ ID NO: 462841 - DNA, 201 bp, Homo sapiens
actgtccaaccagtcccaatgacatgaggcaggtacctcagttggaaatgcagaaatcacccatcttctgcaatgatcacattgggaactgcagaccggasctgttcctatttggctatcttggaacacaccaacattcttgattttttgatcttttgtatgaagttgagaattggccaatcacatactaagaaaactctg

SEQ ID NO: 462842 - DNA, 201 bp, Homo sapiens
aatgtttttcaataaagttttatgattttctttaccagtcttgagtgtctagatttatttctaagtatcttatagttttgttgctactgtaaattaaaaawttttttttttccttaaaaaaagccagcaaggcatttatttttgtcatatagagctgttcaaaggtaagtatccaggattcgttgggcatattcaattaat

SEQ ID NO: 462843 - DNA, 201 bp, Homo sapiens
atgtttttcaataaagttttatgattttctttaccagtcttgagtgtctagatttatttctaagtatcttatagttttgttgctactgtaaattaaaaatwtttttttttccttaaaaaaagccagcaaggcatttatttttgtcatatagagctgttcaaaggtaagtatccaggattcgttgggcatattcaattaatg

SEQ ID NO: 462844 - DNA, 201 bp, Homo sapiens
gcagatgccttgggctcaggcttccagcgtccagaactgtgataaataaatgtgtgcgtttcagcctcccagttgtggtactttgctatggcagctctagmaaacaaatatgggcaccaaccaaacaaccaactatcatagtcacatggaatcaaggctcaggtgaaaggacctgacagggatctaggaggaaggggaagg

SEQ ID NO: 462845 - DNA, 201 bp, Homo sapiens
ccaaccaattctttctgttcccagtgaattctcttgacttctcattggctgagagtgtgggtcactgcaatcctcagttgcaaggaaggctggtagtagcracttaaaaacaaaacaaaactggatttctattagtaaggaagagagaatgacgattggattgaccgtgagcggcctctttgtctctggcaatgctcttga

SEQ ID NO: 462846 - DNA, 201 bp, Homo sapiens
aatatgtctggtgtctttatgagaagaggtaattggaacacaaacacacacagagggatgaccatgtgatgaggagaacacaggcagaacacagacatccrtgagcctaggagaggtctcagagggaaccaaccttgcagatgccttgggctcaggcttccagcgtccagaactgtgataaataaatgtgtgcgtttcagc

SEQ ID NO: 462847 - DNA, 201 bp, Homo sapiens
ccatttatatttattgcagttactcataaacttaatttataatcatcatcttttttttgctttctatttatttgtctcactttaaaaaatatagtcatgcwgatcatttaagggtttagttgaaggtaaatttctccagcagaatttgcatttgtttctgacaggtgtcaggggtcactaccatcttgagaacctttaaat

SEQ ID NO: 462848 - DNA, 201 bp, Homo sapiens
tcacgaatcttcatctgactcctttcaccaagagtttacttgtcatctccctcaaaggagtggattttttcccaaatgtcctctgaaagtgaagatttatmctgggtccttcactgtaactctccagcttaagtggctctaggcttcatttactgtctttcacatagttattaagtgcagttttgggttgcaagaggttgg

SEQ ID NO: 462849 - DNA, 201 bp, Homo sapiens
agaggactccaggggccctgagatgtggtgagtgtgtgtgagggctccttgacttttccccttcccctgctccataagatcagagagttgatttagttcaygtctgtcttgtttagttcacgtctgtcttgtttagttcacgtctgtcttgtttagttcacatctgtcttagtaacaagccagtttccctaaaggcttttc

SEQ ID NO: 462850 - DNA, 201 bp, Homo sapiens
ttctaggaattgggcttctggaatgttccttggctgataaggtggttttgtatgcctgcctactaaattccagtctatcagcttgcctagactgtacaatrtgatttcaggtggacacctgcttttcctctgggagtctggaattgcagtagctgtgcaggtggagggagtgcctatgtggccagctctcaataaaaaccc

SEQ ID NO: 462851 - DNA, 201 bp, Homo sapiens
ggccctgtcaatctgtaatttatcacagataccactggtaagaaattaacccaaaagcataatgaacctaggaagtcgaagccgaagtgagctgtgattgygccactgcactccagcctgggcaacagagcgagaccctgtctcaaaacaacaaccaccaccaccaccaccaccacaacaacaacaaacaaagactgcaca

SEQ ID NO: 462852 - DNA, 201 bp, Homo sapiens
gtcttaggtgggtttccctgggcagaaacactgctgtgttactgtgtggcctctcaccgtgggaagatataggaagcctgtgccggattcttccagagtcygcctaatgtgttctttccccaccttgtgtatccttttactataatataacttagccatgaacacaactacatgctgagccctgtgggtccttcaagtgga

SEQ ID NO: 462853 - DNA, 201 bp, Homo sapiens
ccttcaagatatagcaattggctccttgtcagtatctaactggttttgaagttcttcctgttctaattcctaaatagctctggatttctttccagcctcayggtctttgctatcattgtctacatcaaggatttttaaccttggcaccattgatagtttgagcctgatcatgctcacgggcctgtcctgtgtgtagtagga

SEQ ID NO: 462854 - DNA, 201 bp, Homo sapiens
gatatagcaattggctccttgtcagtatctaactggttttgaagttcttcctgttctaattcctaaatagctctggatttctttccagcctcacggtcttwgctatcattgtctacatcaaggatttttaaccttggcaccattgatagtttgagcctgatcatgctcacgggcctgtcctgtgtgtagtaggacgtctag

SEQ ID NO: 462855 - DNA, 201 bp, Homo sapiens
ggaggggaggagagggtttcctggacaagggctggggaagaggagagggatttgaggcggggacctcatgactcttccaccgattgaaggagcgtgtgtcwtgaccctctttctcttccagggctatatatccagcctgctcaccctggcaggctttgctacagctatggctgctgttgtcctctgcgtgaatagcttcat

SEQ ID NO: 462856 - DNA, 201 bp, Homo sapiens
gaattcttgcccctacttctactataggctttgatggcctccatctttttcttggttcatagtcatgaatttaaaaatacatgattcatattttatcaagsagttttaggattttttatggggcaatttgtaagggtttctattttgccatgttgttggatgtcctttctatgttgttggatgtcctatcggtgttatgtt

SEQ ID NO: 462857 - DNA, 201 bp, Homo sapiens
tggggataggggctttctgggctgggccaccactgggtagaaagacaggcatgataataggtgggacttgggtcatgggcccctttctcctccccaaactrtccactgtccattcctgtctcctttgagcagttccactgccccaaatacacaggcacacaccttagggactcacccctttggttgggaacattctccagc

SEQ ID NO: 462858 - DNA, 201 bp, Homo sapiens
ctcctttgagcagttccactgccccaaatacacaggcacacaccttagggactcacccctttggttgggaacattctccagcagtacagccacagaggggycagagatgccagaagcagcagaatccagacacccaagagcatggcctgaagggttctgaacaaggcctggggacagagggccaaggccataagcaccagg

SEQ ID NO: 462859 - DNA, 201 bp, Homo sapiens
tagagtaaaagttttttccttcagcaccttaaatatgtcatgccactatctcctggcttgtaagatttccactaaaaagtctgctgccaaatgtattggasctccattgtatgttacttgttttttttttttttttctcttgctgcttttaggatcatttttaaaaaaaatccttgccctttgggagtgtgattattaagt

SEQ ID NO: 462860 - DNA, 201 bp, Homo sapiens
gcaattggctccttgtcagtatctaactggttttgaagttcttcctgttctaattcctaaatagctctggatttctttccagcctcacggtctttgctatyattgtctacatcaaggatttttaaccttggcaccattgatagtttgagcctgatcatgctcacgggcctgtcctgtgtgtagtaggacgtctagcagcat

SEQ ID NO: 462861 - DNA, 201 bp, Homo sapiens
ctggagatgcggcaggcactgttgtaataagagtagccatatcggaaatcttcattccaaagtttgagggcagcgatggctgtggagaaagctgccagcgytagcagagtcctcagcagggcctggggagggaggaggcagagagaaatctttgtgtttcagtctctctcagagtccagtcgggggaaaaaagggcaaggc

SEQ ID NO: 462862 - DNA, 201 bp, Homo sapiens
ctccttgtcagtatctaactggttttgaagttcttcctgttctaattcctaaatagctctggatttctttccagcctcacggtctttgctatcattgtctwcatcaaggatttttaaccttggcaccattgatagtttgagcctgatcatgctcacgggcctgtcctgtgtgtagtaggacgtctagcagcatctctggcc

SEQ ID NO: 462863 - DNA, 201 bp, Homo sapiens
gtgtttcagtctctctcagagtccagtcgggggaaaaaagggcaaggcccagagaagcctgcaacagggcaggagattggggtgacctccagcctgaaccyggtcccctcccatgcccttccctgaacttacccagtatgtaccaccccgtttctcgtaaatgaaggcagcagctccagccagcacagcctggggagagat

SEQ ID NO: 462864 - DNA, 201 bp, Homo sapiens
gatgctattaactctcaactcaagggaagagtctttatacaacatcgcaggctccttaggccgaggccaaggacaactgggagtggtctgagtcagcaccrgctcctggccatgcggctgtgcagtctcccacgtctcacactcagaagggctctctacttggcttaacgctccgctgctgtctttagattcttaactttt

SEQ ID NO: 462865 - DNA, 201 bp, Homo sapiens
cctgaacttacccagtatgtaccaccccgtttctcgtaaatgaaggcagcagctccagccagcacagcctggggagagattgagccaggagcaggcttagyacaggaaatgcaactcctctcccacgagagagcctccatgcaggcccttccccagcacacagcttgggcgggaggtttcatgctaagctttattatccat

SEQ ID NO: 462866 - DNA, 201 bp, Homo sapiens
tttagtccccttcctcttctacagctccccattggcagaaggaaggagtgctagacagggggtaatttctttaaaaccaaatgcccctttgcagtgacacygcacctgggtctggagggaggttgaggactgaagaaacaaaattgaaggggctggttgacatttgcacctatgtgagcaccagaggaagccttcaggcta

SEQ ID NO: 462867 - DNA, 201 bp, Homo sapiens
gcacaggaaatgcaactcctctcccacgagagagcctccatgcaggcccttccccagcacacagcttgggcgggaggtttcatgctaagctttattatccrtggtaagataattgctgagagggtggagcctggatccaactcctgaggctgcaaaaggccctgctttagtgacacctaagagcttgtggtcaagccaggt

SEQ ID NO: 462868 - DNA, 201 bp, Homo sapiens
tgctagacagggggtaatttctttaaaaccaaatgcccctttgcagtgacaccgcacctgggtctggagggaggttgaggactgaagaaacaaaattgaargggctggttgacatttgcacctatgtgagcaccagaggaagccttcaggctatttgaaaatgcaccttcaggctgcgaccagtaacatgaaaaatcagga

SEQ ID NO: 462869 - DNA, 201 bp, Homo sapiens
tgctattctgagagtgtaggtaccatgaccagcctacccagctcctgtgcaaactgcacacacccatctgttgacaacaattcctgggtttccattgtgtrcagggcctgtggaggacaatgggaataaccagggggtgatgcttcctgggggaccacatactatctggaacgctctgccttccccatctcaatgcaagta

SEQ ID NO: 462870 - DNA, 201 bp, Homo sapiens
acccgggaggcagagcttgcagtgagcagagattgcgccactgcactccagcctgggcgacagagtgagactctgtctcaaaaaaaaaaaaaaaaaagttwattttttaaacctcactcagttttctcatttgtgaaacaggcacaataatggatatgaaggtatgacaaaatcgttggcatcagatgaggtaaaaggtat

SEQ ID NO: 462871 - DNA, 201 bp, Homo sapiens
aggactgaagaaacaaaattgaaggggctggttgacatttgcacctatgtgagcaccagaggaagccttcaggctatttgaaaatgcaccttcaggctgcraccagtaacatgaaaaatcaggagagcctggcagcttcttaccactagaattgtaccccaggggctctttctccagcttagggacttattttttcattaa

SEQ ID NO: 462872 - DNA, 201 bp, Homo sapiens
ccatgaccagcctacccagctcctgtgcaaactgcacacacccatctgttgacaacaattcctgggtttccattgtgtgcagggcctgtggaggacaatgrgaataaccagggggtgatgcttcctgggggaccacatactatctggaacgctctgccttccccatctcaatgcaagtatctggagatgagcaggtcctta

SEQ ID NO: 462873 - DNA, 201 bp, Homo sapiens
agtgagactctgtctcaaaaaaaaaaaaaaaaaagtttattttttaaacctcactcagttttctcatttgtgaaacaggcacaataatggatatgaaggtrtgacaaaatcgttggcatcagatgaggtaaaaggtatgtaaagcacctaactaatgtttttgacacatagaaatcactcaataaatgttagctatgatga

SEQ ID NO: 462874 - DNA, 201 bp, Homo sapiens
atgaaaggcaccccaggcccactctgagcaggctcaaaaccacggagagaggaaaactgagatagtgtatctgattgtacttatggagctcatacagaggrgtgactgtgaccaccatgccaacatacactgcactgctccagatacagaccccgttttaaatgctttatgagcattatctcattccaccttcccaacaat

SEQ ID NO: 462875 - DNA, 201 bp, Homo sapiens
tatctggaacgctctgccttccccatctcaatgcaagtatctggagatgagcaggtccttagatccttagttgacattaactgttgaaggcagggagaggyggccagcctggtgggaacagcactgggaagggtatgggagagcagacagtgtgaataggacatgccaccaccgccctcagctgtttgctcatctgaacag

SEQ ID NO: 462876 - DNA, 201 bp, Homo sapiens
ggagagccacctaggtaggagccaggcagctggtcccagggcagccggggcatgtggactcacgggaaggggtctggtttctcatcctgtcttgcaggtgrctcagatattgctgggggttgtgagttgtgttcttggagtgtgtctcagcttggggccctggactgtgctgagtgcctcaggctgtgccttctgggcggg

SEQ ID NO: 462877 - DNA, 201 bp, Homo sapiens
tgtctcaaaaaaaaaaaaaaaaaagtttattttttaaacctcactcagttttctcatttgtgaaacaggcacaataatggatatgaaggtatgacaaaatygttggcatcagatgaggtaaaaggtatgtaaagcacctaactaatgtttttgacacatagaaatcactcaataaatgttagctatgatgatgatgatcat

SEQ ID NO: 462878 - DNA, 201 bp, Homo sapiens
atcttgatgagtgagatcatgcggtatttatctttctgtgcctggcttatttcacttacagaatgtcctccaagttcatcctgttatcacaaatggcagayttcattcttttttatggataagtggtattccatgtgtatatatacaactcatttttttaaatccatttgtcctttgatggacatttaggttgataccata

SEQ ID NO: 462879 - DNA, 201 bp, Homo sapiens
ttttgacacatagaaatcactcaataaatgttagctatgatgatgatgatcatggttagctatgatgatgatgatggttacagttggggaggtatgaatgmgggtaatacagaggactccaggggccctgagatgtggtgagtgtgtgtgagggctccttgacttttccccttcccctgctccataagatcagagagttga

SEQ ID NO: 462880 - DNA, 201 bp, Homo sapiens
gtattccatgtgtatatatacaactcatttttttaaatccatttgtcctttgatggacatttaggttgataccatattttggttattgtgcatagtgctgyaataaacatgggagtgcagatatctcttcaacatactgatttcaattcctttgaatatatacccagtagtggggttgctggatcatattgtagttctgtt

SEQ ID NO: 462881 - DNA, 201 bp, Homo sapiens
tgtgtggccagagctcccagcccctggtgagttgtcggggaggggcctctgggcagcgtgagtctgggtggtgagtgtgtgggacaggtaggagtgcgggrccaggggcacccgaacctgaggctgggcctggtgcccctcagcttctttccatatgcagctctcccctttgctgtctggggaatgtggccatcaccatgg

SEQ ID NO: 462882 - DNA, 201 bp, Homo sapiens
ccagaggaagctgtgcactgccttcagctcttggttgcttaggtctgaaaacacccctgccttcctgggcagagtccccggggagggctccgccatggccrtctgcagcatcaggatggcagccacggcccagcccagggccggcatctctcgctccacggctctggaatgcaatagaggagatgaacttagttgtcttat

SEQ ID NO: 462883 - DNA, 201 bp, Homo sapiens
actccctgatggtgatgaggatggtcctgggctgagctggaaggaggcagggccagcaccgggcagggctggggacagggcagtacctcattttcaatgtkctcgttgttgtgaagaaactgctcaaagaccacgggcgggtgccaggggtcgttctggtggtagatgctgctgctgcacagctccgactcccggtacttg

SEQ ID NO: 462884 - DNA, 201 bp, Homo sapiens
atctggaacgctctgccttccccatctcaatgcaagtatctggagatgagcaggtccttagatccttagttgacattaactgttgaaggcagggagaggtrgccagcctggtgggaacagcactgggaagggtatgggagagcagacagtgtgaataggacatgccaccaccgccctcagctgtttgctcatctgaacagg

SEQ ID NO: 462885 - DNA, 201 bp, Homo sapiens
tcgctaagtaagaagacataactggctcggtgtcctgttcagagggaggctggcagagagtgctgctgcggctggaggtggggagttcctcccgccgcccsacgaggcaggccgtcacactcacccacgaggccaccagcagccggctgctgcccctggcctgggtggcccggggccgcagcgcagagcagcaggtgagca

SEQ ID NO: 462886 - DNA, 201 bp, Homo sapiens
ctcctgcgactggggacagatctgggcaaagggtggttgggactccctgatggtgatgaggatggtcctgggctgagctggaaggaggcagggccagcacygggcagggctggggacagggcagtacctcattttcaatgttctcgttgttgtgaagaaactgctcaaagaccacgggcgggtgccaggggtcgttctggt

SEQ ID NO: 462887 - DNA, 201 bp, Homo sapiens
caccagagaggaacggctgtcagaagattttcgcagatttcattggagttggggaggtcaggggccagtggtggctcaaagtcacccaatgaatggctgtmctggtcacagggccgcacccctggcccctcacgaggggaatgtgtgtagcagagggggtgctgaccatgctggaactgcggcgactacagagcctgcggg

SEQ ID NO: 462888 - DNA, 201 bp, Homo sapiens
actgctcaaagaccacgggcgggtgccaggggtcgttctggtggtagatgctgctgctgcacagctccgactcccggtacttggtcactgccagggggtamctgccaggcacaggcgaagcagcttggctcagggccctgggctggcccccctcagtcctgcccagggaacagcctcagggtcagaatagaggaagatgat

SEQ ID NO: 462889 - DNA, 201 bp, Homo sapiens
aagatttccactaaaaagtctgctgccaaatgtattggacctccattgtatgttacttgttttttttttttttttctcttgctgcttttaggatcattttwaaaaaaaatccttgccctttgggagtgtgattattaagtgccttgaagtggtcttctttgggttcaatctgcttggtgttctataaccttcttgtactca

SEQ ID NO: 462890 - DNA, 201 bp, Homo sapiens
tgaatggctgtcctggtcacagggccgcacccctggcccctcacgaggggaatgtgtgtagcagagggggtgctgaccatgctggaactgcggcgactacwgagcctgcgggaacctcccctttcgcccaagatctgctctgtccccctcatcctcctcccagggccctggcgtctgggtcaagcagcgccccacacctcg

SEQ ID NO: 462891 - DNA, 201 bp, Homo sapiens
agccgacatcgaggtacttggtctgcatgcctgcaggtgtgtgtcctccatacagcgccactgcctcttgcacgctgacctcataggcaatgcgctctccrccgaagtgcacgttcaggacctgcagcccggaggaggagcgcagccggaaggcaaagctccagccgccgtagagcacagcgttgccctccagcctgaagc

SEQ ID NO: 462892 - DNA, 201 bp, Homo sapiens
ctaacaccattctattgaagcaattgtcctttttccactgtgctatcttcgcactgctgttgaaaatcaggtggctatgaaggtgtagatttatttctggrctctctatcctgttccattggtttatgcatctgtttttatgccagtaccacgctgttttagttactattgctttgtattatactttgaggtcaggaagtt

SEQ ID NO: 462893 - DNA, 201 bp, Homo sapiens
agggtgacgctgggccaggagggccccgggagtggggtgggggagggccactgggtggaggtgcccttcagggctgcatctcctggcgccggctccagttycacttcggctcctgaccctcaattcccgtctgcggcccggggacctcggccttctccccagccaccttgctggctggccctgtcttcccaaggtcaagtt

SEQ ID NO: 462894 - DNA, 201 bp, Homo sapiens
cagtctgaagctcctttgtacgtgtgcggaattgtctaactcctgtcctttctaaccccaaggaggccaggtgggtgaaagagtgaaactgctttgaaaartaggtagagtacgaatgggaggtgttattagaattgttaataatatttgatttaaactgtgatacttagccaggatgtccattagaattgcctatgcagg

SEQ ID NO: 462895 - DNA, 201 bp, Homo sapiens
ctcttgcacgctgacctcataggcaatgcgctctccgccgaagtgcacgttcaggacctgcagcccggaggaggagcgcagccggaaggcaaagctccagycgccgtagagcacagcgttgccctccagcctgaagcgagggccgtggggctggaccaagcgggggccgctcacatggatggggctggggaagtccccgcg

SEQ ID NO: 462896 - DNA, 201 bp, Homo sapiens
ttctattgaagcaattgtcctttttccactgtgctatcttcgcactgctgttgaaaatcaggtggctatgaaggtgtagatttatttctgggctctctatyctgttccattggtttatgcatctgtttttatgccagtaccacgctgttttagttactattgctttgtattatactttgaggtcaggaagtttgatgcctc

SEQ ID NO: 462897 - DNA, 201 bp, Homo sapiens
caagttaaagaaccaaggtgtgtaaggtcatgtcttcccagtcagggggccgccatatcttggtatccaatggacaacctgcctgccgctcactctctaamagccaatgatgagggagctatgtgctaagccccgcctccccaccccatgaatgcgcacagcaccacctcgtgtcccagtagcgcagctttggggagtttg

SEQ ID NO: 462898 - DNA, 201 bp, Homo sapiens
aataatatttgatttaaactgtgatacttagccaggatgtccattagaattgcctatgcaggatttattttagagccaggcaagctgattctaaagtgcaygtgaagaagtagtctagcaaaaatggccatgacaattctgaaagaaaaaccacacgaggggatcatgaaacagcccaattagcattaagctccatgttaa

SEQ ID NO: 462899 - DNA, 201 bp, Homo sapiens
tttttccactgtgctatcttcgcactgctgttgaaaatcaggtggctatgaaggtgtagatttatttctgggctctctatcctgttccattggtttatgcrtctgtttttatgccagtaccacgctgttttagttactattgctttgtattatactttgaggtcaggaagtttgatgcctctagctttgttctttttgctt

SEQ ID NO: 462900 - DNA, 201 bp, Homo sapiens
tgagaaaaagaggatgtattttccgcaaatggaacgtatctttcagaagttaaacatctgaatgacagcaacagaacttggatccgtgtctcccaacggcsaaggttggtcacccagctcccaaattccagatggtcggcatttaaaagtgaaaactgaaagcataaaggcacttagaagaaaatgtggaagattatttta

SEQ ID NO: 462901 - DNA, 201 bp, Homo sapiens
ggtcacccagctcccaaattccagatggtcggcatttaaaagtgaaaactgaaagcataaaggcacttagaagaaaatgtggaagattattttataatctygaaacggggaagtcctttaaaagtgtaagagctagacaccataaatagaatgaaatagaacatggattgtatgaatatacaagcaaggtcaaaaaataaa

SEQ ID NO: 462902 - DNA, 201 bp, Homo sapiens
ttgatgcctctagctttgttctttttgcttatttcagctttttgggtttttttttgtgtgtgtttccatacaaattccaggaatacttttgttatttctgygaagaatgtcattggtgttgtgatatgccttacttttaaaagttaaacagcaaattctcattaagttcaatttttttttcattttaaaaatacttggttc

SEQ ID NO: 462903 - DNA, 201 bp, Homo sapiens
atatgccttacttttaaaagttaaacagcaaattctcattaagttcaatttttttttcattttaaaaatacttggttctaaggagctgaaatttccactcrttactcttgttgatggagcagcctggtcaggatcaagtatcaccagcacctagtgaggcgctgtcatgggctgaactgtgtcccccaaaattcatatgtt

SEQ ID NO: 462904 - DNA, 201 bp, Homo sapiens
ctcgggaggctgaggcaggagaatggcgtgaacccgggaggtggagctggcagtgagccgagatcgcgccaccctagcctgggcgacagagcgagactccrtctcaaaaaatgaataaataaataaatacataataaaaaaatgaaataaaagaaaaccatggattaaaaatatatggaaatcattacagaaagcaggtca

SEQ ID NO: 462905 - DNA, 201 bp, Homo sapiens
ttttaaaaatacttggttctaaggagctgaaatttccactcgttactcttgttgatggagcagcctggtcaggatcaagtatcaccagcacctagtgaggygctgtcatgggctgaactgtgtcccccaaaattcatatgttgaagtcgtacccctagtacctcagaatgtgactatatttggaaatagggtctataaaga

SEQ ID NO: 462906 - DNA, 201 bp, Homo sapiens
gatcaagtatcaccagcacctagtgaggcgctgtcatgggctgaactgtgtcccccaaaattcatatgttgaagtcgtacccctagtacctcagaatgtgrctatatttggaaatagggtctataaagaagtaattaagttaagatgaggtcattagatgagtcttaatccaatatgtctggtgtctttatgagaagaggt

SEQ ID NO: 462907 - DNA, 201 bp, Homo sapiens
aacacagacatccgtgagcctaggagaggtctcagagggaaccaaccttgcagatgccttgggctcaggcttccagcgtccagaactgtgataaataaatrtgtgcgtttcagcctcccagttgtggtactttgctatggcagctctagcaaacaaatatgggcaccaaccaaacaaccaactatcatagtcacatggaat

SEQ ID NO: 462908 - DNA, 201 bp, Homo sapiens
atggactgagtatgtctccctcaaattcatgtgttgaaatcttaatctccatagtggtagcattaggagatggggcctttggaaggtgattaggtcacaarggcagtgccctcacaaatgagattaatgcccttataaaaaaaaaaaaagaccgcagaaaactctcttgtcccttccaccatgtgaggacgcagtgggaag

SEQ ID NO: 462909 - DNA, 201 bp, Homo sapiens
aaatccctaaccttttctccatctctgttgttttcttattttgggaatgctatccgagtgaaatcatactgcatgtgacatttggagtttggctttctccrccactaagcatatgcttagcgatgtctgtgctggttgttgcatatatcaatcgttcattccttttcatgactgaatagtattttattgtgacagagttcg

SEQ ID NO: 462910 - DNA, 201 bp, Homo sapiens
tgtgttttttgtttatataaatagaattctacaatgtttattattctgtgacttgcctttatcacttaacagcaaatactgaaacatatcctttttaaaawatcacagctttattgatatacaattcacatactatacaatttatagatttattaaatctattgtcacaaccaattttagaatgttttcattacctctaaa

SEQ ID NO: 462911 - DNA, 201 bp, Homo sapiens
aatgtatgaagtttataatttcaccacatcctcaccaacacttgttgttatctgtctttctgattacagccatcctggtggggatgaagtggtatcccatygtggttttgatttgcatttcccttatgactaatgatgttgagcaacttttcatgtgatattggttactatgtatcttccttggagaaatgtctgttcaga

SEQ ID NO: 462912 - DNA, 201 bp, Homo sapiens
tgatttagttcacgtctgtcttgtttagttcacgtctgtcttgtttagttcacgtctgtcttgtttagttcacatctgtcttagtaacaagccagtttccmtaaaggcttttcattcacccccctctcttttcaaaactcttatttttctttctaagtgttattttccctctgcatgtgagtaagttgttggccatctcag

SEQ ID NO: 462913 - DNA, 201 bp, Homo sapiens
gagaaagctggccagggtagctaaggctatggcacagagcggagaggggagaggacactggggcaggtagtgcccatgcagtgggcggacagtgctaacgmccacttagtcaggttgagaagggcgaacgtggtgaccggggtaactcctagttggaaaggaaagaatagagtcaggaaaagttcgtggctcaggagtgcc

SEQ ID NO: 462914 - DNA, 201 bp, Homo sapiens
cctcattttcaatgttctcgttgttgtgaagaaactgctcaaagaccacgggcgggtgccaggggtcgttctggtggtagatgctgctgctgcacagctcygactcccggtacttggtcactgccagggggtacctgccaggcacaggcgaagcagcttggctcagggccctgggctggcccccctcagtcctgcccaggg

SEQ ID NO: 462915 - DNA, 201 bp, Homo sapiens
aggaggagcgcagccggaaggcaaagctccagccgccgtagagcacagcgttgccctccagcctgaagcgagggccgtggggctggaccaagcgggggccrctcacatggatggggctggggaagtccccgcggggcttgtgggaggagaagaggggcggctcctctgtgctgtcatgccccttgcccccaggcagcgggt

SEQ ID NO: 462916 - DNA, 201 bp, Homo sapiens
tccaggggttggtgatgttttctagcttcatctgcagtgtctggaagctgttcttggtgcctggaggtatgcagggagaaggagaacgagaatcaagctgycagaactgaaacctcctcattctaccccaggatctccatcctccaccacatccaacagccaactgtcttgaataaccgggatgttgggggatgccctggg

SEQ ID NO: 462917 - DNA, 201 bp, Homo sapiens
tgtgtgcacgtctgtgtgtgtgcacgtctgttcgtgtgtttcctacacacatggccctgtgcctccccgcaagaagcagcacacagagcgaggctctgagrgtttattgtctgccccagtgaggctcctgggcttcctgggaggaactgggggaggaactgggggctggtcacacaggtctataggtcccattgtagctaa

SEQ ID NO: 462918 - DNA, 201 bp, Homo sapiens
tgttattgatccttgtagccaaggatgatcacctcaaagagattatgtaagtctccccatttttcctttaaaaacctttgtcttcctttacctccctgaaygtgcacatgatttactatggtaagcatattctcattgcaatgccctattccagaatcaatctcattttcttttggagagcctctctctgttatttaggtt

SEQ ID NO: 462919 - DNA, 201 bp, Homo sapiens
tatctgcactgggaagcccctttgaattttgacaaagacactgttttttgtttgtttgtttgtttgtttttgttttttttgagatggagtctcactctgtygcccaggctggagtgcagtggcaagatctgagctcactgcaacctcagcctcccaggttgaagtgattctcctgcctcagcctcctgagtagctgggact

SEQ ID NO: 462920 - DNA, 201 bp, Homo sapiens
tggagtgcagtggcaagatctgagctcactgcaacctcagcctcccaggttgaagtgattctcctgcctcagcctcctgagtagctgggactacaggtgcrcaccaccgtgcggatttttgtatttttagtagagagggagttttgccacattggccaggctggtcttgaactcctgacctcaggtaatccacccacctca

SEQ ID NO: 462921 - DNA, 201 bp, Homo sapiens
ttgagattaccacagggcttgcaaatactcttacaatctattaagttgataacaacttaacactacttgcataaacaagcaaactaaaaagcaaaaagaamactaataaagactttctctttatctttgttcccctactttttgttcttttttttttttgtttgagacagcatctcactctgtatctaggctgaagtgagg

SEQ ID NO: 462922 - DNA, 201 bp, Homo sapiens
ccacgtcaacgtccacatccaccaggagtcagctttgacacaactgctgaaagctggaggttctctgaagaagtttctttttcaccctggggacactgtgycttccacagccaggattggttatgagcagctggctctaggggtaagactggggtggtgcggggttggggggcacgttaacgaggtgatgaggtcaattaa

SEQ ID NO: 462923 - DNA, 201 bp, Homo sapiens
aaaatcaagaggccagaaaatcaggaagcagaagttaaaatatgttgctgatctttgaaataaagaatttgtgttggtagacatgtgaccttgtgtggtgmagggatgtatttgtgttaaaccattttggtgactatgacattccaggtgcatattggaggtagcatgtaggacttcagaaatcaccagaacagtcactgc

SEQ ID NO: 462924 - DNA, 201 bp, Homo sapiens
atatcttggtatccaatggacaacctgcctgccgctcactctctaacagccaatgatgagggagctatgtgctaagccccgcctccccaccccatgaatgygcacagcaccacctcgtgtcccagtagcgcagctttggggagtttggaaacactcctggtttgggattcactcagcaaatatttaatgtgtgtgtgctgt

SEQ ID NO: 462925 - DNA, 201 bp, Homo sapiens
ctggaggttctctgaagaagtttctttttcaccctggggacactgtgccttccacagccaggattggttatgagcagctggctctaggggtaagactgggstggtgcggggttggggggcacgttaacgaggtgatgaggtcaattaaaatatagagccaaatcttcaaaattaaaacgttttatttgggaggagagaatt

SEQ ID NO: 462926 - DNA, 201 bp, Homo sapiens
tccattatctgtcttctgccctttggttgtcaatatcttggggtctttcttggaggggaggagagggtttcctggacaagggctggggaagaggagagggrtttgaggcggggacctcatgactcttccaccgattgaaggagcgtgtgtcatgaccctctttctcttccagggctatatatccagcctgctcaccctggc

SEQ ID NO: 462927 - DNA, 201 bp, Homo sapiens
atgactactcaggaggggacatgaagcggagcaggatggggaaggggtgtaaggaatgggcaagtgctgctggagcagggctgtggccacggtcatggggscaggataactggggctgttgaagagcctcttttcctcagtctggttcttcttccagcagtcagatgcagggacgcccggtgcagaagcaccaggcactaa

SEQ ID NO: 462928 - DNA, 201 bp, Homo sapiens
gcaagtgctgctggagcagggctgtggccacggtcatggggccaggataactggggctgttgaagagcctcttttcctcagtctggttcttcttccagcastcagatgcagggacgcccggtgcagaagcaccaggcactaataatcaggagaggcatggctagattccactcacttccaacatttccttctggtctcttt

SEQ ID NO: 462929 - DNA, 201 bp, Homo sapiens
ctttcttggaggggaggagagggtttcctggacaagggctggggaagaggagagggatttgaggcggggacctcatgactcttccaccgattgaaggagcstgtgtcatgaccctctttctcttccagggctatatatccagcctgctcaccctggcaggctttgctacagctatggctgctgttgtcctctgcgtgaata

SEQ ID NO: 462930 - DNA, 201 bp, Homo sapiens
tgctgctcacgcccgacgggttcacgccgcccctgccccgtgaaggaccgcgctgcggtgcggaggtaggtcaaaagccggggccgcacctggcttcctcygcagtccccttcctggagtgtcatccctgggtgggggtccctcctacgctcctccaactgtgcggaggcagctcggggtgcgtgcggaaggaggcccggg

SEQ ID NO: 462931 - DNA, 201 bp, Homo sapiens
tccagaatgaggaaggatcagagaagaggctactgggggagaattcagtgcccccttcgccctctagggagcagacctccactgccattgtcctgtgagcygccaaagaccccacggggtgcccgcatgtccctgtctagggcagcccagggcccccactcctggctcctcacacttgcctcccctatggccgctctccag

SEQ ID NO: 462932 - DNA, 201 bp, Homo sapiens
attgtgaatggagttgctatggcctctaggccatcccagcccacccacgtcaacgtccacatccaccaggagtcagctttgacacaactgctgaaagctgraggttctctgaagaagtttctttttcaccctggggacactgtgccttccacagccaggattggttatgagcagctggctctaggggtaagactggggtgg

SEQ ID NO: 462933 - DNA, 201 bp, Homo sapiens
catttttttcttttgttgcttgggcatttgatgttatatctcagaaatcattgcctaaaattggcaaggtcgtgaagatttatgcttacattttattctargagttttagctgttacatttaggtctttgattcattttgagataatttttatatatgataaatactagggttccggtttcattcttttacatgtgtatat

SEQ ID NO: 462934 - DNA, 201 bp, Homo sapiens
aaatcttaatctccatagtggtagcattaggagatggggcctttggaaggtgattaggtcacaagggcagtgccctcacaaatgagattaatgcccttataaaaaaaaaaaaagaccgcagaaaactctcttgtcccttccaccatgtgaggacgcagtgggaagatggccagtccatgcaccaggaagcaggccctcccc

SEQ ID NO: 462935 - DNA, 201 bp, Homo sapiens
atggggcacttgatgtccctgggatagctcggtgcctctgtgcagaccgctgtccagaatgtccttctcccttcagttgatgttaaagctcaaactctacytcctttttaaagttttctgtgactttccttgaatgaattaggagggactttctccattattcttgagttattctttacgtgactttttcttacagaaaaa

SEQ ID NO: 462936 - DNA, 201 bp, Homo sapiens
tgagtcatggagtggcagttctgaaccatggcccctctcacttttttgctggtcctcccattgagatgtggggtctatgtcttcttcctttccatttgggygcaatggtgaccactgaccaatagagtatggcagaaatagtcatgggatttctgaagttaggtcataaaaggcatgcggcttccttcttgtgtgtgagaa

SEQ ID NO: 462937 - DNA, 201 bp, Homo sapiens
cactactattaactaggctacagaagttattcggtgttcactgcttttaaacctgcattcatctctctctctctctgtctctctctctgtctctctctgtrtgtgtggttttgtgtgtgcatacagttctatgcaagtttatgtcaggtgtttttgtcaggtgtggatttgtgtaagcagcgcctcagtcaagatgcagaa

SEQ ID NO: 462938 - DNA, 201 bp, Homo sapiens
ctatgtcttcttcctttccatttgggtgcaatggtgaccactgaccaatagagtatggcagaaatagtcatgggatttctgaagttaggtcataaaaggcrtgcggcttccttcttgtgtgtgagaacacccatcttgaagccctgagcctccatgcaagagtctgattacttgagaccactatgctgtgaggaagcccca

SEQ ID NO: 462939 - DNA, 201 bp, Homo sapiens
gtcttcttcctttccatttgggtgcaatggtgaccactgaccaatagagtatggcagaaatagtcatgggatttctgaagttaggtcataaaaggcatgcrgcttccttcttgtgtgtgagaacacccatcttgaagccctgagcctccatgcaagagtctgattacttgagaccactatgctgtgaggaagccccagccc

SEQ ID NO: 462940 - DNA, 201 bp, Homo sapiens
cgtgaatagcttcatctggcaaactgaaccctttttatacatcgacactgtgtgtgatcgctcagaccctgtcttccctaccactgggtacagatggatgyggcgaagtcaagagaaccaatggcagaaggaggagtgtagagcttacatgcagatgctgagggtgagcaggaagagtccagtcttcggggacccatcaca

SEQ ID NO: 462941 - DNA, 201 bp, Homo sapiens
agaccacacataggtgcttggtctacagttctagttgagcacagaccagtccagatgccagacatgtaagggaaaaagctgccagacaattgctgcctccrgtattagcatccaagatgctatcagcttccgagtcctcccagctgaagccccagacatcatggatcagagagaagccatctccagggtgtcctgtctgaa

SEQ ID NO: 462942 - DNA, 201 bp, Homo sapiens
tccagtattagcatccaagatgctatcagcttccgagtcctcccagctgaagccccagacatcatggatcagagagaagccatctccagggtgtcctgtckgaatccttgtcccattgagttcatgagcataataaaatagttgttgttttgtgccactgagttgaggtggcttgttatgtagcaatggataactgtaacg

SEQ ID NO: 462943 - DNA, 201 bp, Homo sapiens
aaccttttaacatcctgactaagttcttggatcagacatctacacctaatatttttttttttttaacttttaagttcacagtgcatgtgcaggtttgtttyataggtaaacttgcatcatgggggtttgttacacagattatttcatcacccacgtattaagcttagtacccattattatttttcatggtcctgtccctcc

SEQ ID NO: 462944 - DNA, 201 bp, Homo sapiens
acagaatcttccagaatcagagctgcagagaggtcaaggcagaggaaaaggagaggagagccacctaggtaggagccaggcagctggtcccagggcagccrgggcatgtggactcacgggaaggggtctggtttctcatcctgtcttgcaggtgactcagatattgctgggggttgtgagttgtgttcttggagtgtgtct

SEQ ID NO: 462945 - DNA, 201 bp, Homo sapiens
cggtgtcctgttcagagggaggctggcagagagtgctgctgcggctggaggtggggagttcctcccgccgccccacgaggcaggccgtcacactcacccaygaggccaccagcagccggctgctgcccctggcctgggtggcccggggccgcagcgcagagcagcaggtgagcaggagcttggccagggcagactcctggt

SEQ ID NO: 462946 - DNA, 201 bp, Homo sapiens
aattttttttgtctcttctggcgatataatttcaaatagcctgtctattctcactaattctttcttctgcttgagcagttctgctattaagagactctgaygcattcttcagtatgtcaattgaaattttcaactccagaatttctgtttgattcttttcaattatttcaatctctgttaaattttctgacaggattctga

SEQ ID NO: 462947 - DNA, 201 bp, Homo sapiens
ggatttccccaatggctgtttgtgtgtgtgtgcgtgtgcgtgtgtgtgtgagagtgtgtgtgcatgtgtgtgtgtgcgtgtgtgtgtgtgcacgtgtgtgygtgcgtgcttgtgtgtgtgcatgtgtgtgtggggtcagctgatggctcaagctgttagattcttcagggtctatcttagcttttgagtgaggctctgctc

SEQ ID NO: 462948 - DNA, 201 bp, Homo sapiens
tgctgcggctggaggtggggagttcctcccgccgccccacgaggcaggccgtcacactcacccacgaggccaccagcagccggctgctgcccctggcctgrgtggcccggggccgcagcgcagagcagcaggtgagcaggagcttggccagggcagactcctggtggatgtgcacatcgatgtgggtgtgctgtggggcct

SEQ ID NO: 462949 - DNA, 201 bp, Homo sapiens
ttgtcttataaatatttctattctctttacttaaattaggatcctaatgagattcataccttagaattagctgatatgcttcttgagtttcttttcatctrtagatataacatatctctatctcttttgatatttcctggctatgaattctattttgttatatattaggatggctacatttttgtaattaaattttttaaa

SEQ ID NO: 462950 - DNA, 201 bp, Homo sapiens
agatcttgctcaaatgctcctgattggtagaaactaattctatacagagctttagatataaaacaatctgggaaatggagagtttaactttctagttgctkcagaacaggaagatacattaggagggaaatataatagaggttaaggaagtgtccatcatatttcccatgagtccagtgacttgggaaatggctgttctca

SEQ ID NO: 462951 - DNA, 201 bp, Homo sapiens
gagaatcgcttgaacccggcaggcggaggttgcagtgagccaagatcgcatcattgcactccagcctgggcaatgagagtgagactctgtctaaaaaaaamccaaaaaaaaaaaaaaaaaaaaaaaagtggtgttttcaaacctggctcctctctcagaatgatctttagagcttcccaaaaacacagtattcaggaccac

SEQ ID NO: 462952 - DNA, 201 bp, Homo sapiens
tctgtgttatcttgaatttctttgagtatcttcaaaacagctattttgaattctctgtctgaaaggtcagatatctctgtttctccaggttggtccctggygccttatttagttcatttgatgaggtcttgttttcctggatggctttgatgcttgtggatgttcgtcagtgttcgagcattaaaaagttaggtatttatt

SEQ ID NO: 462953 - DNA, 201 bp, Homo sapiens
aaaccaatccttggatgctctagcaaataagcatgagggtttagcaggcaaccttttaacatcctgactaagttcttggatcagacatctacacctaatatttttttttttttaacttttaagttcacagtgcatgtgcaggtttgtttcataggtaaacttgcatcatgggggtttgttacacagattatttcatcaccc

SEQ ID NO: 462954 - DNA, 201 bp, Homo sapiens
cctgtagcatcttctctatggttgtgccattttgcaagcctgtcactgacactgggaaattcccttgcagcctccccaagagaaagttgtcactctcagatttttttttttttttttttgagacagggtctcactgtgtctgtgttgcccaggctggagtgcagtggcgtgatctcggcttctcagctcaagagatcttcc

SEQ ID NO: 462955 - DNA, 201 bp, Homo sapiens
ttttttttttaacttttaagttcacagtgcatgtgcaggtttgtttcataggtaaacttgcatcatgggggtttgttacacagattatttcatcacccacstattaagcttagtacccattattatttttcatggtcctgtccctcctcccaccctccactctccaacaggcctcagtgtgtgttgttctcctctatgcgt

SEQ ID NO: 462956 - DNA, 201 bp, Homo sapiens
cagcgagcttcctttttgttagtaatggtggcttttctggactgcagtagaccagtgtgaataaagtacatgccatgtgtgtgcatgtccgtgtgagtgcrtgcacgtctgtgtgtgtgcacgtctgtgtgtgtgtgcatgtctgtgtgtgtgtgcacgtctgtgtgtgtgcacgtctgttcgtgtgtttcctacacacat

SEQ ID NO: 462957 - DNA, 201 bp, Homo sapiens
tgttacacagattatttcatcacccacgtattaagcttagtacccattattatttttcatggtcctgtccctcctcccaccctccactctccaacaggccycagtgtgtgttgttctcctctatgcgttctcatcatttagctcccacttataagtgagaacataaggtattttggtttcctgtgttagtttgctaaagat

SEQ ID NO: 462958 - DNA, 201 bp, Homo sapiens
taaagtacatgccatgtgtgtgcatgtccgtgtgagtgcgtgcacgtctgtgtgtgtgcacgtctgtgtgtgtgtgcatgtctgtgtgtgtgtgcacgtckgtgtgtgtgcacgtctgttcgtgtgtttcctacacacatggccctgtgcctccccgcaagaagcagcacacagagcgaggctctgagggtttattgtctg

SEQ ID NO: 462959 - DNA, 201 bp, Homo sapiens
gcacctgccaccacgcctggataatttttatatttttagtagagatggggttttaccatattggccaggctggtctcaaattcctgaccttgtgatctgcycgccttggcccctccaaagtactgggattacaggtgtgagccactgcacctggccaattccatgtcttttctattgtgaatagtgctgcagtgaacatag

SEQ ID NO: 462960 - DNA, 201 bp, Homo sapiens
agtgtgcaattgctctaatttgcataagcttgaatttggtggtaaatgaaacatttactataactggcatattgatttaatacatatttatttgcttttgrgaagcagaacatgctttgaggagaagattatgtgctctcttgctgcaatgcattactattagaaacacagcccaggaaatagctgccacctcagggccat

SEQ ID NO: 462961 - DNA, 201 bp, Homo sapiens
ttcctcagcccacttaaagtgaaggagacgaggataaagacctttgggatgagccactcccacttaatggattgtagatatattttcttttccttaggatttttttttttttttttttgagaactagtcttgctctgttgcccagactggagtgcagtggtgtgatctcggctcactgcaagctccgcctcccgggttcac

SEQ ID NO: 462962 - DNA, 201 bp, Homo sapiens
gtggttccccatgatagaaaactccacatccattgtattagctcctgtggctgctataaacacagtaccacaaacttagtggcctcaaacaacaccattgyattctcttaccatctgaggtcttcagggccttgttcctaatggaggctctaggggaaaatctgtttccttgtcttttccagtttctagaggtcgcttaca

SEQ ID NO: 462963 - DNA, 201 bp, Homo sapiens
aatggaggctctaggggaaaatctgtttccttgtcttttccagtttctagaggtcgcttacattccttggcttgtggccccttctgtcatcttcacagccrgcagtgtggcatcttctctcctctcttctctcctgtctcccgctcacaagggccttgtgattactcaagcccacctggatgatccaggataatttcccat

SEQ ID NO: 462964 - DNA, 201 bp, Homo sapiens
cttctttccatatgcagctctcccctttgctgtctggggaatgtggccatcaccatggtcctgggccaactgtcgccgccctgtgcctctctgcgccctcytctgctctgatctccccactctcccctctgccctgtcccaggtgttcgtctgactccccttcctctgccaccttgttttttttttgcctgatctgctttt

SEQ ID NO: 462965 - DNA, 201 bp, Homo sapiens
atgctgtctgtattattctatgcctcttctcttttcttacttgctatggcctgaagttttgccctatcagcacacagagtatcctcattcgtgtgtttctyttacaatcagctagaattgcactgtgaggttgtgccacagttcattcaattggggttttctacagatgagaatttggttgtttccagactttcgctgtta

SEQ ID NO: 462966 - DNA, 201 bp, Homo sapiens
tttttttttttgagacagggtctcactgtgtctgtgttgcccaggctggagtgcagtggcgtgatctcggcttctcagctcaagagatcttcctatctaascccctctgccccaggactacaggcgtatgctgccctgcctggctaattttttttgtattttttaggagagatggggtttagcgtgttgctcaggctggtc

SEQ ID NO: 462967 - DNA, 201 bp, Homo sapiens
ctggctaattttttttgtattttttaggagagatggggtttagcgtgttgctcaggctggtcttgaactcctggactcaagtgatcctcccatcctcccgyctcagcctcccaaagtgctgggattaccagcgtgagccaccgtgcctggccagtctcagattttaaaaaaacaatctgataggtgcaggatttcagcgag

SEQ ID NO: 462968 - DNA, 201 bp, Homo sapiens
ccatcagaacgcacctgtgtgctctgctcccagttcgctctgcttccagcctttgcccttaagctgatctctgactccttcttgaagtcaatcagaccccrccctgcagggagggacaaggtgaggcctgagctggcctaggaggggcctatggcttgggaggtgcctctgtgggcagctacagtggcgagagtgggtttg

SEQ ID NO: 462969 - DNA, 201 bp, Homo sapiens
tgtgtcctggagaagaagacacctgtattaacagcaaaactacatttctgacacaacgaaataccttttaggtagacagattttgaaatttagtgtagaarttcaaaggtaggctctagagtcaggctgtctgagtcaagtcccagtgactcatgccactaggacttgctgtgtggccttgggcacgctgcttaaactctc

SEQ ID NO: 462970 - DNA, 201 bp, Homo sapiens
aggtgaggcctgagctggcctaggaggggcctatggcttgggaggtgcctctgtgggcagctacagtggcgagagtgggtttgaggaagctggctgtgcarcacacttgtcctgagtctgtttccagacaagtgccgccttccacaagaatttgccttggcttctctgtgacgagccatgcaatgccacgatctgttaatt

SEQ ID NO: 462971 - DNA, 201 bp, Homo sapiens
ggtggtatgatttgatttcttgctttttaatttttgtgcatctgttgtatgttttttgatttgagattaccacagggcttgcaaatactcttacaatctawtaagttgataacaacttaacactacttgcataaacaagcaaactaaaaagcaaaaagaacactaataaagactttctctttatctttgttcccctacttt

SEQ ID NO: 462972 - DNA, 201 bp, Homo sapiens
acactacttgcataaacaagcaaactaaaaagcaaaaagaacactaataaagactttctctttatctttgttcccctactttttgttcttttttttttttgtttgagacagcatctcactctgtatctaggctgaagtgaggtgcatggcgtgatctcagctcactgccacctccgcctctggggctcaagcgatcctccc

SEQ ID NO: 462973 - DNA, 201 bp, Homo sapiens
ggaggcagggccagcaccgggcagggctggggacagggcagtacctcattttcaatgttctcgttgttgtgaagaaactgctcaaagaccacgggcgggtsccaggggtcgttctggtggtagatgctgctgctgcacagctccgactcccggtacttggtcactgccagggggtacctgccaggcacaggcgaagcagct

SEQ ID NO: 462974 - DNA, 201 bp, Homo sapiens
tcagcaccttaaatatgtcatgccactatctcctggcttgtaagatttccactaaaaagtctgctgccaaatgtattggacctccattgtatgttacttgttttttttttttttttctcttgctgcttttaggatcatttttaaaaaaaatccttgccctttgggagtgtgattattaagtgccttgaagtggtcttcttt

SEQ ID NO: 462975 - DNA, 201 bp, Homo sapiens
ctctttaaggccaacaactcttagatctgcccttttgaggctattttctagatcctgtaggtgtgcttcattaaaaaaaaattttttttgtctcttctggygatataatttcaaatagcctgtctattctcactaattctttcttctgcttgagcagttctgctattaagagactctgacgcattcttcagtatgtcaatt

SEQ ID NO: 462976 - DNA, 201 bp, Homo sapiens
gtgcacgtctgtgtgtgtgtgcatgtctgtgtgtgtgtgcacgtctgtgtgtgtgcacgtctgttcgtgtgtttcctacacacatggccctgtgcctcccygcaagaagcagcacacagagcgaggctctgagggtttattgtctgccccagtgaggctcctgggcttcctgggaggaactgggggaggaactgggggctg

SEQ ID NO: 462977 - DNA, 201 bp, Homo sapiens
cctacttgggaggctgaggcaggagaatggcatgaacccgggaggcagagcttgcagtgagcagagattgcgccactgcactccagcctgggcgacagagygagactctgtctcaaaaaaaaaaaaaaaaaagtttattttttaaacctcactcagttttctcatttgtgaaacaggcacaataatggatatgaaggtatg

SEQ ID NO: 462978 - DNA, 201 bp, Homo sapiens
accacgggcgggtgccaggggtcgttctggtggtagatgctgctgctgcacagctccgactcccggtacttggtcactgccagggggtacctgccaggcayaggcgaagcagcttggctcagggccctgggctggcccccctcagtcctgcccagggaacagcctcagggtcagaatagaggaagatgattgccttcccca

SEQ ID NO: 462979 - DNA, 201 bp, Homo sapiens
ctacttgggaggctgaggcaggagaatggcatgaacccgggaggcagagcttgcagtgagcagagattgcgccactgcactccagcctgggcgacagagtragactctgtctcaaaaaaaaaaaaaaaaaagtttattttttaaacctcactcagttttctcatttgtgaaacaggcacaataatggatatgaaggtatga

SEQ ID NO: 462980 - DNA, 201 bp, Homo sapiens
agcagcttggctcagggccctgggctggcccccctcagtcctgcccagggaacagcctcagggtcagaatagaggaagatgattgccttccccaagatgasagatcatctgtcctgggagtcagcaggacgggctgctgttaaccgggttcaggtgacccacaggagtcctccccgcccccctccccaaatgcacagagac

SEQ ID NO: 462981 - DNA, 201 bp, Homo sapiens
tgaggcaggagaatggcatgaacccgggaggcagagcttgcagtgagcagagattgcgccactgcactccagcctgggcgacagagtgagactctgtctcaaaaaaaaaaaaaaaaaagtttattttttaaacctcactcagttttctcatttgtgaaacaggcacaataatggatatgaaggtatgacaaaatcgttggc

SEQ ID NO: 462982 - DNA, 201 bp, Homo sapiens
gatgcgatcttggctcactgcaacctctgcctcccaggttcaagtgattctcctgcctcagcctcccgagtagctgggattacaggcgcccacgaccacayccggctaacttttgtatctttagtagagacagggtttcgctgtgttggccaggctggtctcgaactcctgacctcaggtgatctgcccaccttggcctcc

SEQ ID NO: 462983 - DNA, 201 bp, Homo sapiens
gtttcgctgtgttggccaggctggtctcgaactcctgacctcaggtgatctgcccaccttggcctcccaaagtgctgggattacaggcgtgagctcctgcrcccagcacacaagtccactttcatttggagtttcttccgcctctgccaccgtgagacagcaagaccagcccctcctcctcctcttcctcagcccacttaa

SEQ ID NO: 462984 - DNA, 201 bp, Homo sapiens
agtccactttcatttggagtttcttccgcctctgccaccgtgagacagcaagaccagcccctcctcctcctcttcctcagcccacttaaagtgaaggagasgaggataaagacctttgggatgagccactcccacttaatggattgtagatatattttcttttccttaggatttttttttttttttttttgagaactagtc

SEQ ID NO: 462985 - DNA, 201 bp, Homo sapiens
cactcacttccaacatttccttctggtctcttttctaatggaagaggaaaggcaagacaatcgtgagtgggagagaaagggcggagtctctcctccagggkcagcttagctctggagctaccagaatcagcagcatggtacctgatccaaaggcatagcatggatatggacttccctggattcctgggctctttgacttgg

SEQ ID NO: 462986 - DNA, 201 bp, Homo sapiens
tatatgtgtatatccacatagactaggaaccccatagacacaaacacagacagacacagacacacacactgagggaagccactgaccctcccccaggcccyctgggtcttcctcaccttgcccaggtgatggcctgctcctcctgccagcctgggggcagcacctggtcggccatggagtggatctgcaggcggtagctgc

SEQ ID NO: 462987 - DNA, 201 bp, Homo sapiens
tgacccggttaacacacgagtaaacaggcctagagcttgtctgctgtttgacctcttttaagacccggctgtgctgcatctacaaaatgaagatgacagagctagccgaggtcttcagcaaggaagaaaggggtcagtgtatatgaaagggttacctgggcagtgtcattccctccatctctgtacgcagccctttgggaa

SEQ ID NO: 462988 - DNA, 201 bp, Homo sapiens
cacccaccacccccttctacctgcaaggtgtcacacaggccttctgaccaggacacttcttctggtcactaaccttcccccccctccccatatccccttcytgctcaattccacctctctatactcctggatggttactctcagatctgggtgtcccctccccatgtctccctctggttttgctctcctcccattaggggc

SEQ ID NO: 462989 - DNA, 201 bp, Homo sapiens
aatgaagatgacagagctagccgaggtcttcagcaaggaagaaaggggtcagtgtatatgaaagggttacctgggcagtgtcattccctccatctctgtaygcagccctttgggaaccatcacaataaggaagaggtgagggcagaggtgaaggatccactgcccaggcaaggtgctaccatgtggtgggagagtgtgaac

SEQ ID NO: 462990 - DNA, 201 bp, Homo sapiens
tcctgagggctagcacccagggcaaaatgcctgagctggggcatcgttatatgggcagggaggcctgaaacacgaggaggccctttagggttggcagccakcctgtggccgtgaccccgagagtccctccccaccccccgctgcttgcatgcccacatccaagttgttaacctgcagctcttagcacaagtgatgagtctt

SEQ ID NO: 462991 - DNA, 201 bp, Homo sapiens
cccgctacaacaagcttatccgcccagccaccaatggctctgagctggtgacagtacagcttatggtgtcactggcccagctcatcagtgtggtgagtagrggtcccaggctctctgcccagctactgaaatcagccccgccaaaatgtgttaatgcttgtgtgcttcctcccctggtgtttccaaggcttggggaggtgt

SEQ ID NO: 462992 - DNA, 201 bp, Homo sapiens
gccgtgaccccgagagtccctccccaccccccgctgcttgcatgcccacatccaagttgttaacctgcagctcttagcacaagtgatgagtcttttgtgcmccacacaggcaggagggggcaacattgaggacagtaggagtggtgtgtattgggggaggggtggcgttggtggcggggttagagattccaggagcctgct

SEQ ID NO: 462993 - DNA, 201 bp, Homo sapiens
aagtgaggcccttcctcatctccatgctctttcaccctgccaccctctgctgcacagtagtgttgggtggaggatggacgagtgagctaccaggaagaggrgcgctgcccccacagatccatccttttgcttcatctggagtccctcctcccccacgcctccatccacacacagcagctccaacctggaggctggaccaac

SEQ ID NO: 462994 - DNA, 201 bp, Homo sapiens
gtgatgagtcttttgtgcaccacacaggcaggagggggcaacattgaggacagtaggagtggtgtgtattgggggaggggtggcgttggtggcggggttaragattccaggagcctgcttgtggtggagagcatggagtcctaaatcaatatccctgctcttctgagtcccaggggatggcctcctgaaatatttatggag

SEQ ID NO: 462995 - DNA, 201 bp, Homo sapiens
gagattccaggagcctgcttgtggtggagagcatggagtcctaaatcaatatccctgctcttctgagtcccaggggatggcctcctgaaatatttatggakatgggggtgggtgaaggggaaggctccttggccccttcctcaggctttctgcatacccggcttttggcttcttctacagggttccctgagagcttctttg

SEQ ID NO: 462996 - DNA, 201 bp, Homo sapiens
ccttgtcttctacctgccatccgactgtggcgagaagatgacgttgtgcatctcagtgctgctggcgctcacggtcttcctgctgctcatctccaagatcvtgcctcccacctccctcgacgtgccgctcgtcggcaagtacctcatgttcaccatggtgcttgtcaccttctccatcgtcaccagcgtgtgcgtgctcaa

SEQ ID NO: 462997 - DNA, 201 bp, Homo sapiens
gagccgtgtggctgtggcctccgggaggcggtggacggcgtgcgcttcatcgcagaccacatgcggagcgaggacgatgaccagagcgtgagtgccgcagkctgggaccccgggcgtgagatatggggtctgccagggcccgggtatctggaaagcagcggcgttctatagacatgcagaggtagtaggagtgtaggggag

SEQ ID NO: 462998 - DNA, 201 bp, Homo sapiens
tctccatgctctttcaccctgccaccctctgctgcacagtagtgttgggtggaggatggacgagtgagctaccaggaagaggggcgctgcccccacagatscatccttttgcttcatctggagtccctcctcccccacgcctccatccacacacagcagctccaacctggaggctggaccaactgctttgttttggctgct

SEQ ID NO: 462999 - DNA, 201 bp, Homo sapiens
ccgtgaccccgagagtccctccccaccccccgctgcttgcatgcccacatccaagttgttaacctgcagctcttagcacaagtgatgagtcttttgtgcamcacacaggcaggagggggcaacattgaggacagtaggagtggtgtgtattgggggaggggtggcgttggtggcggggttagagattccaggagcctgctt

SEQ ID NO: 463000 - DNA, 201 bp, Homo sapiens
agccaagagttggggggagatatgataggctgacatccccccgaccccgcactttgggtaggggccggccccaccctgtggtcagtctctggctacctggytggttccaggctgaggctcagctgttgccatggtgactggccaggtttcctctaggacagctgccattctggctgggggatgaagaagggcactgcggtg

SEQ ID NO: 463001 - DNA, 201 bp, Homo sapiens
tctccatctcttgtaccagcccaggcaatagtgttgaggaggggagcaaggctgctaagtggaagacagagatggcagagccatccaccctgaggagtgaygggcaaggggccaggaaggggacaggattgtctgctgcctccaagtcatgggagaagaggggtataggacaaggggtggaagggcaggagctcacaccgc

SEQ ID NO: 463002 - DNA, 201 bp, Homo sapiens
atgacccggttaacacacgagtaaacaggcctagagcttgtctgctgtttgacctcttttaagacccggctgtgctgcatctacaaaatgaagatgacagagctagccgaggtcttcagcaaggaagaaaggggtcagtgtatatgaaagggttacctgggcagtgtcattccctccatctctgtacgcagccctttggga

SEQ ID NO: 463003 - DNA, 201 bp, Homo sapiens
ggggtataggacaaggggtggaagggcaggagctcacaccgcaccgggctggcctgacacaatggtagctctgaagggaggggaagagagaggcctgggtrtgacctgacacctgccgctgcttgagtggacagcagctggactgggtgggccccacagtggtcagcgattcctgccaagtagggtttagccgggccccat

SEQ ID NO: 463004 - DNA, 201 bp, Homo sapiens
cctctcttccagaactacaccaccaccaccttcctccactcagaccactcagcccccagctccaagtgaggcccttcctcatctccatgctctttcacccwgccaccctctgctgcacagtagtgttgggtggaggatggacgagtgagctaccaggaagaggggcgctgcccccacagatccatccttttgcttcatctg

SEQ ID NO: 463005 - DNA, 201 bp, Homo sapiens
agctctgaagggaggggaagagagaggcctgggtgtgacctgacacctgccgctgcttgagtggacagcagctggactgggtgggccccacagtggtcagygattcctgccaagtagggtttagccgggccccatggtcacagacccctgggggaggcttccagctcagtcccacagccccttgcttctaagggatccaga

SEQ ID NO: 463006 - DNA, 201 bp, Homo sapiens
atcattctgggatcactgcaggagaggagtggggtgtgtgtctgtgtggtgggacccgcttatactcgtttgtctcccatcctgcatcatgtgacctgggmctcctccgtctcctccatccaggtgagtgaggactggaagtacgtcgccatggtgatcgaccgcctcttcctctggatctttgtctttgtctgtgtcttt

SEQ ID NO: 463007 - DNA, 201 bp, Homo sapiens
tgcccagcttaatgctgggcaaggactggaggaagctccagatctggaggtggcagagatactggatggaaacctggagcaagggtttgggaggggaagtraggaaacaggttgagactatctccatcagagatggcaaggccacaggtgatctgagaactatttttgtctgaaaagaaggcatgcacaggctctctgctt

SEQ ID NO: 463008 - DNA, 201 bp, Homo sapiens
tgaggcccaggaaccaccgcggcggccggcaccacctggacccagctccaggcgggcgcggcttcagcaccacggacagcgccccacccgcggccctcccyccggcggcgcgctccagccggtgtaggcgaggcagcgagctatgcccgcggcatggcccggcgctgcggccccgtggcgctgctccttggcttcggcctc

SEQ ID NO: 463009 - DNA, 201 bp, Homo sapiens
ccaccacccccttctacctgcaaggtgtcacacaggccttctgaccaggacacttcttctggtcactaaccttcccccccctccccatatccccttcttgytcaattccacctctctatactcctggatggttactctcagatctgggtgtcccctccccatgtctccctctggttttgctctcctcccattaggggctgg

SEQ ID NO: 463010 - DNA, 201 bp, Homo sapiens
ccagggcaaaatgcctgagctggggcatcgttatatgggcagggaggcctgaaacacgaggaggccctttagggttggcagccagcctgtggccgtgaccycgagagtccctccccaccccccgctgcttgcatgcccacatccaagttgttaacctgcagctcttagcacaagtgatgagtcttttgtgcaccacacagg

SEQ ID NO: 463011 - DNA, 201 bp, Homo sapiens
cagggcaaaatgcctgagctggggcatcgttatatgggcagggaggcctgaaacacgaggaggccctttagggttggcagccagcctgtggccgtgacccsgagagtccctccccaccccccgctgcttgcatgcccacatccaagttgttaacctgcagctcttagcacaagtgatgagtcttttgtgcaccacacaggc

SEQ ID NO: 463012 - DNA, 201 bp, Homo sapiens
cgcttatactcgtttgtctcccatcctgcatcatgtgacctgggcctcctccgtctcctccatccaggtgagtgaggactggaagtacgtcgccatggtgrtcgaccgcctcttcctctggatctttgtctttgtctgtgtctttggcaccatcggcatgttcctgcagcctctcttccagaactacaccaccaccacctt

SEQ ID NO: 463013 - DNA, 201 bp, Homo sapiens
acgcagggtgtcccattccctcaggaatagcgcctatggggatattgactgaaataacccagcgtgggctctcctggggcaaggctgggctgggacagtcygtaaccaacttggacctgtctgctgagcaagccacagacgagccctggggacgtgcggtcatccttgacttcagactctgacgggctctcctacccacac

SEQ ID NO: 463014 - DNA, 201 bp, Homo sapiens
ccttggtgtaccccacgttcgggccccaggactcattctcagaggagagaagtgacgtgtgcctggtgcagctgctgggaaccgggtgggccctgcacttrccctatttgctggaaacccaaacgcactagttctcagctggtcctgtcccgctcctccttctccaagccctagggctgaagccaggggtttgtgcagaca

SEQ ID NO: 463015 - DNA, 201 bp, Homo sapiens
tctttctcggctcactgcaagctcctcctaccaggttcaagtgattctcatgcctcagcctcctgagtagctgggattacagatgtgcgccaccatgcccrgctaatttttgtatttgtgtgtgtattttttatttttactttattttattttatttttatttatttattttgagatggagtctcgctctgtctcccaggc

SEQ ID NO: 463016 - DNA, 201 bp, Homo sapiens
tgcaggaggaataagcatgttgggcccagattccaagtggtctgggttcaagtacccactgttcggggctggaaaagatgtgatttggcccatggagcaayaggaagtttcagccttggtggcttcctcaaccccagaatagctctagcgtcatctttcctgggctagggcagccagatttagcaaatcaaaatgcaggac

SEQ ID NO: 463017 - DNA, 201 bp, Homo sapiens
taactgctctcgtggagttttggtttcctcatccttcacctgcagctggtggatgggagtatcacacgatcatgcacatgtgtctcatgagattgtgtgtmtatgtcatcttaccagtggggctcagtacttgtcagccattactgtttccatctatcaaagcattgagcatccttgactagcagcaacggcttcctcacc

SEQ ID NO: 463018 - DNA, 201 bp, Homo sapiens
accgtcatccccctgcagccacccttcccagagtcctttgcccaggccaccccaggcttcttggcagccctgccgggccacttgtcttcatgtctgccagsgggaggtgggaaggaggtgggaggagggcgtgcagaggcagtctgggcttggccagagctcagggtgctgagcgtgtgaccagcagtgagcagaggccgg

SEQ ID NO: 463019 - DNA, 201 bp, Homo sapiens
aagtacccactgttcggggctggaaaagatgtgatttggcccatggagcaataggaagtttcagccttggtggcttcctcaaccccagaatagctctagcrtcatctttcctgggctagggcagccagatttagcaaatcaaaatgcaggactgctgtattgtctctgtcaacccccatgcccagctgggtgtctggaatc

SEQ ID NO: 463020 - DNA, 201 bp, Homo sapiens
ccatggccagcctggggctgctgctcctgctcttactgacagcactgccaccgctgtggtcctcctcactgcctgggctggacactgctgaaagtaaagcyaccattgcagacctgatcctgtctgcgctggagagagccaccgtcttcctagaacagaggctgcctgaaatcaacctggatggcatggtgggggtccgag

SEQ ID NO: 463021 - DNA, 201 bp, Homo sapiens
gaatagctctagcgtcatctttcctgggctagggcagccagatttagcaaatcaaaatgcaggactgctgtattgtctctgtcaacccccatgcccagctrggtgtctggaatctactgggagttccaacaactacaactagggggctgggaagacgcagggcagagtcagcgctccatccttaacagcttggaaccactt

SEQ ID NO: 463022 - DNA, 201 bp, Homo sapiens
agaccgtctcagaactgcaagactttcccatagcagggcgtgtgtctgtcatctgtaccactgactcccttgtctttgggtgtttgtctccccagaggggrtgcacacagggaccactccaacagagccaggactatatcaacctcttctgcgccaacatgatggacttgaaccgcagagctgaggccatcggatacgcct

SEQ ID NO: 463023 - DNA, 201 bp, Homo sapiens
cccaggactggcctaacctccgctgcctaaccgtcatccccctgcagccacccttcccagagtcctttgcccaggccaccccaggcttcttggcagccctrccgggccacttgtcttcatgtctgccagggggaggtgggaaggaggtgggaggagggcgtgcagaggcagtctgggcttggccagagctcagggtgctga

SEQ ID NO: 463024 - DNA, 201 bp, Homo sapiens
cccgcgggttcaggctcgttgtacattgcattgcccccgcgatcggtcacagagcacctcctagtggcccaggcatcacattgggcacttcccagctgtgycatccccctacgagagcccctctggtgccgtttctagaggcctcgccctttcctgataaaaactcttgaggctcagaaaggttactttagcaaaccaagt

SEQ ID NO: 463025 - DNA, 201 bp, Homo sapiens
accagctgggccaacatggtgaaacccattctctactaaaaatacaaaaaaaaaattagctggacgtggtggcgtgcacctgtaatcccagctacaagagkaggctgaggcaggagaatcactggaacccgggaggcggaggttgcagtgagtaagattgcgccactgcactccagcccaggcaatggactaagactctgc

SEQ ID NO: 463026 - DNA, 201 bp, Homo sapiens
ttctgggttgaattgcaattgctagatcaaagatctagcctgtgagcctggagaatcagggctgagaaggacagggcgggcagccctctccccagcatccygtggacagcaggctctacgcccaggactggcctaacctccgctgcctaaccgtcatccccctgcagccacccttcccagagtcctttgcccaggccaccc

SEQ ID NO: 463027 - DNA, 201 bp, Homo sapiens
ccgtcatccccctgcagccacccttcccagagtcctttgcccaggccaccccaggcttcttggcagccctgccgggccacttgtcttcatgtctgccaggsggaggtgggaaggaggtgggaggagggcgtgcagaggcagtctgggcttggccagagctcagggtgctgagcgtgtgaccagcagtgagcagaggccggc

SEQ ID NO: 463028 - DNA, 201 bp, Homo sapiens
actcttgttcttctctcccagtgtggggagtcaccagcccggttcttggcccacactttgagtagcactgaagctgcccgcgggttcaggctcgttgtacrttgcattgcccccgcgatcggtcacagagcacctcctagtggcccaggcatcacattgggcacttcccagctgtgtcatccccctacgagagcccctctg

SEQ ID NO: 463029 - DNA, 201 bp, Homo sapiens
cctgggaaactaaaccttttatttatctggggtttccatgggatgcagtgggtttagtcaaatcccgtcccatcactgttcctattgattaggggaaaaartggttttataagcaaaaggagctttcttgagtgtttcaaacccaatctgggaccaggggacagggcttagagccctgagctgcacctgccagtgggcagg

SEQ ID NO: 463030 - DNA, 201 bp, Homo sapiens
ccaaatagttgaatgaattaactctgttcccttccagagcagctaaaaagtgtccgggagaagtgggcccaggagcccctgctgcagccgctgagcctgcrcgtggggatgctgggggagaagctggaggctgccatccagagatccctccactacctcaagctgagtgatcccaagtacctaagaggtgagcacacgcag

SEQ ID NO: 463031 - DNA, 201 bp, Homo sapiens
tcttgtgagagtgaatatgtctcacaagatctgatggttttaaaaaggggagtttccctgcacaagttctcttctcatgtctgccaccatgtgagacatgsctttcaccttctgccatgattgtgaggactccccagccatgtggaactgtaagtaagtccataaaccactttcttttgtaaatttcctggtctcagatat

SEQ ID NO: 463032 - DNA, 201 bp, Homo sapiens
gtttttgagacagagtcttgctctgtctcccgggctggagtgcaggggcataattacagctcactgctgggctcaagcaatcctcccagggactacaggcrtgcgccaccgggcctggctagtttttgtatttgttgtagagatggggtttcgccatgttgcccaggctggtctggaactcctgggctcaagcagttgcct

SEQ ID NO: 463033 - DNA, 201 bp, Homo sapiens
ttagaggcatgagccaccgcacctggcctggttttctcttcagacacgcacaaccaactgcttacattccatggcctttctggcaacactgctacaacacrtcgttgatgataagaggcacagggattaatgctgagggatcttgagatatattttcagtagagttgactatatagagtatgtaaatagataaagcaaatt

SEQ ID NO: 463034 - DNA, 201 bp, Homo sapiens
cacaactgtcttccaatcaaaagtgttcttcccgtactcaagggtggagtttgcaagcagctggcctgtgattgggcagattttcattcagttatgtttamgatgttttcaggcatgcttggttttgagtaatgcctagcagggcgcccccttttaaggatgagtaattgagggttggatgaatgagtttctgaagtgatt

SEQ ID NO: 463035 - DNA, 201 bp, Homo sapiens
ctggcctgacttttcttaatagtttaggattacttgactgggaaggaatccccatcttgaacctatataaatatactttaaaaaacattttttttttttttgagacagggtctcactctgtcacccaagctggagtgcaatgacacagtcacaacacactgcagcttcgacctccctgggctcaggtgatccttccgcctc

SEQ ID NO: 463036 - DNA, 201 bp, Homo sapiens
tttaggtcccaggagtttaggtgtgtgttagtttgcgttgctcctgcgatttaccatgtatttgatcatgtctcaggttgatcttcactcgaaaaggggtrctccgtgtggaggggtttttaagcccccagcaaagtgaccctgatgccatgaacctgtggattccctcttcctccctagcagaagggatagatctagaga

SEQ ID NO: 463037 - DNA, 201 bp, Homo sapiens
aagtgatatgtcagctgataataactatgagaaaaataaggaaagaggattgaagtgtgaggatgctagagaggctacagttttaaacaggatgatctgasaaagtgagagttgaggaacagcctgcaggaggtgaaagaatacaccacactgtgacaggtattccagacaggtgcaagcatcccaaagctggagtatttc

SEQ ID NO: 463038 - DNA, 201 bp, Homo sapiens
tcattgcctcagtggtagaaaataagaaaacctcagatgcttcaaagcgggcctgcaacttgactgatacccagaaggaagtgaaggagatggtgatgggkttaaatgtgctagatccccatacttctcactcctggctttgtgatgggaggcttctgtgtctccatgaccccagcaacaaaaacaattggaagatcttcc

SEQ ID NO: 463039 - DNA, 201 bp, Homo sapiens
aggaggtggaggttgcagtgagccgagatcatgccacggcactccagcctgggtgacagagcaagactctgtcttaaaaaaaaaaaaaaaattggaaagtwggtctgtgtttttatctggtcacattcagcagtatgggtgcaggtgtagaacaggtgaatggaaaaactaagaggaactctgggacagctttttaaagaa

SEQ ID NO: 463040 - DNA, 201 bp, Homo sapiens
cttaagcccaggtgtttgaaattggcctgggcaacatggcaagaccctgtctctacaaacagttttaaaaaatgaaaaattaggccaggcgcagtggctcrcgcctgtaatcccagcactttgggaggccgaggcaggtggatcacaaggtcgggagatcgagaccatcctggcttaacatggtaaaaccccgtctctact

SEQ ID NO: 463041 - DNA, 201 bp, Homo sapiens
ttaaattaataaatataagtttgggctcatacctacctatgggtctcttctctctctctctctctctctgtgtgtgtgtgtgtgtgtgtgtgtgtgtgtgkccctttctcttgtctgtatctgggtacattaatatataggaaagtccttccttttttttgtttttgtgagggaatcttgctctgttgccaggctggagtg

SEQ ID NO: 463042 - DNA, 201 bp, Homo sapiens
agatatgtcttttggcctaaaaacaggaagaatgagattgccatttactgataaagagattctttagggaaaagcaggtttggggaggaaaagggggagtkttaacttggccgtgttaaatttgagatgcttgttagattttcaaaggaaaatactgagaaggcagctggggatacagctctagagttaagggaaggggtc

SEQ ID NO: 463043 - DNA, 201 bp, Homo sapiens
ttatagtgagctatgatcataccactgcactccagcctggacaacagagtgagacctgtctaaaaatcaattaattaaagtaaatctacaaggttgtacarccattatctaattccattttcatcaccccacaccccacctgacaacccatacctgttatcagtcactgccgattcctcctcagcccttggcatccactag

SEQ ID NO: 463044 - DNA, 201 bp, Homo sapiens
aggaggaccggcaccagtaacaactccagagccggaccatgttcccaaagccgacagcactgacatcagatctgaagagcctctgaaaacagacagttcgkcatcaaatagcaatagtgaactgaaagccatcaggcctccttgccctgacacggccccaccctcctccgccctgcactggttggcagatttagcaactca

SEQ ID NO: 463045 - DNA, 201 bp, Homo sapiens
gatatagtagtcagttaaaagtgcaataagcagtagtaatactcgtgatctaccaagtaacaagaagtgaaggataaactacgtccactttttttttttttccattcggtggcagtgagctccaacggagtctgaaattctgtattcccaagtagaatcaattcaagctggtacctagttcagtgctcagcccccagtgca

SEQ ID NO: 463046 - DNA, 201 bp, Homo sapiens
ttgctttgaaccaatttgtattaataagctctgtggtttgtaaatagatggtgtgctactaggtgccatgtttcatacctagaacccacattattcatacmtttcaaatatttccatgtctgtaagatactatgccctattttccagactaagaaaaattatactgtgaaattatatcctaaatttctttttttttttttt

SEQ ID NO: 463047 - DNA, 201 bp, Homo sapiens
gccccaagtggggcgggaatgtgggcagttatgggaggcacggaggctgcagttggagctggtcggggcttttttatctggcagttacttcctcatctgarctgggctcggcctggcggtctccagaaaggccagctctcggcactgtctcgagctctcctctcctttccttaacgcttctgggtgacaggagctgcagtt

SEQ ID NO: 463048 - DNA, 201 bp, Homo sapiens
tcaagaccagcctgggcagtagttcaagaccagcctgggcaacatggcgaaaccctgtctctactaaaaatacaaaaattagctgggcattgtggcgtgcrcctatagtcccagctactcaagaggctgaggcaggagaattaattgaacgcaggaggtggaggttgcagtgagccgagatcatgccacggcactccagcc

SEQ ID NO: 463049 - DNA, 201 bp, Homo sapiens
tggaggctgatgtgtggatcacttggggtcaggagttcaagaccagcctggccaacttagcgaaaccccacctctactaaaaatacaaaaattagctgggyatggtggtgtgtgcctataatcccagctactcaggaggctgaggcaggacagtcacttgaacccaggaggcagaggttgcagtgagccaagatggcacca

SEQ ID NO: 463050 - DNA, 201 bp, Homo sapiens
aacaaaaacaattggaagatcttccgggagtgttggaagcaaggtcaggtaagcaagaataagtcgttccaagggccaattctctgcctgcctaccacagmtacctggacaattccaggtctctctttttgccagggagatttagacatagtgaggttattgtaatagccttgctacttcgagttgtcttggatttttaaa

SEQ ID NO: 463051 - DNA, 201 bp, Homo sapiens
ctgctttcagagctgtataaatacagtgcctacttaagtatatttcaagaagtggagtatctgttcagggaagaagaaagcattgttgtgactacagcaartgtctgctaacagatgtgagattactgctgactgttgcacttaagaatccacatgcagctgggtgtggtggctcatacctgtaatcccaacactttggga

SEQ ID NO: 463052 - DNA, 201 bp, Homo sapiens
ctcacgcctgtaatcccagcactttgtgaggctgaggcaggaagattgcttggctccaggagtttgagaccagcctgggcaacatagtgagaccctgtctstacaaataatcaaaaattacctggacatggtagtgtgtgcctgtagtctcagctacccaggaggctgagggagaattgcttgagcctaggaagtcgaggc

SEQ ID NO: 463053 - DNA, 201 bp, Homo sapiens
aatgtgtatagtttaataactttatcagctcttaaaaggcaccagaacagttgggtgaatcaaaaactgatgatacaacctaatttaaagacatgttaaartagatctggtggggaatgttttaaattctattatctatttagttcacgtagtgatcaagcctctgctaggcctataagaggtgaggttaatgaattacag

SEQ ID NO: 463054 - DNA, 201 bp, Homo sapiens
ttggcttttttaggattctttttctccccctcccatcttagtcttaccttgagggaacagtcatatgagaaggaactttgtcacatctaagctgtggtgtsttccccatgtgtgtgtacaacactggtgactccaggaaccattttcacctattaccagtgttccctggggactcctcttaatgtttccaaatgggaagga

SEQ ID NO: 463055 - DNA, 201 bp, Homo sapiens
gtgatgggaggcttctgtgtctccatgaccccagcaacaaaaacaattggaagatcttccgggagtgttggaagcaaggtcaggtaagcaagaataagtcrttccaagggccaattctctgcctgcctaccacagatacctggacaattccaggtctctctttttgccagggagatttagacatagtgaggttattgtaat

SEQ ID NO: 463056 - DNA, 201 bp, Homo sapiens
accttaatatgcctgttcacttttttcaataacttttattgtgtgttccaatttcacaggtaatatatccaaatcagaaaacatataagcacgaagggaaraaataggccataatcctgctttcccctcttgttttaatgcatccttattagctgtagaaccttaaggaagcctcttaaccatataaggaaacaaagttct

SEQ ID NO: 463057 - DNA, 201 bp, Homo sapiens
ctcctctctgaaacctacataaggattttaacagctctatcaaaatccattaacttgtgtggtgtgaggttatggtccagaagcgggtaaaacaaagtctyatggtaaaagcagctgttctcaataggaattgctatgttgtgggagctcaagaggtcctgatgaacagaatagccatatcgtgagagactagaggcaggt

SEQ ID NO: 463058 - DNA, 201 bp, Homo sapiens
ctgaggtgggaggatcacttgagcccaggaggtcaaagctgcattgagccttgatcgtaccactgcactccagccttagaagcaaagcgaggctctctctraaagaaaaagaaaaaataataagtgatatgtcagctgataataactatgagaaaaataaggaaagaggattgaagtgtgaggatgctagagaggctacag

SEQ ID NO: 463059 - DNA, 201 bp, Homo sapiens
tcccaatggaagcttctttgctccttgctttcccttcctgtcaaggatggacataatgggtacatgcccaagcagggaaaggagtagcaacccaggtcagracaaatgtctgtccccaaaagaatcatgctattggttcctgtttacacctcatgacaaacttttcttctctcccccttgccacagttggccagtcagtgc

SEQ ID NO: 463060 - DNA, 201 bp, Homo sapiens
tatagtttaataactttatcagctcttaaaaggcaccagaacagttgggtgaatcaaaaactgatgatacaacctaatttaaagacatgttaaagtagatmtggtggggaatgttttaaattctattatctatttagttcacgtagtgatcaagcctctgctaggcctataagaggtgaggttaatgaattacagtattgg

SEQ ID NO: 463061 - DNA, 201 bp, Homo sapiens
cctgtctctactaaaaatacaaaaaaaattagctgggcatggtggtgggtgcctgtaatcccagctgcttgagagggtgaggcaggagaatcactttaccygggaagcagagggtgcggtgagccaagatcataccactacattccagcctgggctacagagcaagattccacctcaaaaataaataaataataaataaat

SEQ ID NO: 463062 - DNA, 201 bp, Homo sapiens
cctgttttcaattcatcattttctatgatattttcccttgaggctgagttaatttccatcatttgatatggccatggaaggttttttctccctatcttcayctttttaagccttacctgaaaatttgatggatttcatcacaacagtatctgatttcctttgttctttatctgatatgcatatattgttgctaaaatggaa

SEQ ID NO: 463063 - DNA, 201 bp, Homo sapiens
gaaactccaagctcctctgtgaagcaggtctttcactcacaacacttaacagggaacggcagggctctttgctggagcagaggcccttcacccagagccartgtggtcagtattccaaactctccagccactctcttctacgctgcctcaacactgaaggttgacacaggaaagtcgtactgttcacacacacagtttgag

SEQ ID NO: 463064 - DNA, 201 bp, Homo sapiens
gcgggcggatcacaaggtcaggagatcaagaccatcctggctaacacggtgaaaccccatctctactaaaaatacaaaaaattagccgggcgtggcggcgkgcacctgtagtcccagctactcgggaggctgaggcaggaggatggcgtgaacctgggaggtggagcttgcagtgagccgagattgtgccactgcactcca

SEQ ID NO: 463065 - DNA, 201 bp, Homo sapiens
caccttggcctcccaaagttctgggtttacaggcgcgaacgaaccaccacgcctggtgatctttggtttttagcagcagatgttggttcttccttttttgktattaacatgatattactgttttctttgctagcagagtccaattattttttatagttctgccaagttttatagtaaccctttttagagatccatgatcac

SEQ ID NO: 463066 - DNA, 201 bp, Homo sapiens
acagggtttcaccatattgaccaggctggtgtcaaactcctgacctcgtgatccgcccaccttggcctcccaaagttctgggtttacaggcgcgaacgaaccaccacgcctggtgatctttggtttttagcagcagatgttggttcttccttttttggtattaacatgatattactgttttctttgctagcagagtccaat

SEQ ID NO: 463067 - DNA, 201 bp, Homo sapiens
ggatcacttgagcccaggatatatatatacatatatgtgtatacacacacacacacacacacacacacacacacacaaaatatcttaagtgaatagtgtaygtggtttactctcccctaagttgcctataagaaatatagaaatataattatttctatggttttgttatataattatttctataattttattatataattt

SEQ ID NO: 463068 - DNA, 201 bp, Homo sapiens
tgacaacccatacctgttatcagtcactgccgattcctcctcagcccttggcatccactagtccacttttttctcttttttttttttgagactaatgctaktttaacaagtagtctgctttttgtctctgtagatttgcctattctggacatgtcataaaaatagaatcagccaggcgccatggctcacgcctgtaatccc

SEQ ID NO: 463069 - DNA, 201 bp, Homo sapiens
ttggccaggcacagtagctcacacctgtaatcccagcactttgggaggccaaggcgggcggatcacaaggtcaggagatcaagaccatcctggctaacacrgtgaaaccccatctctactaaaaatacaaaaaattagccgggcgtggcggcgtgcacctgtagtcccagctactcgggaggctgaggcaggaggatggcg

SEQ ID NO: 463070 - DNA, 201 bp, Homo sapiens
gacagggtttcaccatattgaccaggctggtgtcaaactcctgacctcgtgatccgcccaccttggcctcccaaagttctgggtttacaggcgcgaacgaaccaccacgcctggtgatctttggtttttagcagcagatgttggttcttccttttttggtattaacatgatattactgttttctttgctagcagagtccaa

SEQ ID NO: 463071 - DNA, 201 bp, Homo sapiens
ccatgttggccaggcacagtagctcacacctgtaatcccagcactttgggaggccaaggcgggcggatcacaaggtcaggagatcaagaccatcctggctwacacggtgaaaccccatctctactaaaaatacaaaaaattagccgggcgtggcggcgtgcacctgtagtcccagctactcgggaggctgaggcaggagga

SEQ ID NO: 463072 - DNA, 201 bp, Homo sapiens
agacagggtttcaccatattgaccaggctggtgtcaaactcctgacctcgtgatccgcccaccttggcctcccaaagttctgggtttacaggcgcgaacgaaccaccacgcctggtgatctttggtttttagcagcagatgttggttcttccttttttggtattaacatgatattactgttttctttgctagcagagtcca

SEQ ID NO: 463073 - DNA, 201 bp, Homo sapiens
caaattgcctgaacatggcggggctttcctgcacattctcctgatttgagattcacgggcacacctttcttttcttttcctcttgtgcctagttaagtggraatgtgtttggagataggggaaatcacataactggtacaagtatggggtaattgcttaaacatgcctggtggaagtctgatagcgtctctgcacgtgacc

SEQ ID NO: 463074 - DNA, 201 bp, Homo sapiens
gagacagggtttcaccatattgaccaggctggtgtcaaactcctgacctcgtgatccgcccaccttggcctcccaaagttctgggtttacaggcgcgaacgaaccaccacgcctggtgatctttggtttttagcagcagatgttggttcttccttttttggtattaacatgatattactgttttctttgctagcagagtcc

SEQ ID NO: 463075 - DNA, 201 bp, Homo sapiens
tggtagtatgttgctgtgagccaggctctgcaagttggctggatgacttataggtgggatgtttgtttttgtttttttctttttttttttgagatggagtyttgctctgtcacccatgctggagtgcagtggggtgatcttggctcactgcaacctccgcctcccgggttcaagtgattcttctgtctcagcctcctgagt

SEQ ID NO: 463076 - DNA, 201 bp, Homo sapiens
agaggattcatgatggaaaagagaagccaggtgctttatggcacatctatgcagccaaggatgcagagaagatccgggagctgctccgaaaggtacgcccytgggtgggctgtgctcccagctcacatatcaagagtctcgttgctgagacaccctatctagggtttctcatgtagagtcccttggcattaaagacctgtt

SEQ ID NO: 463077 - DNA, 201 bp, Homo sapiens
tacataatatttcctaatcctaattgatcctagcattcttaatttttgcagaacatctcatgagaatagagttctctttttttgttgttcacaagagacagggtcttgttctgtcacctaggctggaatgcaatggcgcagccatacctcactgcagcctcaaactcctgggttcaagcgatcctcctgccttggcctccc

SEQ ID NO: 463078 - DNA, 201 bp, Homo sapiens
ttactcactgcttttccttagcacaatgtctgacacatagtaggtattcataaatctttgttgaagcaatgcaaaaaaattaatggagaatagtaaaagarggacttggatgcccatgacccagcttaagaaattatagcacacatacatatacagcaactacatggttgaagcccccatgtacccttcccctttgcattt

SEQ ID NO: 463079 - DNA, 201 bp, Homo sapiens
agagttatagtattacaagtgttagtaactaactagactgacctccccaaacaggtggaaaaagcactatggcagtgtgttctaagcatgtttctgagaasaaatattgcgctgaagctgcttctcatagcagatttctatgcagactcaatttcttagagctctgctagggattacagttcatgtccctaagaactgtat

SEQ ID NO: 463080 - DNA, 201 bp, Homo sapiens
gcccctgggtgggctgtgctcccagctcacatatcaagagtctcgttgctgagacaccctatctagggtttctcatgtagagtcccttggcattaaagacytgttggccatgatacctctggtggaaaagcccaaaggcttgaatccacacctagaggatgttgactagaataaagttttgccatccccaccccatcttag

SEQ ID NO: 463081 - DNA, 201 bp, Homo sapiens
ttcacttagatgtgtctgatgctgttaatgtgatggtgtatgttgggattcccatcggggagggtgctcatgatgaaggtatgctttctagaatccactgytttaggatggtgaggctttgtcttgggaatacagttttgtgttttcatccttagggccagtggcttttccttttttttttctttttcttttttctgtttt

SEQ ID NO: 463082 - DNA, 201 bp, Homo sapiens
atttcttcataaacaaatagacttcactctcctaattttactcatttaacaacacccttgagcatgttttcagatgtagtgtcgacgtggattcttccaamtattggcccttcaccttgcatattttcctttctcctttagggttgataacagcagaagatagaagagttggtacaacaaatcttcacttagatgtgtctg

SEQ ID NO: 463083 - DNA, 201 bp, Homo sapiens
acaggcatgagccaccgtgcccagcctggataagtaaattttaaaaagcaaacaaaacaattactttgggtaccgttttatgtatacttgttcatcatacygccagttctttttctaattctcccatgatgttacataattatacatactttatagagatagggattagtaatactgtaagcataggattatccagtttat

SEQ ID NO: 463084 - DNA, 201 bp, Homo sapiens
aaagacatgagaagcatagaaagttacagccccagtatccatcatgaacatagatgtaaaaatattctataaaacttaagcaagtttaagtcaagagatayataaaaagaataatacatcatgaacaaatggggttcacttgaaaatcagtgcagtccactatattagtagactaaaaaataaccacatgatctcaagata

SEQ ID NO: 463085 - DNA, 201 bp, Homo sapiens
ctcagctcactgcagcctccacttcccaggttcaagcaaatctcctgccttagcctcccgagcaagtagctgggactacaggcacgtgccaccacactggrataatttttgtatttttagtagagacagggttggccaccatgttggccaggctggtctcgaactcctgacctcaggtaatccacctgccttggcctccca

SEQ ID NO: 463086 - DNA, 201 bp, Homo sapiens
ggccaagttgcagggaagtgtggtagtgtcgtggtgggagcttgtggaggttgttttctggctcctcttttctcagtggaatagaaaacaaggtcctcacrggggaagtaatattggaggtatgaatagaaggaaggtatgaaaataggcatctagaagagggaatgtaccaagaaactgtattgtgactgtcaggcaata

SEQ ID NO: 463087 - DNA, 201 bp, Homo sapiens
tatgtttttcccctaaatgttctacaccttgctattctgatttttagtttatatgtcctgcaaatcatttcaagcgaatacataaatacatttcttcttckgttttatgactaatggctgaaacgtgatgaactgtgggtgactgagccctctatacaatttgggttatttgtttctcttttggataagtaactttttttt

SEQ ID NO: 463088 - DNA, 201 bp, Homo sapiens
gttgtcctcagcctctatcagttcctctgcacatctgaagtgatcttatgcctctgaatacccaccataccttattttaccctatttctgtttatcctgtkacatactattgcccaaatagtgctttataatcaaccaaagtgcttagaatctgttcctttatttaattttcacaaccagtccatgaggtaagaaagatgt

SEQ ID NO: 463089 - DNA, 201 bp, Homo sapiens
cttgttttaatgcatccttattagctgtagaaccttaaggaagcctcttaaccatataaggaaacaaagttctccaggtgttcactgtggccttagtttcygcagtttctcctctgtaaattgggcatgataataatagaacctacctcataggattctgtcaaggattaagcaaaggtccacataaagagctcagcagca

SEQ ID NO: 463090 - DNA, 201 bp, Homo sapiens
acattaaggctcatttaaaaaattttaaacagggcggtcctggtagctcaacgcctgtaatcccagcactttgggaggccgaggcgggtggatcacctgargttgggagttcaagatcagcctgaccaacatggtgaaaccccatctctactaaaaatacaaaattaggcaggcatggtggcacatgcctataatcccagc

SEQ ID NO: 463091 - DNA, 201 bp, Homo sapiens
gtgtgtgtgtgtgtgtgtgaattttaatagttctatttctttttttttttttttttgagacggagtctcactttcacccaggctggagtgcagtggcacaktgtcggcttgctgcaacctccacctcccgggttcaagtgattctcctgcctcagcctcttgagtagctgggattacaggcaagtaactcggattacaggt

SEQ ID NO: 463092 - DNA, 201 bp, Homo sapiens
tcagggagaatcgcttgaacccgggaggccaagatcatgccactgcactgcagcccgggtgacagagcaagactctgtctcaaaaaaaaaaaaaaaaagaraaaaaagagattagtctcccaaaagttactgttgaaaatcggacaccagccaaaccagcagatgtttgtgggagtattctctgtcttccagaacgactac

SEQ ID NO: 463093 - DNA, 201 bp, Homo sapiens
atacataatatttcctaatcctaattgatcctagcattcttaatttttgcagaacatctcatgagaatagagttctctttttttgttgttcacaagagacagggtcttgttctgtcacctaggctggaatgcaatggcgcagccatacctcactgcagcctcaaactcctgggttcaagcgatcctcctgccttggcctcc

SEQ ID NO: 463094 - DNA, 201 bp, Homo sapiens
tagctagatatggtggcacatgcttgtagtcacagctactcaggaggctgaggcaggaggatcacctgagctcagagtttgaggttatagtgagctatgaycataccactgcactccagcctggacaacagagtgagacctgtctaaaaatcaattaattaaagtaaatctacaaggttgtacagccattatctaattcca

SEQ ID NO: 463095 - DNA, 201 bp, Homo sapiens
atcaataaagagataattacattgattaggaaattatataattatgtctttatggacaaggcattaaatatctttttcccctcctactgtagagtggtgaratcaagtcggtagatcccagactaatccatgtgatgctgatggataattcaacgcctcaaagcgaggtacagtaatggactgcattcctgagcagactca

SEQ ID NO: 463096 - DNA, 201 bp, Homo sapiens
ctactgcttccttccgacagtgtgttaaataggtcctgaccatcccagagcttaactggggcttttgttgtcctcagcctctatcagttcctctgcacatytgaagtgatcttatgcctctgaatacccaccataccttattttaccctatttctgtttatcctgtgacatactattgcccaaatagtgctttataatcaa

SEQ ID NO: 463097 - DNA, 201 bp, Homo sapiens
ctatctcagcctcccaaagtgctgggattacaggtgtgagccaccgtgccccccccacctttttttttttttttttttttttaagagattgggtctcacarttttgcccaggctggtttcaaacccctggccttaagtgatccactcagctcggcctcccaaagtgcttggattacaggcatgagccactgcacttggcct

SEQ ID NO: 463098 - DNA, 201 bp, Homo sapiens
ccattgcgcctggcctcatactgcatttttaattttgagttttgctttttcatttaatgtggcagttattctgtttagtttttctttttttttttttttcragatggagtctcactcactctgtcgcctaggctagagtgcagtggcacgatctgtgctcactgcaacctccgcctcccgacttcaagtcattctccttcc

SEQ ID NO: 463099 - DNA, 201 bp, Homo sapiens
ctttctttcttttttttttttttttgagacggagtcttgttctgttgcccaggctggagtgcagtggcgcgatctcagctcactgcaacctctctctcccrgattcaagtgattctcctgcctccagtcccagtagctgagattacaggcgtgcaccaccacacccagctaatttttttttatttattagtagagacgggg

SEQ ID NO: 463100 - DNA, 201 bp, Homo sapiens
cccaaagtgctgggattacaggcgtgagccattgcgcctggcctcatactgcatttttaattttgagttttgctttttcatttaatgtggcagttattctrtttagtttttctttttttttttttttcaagatggagtctcactcactctgtcgcctaggctagagtgcagtggcacgatctgtgctcactgcaacctccg

SEQ ID NO: 463101 - DNA, 201 bp, Homo sapiens
ttggcctcccaaagtgctgggattacaggtgtgatcaaccacgcctggcatttttaaatttttatttatttatttattttgagaaagccaccttggctggmgtgcagtggctccatctcgcctcactgcaacgtccacctcccggtttcaagtgattcttgtgcctcagcctcccaactagcttgggatcaaaggcacatg

SEQ ID NO: 463102 - DNA, 201 bp, Homo sapiens
gggtctgccttgactgttaccggctcaggaaaagccggccacgcagtggtaagtaaacattgtcctgtgtagctcgaaaggtaacgtggaggtatgtccawgatgttgtgggatttgaaaattgaggcaggaatgggcttatgcctctctttagctgcttggcttcattcaactttgttgtattttaagaccttaaaatgg

SEQ ID NO: 463103 - DNA, 201 bp, Homo sapiens
agtggtgtgcacctatagggaggatcacttgagcccaggatatatatatacatatatgtgtatacacacacacacacacacacacacacacacacacaaaatatcttaagtgaatagtgtacgtggtttactctcccctaagttgcctataagaaatatagaaatataattatttctatggttttgttatataattatttc

SEQ ID NO: 463104 - DNA, 201 bp, Homo sapiens
ttacaggcatgtgccaccacacccagataatttttgtattattagtagagatggggtttcaccatgttggtcaggctagtctcgaactcctgacttcaggygatccacctgccttggcctcccaaagtgctgggattacaggtgtgatcaaccacgcctggcatttttaaatttttatttatttatttattttgagaaagc

SEQ ID NO: 463105 - DNA, 201 bp, Homo sapiens
gggtgcagtggtgtgcacctatagggaggatcacttgagcccaggatatatatatacatatatgtgtatacacacacacacacacacacacacacacacacacaaaatatcttaagtgaatagtgtacgtggtttactctcccctaagttgcctataagaaatatagaaatataattatttctatggttttgttatataat

SEQ ID NO: 463106 - DNA, 201 bp, Homo sapiens
caggcgtgagccaccacgcccagcctattttatttttttgagacagagagttttgctcttgttgcccaggctggagtgcaatggtgtgatcttggctcackgaaacctctgcctcctggattcaagcaattctcctgcctcagcctcccaagtagctgggattacaggcatgtgccaccacacccagataatttttgtatt

SEQ ID NO: 463107 - DNA, 201 bp, Homo sapiens
gcaagtagttgggattacaggcgtccaccaccatgtaattttagtagagatggggtttcaccatgttggccaggctgatctcgaactcctgaccttaggtratctgcctgcctcggccttccaagtgctgggattacaggcctgaaccaccgcgctcggcgggaattttttttctttctttctttcttttttttttttttt

SEQ ID NO: 463108 - DNA, 201 bp, Homo sapiens
aagcactttgtatagttgattttttaaaaaaagattgtgtgtgtgtgtgtgtgtgtgtgtgtgtgaattttaatagttctatttctttttttttttttttttgagacggagtctcactttcacccaggctggagtgcagtggcacattgtcggcttgctgcaacctccacctcccgggttcaagtgattctcctgcctcag

SEQ ID NO: 463109 - DNA, 201 bp, Homo sapiens
cctcaggtgagccactacgcccagccgtttcatttgtttttgttgttgttgttgttaagatggagtttcgttcttgttgctcaggctggagtgcaatggckcgatctcggctcaccaccccgcctcccaggttcaagcaattctcctgcctcagcctcccgagtaactgggattacaggcgcccaccaccactcccggctt

SEQ ID NO: 463110 - DNA, 201 bp, Homo sapiens
gaaacactgagccatggttgagtttttcagacactcaagcactttgtatagttgattttttaaaaaaagattgtgtgtgtgtgtgtgtgtgtgtgtgtgtgaattttaatagttctatttctttttttttttttttttgagacggagtctcactttcacccaggctggagtgcagtggcacattgtcggcttgctgcaacc

SEQ ID NO: 463111 - DNA, 201 bp, Homo sapiens
acttccaaactgctttttatctcttgcagatctttgtagaatttgatggctgtaactggaagcaacactcctgggtaaaagttcatgctgaggaagttatygtgcttctgctggaagggtctcttgtatgggcgccccgtgaggacccagtccttctccagggcattcgagtctccattgcacaatggccagccctggtga

SEQ ID NO: 463112 - DNA, 201 bp, Homo sapiens
ttcattggcccataggtacattggaaaatgtatatctctccagctgtactgtagtgccctgcaggctgtttatatgttcacagttacttttttttttttttaaataaaagtcatttaatgtagaatacttttaatttcactttctgtattttaattttgttgaagggctgattgggatttccatgttcttattaaaaatct

SEQ ID NO: 463113 - DNA, 201 bp, Homo sapiens
atcattataatttttatgttggttacttgagaacatgtatacaaacaaaaaaaaagccattgtgaattcagtaatattttccttcatattttttccactgyggtaaaatacacataaaattttattaagtttttaatggatttgaattttattaattacatcatctacatgtatttgaaaaatcatagcacatacatctgc

SEQ ID NO: 463114 - DNA, 201 bp, Homo sapiens
atcagattaggtttcctctgctcttgaaatggattggaattttaagggcagaatttcatcattaatacacttaggtactttagttgcataaaaagaacaaagagggctgggcgggtggatcatgaggtcaggagatcaagaccatcctggctaacatgttgataccccatctttactaaaaatacaaaaaattagctgggc

SEQ ID NO: 463115 - DNA, 201 bp, Homo sapiens
tgaaacactgagccatggttgagtttttcagacactcaagcactttgtatagttgattttttaaaaaaagattgtgtgtgtgtgtgtgtgtgtgtgtgtgtgaattttaatagttctatttctttttttttttttttttgagacggagtctcactttcacccaggctggagtgcagtggcacattgtcggcttgctgcaac

SEQ ID NO: 463116 - DNA, 201 bp, Homo sapiens
caactctgggtcatgtaagaacactccctactactcccccaccgtatacacacacaaaaaaccttttaatgatagttgcacgcacacacccacacctcccrttgacagctggatgaagccccaatcttttatccaagtgttcaagatcttccacatctactcctagcgtttttagcctcattggctactgcttccttccga

SEQ ID NO: 463117 - DNA, 201 bp, Homo sapiens
tactcagggagaatcgcttgaacccgggaggccaagatcatgccactgcactgcagcccgggtgacagagcaagactctgtctcaaaaaaaaaaaaaaaaagaaaaaaaagagattagtctcccaaaagttactgttgaaaatcggacaccagccaaaccagcagatgtttgtgggagtattctctgtcttccagaacgac

SEQ ID NO: 463118 - DNA, 201 bp, Homo sapiens
tttttgttcctttccttatttcattccttcattaagcatatattgtatgccaggtactgttcagctggccaaatagaactggggagtactggtctcaatgytgtaggctgcttactcacgtatgagtagctcactgtaagtaggacttacatataagttgtttagggactggtagtatgttgctgtgagccaggctctgca

SEQ ID NO: 463119 - DNA, 201 bp, Homo sapiens
gcaccagtaacaactccagagccggaccatgttcccaaagccgacagcactgacatcagatctgaagagcctctgaaaacagacagttcggcatcaaatarcaatagtgaactgaaagccatcaggcctccttgccctgacacggccccaccctcctccgccctgcactggttggcagatttagcaactcagaaggctaaa

SEQ ID NO: 463120 - DNA, 201 bp, Homo sapiens
acaggtccccttgtttctgccctttacagtctacagtgtattttcaacacagtagctagagaggttcttttaaaatatgtcatcccatgggaggctttttmttaagaaataaagaaaaataaaagaaaaggagaaaaataataaaatataagtcagatcatatcttaacctctgcctgaaatccttcaagggcttcctttt

SEQ ID NO: 463121 - DNA, 201 bp, Homo sapiens
tcttgtgcctagttaagtgggaatgtgtttggagataggggaaatcacataactggtacaagtatggggtaattgcttaaacatgcctggtggaagtctgrtagcgtctctgcacgtgacctctgacaaagcccatcccaggagacggggtgaagctattccccacactctcctgtgaacactggagtcttgcaagaccca

SEQ ID NO: 463122 - DNA, 201 bp, Homo sapiens
gccaggcatggtgacacatgcctgtggtcgcagctacttgggaggttgaggtgggaggatcacttgagctgagaggttgaggccgcagggagccatcatcrcttcactgcactctagcataggcaacagagtaagactctgtcttacaaaagaaaaaaaaaacgagtgaccattctagcagcttttctcaaaccaagaaaa

SEQ ID NO: 463123 - DNA, 201 bp, Homo sapiens
tcacctgagctcagagtttgaggttatagtgagctatgatcataccactgcactccagcctggacaacagagtgagacctgtctaaaaatcaattaattaaagtaaatctacaaggttgtacagccattatctaattccattttcatcaccccacaccccacctgacaacccatacctgttatcagtcactgccgattcct

SEQ ID NO: 463124 - DNA, 201 bp, Homo sapiens
ctccagttccttagaggagctcttcacttccaaatagataccaaaaagcctacaaggccttctagcactgtgacgaccaattggataacaaccaagggaaytgcaggatgaatgacatcctgctatctctggttcaccttgctaaagatgccctcagtgtagtctgtggcagatttcttccccactgctggtgaactccag

SEQ ID NO: 463125 - DNA, 201 bp, Homo sapiens
cagaaaagtcacaaccttgcatttaatcagtaattatcgagtgtgcaaaaataccaacttacatgaccagtaagctgaggagggataatcaatcaataggwaaaaaccccagaatgacggtgataatagaatagaaaagaaccagcctggcacagtggctcatgcctgtaatctcagcactttgggaggcccaggcaggtg

SEQ ID NO: 463126 - DNA, 201 bp, Homo sapiens
atcacctgagctcagagtttgaggttatagtgagctatgatcataccactgcactccagcctggacaacagagtgagacctgtctaaaaatcaattaattaaagtaaatctacaaggttgtacagccattatctaattccattttcatcaccccacaccccacctgacaacccatacctgttatcagtcactgccgattcc

SEQ ID NO: 463127 - DNA, 201 bp, Homo sapiens
gatcacctgagctcagagtttgaggttatagtgagctatgatcataccactgcactccagcctggacaacagagtgagacctgtctaaaaatcaattaattaaagtaaatctacaaggttgtacagccattatctaattccattttcatcaccccacaccccacctgacaacccatacctgttatcagtcactgccgattc

SEQ ID NO: 463128 - DNA, 201 bp, Homo sapiens
ggatcacctgagctcagagtttgaggttatagtgagctatgatcataccactgcactccagcctggacaacagagtgagacctgtctaaaaatcaattaattaaagtaaatctacaaggttgtacagccattatctaattccattttcatcaccccacaccccacctgacaacccatacctgttatcagtcactgccgatt

SEQ ID NO: 463129 - DNA, 201 bp, Homo sapiens
gagcgcagtgctgagctgttgctgggcaaaagcaaagggaagcaggcccccaagggccggcctcggactgcccccctgaaaggtgatcctgctggggctayatttgggctttgctctggcactgggctcaaatgcctgtcgtgttcttgtgcagcagaggcactcactttgatggagagttctgtaatctcatagaattac

SEQ ID NO: 463130 - DNA, 201 bp, Homo sapiens
tcctttttctctcgtaagatgagcagagtccttgtagtgcttacagatgagtagagtcacgcacctggactatgaggccatagccctatctgttcatcttsctctcacctccctgtcttcaactaccactctctgttctgttcactccgttccagccacacccaccttcttgctgttctttgaacatggcctggcatgctc

SEQ ID NO: 463131 - DNA, 201 bp, Homo sapiens
gtatgtttttcccctaaatgttctacaccttgctattctgatttttagtttatatgtcctgcaaatcatttcaagcgaatacataaatacatttcttcttstgttttatgactaatggctgaaacgtgatgaactgtgggtgactgagccctctatacaatttgggttatttgtttctcttttggataagtaacttttttt

SEQ ID NO: 463132 - DNA, 201 bp, Homo sapiens
cccacgtgctgggattagaggcgtgagccaccacacctggccaatatttatactcttgaacactagagaatctacccctagagtttctcctggaggatacygtgttaatgtttactagaagagggaaaggggtgtagcttagtgcttaaaagtaacagaactttaggggtagatatacctgggctaaagtcttagtgctcc

SEQ ID NO: 463133 - DNA, 201 bp, Homo sapiens
tccacagaaagacctatacatgaatgtttatagctgctttatttatttttttgtttttttgtttttgagacagggtctctttctgttgcccaggctggagygcagtggagcgatctctgctcactgcagcctccgcctcccaggctcaaacaatcctcctacctcagccacccaagtaactgggaccacaagcatacatca

SEQ ID NO: 463134 - DNA, 201 bp, Homo sapiens
taaaactgacagtattggccaggcatgttggctcatacctgtaatcccagcagtttgggaggccgacgcgggtggatcacaaggtcagaagattgagaccrtcctagctaacattgaacccctgtctctatgaaaaacacaaaaaattagttgggcatagtggcacgcacttgtagtctcagctactcgggaggcggaggc

SEQ ID NO: 463135 - DNA, 201 bp, Homo sapiens
ctcctgaccttaggtgatctgcctgcctcggccttccaagtgctgggattacaggcctgaaccaccgcgctcggcgggaattttttttctttctttctttyttttttttttttttttgagacggagtcttgttctgttgcccaggctggagtgcagtggcgcgatctcagctcactgcaacctctctctcccagattcaag

SEQ ID NO: 463136 - DNA, 201 bp, Homo sapiens
ctattttttttgtagagacaggatcttgctatgttgccagggctggttttgaactcttgaactgctgggctcaagtgatcctcccgcctcagcctcccacrgtgctgggattacaggtgtgggccacagcgtcccacttgaaatgattctttactttgtatgctctaactctttcatttttgtagccaggaagcgaagtac

SEQ ID NO: 463137 - DNA, 201 bp, Homo sapiens
aggggcatgatcgtagctcactgcagccttgaactccttggcccaagctgtcctcccatctcagcctactgagtagtggggactacagatgtaccccaccwtgcctggttttttttttctattttttttgtagagacaggatcttgctatgttgccagggctggttttgaactcttgaactgctgggctcaagtgatcctc

SEQ ID NO: 463138 - DNA, 201 bp, Homo sapiens
ctaaggctggcagctctgtggaccggaaagtgcctgcagagtccatgcccaccctcactccagccttcccacggagcctcctaaatgcccgtaccccagakaatcatgaaaatctatttttacagccccccaaattgtcccgagaagagccttctaatcctttcctggcatttgtggagaaagttgaacacagccctttca

SEQ ID NO: 463139 - DNA, 201 bp, Homo sapiens
tgagatcgattcctgactactttgttgtgagttgcacaactcacacagtaatatagcttcacataacagcttgggaagcacatagacatcaaagacactcrcttcggaaatgtccctgactgctgcgaccttcactgtgtttcaaatgacgaatttcttaatggccttgtccttgggcacgcatcaggcacggttcgtgca

SEQ ID NO: 463140 - DNA, 201 bp, Homo sapiens
tctcctgggcctcccaaaatgctgggtttacaggcgtgagccactgcactcagcccaaaatctttaactttttaaagtaagtgatacgttaacatgattaraagccaaaagtggccaggtgcagtgggtcacacctgtaatcccaacactttttgggagactgaggtgggagaatggcttgaggccaggagttcaagtcta

SEQ ID NO: 463141 - DNA, 201 bp, Homo sapiens
ttatctcataataaatacaggtgtgcttaactactagtttcctacctcaaagatatactcaaatctaaagatgtttaagattttgggatctgaagagtaarcatttctcctaatcacaatgtgacagagacaaatgaatcaagccaatgctacttttatttatgcatactaactggaacttttctttttggaaatcagata

SEQ ID NO: 463142 - DNA, 201 bp, Homo sapiens
agatggtatattcactttgtgatgcttcactaagatatgcactgttctgtatgtttgttgtatctgaatagaaagttgtttttttttttttttttttttttatgaagtaggttgtaggggactgagtcctcataaccctaaaagaagaactccattaagtcaacatttcttatatgccaaatgacaagaacgtgaccccat

SEQ ID NO: 463143 - DNA, 201 bp, Homo sapiens
ttctagtattaacaggtactagaagatatgttttatctttttttaactttatttgactaatatgactgtcaatactaaaatttagttgttgaaagtatttrctatgttttttgatgttcccctatagagtattgtttcgttggtttttgttgttgtcgttgttgttgttttaaacagggtcttgctctgtttcctaagctg

SEQ ID NO: 463144 - DNA, 201 bp, Homo sapiens
gtttcaaacaccactttcatcatatattacggtcccatatttatttaaggttgtttctggactctcttctgggcatttggcttgtccttcttatcctctgyttaaaattatattgtgggtatttcatcaaccagttccttaaactgctaatgattcattggtgaagatagaagtaatttatttgcagttactaaagttaaa

SEQ ID NO: 463145 - DNA, 201 bp, Homo sapiens
tgacactttgtttctctccctttttggtctataccctccttcttttcccttctcttactgcacctttatttgatatttggacattggtcagttaatcttgkttacatccctaaacacaaggacagaaaataagagcagggactgagagatacagagatggattgaaaagcaaaagcaacattgaattttggattttctcat

SEQ ID NO: 463146 - DNA, 201 bp, Homo sapiens
atgaagtcagcagttgctgctgtgcttgtttcatatagtgctttgttttctcttccctttatcttgtgtttggaagttggtactgaatgctctgttgtgcytttgttctgattacttggttttttctttgtctgtctctggtagccctatagtcgctcttcctccatgtcttccattgatctagtcagtgcctctgatgat

SEQ ID NO: 463147 - DNA, 201 bp, Homo sapiens
tgagatcttatccatagctgaacataaaactgttctaattgtctttgtttgaaaatgtctgaaaccagcttttttctccttgtgtttatttgttaagcagktaataaaatctccttcacatgtatatacacacatacattaaaatcttataagctttctatattaagagaaaaaaatgtgtaagaaatatatttggtaatt

SEQ ID NO: 463148 - DNA, 201 bp, Homo sapiens
atgaagtatgaatttatattttgatcttagagaaacacatagatcatgtctatcacaaaagtgattttttaataatactcttgtaacctttaaatattctraatatataattttttcctcagtgtttatgttaattcagtgtatatttcatgatatataaatgccaggcatgctcaaatatatatttcttattgcctacaa

SEQ ID NO: 463149 - DNA, 201 bp, Homo sapiens
cagctactaagagcaccatttctgaactgaagttaactgaagaccattctgttttagagattatgacataccttttggattctcatgcctttttcctcccytctcaaggttgaagagatggtgcagaaccacatgacttactcattacaggatgtaggcggagatgccaattggcagttggttgtagaagaaggagaaatg

SEQ ID NO: 463150 - DNA, 201 bp, Homo sapiens
agaaaatactatgtccaggcactgttctaagtctattcttgtttaaacttaactctaagagaatttgacaaagaaaaaaagaacacaaagagaataagtaacttgaccactgtcacaaagtttagccttatgaagtgtggtaattgtaaatgaggtaggattaatccatgaagggtcttgaatgccctaaacaatttgtat

SEQ ID NO: 463151 - DNA, 201 bp, Homo sapiens
agtttttgactggtggcagtggctcatacctgtaatcccagcactttgggaggccaaggcgggcagatcatctgaggtcagaagtttgagaccagcttggycaacatggtgaaaccctgtctctactaaaaataccaaaaattagctgggcgtagtggcaggcgcctgtaatcccagctactcaggaagccgagacaggag

SEQ ID NO: 463152 - DNA, 201 bp, Homo sapiens
tagtattagaaggacaaaagtgatggtggaaaaagtggaagttggaatgcagtgataaccaggttgtgtagatgatttgaaaaataataatagacattacmcggaatcttttctgctacatgtttaaataaatagcaaattgaagactgatgtattagtttgctagggctgccatatcaaagtaccacagactgggtggct

SEQ ID NO: 463153 - DNA, 201 bp, Homo sapiens
gaacagtttttgactggtggcagtggctcatacctgtaatcccagcactttgggaggccaaggcgggcagatcatctgaggtcagaagtttgagaccagcytggccaacatggtgaaaccctgtctctactaaaaataccaaaaattagctgggcgtagtggcaggcgcctgtaatcccagctactcaggaagccgagaca

SEQ ID NO: 463154 - DNA, 201 bp, Homo sapiens
cctttttggtctataccctccttcttttcccttctcttactgcacctttatttgatatttggacattggtcagttaatcttgtttacatccctaaacacawggacagaaaataagagcagggactgagagatacagagatggattgaaaagcaaaagcaacattgaattttggattttctcattcctaaggaactatgcta

SEQ ID NO: 463155 - DNA, 201 bp, Homo sapiens
tgatgttttttaaacacaataaagttggatcttccatgttacaatcacagaattaaaaccagtatttaaagtggaaaagtattaaaatattatggacaaawatgctggcttgatttgttttccttaaccctgagatattgccctactctgaatagttaagagcttgaaattcagtgttcttcccgtaacccagttagggat

SEQ ID NO: 463156 - DNA, 201 bp, Homo sapiens
atcgatgtaaaagttcaaatttaaggaaactcttgagtatagtgattgtatcagaaatgggaagaggtatgaggggaacatatgaacatgccttataccarcctggctgcttgtctaactggcaccttgacattgtttgctgactttgtcaattgaaatttttattaatctggaatgccttttcctcctctggtatcaaaa

SEQ ID NO: 463157 - DNA, 201 bp, Homo sapiens
tatagacatgctgttgatttttgtgtatgtatttttgtatcctgcaactttactgaatgtatcagttctaatagttttggtggagtttttaggttgtttcwaatataaggtcattatcatttccagataagcataatttgatttctttctttccaattcatatacccttcatttctttctctttttcaattgctctagctg

SEQ ID NO: 463158 - DNA, 201 bp, Homo sapiens
gaacccctagcctaaagtgatcttcccacctcagcctcccaaagtgctaggattacaggccacaggcctcagccaagttttaaaaatttttactgccaaastcttcattagaaaagttgaaccagcttacattcccaggccagttttctattgatatagtagcactgaatattataattcagttaacttttgtcaatacgg

SEQ ID NO: 463159 - DNA, 201 bp, Homo sapiens
tcttttcttttttttattttttttttagaggcagagtcttgctctgtcacccaggctggaatgcagcagcaggatcttggctcactgcaccctccgccctmagggttcaagcaattctcctgtctcagcctcccaagtagctgggattacaggtgctgcgccaccacacctggctaatttttctgtttttagtagagactg

SEQ ID NO: 463160 - DNA, 201 bp, Homo sapiens
actgaggtttgactgaaacctaaggctgctgtcatcatccagcagtgatgggagccagagattgagtccattttgtgagggctatagtttaccacctgtcrctgggataggtgaggagattcagttcacagataccaacctggattcagttaccatgaggggtctgcctggcactggatttttactgtggcaggcccagta

SEQ ID NO: 463161 - DNA, 201 bp, Homo sapiens
ttttctccacactcttgccaacacttaactctattttgtctttttgctaatagccatttcaacaggagataatatctcattatggttttcatttgtatttscctgatgatttatgacattgagcattttttcatatacctgttgacaatttatatgttttcttctgagaaatgtttgttcaggtgtttgtgcattttttta

SEQ ID NO: 463162 - DNA, 201 bp, Homo sapiens
ttgcaggttttgtctgttgtctgttgtagattcgatgttaccatgaggctttcaaataacaagccattattttagactcatgataacttagcactggttayaaaaagaaacaaactaagaaacagagagaattcataaaaactctataattttatcaccccccacttttaaactttttattgtttctctttatatgttata

SEQ ID NO: 463163 - DNA, 201 bp, Homo sapiens
ggacactgaggttgattccatatcttggctgttgtgaatagctataataaaagtaggaagtacagatgtctcttcaacatactgattttatttactttagrtatataccaaggagtggcattactgaattatatggtagtttttttttaatttttcgaggaacctccatggtgttttctttagtggctctactaattcaca

SEQ ID NO: 463164 - DNA, 201 bp, Homo sapiens
acatgagaaaatatggaacccacttttttatagatgtctttttcctgtagcatgcattcttagtggtggtgatacttggttcttcgggagggttgaaatcwtagataaaacaatggtttatggccccaaaaaattctaatggacaaaaatcttatccttagtatttaattgtggggtagagggtttggtaatgcaaaaacc

SEQ ID NO: 463165 - DNA, 201 bp, Homo sapiens
gtttttttaacatactgaatgttgtgcctagatgacactttgtttctctccctttttggtctataccctccttcttttcccttctcttactgcacctttawttgatatttggacattggtcagttaatcttgtttacatccctaaacacaaggacagaaaataagagcagggactgagagatacagagatggattgaaaag

SEQ ID NO: 463166 - DNA, 201 bp, Homo sapiens
gttcgtttgagtttcacaaagttgtagttgaaacacctgttttggttatttctaacaggcacaaaacacacacacacataccacacacacacacacacacatttttaacaggcacaaaacacacacacacacaccacacacacacacacacgcgcgcctatacccatacacccaagaaaaaccagtctggcttgagaaaga

SEQ ID NO: 463167 - DNA, 201 bp, Homo sapiens
tccatctgtcttagcaaggctgtcatcacagtaagttccttttcttcttcattcaacaaatatttattgagtgtcagctacataccaggaactgttctacrtgttcaggatacatccgtggataagataaagatccttgtccttgtagaatatacattctaatacttttttccataaagtgattttactgtggtttttact

SEQ ID NO: 463168 - DNA, 201 bp, Homo sapiens
tgttcgtttgagtttcacaaagttgtagttgaaacacctgttttggttatttctaacaggcacaaaacacacacacacataccacacacacacacacacacatttttaacaggcacaaaacacacacacacacaccacacacacacacacacgcgcgcctatacccatacacccaagaaaaaccagtctggcttgagaaag

SEQ ID NO: 463169 - DNA, 201 bp, Homo sapiens
tgttttggcagctaaacaaccgatgtgtccgtgccaaaataaatgttgctatgatttgtcaaaccttggtaagcccaccagagggaaaccaggaaattagyagggacaacattctatgcaagattacatatgtagctaatggtatgtattttattgtttttgctctttgataatgtggctgttcttgatcatgacctatat

SEQ ID NO: 463170 - DNA, 201 bp, Homo sapiens
aggattgtttaaggccaggagttcgagaccagcctgggcaacatagcaaggctccatctttttttttttttttttttttttttttgagacggaggactcaytctgtcacccaggctggagagcagtggcgcaatctcggctcactgaaacctcggcctcccgggtttaagcaattctctgcctcagcctcccaagtagctg

SEQ ID NO: 463171 - DNA, 201 bp, Homo sapiens
atgttgtctaagaatagctaagcctgctattttttgctttccattggcatggaatatctttttccattcttttattttcagtctgtgtctttatagatgaygtgtatttcttgtaggcaacagatcattgggtcttgctttttttttttttaatccattcagtcactctgtcttttgattggagagtttagtccatataca

SEQ ID NO: 463172 - DNA, 201 bp, Homo sapiens
tgtgtgtgtaatatagtgatgtgagctttattgcataatacatcctcttaaccaaatctgtcatttcctttgccctgtagactcatcttctctcgtttttkttttttttttcactttgttgagatgtaaaacttttgtgttattcacagactttctataccacttacaattcatgcttttctcttctgtgccacctatgct

SEQ ID NO: 463173 - DNA, 201 bp, Homo sapiens
aggactagcaatacatttatgtagagcttttcagtgtatgaaatgcttcctagtatgtaatttgatccaataacctcagtaatcctacagtgataggtagktattattgcttattttacatacaaataaagtaaaattcagataggcaaagtgacttgtcaaaggcaacaagagctatatggtggagaagccaagactgaa

SEQ ID NO: 463174 - DNA, 201 bp, Homo sapiens
tatgttctctttaggtatacagaagagaagtagaagaaaatgggattgttctggatcctttaaaagctacccatgcagttaaaggcgtcacaggacatgargtctgcaattatttctggaatgttgacgttcgcaatgactgggaaagtaagctgtcattattaatatattttaatctattattttgaatttaatatcaaa

SEQ ID NO: 463175 - DNA, 201 bp, Homo sapiens
cgctcggtgtcaggcgcggcggcggcgcggcgggcggacttcgtccctcctcctgctcccccccacaccggagcgggcactcttcgcttcgccatcccccracccttcaccccgaggactgggcgcctcctccggcgcagctgagggagcgggggccggtctcctgctcggttgtcgagcctccatgtcggataatcagag

SEQ ID NO: 463176 - DNA, 201 bp, Homo sapiens
atgcagcagcaggatcttggctcactgcaccctccgccctaagggttcaagcaattctcctgtctcagcctcccaagtagctgggattacaggtgctgcgycaccacacctggctaatttttctgtttttagtagagactgggttttgccatgttggtcaggctagtctcgaactcctgacttcaggtgatctgcccgcct

SEQ ID NO: 463177 - DNA, 201 bp, Homo sapiens
tgggccaaagaaaatgaggcttcctggtgatcagacctcacatccctaatctgtaaccataatactaagtattagctaccttccatttggatgtaacctaratagggcaggatcctgttcaatttaccatactgtccattcgtacttgactttcaacataagtgaattgatcacattctaggaaaagataatatatctttt

SEQ ID NO: 463178 - DNA, 201 bp, Homo sapiens
aacactatgtaaaacctactaacctttgtgcatttggttgctcagctactaagagcaccatttctgaactgaagttaactgaagaccattctgttttagakattatgacataccttttggattctcatgcctttttcctcccttctcaaggttgaagagatggtgcagaaccacatgacttactcattacaggatgtaggc

SEQ ID NO: 463179 - DNA, 201 bp, Homo sapiens
ttttttttttcactttgttgagatgtaaaacttttgtgttattcacagactttctataccacttacaattcatgcttttctcttctgtgccacctatgctycagatcatagatggtagaaatggctcccttgtctgcataagaaggtgtttgccagagaaaatggtgaattatgagctatatgttcttttatttttctaaa

SEQ ID NO: 463180 - DNA, 201 bp, Homo sapiens
ttataagtgatatcacgaggttatcatcattcataagtggcttatcgctatcaagccaatagattcatcagtttcaagcctattcctagaagtattatatygaactagacagctctccttatcccatgccctcagttataaggtgcagaccttaaaagttgatgaaataccataggaccacatgaaatccagttttgtttt

SEQ ID NO: 463181 - DNA, 201 bp, Homo sapiens
tcacattacattcgcagtgtatgtaactataccactcacactatatctgaaatttatcatcaccccaaacagaaactccgtactcattaagcaacaactcyccattccctctcctcccattccataataatgttctgcttagactcaaagtctatagtgttatttacactacaatatttttccctttaaatttgacatctt

SEQ ID NO: 463182 - DNA, 201 bp, Homo sapiens
aatttatgttttcaaaataatggattggtgattagaggttgtaaatgagttcaccttcttttttcttgtggaagagtaagtggaattaagaaaaagccagyatgcctttaaagtactgtccccaaaactggtgccactgggattttgaaagcatgttacaaattttaagaacatttaacactgtatcagttatgaccactg

SEQ ID NO: 463183 - DNA, 201 bp, Homo sapiens
ctcctgagctcaagtgatcctcctgcctcagcctctcaagtaattggaactactggtgtatgccacactcttagctttctttatacacagtttaagtctaraaaagagccttctgaaatactgaaatccatttaaatacctttctagtatctagtttctataagaggtaaatgatagttaccaaatatgaaagtgaattat

SEQ ID NO: 463184 - DNA, 201 bp, Homo sapiens
tacaagggaaattagaaaatgcttagagttgaataaaaacataccaaaactttgaggatacagtgaaagcagtgctaagggagaaatatagccataaacayttatattagtaaacaagacctcaaatcaacaacatagctttacaaattaaaaaggaaaataatgtaaatccaaagctagcaaaaggaaggaaataataaa

SEQ ID NO: 463185 - DNA, 201 bp, Homo sapiens
attcttagtgtgtattccccttagacacaaaatttcctaagtatagatacttctcaacatcatcagatgtttatcattggcagtttgacatctctttttcwcagaaatagccacctaagattagatataacaatttatttaacatcaataaattggggaaaagggaagggttttagtgttagggaattatttgtgcctgag

SEQ ID NO: 463186 - DNA, 201 bp, Homo sapiens
agtaagttcttccttatcagtaattactttaaatgtaaatggatccaactcttcaattgaaagactgacagaatgaattaaaaatacatgatcaggccaggcgcagtggctcacatttgtaattccagcactttgggaggctgaggtgggtggatcacaaggtcaggagttcaagaccagcctggccaagatggtaaaact

SEQ ID NO: 463187 - DNA, 201 bp, Homo sapiens
tcttgaacccaggaggtggaggttgcagtgagccgagattgcaccactgcactcagcctggtgacagaatgagactctgtctcaaaaaaaaaaaaaaaaaagaaaagaaaagcaaaatcaactaaacagtgataaactagacagtgatgcaggaaatgagggacaaaaatactaataaggcacatagaaaatagcaaaaat

SEQ ID NO: 463188 - DNA, 201 bp, Homo sapiens
tttgcatcatatgatgatgacagaggatcaaattttacttcctctttacattcaggagttttaaattttgagggaaggacgcataaatagttcttacagtrgtcggggctctgccattttctcaagctgtagaaaaatcagtacatagaatcacaactgacctttattaagcagcagagaaacttcatgttgtctctggat

SEQ ID NO: 463189 - DNA, 201 bp, Homo sapiens
ttagctcccactcataaatgagaacatgcagtatttgactttctgtttgtgagttaatttgttctgggaccaaactgaggttcgggctgctatttctcacrgcccaataacgagatgcagatgaactggggaggaagagagttatttctgtaactggttacagggagaaggtctgaacatcatcaccagaccaactccaaa

SEQ ID NO: 463190 - DNA, 201 bp, Homo sapiens
gaaatgtttgttcaggtgtttgtgcatttttttaattgggttattttcttgttattgagttgagttcctgatatttttcggatattaatcccttatcagakatatagtttgcagatattttctcccattctgtgggttttctcttcactttgttgattgcttcttttgctgtgcagaagctttttagtttgttgaaatctc

SEQ ID NO: 463191 - DNA, 201 bp, Homo sapiens
gccattctcctgcctcagcctcccgagtagctgggactacaggcgcccgccactgcgccctgctaattttgtgtatttttagtagagacagggtttcaccrtgttagccaggatggtctcaatcttttgacctcatgatccgcccgccttggcctaccaaagtgctgggattacaggcgtgagccaccgcacccggccaac

SEQ ID NO: 463192 - DNA, 201 bp, Homo sapiens
cattgaagatacattttcttacattattagattcacaggtgtgtacttttacatacattttcactttcctgtaagtctttaatattattgctgtgctgtgyatttttgttttattcatttaaaattaatacataacatacatacaatgaagtgtaccaatcttaagtatactacctgattttttttaacgtttgtatacac

SEQ ID NO: 463193 - DNA, 201 bp, Homo sapiens
tgaacccaggagacagaggtggcagtgagccgagattgtgccactgcactccagcctgggcaagagacagtgagactctgtctcaaaataataataataataattattattattattattattattcagtttctatttagaggttttcaaaatcccagataacctgaattttatgtactgtaggctggaggtggaagtagg

SEQ ID NO: 463194 - DNA, 201 bp, Homo sapiens
aaaaaggttttttattatactttaagctctgggatacatgtgcagaatgtgcaggtttgttacataggtatacatgtgccatggtggtttgttgcaactgycaacctgtcatctacactaggtatttctgctaatgctatgcctccccttgtccccaacctcccgacaggccccggcgtgtgatgttcccatccctgtgct

SEQ ID NO: 463195 - DNA, 201 bp, Homo sapiens
agtgtttgtaaaagttctttaagaaaaaactgaaagctgtatgaattaaagttaagattgtgtaaagttaagctaacatttttctagtaaagaggtgcctrttgtcaaagggctctgtgagcattttctgtataatttgtcaaagatatataataaaccacttttgatgctattatttttttaaattataggattattttc

SEQ ID NO: 463196 - DNA, 201 bp, Homo sapiens
ccctcttcatattcagtgtatattgcacagatctctcaacaacacagccattaaatagatattctccaagtgacacttacatcacacatgtttgagtttaygttacttgcaaacatagggaaagaaagatacatgggataaactggtgcatgagaaatgagatcttagcagttggttgaaataaatgagaacaactgaggc

SEQ ID NO: 463197 - DNA, 201 bp, Homo sapiens
gtgtcataattgtatccatatgtcattttgtacttgcaagtttatatgtgggaaaattaatagatgtggtactactggccctgctaggggtttgtgcatartttagatactacttttcatagaggttatagtaattgaccatctcaacagcaataatgaattggagtccctgtgtcccacagtttttcatacaacgtgtaa

SEQ ID NO: 463198 - DNA, 201 bp, Homo sapiens
agatgacactttgtttctctccctttttggtctataccctccttcttttcccttctcttactgcacctttatttgatatttggacattggtcagttaatcytgtttacatccctaaacacaaggacagaaaataagagcagggactgagagatacagagatggattgaaaagcaaaagcaacattgaattttggattttct

SEQ ID NO: 463199 - DNA, 201 bp, Homo sapiens
gctgaattgcttttaagtccaggtaactatatcactgagaagcaggtgcctatatttttacaaaattttgctgacagcttacttcttcgtaatattaatamccttttgtaaaactcatgtatgtaacttgagagaaatcttgctggatttttttctctaatatatggtgctcatgattgatcagatcctgttttagccttt

SEQ ID NO: 463200 - DNA, 201 bp, Homo sapiens
ttttttgggtttttttgagacagagtctcattctgtcacccaggctgtagtgcagtggcacgatctcaactcactgcaacctccgtctcccaggttcaagygattctcctgtctcagctgggattacaggcacacgctatcacacccagctaatttttgtatttttagtagagacagggtttcaccatgttagccaggctg

SEQ ID NO: 463201 - DNA, 201 bp, Homo sapiens
tgcccagctaatttttttatttgtagcagagacgaggtctcactgtgttgcccaggctgctattttatttattttttaagagatagggtctcattctgtcwtccaggctagaatgcagtggcacaatcatagctcactgcaacctcaagcgatctttgcctcagcctgagtagctgggactacaggcatgggccaccactc

SEQ ID NO: 463202 - DNA, 201 bp, Homo sapiens
tccatgtcttccattgatctagtcagtgcctctgatgatgttcacagattcagctcccaggtactgtatgaatgtatagagtggacttgagtctttctgtrctatatttcagcctgctttcccagttcctagaaatcttttggttaggccactgattttagttttgaattttaaatagtaacattaagcattaaaaaggtc

SEQ ID NO: 463203 - DNA, 201 bp, Homo sapiens
cttgtaacctttaaatattctaaatatataattttttcctcagtgtttatgttaattcagtgtatatttcatgatatataaatgccaggcatgctcaaatrtatatttcttattgcctacaaagtttaggcttcaaaaggcttagtattaggcctgttcacttgataggacaaatttttatctcccctgtaaagatgatca

SEQ ID NO: 463204 - DNA, 201 bp, Homo sapiens
tgttgtggaaataagttttatatgggaccaacctttgttattttaagtgttgaccctgggtcttttaaccttttagagctataggccctatcattaaaaggagagtgttaaaatacataactaaagtctttttcaacgctaaaatacagtcttaagcagcagtgagaaagtataagaaggttttctttcttagaatatctt

SEQ ID NO: 463205 - DNA, 201 bp, Homo sapiens
tatcagcttggtgcttataagatttcactggagatacttttaagagttacgattttggttaacctaatataatattagaccagcagagtttacaaaatacygggtatctactgatgctttgttttttgttttggcagctaaacaaccgatgtgtccgtgccaaaataaatgttgctatgatttgtcaaaccttggtaagcc

SEQ ID NO: 463206 - DNA, 201 bp, Homo sapiens
agaagggcatgaacccaggaggcggagcttgcagtgagccgagatcgcgccactgcactccagcctgggcgacacagcgagactctgtctcaaaaaaaaawaaataaataaaaatttcgtacaggtgttgaagaaagagtagacaacaatgaagagaatgaaagtaagataaaaaggatcagaaaaattactgaaaatgga

SEQ ID NO: 463207 - DNA, 201 bp, Homo sapiens
actacaggcatgaaccaccatgcccaacttagacttttattgtactatcaaaaggcaattttcttttcaaatttctgggtaatagtgttagaaaaatcctrcttggtaacatccagaaatggcatcatactgagtgattcaaatgtgagatggaagaaaaggttagaattggagtgaacgtcccctcttatctcaaatgta

SEQ ID NO: 463208 - DNA, 201 bp, Homo sapiens
aggttatcatcattcataagtggcttatcgctatcaagccaatagattcatcagtttcaagcctattcctagaagtattatattgaactagacagctctcyttatcccatgccctcagttataaggtgcagaccttaaaagttgatgaaataccataggaccacatgaaatccagttttgttttacttgaattacatcccc

SEQ ID NO: 463209 - DNA, 201 bp, Homo sapiens
gtggaaataagttttatatgggaccaacctttgttattttaagtgttgaccctgggtcttttaaccttttagagctataggccctatcattaaaaggagagtgttaaaatacataactaaagtctttttcaacgctaaaatacagtcttaagcagcagtgagaaagtataagaaggttttctttcttagaatatcttttta

SEQ ID NO: 463210 - DNA, 201 bp, Homo sapiens
tgtggaaataagttttatatgggaccaacctttgttattttaagtgttgaccctgggtcttttaaccttttagagctataggccctatcattaaaaggagagtgttaaaatacataactaaagtctttttcaacgctaaaatacagtcttaagcagcagtgagaaagtataagaaggttttctttcttagaatatcttttt

SEQ ID NO: 463211 - DNA, 201 bp, Homo sapiens
actgcaacctcgacctcccaggttcaagcaattcttctgcttcagcctcccaagtagctgggactatagccacgtgccatcacgcccggctaatttttgtktttttagtagaaatggggtttcactgtgttggccaggctggtctcaaactcctgacctcaagtgatccacccacctcagcctcccaaagtgctgggatta

SEQ ID NO: 463212 - DNA, 201 bp, Homo sapiens
atctttagttttttaggagcacagtactgaatgtttgtttctttgttggaccttttgaaaaccggttttccattgatgcagtgtagctgttacaggaataycatttttaaaacgtttttatacagcatggctgaaaattgaacctgggcctccctcgtggcctaccattgaaggaacagcattttttgcctatctagaaag

SEQ ID NO: 463213 - DNA, 201 bp, Homo sapiens
ttcttatcttaagttgtttcatagcctaaagaaaatggtagagttagtttatattgtgtttgctaaataaactgatgagataaaaggtggatgttgttaarggagggagagaataaacaataaaccctgggaggagtacaggatgtaaattgtgttaagcaaataagttcactgtcgtgttgcccagagcggattcttttc

SEQ ID NO: 463214 - DNA, 201 bp, Homo sapiens
catgtaatatctgtttcttcagtcaggatttagcagttttgatggacgtggtctatatgatatgttatagcagaaaagcagattttaacagtctcactttwaagctaaagtatctccaaattatattcaacaaggaaatcactttttaataatatgtttcatttccattataatactaagctctattgagcagattgtgtt

SEQ ID NO: 463215 - DNA, 201 bp, Homo sapiens
aaagtgctgggattacaggcgtgagccactgcgctcgacctagccttcatattaagcaccattttcttagatatttgcctcatagaacagatttattattaggaatataagcaacagtggggaaggaaattaagagttcttttactcattgtcagcctttttagctttctgaatcaatgttcccctagtccttattagttg

SEQ ID NO: 463216 - DNA, 201 bp, Homo sapiens
ttttcaaactgaattgaaacaaatagaagatactgggttttgtatatcatgtaatatctgtttcttcagtcaggatttagcagttttgatggacgtggtcyatatgatatgttatagcagaaaagcagattttaacagtctcacttttaagctaaagtatctccaaattatattcaacaaggaaatcactttttaataata

SEQ ID NO: 463217 - DNA, 201 bp, Homo sapiens
ttgtcgttgttgttgttttaaacagggtcttgctctgtttcctaagctgaagtgcaatgacaccatcacggctcactgcaacctcaacctctggcctcaarcaatcctctcatctcagccttcccagtagctgggagtccccacaggcatgtgccaccatgctcagctaattttttattttttgtagagataggggtcttg

SEQ ID NO: 463218 - DNA, 201 bp, Homo sapiens
gttctcatgctcctatgaagaaatacccgagactgggtatttctttttataaagaaaagagttttaattgactcacagttctgcttggctggggaggttcrggaaacttaaaatcatggcggaagtcacctcttaacagggcggcaggaaaaagaatgagagccaagcaaagggtgggaaagcccttataaaaccatcgcc

SEQ ID NO: 463219 - DNA, 201 bp, Homo sapiens
cttaagaccaggaggttgaggctgcagtgaactatgattgtgccactgcactccagccttgggccagagtgagacccctgtctcgtaaaaaaaaaaaaaawatatatatatatatatatatatatatattcagtcttctgacacaatgtaaatagtctaagaatttattgtgcatgggattttggctacttagactgaacc

SEQ ID NO: 463220 - DNA, 201 bp, Homo sapiens
acaggttttttaataagttcatcattttctttaaaaatagtttatttttaaaaatagtttgattctattactcactgttgaacagtttccaaccttcttaygatgttttagattttgaaacatcatgtcttccttacaaatggacattctaattgtggatctgaaaaatgcagagactcttaagagctaaaggaatgtaca

SEQ ID NO: 463221 - DNA, 201 bp, Homo sapiens
tatcgtgagatattattttgtttttactcttcataatagctgaaaaaatgacagtgaccagtgttttcaaaatgttcttattgagcattctcatatattgktggttggcatatttgttgaaaataatttggctgtatgttgtgaattatttaaaattgtgtaaactcttttactcagtaaattccacttctaggaatctgc

SEQ ID NO: 463222 - DNA, 201 bp, Homo sapiens
actcatcattcaaggcctatcttaaatactacctcttccttgaagacttttctttggttagaatataagcttcttgagagctgggaacgatatcatattcttttttttttttttttttagacaggctctcgctctgtttcccaggctggagtgtggtggcatgatcatgggtcactgcaaccttggtctccccggctcatg

SEQ ID NO: 463223 - DNA, 201 bp, Homo sapiens
ttggttagtttaaactcacatatttgccatgctactaaactactcagattttccttaaacccagttttgttttttgagatggggtttctgtcacccgggcyggagtgcagtggcatgatctccactcactgcatcctccacctccctggctcaagcagtcctcctacatcagcctgccaagtaactgggacaacaggtgtg

SEQ ID NO: 463224 - DNA, 201 bp, Homo sapiens
aatcttactcatcattcaaggcctatcttaaatactacctcttccttgaagacttttctttggttagaatataagcttcttgagagctgggaacgatatcatattcttttttttttttttttttagacaggctctcgctctgtttcccaggctggagtgtggtggcatgatcatgggtcactgcaaccttggtctccccgg

SEQ ID NO: 463225 - DNA, 201 bp, Homo sapiens
aaagaagaaaaggccttgggatctattatttatttttattggccaagaagagcttaccctatttcttaaccaccttagttattctttctttttttatttgcccccccccacccccaagaggtagaggagataaaactttaactaggaaggtagatttaactctttgttcactttgatgtctttaagagacctagagcattt

SEQ ID NO: 463226 - DNA, 201 bp, Homo sapiens
gcaaggattatgggcatgagccactgagcccagcctaaacaaagcttttaaaagctcctgcaacctcaaggttgttaacctggtcatctcatggtaattasaaactctgattggctgctttagatttcttgattaaaaacctaagtaaactgattaagttttaggcattctttcaaaggtttctcagtgaaaagattggga

SEQ ID NO: 463227 - DNA, 201 bp, Homo sapiens
aactcctgacctcgtgatctgcccgccttggcctcccaaagtgctgggagtaatgtatcacatatatataatgtttcacaattctcaaagtacttttacaygtagcatttatcttattggaaggagtaactgtaaataaatttcagttcctcagaataaatgatatgtaagcagcttgtctatttaaatacttttttttcc

SEQ ID NO: 463228 - DNA, 201 bp, Homo sapiens
agcaggcattcaatatccctgcacttctgaagtgcacctgagcaaaagggtaaaggctgtgggcctgagagtgggctggtgtgggagagccccatgcagayggtttgccacacatcccttcttgtagacttggcattttggaagaactctttgacagagaatgagttgattttagttttatgctcccacctaaaatttttt

SEQ ID NO: 463229 - DNA, 201 bp, Homo sapiens
gatcttcagtcttggaggagaagcctggtgggaggtgactggatcatgggggtggatttcgtcttgctgttctcatgagatctggttgtttgaaagtgtayagcacttccttctttgctctctccccttcctactccagccatgtagaatgtttgggcttccccttcaccttttgccgtgattgtaagtttcccgaggcct

SEQ ID NO: 463230 - DNA, 201 bp, Homo sapiens
attctcaaagtacttttacatgtagcatttatcttattggaaggagtaactgtaaataaatttcagttcctcagaataaatgatatgtaagcagcttgtcyatttaaatacttttttttccacatttcttgagtttttaatataatcggaagaaagaaagaagttttcaaaggtgtttaagattatgatacccttctaaac

SEQ ID NO: 463231 - DNA, 201 bp, Homo sapiens
tcttaaatactacctcttccttgaagacttttctttggttagaatataagcttcttgagagctgggaacgatatcatattcttttttttttttttttttaracaggctctcgctctgtttcccaggctggagtgtggtggcatgatcatgggtcactgcaaccttggtctccccggctcatgcagtcctcccacctcatcc

SEQ ID NO: 463232 - DNA, 201 bp, Homo sapiens
ataaatttcagttcctcagaataaatgatatgtaagcagcttgtctatttaaatacttttttttccacatttcttgagtttttaatataatcggaagaaasaaagaagttttcaaaggtgtttaagattatgatacccttctaaaccaggctggaaagtaagagacttctcttctaaaaaactctgaagtttgctttaata

SEQ ID NO: 463233 - DNA, 201 bp, Homo sapiens
atcattattaatttatgcccaatcctagtttctaagcactagggaggataataaaattaatcatttagatgcaatatactaagtgtagatacataggaagmtttcctgggggattcattgtgcttttatttttttatattgtgtattaaagtatgataattttttttttttacatgggactctgcttgataaaagtataat

SEQ ID NO: 463234 - DNA, 201 bp, Homo sapiens
catcaatagtatttcattaaaaatagtatttgtatggaaacataacacatatagtgaaattccttgtgtttagttgtacctctgtttcagttaagagactratttgactgtattaatattacgtatgatgtgtgaaagccataacagtgaagtatgtacataaaataatatattgattaattcccctcatctagacagggg

SEQ ID NO: 463235 - DNA, 201 bp, Homo sapiens
agtcattggccaaggatactatgatgaacaaaaatgaacctagcctttaacttcatgtaaaagtacaattttgctaagttccacaaaggagagacacatgwtatgagaaggcacaataggaggaaataacaagcaagctctggggatgagtaagtaggagttacctagactgaagaaaagaaggcacaccatgtcaaggag

SEQ ID NO: 463236 - DNA, 201 bp, Homo sapiens
gttctccgggagggttatattggttcccattccacagcggccgcaacgtgtcgagagccgtaagtaaagtgtcgcaaagcagaaggaaggcgggagtcccractgcaaacattgaggaaagccaggcagtagaggccgctatggcgaacgttccgtgggcagaggtctgcgagaaattccaggcggcgctcgctctgtcgc

SEQ ID NO: 463237 - DNA, 201 bp, Homo sapiens
tcacagttaacatgtgtctttgagtcatttaacaggttttttaataagttcatcattttctttaaaaatagtttatttttaaaaatagtttgattctattrctcactgttgaacagtttccaaccttcttacgatgttttagattttgaaacatcatgtcttccttacaaatggacattctaattgtggatctgaaaaatg

SEQ ID NO: 463238 - DNA, 201 bp, Homo sapiens
ttgtaagaaaaaatgctgggtaatgtacctggtaacaagcctgttaatatattaagattgaaaaagtaacttctatagttactccttctaaaatatttgayttcctaaattccccccacccaaaatctttcccttttgaaaatactaaaaactaagttatgttattataaagtgtaaaatggtttgtcttaattataggag

SEQ ID NO: 463239 - DNA, 201 bp, Homo sapiens
ataatagaatatctatttaattgtatataatggtgtacttaaaaatgaagctaagagttgataatgatatgagtaaagtgtttgtggtgcgagaaagaaayatgcaaaaataatagtgagtgcttctgggtagtaggatttggggggggatctttcttcccttttccccaagccccctgcttcagtaaagatctgttactt

SEQ ID NO: 463240 - DNA, 201 bp, Homo sapiens
ctttaatattatttaacagcaggaggtgagtgtcctacttaaccataatttatttttttttccttcaggacaacataggagagcttgatcttgataaacartctgaacttagagctttaaggaaaaaagaactagatgaggaggaaagcattcggaaaaaagctgtgcagtttggaaccggtgaactgtgtgatgccatct

SEQ ID NO: 463241 - DNA, 201 bp, Homo sapiens
tatcactgcactccagcctgtgcaacagagtgagaccctgtctcaaaaagcaaagaaaaggaaaacaatataaatgtcagtaggaatatgattaaattccrttacatccaaacagaagaacagtacacaattattaaaaataataatttatattaacaaaaattggcaatatgaagagggaggaagaagactataagccat

SEQ ID NO: 463242 - DNA, 201 bp, Homo sapiens
agtgacacctcatcgctactaaaaataagaaaaaaaaattattccaggcatggctgctttgctaggcagtatgttctttgggcagccatcggggccccaaccaccaccggggctctggggccaggcttcctttacttaccagcagctccggggcctctgagaccttctaacagtactttggtggatgacatggagtcatct

SEQ ID NO: 463243 - DNA, 201 bp, Homo sapiens
tatagagagataattaaagtttcattatataaactctaactttcttttggcttttaagatttaacacatttttatctatagatgttgctgggctaatactrcacgtgtccagctattctcaagatggcttctgaatttgccataatggaaagatacatttaatgctgcaattttaaagttatagccaaccatttaaagcct

SEQ ID NO: 463244 - DNA, 201 bp, Homo sapiens
gtctcttaaacaaaacaaaacaaaacaaaaaacccacaaaactagccaggcatggtggtacacgcctgtagtcttagctactggggaggctaggttgagcygggaggatcacttgagcccctggaggagccatgatcatgccactgcaactgcagtctgggtgacagagcaagaccttttctcaacaacaacaaaatccac

SEQ ID NO: 463245 - DNA, 201 bp, Homo sapiens
atggctgctttgctaggcagtatgttctttgggcagccatcggggccccaaccaccaccggggctctggggccaggcttcctttacttaccagcagctccrgggcctctgagaccttctaacagtactttggtggatgacatggagtcatctttccagacttgctttgcctctccgttaagtcaggactatgtcaatggca

SEQ ID NO: 463246 - DNA, 201 bp, Homo sapiens
aaacctccatttaccacttacttgttatttgaccttgttcaaacctgagactcagtttccttatctgtcaaatagatacaataaacaaatccaactcaaakggttggtgggataatcaaaataaatatatatgaaatttacttataaaacgtaaaccatggtccggacacggtggcttacacctgtaatcccagcactttg

SEQ ID NO: 463247 - DNA, 201 bp, Homo sapiens
aaaaaatgctgggtaatgtacctggtaacaagcctgttaatatattaagattgaaaaagtaacttctatagttactccttctaaaatatttgacttcctamattccccccacccaaaatctttcccttttgaaaatactaaaaactaagttatgttattataaagtgtaaaatggtttgtcttaattataggagaaaaagg

SEQ ID NO: 463248 - DNA, 201 bp, Homo sapiens
gatgacatggagtcatctttccagacttgctttgcctctccgttaagtcaggactatgtcaatggcagcaatcaggaagaaattggaactggtgttgatcrgtgtatacacaagtttctggatattgcaagacagaatatttctttcctacaaaaaagattgcaattatctgtccagaaaccagagcaagttatcaatgag

SEQ ID NO: 463249 - DNA, 201 bp, Homo sapiens
ctcaagaatcacttcctttagtattaataactttcttgggaccattttgggccaaactgatctctccctcctacctttgaattcttataatactttttgtktcccatttatatggtacttggtttcttaaataaatctgggcagggcacagtggctcccatctgtaatcccagcattttgggaggccgaagtgggaggatg

SEQ ID NO: 463250 - DNA, 201 bp, Homo sapiens
atacaagtccaaatacagcgcccgggcgctactggaagaggtcaaggcgctgctcggccctgcgcctgaggacgaggatgagcggcctgaggccgaggacrgcccgggtgccggtgaccacgccctggggctgccggctgaggtggtggagcccgaggggcccgtcgcccagcgagcggtgaggctggcagtcatcgagtt

SEQ ID NO: 463251 - DNA, 201 bp, Homo sapiens
cacctaaaattttttcactatttttataagatgttaatttcttgagtactttatttataacatgcctgtaccttgggtaaaccaagtaaacttttttttgycttaggcaaagtttagactgttcgtatgatgatacactttcttttttatgtgggttttttttttttgcttgttttttatttttatttttatttttgagac

SEQ ID NO: 463252 - DNA, 201 bp, Homo sapiens
tataacatgcctgtaccttgggtaaaccaagtaaacttttttttgtcttaggcaaagtttagactgttcgtatgatgatacactttcttttttatgtgggttttttttttttgcttgttttttatttttatttttatttttgagacagaatcttcctctgttgcccaggctacatagcagtggcaccttcacagctcattg

SEQ ID NO: 463253 - DNA, 201 bp, Homo sapiens
tatttttgtataagactaagtatacacacacacacacatacttacattatatatacacatatagtaaaaagtttatatacatgtgaatatatacaaatacrtatgtatgtgtgtgtatatggaagagttttgcaagtatcagttaatgggaattcatgatattctaactgctttgtcttaatctggtgtcttctccttggg

SEQ ID NO: 463254 - DNA, 201 bp, Homo sapiens
agctcttcttagactccctgagagacccaaataaagtattccctgagcatataggggaagatgttcttcgccctgccatgttagctaagtttcgagttgcycgtctctatggcaaaatcattactgcagatcccaagaaagagctggaaaatttggcaacatcattggaacattacaaatttattgttgattactgtgaaa

SEQ ID NO: 463255 - DNA, 201 bp, Homo sapiens
tgaggcacaagaatcgctagaacccgggaggcggaggttgcagtgagccaagatcatgtcacagcactccagactgggcaacagagcaagactctatctcaaaaaaaaaaaatggtaataataattcaaataaaatgtcaatagtgattatctctgtggagtcaagctttaaaaaaaaaatccaaaacaccaaacctaatt

SEQ ID NO: 463256 - DNA, 201 bp, Homo sapiens
atgagaatggactaatacaaagggctctgccttcctaataacttactgattggtcatgttacatgttagtcaggctggtcttgaactcctgaccccgtgayctgcccgcttcagcctcccaaagtgctgggattacaggcgtgagccattgcacccagcccaaaagatttttaaaacaaaatgtgtgatatagtaatatat

SEQ ID NO: 463257 - DNA, 201 bp, Homo sapiens
ggcacaataggaggaaataacaagcaagctctggggatgagtaagtaggagttacctagactgaagaaaagaaggcacaccatgtcaaggagctgaagcarcatgtttagaagttctgtggcgtaagggaggatgatatcagaagggatggagcaaaggctgtgaggttggagctgagggagagggagtgtgatataagct

SEQ ID NO: 463258 - DNA, 201 bp, Homo sapiens
tccttgtgcctgaaggactgactattccaagggaagtgaggtagactaaccccactacatacatacatacatacatacatatatgtatatatatatatatwtatatatattttttttttttttttgagacagagtctcaatctgtagcccaggctggagtgcagtggcacgatctcggctcactgtaacctccacctcctg

SEQ ID NO: 463259 - DNA, 201 bp, Homo sapiens
tgtgcctgaaggactgactattccaagggaagtgaggtagactaaccccactacatacatacatacatacatacatatatgtatatatatatatatatatatatattttttttttttttttgagacagagtctcaatctgtagcccaggctggagtgcagtggcacgatctcggctcactgtaacctccacctcctgggtt

SEQ ID NO: 463260 - DNA, 201 bp, Homo sapiens
tgcctgaaggactgactattccaagggaagtgaggtagactaaccccactacatacatacatacatacatacatatatgtatatatatatatatatatatatattttttttttttttttgagacagagtctcaatctgtagcccaggctggagtgcagtggcacgatctcggctcactgtaacctccacctcctgggttca

SEQ ID NO: 463261 - DNA, 201 bp, Homo sapiens
cctgaaggactgactattccaagggaagtgaggtagactaaccccactacatacatacatacatacatacatatatgtatatatatatatatatatatatattttttttttttttttgagacagagtctcaatctgtagcccaggctggagtgcagtggcacgatctcggctcactgtaacctccacctcctgggttcaag

SEQ ID NO: 463262 - DNA, 201 bp, Homo sapiens
tcttgaacttctcgcctcaagtgatctgcctgcctcggcctcccaaagtgctagaattacaggcgtgagccaccatgcctggcctatttcttttttttttwaaaaaaaagttctctggaagagcatagtattttgaaagtattatatgtttctgatccatctttgtctattatctcagaatctcaccatggcttagctgat

SEQ ID NO: 463263 - DNA, 201 bp, Homo sapiens
ggcagttggcttccttaagaaggagcaggcaattgaccgggcgcggtggctgacgcctgtaatcccagcactttgggaggctgaggtgggtggatcatgargtcaggagatcgagaccatcctggctaaaacggtgaaaccccgtctctactaaaaatacaaaaaattagccgggcgtgattgcgggcgcctgtagtccca

SEQ ID NO: 463264 - DNA, 201 bp, Homo sapiens
gtatatgaaagaggtatgttacatgtcagatgagttttaagttttgattgaaactagttaagaattgatagtaagaatccctcattcgtaatattggtgtractcttcactgtgccctagaacttctctatagagccatctgggaagtcacctcatagctgaaattattgcatattaaagacttcagggttttaaaaaaat

SEQ ID NO: 463265 - DNA, 201 bp, Homo sapiens
ctgagggcctcagactgttgacctctctcatttcctttccatatgggcttctccatagggtggctcacaacatggcagttggcttccttaagaaggagcargcaattgaccgggcgcggtggctgacgcctgtaatcccagcactttgggaggctgaggtgggtggatcatgaggtcaggagatcgagaccatcctggcta

SEQ ID NO: 463266 - DNA, 201 bp, Homo sapiens
tccttaagaaggagcaggcaattgaccgggcgcggtggctgacgcctgtaatcccagcactttgggaggctgaggtgggtggatcatgaggtcaggagatygagaccatcctggctaaaacggtgaaaccccgtctctactaaaaatacaaaaaattagccgggcgtgattgcgggcgcctgtagtcccagctacttggga

SEQ ID NO: 463267 - DNA, 201 bp, Homo sapiens
tgaaattgttaatttaaaatgtaaagtctgaggccaggcacagtggctcacgcctttaatcccagcactttgggaggctgaggtgggtggattgcctgacytagaggttcaaagatcagcctgggccacatagtgatacgctgtctctacaaaaactaaaaaaaaattagctgggtgtggtggcgtgtgcttgtggtccca

SEQ ID NO: 463268 - DNA, 201 bp, Homo sapiens
ctaggtaaccaaataagaccctgtctcaaaaataagtaaaataaaatgtaaaagctgaacacggtgacttacacttataatcccagcactttgggaggccraggtgggaagattgcttgatgccaggagttcaagaccaacatgagcaacaaagcaagaacccgtctttacaaaaaaaaaaaaaaaaaaagttactaagca

SEQ ID NO: 463269 - DNA, 201 bp, Homo sapiens
gttcgtatgatgatacactttcttttttatgtgggttttttttttttgcttgttttttatttttatttttatttttgagacagaatcttcctctgttgccmaggctacatagcagtggcaccttcacagctcattgcaacttccaccctcctggcttaagcgatccttccacctcagcctcccaaatagctgggaccacag

SEQ ID NO: 463270 - DNA, 201 bp, Homo sapiens
tgcagatggtttgccacacatcccttcttgtagacttggcattttggaagaactctttgacagagaatgagttgattttagttttatgctcccacctaaawttttttcactatttttataagatgttaatttcttgagtactttatttataacatgcctgtaccttgggtaaaccaagtaaacttttttttgtcttaggca

SEQ ID NO: 463271 - DNA, 201 bp, Homo sapiens
catggacttgataaaatctaaaagggtagacttttaagaaatagctcatgtaatagttcaaaaatagaagcagaactgatggcagtgaagagcatggactygaaatacactaggtaggtatgaactccagctctgccgcttcgtagctatgtctttgtggcaatttacttaatatatttttgcctctatttcctcacaagt

SEQ ID NO: 463272 - DNA, 201 bp, Homo sapiens
tcttgattaaaaacctaagtaaactgattaagttttaggcattctttcaaaggtttctcagtgaaaagattgggaactattctatttggtgctttgtgaamatattttgaattagtatatgtgccagttattgccatttcttaagtccaaaatgtttttctggtcaaataaatagcagtttttcaaaaacaaaaattagct

SEQ ID NO: 463273 - DNA, 201 bp, Homo sapiens
agcgaagccctgtctctacaaaaaatataaaaattagccaggactggtggtgcacacctgtggttccagctactcaggaggctgaggtaggaggattgctygaggtgggaggatcgggagacggaggttacagtaagccgagattgtgccactccactccagcctgggtgacagagaccctgtctcaataaataaataaaa

SEQ ID NO: 463274 - DNA, 201 bp, Homo sapiens
ctcagcctcctgaatagctgggactatgtagaaattttattttatttttgaagacggggtctggctctgtcacccaggctggagtgcagtggtgggatttyggctcactgcaacctctgctttctgggctcaagccatcctcccacctcagcctcctaagtagctgagactacagggtcacaccaccacgcccagctaatt

SEQ ID NO: 463275 - DNA, 201 bp, Homo sapiens
gcattcagttaactaattctcatgaatccatttcattgtcctcatccaaagtgttatccagtgcctccgcttgtgacatcttttttacagctgttggaggycccttattcattctgtttagcaactttaaaattacatattcactgtgactttaatttatacttaaaactccatggaaattggcagtactaagatatctag

SEQ ID NO: 463276 - DNA, 201 bp, Homo sapiens
cgtattgcaaaaagagggatttgaaccatgtttttaaaaatgcaattgtcatttatatcattgtcatcttcatctgattccagtgatgaggttttgctacwtggtgaatccctacctggcagctgctaaagtcccacatttaccagccacctagagggcataagacactcactgttctagcagtggttgctcacagggagc

SEQ ID NO: 463277 - DNA, 201 bp, Homo sapiens
gtggtgggatttcggctcactgcaacctctgctttctgggctcaagccatcctcccacctcagcctcctaagtagctgagactacagggtcacaccaccaygcccagctaatttttgtattttttgtagaggcagggtttcaccatgttgcccaggcctcaagtgattcgcctgcgttggcctcccaaagtgctgggatta

SEQ ID NO: 463278 - DNA, 201 bp, Homo sapiens
ccttaagaccaggaggttgaggctgcagtgaactatgattgtgccactgcactccagccttgggccagagtgagacccctgtctcgtaaaaaaaaaaaaaaaatatatatatatatatatatatatatattcagtcttctgacacaatgtaaatagtctaagaatttattgtgcatgggattttggctacttagactgaac

SEQ ID NO: 463279 - DNA, 201 bp, Homo sapiens
tcgtattcttcgaattgcttgaatccgggaggcagaggctgcgtgagccgagattggaccactgcactccagcctgggcaacagagcgagactccatctcwaaataaataaataaataaaataaatcttactcatcattcaaggcctatcttaaatactacctcttccttgaagacttttctttggttagaatataagctt

SEQ ID NO: 463280 - DNA, 201 bp, Homo sapiens
atcttactcatcattcaaggcctatcttaaatactacctcttccttgaagacttttctttggttagaatataagcttcttgagagctgggaacgatatcatattcttttttttttttttttttagacaggctctcgctctgtttcccaggctggagtgtggtggcatgatcatgggtcactgcaaccttggtctccccggc

SEQ ID NO: 463281 - DNA, 201 bp, Homo sapiens
ctcgcctcaagtgatctgcctgcctcggcctcccaaagtgctagaattacaggcgtgagccaccatgcctggcctatttcttttttttttaaaaaaaaagktctctggaagagcatagtattttgaaagtattatatgtttctgatccatctttgtctattatctcagaatctcaccatggcttagctgattgttccttac

SEQ ID NO: 463282 - DNA, 201 bp, Homo sapiens
agaccaggaggttgaggctgcagtgaactatgattgtgccactgcactccagccttgggccagagtgagacccctgtctcgtaaaaaaaaaaaaaaaatawatatatatatatatatatatatattcagtcttctgacacaatgtaaatagtctaagaatttattgtgcatgggattttggctacttagactgaacctaaa

SEQ ID NO: 463283 - DNA, 201 bp, Homo sapiens
gggtggattgcctgacttagaggttcaaagatcagcctgggccacatagtgatacgctgtctctacaaaaactaaaaaaaaattagctgggtgtggtggcrtgtgcttgtggtcccagctacttcgggggctgaggtgggaggatggcttgagtccgggagggcagtccaggaggtcaaagcagcagtgagcgaggatcct

SEQ ID NO: 463284 - DNA, 201 bp, Homo sapiens
gaatataagcttcttgagagctgggaacgatatcatattcttttttttttttttttttagacaggctctcgctctgtttcccaggctggagtgtggtggcrtgatcatgggtcactgcaaccttggtctccccggctcatgcagtcctcccacctcatccttggagtacaggcgtgtgccaccatatccagttaattttta

SEQ ID NO: 463285 - DNA, 201 bp, Homo sapiens
tacatagcttttaaaaaaagttttattttgaaattattttaaacttttgaaaagttgcaagaacagaagagctatcatatgcccttctaaatgcaccaatktttagtattttcctcgcttggaatcaaattttatttttctctctgaaccattggagagaaggttacatacattaggctcttttaccctttcatactttag

SEQ ID NO: 463286 - DNA, 201 bp, Homo sapiens
taagaccaggaggttgaggctgcagtgaactatgattgtgccactgcactccagccttgggccagagtgagacccctgtctcgtaaaaaaaaaaaaaaaawatatatatatatatatatatatatattcagtcttctgacacaatgtaaatagtctaagaatttattgtgcatgggattttggctacttagactgaaccta

SEQ ID NO: 463287 - DNA, 201 bp, Homo sapiens
aactttcttcctgaagtactaacaagagcagagtgccacaaaaccaaatagagatattagtctaccctttcttgcttttaggctcacagtcttatatgtgraattgttaatttaaaatgtaaagtctgaggccaggcacagtggctcacgcctttaatcccagcactttgggaggctgaggtgggtggattgcctgactta

SEQ ID NO: 463288 - DNA, 201 bp, Homo sapiens
agagcatagtattttgaaagtattatatgtttctgatccatctttgtctattatctcagaatctcaccatggcttagctgattgttccttactcaaaggcmcacatcatattgttgacctgctggggctcgcagtaatacttgaagactgggacgccgggaggatccatttccaacttactcacatggttgttggcaggat

SEQ ID NO: 463289 - DNA, 201 bp, Homo sapiens
ggccgaagtgggaggatggcgtgaggtcagtagttcaagaccagcctgggcaacaaagtgagactctgtctcttaaacaaaacaaaacaaaacaaaaaacscacaaaactagccaggcatggtggtacacgcctgtagtcttagctactggggaggctaggttgagctgggaggatcacttgagcccctggaggagccatg

SEQ ID NO: 463290 - DNA, 201 bp, Homo sapiens
tatacaaatacgtatgtatgtgtgtgtatatggaagagttttgcaagtatcagttaatgggaattcatgatattctaactgctttgtcttaatctggtgtmttctccttggggaactacagaacttggctctatattatttatcaaaagagattgatattacattagattatcaagagatttctgtcttctctgggttcca

SEQ ID NO: 463291 - DNA, 201 bp, Homo sapiens
aaaaaaaagttactaagcatcaatagtatttcattaaaaatagtatttgtatggaaacataacacatatagtgaaattccttgtgtttagttgtacctctrtttcagttaagagactgatttgactgtattaatattacgtatgatgtgtgaaagccataacagtgaagtatgtacataaaataatatattgattaattcc

SEQ ID NO: 463292 - DNA, 201 bp, Homo sapiens
cttactcatcattcaaggcctatcttaaatactacctcttccttgaagacttttctttggttagaatataagcttcttgagagctgggaacgatatcatattcttttttttttttttttttagacaggctctcgctctgtttcccaggctggagtgtggtggcatgatcatgggtcactgcaaccttggtctccccggctc

SEQ ID NO: 463293 - DNA, 201 bp, Homo sapiens
caagagcagagtgccacaaaaccaaatagagatattagtctaccctttcttgcttttaggctcacagtcttatatgtgaaattgttaatttaaaatgtaargtctgaggccaggcacagtggctcacgcctttaatcccagcactttgggaggctgaggtgggtggattgcctgacttagaggttcaaagatcagcctggg

SEQ ID NO: 463294 - DNA, 201 bp, Homo sapiens
cacccagcccaaaagatttttaaaacaaaatgtgtgatatagtaatatatatgcttctttattaacacattatataatgtgtctaatatctatgatgattktaaagtaatgatgagcataaatgatattttgagatatctgcaaactagcataatagaaaggtttttttttttcatttctattgttcacaaagtcccaggt

SEQ ID NO: 463295 - DNA, 201 bp, Homo sapiens
agtcagagactaacaaccaataataaaatagaacaattatatcactatactgtgccaggcacggtggcttatgcctgtaatcccagcactttgggaggccraggtgggagaatcacgtgaggccaagagttttggggttttttttgttttgttttgtttttgtttttgagatggagtttcgctctcgtagcccaggctgga

SEQ ID NO: 463296 - DNA, 201 bp, Homo sapiens
tttcccggcgcactcacatgtccacctctttcccgtagcccgggtggtcctcattcatggagcactcgataatctcaggggccaggtaactgggggtcccrcagacctctgcaggaacagtcatcatcagggcaggtcagcagggcactcagaagaggaagtccaggctggccgcagtggctcatttctataatcctagca

SEQ ID NO: 463297 - DNA, 201 bp, Homo sapiens
agagctcccctctcttcatcctgtggaaacagagggttgatagctggatcggtcccaagaccaccactgcccttaccctgctcccagagagctgccttccrccctgatacctctagaagctaagtgggccactctccgtggagaaccacagtctggggagaggagccggggaagtgagaagtgttctggaagaactgggag

SEQ ID NO: 463298 - DNA, 201 bp, Homo sapiens
tgcgagggcccagggccacttacccagcgccaggggcaccggcccagccctgcctacttcctcccttgcccagcctagctgggtgctcctcctttcccggygcactcacatgtccacctctttcccgtagcccgggtggtcctcattcatggagcactcgataatctcaggggccaggtaactgggggtcccgcagacctc

SEQ ID NO: 463299 - DNA, 201 bp, Homo sapiens
gtgatcatagatcactgcaaccttgaactgggcttctgtgatcccacctcggcctccctagtggctgggactacaggtgcatgctactgcacctggctgakttattttttgtagggatctcactttattgcacagacttcaaatattctcaatcctcgattggctgaatccatggacaccaaactcagggaattggagcgc

SEQ ID NO: 463300 - DNA, 201 bp, Homo sapiens
cgagggacatctgagcattaacactacagactcacagaggtcccgagcctccaggaaaattagcaaaagtgtcttctataaacccaggagggaatatgccrgggaactggccaggagtgaactgtgctgagaccctctttctgaaagggagcctctttcaggaactgaatgtttaggcactccaggaacacagctgatagg

SEQ ID NO: 463301 - DNA, 201 bp, Homo sapiens
tgggggatggcagttagcctgagtgttttaggaagaggaggctacaacaccttaaacagagcaaaagcaccttcaggggaactgcatatattaagaatggytttttatcttcaatcaggggcgtccaagggagagaatgcagtcatgggtttagttacagtttatggttaggccagtaaaaccccttcctcatcgctcttt

SEQ ID NO: 463302 - DNA, 201 bp, Homo sapiens
ggacgcttagtaccttgaacttcccccgggggctgaagtgccgcacttcctccaccaagtactgctggaagaaggggtgtgccaaggcctcttccgctgtrtagcggttctggggttgcaccaccaggaatcgggagacctgtgagaggaggagaggggaaccgagaatgtcaaggcaggtcccctccagcatgtcaggaa

SEQ ID NO: 463303 - DNA, 201 bp, Homo sapiens
tgggattacaggcacatgccagcacgcacagctttaaacaatattttaagcagagtttcctgctactgctcagcttacataactccagacccacagcagcyagaacctttgaattgagcagcatgttatgtttgcaagtgagctactccttatataacccctcagggagctgtcagatctgggaggatgctaatttcataa

SEQ ID NO: 463304 - DNA, 201 bp, Homo sapiens
ccacttcactccagcctggtgacagagtgagactctgtttcaaaaaaaaaagagaggaagtccaaagagacaatggagatgatggaacagaaatggcgctsgggctgggactcccccaacatccaccaacttcagggcccagggcagggcgggatactgcccacagggccaccagctcatggcccattgcttccctggtca

SEQ ID NO: 463305 - DNA, 201 bp, Homo sapiens
ccagagaacgtaaatccagccttgtgcggagggcacttgcttctctgggagcaattttgatttccacgtatgctgagagcactgccctggaggctttctcratgcatgactgcagcagctgactgcccgggctgtcgcagggacagtgtgcatgatcaccctacataatgcagacctgtacaggttagggaggccgggtgc

SEQ ID NO: 463306 - DNA, 201 bp, Homo sapiens
ggagggggcttagaggtttgcacttagggagctggcgggcctggatcaggacgcttagtaccttgaacttcccccgggggctgaagtgccgcacttcctcyaccaagtactgctggaagaaggggtgtgccaaggcctcttccgctgtgtagcggttctggggttgcaccaccaggaatcgggagacctgtgagaggagga

SEQ ID NO: 463307 - DNA, 201 bp, Homo sapiens
aggctggtctcaaactcctgatctcaggtgatcctcctgccttggcctccctggtattgcaggaagtgctgctattgcaggcatgagccactgtgcctggycccccctttttaaaaaaaaaaatagagatggttagccagacctggtggcacatacctgttgtcccagctactagggaggctgaggtgggaggatcacttg

SEQ ID NO: 463308 - DNA, 201 bp, Homo sapiens
ctccaggcccagagaacgtaaatccagccttgtgcggagggcacttgcttctctgggagcaattttgatttccacgtatgctgagagcactgccctggagrctttctcaatgcatgactgcagcagctgactgcccgggctgtcgcagggacagtgtgcatgatcaccctacataatgcagacctgtacaggttagggagg

SEQ ID NO: 463309 - DNA, 201 bp, Homo sapiens
gcatccatccctgcctgggaccccttctatcagagcagtgagggtggagctgggagccttgagcctgggtggttctagttggctgtgcggtggggccacaytccctggcttgggctgtcagggcagaatcacaggggggcaccctgccgtgtggcttggggccatcactcactgatgttggggtgccctgagaccttgcgc

SEQ ID NO: 463310 - DNA, 201 bp, Homo sapiens
aggggtcctgctgcaggatagaggcagtacagagccaggacactcaggcctgtacacagaggcgctgagctaccccgctttgtgtcaggaacatggaggcycctaccagggaactcaactcctgcttcagatgtaggatttaggcgtggcgtgatggctcacacctgtcatcccagcactttgggaggctgaggtgggcag

SEQ ID NO: 463311 - DNA, 201 bp, Homo sapiens
cagcctcttgagtacctgggattatagatgcctgccaccatgcccggctaatttttgtatttgtagtagagacagggtttcaccatattgaacaggctggyctcgaactcctgacctcaggtgatctgctcgcctcagcctcccaaagtgctgggattacaggcgtgagccaccatgcccagccttttacttttattattt

SEQ ID NO: 463312 - DNA, 201 bp, Homo sapiens
gttgggattacaggcgtgagccaccacgcctggccgagtatcccgattttttcccaggaaacaaatgggaagaatcggctgtgcaagagttgcaggagcawagtttgccaattacaggattaagaattgaggttcaatcttcttacctcctgggatgatctagaaaggactctgctagaacaatctagttataccctggag

SEQ ID NO: 463313 - DNA, 201 bp, Homo sapiens
atcttgttatcaagactaaatggtttactgaagcttcagggaggaaaaatggtactattatagaaaactggatggagcagtttcaagcacaccggaaatayaagagtatacacacctatgctcattagactagaaagcccacacacatcagaaagatgggtaatggcaaacatcacgtaaaagaacacacagctatgcgag

SEQ ID NO: 463314 - DNA, 201 bp, Homo sapiens
catgaggtaggcatttcttcagctaagtcccctccccaggttcccattaccctagttccaggccaggatggctagaagtgaccagggaagcaatgggcccsgagctggtggccctgtgagcagtaccttgccctgccctgggccctgaagttggtggacttgggagagtcccagcccaagcaccatttctgttccatctcc

SEQ ID NO: 463315 - DNA, 201 bp, Homo sapiens
gtacccctttggctcagggtcctgctggaagaatgccccatgtcctacttaacaatggccagtgagccctgaggggtcctgctgcaggatagaggcagtasagagccaggacactcaggcctgtacacagaggcgctgagctaccccgctttgtgtcaggaacatggaggctcctaccagggaactcaactcctgcttcag

SEQ ID NO: 463316 - DNA, 201 bp, Homo sapiens
tggccgcagtggctcatttctataatcctagcactttgggaggccgaggcaggtggctcatctgaggccaggagttcgagaccagcctggccaacatggcraaactccatctctactaaaaatacaaaaattagctgggcgtggtggcatgtgcctgtagtcccagctactcaggaggctgagacaggagaatcgcttgaa

SEQ ID NO: 463317 - DNA, 201 bp, Homo sapiens
gtgtggtgcacaggtggcgcatgcctgtagtcccagttactctggaggctgacgtggtagaatagcttgagcccaggaagtcaaggctgcagttagccatrattacgtcactgcactacagcctgagttagactctgactcaaaatataaataaataaacattctaattaggacttaaagatggtcaactggggaaataat

SEQ ID NO: 463318 - DNA, 201 bp, Homo sapiens
accagatcagtcccggggacctcttttctgtagaaaattcctgcagatggaggtttcaagggtcaatgctgccactctccctggtccatccgccttcagaaaagagacatggatggaatggatgtgggggtttctatcttctccacccccagtcctccccgctccctgcctatcacctggcttttgtccatcactgggcta

SEQ ID NO: 463319 - DNA, 201 bp, Homo sapiens
cgtaagtgaattccctccccacactcccctaacataggctttacgttcaatctacccccgcctggcagaggcgagcccacgccgcagccgaccttagttcrcccccgcccgcggcctccctctgcgtcattgccccagtagagtccggacggccgcgctttggtctcaaaccctgcgatggtctcacctggccggaggggc

SEQ ID NO: 463320 - DNA, 201 bp, Homo sapiens
gcagggacagtgtgcatgatcaccctacataatgcagacctgtacaggttagggaggccgggtgcagtggctcacacccagcgctttgggagaccgaggcrggaggattgtttaagtccaagagtttgacagcagcctgggcaacaaagtgagaccctggctctacaaaaaaattaaaaaattagccaggtgtagtggcac

SEQ ID NO: 463321 - DNA, 201 bp, Homo sapiens
cggacggccgcgctttggtctcaaaccctgcgatggtctcacctggccggaggggccatgcgggaggtgcggcttcggcttccacgcggcatcctaggtamgcgacggctaggcctccggacgtgtgacaaccaccgaagagctaagcgacttctgaggagaccggaagatgggaggcggggctggcctcaacgcgcaacc

SEQ ID NO: 463322 - DNA, 201 bp, Homo sapiens
aaaatataaaatagaataaagtcgccaagtgtggtgcacaggtggcgcatgcctgtagtcccagttactctggaggctgacgtggtagaatagcttgagcycaggaagtcaaggctgcagttagccataattacgtcactgcactacagcctgagttagactctgactcaaaatataaataaataaacattctaattagga

SEQ ID NO: 463323 - DNA, 201 bp, Homo sapiens
taacagctagtttaaggaggccacacaaacatttgcccagtcccagattctacagagtagggacacccccacttccatttcaattctgaagcaaggaagcyaggaatgacaggagaggtttaactgatggttacactttataccctcactatcaattctatttttatactaaattaacttagttatgagagctgattttcc

SEQ ID NO: 463324 - DNA, 201 bp, Homo sapiens
gtaatcccagcactttgggaggccgaggcaggtggatcacgaggtcaggatatcgagacaatcctggctaacatggtgaaaccccgtctctactgaaaatrcaaaaagtagccgggcatggtggcagatgcctgtagtcccagctactcaggaggctgagtcaggagaatggcgtgaacccaggaggtgaagcttgcagtg

SEQ ID NO: 463325 - DNA, 201 bp, Homo sapiens
ctgcccttaccctgctcccagagagctgccttccaccctgatacctctagaagctaagtgggccactctccgtggagaaccacagtctggggagaggagcyggggaagtgagaagtgttctggaagaactgggagaaaagcagaggaggctggagaggtggcccacatcaggggctcaggctctcatcaaccctccgagga

SEQ ID NO: 463326 - DNA, 201 bp, Homo sapiens
gctactcaggaggctgagtcaggagaatggcgtgaacccaggaggtgaagcttgcagtgagccgagattgcgccactgcactccagcctgggcaatacagygagactccgtctcaagaaacaaacaaacaaacaaacaaaacaaaaattagtccggcgtggtggtgggtgcctgtagtcccaggtactctggacgttgaag

SEQ ID NO: 463327 - DNA, 201 bp, Homo sapiens
ccctgcgatggtctcacctggccggaggggccatgcgggaggtgcggcttcggcttccacgcggcatcctaggtacgcgacggctaggcctccggacgtgkgacaaccaccgaagagctaagcgacttctgaggagaccggaagatgggaggcggggctggcctcaacgcgcaaccaaccagcacacaggcagagaacttc

SEQ ID NO: 463328 - DNA, 201 bp, Homo sapiens
tctcacgatgttgcctagactggtctcaaaattctgggcttaagcaatcctcctgttttggtcctcccaaagtgctgggattacaggtgtgagaaaccacrcttgaccacagatacctaattgatacacattttacaaagcacttcatacagtttcacttggacaacgaaaccctggtattaagccaattttagagagatt

SEQ ID NO: 463329 - DNA, 201 bp, Homo sapiens; identical to SEQ ID NO: 429285

SEQ ID NO: 463330 - DNA, 201 bp, Homo sapiens
tgtaatcccagcattttgggaggctgaggtgggcggatcatgaggtcaggagattgagaccatcctgtccaacatggtgaaaccgtccctactaaaaatayaaaaattaactgggcacagtggcacatgcctgtaatcccaactactcaggaggctgaggcaggtgaattgtttgaacccgggaggcactgcagtgagccg

SEQ ID NO: 463331 - DNA, 201 bp, Homo sapiens
agctgagaccaaaagcgggcaacaccatggccagcaattgttttttctttttttttgagacagagtttcactcttgtagcccaggctggagtgcaatggcmcaatcttggcccactgtaacctctgcctcccgggttcaagcgattctcctgcctcagcctcctgagtagctaggattacaggcgtacgtcaccacacctg

SEQ ID NO: 463332 - DNA, 201 bp, Homo sapiens
caggctggtcttgaactcctgacctcaggttatctacccacctcggcctcccaaagtgctgggatcacaggcatgagccactgtgccaggtctaatttgctttttttttttttttttttttttgagagaagagtctcactctgtcacccaggctggagtgtagtagcacgatcctggctcactgcatccagggttcaagca

SEQ ID NO: 463333 - DNA, 201 bp, Homo sapiens
ctgaccatctatttctttcactttggggaaaatttttgttgaattgtttacatacaaaagagctgaaaaatacttcagggaatgagtgctaagcataaaarcctccaacttactgaaatgcaacacattgaaacacaaattctgcaaggttttaaatacctggaactctttaacttactgttttctctttttttttttttt

SEQ ID NO: 463334 - DNA, 201 bp, Homo sapiens
gtagcacgatcctggctcactgcatccagggttcaagcaattctccttgcctcagcctgagtagctgagactacaagtgtgtgccaccaggcctggctaatttttttttttttttttttttgagacagtcctgctctgttgcccaggctggagtgcagtggcacaatctcatctcactgcaacctctgcttcccaggttca

SEQ ID NO: 463335 - DNA, 201 bp, Homo sapiens
ggggcacacacttgttactcttcctctgctcagggtcaggtaacaggcagggagacacagctcacatttcagccacactgcaagggagcagcacacacgcycagcccagacatgtgcacgccctgcctcccctgagaccccagtgcctgtggccctaagccacgtgggagggagcggagagaagggcaaagggaccctcac

SEQ ID NO: 463336 - DNA, 201 bp, Homo sapiens
tgatagctggatcggtcccaagaccaccactgcccttaccctgctcccagagagctgccttccaccctgatacctctagaagctaagtgggccactctccrtggagaaccacagtctggggagaggagccggggaagtgagaagtgttctggaagaactgggagaaaagcagaggaggctggagaggtggcccacatcagg

SEQ ID NO: 463337 - DNA, 201 bp, Homo sapiens
tggatcggtcccaagaccaccactgcccttaccctgctcccagagagctgccttccaccctgatacctctagaagctaagtgggccactctccgtggagarccacagtctggggagaggagccggggaagtgagaagtgttctggaagaactgggagaaaagcagaggaggctggagaggtggcccacatcaggggctcag

SEQ ID NO: 463338 - DNA, 201 bp, Homo sapiens
aatagagatgggagctgcgtgcggtggctcacatctgcaatcccagcacttcgggaggctgaggtgggcggatcacctgaggtcaggagttcgaggccagyctggccaacatggtgaaaccacatctctactaaaaatacaaaaattaggctgggcgtggtggctcacgcctgtaatcccagcactttgggaggccgaggc

SEQ ID NO: 463339 - DNA, 201 bp, Homo sapiens
gcagtgagccgagattgcgccactgcactccagcctgggcaatacagcgagactccgtctcaagaaacaaacaaacaaacaaacaaaacaaaaattagtcyggcgtggtggtgggtgcctgtagtcccaggtactctggacgttgaagcaggagaattgcttgaacccgggaggcagaggttgcagtgagccgagatcgtg

SEQ ID NO: 463340 - DNA, 201 bp, Homo sapiens
cagctgcagtggttgccatctgggccatcagacctggctgccggggcgcagcagcagaagagccaactgcagatgggggtgccgctgctggtggctgagcractggtgctggcctgggtgcagctctcatctgaggggcccggctgtgaaagaaaagaaaaaaacatcaagttcccaattccaaccagttttggaaattgt

SEQ ID NO: 463341 - DNA, 201 bp, Homo sapiens
agcgagactctgcctcaaaaaaaataaaaaataaaataacaagagataggggtctcacgatgttgcctagactggtctcaaaattctgggcttaagcaatsctcctgttttggtcctcccaaagtgctgggattacaggtgtgagaaaccacacttgaccacagatacctaattgatacacattttacaaagcacttcata

SEQ ID NO: 463342 - DNA, 201 bp, Homo sapiens
agaagctgggctgcagcccccgccctgccaggccctgcccctccagcacagggacgctctgggctcgtttgccacgaagccttgggtggcttctgcggggycttcctagtgtcccccacttcccacttggccagcatcctcagggaccgagccagtgggctgacacctgccgtctttgaagccatcacagggcagctggga

SEQ ID NO: 463343 - DNA, 201 bp, Homo sapiens
cctcggcctcccaaagtgctgggatcacaggcatgagccactgtgccaggtctaatttgctttttttttttttttttttttttgagagaagagtctcactstgtcacccaggctggagtgtagtagcacgatcctggctcactgcatccagggttcaagcaattctccttgcctcagcctgagtagctgagactacaagtg

SEQ ID NO: 463344 - DNA, 201 bp, Homo sapiens
gctctgttgcccaggctggagtgcagtggcacaatctcatctcactgcaacctctgcttcccaggttcaatcaattcccctgcctcagcctcccaagtagytgggattacaggcacccaccaccatgccttgctaatttttgtgtttttagtagagatgagatttcaccatgttagctaggctggtctcaaactcctgaac

SEQ ID NO: 463345 - DNA, 201 bp, Homo sapiens
catgcgggaggtgcggcttcggcttccacgcggcatcctaggtacgcgacggctaggcctccggacgtgtgacaaccaccgaagagctaagcgacttctgmggagaccggaagatgggaggcggggctggcctcaacgcgcaaccaaccagcacacaggcagagaacttccgttctccgtcgtctccgcaggcctgaagtt

SEQ ID NO: 463346 - DNA, 201 bp, Homo sapiens
gaaataatctagtccaattccttcattttacacattacaaaacaagactggccaaagtgactcgtctgaactattataccaaaagcaacttcaactattcstcatctgttcaacgttcagatgctttcaacaatttcgagaccccttctcaaataacaaaagactaattatgtcctgcacgtatttaaaaatcttcatatg

SEQ ID NO: 463347 - DNA, 201 bp, Homo sapiens
gacaggagaatcgcttgaacctgggaggtggagtttgcagtgagctgagatcgccccacttcactccagcctggtgacagagtgagactctgtttcaaaaraaaaagagaggaagtccaaagagacaatggagatgatggaacagaaatggcgctcgggctgggactcccccaacatccaccaacttcagggcccagggca

SEQ ID NO: 463348 - DNA, 201 bp, Homo sapiens
ggaagaaggggtgtgccaaggcctcttccgctgtgtagcggttctggggttgcaccaccaggaatcgggagacctgtgagaggaggagaggggaaccgagmatgtcaaggcaggtcccctccagcatgtcaggaaaggcagggcctccccgggcaggggcgcctggcatcgcagccctgagcccaggagccagttggcctg

SEQ ID NO: 463349 - DNA, 201 bp, Homo sapiens
gcagtggcacaatctcatctcactgcaacctctgcttcccaggttcaatcaattcccctgcctcagcctcccaagtagctgggattacaggcacccaccamcatgccttgctaatttttgtgtttttagtagagatgagatttcaccatgttagctaggctggtctcaaactcctgaactcaggtgatccgccctcctcag

SEQ ID NO: 463350 - DNA, 201 bp, Homo sapiens
tggctagcttgtctcaagtagcaggggagcccaggcaggggcagccggggcacgggggtcagggaccgaggctgctgtgggctaacttcaaaagctgacasgggaatcaggagggtgctcaaagacgtcaacctgggatgtgggcaggcccagggactttattattattattattattattattattattattattattat

SEQ ID NO: 463351 - DNA, 201 bp, Homo sapiens
tgaccggaggctaacgtgccaaaaataaatcacaactgcaaacccgggaggcaggccaaggctccgcagggacagggcatggagcccagtctccgggcggraggtgggggacctctggtggagggtgagggaagcttgtgtggcctgagaccaggccagacaggatgtaagagtgatcagtctcccctctggagctccctt

SEQ ID NO: 463352 - DNA, 201 bp, Homo sapiens
tgctaatttttgtgtttttagtagagatgagatttcaccatgttagctaggctggtctcaaactcctgaactcaggtgatccgccctcctcagcctcccarcgtgctgggattacaggcatgagccactgcgccctgcctaatttaccattaaaaacctattttctccctcacatttctaagctacagatttgactcttgc

SEQ ID NO: 463353 - DNA, 201 bp, Homo sapiens
ggaacagtcatcatcagggcaggtcagcagggcactcagaagaggaagtccaggctggccgcagtggctcatttctataatcctagcactttgggaggccraggcaggtggctcatctgaggccaggagttcgagaccagcctggccaacatggcgaaactccatctctactaaaaatacaaaaattagctgggcgtggtg

SEQ ID NO: 463354 - DNA, 201 bp, Homo sapiens
gacaggatctcactgtctcacccaggctggagtgtaatagtgcaatcataactcactgcagcctcaaactactgggcttgagtgatgctcctgcttcagcytcccgagtggctgggattacaggcatgcaccagcatgcctggctaattcagcccagggacatcaaacccccattcccctgcctgcatccatccctgcctg

SEQ ID NO: 463355 - DNA, 201 bp, Homo sapiens
ccaggaacacagctgataggaggcgagacagcaactggctaattccctcaatcaccagcatttcactcacctggcagtgatgcagggctctgaaactcagaaaaaaaatcagaaaacagaacctacggaggccaggtgtggtggctcatgcctacaatcccagcactttgggatgccgaggctgggggatcacctgaggtc

SEQ ID NO: 463356 - DNA, 201 bp, Homo sapiens
cccccgccctgccaggccctgcccctccagcacagggacgctctgggctcgtttgccacgaagccttgggtggcttctgcggggccttcctagtgtccccyacttcccacttggccagcatcctcagggaccgagccagtgggctgacacctgccgtctttgaagccatcacagggcagctgggaggggagggatgggtac

SEQ ID NO: 463357 - DNA, 201 bp, Homo sapiens
acagacaggtgatttgcccagaactggtgagtaacaagcctgctctcaggccgtgtgactcttttttttttttttttttcctttttgagccgttcagtgctttttttttttttttttttgagacggagtctcgctctattgccaggctggagtgcagtggcacaatcttagctcactgcaacctccacctcccgggttcaa

SEQ ID NO: 463358 - DNA, 201 bp, Homo sapiens
caagattttcatttcaaattatttacatcattttctctcttcaatttttttttttttgagatggagcttcgctcttgttgcccaggctggagtgcaatggygcaatctcagctcactgcaacctccacctcccagactcaagcgattctcttgcctcagccttccgagtagctgggattacaggcacccgcgaccacctcc

SEQ ID NO: 463359 - DNA, 201 bp, Homo sapiens
gcacggtcagagcgatcacctgcagggccaggcggagaagctgggctgcagcccccgccctgccaggccctgcccctccagcacagggacgctctgggctygtttgccacgaagccttgggtggcttctgcggggccttcctagtgtcccccacttcccacttggccagcatcctcagggaccgagccagtgggctgacac

SEQ ID NO: 463360 - DNA, 201 bp, Homo sapiens
tctcaaactcctgatctcaggtgatcctcctgccttggcctccctggtattgcaggaagtgctgctattgcaggcatgagccactgtgcctggccccccctttttaaaaaaaaaaatagagatggttagccagacctggtggcacatacctgttgtcccagctactagggaggctgaggtgggaggatcacttgagcctag

SEQ ID NO: 463361 - DNA, 201 bp, Homo sapiens
gaagctgggctgcagcccccgccctgccaggccctgcccctccagcacagggacgctctgggctcgtttgccacgaagccttgggtggcttctgcggggcyttcctagtgtcccccacttcccacttggccagcatcctcagggaccgagccagtgggctgacacctgccgtctttgaagccatcacagggcagctgggag

SEQ ID NO: 463362 - DNA, 201 bp, Homo sapiens
aactcctgatctcaggtgatcctcctgccttggcctccctggtattgcaggaagtgctgctattgcaggcatgagccactgtgcctggccccccctttttwaaaaaaaaaatagagatggttagccagacctggtggcacatacctgttgtcccagctactagggaggctgaggtgggaggatcacttgagcctaggaggc

SEQ ID NO: 463363 - DNA, 201 bp, Homo sapiens
aaccagatcagtcccggggacctcttttctgtagaaaattcctgcagatggaggtttcaagggtcaatgctgccactctccctggtccatccgccttcagaaaagagacatggatggaatggatgtgggggtttctatcttctccacccccagtcctccccgctccctgcctatcacctggcttttgtccatcactgggct

SEQ ID NO: 463364 - DNA, 201 bp, Homo sapiens
gctaaagggctgtaattgtatattaaagttaattattttaaaacttgaaaaattaagagaggttgacacaatcacatgggcaaaatgcatgaggatgatttttcttttcttttctttttttttttttttaattagacgaagtctcgctctgtcgaccagcctggagtccggtggcacaatctcaactcactgcaacctctc

SEQ ID NO: 463365 - DNA, 201 bp, Homo sapiens
ctaaagggctgtaattgtatattaaagttaattattttaaaacttgaaaaattaagagaggttgacacaatcacatgggcaaaatgcatgaggatgatttttcttttcttttctttttttttttttttaattagacgaagtctcgctctgtcgaccagcctggagtccggtggcacaatctcaactcactgcaacctctcc

SEQ ID NO: 463366 - DNA, 201 bp, Homo sapiens
aatagctgacattgcagatggcaagagataacctgtagtttaatatttgcagtattaggggttatacttgagtacaaacttgctttttgcttttgttttaractgatatcattgttttctattatataccagttttgatatataatttatgactggtgtattgctgctgggtttggggtagttgagagagttgatcagtaa

SEQ ID NO: 463367 - DNA, 201 bp, Homo sapiens
aactgttagagaatcatacttttttcatttggtgttctctgtttagttgctcctttcccccatgaataatgtgatcagctggaagtatggaaactgaactmgccctctgatgtgtagaggggaagggggaaatttaattggatgtaatgtgtgcagcttggttggaagtgggaagttgagtcgaattagggctcctaatca

SEQ ID NO: 463368 - DNA, 201 bp, Homo sapiens
ttctccctcccccttgccccttgtaaacattattttactttttgtttctgaattcaatatacttttttccaaagagctccccacaataaaaagcttttttwaaaaattttttattattattttttgagacagtcttgctctttcgtgcagtggcatgatcttggttcattgcgactaccacttcctgggttcataggattc

SEQ ID NO: 463369 - DNA, 201 bp, Homo sapiens
gaagactgcaaagtgatcctgaggaatacagctgtggaatttttgtccaagcttcaaataattttgaaagaaattttcccatatgaaaaaaggagagaacmctggcatctgttgaaatttggaagttctgaaattatagtatttttaaaaattgcactgaagtgtatacacataaagcaggtcttttatccagtgaacagg

SEQ ID NO: 463370 - DNA, 201 bp, Homo sapiens
cttgccataaagaggcaaggatgtacaattatgtgttactgttaactggtagctctgtcatcttgagtaaacttctactgagcctcaagcttcctcatctgtaaagtagagataacctgggaaataaattacacatgaagacgtttcaatcattataattgcatgtgcatgatagttaatcgaagtaatttgtagccaaca

SEQ ID NO: 463371 - DNA, 201 bp, Homo sapiens
ttgccataaagaggcaaggatgtacaattatgtgttactgttaactggtagctctgtcatcttgagtaaacttctactgagcctcaagcttcctcatctgtaaagtagagataacctgggaaataaattacacatgaagacgtttcaatcattataattgcatgtgcatgatagttaatcgaagtaatttgtagccaacat

SEQ ID NO: 463372 - DNA, 201 bp, Homo sapiens
tgccataaagaggcaaggatgtacaattatgtgttactgttaactggtagctctgtcatcttgagtaaacttctactgagcctcaagcttcctcatctgtaaagtagagataacctgggaaataaattacacatgaagacgtttcaatcattataattgcatgtgcatgatagttaatcgaagtaatttgtagccaacatt

SEQ ID NO: 463373 - DNA, 201 bp, Homo sapiens
gccataaagaggcaaggatgtacaattatgtgttactgttaactggtagctctgtcatcttgagtaaacttctactgagcctcaagcttcctcatctgtaaagtagagataacctgggaaataaattacacatgaagacgtttcaatcattataattgcatgtgcatgatagttaatcgaagtaatttgtagccaacattt

SEQ ID NO: 463374 - DNA, 201 bp, Homo sapiens
gaggcaggagaattgcttgaacccaggaggtggaggttgtggtgagtcgagattgtgccattgtactccagcctgggtaacaagtgcgaaactccatctcaaaaaaaatgaaagaaaataaagataggataatgctaccatctgtgagttgttgggacacagtgttggttttgaaatgattcagagtggtttgcacagtga

SEQ ID NO: 463375 - DNA, 201 bp, Homo sapiens
ccataaagaggcaaggatgtacaattatgtgttactgttaactggtagctctgtcatcttgagtaaacttctactgagcctcaagcttcctcatctgtaaagtagagataacctgggaaataaattacacatgaagacgtttcaatcattataattgcatgtgcatgatagttaatcgaagtaatttgtagccaacatttg

SEQ ID NO: 463376 - DNA, 201 bp, Homo sapiens
atctgggtctttatcctggtctaaaacaaattgtgaccttggacaggttatagaacctttcttggcctgaaaataattttgtaatcaagttgcattgcctrtgtgatttgcatctgtctttagtgtagattaataattgagatctaaaaatggaatgtttaggactaggcatatttgttaggaaaaaggcaaccaaaagct

SEQ ID NO: 463377 - DNA, 201 bp, Homo sapiens
actaaaaatacaaaaattagccaggcgtggtggtgcatgcctgtaatcccagctacttgggaagctgaggcaggagaattgcttgaacccaggaggtggasgttgtggtgagtcgagattgtgccattgtactccagcctgggtaacaagtgcgaaactccatctcaaaaaaaatgaaagaaaataaagataggataatgc

SEQ ID NO: 463378 - DNA, 201 bp, Homo sapiens
tgctaggtacaaagcataatgagaagtagtagaggaatttaaaaaaatatttttttcaaagagttagttagaaaacatgtttgttttccctttggggtgtktgtgtgtgtgtgtctgtgtggagaatggagtctccctatgttgcccaggctggttttaaattcctgggattaaggtgtcctctcacttctgcctccgtaa

SEQ ID NO: 463379 - DNA, 201 bp, Homo sapiens
gatgtaatgtgtgcagcttggttggaagtgggaagttgagtcgaattagggctcctaatcatctgagccatcttatttttgtccccctttcagcactgtgrttgccaccaacattctcttggttgatgagatcatgcgagctggaatgtcttctctgaaaggttgaattgaagcttcctctgtatctgaatcttgaagact

SEQ ID NO: 463380 - DNA, 201 bp, Homo sapiens
ttatttttgtccccctttcagcactgtgattgccaccaacattctcttggttgatgagatcatgcgagctggaatgtcttctctgaaaggttgaattgaakcttcctctgtatctgaatcttgaagactgcaaagtgatcctgaggaatacagctgtggaatttttgtccaagcttcaaataattttgaaagaaattttcc

SEQ ID NO: 463381 - DNA, 201 bp, Homo sapiens
ccatttcttcccgcatcgatgcagtctccgcggagaacaaagcggctctagagcgcggcgttccccgccctctggggcttccaggcaccctgaggactcgrcacaatctctgcggggacggggtgggcactacacctgtcctccatcctgctggacataactagccccacatccctggctccctaaaatctgggaaaagcc

SEQ ID NO: 463382 - DNA, 201 bp, Homo sapiens
tgtgtaaagaaacagcttcttcactcctggtaagtttgggaaaatgaaaactaaactgttagagaatcatacttttttcatttggtgttctctgtttagtygctcctttcccccatgaataatgtgatcagctggaagtatggaaactgaactagccctctgatgtgtagaggggaagggggaaatttaattggatgtaat

SEQ ID NO: 463383 - DNA, 201 bp, Homo sapiens
gtgatcctgaggaatacagctgtggaatttttgtccaagcttcaaataattttgaaagaaattttcccatatgaaaaaaggagagaacactggcatctgtkgaaatttggaagttctgaaattatagtatttttaaaaattgcactgaagtgtatacacataaagcaggtcttttatccagtgaacaggatgttttgcttt

SEQ ID NO: 463384 - DNA, 201 bp, Homo sapiens
taacagagaagctttgaattctcatagttaatactggaggaaatgagtcatcagtgataagcaaagctgcacacaatattgttggttcttactgactgaayttattttaagatttggttgccttttaggtgagccaatggtggcagcagaagtaggcgtatgggataactattgtgtaaagaaacagcttcttcactcctg

SEQ ID NO: 463385 - DNA, 201 bp, Homo sapiens
ttctcaagaattaaatttgtttactttaggttcttgctcagaactctggttttgaccttcaggaaacattagttaaaattcaagcagaacattcagaatcrggtcagcttgtgggtgtggacctgaacacaggtaagagaatgcaactgttgtagagggaaaactagatgtaatacgtgtgagttgaagccaggaaagatt

SEQ ID NO: 463386 - DNA, 201 bp, Homo sapiens
tggaatttttgtccaagcttcaaataattttgaaagaaattttcccatatgaaaaaaggagagaacactggcatctgttgaaatttggaagttctgaaatyatagtatttttaaaaattgcactgaagtgtatacacataaagcaggtcttttatccagtgaacaggatgttttgctttagcagcagtgacataaaattcc

SEQ ID NO: 463387 - DNA, 201 bp, Homo sapiens
catggtttagagtagaaaattgggctaacagagaagctttgaattctcatagttaatactggaggaaatgagtcatcagtgataagcaaagctgcacacartattgttggttcttactgactgaacttattttaagatttggttgccttttaggtgagccaatggtggcagcagaagtaggcgtatgggataactattgtg

SEQ ID NO: 463388 - DNA, 201 bp, Homo sapiens
gaatttttgtccaagcttcaaataattttgaaagaaattttcccatatgaaaaaaggagagaacactggcatctgttgaaatttggaagttctgaaattayagtatttttaaaaattgcactgaagtgtatacacataaagcaggtcttttatccagtgaacaggatgttttgctttagcagcagtgacataaaattccat

SEQ ID NO: 463389 - DNA, 201 bp, Homo sapiens
acttttctgtacagcgtaggatcttcaggtaatttaagaaataggccgggcgcagtggctcatgcctgtaatcccagcactttgggaggccaaggcgggcrgatcacgagatcaggagatcgaaaccatcctggctaacacggtgaaaccccgtctctactaaaaatacaaaagaattagctgggcatggttgtgggtgcc

SEQ ID NO: 463390 - DNA, 201 bp, Homo sapiens
tttcaagtagatagcactcaaagaggcccttcctgcattttgtctgtggtatatttagactgcttcatattgttttaagtgattcattctttttctacttwcagcaaattcaacacccaacagcttccttaatagcaaaggtagcaacagcccaggatgatataactggtgatggtacgacttctaatgtcctaatcattg

SEQ ID NO: 463391 - DNA, 201 bp, Homo sapiens
taaagggctgtaattgtatattaaagttaattattttaaaacttgaaaaattaagagaggttgacacaatcacatgggcaaaatgcatgaggatgatttttcttttcttttctttttttttttttttaattagacgaagtctcgctctgtcgaccagcctggagtccggtggcacaatctcaactcactgcaacctctccc

SEQ ID NO: 463392 - DNA, 201 bp, Homo sapiens
aaagggctgtaattgtatattaaagttaattattttaaaacttgaaaaattaagagaggttgacacaatcacatgggcaaaatgcatgaggatgatttttcttttcttttctttttttttttttttaattagacgaagtctcgctctgtcgaccagcctggagtccggtggcacaatctcaactcactgcaacctctccct

SEQ ID NO: 463393 - DNA, 201 bp, Homo sapiens
aattgtatattaaagttaattattttaaaacttgaaaaattaagagaggttgacacaatcacatgggcaaaatgcatgaggatgatttttcttttcttttytttttttttttttttaattagacgaagtctcgctctgtcgaccagcctggagtccggtggcacaatctcaactcactgcaacctctccctcccgggttca

SEQ ID NO: 463394 - DNA, 201 bp, Homo sapiens
ataattttgaaagaaattttcccatatgaaaaaaggagagaacactggcatctgttgaaatttggaagttctgaaattatagtatttttaaaaattgcacwgaagtgtatacacataaagcaggtcttttatccagtgaacaggatgttttgctttagcagcagtgacataaaattccatgttagataagcatatgttact

SEQ ID NO: 463395 - DNA, 201 bp, Homo sapiens
attgtatattaaagttaattattttaaaacttgaaaaattaagagaggttgacacaatcacatgggcaaaatgcatgaggatgatttttcttttcttttctttttttttttttttaattagacgaagtctcgctctgtcgaccagcctggagtccggtggcacaatctcaactcactgcaacctctccctcccgggttcaa

SEQ ID NO: 463396 - DNA, 201 bp, Homo sapiens
ttgtatattaaagttaattattttaaaacttgaaaaattaagagaggttgacacaatcacatgggcaaaatgcatgaggatgatttttcttttcttttctttttttttttttttaattagacgaagtctcgctctgtcgaccagcctggagtccggtggcacaatctcaactcactgcaacctctccctcccgggttcaag

SEQ ID NO: 463397 - DNA, 201 bp, Homo sapiens
tgtatattaaagttaattattttaaaacttgaaaaattaagagaggttgacacaatcacatgggcaaaatgcatgaggatgatttttcttttcttttctttttttttttttttaattagacgaagtctcgctctgtcgaccagcctggagtccggtggcacaatctcaactcactgcaacctctccctcccgggttcaagc

SEQ ID NO: 463398 - DNA, 201 bp, Homo sapiens
taattattttaaaacttgaaaaattaagagaggttgacacaatcacatgggcaaaatgcatgaggatgatttttcttttcttttctttttttttttttttaattagacgaagtctcgctctgtcgaccagcctggagtccggtggcacaatctcaactcactgcaacctctccctcccgggttcaagcgattcttctgtct

SEQ ID NO: 463399 - DNA, 201 bp, Homo sapiens
ccccttgccccttgtaaacattattttactttttgtttctgaattcaatatacttttttccaaagagctccccacaataaaaagctttttttaaaaatttwttattattattttttgagacagtcttgctctttcgtgcagtggcatgatcttggttcattgcgactaccacttcctgggttcataggattctcagcctcc

SEQ ID NO: 463400 - DNA, 201 bp, Homo sapiens
tggttgatgagatcatgcgagctggaatgtcttctctgaaaggttgaattgaagcttcctctgtatctgaatcttgaagactgcaaagtgatcctgaggawtacagctgtggaatttttgtccaagcttcaaataattttgaaagaaattttcccatatgaaaaaaggagagaacactggcatctgttgaaatttggaagt

SEQ ID NO: 463401 - DNA, 201 bp, Homo sapiens
ctgtgattgccaccaacattctcttggttgatgagatcatgcgagctggaatgtcttctctgaaaggttgaattgaagcttcctctgtatctgaatcttgragactgcaaagtgatcctgaggaatacagctgtggaatttttgtccaagcttcaaataattttgaaagaaattttcccatatgaaaaaaggagagaacac

SEQ ID NO: 463402 - DNA, 201 bp, Homo sapiens
ggttttctctttttaaaacagcagtttctctgttaggtctcatctctatctccaactggaggggagataaatctgtctctttgcaagtcttagggatggaraatattagattattgaggggagtatgctttttactcatccctaaattcccaaaacttagcagttcaaatccaagaaaaggaaattatttcctgctgattt

SEQ ID NO: 463403 - DNA, 201 bp, Homo sapiens
gcccactgaattgctttgtgtttttttagtagagatggggttttgccatgttagctaggctggtctcaaactcctggcctcaagtgatccacccacctcarcctcccaaagtgttgggattacaggtgtgagccaccatgcctggctaataaagagctcttgtccaccttttagatttcatttgctaacttggggagagtg

SEQ ID NO: 463404 - DNA, 201 bp, Homo sapiens
tgcaggacgtgctaaggaccaacctggggcccaagggcaccatgaagatgtaaggcggggctgaaccggagggccgggcgggcaccgcgcgccgccgcgcwcctggcgggcccgggaccgcggactggagcccgccgcctcggggctgcgcagccgtccttctcggcgtcctccggggtcggtcctgtgtccctcctaagc

SEQ ID NO: 463405 - DNA, 201 bp, Homo sapiens
taaccataattttgtgtgtgtttaaacagcttaatcagagggcttgttttggaccacggagcacggcatcctgatatgaagaaaagggtggaggatgcatrcatcctcacttgtaacgtgtcattagagtatgagaaaacgtaagtttatagccccttaacagtgaaatggagaagcttcgtattttaggcgagttacttt

SEQ ID NO: 463406 - DNA, 201 bp, Homo sapiens
aaactaaactgttagagaatcatacttttttcatttggtgttctctgtttagttgctcctttcccccatgaataatgtgatcagctggaagtatggaaacygaactagccctctgatgtgtagaggggaagggggaaatttaattggatgtaatgtgtgcagcttggttggaagtgggaagttgagtcgaattagggctcc

SEQ ID NO: 463407 - DNA, 201 bp, Homo sapiens
gcatggaggctcacacctgtaatcccagcactttgggaggctgtggtgggcaaatcacctcaggtcaggagttccagaccagcctggccaacatggggaarccccgtctctattaaaattacaaaaattaaccaggcgtgccgggcatgactgtaatcccagctactcgggaggctgaggcagcagaatagcttgaacctg

SEQ ID NO: 463408 - DNA, 201 bp, Homo sapiens
ctttttacttttaaggtgaaagatgttgaaattaatttttatttttgttacagggaattgaccccttttccttagatgctctttcaaaagaaggcatagtygctctgcgcagagctaaaaggagaaatatggagaggtatccgagtaatttgacttttactcattttgcaagtgaattgggattatttctttttccttata

SEQ ID NO: 463409 - DNA, 201 bp, Homo sapiens
acttactaaagacggcaatgtgctgcttcacgaaatggtgagaggtgctctgggctaggtcagaaaggtcttgattttccgtagaatgttttctttgtagraagatttgcagtgtccattttcaaggtaggagaacattcagaagtggcgtgtaatcagtaatagtcctgagtgcctggagtctgacagccctgcctttga

SEQ ID NO: 463410 - DNA, 201 bp, Homo sapiens
ggctaaagggctgtaattgtatattaaagttaattattttaaaacttgaaaaattaagagaggttgacacaatcacatgggcaaaatgcatgaggatgatttttcttttcttttctttttttttttttttaattagacgaagtctcgctctgtcgaccagcctggagtccggtggcacaatctcaactcactgcaacctct

SEQ ID NO: 463411 - DNA, 201 bp, Homo sapiens
gtagaaaacaaataccaaaatgataagtgtaagctttatcaggaattacattaaatataaatgcatttaattaaacactccagtccaaatgcagagattgrcagaatggattaaaaatacatatgctatctacaagagacatatgttcaatttaaagtacaaataggttgaaaggaaaaggatggaaaaagatataccatg

SEQ ID NO: 463412 - DNA, 201 bp, Homo sapiens
atcctttttttctcgttctatgggagataatttatgtctatattagagactatcttgtagttgttaactctcaaattttgatcaaagtatggctcagtgtkcaactcaataaaaatactaaagtatctataagactttctacttttcaaagtactttataacaattttatttcatttaatctgtattttataaaggaataa

SEQ ID NO: 463413 - DNA, 201 bp, Homo sapiens
tgataaaagtatgaattttgggattataacatttcaggtaaaaggactgactgggcagatttgtaaatgagagggttagatgagaaaagataaatatgtayattttacatatcctacaacacccaccccagggccttaggcattgctgaaattcagagaaagttaattgaataaatacgtgaatgaatggatttagcaaga

SEQ ID NO: 463414 - DNA, 201 bp, Homo sapiens
tttcagtgttcttttggaaatcatttacggagtgtgcctgttaatcatgttcaattgtccttccctctgctcacgtgggtatgcaggtgagcagccagaarccgcatggtatcttcacctggtaaactcctgatctctctgtcacacaggcagaggacaaggctttcatagcctggctcgctttaaaactttaaaactttt

SEQ ID NO: 463415 - DNA, 201 bp, Homo sapiens
caccattaagtatgatgtttgctgtgggttttcatgaatgtcttttattagatgaagggaattttcatttattcctagattgctgagagtgtttattacamatttcactgaaagctttttctgcatctttgatatgatcatgtagttttcttaattcctctactaatacggtaaactacattgattgattttccaatgtaa

SEQ ID NO: 463416 - DNA, 201 bp, Homo sapiens
tttacatttttaaaataatctccttctacctgagtgtcgtagcatgtacctgtaatctcagctactttggaggctgaggcaggaggactgcctgagtccastagtttgagacaagcgtgggtaacatagcaagaccctatctcaaataataataatgatctctttccaccttcaaataacactttacatgtagtgaaagaa

SEQ ID NO: 463417 - DNA, 201 bp, Homo sapiens
cctttatggcagataattttgtctccattgagacccaagacagacttctatcttaagaaagagctgtatggaaccttttaccttacaaagtgccactgttyttaaatgaaaaaaaaaaaaaagtcagcagaaagtattttttacctgtgcaaaacagaaaaattactatatatatgtagtaatttatatatagtaatatat

SEQ ID NO: 463418 - DNA, 201 bp, Homo sapiens
tattagatgaagggaattttcatttattcctagattgctgagagtgtttattacaaatttcactgaaagctttttctgcatctttgatatgatcatgtagwtttcttaattcctctactaatacggtaaactacattgattgattttccaatgtaaaattatccttgccttcctgagatgaactccacttggtcatggtgt

SEQ ID NO: 463419 - DNA, 201 bp, Homo sapiens
gaagcagtggttgtatgctcagtcctcccctgggaagaacaacaacaggcaacttgcagggttcccttcagaatgtctctctgagtgcacctggcaataarcagcacaagaccctgggtgctgaaccctctcaacagcctggcagcaacgagacactcagaactaccagccagaaagcagaaccgctttgcttgggtcatt

SEQ ID NO: 463420 - DNA, 201 bp, Homo sapiens
gaccccatttaaccttcattacttccttagtggccctatgttcaaatacagccacactaggggttagggcttcaacacagtaactttagggggacacaagyattcagttcatgacagtaggtaatgtgggtctttccctttagctaccttcaagactttttctttgtctttgatttttagcagttcgaatatgatatatct

SEQ ID NO: 463421 - DNA, 201 bp, Homo sapiens
acttttctcctaagtatgcagccttcaatgctatagtttttcctggtttggaactttatatacatggaatcatactatatgccatattaatatttaaaatmgttatgttttatttaatccagttgtctttgagaaataaggtattctgtataagtaagttttatatttgttttctaattttaagcatttggacagaatgtt

SEQ ID NO: 463422 - DNA, 201 bp, Homo sapiens
ttgttatataggtatacgtatgccatggtggtttgctgcacctattgacccatcctctaagtttcctcccctcatcctccacccctcaacaggccctggtrtgtgctgttcccctctctgtgtccatgtgaaggaaccatttgtttacttaggggttggggagaaattcatgtttttataagtaatcacttctctactggc

SEQ ID NO: 463423 - DNA, 201 bp, Homo sapiens
ctaagtatgcagccttcaatgctatagtttttcctggtttggaactttatatacatggaatcatactatatgccatattaatatttaaaatagttatgttktatttaatccagttgtctttgagaaataaggtattctgtataagtaagttttatatttgttttctaattttaagcatttggacagaatgttcttaatttc

SEQ ID NO: 463424 - DNA, 201 bp, Homo sapiens
gagcatgccttagcagtcacagaagcacagagccacctgctgtcaaagcccagagaagaggaaccaagaacctgccagatgcttgtgaagtatgtctgttstatcagaactcgctggactcattttaaggggtttttcactttgggctcctgagcttctttgccctgcttctgagccccatgattgttccttttccttgat

SEQ ID NO: 463425 - DNA, 201 bp, Homo sapiens
acaccttttatacagcattttattaacataagaattatttttataaagttcttaatgtgctatagatggaaagccaactttttctcaacatttcacttttytccttctttattcttaaaggaggatcctctggatcacccttcggacatggaagaagtttgtaaaatttatgaaagaggaaagagtaaaagaagaaaggcg

SEQ ID NO: 463426 - DNA, 201 bp, Homo sapiens
ccaaatactgcttaagagagtcatccagagctggctacaggtaaggacatagggaagggtaccttaaatacatctcattgctcaattctatttaagaaaastaaatgaaatccagaatgtccagggtcattatgttttttcaagaacaaaagagtagtcaatcccattcactgctttgaaataaatgtgaaaatggtaaat

SEQ ID NO: 463427 - DNA, 201 bp, Homo sapiens
gttcctcattgctgaggatgggataataggtctttaacctgtagagtatataagttctgtttatctctatatattttctgagattgtgaacattcaacttmcaagaaaaccctaataataacactaaattttactatgaaatggagacatttctcttgcagtattcctcatattttttcaatataaaaaatattagaactc

SEQ ID NO: 463428 - DNA, 201 bp, Homo sapiens
attgttcctcattgctgaggatgggataataggtctttaacctgtagagtatataagttctgtttatctctatatattttctgagattgtgaacattcaasttacaagaaaaccctaataataacactaaattttactatgaaatggagacatttctcttgcagtattcctcatattttttcaatataaaaaatattagaa

SEQ ID NO: 463429 - DNA, 201 bp, Homo sapiens
gcctcagtgtgtgttgttcttcccaacgtgtccatgtgttctcatcattcagctcccacttttaagtgagaacatgcagtgtttggttttctgttcctgcrttagtttgctgaggatgatggcttccagctccatccatgtctctgcaaaggacatgatctcattcctttttatggctgcatagtattcctcaacgatcta

SEQ ID NO: 463430 - DNA, 201 bp, Homo sapiens
cagaggttgcagtgagccgagatcatgccactgcactccagcctgagtgacagagtgagtgagactccatcgcaaacagaaaataaaaaaaaaaaaaagaratatggatgacttttatacttctccagtttttcacaatgagcatatatttcttttaaaatagatatatattctaatgttattttaaaaaatcagtttcat

SEQ ID NO: 463431 - DNA, 201 bp, Homo sapiens
ctccagtgtgtgacatttctttagtctttccgtgtcttttatgaccttgccatttctgaagagaactggtcaggtattttgtagaattgtctctcgttttgggtttttttatgttttctcccccttgcttaaggttatgcatttttggtaagaatgctataagatgtgatactgtgcccttctctgtatatcctaacaagg

SEQ ID NO: 463432 - DNA, 201 bp, Homo sapiens
tgacatttctttagtctttccgtgtcttttatgaccttgccatttctgaagagaactggtcaggtattttgtagaattgtctctcgttttgggtttttttatgttttctcccccttgcttaaggttatgcatttttggtaagaatgctataagatgtgatactgtgcccttctctgtatatcctaacaaggaggacgtaat

SEQ ID NO: 463433 - DNA, 201 bp, Homo sapiens
gagtaatgaaacttggatactcagcagcctaggtatgaccacaggatgaaaacaggaaaatgcctagctgccttgcagggagtgactagataactggaagytcttgtcagcaccctcagaatgtttcactggtacaaaccctgtagaaacagctgtgtagagtatttgcaggaagactttaaagaatctgtttttaggagt

SEQ ID NO: 463434 - DNA, 201 bp, Homo sapiens
tttaaatgtcagttgttttcctcatcctctagctcccctcgctgacgtgtgtgtttgccacctcgatttccgctcactggcctgtccgccatgaagggccyagacttgtgggcttttttcttttgccccttttctttctgttcttcccactttctctctgaagcaaccacaaatctctctctttttattcgtaatttagca

SEQ ID NO: 463435 - DNA, 201 bp, Homo sapiens
ctgcatttacagctagccccagacaaaattgggaagaaacatggtttgttttcaacatctgcaccaaaatctcataaatcactacttaaaaacttactcaygtaagtgaataccacctctaccccaataactatggataaattaaaataaaaattttagaaaaatcttctgccagtccttcctgagccctgcttcccagat

SEQ ID NO: 463436 - DNA, 201 bp, Homo sapiens
cagcattagcctgataccaaaaccaaacaaggacatgataagaaaaaagaaaactacatatccctgatgaacacaaatgcaaaatcttcaaccaaataccrgcaaaccaaattcaataacacgttgaaaagaacattcaccatgatcaagtgggatttatcccagggatccaaggatggttcaacttatgcaaatcaataa

SEQ ID NO: 463437 - DNA, 201 bp, Homo sapiens
aaagtcattacttgtgtacctcttctttttgctctttcccctccaaaagctttcagaaactatggtaatcaaaaacatgtaacatgcccttgtgacatgaraacagaacagttcctctttcttcttgaaggtaatctgttgaagtgctgacaccttctatgaggagatcctttgcactggggaatttataaagcaatttca

SEQ ID NO: 463438 - DNA, 201 bp, Homo sapiens
taataactagaatatgtaaggaactcaaacaatagcaaaaaaaaatccaatttaaaaatgggcaagtccattatagtggctcacatctataatcccaacamtttgggaggctaaggtgggtggatagtttgagtcaaggagttcaagaccagcctgggcaacatggcaaaaccccatctctaccaaaaaaaaaaaaacaaa

SEQ ID NO: 463439 - DNA, 201 bp, Homo sapiens
agactccaaatctctgaaatcaagaacaaaagactttatcaagaaaggacagtattgttaaaaatggagcaaatgataatagagggctacaatagaccctrtagagactaagtaaactaatctttttccagcgtgtacagcaaaacatgaccaagtgaaaatataaaatctttagttagatgctcattaattatacagtca

SEQ ID NO: 463440 - DNA, 201 bp, Homo sapiens
atagctgaaaggtatatcatttttctgtaatttgagatttggattgtgaaaaaaaaaggaataattacacaaatgagaaaactctgagtaactgccaaggwcaaacactgataaaggacacctgtcattgtactttgttaatgttcaaatttgatcagtttacagtaatccaagataagttattattttataatattataa

SEQ ID NO: 463441 - DNA, 201 bp, Homo sapiens
tgcaagaagagaagaaaaggaaggctctggaggccaagaaagaggaagaggagattcaaagggagatggtgaagctgcggagggagataattgagaggagrcgcactgtgaaagcagcatggaaaatgtaagccagtgtgataagcactgtggggtttctctgtttaagcagtcattttagaaatgctctgaagtttttga

SEQ ID NO: 463442 - DNA, 201 bp, Homo sapiens
ttatttcttctaaaatttttatttcaagattattcagtctcagatatttgttttcataaaagtaaaacatacataaatgtttattaccacctatattatamttttattacaaaaaccatcagtgagtgaatttctaaatatttattgagtacctatcaatgcattagaaggaaacaattaaatataatgaaatatgctgtt

SEQ ID NO: 463443 - DNA, 201 bp, Homo sapiens
tggtgcaagaagagaagaaaaggaaggctctggaggccaagaaagaggaagaggagattcaaagggagatggtgaagctgcggagggagataattgagagragacgcactgtgaaagcagcatggaaaatgtaagccagtgtgataagcactgtggggtttctctgtttaagcagtcattttagaaatgctctgaagtttt

SEQ ID NO: 463444 - DNA, 201 bp, Homo sapiens
agctaggattaattcatcactgaagaaaaaaaattctaataaatttagtgtggcctaagtatacaatgtctatgaagtctgcactagtatataataatgtsctaggccttcacattcactcatctagagcaacttccagtcctgcaagtgccattcatggtaagtgcccccatacaggtgtaccattttttatcttgtata

SEQ ID NO: 463445 - DNA, 201 bp, Homo sapiens
gacatgtgaaattaaattgtgcactagagggtccccagccttgctttttaccctgattattgctagcaagtaggctagttttaatttaagcttattctctsagcaaggggggatcaggaagatgcttgttgggacttatgtgtaacattttggtcccttcccctaggcaatgtatctacctttatggcagataattttgtc

SEQ ID NO: 463446 - DNA, 201 bp, Homo sapiens
agattgaaatcttttagatttggcagtgaaggactctttagtgacttgggtgagggcaattcttggtaagtggagcttttttattcttagttgaaggtaaytgctgagggctatactcaatcagttgccattatcagttactatttattgaacactcgcagctttgtatttttattgtactaggattctttatgtaaatat

SEQ ID NO: 463447 - DNA, 201 bp, Homo sapiens
ggaagtgaagtaatggcttagaggttggttgttccatttccataaccagcaaatcactgtggtcttcagggagctggcattgaaaggccatgcatgatgtkaatctataacctccatagaataggtcaacagtcaaagcttttaggacacaggctgcatgtaccttcagattattctctaccgactgcctaaatgtgtttt

SEQ ID NO: 463448 - DNA, 201 bp, Homo sapiens
aacaaacctgataaaaacaagcaatggggaaaggattccctatttaataaatggtgctgggaaaactggctagcctatgcagaaaactgaaactggacccyttccttacaccttatacaaaaattaactcaagatggattaaagatttaaatgtaaaacccaaaaccataaaaaccctagaagaaaatttaggcaatacca

SEQ ID NO: 463449 - DNA, 201 bp, Homo sapiens
taaaaacaagcaatggggaaaggattccctatttaataaatggtgctgggaaaactggctagcctatgcagaaaactgaaactggaccccttccttacacyttatacaaaaattaactcaagatggattaaagatttaaatgtaaaacccaaaaccataaaaaccctagaagaaaatttaggcaataccattcaggacata

SEQ ID NO: 463450 - DNA, 201 bp, Homo sapiens
gtttgctgtgggttttcatgaatgtcttttattagatgaagggaattttcatttattcctagattgctgagagtgtttattacaaatttcactgaaagctytttctgcatctttgatatgatcatgtagttttcttaattcctctactaatacggtaaactacattgattgattttccaatgtaaaattatccttgccttc

SEQ ID NO: 463451 - DNA, 201 bp, Homo sapiens
ggatttcagtgttcttttggaaatcatttacggagtgtgcctgttaatcatgttcaattgtccttccctctgctcacgtgggtatgcaggtgagcagccasaagccgcatggtatcttcacctggtaaactcctgatctctctgtcacacaggcagaggacaaggctttcatagcctggctcgctttaaaactttaaaact

SEQ ID NO: 463452 - DNA, 201 bp, Homo sapiens
gcttctcagctttcagctacagagcagtttcaccagctgttttcacccttaagttatactttcctaaataatattctgtagatgtatgtggcctttttgarggccccaggcgattgttcttgcgatttattctaaatttaccagctaaatgcattggacatattccacatgacaaatatgttgccctagatactagagggc

SEQ ID NO: 463453 - DNA, 201 bp, Homo sapiens
gctttcagctacagagcagtttcaccagctgttttcacccttaagttatactttcctaaataatattctgtagatgtatgtggcctttttgagggccccargcgattgttcttgcgatttattctaaatttaccagctaaatgcattggacatattccacatgacaaatatgttgccctagatactagagggcacagactg

SEQ ID NO: 463454 - DNA, 201 bp, Homo sapiens
ctctaagataatgataaaagtgtagtatatacataaaccagtaacatagttgttattatcattatcaagtattatgtattgtatataattgtatgtgctayacttttttttgcatagtattcttaagattttttgagggtgctttattttattttaacttttattttaagtccagggtacatgtgcaggatgtaccggttt

SEQ ID NO: 463455 - DNA, 201 bp, Homo sapiens
tgggacttatgtgtaacattttggtcccttcccctaggcaatgtatctacctttatggcagataattttgtctccattgagacccaagacagacttctatyttaagaaagagctgtatggaaccttttaccttacaaagtgccactgttcttaaatgaaaaaaaaaaaaaagtcagcagaaagtattttttacctgtgcaa

SEQ ID NO: 463456 - DNA, 201 bp, Homo sapiens
tccacaacggttgaactagtttacagtcccaccaacagtgtaaaagtattcctatttctccacatcctctccagcacctgttgtttcctgactttttaatratcgccattctaactggtgtgagatggtacttcattgtggtattgatttgcatttctctgatggccagtgatgatgagcattttttcatgtgtcttttgg

SEQ ID NO: 463457 - DNA, 201 bp, Homo sapiens
ttgttgggacttatgtgtaacattttggtcccttcccctaggcaatgtatctacctttatggcagataattttgtctccattgagacccaagacagacttytatcttaagaaagagctgtatggaaccttttaccttacaaagtgccactgttcttaaatgaaaaaaaaaaaaaagtcagcagaaagtattttttacctgt

SEQ ID NO: 463458 - DNA, 201 bp, Homo sapiens
tataagttctgtttatctctatatattttctgagattgtgaacattcaacttacaagaaaaccctaataataacactaaattttactatgaaatggagacrtttctcttgcagtattcctcatattttttcaatataaaaaatattagaactctgttactattttctagctatggaagagagagcaattcaacgagctgaa

SEQ ID NO: 463459 - DNA, 201 bp, Homo sapiens
taggattaagctggggaaagctgggaccctgtctgactggaagattcagctgaaggtcctgcgggcctggagagactacacaagattccagaagttggagygggagactcaagccttggaaaatgatcttagggaagaaaacaggtatcattatttgtattgtgaaaatctagtatgtttatctaggatatttccctcctg

SEQ ID NO: 463460 - DNA, 201 bp, Homo sapiens
tggccattttcacgatattgattcttcctacccatgagcatggaatgttcttccatttgtttgtatcctcttttatttcattgagcagtggtttgtagttstccttgaagaggtccttcacatcccttgtaagttggattcctaggtattttattctctttgaagcaaatgtgaatgggagttcactcatgatttggctct

SEQ ID NO: 463461 - DNA, 201 bp, Homo sapiens
ccagtgatcctgagcttccaaatatttcccacccatagatagttcaggaatagctggaaacggttagctaggctttaacgggaccttgatgctgaaataamtaaatatcctatactatggcatatgattaatttactagtgtcaggagaggcattgaaagaaaagagatatattattcatttgtaaagatattctttggtt

SEQ ID NO: 463462 - DNA, 201 bp, Homo sapiens
gattcttcctacccatgagcatggaatgttcttccatttgtttgtatcctcttttatttcattgagcagtggtttgtagttgtccttgaagaggtccttcrcatcccttgtaagttggattcctaggtattttattctctttgaagcaaatgtgaatgggagttcactcatgatttggctctctgtttgttattggtgtat

SEQ ID NO: 463463 - DNA, 201 bp, Homo sapiens
caccaccacgcccagctaatttttatattttttgtagagatgaagtttcactatgtggcccaagtctcaaactcctgggctcaagtgatccactcacctcrgcctcccaaattcctgtgattacaggcatcagccactgcgcctggccaactacattttcatatccccgcacaaccattatagagtgggctttaagcccta

SEQ ID NO: 463464 - DNA, 201 bp, Homo sapiens
gtaggctagttttaatttaagcttattctctgagcaaggggggatcaggaagatgcttgttgggacttatgtgtaacattttggtcccttcccctaggcartgtatctacctttatggcagataattttgtctccattgagacccaagacagacttctatcttaagaaagagctgtatggaaccttttaccttacaaagtg

SEQ ID NO: 463465 - DNA, 201 bp, Homo sapiens
tatcctttgccacaacatcttcaaatttccactaaaattcagagtcaatttatgcatattaaattcatgttttttatatataaaatatatatatttttttatatatatatatatatatatatatctggagtaaccttgcctaattcacaaatgaactgtccaaattagaaatttataagagaagatttttgctattacgaa

SEQ ID NO: 463466 - DNA, 201 bp, Homo sapiens
tcctccccacttaaccctcagcttcctcttactatgcatgagaaaattgttgtaaattttctctctggccatttcattcaacaagtatctcaagtgcctgraataaagagtataaagcttgttttggtttaatggctaagagaatatggacatttcatttttcagagctttcacagaaataggcagtttgtattggaaaat

SEQ ID NO: 463467 - DNA, 201 bp, Homo sapiens
ttacaggtgcgtaccaccatgcctggccaacttttgtacctttagtagagacagggtttcaccatgttggccaggctgatctcaatctcctgaccttaagwcatctgcccatctcggcctcccaacgtgctgggattacaggcatgagccaccacagccggccactctcccagttttcatggtgagcagcaatgcatgttt

SEQ ID NO: 463468 - DNA, 201 bp, Homo sapiens
tttaaggttggctcctattgtccctttgacatgcccccattattttgtgttttttgggcactttactttctgatgctattcatcttttattttttcattgmcctgccctcatgaataagccatttctctgagggttcttagttataaatggtatttggaaagcaagatctaagtactgagggtctaattgctactgggtgt

SEQ ID NO: 463469 - DNA, 201 bp, Homo sapiens
attttaataaaaatgtaaacaaaataattaatttataaattgttcctcattgctgaggatgggataataggtctttaacctgtagagtatataagttctgtttatctctatatattttctgagattgtgaacattcaacttacaagaaaaccctaataataacactaaattttactatgaaatggagacatttctcttgca

SEQ ID NO: 463470 - DNA, 201 bp, Homo sapiens
ttttaataaaaatgtaaacaaaataattaatttataaattgttcctcattgctgaggatgggataataggtctttaacctgtagagtatataagttctgtttatctctatatattttctgagattgtgaacattcaacttacaagaaaaccctaataataacactaaattttactatgaaatggagacatttctcttgcag

SEQ ID NO: 463471 - DNA, 201 bp, Homo sapiens
tatcctaaacataaaagatcacatttctgttcaaattgagggttctgatatttctgggttctaatctcaatcaggcccagttaaaggcccaagaggaggawcgtcagaaaagggaggcagaagaaaaggaggcacagcttgaaagaaaacgagaagagaagagactgaagaaaatggttagtattgtctatttggtcagtc

SEQ ID NO: 463472 - DNA, 201 bp, Homo sapiens
tttaataaaaatgtaaacaaaataattaatttataaattgttcctcattgctgaggatgggataataggtctttaacctgtagagtatataagttctgtttatctctatatattttctgagattgtgaacattcaacttacaagaaaaccctaataataacactaaattttactatgaaatggagacatttctcttgcagt

SEQ ID NO: 463473 - DNA, 201 bp, Homo sapiens
tacttgaaaggccacacttcatctttattatatttgctttaaggtaaaagaaaatcgcttaagacgtgagaaagaactggagtaccagagaatagaaaagmccctgaaaaaatcggccttcttggaggctcagtgtctggtgcaagaagagaagaaaaggaaggctctggaggccaagaaagaggaagaggagattcaaag

SEQ ID NO: 463474 - DNA, 201 bp, Homo sapiens
atcatagagtctgggtgtcactatgttacccagggtggtctcaaactcctgggctcaagtgatcctcctgcctcagcctctcaaaatgctggattacaggygtgagccaccacacctgggtcacaggggtgacccagcctactgaaatttttttttatcatgcaagggtgttgagttttgtcacatgcttttctgcatctg

SEQ ID NO: 463475 - DNA, 201 bp, Homo sapiens
tgtgccatgttggtatgctgcacccattaactcgtcatttagcattaggtatatctactaatgctatcccttccccctccccccatcccacaacagtcccygtttaaatgtttgatacaattcaccaatgaagtcctgggtttttctttgttagatttttaaattactcattcaatctccttatttgtttattggttatag

SEQ ID NO: 463476 - DNA, 201 bp, Homo sapiens
ttttccttcacttttaaagtatgttttttgccggatatagaattgtgggttgacaggtgtttttttttttttctttcaacaccttaatgatgttactctawtgttttcttgcttgcctggtttctcacaagacatctactgtaattcttacctttctttctttgtgggtgtcttattctgttcaggctgccataacaaaat

SEQ ID NO: 463477 - DNA, 201 bp, Homo sapiens
gaaactatgagactactagaagaaaacattgagacaatgctccaggccactggtctggccaaagattttttgtgtaagacctcaaaagcacagacaaccaragcaaaaatagacaactgggattacatcaagctaaaaagtttctgcacagcaaaggaaacaatcaagtgaagagataacccacagaaagagagagagagt

SEQ ID NO: 463478 - DNA, 201 bp, Homo sapiens
gtaaggccagtgaattccgtgagcatgggcccattgctatacttctttgctgtgaagtgagttctttggtcagaagcaacggtgtgtggaatactatgacrgtagataaggtgaatctgtaagtccacagatggtggttttagtagaatcactgcatgcagggaaagcaaatccatatctagatagagtgtctgttccagt

SEQ ID NO: 463479 - DNA, 201 bp, Homo sapiens
agaatgttgataatttttgaagttgggtaaaggtttattctttgtttctgcttttagaacagtgatagggtttgggttttgttttttttttttttggtaarttgaaatgaggaaggagaaaaaaatttaatatagaagtaaaatgagcatcacatattccaggatataacagacatagtttttttgtctatagccggggta

SEQ ID NO: 463480 - DNA, 201 bp, Homo sapiens
atagaagagaaatcactcactattccaccatcttaacaaattaactaatttcatatttccatgttcctcctgacgtggtccctttccatacttaattatayaaccataaagtacatttaatttgtaattctgcttgttgtaattaacacattgcctggagtcctgggatgtgtataatactccattgagttcctataccat

SEQ ID NO: 463481 - DNA, 201 bp, Homo sapiens
tcctgacattccagcctttgccaacttccctagaccattagttgcaccaaagttagttccattcagcaaaaataaattgtaaacttgttgacatttttgtyctcttaacaattcattgtttatttttccatgacggagaattttgatgcaattatcactgagctttctgacaaaagagaaatagctgaggaattttgatga

SEQ ID NO: 463482 - DNA, 201 bp, Homo sapiens
gcgttttttaccatgctgcccaggctgatctcaaactctagcctcaaggaatctgcccacctcggcctcccaaagtgctaggattacaggtgtgagccatyttgcctggcctcatttttagactataaaatagtaagatagtcatcctatttaggatttgaagttgtgaaatcaatgtaggaatccatgcaatcaacaaga

SEQ ID NO: 463483 - DNA, 201 bp, Homo sapiens
attgaaatgaaactcattcgttttttgatcatagcattttgctttttaatcttttccagaaagaacttgagaagcagaagagaattaagaggaaccagcasctggaagcaatagccaaagaacattatgaaagggtcttgctaaggaaaaaaggtctagagccttggaagagattgagaatgcaaagcaaacaaaacatcc

SEQ ID NO: 463484 - DNA, 201 bp, Homo sapiens
ccagtgtgtgacatttctttagtctttccgtgtcttttatgaccttgccatttctgaagagaactggtcaggtattttgtagaattgtctctcgttttggktttttttatgttttctcccccttgcttaaggttatgcatttttggtaagaatgctataagatgtgatactgtgcccttctctgtatatcctaacaaggag

SEQ ID NO: 463485 - DNA, 201 bp, Homo sapiens
ttaataaaaatgtaaacaaaataattaatttataaattgttcctcattgctgaggatgggataataggtctttaacctgtagagtatataagttctgtttatctctatatattttctgagattgtgaacattcaacttacaagaaaaccctaataataacactaaattttactatgaaatggagacatttctcttgcagta

SEQ ID NO: 463486 - DNA, 201 bp, Homo sapiens
aataaaaatgtaaacaaaataattaatttataaattgttcctcattgctgaggatgggataataggtctttaacctgtagagtatataagttctgtttatctctatatattttctgagattgtgaacattcaacttacaagaaaaccctaataataacactaaattttactatgaaatggagacatttctcttgcagtatt

SEQ ID NO: 463487 - DNA, 201 bp, Homo sapiens
taaaaatgtaaacaaaataattaatttataaattgttcctcattgctgaggatgggataataggtctttaacctgtagagtatataagttctgtttatctctatatattttctgagattgtgaacattcaacttacaagaaaaccctaataataacactaaattttactatgaaatggagacatttctcttgcagtattcc

SEQ ID NO: 463488 - DNA, 201 bp, Homo sapiens
gaagaaaaattggtaatagattcaaaatgcaaactgagtcaaaaaagaaggatttgtccaggtctttcttaaaaaatgaaaccttgctttttcagaactcytgagacaatagagttacatcaactttggaaatggttttttggcctagtggcctgaattccgtgacaattttaggaaaataagggggacagaaacatcaac

SEQ ID NO: 463489 - DNA, 201 bp, Homo sapiens
tgggtcaggctagtctcgaactcctgaactcaggtgatccgcctgcctcggcctcccaaagtgctgggattataggcatgagccaccacgcccagccaacttttttttttttaattaaggagtacaatctaaaataatgataaaaagtatagtgtcattctcaagtattatgtagttcacataattatatatgctatactt

SEQ ID NO: 463490 - DNA, 201 bp, Homo sapiens
ttctttgtttttcttttttccctaccttatctggttttaattaagcatctttatgattctattttattgtgtttttttggagtttttatacctctttaaawatatatatatatatattgagatggagtcttgctctgtcgcccaggctggagtgcagtggcatgatcttggctcactgcaacatccgcttcctgggttcaa

SEQ ID NO: 463491 - DNA, 201 bp, Homo sapiens
aaacagcatcatatcatgtaatcctcacagtaaatcatggatgcaggtgctattaaagacattttataaaccaggaaattgaaaatgtggtaatattaatkaaatacaaccagttctatcgaggaacccttaatagagggaggagatacatatttgaattaaattgctatgtaagaatacaacattttgactcaagcagaa

SEQ ID NO: 463492 - DNA, 201 bp, Homo sapiens
ttggaaaattagagcaattcttccttccatattagaaatgttccattgctctctctgtaatgtttctctcacagaaggctcaggcacattaagtagcttgccaggatcagccagttcaccactgcccttttcctaatgtgaaatcgtatgaagtaaaggaaatcagcttaaattaaatgtttttgtatttatgctgcaaag

SEQ ID NO: 463493 - DNA, 201 bp, Homo sapiens
ataatgaagctccaattcatctggcaacagacttctcagcagaaacggtataggccaggagacagcaggatgagattttcaaagtgctgaaagaaaaaagaaaaaaaaaaaaacctgccatccaagaatactgtatccagcaaagccatctttcaaatatgaaggatagagaaagtttttctcagaaaaacaaatgctgag

SEQ ID NO: 463494 - DNA, 201 bp, Homo sapiens
ttgtttagattgaaatcttttagatttggcagtgaaggactctttagtgacttgggtgagggcaattcttggtaagtggagcttttttattcttagttgarggtaactgctgagggctatactcaatcagttgccattatcagttactatttattgaacactcgcagctttgtatttttattgtactaggattctttatgt

SEQ ID NO: 463495 - DNA, 201 bp, Homo sapiens
gggcctgcgagctgcggctcttcggccgcgtcctggagcgagccgcctgcctgcggcgctgcaagcggacgctgcccgccttccaggtgccctacccgccscggcagctgctgcgtgacttccagagccgcctgccctaccagtacctgcactacgcgctgttcaaggtgggagcccgcccccacccggggacctgtctcg

SEQ ID NO: 463496 - DNA, 201 bp, Homo sapiens
cagcccctggtggtcagctgtcgtgaagaagagaggtttgcctgttccttgtctagactgtccgttccttccccagccttagtattctcatgtcctccttytgtacatgtctcaatcctgttcctcccaggcccagctcacatggtgcctcctccaggaagcccttgctgcatgccctggctctttgttctgggctagcag

SEQ ID NO: 463497 - DNA, 201 bp, Homo sapiens
gcggccgggcgcggtggctcatgcctgtaatcccagcactttgggaggctgaggcgggtggatcacgaggtcaggagatcaggaccatcctggctaacacrgtgaaaccccgtctctactgaaaagaaaaaaaaattagccaggcatggtggtggacgcctgtagtaccaactactcgggaagctgaggcaggagaatggc

SEQ ID NO: 463498 - DNA, 201 bp, Homo sapiens
ccagctgtgtgagcttgagcaatttatctaacctctctgtgactcagatttcttgactgtaaaatggggatgacagtaataggtaggcatggctgggcacrgtggttcacacttgtaatcccagcactttgggaggcccaggcaggcagatggcttgagcccaggagttcgagaccaacctgggcaacatgacaagacccc

SEQ ID NO: 463499 - DNA, 201 bp, Homo sapiens
tgaggtgagtgcctcctgctttccaggattgggctgtgatggggacaccttggaccttttcctggggccaccagtgtgccagaattcagccccagcccctrgtggtcagctgtcgtgaagaagagaggtttgcctgttccttgtctagactgtccgttccttccccagccttagtattctcatgtcctccttttgtacatg

SEQ ID NO: 463500 - DNA, 201 bp, Homo sapiens
ggcgtgcaccaccacgcctggctaatttttgtatttttagtagagacagtgtttcaccatgttggtcaggctggtctcgacctcgtgacctcatgatctayctgcctcggtctcccaaagtgctgggattacaggcgtgagcagccgcacccggccctattaacattgatttcaagtgagggtttgacagccttaatttct

SEQ ID NO: 463501 - DNA, 201 bp, Homo sapiens
tgctgcatgccctggctctttgttctgggctagcagtgcccactctgacctgtgtgcctccctggccacctgtggcctggacctgggtgattgcagccctsgtccatctcagccctgggccccttctccagccagtatccaggagaaccgcactgcaggacacagggccacattattccctgttctcccacatcctgcaca

SEQ ID NO: 463502 - DNA, 201 bp, Homo sapiens
gctccccacagatcggtcgaaggagcgttatcttcacccaaggcacgaagcccgccgtgcgctcggggccgcgagctccggtcttgctgacccgctccccmaccccctaccccccgaccaggctaaccggctggagaaggcggtggcggcggcctacaccttcctccagaggaacccgaagcacgagctgaccgccaagta

SEQ ID NO: 463503 - DNA, 201 bp, Homo sapiens
ctacctaggggacacccccaaggcaggagcccgggccgacggagaggacttaacgacactatcggaccctctgggaaaagaggggagacgtcgtgacccakgccccgccccaccttgccgcctcgtgcccggcgctaagacccagcgggcgcgccgcccgcccggggcccggccctgtccccttccgtccgcggggcagcc

SEQ ID NO: 463504 - DNA, 201 bp, Homo sapiens
caccatgttggtcaggctggtctcgacctcgtgacctcatgatctatctgcctcggtctcccaaagtgctgggattacaggcgtgagcagccgcacccggscctattaacattgatttcaagtgagggtttgacagccttaatttctctgaggtgttgctgctcagtgctcatttatgtatcctctcctttgttcatgccc

SEQ ID NO: 463505 - DNA, 201 bp, Homo sapiens
gaccaggctaaccggctggagaaggcggtggcggcggcctacaccttcctccagaggaacccgaagcacgagctgaccgccaagtatctcaactactatcrggggatgctggacgtcgccgacgagtccctcacggacctagaggcccagccctacgaggtggggtggagggtcaggaggaggcttgtagaggagggctag

SEQ ID NO: 463506 - DNA, 201 bp, Homo sapiens
gacacccattgggagtgggtgggggagcaaccccagtgctttctcctttccttttcagagccagagcctgaactcgcatgagaaggggacaccccacaccsctcaagcttgggaagcctggtgccgatggccccaccctcaccagcctgggcagcagcaagaactatttattaaaaacttaagatgggccaggtgcggtgg

SEQ ID NO: 463507 - DNA, 201 bp, Homo sapiens
actttatcttatgtggtcctttcaccaacaccatgcagctggcattactggaccgatttttcagatggggaaactgaggcttatagggcaaggggctgttrgtcttatgactaataaaaagtggcaccaggacttgtggctctcctcactggagagatcctggcatccactggggctggaatggacagcctccagtgttcc

SEQ ID NO: 463508 - DNA, 201 bp, Homo sapiens
tctggaccacaggatggtggtggcattgcaggttggcaagtgggctgatggggtccgccctcctcactgctgagctcctcacctggacagtctcctggacraggagtttccagctgctggctggagtctcaggccaaattgcagagggtcctccagggtcctgaagagcactggactaagagtctagtggttccagggccc

SEQ ID NO: 463509 - DNA, 201 bp, Homo sapiens
cgtactgtgacccggtttctcccacaaccgtggcgctactctagatggagctggaggagacagaaccgcccctggagcctgaggatgccctatctgacgcygagtttgagggggagggtgactacgaggagggcatgtatgctgactggtggcaggagccggatgccaagggtgacgaggccgaggctggtcagtgacacg

SEQ ID NO: 463510 - DNA, 201 bp, Homo sapiens
ggtgactacgaggagggcatgtatgctgactggtggcaggagccggatgccaagggtgacgaggccgaggctggtcagtgacacgagtccttggggggtgrggatgcagcctgggatggaggttggggacagatgcattcacccgctgggctccggagcccagggtgtgtgtgggtgctggggcccatcctccaggggcct

SEQ ID NO: 463511 - DNA, 201 bp, Homo sapiens
tgacacgagtccttggggggtggggatgcagcctgggatggaggttggggacagatgcattcacccgctgggctccggagcccagggtgtgtgtgggtgcyggggcccatcctccaggggcctccagcctgttggcaacccctgtcccgcttgggggtggtggtgcagcatctcccctggagctgggaccagctgagacct

SEQ ID NO: 463512 - DNA, 201 bp, Homo sapiens
cccaaggacagcgtcatgcagcagaacctggtgtattaccggttccaccgggctcgctggggcctggaagaggaggacttccagccccgggaggtgggcaytgctttctggggcacttgctggatatgcactttgtaaaaaatgaactcctggcggccgggcgcggtggctcatgcctgtaatcccagcactttgggaggc

SEQ ID NO: 463513 - DNA, 201 bp, Homo sapiens
ccaccagtgtgccagaattcagccccagcccctggtggtcagctgtcgtgaagaagagaggtttgcctgttccttgtctagactgtccgttccttccccarccttagtattctcatgtcctccttttgtacatgtctcaatcctgttcctcccaggcccagctcacatggtgcctcctccaggaagcccttgctgcatgcc

SEQ ID NO: 463514 - DNA, 201 bp, Homo sapiens
gctttggggaccgagagatgggatgggaagtcccattggccaggaagggagcccatatgggtttgggcgtactgtgacccggtttctcccacaaccgtggygctactctagatggagctggaggagacagaaccgcccctggagcctgaggatgccctatctgacgccgagtttgagggggagggtgactacgaggagggc

SEQ ID NO: 463515 - DNA, 201 bp, Homo sapiens
gagtgtgagaggcatctccgtgctcatccgtgaccccagctgtactccaagggaaggcatctccagggaagagcagcttggtcccgcaaaagctggactgmaagaaggactttgtgacttgggatgtgacgggcacggagatggagtggggggtggtggcagcgcaaggtgtgcaggtgacagcaggtgtgtgcctccgac

SEQ ID NO: 463516 - DNA, 201 bp, Homo sapiens
ggcctccagcctgttggcaacccctgtcccgcttgggggtggtggtgcagcatctcccctggagctgggaccagctgagacctgtccgggggagcctcacyccacctcccatcaggacagcacctggacacccattgggagtgggtgggggagcaaccccagtgctttctcctttccttttcagagccagagcctgaactc

SEQ ID NO: 463517 - DNA, 201 bp, Homo sapiens
cccgtatggtctcgatctcctgaccttgtgatccacccacctcggcctcccagagtgctgggattacaggtgtgagccaccacacccggcctcaagtatgyatttttcttttttttttcttggagacagaatctcactctgtcacccaggctggagtgcagtggtgcgatctctgctcactgcaacctccacctcttgggt

SEQ ID NO: 463518 - DNA, 201 bp, Homo sapiens
tcagaagattgagaccatcctggctaacacggtgaaacccggtctctactaaaaatgcaaaaaattagccaggagtggcggcatgcgcctatattcccagmtgctggggaggctgaggcaggagaatggcgtgaacccaggaggcagagcttgcagtgagccgagatcatgccactgcactccagcctgggcaacagagca

SEQ ID NO: 463519 - DNA, 201 bp, Homo sapiens
atctcctgaccttgtgatccacccacctcggcctcccagagtgctgggattacaggtgtgagccaccacacccggcctcaagtatgcatttttcttttttytttcttggagacagaatctcactctgtcacccaggctggagtgcagtggtgcgatctctgctcactgcaacctccacctcttgggttgaagagatcctcc

SEQ ID NO: 463520 - DNA, 201 bp, Homo sapiens
gtgccagagcaattcctcacccctgtcctgctgcagtgaatgatgtgcgccaggctgcccgcagcgccgccagctacatgctcttcgaccccaaggacagygtcatgcagcagaacctggtgtattaccggttccaccgggctcgctggggcctggaagaggaggacttccagccccgggaggtgggcactgctttctggg

SEQ ID NO: 463521 - DNA, 201 bp, Homo sapiens
ggaggacttccagccccgggaggtgggcactgctttctggggcacttgctggatatgcactttgtaaaaaatgaactcctggcggccgggcgcggtggctyatgcctgtaatcccagcactttgggaggctgaggcgggtggatcacgaggtcaggagatcaggaccatcctggctaacacggtgaaaccccgtctctact

SEQ ID NO: 463522 - DNA, 201 bp, Homo sapiens
gcccggtgcctggccggctgtgaaggggcccatgagcaggtggacttcaaggacttctacccggccatagcaggtatctgccacccagaccacggtgggcrgtcctctcacccacagggcccggtaaggcagatgtccccttcatgcacgtggagcactgcgaatgcggaggagccagccgggaggaaggccttgtctgtt

SEQ ID NO: 463523 - DNA, 201 bp, Homo sapiens
acccatgggtgctgcaccccagacccatcctgccacttctatgtctctggaccacaggatggtggtggcattgcaggttggcaagtgggctgatggggtcygccctcctcactgctgagctcctcacctggacagtctcctggacgaggagtttccagctgctggctggagtctcaggccaaattgcagagggtcctccag

SEQ ID NO: 463524 - DNA, 201 bp, Homo sapiens
tctcagctcactgcaagctccgcctcccaggttctcacgccattctcctacctcagcctcccaagtagctgggaccacaggcgcctgccaccacgcccggstaattttttttgtatatttagtagagatggggtttcactatgttaccccgtatggtctcgatctcctgaccttgtgatccacccacctcggcctcccaga

SEQ ID NO: 463525 - DNA, 201 bp, Homo sapiens
cacttgtcatatagtatgccaagcactttacagacattctctcctgtgattgcaacagcaacacattttctggacaagcagcttggcttagtaggcagagmttggatttagagtcttctccactggggggacggagatgttcattgcaatgccagcctctcactgctgcctcccaccctcagatctctttgcagagtccct

SEQ ID NO: 463526 - DNA, 201 bp, Homo sapiens
tgtgagccccctgggtgggctggcttgggcaggggacgaggtgataagggagaggactgtatgggagcctcccagagttgtggggagctttccttcagtaytgaggaccctgggtgataggaggaaagtctaggggtggtgggaatatggggaaggcaccctgggagtctggggcaggtgagaggcttctgagtgagaaca

SEQ ID NO: 463527 - DNA, 201 bp, Homo sapiens
gcgggcggatcacaaggtcaggagatcgagaccatcctggctaacacggtgaaaccctgtctctactaaaaatgcaaaaaaaattagacaggcgggtgccygtagtcccagctactcgggaggctgaggcaggagaatggcatgaacctgggaggcggaggcggagcttgcagtgagccgagatcgtgccactgcacttca

SEQ ID NO: 463528 - DNA, 201 bp, Homo sapiens
agctgggcaagaggcttccaggggtgggctgtcctcccagggagttggggaagacagcctggagctgtccatctcacaaagagccctaaatgggagggaaragcccaaagatggttctgccctgggtgggggtgtcttgtccccactcctcactttggagccaggccctttgagctgtattctcatggtcctaggtagcag

SEQ ID NO: 463529 - DNA, 201 bp, Homo sapiens
tgggcacagccattggcacctgcttcggctactggctgggagtctcatccttcatttacttccttgcctacctgtgcaacgcccagatcaccatgctgcaratgttggcactgctggtaaggagccaggtgtggtgggcaagagtgatgttaaaaagagtagccaggccttggtcggcatctgtcctggggccccaaagcc

SEQ ID NO: 463530 - DNA, 201 bp, Homo sapiens
tggggaagacagcctggagctgtccatctcacaaagagccctaaatgggagggaagagcccaaagatggttctgccctgggtgggggtgtcttgtccccaytcctcactttggagccaggccctttgagctgtattctcatggtcctaggtagcagtgttggtgtctcggaccgtgggccccacacagcggctgctcctct

SEQ ID NO: 463531 - DNA, 201 bp, Homo sapiens
aatgggagggaagagcccaaagatggttctgccctgggtgggggtgtcttgtccccactcctcactttggagccaggccctttgagctgtattctcatggycctaggtagcagtgttggtgtctcggaccgtgggccccacacagcggctgctcctctgtggcaccctggctgccctacacatgctcttcctgctctatct

SEQ ID NO: 463532 - DNA, 201 bp, Homo sapiens
ttttgcctaccacaaagtggtagagggtaagtggcaggaaggtctgggtgggggagaatgggaaagcagctgcctagagcaagaagctagatatgatggcyggtgggctgggcccatctgatcctcgctcaccttccatcttccttccagggatcctggacacactggagggccccaacatcccgcccatccagagggtcc

SEQ ID NO: 463533 - DNA, 201 bp, Homo sapiens
agagggtaagtggcaggaaggtctgggtgggggagaatgggaaagcagctgcctagagcaagaagctagatatgatggctggtgggctgggcccatctgaycctcgctcaccttccatcttccttccagggatcctggacacactggagggccccaacatcccgcccatccagagggtccccagagacatccctgccatgc

SEQ ID NO: 463534 - DNA, 201 bp, Homo sapiens
cgagatttttccccgcccccgtccacgtccccagcttccggaagttgcttttgtccaaacatccgggcttctcctttttgtgttccggccgatcccacctytcctcgaccctggacgtctaccttccggaggcccacatcttgcccactccgcgcgcggggctagcgcgggtttcagcgacgggagccctcaagggacatg

SEQ ID NO: 463535 - DNA, 201 bp, Homo sapiens
acctagaccttcatgcacactacagtcagatttcaagccctgggctctgatgggctccccgtcttcatgaccccatcacctctcatcactgcacctgtcaytgaaacaagtaataatagcacaccatcttcctcttcttttccatctaactgactactcatcttccctcaaaacctacctcagatgtcacttcctctgttc

SEQ ID NO: 463536 - DNA, 201 bp, Homo sapiens
agatttttccccgcccccgtccacgtccccagcttccggaagttgcttttgtccaaacatccgggcttctcctttttgtgttccggccgatcccacctctyctcgaccctggacgtctaccttccggaggcccacatcttgcccactccgcgcgcggggctagcgcgggtttcagcgacgggagccctcaagggacatggc

SEQ ID NO: 463537 - DNA, 201 bp, Homo sapiens
tccccagcttccggaagttgcttttgtccaaacatccgggcttctcctttttgtgttccggccgatcccacctctcctcgaccctggacgtctaccttccrgaggcccacatcttgcccactccgcgcgcggggctagcgcgggtttcagcgacgggagccctcaagggacatggcaactacagcggcgccggcgggcggc

SEQ ID NO: 463538 - DNA, 201 bp, Homo sapiens
tttgtccaaacatccgggcttctcctttttgtgttccggccgatcccacctctcctcgaccctggacgtctaccttccggaggcccacatcttgcccacthcgcgcgcggggctagcgcgggtttcagcgacgggagccctcaagggacatggcaactacagcggcgccggcgggcggcgcccgaaatggagctggcccgg

SEQ ID NO: 463539 - DNA, 201 bp, Homo sapiens
tggacgtctaccttccggaggcccacatcttgcccactccgcgcgcggggctagcgcgggtttcagcgacgggagccctcaagggacatggcaactacagyggcgccggcgggcggcgcccgaaatggagctggcccggaatggggagggttcgaagaaaacatccaggtaatggccccaaggcaccagctgccagcagcc

SEQ ID NO: 463540 - DNA, 201 bp, Homo sapiens
ccggaatggggagggttcgaagaaaacatccaggtaatggccccaaggcaccagctgccagcagccggagggccggcgatgtccagaagtgtcttggggaytccccctctgggcctggaagtccgctccatttacaaaactctcttctttgggtcttcgtgcacactaaagtcagtgggattaacattgacctgaaagggc

SEQ ID NO: 463541 - DNA, 201 bp, Homo sapiens
ggtggcagatcaggtaagcaagattgaatcctctgcaggtagaaaagtagacctaggtatgtcccgtgttctggaattggtgttggtgatgttcgccccasgttgtccagttagaaccatgtagaaatcaaacggaaaataggcaacaggatctagaaccaacagtaccacaatacctatgcccatcttccttacttcaga

SEQ ID NO: 463542 - DNA, 201 bp, Homo sapiens
gtggcagatcaggtaagcaagattgaatcctctgcaggtagaaaagtagacctaggtatgtcccgtgttctggaattggtgttggtgatgttcgccccagrttgtccagttagaaccatgtagaaatcaaacggaaaataggcaacaggatctagaaccaacagtaccacaatacctatgcccatcttccttacttcagat

SEQ ID NO: 463543 - DNA, 201 bp, Homo sapiens
cctccagcctgaatgaattggtatattgacagaaaattgcaggtgaactctatggacctctcatgctggtcttcactctggttgctatcctactccatggratgaagacgtctgacactattatcgtaagcaggacagacaactttgggggggtggctgcactaggttgaaagctgcctgaggatacaatggtggagtgag

SEQ ID NO: 463544 - DNA, 201 bp, Homo sapiens
ctattaaaggacagtcctgatgacatgtttcgtagatggggtttgcagctgccactgagctgtagctgcgtaagtacctccttgatgcctgtcggcacttytgaaaggcacaaggccaagaactcctggccaggactgcaaggctctgcagccaatgcagaaaatgggtcagctcctttgagaacccctccccacctaccc

SEQ ID NO: 463545 - DNA, 201 bp, Homo sapiens
acctatgcccatcttccttacttcagatgtggcaggctgggaaaagacaagcctccagggccttcagcttgtacgccaacatcgacatcctcagaccctamtttgatgtggagcctgctcaggtgcgaagcaggtgaggagccttctcttgaagaagcttccctcctaacacctagaccttcatgcacactacagtcagat

SEQ ID NO: 463546 - DNA, 201 bp, Homo sapiens
actcgggaggctgaggcaggagaatggcatgaacctgggaggcggaggcggagcttgcagtgagccgagatcgtgccactgcacttcagcctgagcaacaragtgagactccatctcaaaaaaaaaaaaaaaagaactctgcgcttgcctctaatagacagcacttcaccactgctatcctttcttattcctggaatcttc

SEQ ID NO: 463547 - DNA, 201 bp, Homo sapiens
cacagccaaagctgttgcggtgaccctgcagtcacactgaccccacctgaaattcttggccagtcctctttcccgcagctgcagagaggaggaagactatyaaaggacagtcctgatgacatgtttcgtagatggggtttgcagctgccactgagctgtagctgcgtaagtacctccttgatgcctgtcggcacttctgaa

SEQ ID NO: 463548 - DNA, 201 bp, Homo sapiens
aaaattagacaggcgggtgcccgtagtcccagctactcgggaggctgaggcaggagaatggcatgaacctgggaggcggaggcggagcttgcagtgagccragatcgtgccactgcacttcagcctgagcaacaaagtgagactccatctcaaaaaaaaaaaaaaaagaactctgcgcttgcctctaatagacagcacttc

SEQ ID NO: 463549 - DNA, 201 bp, Homo sapiens
ctggagtgcaatggcgcaatctcggctcaccgcaacctccacctcccaggttcaagcaattctcctgcctcagcctcccaagtagctgggattataggcayccaccaccatgcctggctaatttttgtatttttagtagagacagggtttcaccatgttggctggggtgctcttgaactcctgacctcaggtgatctgcct

SEQ ID NO: 463550 - DNA, 201 bp, Homo sapiens
agccacggctggcagagaatgggacagaaggcactggccaggggagtgaccacttatttgctgcaggacaaactgcggacaggcgagaaggcagtggtacrtttccgcttcctgaaacacccagagtacctgaaggtgggcgccaaactgctgttccgggagggtgtcaccaagggcatcggccatgtcactgatgtacaa

SEQ ID NO: 463551 - DNA, 201 bp, Homo sapiens
acacccagagtacctgaaggtgggcgccaaactgctgttccgggagggtgtcaccaagggcatcggccatgtcactgatgtacaagccattacagcaggakaagcccaggccaacatgggcttctgaacccttcaggcagggacagttctattgctgtccctacaatatataaggtgacttctggccatgctgccctgcca

SEQ ID NO: 463552 - DNA, 201 bp, Homo sapiens
aagttttgctcttgttgcctaggctggagtgcagtggcgcaatctcagattctcctgcctcagcctcccaagtagctgggattacaggcatgcgccaccaygcctggctaattttgtatttttagtagagatgaggtttctccatgttggtcaggctggtctcgaactgctgacctctggtgatccaccagcatgggataa

SEQ ID NO: 463553 - DNA, 201 bp, Homo sapiens
cccgggttctcaagcgattcttctgctgcagcctcccgagtagctggcattacaggtgcccgccaccacgcccagataatttttgtatttttagtagagayggggtttcaccatgttggccaggctggtctcaaactcctgacctcaggtgatccacccgcctcggcctcccaaagtgctgggattgcaggcgtgagcctc

SEQ ID NO: 463554 - DNA, 201 bp, Homo sapiens
cctcggcctcccgggttctcaagcgattcttctgctgcagcctcccgagtagctggcattacaggtgcccgccaccacgcccagataatttttgtattttyagtagagatggggtttcaccatgttggccaggctggtctcaaactcctgacctcaggtgatccacccgcctcggcctcccaaagtgctgggattgcaggc

SEQ ID NO: 463555 - DNA, 201 bp, Homo sapiens
cagttcttgatgacagtaaatgcatcatggctcatcttgtgagcatcatagcgggtaagggcacagcagcggcgcaggctgctgaggcgtttgtctccttrtacacgaatgctcacaaccagctgggtggctaccctgtcattctgtgggtggaaaggatggagaccagaaataaagttatgaggagcatctgaattctag

SEQ ID NO: 463556 - DNA, 201 bp, Homo sapiens
ctaggattacaggtgtgagccaacgcggctggcctaagactctgcaaagcagagaatgaaacccaaggggataacttgctccttcagtgattaggtgttcrgtgttgttaaaccagcaagtgtctctctgtccaccatcactgctggccttttatgaaattagtcttctgattctgaactctggcagtgagccctgttaca

SEQ ID NO: 463557 - DNA, 201 bp, Homo sapiens
tgatgagatacggcagaaacaacctgggggtttgaagagtggggctgcaaaaaggatttctgcaactccaatgcaaaatgatagtccatgtgttctggcawatcccataccggtaccagggagccacacttctcacagggcacttggtcctcagcagctagaagacttggatttggggttgctttctgagtcacctccagc

SEQ ID NO: 463558 - DNA, 201 bp, Homo sapiens
tggggttgctttctgagtcacctccagcacagatttggaagctgaagaggcgtgcatgctttggctgttgtgggccaaatccatctctgcaggagttgctktagaggattcttctagcttcgacaccccttcacaaacagggacacaccctggatactctgttggtaaagagtttggtaatgctttacagttggaccatgg

SEQ ID NO: 463559 - DNA, 201 bp, Homo sapiens
ggtaaagagtttggtaatgctttacagttggaccatgggttttgttggggggaagaaactgaagaattattaagctgtttctgctttagaagcagactttyctgcttaaagaagggctcagttcctgtactttgactggtttgaaaaggtaatgagggcttggatggtgaattgctcatgggagcctgagtgggagcagta

SEQ ID NO: 463560 - DNA, 201 bp, Homo sapiens
gacctctacggcataacctttccttcagtggcacaggactaagaaaagtcacatgtgctttcaaccactgaagacccacataattggcctatggtcagctwggcccttttgcagattttggtctctctgctctcactgctttgggaaattatgctatgtggacagcatgatcagtaaacctgcctccctccttgtggccct

SEQ ID NO: 463561 - DNA, 201 bp, Homo sapiens
ccatgcctggctaattttgtatttttagtagagatgaggtttctccatgttggtcaggctggtctcgaactgctgacctctggtgatccaccagcatgggrtaagttctctgagagccttccaacttcataattatagcagtttaaggatatggttcaggttaagggctctgtacctcgttctgttggagggggatcaggt

SEQ ID NO: 463562 - DNA, 201 bp, Homo sapiens
gggccccacggatgatggctgcttcctggagctgagagtatgcagcatccagcgcaaccgctctgcctgtcgtgtgctgcgagctggtcaggctgctacaytggcgcttggggactttgaccgtgcactgcttcgcaaggtgaggtgggtgcatgggttggggagggaacgctaagagaagtgcctaggagactggctact

SEQ ID NO: 463563 - DNA, 201 bp, Homo sapiens
cctcctacagtcttggccgtttaaaaccaaactcagttcttcccgattggttctgcttcaaaacaaaggggaggaggaatactcgctttgggtatgcttgyagccttcggggaggaagctggtttacgggttcgggtctcgtgtcggggccaccgcggtgcctccggttattaaaaccagcccctggacggtgccagcctg

SEQ ID NO: 463564 - DNA, 201 bp, Homo sapiens
gccgtgagggggaccagctggtggtgggccccacggatgatggctgcttcctggagctgagagtatgcagcatccagcgcaaccgctctgcctgtcgtgtrctgcgagctggtcaggctgctacactggcgcttggggactttgaccgtgcactgcttcgcaaggtgaggtgggtgcatgggttggggagggaacgctaag

SEQ ID NO: 463565 - DNA, 201 bp, Homo sapiens
agtcacctccagcacagatttggaagctgaagaggcgtgcatgctttggctgttgtgggccaaatccatctctgcaggagttgctttagaggattcttctrgcttcgacaccccttcacaaacagggacacaccctggatactctgttggtaaagagtttggtaatgctttacagttggaccatgggttttgttgggggga

SEQ ID NO: 463566 - DNA, 201 bp, Homo sapiens
gctagaagacttggatttggggttgctttctgagtcacctccagcacagatttggaagctgaagaggcgtgcatgctttggctgttgtgggccaaatccayctctgcaggagttgctttagaggattcttctagcttcgacaccccttcacaaacagggacacaccctggatactctgttggtaaagagtttggtaatgct

SEQ ID NO: 463567 - DNA, 201 bp, Homo sapiens
gcgttttctttggcttcaggtggatgaaatctacacagtaccagaggtggggactgttgttggaggaacactttccaggtaaattgtcttgcttgctaccytccccactcagccctcacctatatactcaaagacatcctggcccaaaggaggagaccctggaattgaacggaacccatttaaaggacatgcttatttgca

SEQ ID NO: 463568 - DNA, 201 bp, Homo sapiens
gagttgtgtagaggaagaggaaattcaggagctataaagggtgtggggtggctggggagggagagtctgatgttagagctgcccttcctgggcctggggtytgttcctccccagggcatggtgatggtgagcccggagatgaatcctaccatctgctcggtgtttgaggcagagatagtcttactgttccatgccaccacc

SEQ ID NO: 463569 - DNA, 201 bp, Homo sapiens
agagggacctggccttccatttctccagaggtcagaaaagagggaggcctgccccagactggcagagaactccttgatcccacaatgggaataaaaccccrcttagggtgggtagcggcctgataggcctctggagggtggagagccacggctggcagagaatgggacagaaggcactggccaggggagtgaccacttatt

SEQ ID NO: 463570 - DNA, 201 bp, Homo sapiens
ttctggtctagctacgtagactataaaaacagcttaacgtactcatgaggtacagataactaaatatgaatcactatgttacactgtttttaatgaacacyatttttagtgttcaggaccctaaaaatgtgaagcgttagatgggctagaggacgtaggaggtgggtaaagactcattccctctgagagttttgattattg

SEQ ID NO: 463571 - DNA, 201 bp, Homo sapiens
aattgctcatgggagcctgagtgggagcagtaagagatgaaagcgaagcttctttaactttctgcctttctgcagctttttggaagaatgattccagagaygtggttgctttcttagtggctgtcaccgctgggccacttccctgggtcttagcttctgagctggtaactggcacctttggcagagaacttgggtcactgc

SEQ ID NO: 463572 - DNA, 201 bp, Homo sapiens
agcactaaagagctggagattgcttcacaagagagtcaaaagccaaaaatcccctgtggccctaggccaagtttctattcccggccactgccccgccctcrtggtggttggtgtaacccgagccctagccccgcccgaagtaggggccaggcccctcctacagtcttggccgtttaaaaccaaactcagttcttcccgatt

SEQ ID NO: 463573 - DNA, 201 bp, Homo sapiens
gtgctacccactggagctagaagagactgtggggtggattcaggatttcacctccactgaggttagggggcaagaggtaaaggccatagcgagtctgtccrcttcattacattttctgagtttttctgttcctctcagccccagctttggagctcttctcctctctcacctagatcttctcggtcatcaggcttgtagtga

SEQ ID NO: 463574 - DNA, 201 bp, Homo sapiens
tcaggttaagggctctgtacctcgttctgttggagggggatcaggtatgagtttaagtggaaagagaaagtcctggtccttgcagcagaacaggtggggaycatgtaggtttgggaggaacacctctgatttcaccttatgataccccacttgccctaagttgaagctggtgaatccatcccagtaccgctttgagcacct

SEQ ID NO: 463575 - DNA, 201 bp, Homo sapiens
acttggtcccttttctgtgccaactttatgtttgtttttgttcttgtttttgtttgagatggagtctcgctctgttgcccaggctggagtgcggtggcgcratctcagctcactccaacctctgcctcctgggttcaagtgattctcctgccttagcctcctgagtagctgggattacaggcgtgcaccaccacgcctgga

SEQ ID NO: 463576 - DNA, 201 bp, Homo sapiens
tccaattctcatccttcttgagatctctcactgagttccctagtctctgtctctaagcagcagtttccctagtaggcctgtgcccctggctagcattgacmtctacggcataacctttccttcagtggcacaggactaagaaaagtcacatgtgctttcaaccactgaagacccacataattggcctatggtcagctaggc

SEQ ID NO: 463577 - DNA, 201 bp, Homo sapiens
tcccagatggaagagctcagattcctactacttgtagagctaagacagagattcctactacttgtagaactgagacagacctcaggtgattcacccacctyggcctcccaaagtgctgggattacaggcgtgagccactgcgcccggccgatactttaataataactttaaaatgacatttaccctttacctcattgaagg

SEQ ID NO: 463578 - DNA, 201 bp, Homo sapiens
tgttggggggaagaaactgaagaattattaagctgtttctgctttagaagcagacttttctgcttaaagaagggctcagttcctgtactttgactggtttraaaaggtaatgagggcttggatggtgaattgctcatgggagcctgagtgggagcagtaagagatgaaagcgaagcttctttaactttctgcctttctgca

SEQ ID NO: 463579 - DNA, 201 bp, Homo sapiens
caccccttcacaaacagggacacaccctggatactctgttggtaaagagtttggtaatgctttacagttggaccatgggttttgttggggggaagaaactkaagaattattaagctgtttctgctttagaagcagacttttctgcttaaagaagggctcagttcctgtactttgactggtttgaaaaggtaatgagggctt

SEQ ID NO: 463580 - DNA, 201 bp, Homo sapiens
caaactcccagattcaggtgatcctcccaacctcagcctcctgagtaggtacgactacaggcataagccaccatctttgtattttttgtaaagactgtttygccatgtggcttaggccggttttgaactccagggctccagtagtccacccacctcagcctcccaaagtgttaggattacaagcatcagccaccgtgactg

SEQ ID NO: 463581 - DNA, 201 bp, Homo sapiens
ctgtcattcttgtaccacattttttgaagccacccatccccagaaaaatgattaaaaggtttttattgatggggaaaaaaaataatctccttaacacaccrtgaagtggagattatgagtgaagacctgttagggcctgggagccagacagccttgaagggatggaatgataggaagggaagaggaaaactaaaatatcca

SEQ ID NO: 463582 - DNA, 201 bp, Homo sapiens
cattcttgtaccacattttttgaagccacccatccccagaaaaatgattaaaaggtttttattgatggggaaaaaaaataatctccttaacacaccatgargtggagattatgagtgaagacctgttagggcctgggagccagacagccttgaagggatggaatgataggaagggaagaggaaaactaaaatatccagaga

SEQ ID NO: 463583 - DNA, 201 bp, Homo sapiens
cttaacacaccatgaagtggagattatgagtgaagacctgttagggcctgggagccagacagccttgaagggatggaatgataggaagggaagaggaaaamtaaaatatccagagaggcgggtagaaaaatgcagactggccaaacaggcaaatcccatatccctttgtacctgggaggggaagcctcaggtaacagggtg

SEQ ID NO: 463584 - DNA, 201 bp, Homo sapiens
tcttcccgattggttctgcttcaaaacaaaggggaggaggaatactcgctttgggtatgcttgcagccttcggggaggaagctggtttacgggttcgggtstcgtgtcggggccaccgcggtgcctccggttattaaaaccagcccctggacggtgccagcctggtaataaagcagtgactactatgtaaaggtagcataa

SEQ ID NO: 463585 - DNA, 201 bp, Homo sapiens
gagtctcgctctgttgcccaggctggagtgcggtggcgcgatctcagctcactccaacctctgcctcctgggttcaagtgattctcctgccttagcctccygagtagctgggattacaggcgtgcaccaccacgcctggataattttttttgtaattttagtagagatggggtttcaccatattggtctgaaactcctgac

SEQ ID NO: 463586 - DNA, 201 bp, Homo sapiens
gaccgtaactcagcacctaaatggattattttttgtattaaaaatttcataattccctttctcagggaaatctgtaaagataaaatattaaagataaagayctgtaaagataaaaaatattaaatcctacaggcaagcctgagggcagcactaatgtgttaatggcttaaaaaatgattccaatgtttgcatgccctcagg

SEQ ID NO: 463587 - DNA, 201 bp, Homo sapiens
tcaccaacagcaaagagcaggaggaactcatgcagcagctgacggagttccaggtagttgactgcccaaacatctaataggctgggaaacagggaggggcygcttcagaccaaacccagagtctgtttagagattttggacccaccagccctacttggcaggccattgatagcgttttctttggcttcaggtggatgaaat

SEQ ID NO: 463588 - DNA, 201 bp, Homo sapiens
gttctattgctgtccctacaatatataaggtgacttctggccatgctgccctgccattggcggctctgtgtgttaataggctagggagagaggggtgctgwctgccacttgctccctgccaactttctggagaggtgccaaacttggtgtggccaggaaagggcagtcctgagggagaagacaggattcagggcagtgctc

SEQ ID NO: 463589 - DNA, 201 bp, Homo sapiens
agggaaccaggaggaaagggaaagatgttgccatatttcctactctttaggcatggactctcctttccctttgttagtgtcctgggttcccatggactcarggatttgttggctaaggtttctctgtgcatatatatatatatacatatgtatatatatttaaatacacatatatattgtacagaataaaaatgttttatt

SEQ ID NO: 463590 - DNA, 201 bp, Homo sapiens
ttgtctaaaccttgttcccatctcagaagcttcaggctggctcaccatcacagcccccatagtttgtctttgtcatcagctataacctgtgtctgagcccrgctgtggtcaagcaatccaatggcattcctcagctgtgaagttagccaaaggaaggatgttaatttgcctttccagaactcatgtctgtctgtttcagcc

SEQ ID NO: 463591 - DNA, 201 bp, Homo sapiens
attctcctgcctcagcctctcgactgcctcagcctctcgagtagctgggattacaggtgtgcgccaccacgcctggctaattttttgtatttttagtagakacagggttttgccatgttacccaggctggtctcaaactcctgagctcaactgatccacctgcctcagcctcccaaagtgctgggattacagccgtgagct

SEQ ID NO: 463592 - DNA, 201 bp, Homo sapiens
aagctgctcatgatggctggtatcgatgactgctacacctcagcccagggctgcactgccaccctgggcaacttcgccaaggccacctttgatgccatttytaagacctacagctacctgacccccgacctctggaaggagactgtatttaccaagtctccctatcaggaattcactgaccacctcgtcaagacccacacc

SEQ ID NO: 463593 - DNA, 201 bp, Homo sapiens
gtatacttttccttggaacaaacttcagggtttgttgtttgattttgtttgtgggtttttttttttggcaacagaaaatagcctttggatatacataaaakgaaaagatattttagtttttaactagcttatttctattggtgtaggaaacacagacagaattggtgatgtttatccttttgcgactggcagaggatgtag

SEQ ID NO: 463594 - DNA, 201 bp, Homo sapiens
aggtggccaccgccacccgtggggccatcatcctggccaagctctccattgtccccgtgcacagaggctactaggggaacaagatcggcaagccccacacygtcccctgcaaggtgacaggccgccgtggctctgtgctggtgcgcctcatccctgcacccaggggcactggcattgtctccgcacctgtgcccaagaagc

SEQ ID NO: 463595 - DNA, 201 bp, Homo sapiens
cctgcccattaaggaatcagagatcattgactttttcctgggggcctctctcaaggatgaggttttgaagattatgccagtgcagaagcagacccgtgctrgccagcgcaccaggttcaaggcgtttgttgctatcggggactacagtggccacgtcggtctgggtgttaagtgctccaaggaggtggccaccgccacccg

SEQ ID NO: 463596 - DNA, 201 bp, Homo sapiens
ctaaattatagagaaatagacaaaagatataatccaataatgtatagaggagaacctaaagtagctgataagccgggcgcagtagctcatgcctgtaatcscagcactttgggaggccaaggctggctgatcacttgagttcaggagttccagaccaccctggccaacatggtgaaaccttgtctctactaaaaacacaaa

SEQ ID NO: 463597 - DNA, 201 bp, Homo sapiens
agtttttttttttttgagatggagtttcgctcttattgcccaggctggggtgcaatgatgcgatctcagctcactgcaacctctgcctcccgggttcaagygattctcctgcctcaccctcccaggaagctgggattacaggcatgcaccaccatggccagctaattttgtatttttagtagaaacagggtttctccctgt

SEQ ID NO: 463598 - DNA, 201 bp, Homo sapiens
agaccattaattaaaccaatagattctaacttcttgagtacaaatgtatgaatacctgatactcagtttatatttttatataaatgggagggggtagtaarggtggtagattatcatatatgttgttttgccactatagggcatacaagaaacatggattcttggtggctataaatgttactccattatactcttagggtt

SEQ ID NO: 463599 - DNA, 201 bp, Homo sapiens
gcaggtgtgtgccactgcacccagccttgggaagtaaaatgataagatttggggttttgtgaaaaagataaaatggccacacatgccagtatggtcttgtygttggatgttgagaatgtcattgtttgagaagtgattgtgttccctacctgtgactgttacatgagtatattcttaaaaaataattttcttagaattaga

SEQ ID NO: 463600 - DNA, 201 bp, Homo sapiens
aaaagatgaaaataaaatgtagccaaaatggttatttctaagtggaggcagccattgtcaacctgttttatgtctttgttacaggaaattcctgttaatgrtggaatagagctattgcagatggttctgaactttgataccaaggatcccctcatcctgtcctgcgtccttactaatgtctctgcactctttccatttgtc

SEQ ID NO: 463601 - DNA, 201 bp, Homo sapiens
gaccgtagtgtcatttcattaagagaattattggctcttcttcctgagccaaacagtgcacttgtctaggtcagcagcttttccctttaggtaatattctrattgtactcagtcacatgtgaggtgtgtcccaggtggtttagtactaaagttataaagatttttgaaacaaaagtctgattaattgtattataaaattaa

SEQ ID NO: 463602 - DNA, 201 bp, Homo sapiens
aacaaggagaggtgatgaggttggcatgtcgtttggatcccaaaactagcttccagatggctggggagtggctaaagtatcaactatcaacttttcttgaygctggttctgtgaattgtaagtttttttcattactgaatgttagtgaaatgttaggacagtatcaaaactatatataggaaatgagcctgagctatacac

SEQ ID NO: 463603 - DNA, 201 bp, Homo sapiens
cagttacgtggcttttcaccagtgtgctgaaaggcttacagatgcacgggcagcacgacgggtgcatggcttccctggtccatctggccttccagatataygaggcactggtgagtggggaaggcatgggggaaggatggctgcagcttcatcactcagtctgctcctagtctcttgggccttatcctaaattcaggcacc

SEQ ID NO: 463604 - DNA, 201 bp, Homo sapiens
ttagtagatacagggttttgccatgttacccaggctggtctcaaactcctgagctcaactgatccacctgcctcagcctcccaaagtgctgggattacagscgtgagctaccatgcctggccctctttttcttttcaatttatttgttgaaaaatgtggacttgtatttccagagtttcccctggtgaaattttgatgatt

SEQ ID NO: 463605 - DNA, 201 bp, Homo sapiens
ttacaggtgtgcgccaccacgcctggctaattttttgtatttttagtagatacagggttttgccatgttacccaggctggtctcaaactcctgagctcaastgatccacctgcctcagcctcccaaagtgctgggattacagccgtgagctaccatgcctggccctctttttcttttcaatttatttgttgaaaaatgtgg

SEQ ID NO: 463606 - DNA, 201 bp, Homo sapiens
catacaatatctcatgcaaacgcttaactcttaaataaattaaaagtgcttgaactcctgaagcttaaaaactctttcagtgggtccactttcatcccctmccccaattacctttctttttccagatgggctttccttctaaaacagacagccctagctgtgaatattctcggtttgattttgatagcgatgaggacttca

SEQ ID NO: 463607 - DNA, 201 bp, Homo sapiens
aattatatctatacaagtctgttccctcctccagcgagcattcagatatttataccttcttttctttcccctgccaggagttgatgggcagatctgtgtgraactgtagtatcactggattacaagcaaaacccactctttccttctgcatcagatggaaaagctcaatagcattcttgtttctttcagaacccacaatac

SEQ ID NO: 463608 - DNA, 201 bp, Homo sapiens
ccttttttgcaaagaagagaaagtagtaaaattcagctcacattccaggtaatttccttgatccacagcctgtcttactaacatgtggtccatagtgggtrgtcattactgataaattgcagtagagacagcttcaaagtattgtacagatttatttctatgaaaaaatgtagttgataactgctaagtaataatctgggt

SEQ ID NO: 463609 - DNA, 201 bp, Homo sapiens
tgcagttgacctagatgtatattcacttttggcccatcaataaaatcatgaggcaaagctgacgtgtggtacaaatcttgtgcggattccagttaatggaycactgcatatataaaaccttttcccaagaatttttgtgttagtattttggttaaatgtagatcatttttgcccattcattgacaggtacaaaatcaaaag

SEQ ID NO: 463610 - DNA, 201 bp, Homo sapiens
ttacagtaagctaaagttaattcattattgaagaaaggaagtttttttttttttgagatggagtttcgctcttattgcccaggctggggtgcaatgatgcratctcagctcactgcaacctctgcctcccgggttcaagcgattctcctgcctcaccctcccaggaagctgggattacaggcatgcaccaccatggccagc

SEQ ID NO: 463611 - DNA, 201 bp, Homo sapiens
tttttaaaagtttataaagttaaaaagttacagtaagctaaagttaattcattattgaagaaaggaagtttttttttttttgagatggagtttcgctcttrttgcccaggctggggtgcaatgatgcgatctcagctcactgcaacctctgcctcccgggttcaagcgattctcctgcctcaccctcccaggaagctggga

SEQ ID NO: 463612 - DNA, 201 bp, Homo sapiens
tccgccgcacagtgagtatctttacttttcagtgtgttttctaatttctttgtcatttttctatcttatttggatttatctgaagttctttttttttttttattttgagatggatctcgctctgtcacccaggctggagtgcagtggcgcgatcttggctcaccacaacctccgtctcctgggatcaagcgattctcctgc

SEQ ID NO: 463613 - DNA, 201 bp, Homo sapiens
ctcagcctttgtcaacttgaacaatattcctgactaccgactcagacccatgcttcatatcctttcaaaagtctctacataacccaaaaggtcagaaaatyagagagagaaacaaaacaggtcacagcaaccagagggaagaggcagaactggaaggaagagatgagattatgtatctaagtgtatcatgtcattaaaaac

SEQ ID NO: 463614 - DNA, 201 bp, Homo sapiens
ggatttgaaatataaggataaaaatcaaccatatttgtatattcactgaatagccactattctgatgtatttaacatcatatatatatgtatttttttttkttgtttttttttttttgagacggagtttcacttttgttgcccaggctggagtgcagtagtgcaatcttggttcactgcaacctctgcctcccgggttcga

SEQ ID NO: 463615 - DNA, 201 bp, Homo sapiens
tggatttgaaatataaggataaaaatcaaccatatttgtatattcactgaatagccactattctgatgtatttaacatcatatatatatgtattttttttktttgtttttttttttttgagacggagtttcacttttgttgcccaggctggagtgcagtagtgcaatcttggttcactgcaacctctgcctcccgggttcg

SEQ ID NO: 463616 - DNA, 201 bp, Homo sapiens
tgcttgaacctgggaagcagaggttgcagtgagccgagatcatgccattgcattccagcctgggcgacagagtgagactccgtctcaaaaaaaaaaaaaawatatatatatatatatatatatttaatagagatggggtttcgccatgttgcctaggctagtctcagactcctagactcaagtagtccacccatctcagcc

SEQ ID NO: 463617 - DNA, 201 bp, Homo sapiens
aagtaaggtaagaccattaattaaaccaatagattctaacttcttgagtacaaatgtatgaatacctgatactcagtttatatttttatataaatgggagrgggtagtaagggtggtagattatcatatatgttgttttgccactatagggcatacaagaaacatggattcttggtggctataaatgttactccattatac

SEQ ID NO: 463618 - DNA, 201 bp, Homo sapiens
ggacagagtcactagtaataatgtccttcagtggatcactgctgtccattcccaacttttgcataaaacgaagacccaaaggagaagaaagtggtcagagwgagtctgattagggtcgctgctttccttgtccttccttttctgcactcctgtggaacttggccccctggttttctgcagtggagaagatgaggctgcaga

SEQ ID NO: 463619 - DNA, 201 bp, Homo sapiens
ccaaataataaccttataggcctgactttcctgggactgctttggttttcttctttcttccttgagtaagccacctctccttgaaaatcagacctttaccrcctctggctttttttctttttgatctgtagcccaattttgacatgctttataaccatgtgaagcaactcctctccaatgagctactcctgacacaaatgg

SEQ ID NO: 463620 - DNA, 201 bp, Homo sapiens
gcaaacattaacccagaacatggaaaggatcttcagttttctgcttaacacacttcaagaaaatgtaaacaagtatcagcaagtggtaagggatacccctmcctataacatttctattttccaatatgagtgtttttgattaatcttacagtaaggaactagggtgtctaggtcagcaaaatgaaatcctattttataagc

SEQ ID NO: 463621 - DNA, 201 bp, Homo sapiens
gttgaatgaacaggaacttcagttgggagccgctgagtgtcttctcattgcagtcagcagaaaagtaagttaccacttcaaactgacttatcctcagtctytgaagtaggctgtgtatgtgtttaattgcatgttgtggcagaaagtcatttaaaggtttgggtttttttccttggggccaacttactgcctgcttccaac

SEQ ID NO: 463622 - DNA, 201 bp, Homo sapiens
gaggaacttggaggatggtatcaactaaaagtattctcttttctaccactgaggaatactggaactgggagcaaactgtggacctgtgatagaactgaagyggatatttaccatacaatatctcatgcaaacgcttaactcttaaataaattaaaagtgcttgaactcctgaagcttaaaaactctttcagtgggtccact

SEQ ID NO: 463623 - DNA, 201 bp, Homo sapiens
  misc_feature (1)...(201): n = A,T,C or G
agaaacaattgggttccattagtttggtttttattattaatatttaaaatagacacaaaagtggagagaatacgacagtgattctgcatgttcctgtcacntaaattcagcaatcaaagattttaccgcatttactttttccaccgcctatcctctctccctgcctcgaaggtttttaaaagaaaccctagaaattgttat

SEQ ID NO: 463624 - DNA, 201 bp, Homo sapiens
ctgggattacaggtgtgcgccaccacgcctggctaattttttgtatttttagtagatacagggttttgccatgttacccaggctggtctcaaactcctgasctcaactgatccacctgcctcagcctcccaaagtgctgggattacagccgtgagctaccatgcctggccctctttttcttttcaatttatttgttgaaaa

SEQ ID NO: 463625 - DNA, 201 bp, Homo sapiens
ctcagcctctcgactgcctcagcctctcgagtagctgggattacaggtgtgcgccaccacgcctggctaattttttgtatttttagtagatacagggtttygccatgttacccaggctggtctcaaactcctgagctcaactgatccacctgcctcagcctcccaaagtgctgggattacagccgtgagctaccatgcctg

SEQ ID NO: 463626 - DNA, 201 bp, Homo sapiens
atggtgaaggagagtttgttacaaggatgtcctccttcctatttttttattcctactttttgggccagtgaccataatgtgcagcctgacggaaatgcagytaaactaagagtataatggaattcaatatcagtgccatttaggattttaggaaaagaactttaagattttttcactgttaacacaggatatttttgacat

SEQ ID NO: 463627 - DNA, 201 bp, Homo sapiens
acattaaatagtaatgaaagctactgctgatctcggccaccaacatctgtctttaaaaagatgctgtatctataagttctcttaagtaaatacaactgctyttctggctgaaaaaccttattgtaggctagaaatgaaattcatgggacagggctggcagtaacagatgttggatttgtcattttcaatgctctttttttc

SEQ ID NO: 463628 - DNA, 201 bp, Homo sapiens
gttgtcaagtaaggagctcttggacattaccactgaagtctgagagaacagatctttatatcttatataacctatagagatgctgtttaggtgagtagagwagagcaatctccaagaagagaggaatgatcccctagatgttatcagaacctcacaggagctctcattcaagatttaacctttcttttcttcagtttcttc

SEQ ID NO: 463629 - DNA, 201 bp, Homo sapiens
cgagcgtcagaaggtgttcctagaggagctgatggcaccagtggccagcatctggctttctcaagacatgcacaggtaaaggagatcccttgccctgactyttactatactcaagcacccattttggtttaagagctaggcccagggtggggtaggggttaaggatattgaagtgtgatggcattatccatgatatctgaa

SEQ ID NO: 463630 - DNA, 201 bp, Homo sapiens
gttgtgtgcgctgggcaatcagctgtgtgcattgctggtgagctagtgtttgctttctggagagcttcaagcccatttgggaagagcatttagaaacttaygtttcaatgaggggttgcaaatgtcattgattttagcctgatggggcagtgccatacaagttattgcatgattctatagattaaattatcttaatagaat

SEQ ID NO: 463631 - DNA, 201 bp, Homo sapiens
ggtccaaagttacttcttttctggtaggcgcaagcaaactgtcgagtaggagttgcagcactgaatactctagcaggctatattgactgggtgtctatgartcacatcactgctgaaaactgtaaactcctggagatactgtgtttgctgttgaatgaacaggaacttcagttgggagccgctgagtgtcttctcattgca

SEQ ID NO: 463632 - DNA, 201 bp, Homo sapiens
actccgatgactcttgtagaggttatctgagaaaatggacagtatgaataagctcatgcccgtagtcccagctactcagaaggctaaagcaggagaatcarttgagcccaggaattcaagtctagtctgggcaacatagcaagatctcatctctaaaacaaataaacatgagtgaccttttttcctcctctcccttagcta

SEQ ID NO: 463633 - DNA, 201 bp, Homo sapiens
ctctaggcccttcttgcactgccacctcactttccaccactgtcagcctggaaagagatccaggtctggagctggagagaacaggccctgtgcaggaccaraagtaattatactaaagtatcaagaaagggagttagggcttaaactattctgtctagatgtcccagatagttcccattctacttggagatttggcttttc

SEQ ID NO: 463634 - DNA, 201 bp, Homo sapiens
agtgagcctgtgagaccttggagttctgctcttagcctcctaaatactgttccttctgaaccaggtcagtttccttgcagtctggtgaggagaagacaccytacatgtagttatcatctctggaccagccctcttgctgtgtgcctccatcatactcccacctccaagcctttgcacttgctgtttcctctgtctcagatg

SEQ ID NO: 463635 - DNA, 201 bp, Homo sapiens
ctaaaaatacaaaaattagctgggcatggtggcacatgcctgtaatcccagctactcgagaggctgaggcaggagaatcgcttgaacccgggaggcggagrttgcagtgagctaagatcacgccactgcactccagcctgggcgacagagtgagacttccatctcaaaataaataaataaataaataatattttcttttga

SEQ ID NO: 463636 - DNA, 201 bp, Homo sapiens
ctttgggcaagaatctggtcacctgatgggatccatggtacaggctactgctaaacttggcacagtatcaagtatagtacctccaaggaccagggctgggmagtctttagtgctaacatcccctttagagttcacacatcttgcccttccatgaatgacccctcagtctggcctccccagcctcaaggtccactcaggcac

SEQ ID NO: 463637 - DNA, 201 bp, Homo sapiens
aatcctttagggattgattctgcccaggggtgcaacccaccacctggcaggtgagagatgtgtgcctatgcactaaaatttcttaacttgttgcagcacgkgtctttgtaaagcctctggtgctcttctgtcccccagagcactatgaagccctggtatcccccatcctcggacctcttttcacctacctccatatggtaa

SEQ ID NO: 463638 - DNA, 201 bp, Homo sapiens
aattgtagtggaaatgatcaagcgagagtggccacagcattggcctgacatgctaatagaattggacactctttccaaacaaggggtatgaaacacagctrtatcagtttggtatacttttccttggaacaaacttcagggtttgttgtttgattttgtttgtgggtttttttttttggcaacagaaaatagcctttggat

SEQ ID NO: 463639 - DNA, 201 bp, Homo sapiens
gttttcatatacttaggctatacatacatgttcatgaattgtattcatttaattatgcttctgactttacttgttctccctaggggaatatcagttatgcrtgcttagtaaagttgtgttattttccaagatgaaaaattgcatatatttaagaatcattattcaagggcattgatttgtggggggtagaaagttattatg

SEQ ID NO: 463640 - DNA, 201 bp, Homo sapiens
gatccacccgcctcggcttcccaaagtactaggattacaggcgtaagccaccacacccagcctttttttttttttttttgagatggagtcttgctctgtcrcccaggctggagtgcaatgacacactctcggctcactgcaacctctgcctctgaggttcaagcgatttttctgcctcaccctcccaagtaactgggatta

SEQ ID NO: 463641 - DNA, 201 bp, Homo sapiens
atgatcaagcgagagtggccacagcattggcctgacatgctaatagaattggacactctttccaaacaaggggtatgaaacacagctatatcagtttggtrtacttttccttggaacaaacttcagggtttgttgtttgattttgtttgtgggtttttttttttggcaacagaaaatagcctttggatatacataaaatga

SEQ ID NO: 463642 - DNA, 201 bp, Homo sapiens
tcccaaagtgccaggattataggcatgagccaccacgcctggccttccagttgtgaccttgttaggatactgctttaattcattttcccattgaaaataarcatgaaaataactgtgcagtcataattgtggtatttgctgtgaaggaaagtggcagggctctgagtgtttatcgggagacctaacccagtctcagaggga

SEQ ID NO: 463643 - DNA, 201 bp, Homo sapiens
acactggatctttatacttcctttcagaagacagatacttctcaggagtcaaaggtaagagctctttataaagtttgaaggagacctttgaacctttcagrtgaggggatacgtgcccctagtggatggtgacctcagccttgcttgtgttgtattgttttggagacaggtcttactgttgcccaggctggagtgcagttg

SEQ ID NO: 463644 - DNA, 201 bp, Homo sapiens
gaacatggaaaggatcttcagttttctgcttaacacacttcaagaaaatgtaaacaagtatcagcaagtggtaagggatacccctacctataacatttctrttttccaatatgagtgtttttgattaatcttacagtaaggaactagggtgtctaggtcagcaaaatgaaatcctattttataagcaaaaaaataaaaaac

SEQ ID NO: 463645 - DNA, 201 bp, Homo sapiens
gctcgcccccatgcccgactaattttttttttttttttttttttttttagtagagacggggtttcaccatgttagccaggatggtctcgctctcttgaccycgtgatccactcgccttggcctcccaaagtgctgggattacaggtgtgagccaccgcagccagcaaatctttcttacctgaaattataaggagaatggtg

SEQ ID NO: 463646 - DNA, 201 bp, Homo sapiens
caggttcacaccattctcttgccttagcttctcgagtagctgggactacaggcgctcgcccccatgcccgactaattttttttttttttttttttttttttagtagagacggggtttcaccatgttagccaggatggtctcgctctcttgaccccgtgatccactcgccttggcctcccaaagtgctgggattacaggtgt

SEQ ID NO: 463647 - DNA, 201 bp, Homo sapiens
cccttattaatagttgaatctctttctttcttttctttttttttttttttgagacggagtcttgctctgttgcccaggctggagtgcagtggcgtgatctyggctcactgcaagcttcgcctcccaggttcacaccattctcttgccttagcttctcgagtagctgggactacaggcgctcgcccccatgcccgactaatt

SEQ ID NO: 463648 - DNA, 201 bp, Homo sapiens
ctgtcttcaaaaccgtcttggaaagaatgcagcgtttcttctctaccctctatgaaaactggtaaggaaccaatgctgcctctccatattttcttcctcgrtatgtattgtataggaatgtccatgggttggacttttcatctagtgtacaggtaaggcgaggcaagagtttgataggaaacttatcattctagtgttaaa

SEQ ID NO: 463649 - DNA, 201 bp, Homo sapiens
aggctgttaccagcaggcagactctgagatccagccttcataggggctactgttaccttactcacttattttaattctgtaatgtctatccaactggacasagtcactagtaataatgtccttcagtggatcactgctgtccattcccaacttttgcataaaacgaagacccaaaggagaagaaagtggtcagagagagtc

SEQ ID NO: 463650 - DNA, 201 bp, Homo sapiens
gatgttatatctttttgtggtggtttaaatggttagagaggatagtttcagagataagcaaccattgagggggccaggtgcaatggctcatgcctgtaatsccagcattttgggagggtgaggtgggcagatcacctgaggtcaagagtttgagactagcctggccaacatggtgaaaccctgtctctactaaaaatacaa

SEQ ID NO: 463651 - DNA, 201 bp, Homo sapiens
ctcagctcactgcaccctccgcctcccgggatcaagcaattctcctgcctcagcctctcgactgcctcagcctctcgagtagctgggattacaggtgtgcrccaccacgcctggctaattttttgtatttttagtagatacagggttttgccatgttacccaggctggtctcaaactcctgagctcaactgatccacctgc

SEQ ID NO: 463652 - DNA, 201 bp, Homo sapiens
gttttgccatgttagccaggctcttctcgaactcctgagctcaagtgatctgccctcctcagcctcctaaagtgctgggattacaggcgtgagccactgckccaagcctatgtctgtcttggctaaccaatggaactgtgactcttttctccataggaatattatctacaaatgtaatttactttgctgtcatatcagcat

SEQ ID NO: 463653 - DNA, 201 bp, Homo sapiens
gtcttttgtaatttaatctctggttcaattagattgtgggtggggagggcacagagtgagactcctgtggtgtctgcattgcagcaccagcacatttagaraaatgagaacagctaggaagggccatacaaccacacagacacttatctgtgctcacacagtagagaaattattttctttatattttgaagattatattct

SEQ ID NO: 463654 - DNA, 201 bp, Homo sapiens
caggatcttgctacattgcccaggctggactcaaattactagtctcaagggatcctcacacctcacccttctgagtagctgagactacaagcatgcacaascatgcctggcctaggctaattatttttgtaactatttttaaaattatgtgaggcaaactaataaacacagctatttattcatttattaaatatctactca

SEQ ID NO: 463655 - DNA, 201 bp, Homo sapiens
agcattcttgtttctttcagaacccacaatacattatatgcaccagaaatgctagccaaaatggcagagcctttcaccaaggctctggatatgcttgacgyggaaaaatctgctatattaggtaagaaatgtaaccttttttctcctaaggtttatcttatccctaatggatgtcccctttttttgttgttttttaagagt

SEQ ID NO: 463656 - DNA, 201 bp, Homo sapiens
ttcatccatgtaaagtgtgtggtacatattacccattcaacaaatattacctgccatttagccaatacttactgagctctgactatatgtcattagccctygaagcctttttagagtaatgcaatgtataggtcaatgaatctctgattaggcactgtggctttcttttttctctctgtctttctgagtttgtgtgccttc

SEQ ID NO: 463657 - DNA, 201 bp, Homo sapiens
gaggttgtctcagtttttgtcaggtaggcccggaaggagtttcggggaccatgggtttacggctacctctggtggcaattggggcctgttggagcccggcygccgcgggacctacgtgccggacttcaagttcccgcgtggggtgggatttgctgcggtggccggagctgattcttcacccagtcctgttggttctgggcc

SEQ ID NO: 463658 - DNA, 201 bp, Homo sapiens
gtctctactaaaaataccaaaaaaaaaaaaaaaaaaaaaggcagatgtggtggcacacctgtaatcctagctactcaggaggctgaggcaggagaatcacktgagcccaggatgtggaggttgcagtgagctgagatcacatcactgcactccagcctactgcactccagcctgggtgacagagcgatactctgtgtcaaa

SEQ ID NO: 463659 - DNA, 201 bp, Homo sapiens
aataccctttactagtcagtcttttatttattaatcaatatgccacctttattgtagaccaaattctcctggatcaataaataaaagactgattagtaaarggtgtttttgaaaggaaagttagacccctacttcaaagcataacaaaaaatgttgcaggtggcttttgtctgcagctagaaaacaaaaatttgtaaaagt

SEQ ID NO: 463660 - DNA, 201 bp, Homo sapiens
tatgcatacacaacatatccttccagatcttcatttagttgtgtaattgcttccatgacaggaaccagtaaaccttgataaaaattaaggatccgtcaatyagttattgcaatatctgatttgttggactattttggttagtttttgccttcttgtgtttctaggctattcaggcagctatcagccaggcctttaaaaccc

SEQ ID NO: 463661 - DNA, 201 bp, Homo sapiens
ggacgtggtggcacgcactcaagaggctgaggcaggagaattgctgaaacccaggaggtggaggttgcagtgagccgaaatcgtgccaccgcactccagtmggggcgacagagcaagactcagtctaaaaaaaaaagaagtgattccttaggaacagaaaattatcaatgactagccaattgccctaataccctttactag

SEQ ID NO: 463662 - DNA, 201 bp, Homo sapiens
tactacttgaacttctggcatgtagtttcagccttacctgcacaaaggaccacaacagttcattgcagctttttttttttttttgagacagagtcttgctktattgcccaggctggagtgcagtggcgagatctcagcccactgcaacttctgcttcccaagttcaagcgattctcctgcctcagcctcccgagtagctgg

SEQ ID NO: 463663 - DNA, 201 bp, Homo sapiens
gtgccactgcacaccagcctgggcgacagagcgagactcatctcaaataaataaataaatgaataaataaacaaaattaaaaagaaaaaaaattagctagrtgtggtggcatgcacttacagttctagctacttgagaagctgaggcaggaggatcacttgaacccagatatttgaggctgcagtgagccaagatcatgcc

SEQ ID NO: 463664 - DNA, 201 bp, Homo sapiens
ttagtttttgccttcttgtgtttctaggctattcaggcagctatcagccaggcctttaaaaccccagaggtcatcagattgtttgcaaagaaacaaccagrtcagcttcggacaaggttagcagaggtaaaatttctttaaattgatttggttgctgtgtgtttttcatttcctaggccaattcattatgatatcctatgg

SEQ ID NO: 463665 - DNA, 201 bp, Homo sapiens
gccggcccgagtgctaccggagatcaccagcggcccggacgccagcgagtggaacatctcggtcgcactctcattggttccagggggccggaagtgcgtgsgtccagcggaagtgctcccccggcgcggtccgccaggccagtgccctcaggtaggcggggcccctggccctaaactctgggactggcgggcggtcaggcg

SEQ ID NO: 463666 - DNA, 201 bp, Homo sapiens
gccaccatacccagctaattttgtatttttagtagagacggggtttctccatgttggtcaggctggtcttgaactcccaacctcaggtatctgtctgcctyggcctcccaaagtgctgggattacaagcgtgagccactgtgcctggcctttagttttttttttttagagatggggtcttgctacatttccaaggctggtc

SEQ ID NO: 463667 - DNA, 201 bp, Homo sapiens
ctgtcaggctaagaaggtactacttgaacttctggcatgtagtttcagccttacctgcacaaaggaccacaacagttcattgcagctttttttttttttttgagacagagtcttgctgtattgcccaggctggagtgcagtggcgagatctcagcccactgcaacttctgcttcccaagttcaagcgattctcctgcctca

SEQ ID NO: 463668 - DNA, 201 bp, Homo sapiens
gccagtgccctcaggtaggcggggcccctggccctaaactctgggactggcgggcggtcaggcggcacagggggaatcccgggggcctaaggaggttgtcycagtttttgtcaggtaggcccggaaggagtttcggggaccatgggtttacggctacctctggtggcaattggggcctgttggagcccggccgccgcggga

SEQ ID NO: 463669 - DNA, 201 bp, Homo sapiens
ctctttggtagtccaagatgggagggtcactttaggccagatgttccgagaccagcctgggcaacatagtgagactctgtctctacaaaaaataaaacttmaaaaaattgcactggtatgttaatttcatatggtatgtgggtttattgtttcacatagagattaaaatggcttccagaggaaagacagagacaagcaaat

SEQ ID NO: 463670 - DNA, 201 bp, Homo sapiens
caaagaccctctcggcctcgctaggaagaaactcagaaaggctgcggtaggcgcagtcgagggggaaagtgcccccgcccttgatgtctcaggctgctcamgtggaagttatctggactgccttagggcaagtttatatatagcaaataaaattacttgttaatggtttccttttttccagcatctccaccccgaggtggt

SEQ ID NO: 463671 - DNA, 201 bp, Homo sapiens
aggttgcagtgaaccaagatcatgccactgcactccacctgggtgaccgtgagacgccatcaaaaaaaaaagaaagaggaaagaaagaacgaacgaacgaaagaaagaaaaggtaaaatccctacttaaataattcacaacctagtgattgggaggaaatcaaggaagaccttgtagagaaggtgacacttgaactagact

SEQ ID NO: 463672 - DNA, 201 bp, Homo sapiens
gaggttgcagtgaaccaagatcatgccactgcactccacctgggtgaccgtgagacgccatcaaaaaaaaaagaaagaggaaagaaagaacgaacgaacgaaagaaagaaaaggtaaaatccctacttaaataattcacaacctagtgattgggaggaaatcaaggaagaccttgtagagaaggtgacacttgaactagac

SEQ ID NO: 463673 - DNA, 201 bp, Homo sapiens
attgcttgaacccaggaggctgaggttgcagtgagccgagatcgcgccactgcactccatcctggacgacagagcgagactccgtctcaaaaaaaattttwaaaaaaaagatttgaatgctaaagaagaagcaatcaattctcattattcatctaccagttgtttattcggcactttttgtctgtccaagattgtgctgga

SEQ ID NO: 463674 - DNA, 201 bp, Homo sapiens
agaggttgcagtgaaccaagatcatgccactgcactccacctgggtgaccgtgagacgccatcaaaaaaaaaagaaagaggaaagaaagaacgaacgaacgaaagaaagaaaaggtaaaatccctacttaaataattcacaacctagtgattgggaggaaatcaaggaagaccttgtagagaaggtgacacttgaactaga

SEQ ID NO: 463675 - DNA, 201 bp, Homo sapiens
cagaggttgcagtgaaccaagatcatgccactgcactccacctgggtgaccgtgagacgccatcaaaaaaaaaagaaagaggaaagaaagaacgaacgaacgaaagaaagaaaaggtaaaatccctacttaaataattcacaacctagtgattgggaggaaatcaaggaagaccttgtagagaaggtgacacttgaactag

SEQ ID NO: 463676 - DNA, 201 bp, Homo sapiens
ggatttgctgcggtggccggagctgattcttcacccagtcctgttggttctgggccaaaccctcctcactttcaaggaagaggcgtgctctccgcccttaycttttccaagcctctgggtttgacgccatccctcaaggcgtgtccggatgcgggattttcctcaaagaccctctcggcctcgctaggaagaaactcagaa

SEQ ID NO: 463677 - DNA, 201 bp, Homo sapiens
ttatgatttgtctgtttaagagagaaaacaaagtggacttgatttttattaaggctgtttgtttttaagtgttgatagtgaacgaaaagatgtgaagtaakgatatttttctgcttacaacttatccccactcattggagtgaacagtgacgcaagctcaatagacttcataagtgttcatagaattttacaattctgagt

SEQ ID NO: 463678 - DNA, 201 bp, Homo sapiens
tgcctggcctttttttctctttagagatggggtttcccccatgttgctcaggctggtcttgaactcctgacctcaggtgatccacccacctcggcttccaraagtgctggggttacaggcgtgagccaccacatccggccttttttgtatttttagtagagatggggtttcaccatgttagccaggatggtcttgatctcc

SEQ ID NO: 463679 - DNA, 201 bp, Homo sapiens
cagatgttccgagaccagcctgggcaacatagtgagactctgtctctacaaaaaataaaacttaaaaaaattgcactggtatgttaatttcatatggtatrtgggtttattgtttcacatagagattaaaatggcttccagaggaaagacagagacaagcaaattaaagcagaatttagaagaacagttggatagactcat

SEQ ID NO: 463680 - DNA, 201 bp, Homo sapiens
aggtaaaatttctttaaattgatttggttgctgtgtgtttttcatttcctaggccaattcattatgatatcctatggcttaaaaatttgccaggtgatttyagagccacaactaacaattttctgacaaaattagtactttgagcaattatagttgataatgaatgtagagctttaaacaatatacggcagtttaaattgc

SEQ ID NO: 463681 - DNA, 201 bp, Homo sapiens
atatctgtagttctttataatattaatcagctagaggatttttttttaagaagtacgtctgaaaagctatatgtacgtgtatatatatatatatatatatwtttttttttttttttttttttgtggtggagtcttgctctgtcacccaggctggagtgcagtggcgctatctcggctcactgcaagctccacctcccgggt

SEQ ID NO: 463682 - DNA, 201 bp, Homo sapiens
atttctatcatatttgccttggattatatctgtagttctttataatattaatcagctagaggatttttttttaagaagtacgtctgaaaagctatatgtaygtgtatatatatatatatatatatttttttttttttttttttttttgtggtggagtcttgctctgtcacccaggctggagtgcagtggcgctatctcggc

SEQ ID NO: 463683 - DNA, 201 bp, Homo sapiens
ttatatctgtagttctttataatattaatcagctagaggatttttttttaagaagtacgtctgaaaagctatatgtacgtgtatatatatatatatatatwtttttttttttttttttttttttgtggtggagtcttgctctgtcacccaggctggagtgcagtggcgctatctcggctcactgcaagctccacctcccgg

SEQ ID NO: 463684 - DNA, 201 bp, Homo sapiens
tatcatatttgccttggattatatctgtagttctttataatattaatcagctagaggatttttttttaagaagtacgtctgaaaagctatatgtacgtgtrtatatatatatatatatatttttttttttttttttttttttgtggtggagtcttgctctgtcacccaggctggagtgcagtggcgctatctcggctcact

SEQ ID NO: 463685 - DNA, 201 bp, Homo sapiens
gaattcctgcttcactactgaggtatgtgacaagttttttatgtttttttttttttttgagatggggtcttgttctgttgcccaggctggagggcagtggygcaatctcggttcagtacaacctctgcctctgggttcaagtgattctcttgcctcagcctcctgagtagctgggactacagcaggcacatgccaccacgc

SEQ ID NO: 463686 - DNA, 201 bp, Homo sapiens
atagtgattcagagcatggactttggtcagactggctggatttgaattcctgcttcactactgaggtatgtgacaagttttttatgtttttttttttttttgagatggggtcttgttctgttgcccaggctggagggcagtggcgcaatctcggttcagtacaacctctgcctctgggttcaagtgattctcttgcctcag

SEQ ID NO: 463687 - DNA, 201 bp, Homo sapiens
atcctcattttggtaaaagaaaaatgtttaccaaagtaactatattgcaggaaaatgccctcactactactatgtgaacacattcaccatcagcattttgrtatttcccttcagtctttctctaatgtacaagtattaagattgcatttttcacttggaactcttcatttttccatatcatgatgttcacctatttcagag

SEQ ID NO: 463688 - DNA, 201 bp, Homo sapiens
tggatgtaattaagagttaccaaattatttgtaagtatgggcaattcagtagcatagtgattcagagcatggactttggtcagactggctggatttgaatycctgcttcactactgaggtatgtgacaagttttttatgtttttttttttttttgagatggggtcttgttctgttgcccaggctggagggcagtggcgcaa

SEQ ID NO: 463689 - DNA, 201 bp, Homo sapiens
gcctctgggttcaagtgattctcttgcctcagcctcctgagtagctgggactacagcaggcacatgccaccacgcctggctaatttttgtatttttagtaraaatggggtttaccatgttgtcaaggctggtcttgaactcctaacctcaagtgatctgcccgcctcagcctcccaaagtgttgggattatagatgggagc

SEQ ID NO: 463690 - DNA, 201 bp, Homo sapiens
ggcttccctcttggccaagatgatcatttgcttgtttgtgggtttattgactaggtatcactccccacgagggtagcgaggactcttgttcactgtatttstgcaggacccagtgctgaacacacacagggtaaatggtggtgtgtgaaagaccgagaaagaagctgttaattctgggcttccaatggtcagaaatgcaga

SEQ ID NO: 463691 - DNA, 201 bp, Homo sapiens
atttcattaggccttgcctcttatgtcactagacactcgtctagtcccttgggacaaatcacttgaggccatggaattcaaagaccttcccaaaagtcatmatgtagcctgtccatggtgacatttgctagtagccactattttacaaaataatgtggcctctagagaggggatccgccttgttcacgaagcctctggttt

SEQ ID NO: 463692 - DNA, 201 bp, Homo sapiens
accccttcctggggccttgggaggctgcacagggaacttggaggcagcagatgggttctcagtgcccggtggggtgggactcctgtcctggcctctcagcrgagttcacatttctggaccctggagaaggtcccgagcatcctgtggatggagccatgctgcccggcccgtctctgagcagaggggtggagggcctggctc

SEQ ID NO: 463693 - DNA, 201 bp, Homo sapiens
aataacctgctctgggatcctttccccccataacccttggcactctccgctccaaccaaacaattctgcagctccctggacatgctctgccctctcacctstgggcctttgcacgcggaacacctctccccagctcccatcctctttactggcccacatacatttcaactggaaagcattttctgaaggctaagactgagc

SEQ ID NO: 463694 - DNA, 201 bp, Homo sapiens
gcacggccactgcaggaccagcccagcatgggcatttcctgtgattcaaggttgccacatttctccaaagtgagggcccacagagggccctccaccggcartccctgtgttacgagtgccttccctaaccagctgtgcagatacggctacgtcaccaactccaaggtgaagtttgtcatggtggtagattcctccaacaca

SEQ ID NO: 463695 - DNA, 201 bp, Homo sapiens
cctctgagtgggtctgtttctcttagcagggcctttgataacatggtgacgtcgatgatgatacaggtgtgctgagtgagctgtgctgccagccatcgcaraggagcccgcgcacgactgtggtggggccgtcggtctgttctggttgcctcttcctgaatgggacgcctggggctttcagggcaggcagctgtgcatgtt

SEQ ID NO: 463696 - DNA, 201 bp, Homo sapiens
tgctgagtgagctgtgctgccagccatcgcagaggagcccgcgcacgactgtggtggggccgtcggtctgttctggttgcctcttcctgaatgggacgccyggggctttcagggcaggcagctgtgcatgttctctcaactaaaggtcttgtgagaggagatttggctttttccttccgtgtcagccaaggatttaattaa

SEQ ID NO: 463697 - DNA, 201 bp, Homo sapiens
acccagcacggccactgcaggaccagcccagcatgggcatttcctgtgattcaaggttgccacatttctccaaagtgagggcccacagagggccctccacyggcagtccctgtgttacgagtgccttccctaaccagctgtgcagatacggctacgtcaccaactccaaggtgaagtttgtcatggtggtagattcctcca

SEQ ID NO: 463698 - DNA, 201 bp, Homo sapiens
gcgtacgcgcggcgtggggcgtccgggctcgcaccatcctcggctctccgctttctttctacttcttccctgggcttagaaggcaccttaggaaatgggayctggaggaggccttcgccgagctccagcggtcaggggcttcgcggtggacgagccgccaggcagaccctgactgagaccccagttccgcgctcgcccgtc

SEQ ID NO: 463699 - DNA, 201 bp, Homo sapiens
atgtggggtccatgcccacattccagacttgctttcagtgagtccccagttccaagacataattccctgtggttggcagggaagaggacgctgcagtgatycaaggcaggcccctccctccaccaggacactgtcttggggccatcctggtcccagatgggagcaggcaggcgaatgtccacagtcttgcctcctgggctg

SEQ ID NO: 463700 - DNA, 201 bp, Homo sapiens
atttctccaaagtgagggcccacagagggccctccaccggcagtccctgtgttacgagtgccttccctaaccagctgtgcagatacggctacgtcaccaaytccaaggtgaagtttgtcatggtggtagattcctccaacacagcccttcgagacaacgaaattcgcagcgtaagtcagggagttagagggccacgcccga

SEQ ID NO: 463701 - DNA, 201 bp, Homo sapiens
acaccagacgtcgccctagcaaagtatttaggcttgtacccagcacggccactgcaggaccagcccagcatgggcatttcctgtgattcaaggttgccacrtttctccaaagtgagggcccacagagggccctccaccggcagtccctgtgttacgagtgccttccctaaccagctgtgcagatacggctacgtcaccaac

SEQ ID NO: 463702 - DNA, 201 bp, Homo sapiens
tgctttgtacctgcaaggatttctttctgtgcttttcagggggagccaccacctttgagcaggggataatagtttcatttatttcattaggccttgcctcktatgtcactagacactcgtctagtcccttgggacaaatcacttgaggccatggaattcaaagaccttcccaaaagtcatcatgtagcctgtccatggtga

SEQ ID NO: 463703 - DNA, 201 bp, Homo sapiens
tggctgcctgctcttcgcttctcctgcaaacaccagacgtcgccctagcaaagtatttaggcttgtacccagcacggccactgcaggaccagcccagcatrggcatttcctgtgattcaaggttgccacatttctccaaagtgagggcccacagagggccctccaccggcagtccctgtgttacgagtgccttccctaacc

SEQ ID NO: 463704 - DNA, 201 bp, Homo sapiens
cttttagaagaaaaagaggtgagagtttttagccagccagggaattagggtagcttgaggtgaatgaaggcctgtaactcttctctttcattggaagagcyatttgggaaaagcaaggctagaattccccgtagaatgttttggtttgcacgtgtccgttgtctggtttgcagaggaagtgggacacttctgctttgtacc

SEQ ID NO: 463705 - DNA, 201 bp, Homo sapiens
tctcaaggaccttgaggaccccagaagcccttgcagcaggaaaggctgtaagggggggtcagcctagggcaggacctagggaggggaactttcttgatacrtatttgccttttcatcccatctagcaagcacagtgttaattttagaaattatagaagaaaaaatcagcaaggagtgtgggaaaactgcatgccccaggcc

SEQ ID NO: 463706 - DNA, 201 bp, Homo sapiens
ttctcttagcagggcctttgataacatggtgacgtcgatgatgatacaggtgtgctgagtgagctgtgctgccagccatcgcagaggagcccgcgcacgaytgtggtggggccgtcggtctgttctggttgcctcttcctgaatgggacgcctggggctttcagggcaggcagctgtgcatgttctctcaactaaaggtct

SEQ ID NO: 463707 - DNA, 201 bp, Homo sapiens
ttccagacagacagactcggagtctaggtggttcggctcctggagtgtgaactgggtaaggcttggctgcctgctcttcgcttctcctgcaaacaccagaygtcgccctagcaaagtatttaggcttgtacccagcacggccactgcaggaccagcccagcatgggcatttcctgtgattcaaggttgccacatttctcca

SEQ ID NO: 463708 - DNA, 201 bp, Homo sapiens
gcatcgcggtgattgccaaggaggtgcgtacgcgcggcgtggggcgtccgggctcgcaccatcctcggctctccgctttctttctacttcttccctgggcytagaaggcaccttaggaaatgggacctggaggaggccttcgccgagctccagcggtcaggggcttcgcggtggacgagccgccaggcagaccctgactga

SEQ ID NO: 463709 - DNA, 201 bp, Homo sapiens
gaaacctaggtggtcccgggcactacctccgtcctccgtcctcagcaggttctgcccgttctcccgtccagcgctggttccccgcggacggcggccccggscctcctgccagtctccccggagccgagttaaaaacaaatcggatcctgtcacgcctctgcctgagacctctgcagtggcttctcgttgccttaggatgct

SEQ ID NO: 463710 - DNA, 201 bp, Homo sapiens
agcacagtgttaattttagaaattatagaagaaaaaatcagcaaggagtgtgggaaaactgcatgccccaggcctcccccgccccagggtgaattggaagycctggaatgggccgaggcacaccaggcagctgatctgggtgcatgtgggccacagaccactctcacaaggttaaatctttaacaagagcctcatgtttgt

SEQ ID NO: 463711 - DNA, 201 bp, Homo sapiens
agggaacttggaggcagcagatgggttctcagtgcccggtggggtgggactcctgtcctggcctctcagcggagttcacatttctggaccctggagaaggycccgagcatcctgtggatggagccatgctgcccggcccgtctctgagcagaggggtggagggcctggctctcctctgagtgggtctgtttctcttagcag

SEQ ID NO: 463712 - DNA, 201 bp, Homo sapiens
gcggaggttgcagtgagctgagattgcaccactgcactccagcctgggtgacagagcaagactttgtcttaaaaacaaaatgaaacagtggtaaggatgtrgagaaatgggacctctcagattttgctggtagattcaaaaatggtgcaactgctttgagaaagtttggcagtttgtcaaaatgttaaacagagatactcc

SEQ ID NO: 463713 - DNA, 201 bp, Homo sapiens
agaagaaggggcccgagtcccagggtccagagagctgccctcatggtcccacagccctctgggcttcagcaagctctcgctgcttagctggggcaatggcrgaggtcacagcccagagtcacatatacagaagtgggagctgccaaggacctccagggtccaatggggacagccacagcctttccagagcgaatcagcagc

SEQ ID NO: 463714 - DNA, 201 bp, Homo sapiens
acgcgctctacgttgtcacaggcactgcccaggccgtagtgctgcacgtacctgcacataggctgcaggtcagcaccagggggcccagcactgacaccgcrcggccagccaggccgggcccttcctcctgaatgccacaaaggccacggccaggcacctcctgtgggtgacagtgactgcggcgctgtggatgaccaagat

SEQ ID NO: 463715 - DNA, 201 bp, Homo sapiens
ctgaccactcgggctctggcagcacaacctggccacttcccacaggagacgtgcactccctgggtgtccaggtcacgaaccacacattagatgggggcacrccatatgagaaacgatgctggcacgcttctgcaaagcaaagggctgtttctaaagcagagcctgcctgggcaaactgacaagtgtgcgtccggcaactct

SEQ ID NO: 463716 - DNA, 201 bp, Homo sapiens
ttaataggaaccatcccaggtaaagagtgacactgtctctggcatagatgccttaggtaattactcaaaatctgcctgtgtctcagggcccacagctcatrtctgaccagaggccctggatggacagccccatggctggtcagtggtccctctgtggacagccacggaggctagagtggttgtgacagagcttgggggggg

SEQ ID NO: 463717 - DNA, 201 bp, Homo sapiens
cccactaccacgactggctaatttttgtatttttagtagagatggggtttcaccatgttggccaggctgatctcgaactcatgacctcaggtaaactgccygcctcagcctcccaaagtgctgggattacagccataagccaccacgcccgctatgaatagcttttcattttatattttctaaagctatttcttgttgtaa

SEQ ID NO: 463718 - DNA, 201 bp, Homo sapiens
ctcttctaggacacaggctgtggaccccttcaggtgcactataatggggctggaggggcccccacatctctcagccccactaatgcagaatcccactaccmgtgagctagaaggtgctcagaggccaggggtctctactgcccatgccgggcggccttccagtcattgcacagcaaagccatgtgcagggcgtccccctca

SEQ ID NO: 463719 - DNA, 201 bp, Homo sapiens; identical to SEQ ID NO: 199643

SEQ ID NO: 463720 - DNA, 201 bp, Homo sapiens
gcgcccactaccacgactggctaatttttgtatttttagtagagatggggtttcaccatgttggccaggctgatctcgaactcatgacctcaggtaaactkcccgcctcagcctcccaaagtgctgggattacagccataagccaccacgcccgctatgaatagcttttcattttatattttctaaagctatttcttgttg

SEQ ID NO: 463721 - DNA, 201 bp, Homo sapiens
gcagcagaggcagccagccagcaaagaggggccactgagcaccagggccctggtggaggctgctgtgggacggtcaggccaccaccgcaaagaggcagccrgagcttctgcacaggatgtccctggccccaggtcctgcagcaccttagtccatactaccagccccacccaccttccttcctcttccctcttctaggacac

SEQ ID NO: 463722 - DNA, 201 bp, Homo sapiens
tctggctgcactaatatttattggatacaaagcaaaaggggcagggtaaggagtgtgagccatctccaatgacaggtaaggtcacgtgggtcatgtgtccrctggacaaggggcccttccctgcctggcagccaaggcagagagagagggagaaagagagacagcttacgccattatttctgcttatcagagactttcggt

SEQ ID NO: 463723 - DNA, 201 bp, Homo sapiens
ttttgggggggaaaaaccaacacattccagagctttccaagtcctttgaacttcaggttcacattcagggatcacacagttctgcctgttctcagggcacrgcaactgccaatcccgctgaagaggcctccctgggcacagcacaggctgcacggtgcacgcatttccctgaaggcagccccttcttcggaagcagctgtt

SEQ ID NO: 463724 - DNA, 201 bp, Homo sapiens
ctacaaaaagtcacattttcaaaggcaggagttgccactgatatgacgtaaaagtaccaactagtgaaaacacttgcgatgatttaaaaaaaaaaaaaaaacaggctggacgcagtgactcacgcctgtaataccagcactttgggaggccgaggcgggcggatcatgaggtcaggagattgagaccatcctggctaacac

SEQ ID NO: 463725 - DNA, 201 bp, Homo sapiens; identical to SEQ ID NO: 199645

SEQ ID NO: 463726 - DNA, 201 bp, Homo sapiens
ttataatagtagagcgaggattattataatattggaataaagagtaattgctacaaactaatgattaataatattcatatatcatcatatctataatctayttctagtataactattcttattctatatattttcttcattacactggaatagctcgtgcccttagtctcttgcctcagcacctggatggcttctcgccca

SEQ ID NO: 463727 - DNA, 201 bp, Homo sapiens
ctgcgtgggggcctgtgctggcggcacatgtgtctgggtgtggatgggtgtagttctgatgcaggtacctgggtgccctgtgagtgaagccaagtgtgggrtcggggcatgtgattctgcacttacggtaggtgtgggggagcacatgggctgtgtgagagcatctctgtagggcctgcatgccaggctgtccgtgggcac

SEQ ID NO: 463728 - DNA, 201 bp, Homo sapiens
tacacccccaatccaggtgcacaaccttcaggtgcagaaccctcctgccccacctgccacttcccagcgcctcccccaggcctaagtccctgatgctagargttaaaccgcgcccccccaggcctcagtgggcctccaagatgctgggggcaccctgatcccacaaaagatgggggtccctctgctctccagccttgagcc

SEQ ID NO: 463729 - DNA, 201 bp, Homo sapiens; identical to SEQ ID NO: 35055

SEQ ID NO: 463730 - DNA, 201 bp, Homo sapiens
aatgagaagcataagcttggtttccttctaacatccggcaagttagaagatagaacgtatttcttcacttattcatcacatatttgcagggcacccctacrcgggacagcagaggtcccaggccggtgctgcacccggagccaggctcggagctggccgcgcgccctcagctgaaactcaccggaggcgcggccgccctgg

SEQ ID NO: 463731 - DNA, 201 bp, Homo sapiens; identical to SEQ ID NO: 35043

SEQ ID NO: 463732 - DNA, 201 bp, Homo sapiens
gggcaaagccaccccttggagacaggagttagggctgcggaggctcctgcttttcatcacacacctgtcaatcacacctagatttccaagtgagtgctggscatcgctagctttgtgaacttgggcaattaagtgacttctctctacttgcctagatgttcaaatctgtcatatgtgggacaatgacagacacctcccaag

SEQ ID NO: 463733 - DNA, 201 bp, Homo sapiens
aagggggactcaacccgagtgtgcagacctatgatgaccctcgcttccacctccacgtcccatggccacggcccctcccttccaagctccttctgcctgaygggcagcaccccctcccgtctggagtctgccggggcccttcctgctctccttcttaatttattttctgtcttggagggaagctgggtgcacctgctcagg

SEQ ID NO: 463734 - DNA, 201 bp, Homo sapiens
cagcatccccaggacctcttctcccctctgggtcctgcccccatctcactggctcccatctcagattccctgtgaggctccacgcttggcttcacatgcaragtctaggggtgaggggcccctcccagcctctcagctggcagtcctgggcctgtgctgggaaacatgccctccccgcccgcagccggaggagccgcatgg

SEQ ID NO: 463735 - DNA, 201 bp, Homo sapiens
tccacagcatccccaggacctcttctcccctctgggtcctgcccccatctcactggctcccatctcagattccctgtgaggctccacgcttggcttcacaygcaaagtctaggggtgaggggcccctcccagcctctcagctggcagtcctgggcctgtgctgggaaacatgccctccccgcccgcagccggaggagccgc

SEQ ID NO: 463736 - DNA, 201 bp, Homo sapiens
acctcacagccttcggcttatctctgttctacacccacatccaatccatcagcgaatccatcgggctgcaccccggcagggtctgcccgatttcagctacsagggccgcccccaactgggccctgccccgcccatgctccaccagcgtccagaggtcgagggggctccttgaaagcaaagtcacatcagtcccctctctgc

SEQ ID NO: 463737 - DNA, 201 bp, Homo sapiens; identical to SEQ ID NO: 35044

SEQ ID NO: 463738 - DNA, 201 bp, Homo sapiens; identical to SEQ ID NO: 199656

SEQ ID NO: 463739 - DNA, 201 bp, Homo sapiens
ctgggccggaagaggaactgggggcaccctgagctccagtaccaccactcacaacaggcctcccagtggcagctcccagacctgggccctggccagggctytaggggccggcagtcttggggtgggccctgccaattgggacgagtatccctgatttgtgaaaatgatggaaaaacgttcagtctcaagagtccaattcca

SEQ ID NO: 463740 - DNA, 201 bp, Homo sapiens; identical to SEQ ID NO: 199657

SEQ ID NO: 463741 - DNA, 201 bp, Homo sapiens; identical to SEQ ID NO: 199658

SEQ ID NO: 463742 - DNA, 201 bp, Homo sapiens
gggagtggcagggtgggcagagcagccgcccctcatagcatctactagctggccagcctccaaggcccccatggcccagggctggagggaccccccaacayaccgcctgccacgccccaagctcagctctgcggtggttcgttgtcagccgtccccggcccaaatgcgttcacaaaattacccagcttgtttaccaaactg

SEQ ID NO: 463743 - DNA, 201 bp, Homo sapiens
aattctactcctcggaaaacactgttaagagggctgaaaagacaaggcacagacttaaagaaagtatttacaaaccgtatctctgattaaggacttgtatycagaatatattagaaaaaggttacaggctgggcatggtgcctcatgcctataatcctaatgctttgggaggctgaggcgggcagatcccttgagcccagg

SEQ ID NO: 463744 - DNA, 201 bp, Homo sapiens
aggaaaaacagcttttctccaagatctggaacaacacacagatgcccatttctaccacttttattcaacagaatactggaagtcctacccagaacaattasgcaagagaaagaaataacagtcacccaaattggagaggaagaagtcaaaattatccttattcacagatgacaatcttatattgggaaaaactgaaagact

SEQ ID NO: 463745 - DNA, 201 bp, Homo sapiens
ttccaggcaaatatccttcaatcccactgcagggcgggcatctgcagaaggccaggttcggagaccggacgaggctgcccatgctgaatacagcccagcakgcagggccgacgggggctacagccttggcctcccggaggaatctgtcctctgctcctcctaagaggctgtgaggagagggagggcagtagaccaggtgca

SEQ ID NO: 463746 - DNA, 201 bp, Homo sapiens
cagacctcaatggacgctgacccagaccacaacagacactgacccaggcactcatggaccctgtcccaggcactggggttccccacagggattcacacccrgtgccccatccttaggtccctccctgcatccctccctaaccttcccccagaccataacacaaggagaccctggagaggctgagccactcttccaggcaaa

SEQ ID NO: 463747 - DNA, 201 bp, Homo sapiens
ccgccaccacacccacctaatttttcgtatttttagtagagacggggtttcaccgtttcagcaagaatggtctcaatctcctgacctcatgatccgcccgyctcggcctctcaaagtgctgggattacaggcgtgagccatgcacccggccaaagggatttaaataaatgaacaaatatcaaagtttagaaaagccatctt

SEQ ID NO: 463748 - DNA, 201 bp, Homo sapiens
ccaccgcgcgcagcctcaagtacttcagggtttaatataacaaactgtttccaaatactgactgcagttctgctaaattaaaccgattaattaatgaggcygaaatattctccactgtccaagactagacataaatatagtcggatttcaactctaaatcagcagtcagcaactgctcaattgcacactgcgttacaagag

SEQ ID NO: 463749 - DNA, 201 bp, Homo sapiens
gttggtaaaaatgacattttttaggccttctccttctaagtgttgcataattttctgaaagacacaaaacatttctatgttactttttttactggagtctyggctctgtcacccaggctggagtgcagtagcacaatctcggctccctgcaacctccgcctccctggttcaagcgattctcatgcctcagcctcccaagta

SEQ ID NO: 463750 - DNA, 201 bp, Homo sapiens
tgacgggaacgctcgtttccttgatttcacgaaggaggagcagggactgggggtgacgggaacgctcgtttccttgatttcacgaaggaggagcagggatkgggggtgacgggaacgctcgtttccttgatttcacgaaagaggagcagggactgggggtgacgggaacgctcgttttcttgattgtgtgttgctttcaca

SEQ ID NO: 463751 - DNA, 201 bp, Homo sapiens
gtgacgggaacgctcgtttccttgatttcacgaaggaggagcagggactgggggtgacgggaacgctcgtttccttgatttcacgaaggaggagcagggayggggggtgacgggaacgctcgtttccttgatttcacgaaagaggagcagggactgggggtgacgggaacgctcgttttcttgattgtgtgttgctttcac

SEQ ID NO: 463752 - DNA, 201 bp, Homo sapiens
ggtgtgatcacgaaggagcacagggactgggggtgacgggaacgctcatttccttgatttcacgaaggaggagcagggactgggggtgacgggaacgctcrtttccttgatttcacgaaggaggagcagggactgggggtgacgggaacgctcgtttccttgatttcacgaaggaggagcagggactgggggtgacgggaa

SEQ ID NO: 463753 - DNA, 201 bp, Homo sapiens
aaaacacagagaatagcagatgctgttgaggatgtagagaaaggggagctgtcgtacactgttggtgggaatgtaagttagtacagctactatggaaaacagtatggaggttcttcaaaacactacaaatagaactgccataggatccagcaatcccactactgggtatagacccaaaagaatggaaatcaatatactgaa

SEQ ID NO: 463754 - DNA, 201 bp, Homo sapiens
caggcgtggtggcacacgcctgtaatcccagctacttgggaggctgaggcaggagaatcgcttgaacccaggaagcggaggttgcggtgagccaagatcaygccattgcactccagactgggcaacaagaccgaaactccatctcaaaaaaaaaaaaaagaaatcaagaaaatcccatttataatagttacaaaaatataa

SEQ ID NO: 463755 - DNA, 201 bp, Homo sapiens
tgaaagatgctatgcaggaagaaaagtgagcagcagagtgtgtcaggagaggctcttcctgccgcctctgacccgagagcagtgggctgggacccgggggsctctgacccgacagcagcgggccgggacccgggagctgtgacagcagcagctactgtttccgagccttgggttcctcctctgtaaaaatctgatcaagga

SEQ ID NO: 463756 - DNA, 201 bp, Homo sapiens; identical to SEQ ID NO: 199662

SEQ ID NO: 463757 - DNA, 201 bp, Homo sapiens
aaatgaccagcaacccaaattcaacaacatgttacaaagatcattcaccacgatcaagtgggatgtgtctcaaggttgcaaggatggtttaacatatgcayatcaataaacatataacattaaacagaaccaaggaaaaaaaacaatcatttcaacaaatgctgaaaaagcattcaataaaattcagcatcgcttcatgat

SEQ ID NO: 463758 - DNA, 201 bp, Homo sapiens
aaggcagtggccccagacagccaaggaggcgtcctctgtgccagcagatggcactagcagagttaggggtaggggtaggattagggtttgagtgggagtcycagcagcaccagaagaatgacacggaagagctttgcaagaactctgagaactgaactgtcgttggaatgaaaacccttgagagaagatacagttaagaat

SEQ ID NO: 463759 - DNA, 201 bp, Homo sapiens
cccatgaaaaggtttcctcaatcaaccctgtgaccctcacagtggcctggccagagatcaggaggtaggggacaatgagtcaaactccagtctcagacccractgctctgagcaggcaggcggagcccacctgtgggagaccctgggggaccggcaccctctgctctgggatgtaggggctggggggcatacagggatccc

SEQ ID NO: 463760 - DNA, 201 bp, Homo sapiens
gcatatcaataaacatataacattaaacagaaccaaggaaaaaaaacaatcatttcaacaaatgctgaaaaagcattcaataaaattcagcatcgcttcaygataaaagctctcagcaaactgagtatagaaggaacacacctcaaaacaataaaggccacgcatgacaagcccacagccaacagtatattgaacaaggaa

SEQ ID NO: 463761 - DNA, 201 bp, Homo sapiens
cgccgctgcgacccgcctctgaggttccggcgctgcgggcctccggcactgcgggcttccggcgctccaaggggccgcaccacggcctgcgcgtgcgcackacgttgcctccgcctccggcgaagcccggagtgggcggggcccgggcccagagggagggacgaatggtgggtcgagcgtcggggcgggactgcgaggaga

SEQ ID NO: 463762 - DNA, 201 bp, Homo sapiens
tactgctagaccaaggagccctctagtggccctgtccgggcgtgacagaggctcacactcttgtcttctggtcgcttctcaccgtgtcccctcagctcctwtctctgtatggcctggtttttcctaggttataatagtagagcgaggattattataatattggaataaagagtaattgctacaaactaatgattaataata

SEQ ID NO: 463763 - DNA, 201 bp, Homo sapiens
ctcagcctcccaaagtgctgggattacagccataagccaccacgcccgctatgaatagcttttcattttatattttctaaagctatttcttgttgtaatasagaattccggcccttgtgcatgcgatcgttgacacaaaagcaaatcccttcaaccccaggcttccatccatctgtggccacattgctgcctttccttcaa

SEQ ID NO: 463764 - DNA, 201 bp, Homo sapiens
ctctgtggaaaaggagactccctttcccggtctgctaagtaacgggtgccttccctaggcactgacgctaccactagaccaaggtcagccaagtaacagtygtcttcccagacgctggtgttactgctagaccaaggagccctctagtggccctgtccgggcgtgacagaggctcacactcttgtcttctggtcgcttctc

SEQ ID NO: 463765 - DNA, 201 bp, Homo sapiens
tcccgaacttgtccaactggacgctttaaacgatgtgcaggttaccgtgtttataatacctttataatgctgggggtttttttgtttgtttttttttttttaaatgaggtgactaggaggaggggccccagctgccctgcattcactgcactcacccaaagcgctggtgtttgttgagggtgtacagcaggtagtcagcca

SEQ ID NO: 463766 - DNA, 201 bp, Homo sapiens
gaaagcccggatctacacaaagacctgtcggtacatgaatgttcacagcagctttatctgcaatagccaaaacctgcaaacaacccacatatccatcaacrggtgaagggacagactgcagcgcacctggacactgaaaccgcctggcaacaaaaaggatgaatgacggacaacacacgacgacacacggggatcacacaa

SEQ ID NO: 463767 - DNA, 201 bp, Homo sapiens
acttcagcctgggtaactgagaccctgtctcaaaaaaaaaaaaaaaaaaaagattaaaacttagcaataaggaaagaaacaactcagttaaaaaaaaaaaagggaaaaggatttgaacagacatttccccagagagggatgacaaataagcacatgaagatgctcaacgtccctgtcatcagggaaatgcaaattgaaatg

SEQ ID NO: 463768 - DNA, 201 bp, Homo sapiens
tctacaggatatttcaaataccagaagagagcaattcaaatgtttccagcatgaagataaatgtttgggatgatggatatcccaattaccctgatctgatmattacacattgtatgaatgcatcaaaatatcataggtaccctgaaaacatctactttgtatcaaaagataaatcttagcattaaaagtttaaaaaagagt

SEQ ID NO: 463769 - DNA, 201 bp, Homo sapiens
ttgaacccaggaagcaggggttgcagcgagccgagatcgtgccactgcactccagcctgggtgacacagtgagactccttctcaaaaaaaaaaaaaaaaaagacttaaatctaagacctgaaacttcaaaactgctagaagaaaacgtaagggaaacgcttctggaaattggtctgggccagattttttttgtataagacc

SEQ ID NO: 463770 - DNA, 201 bp, Homo sapiens
ggacacaaacactgcggaaggccgcagggtcctctgcctaggaaaaccagagaccttcgttcacttgtttatctgctgaccttccctccactattgtcctrtgaccctgccaaatccccctctgcgagaaacacccaagaatgatcaataaaaaaaaaaaaaaaagaaaagaaaacacaaagaaatgagaaggtgtggatg

SEQ ID NO: 463771 - DNA, 201 bp, Homo sapiens
gatgtgctttcttaaacagatgcttgaaggcagcatgctcgttaagagtcatcaccactccctaatctcaagtacccagggacacaaacactgcggaaggycgcagggtcctctgcctaggaaaaccagagaccttcgttcacttgtttatctgctgaccttccctccactattgtcctgtgaccctgccaaatccccctc

SEQ ID NO: 463772 - DNA, 201 bp, Homo sapiens
cctgttgatctgtgaccttacccccaaccctgtgctctctgaaacatgtgctgtgtccactcagggttaaatggattaagggcagtgcaagatgtgctttsttaaacagatgcttgaaggcagcatgctcgttaagagtcatcaccactccctaatctcaagtacccagggacacaaacactgcggaaggccgcagggtcc

SEQ ID NO: 463773 - DNA, 201 bp, Homo sapiens
agagaagggggaaaggtggggaaaagattgagaaatcggatggttgctgtgtctgtgtagaaagaagtagacatgggagacttttcattttgttctgtacyaagaaaaattcttctgccttgggatcctgttgatctgtgaccttacccccaaccctgtgctctctgaaacatgtgctgtgtccactcagggttaaatgga

SEQ ID NO: 463774 - DNA, 201 bp, Homo sapiens
gcggttttgtggaatagagaagggggaaaggtggggaaaagattgagaaatcggatggttgctgtgtctgtgtagaaagaagtagacatgggagacttttyattttgttctgtactaagaaaaattcttctgccttgggatcctgttgatctgtgaccttacccccaaccctgtgctctctgaaacatgtgctgtgtccac

SEQ ID NO: 463775 - DNA, 201 bp, Homo sapiens
acccaacagctcattgagaacaggccatgatgacaatggcggttttgtggaatagagaagggggaaaggtggggaaaagattgagaaatcggatggttgcygtgtctgtgtagaaagaagtagacatgggagacttttcattttgttctgtactaagaaaaattcttctgccttgggatcctgttgatctgtgaccttacc

SEQ ID NO: 463776 - DNA, 201 bp, Homo sapiens
ccggcaaagcctcctggtgggcaccgcagggcggagctgggctgcggccaccgacgcaggcccagaaaagctcccgggctgccccaggcacaaaactggargagatgagaatggcgccttcgccgacggacacccagcctctgctctccccccacccacagccccggcctttggagccccggggtcggtcccgacgcaccc

SEQ ID NO: 463777 - DNA, 201 bp, Homo sapiens
caattgcaggcgcgcgccaccacgcctgactggttttcgtatttttttggtggagatggggtttcgctgtgttggccgggctggtctccagctcctaaccrcaagtgatccgccagcctcggcctcccgaggtgcagggattgcagacggagtctcgttcactcagtgctcaatggtgcccaggctggagtgcagtggtgt

SEQ ID NO: 463778 - DNA, 201 bp, Homo sapiens
tgtttagagatcaaccagtaacgagcagaggcaggaaccggcgtgtgtggtgagtacctacctgtcactctccggagcacttgggtgagacacagaagtayttcttcatccgacagagtctccatgaactcagactcaagtccggcaatgaacccacagagaacgtggacagacctgcatggagaaagagagccctgggat

SEQ ID NO: 463779 - DNA, 201 bp, Homo sapiens
aacctccctgcctgattctcctgcctcagcctgccgagtgcctccaattgcaggcgcgcgccaccacgcctgactggttttcgtatttttttggtggagayggggtttcgctgtgttggccgggctggtctccagctcctaaccacaagtgatccgccagcctcggcctcccgaggtgcagggattgcagacggagtctcg

SEQ ID NO: 463780 - DNA, 201 bp, Homo sapiens
ggatgtgaggagcccctctgcctggctgcccagtctgggaagtgatgagcgcctcttcccggccgccatcccatctaggaagtgaggagtgtctctgcccsgccgcccatcgtctgagatgtggggagcgcctctgcccggccgcgaccccgtctgggatgtgaggagcccctccgcccagcagccaccccgtctgggaag

SEQ ID NO: 463781 - DNA, 201 bp, Homo sapiens
aatttcgggggggcagggcccccatttgcctgagcatcaagtgggtgaaggtggacagggtctgctctgtcccccagatgctgaagcagggtctcggcacyctggccctgcagcccagctcagtgctgggcttggctcctctgcagggagacggccctctacggaaacctcatcctcaggaagggggtgcttgccctcaac

SEQ ID NO: 463782 - DNA, 201 bp, Homo sapiens
agaactgaactgtcgttggaatgaaaacccttgagagaagatacagttaagaatcactcatcatatgaagacccagggacacgaccatttcagtaagagayaaccaactaagggcggcaccaggaagagtcaggtgtcagaattatctgacaaggattttaaaacaggcatcataaaaatgtttccacaacaaattgcaaa

SEQ ID NO: 463783 - DNA, 201 bp, Homo sapiens
ttatttattggatacaagacaaaggggcagggtaaggagtgtgagtcacctccaatgattgataaggtcacatgagtcacatgtccactggacaggtggcygaggcggagagagagagagggcagcttatgccattctttcttctatgcatttcaaagacttttagtattttcactaattctgctactgctatctagaagg

SEQ ID NO: 463784 - DNA, 201 bp, Homo sapiens
actgtaaggaacaacattcaaacaaaacaagtttgtatagtcagttgcctcacatcatacttccagggtggccactgtgaacagctgggcttgtgacttcstagagttctgtgcacgcacccacacacccctgcacacgggcacaggcatggtctatggttttcttccacgcccactcacgtcgagccctttcctcacgag

SEQ ID NO: 463785 - DNA, 201 bp, Homo sapiens; identical to SEQ ID NO: 199659

SEQ ID NO: 463786 - DNA, 201 bp, Homo sapiens
tttcatactatggacatgtcatcatgcccttggttctaggtatttcccccagggaagcccacctgcccccagctcagtgcagacgccagagagcgtttgcyggtgtctcctccacttggccccgcagctcagtgtgcgtaggtggtctagattgtggtcatggccttgggttgggtgggcagagtgtgtgagcccccaccg

SEQ ID NO: 463787 - DNA, 201 bp, Homo sapiens
ctaaattagccgggtgtggtggtgggcacctgtaatcccagctactcgggaggctgaggcaggagaattgcttgaacccgggaggcggaggttgcagtgarccgagatcgagctattacactccagcctgggcgacaaaagcaaaactccatctcataaataaacaaatatcactccttcttccaaccacatatccatgta

SEQ ID NO: 463788 - DNA, 201 bp, Homo sapiens
ttttgtaagtttttatcatggtggttaacatcctatcacttctagatgtaggactcccttaagcatttcttgtagggctgatctagtgatgattaattccctcaatgtttgcctgtcttgaatccagacacaggacccacagaatcagcaatgcgtgcaaagcacatcactgacgccaaagctggttttctccaggcctgc

SEQ ID NO: 463789 - DNA, 201 bp, Homo sapiens
aaacatcgaatggaaatcaatgacataaaaaacaaagacaacagaaagtcaatgaaaccagaagctgattctttgggaaaaatcaataaaattaataagcytctagccagactgttctcttcaacctgataaagggcatctaagaaacacccatacctaatactgcactcaatggtaagagactaaaagcttcctacctta

SEQ ID NO: 463790 - DNA, 201 bp, Homo sapiens
accttagatcaggaacaaaaaaagatgtctgttctcaccacatctcaaatactaaaaaaacctgtcaattgtattgaagactgtagccagtgcaataaagsaagaaaacaaaatatggcatctggactggaaaagaaaaagtaagatgatctttatttgcaaatgacataattgtctaggtaaaaaatctaactggaatct

SEQ ID NO: 463791 - DNA, 201 bp, Homo sapiens
atcaccaaatagagaagtagaagcaatctggcttccctcaccctctcaaagaaaaccaaaaccaaacatccagtgccaagaatatcaccagcaatattccrgaactcaaatctgaggatgagaccagagaagtgaaaaaaactccaggcagaaagtaagctgcaaaaaacctctaagcaaacatccaagaaaaaaaaagcc

SEQ ID NO: 463792 - DNA, 201 bp, Homo sapiens
ggaaagcctggataacaaatccttcaatgcaaaaccacagacatatgtgcacaagaaacaacagctaacggaaaaccgcgaccttctcaaacagacaaagmaaagagccagtggccaaccctaatgagatggcaacgtgtaagcgctcaaatcaagaattcaaggtaacagttaaaaaaaaactcagcaaactccaataaa

SEQ ID NO: 463793 - DNA, 201 bp, Homo sapiens
aaaacataacagaatcattccttccacctatctggaacttactagaacgaaaatgtgagcttcgtacacaagcaaacgccccagagccaactgaggcaggrtaagggcagaggcgggggcacttgggatgggggtttgggctgaaaacctgacctacctaagggcacggtgacgatgacatggtgcgccgggaaccggtct

SEQ ID NO: 463794 - DNA, 201 bp, Homo sapiens
acagactgcagcgcacctggacactgaaaccgcctggcaacaaaaaggatgaatgacggacaacacacgacgacacacggggatcacacaacaatcgtgcygagtgacagatcaacaagaatgcacatcctgtgtgattccatctacgtggaattctagaaaacccaaagcaacctacagggacagtagacggctgcctgg

SEQ ID NO: 463795 - DNA, 201 bp, Homo sapiens
acttaaggaaaagagcccacggggcagtgaagggtgctcggggctcctgctttgaatcagagtctgagaacaggcacagagggaggagaggagcgcctgcractccggagtccaggaaccctccagcaaaggcaaggcggacgccatggaggaatggccttgcagcctccctgcctgataatccagccccgtctacttcac

SEQ ID NO: 463796 - DNA, 201 bp, Homo sapiens
tgttaaagattttaaaagagagaaaaattaagtgtgaaattcacagaacgacctggtcccactgttcagccctcctgtgaactggactgaacgagacaagrtgtgctctggggctgcggggtcagcagaagactggcagtgctcctcgggcacgtcccctccaagaaagatggtggcatcagcacatcagccacacgcgcc

SEQ ID NO: 463797 - DNA, 201 bp, Homo sapiens
aaggagtcctctggtggccctgtctgggcataacagaaggctcacacacttgtcacgtctcactatgtcccctcagctcctatctctgtatggcctggttyttcctaggttatgattatagagcaagaattataataatattggaatgaagagtaattgctacaaactaatgattagtaatattcatatacaatcatatct

SEQ ID NO: 463798 - DNA, 201 bp, Homo sapiens; identical to SEQ ID NO: 35050

SEQ ID NO: 463799 - DNA, 201 bp, Homo sapiens
agtaccagtgatcaagggaaaatcttaaaagcagccattgtctcaagagaagtaatgcaagcaagagaacagtggaaccaaaagttttaaagactgtaagraaaaaaaactgtcaatctagaattctgtacacaggaaaaatatctttttttttttttttttttttttgagatggagactcgccctgtcaccaacgctgga

SEQ ID NO: 463800 - DNA, 201 bp, Homo sapiens; identical to SEQ ID NO: 199677

SEQ ID NO: 463801 - DNA, 201 bp, Homo sapiens
ctccctccatcccgacagcagagccccgtgcgtcgtggagtaaaacgtgcgatgtgtggcttcccccgcaaacaggatctggagctgcaaagaagagccarggttagaatggggatgcaattcagacagcagggtctgggcaaggaaacacagaaaatggctcacaagcatccaccaagaagcaggaaaacagctcacaca

SEQ ID NO: 463802 - DNA, 201 bp, Homo sapiens
agggtctgggcaaggaaacacagaaaatggctcacaagcatccaccaagaagcaggaaaacagctcacacacctccaccaacggacgagaaaagggctcaygtgtacccaccaatagccaggaaaacagctcacacacatccaccaacgggcaggaaaacagctcacatgtatccatcaacagccaggaaaacggctcaca

SEQ ID NO: 463803 - DNA, 201 bp, Homo sapiens; identical to SEQ ID NO: 199638

SEQ ID NO: 463804 - DNA, 201 bp, Homo sapiens
aaggacgcctcagcgaaggggctcacaacctttctagagtgatcgattcaagctgaaccgtccagaatgacacgccaccataaataacctaaaaagactayatctgagggaagcgtactaagtaatggtaacagataacatccgctgagcgcctcctccaaggtccgcaccctcggagtgggagactgggaggcaccctgc

SEQ ID NO: 463805 - DNA, 201 bp, Homo sapiens; identical to SEQ ID NO: 199640

SEQ ID NO: 463806 - DNA, 201 bp, Homo sapiens; identical to SEQ ID NO: 199642

SEQ ID NO: 463807 - DNA, 201 bp, Homo sapiens
ggtcctcccacccactctctgcctcccaagcatcattcccctacttccactggaggccctgtggtctccagcccaccactgtcacacctgccccacccacrtgactgtccacaccccttggagtgccccgctcacccttcggtcctgtcctctgcaaccctgagtatccaggaaaaccacccctgcctgccctcccactat

SEQ ID NO: 463808 - DNA, 201 bp, Homo sapiens
cactggaatagctcgtgcccttagtctcttgcctcagcacctggatggcttctcgcccacagtaattaaaaagagaaatcaacagaagaaaatgatttatrggaaatattttgatatttgggaaaaatacagttctaaataacccatcgtcaaagaagaaatcaaaacagaagttagtaaatgttttgaaatgaaaataaa

SEQ ID NO: 463809 - DNA, 201 bp, Homo sapiens; identical to SEQ ID NO: 199646

SEQ ID NO: 463810 - DNA, 201 bp, Homo sapiens
gtgcaatggcacgatctcagctcactgcaatgtccacctccagggttgaactgattctcgtgcctcagcctcccatgtagcgggaattataggcgcccacyaccacgactggctaatttttgtatttttagtagagatggggtttcaccatgttggccaggctgatctcgaactcatgacctcaggtaaactgcccgcctc

SEQ ID NO: 463811 - DNA, 201 bp, Homo sapiens
tctatgacctatatctagtataactattcttatttcatatgttttattacactggaaaagctcgtgtcctcggtctcttgcctcggcacctgggtggcttkctgcccacaatgcgcactcactgaccactcgggctctggcagcacaacctggccacttcccacaggagacgtgcactccctgggtgtccaggtcacgaac

SEQ ID NO: 463812 - DNA, 201 bp, Homo sapiens
tatggtaaagccctgtctaataaaaatacaaaaattagccaggcgtggtggcgggcacctgtagtcccagctactcggcaggttgaggcaggagaatggcrtgaacccgggaggtggaggttgcggtgagccaagatcgcgccactgctctccagcctgggcgacagagtaagactccatctcaaaaaataataataatct

SEQ ID NO: 463813 - DNA, 201 bp, Homo sapiens
tgttgagaagtcagctgccagtcttacttttactcttttgcaggtaatttgagttttccctgcttctggaagttgtttggtttacagctgtcttacctagrtatgccttttttttttttttttttttttttttttttttgatttattgcacttggagtttgtaatgcctctagaattcatgatttaatttctttcatcagt

SEQ ID NO: 463814 - DNA, 201 bp, Homo sapiens
ggccaggttcggagaccggacgaggctgcccatgctgaatacagcccagcatgcagggccgacgggggctacagccttggcctcccggaggaatctgtccyctgctcctcctaagaggctgtgaggagagggagggcagtagaccaggtgcaggagcctccggttccccttcgaacgcagtggctccaggctggcggagct

SEQ ID NO: 463815 - DNA, 201 bp, Homo sapiens
aaaatgcatgaccacagtagcacaaaggccagtaggagagaaacggaagtacactattgtacagcttgtaaaatatacgtgaagaaataacatatcacttraaggtagaggatgacaagttaaaggaatacactaaccctaaaacaaccactaaagtaacaaaagaaggagttacaggtcatagtcagcaaaggagataaa

SEQ ID NO: 463816 - DNA, 201 bp, Homo sapiens
agtttttctctgttctgcaaagtctagtttctgtttagagatcaaccagtaacgagcagaggcaggaaccggcgtgtgtggtgagtacctacctgtcactytccggagcacttgggtgagacacagaagtacttcttcatccgacagagtctccatgaactcagactcaagtccggcaatgaacccacagagaacgtggac

SEQ ID NO: 463817 - DNA, 201 bp, Homo sapiens
accgatggaccccgacccagacctccatggacgctgacccagacaccgatggaccccgacctagaccccaatggaccccaacctagaccccgatggacccmgacctagaccccaatggaccccaacctagaccctgatgtaccctgacctggaccctgatggacgctgacccagacactgatggaccccaacccagacctc

SEQ ID NO: 463818 - DNA, 201 bp, Homo sapiens
gctgacccagacaccgatggaccccgacccagacctccatggacgctgacccagacaccgatggaccccgacctagaccccaatggaccccaacctagacmccgatggacccagacctagaccccaatggaccccaacctagaccctgatgtaccctgacctggaccctgatggacgctgacccagacactgatggacccc

SEQ ID NO: 463819 - DNA, 201 bp, Homo sapiens
tggaccccgacccagaccccgacagacgctgacccagacaccgatggaccccgacccagacctccatggacgctgacccagacaccgatggaccccgaccyagaccccaatggaccccaacctagaccccgatggacccagacctagaccccaatggaccccaacctagaccctgatgtaccctgacctggaccctgatgg

SEQ ID NO: 463820 - DNA, 201 bp, Homo sapiens
ctccgggcattctgccaggcctaagggcagcacgaagtggtcagagggcagagaccctcatgaggggaggccgcggcggttgaaccccttcggcctgagggagctcggggtgggaggctcgggtagggacactggggagcccccggccacagcgcaagggcacccgagtctcggacctggcgaggagcccgtgggctggct

SEQ ID NO: 463821 - DNA, 201 bp, Homo sapiens
agcctacccccgacacgggtggaacagagtaggctgggcccagctagagcctcggcctgggctgctgcacctgcggggcccacagactgaggaggcggtcrgcctccctccatcccgacagcagagccccgtgcgtcgtggagtaaaacgtgcgatgtgtggcttcccccgcaaacaggatctggagctgcaaagaagagc

SEQ ID NO: 463822 - DNA, 201 bp, Homo sapiens
gtccatgcctttgcccagccgctcctccatctctgcacttgcaccccaaaaccttacttccgacttcccccagcccccaaaaccacgctgacctcacagcyttcggcttatctctgttctacacccacatccaatccatcagcgaatccatcgggctgcaccccggcagggtctgcccgatttcagctacgagggccgccc

SEQ ID NO: 463823 - DNA, 201 bp, Homo sapiens
tgccgtgtgtctgcatgcgcacctatgtgtgcttgtgtgtccctgtctgaatgagcacctatgtgtgtctgggagtgcctgtgtgagcacctgtgtgtaamtgtgtatgccacggcacatctgcacatgcctgtgcctataactacattgggcagcgagctgtctggggtgtgctggtcaacaagcttccctgaagcaggt

SEQ ID NO: 463824 - DNA, 201 bp, Homo sapiens
cccaccagatccctagacggtagatggcagccactgacacctccaggcaggaccccggaagatgttcctctcaggaatctgcgtgatgctggcaggcgagrcagggcctccgccagccagatgactctgccacggcctggtcagcattttggatctctccagtgtgggctgacagccaacagtcaccagacatcagacgag

SEQ ID NO: 463825 - DNA, 201 bp, Homo sapiens; identical to SEQ ID NO: 199664

SEQ ID NO: 463826 - DNA, 201 bp, Homo sapiens
agaggctggaagacacggagacagagggcggtgaaatccgtgaatatcctcacggacatcagaacatgcagtttgcacccttgaaacaatagaacactacragaaaagaaaggaaagacagagtcagagaaagaaagacagataacccacaaattggaaataggatgccagaaataaactcaagaaggactggaagaaatc

SEQ ID NO: 463827 - DNA, 201 bp, Homo sapiens
cttagtctcttgcctcagcacctggatggcttctcgcccacagtaattaaaaagagaaatcaacagaagaaaatgatttatgggaaatattttgatatttsggaaaaatacagttctaaataacccatcgtcaaagaagaaatcaaaacagaagttagtaaatgttttgaaatgaaaataaacacaacatatcaaaaaatt

SEQ ID NO: 463828 - DNA, 201 bp, Homo sapiens
ttctcaagaggcctgagcaggaagctccgggagaaccaagcatgcggagctgctcagggacgtccactgggaagcctggtgtccactcccacctgcttggsccctgcaactggggtccctggagctggccaggctgtggggcgccagagagcacagcaccctagtgaccagcatggagcttctggaccgggtgagctgtct

SEQ ID NO: 463829 - DNA, 201 bp, Homo sapiens
acaagccccagctccctgcaacattccagtaaacacgttcccactgactgaagactgagcctgcctgcaagtctacaaacacattctgggccctgagggaygctgacaacccgcatacagcagggcgccatctgtccccgcaggggtcaggcccaggtgcagccagcacctggtgggggggcgctcatgggaaccctaccc

SEQ ID NO: 463830 - DNA, 201 bp, Homo sapiens
tctgttgcccaggctagagtgcatgcagcaccatgatcagggctcactgcagccttgacctccctggctcagtcctcccactttggcctcccaaactgctkggattacaggcgtgagcctctgttccccacctttcacacaagtgttttttgtttttttgttttttgggttttctttttttttttttttgagatggattct

SEQ ID NO: 463831 - DNA, 201 bp, Homo sapiens
accagatctagaattaaacagaattatacacacggctccttcaacaggtcacccccaggcctgaccttcagaccaggcctttcatgccttttcctgtctgyagcaaagtgcggtgtggttaatctccaaggccgtcgcaaccctaaacggttacctccaagcgagcaggacgcatacttactcgcgttttttcttacggtg

SEQ ID NO: 463832 - DNA, 201 bp, Homo sapiens
cgcggagagagaagacatggacccaagagctgcagggtggggacaaccgacgcgctctttgtcccctggatgtggtgccacagcctgaatccaatagcacsggccgctgacgcgctgacctggggctgggttagtcgctcgtcccccttgctctgaaatggagagtgcacgtgaccacggccagtcctggacaatcctgcc

SEQ ID NO: 463833 - DNA, 201 bp, Homo sapiens
ctacgcgctggcgcggatggggcacggggacgagatcggtgagcgcagcgggccggggcctcggggagcaccccgggacaggcaggagggcgaggcttgcrcggggacccccgggccgggaagggccgcgtcctggggtgtgggcgttgctcgggcctccctggcttccgggcaggaagccccctcccccgcattctttag

SEQ ID NO: 463834 - DNA, 201 bp, Homo sapiens; identical to SEQ ID NO: 199670

SEQ ID NO: 463835 - DNA, 201 bp, Homo sapiens; identical to SEQ ID NO: 199671

SEQ ID NO: 463836 - DNA, 201 bp, Homo sapiens; identical to SEQ ID NO: 35049

SEQ ID NO: 463837 - DNA, 201 bp, Homo sapiens
ctgtcccaggcactggggttccccacagggattcacacccggtgccccatccttaggtccctccctgcatccctccctaaccttcccccagaccataacayaaggagaccctggagaggctgagccactcttccaggcaaatatccttcaatcccactgcagggcgggcatctgcagaaggccaggttcggagaccggacg

SEQ ID NO: 463838 - DNA, 201 bp, Homo sapiens
aaccagtgggtaagggcggctggaacctgagctcacagccccgtcggaccctgacccagaccccgacagacgctgacccagacaccgatggaccccgaccyagaccccgacagacgctgacccagacaccgatggaccccgacccagaccccgacagacgctgacccagacaccgatggaccccgacccagaccccgacag

SEQ ID NO: 463839 - DNA, 201 bp, Homo sapiens; identical to SEQ ID NO: 199675

SEQ ID NO: 463840 - DNA, 201 bp, Homo sapiens
ctgatggcagcaagcctctcacttgttgtaggactgcaagacactggaccgaaagcctccaacacaaaccctagctgccaacctgctcatttcttaggttycactggtgagagcagctttaacacacaggcccaaggcactacggtgcacctcacaggccagtaagaaacaggccctttaactggagattttaaaggttac

SEQ ID NO: 463841 - DNA, 201 bp, Homo sapiens; identical to SEQ ID NO: 199676

SEQ ID NO: 463842 - DNA, 201 bp, Homo sapiens
cattctcaccagcatttgttactgtttgtcttttagataaaagcccttcaaacttgggtgagatgatatcttattgtggtttcaatatgcatttctctggyaattactgatgttgagcttttttccatatattttggttctttatatgttttctattgataaatgcctattcagaaactttcacccatttttttatcgact

SEQ ID NO: 463843 - DNA, 201 bp, Homo sapiens
agcagaggcgccgcggccgtaggcatgaccttgcccctccccgccgtgcctcacccttggccatgtggcccgggaaccagcgcgccacgtcgcgaccgcayagggggaagttctcccgccaggcggcctgggcggcgctgcacagcgcgcgcggggtcaatctcatggcggcaccgtccccggaaacgctcccgcagctga

SEQ ID NO: 463844 - DNA, 201 bp, Homo sapiens
ctggactcaagtaatccccctacctcagcctcccttgtagctaggaccacaggtgcatgccaccacacccagataatttgtttttttttttttttttttttgtagagatggggtttcaccatgttgcccaggctggtctcaaactccaggactcaagcaatccaccagtcttggcctcccaaagtgctgggattacaggtg

SEQ ID NO: 463845 - DNA, 201 bp, Homo sapiens
cctggactcaagtaatccccctacctcagcctcccttgtagctaggaccacaggtgcatgccaccacacccagataatttgtttttttttttttttttttttgtagagatggggtttcaccatgttgcccaggctggtctcaaactccaggactcaagcaatccaccagtcttggcctcccaaagtgctgggattacaggt

SEQ ID NO: 463846 - DNA, 201 bp, Homo sapiens; identical to SEQ ID NO: 199639

SEQ ID NO: 463847 - DNA, 201 bp, Homo sapiens
caacctctgcctcctggactcaagtaatccccctacctcagcctcccttgtagctaggaccacaggtgcatgccaccacacccagataatttgtttttttktttttttttttttgtagagatggggtttcaccatgttgcccaggctggtctcaaactccaggactcaagcaatccaccagtcttggcctcccaaagtgct

SEQ ID NO: 463848 - DNA, 201 bp, Homo sapiens
gcacatttctgctggcctcacataggcactgagccggctggggagggaaaggcacagagggtctgggcagcccaggcacagaggcaggggaggcggtggaygagcagtgcaggctgagggtgggggctgccctcccaagtccatcctgcagggttcttggtccagggacgtccttggggagtggcagggtgggcagagcag

SEQ ID NO: 463849 - DNA, 201 bp, Homo sapiens
tcacctgttctgcctgagcaggcttctctcttactccctgctcttgggcctgaagcagagccgctggctcagtggggcgctccattctgaggtccctggcrtgcaccacggaagcccagcgggaccacccacccacctgccccagctccccagcggaggtcctgagatggcagattaaatactctggggttctgaattcca

SEQ ID NO: 463850 - DNA, 201 bp, Homo sapiens
tctgtggcccaggttggagtgcagtggcatgatcttggctcactgcaacctctgcctcctggactcaagtaatccccctacctcagcctcccttgtagctrggaccacaggtgcatgccaccacacccagataatttgtttttttttttttttttttttgtagagatggggtttcaccatgttgcccaggctggtctcaaa

SEQ ID NO: 463851 - DNA, 201 bp, Homo sapiens
taaacttgaaaatacttaaggaaaagagcccacggggcagtgaagggtgctcggggctcctgctttgaatcagagtctgagaacaggcacagagggaggaraggagcgcctgcgactccggagtccaggaaccctccagcaaaggcaaggcggacgccatggaggaatggccttgcagcctccctgcctgataatccagcc

SEQ ID NO: 463852 - DNA, 201 bp, Homo sapiens; identical to SEQ ID NO: 199644

SEQ ID NO: 463853 - DNA, 201 bp, Homo sapiens
ccctggagatgtacagagtcagccaaatttagtttttctctgttctgcaaagtctagtttctgtttagagatcaaccagtaacgagcagaggcaggaaccrgcgtgtgtggtgagtacctacctgtcactctccggagcacttgggtgagacacagaagtacttcttcatccgacagagtctccatgaactcagactcaag

SEQ ID NO: 463854 - DNA, 201 bp, Homo sapiens
cttctcagccggcaggggagggtcaaagaaggtgtccaaatgttccctaagaaaacctggaattcagaattggactcttcttacatcacataaagccctcyacggaagtcctgtctgtccagaccttggatccagcaatttcccctgctggtgtttatcctacagacacattcacacaagcagttttacttttttgtcctt

SEQ ID NO: 463855 - DNA, 201 bp, Homo sapiens; identical to SEQ ID NO: 199647

SEQ ID NO: 463856 - DNA, 201 bp, Homo sapiens; identical to SEQ ID NO: 199649

SEQ ID NO: 463857 - DNA, 201 bp, Homo sapiens; identical to SEQ ID NO: 199650

SEQ ID NO: 463858 - DNA, 201 bp, Homo sapiens; identical to SEQ ID NO: 199652

SEQ ID NO: 463859 - DNA, 201 bp, Homo sapiens
gatcaatttgtggtgaactgtcaccttcacaatatcctgtgcatcctccatttatgcagattttcttttatattctttaataactttaggatgttcttcayagaggtcttttacattgcggactgtggtgaatggctttttttttttttttttttttggaggaggagtcttgctctgtcacccaggctggagtgcagtggc

SEQ ID NO: 463860 - DNA, 201 bp, Homo sapiens
taacctttcatcactaagaggcattactctttgtccctagtagtgcttttacctcaacctttaagtataaagtctactttgtctggcattaatacagctayactggcttccttttagttagtatttgcatggtatctattttttatccatgccaattattaatctgctgcctcttagcttctaaccacccttcacagtcag

SEQ ID NO: 463861 - DNA, 201 bp, Homo sapiens; identical to SEQ ID NO: 199653

SEQ ID NO: 463862 - DNA, 201 bp, Homo sapiens
ggcagaaactaagttgaccgagcacgtctcttcctattgggctgcggcacctggttgtggggaggtatctctcacttgatttcacggtttttccatgcccyaatcccacctccctcatcacagccacccagtgtgatgcattcagcatgtgtccttggagagagaggtactcaacagatgcgtggtatttgtgttttaaat

SEQ ID NO: 463863 - DNA, 201 bp, Homo sapiens
ccttaagcatatcctgagtataagtgtaaaaatttagcaatctctttttacaatttggttaaaatctctcaaatactttaaatttaccttataaatgtaayctcttcattttctttttaagtacttcagggtttttgtttgttttgttttgtttgagacggagtctccgctctgttgcccaagagtgcagtggcacgatct

SEQ ID NO: 463864 - DNA, 201 bp, Homo sapiens
ccctgtctctactaaaaatacaaaaattagccaggtgtggtggcacatgcttgtaatcccagctacttgggaggctaaggcgggagaatcgcttgaacccrggaggtggaggctgcagtgggctgagattgtgccactgcactgtagcctggctgggcgacagagtgagatgccatctcaaaaaaaagaaaaaaagaaagt

SEQ ID NO: 463865 - DNA, 201 bp, Homo sapiens; identical to SEQ ID NO: 199655

SEQ ID NO: 463866 - DNA, 201 bp, Homo sapiens
ttaatctcaaaagtgtcttttttgtcttatttcatcttcacagtttcctgttcttattatataaatatatctccctaatctgagtctatggattggagttytatccaatccattcattccaatgattggaatgattggagtcattcacatttctcaatccatttattttccgtttctttgcctggtctttcttttatgtga

SEQ ID NO: 463867 - DNA, 201 bp, Homo sapiens
ttatatttctttaaaagataactgtatgaaggaaagaaagtatatctggaggttataaaatatgtaaaggtaaaatatatcatgatgatgatggcacaagratcaggataagaaaaacagaaatgcattattgtaaggtcatcacttaaagacatactatacaccctaaagcaacctctcccaaaagttgtagacaataag

SEQ ID NO: 463868 - DNA, 201 bp, Homo sapiens
gggccgtgtccctcattttgtccagggcctgacccagccctgaaccctgggttccaagcagtggggctagggtctgggggccctgaggtcacagggatccrgccatgtggagtcacctccctcctgccccagcatgtcccacccactctgggctgagtgagacccaggcagacggcaggtcactgcagggaccctcatgcc

SEQ ID NO: 463869 - DNA, 201 bp, Homo sapiens
tgcttctcacccattaaagtggccaagactgagaattccacgagaccacctgctggagagggtgggagagccatagtagctgtggagcagtacagccacaytgggaaaagaatctggtattttcttaggaggttttgagtaaagtttgacctcagcattcccattcttacgggtggattacaagagaaatattcacacatg

SEQ ID NO: 463870 - DNA, 201 bp, Homo sapiens
tcggatggcaagtgtttggggtgcagcccccgccacgagtgtcacctgttctgcctgagcaggcttctctcttactccctgctcttgggcctgaagcagarccgctggctcagtggggcgctccattctgaggtccctggcatgcaccacggaagcccagcgggaccacccacccacctgccccagctccccagcggaggt

SEQ ID NO: 463871 - DNA, 201 bp, Homo sapiens
gacactctgcaaagaaatagaaaaacaatcctaaaatttgtatggcaccactaaaggccccaaacagccaaagcaaacctgaagcaaaaagaacaaagctrgaggcatcacactacctgacttcaaaatattcgtagtaaccaaaaacagcacgctactggcataaaacacatacacagaacagtggaacagaccagagaa

SEQ ID NO: 463872 - DNA, 201 bp, Homo sapiens; identical to SEQ ID NO: 35053

SEQ ID NO: 463873 - DNA, 201 bp, Homo sapiens
ccccgtcatggccttgtctgtccacttgtttctgtgggaagcaccgggccccagaggccggggtgagtggtgcctgcctgtctcctgggcaggggcagcaygtctgcatggatgactgtgtgccgggtctggatctgctgtgtgcgtgtttttgtctgtctgctgggagcctgctgtctgcgtgggggcctgtgctggcgg

SEQ ID NO: 463874 - DNA, 201 bp, Homo sapiens
ctgtgtatgccacggcacatctgcacatgcctgtgcctataactacattgggcagcgagctgtctggggtgtgctggtcaacaagcttccctgaagcaggyggccatgtggagggacagcatgtctgtggtttcacatttgtccccgtcatggccttgtctgtccacttgtttctgtgggaagcaccgggccccagaggcc

SEQ ID NO: 463875 - DNA, 201 bp, Homo sapiens; identical to SEQ ID NO: 199661

SEQ ID NO: 463876 - DNA, 201 bp, Homo sapiens
gaccgctgtagatctatgtgtgctgatttggaaacactgacaagttctattaagaaaaaaacaaaaaacaaaaacaggcaaactgagcagcagatttttgktttttttttttttctgagacagagtctcactctgtcacccaggctggagtgcaatgacaccatctcggctcactgtgacctctgcctcccccgttcaagc

SEQ ID NO: 463877 - DNA, 201 bp, Homo sapiens
tgcacctgtgtatacctgtgtctcggtgcacctgtgtatatctgtgcacccacctgtgtatgtgcctgtgcatgcctgtgtgtgcctgtgtgcacctgtgyctgtgctcacctgcatgtgcacctgggcatatctgagtgtctgtgcagctgcatgtgtacctctgtgtgtctgtgtatacctgtggatacctgtgtgcac

SEQ ID NO: 463878 - DNA, 201 bp, Homo sapiens
ccctgctacctcgcggggatgatgacgatagtcccctaaccaggaataccacacacaaccaagataacaaagcttccagctttcttcccctccagtgttayccgaagaccgaggacacagcctcagtcacccacacgggcccttcttccccctcggcccccagtacacgcggagccgacgcaggagtggccatcacaacac

SEQ ID NO: 463879 - DNA, 201 bp, Homo sapiens
gtaactgggactataggtgcatgccaccatgtctggctaattttttaaatttttttgtagagatggaaagccttgccatgtacccaggctggtctcaaackcctggcctcatcggaccctcccaccttggcctcccaaagtgctgagattacaggtgtgagccaccacagccagctacaggatttctttttcaggtgatga

SEQ ID NO: 463880 - DNA, 201 bp, Homo sapiens
gagctaccacaccaggccaaaaatatctttcaaaaacaaaagttaaatgaagaattgttcatacatacaaaagatgaaggaatatatcatgagcagaccamaagatgaaggaatatatcatgagcattacaaaaaatatttagagaaaccctccaggtaaaaggcaaatgatgccaagtggaaataaggatctataaaaag

SEQ ID NO: 463881 - DNA, 201 bp, Homo sapiens
ctgctacctcgcggggatgatgacgatagtcccctaaccaggaataccacacacaaccaagataacaaagcttccagctttcttcccctccagtgttatcygaagaccgaggacacagcctcagtcacccacacgggcccttcttccccctcggcccccagtacacgcggagccgacgcaggagtggccatcacaacacct

SEQ ID NO: 463882 - DNA, 201 bp, Homo sapiens
agagccctgggatgaccagacctgcatggagaaagagagccctgggatgaccagacctgcatggagaaagagagccctgggatgacagtgtccagcccagvtctccgcccgcgtttctcagcaaggaaccactgatggagcaggggccccagaggcacaaagagccaccccacagagcgtccctcaggcagcagttcgcag

SEQ ID NO: 463883 - DNA, 201 bp, Homo sapiens
ggagaaagagagccctgggatgaccagacctgcatggagaaagagagccctgggatgaccagacctgcatggagaaagagagccctgggatgacagtgtcsagcccagctctccgcccgcgtttctcagcaaggaaccactgatggagcaggggccccagaggcacaaagagccaccccacagagcgtccctcaggcagca

SEQ ID NO: 463884 - DNA, 201 bp, Homo sapiens
cctgcatggagaaagagagccctgggatgaccagacctgcatggagaaagagagccctgggatgaccagacctgcatggagaaagagagccctgggatgacagtgtccagcccagctctccgcccgcgtttctcagcaaggaaccactgatggagcaggggccccagaggcacaaagagccaccccacagagcgtccctca

SEQ ID NO: 463885 - DNA, 201 bp, Homo sapiens
gagacagagtctcactttctcatccaggctggagtgcagtggcatgatcatagctcactgcagcctcaacttcctggcctcaagtgatcttcctaccttarcctcctgagtaactgggactataggtgcatgccaccatgtctggctaattttttaaatttttttgtagagatggaaagccttgccatgtacccaggctgg

SEQ ID NO: 463886 - DNA, 201 bp, Homo sapiens
acgtggacagacctgcatggagaaagagagccctgggatgaccagacctgcatggagaaagagagccctgggatgaccagacctgcatggagaaagagagvcctgggatgacagtgtccagcccagctctccgcccgcgtttctcagcaaggaaccactgatggagcaggggccccagaggcacaaagagccaccccacag

SEQ ID NO: 463887 - DNA, 201 bp, Homo sapiens
gagttcgagaccagcctgaccaacatggagaaacctcatctctgctaaaaatactaaattagccgggtgtggtggtgggcacctgtaatcccagctactcrggaggctgaggcaggagaattgcttgaacccgggaggcggaggttgcagtgagccgagatcgagctattacactccagcctgggcgacaaaagcaaaact

SEQ ID NO: 463888 - DNA, 201 bp, Homo sapiens
atcatagttaagtattttacaaggatgtctttatcttttagaaacaggcaccaaaatatcctgaggtgagacaatgtcctgtgtgagtcatgcttaataaraaagggcgggggtgggcggggagaagcttggcttaggggaagcctggtgggcactgaaaggttctccctactttagtatgtttgacattttgcacaggaa

SEQ ID NO: 463889 - DNA, 201 bp, Homo sapiens; identical to SEQ ID NO: 199663

SEQ ID NO: 463890 - DNA, 201 bp, Homo sapiens
tgccctcggacctggtcacagcatgagccggtaacagaggactcaccccaaggcccagcaaagcaagacatgagctcagagcccataggagcatcagaacsctgagtaacacaggttctaaatctaacttctcggaggcaccaagcatgagctctgaatcagcagcctcaagggtgccctggtgctccaaaaaagctgtcc

SEQ ID NO: 463891 - DNA, 201 bp, Homo sapiens; identical to SEQ ID NO: 199665

SEQ ID NO: 463892 - DNA, 201 bp, Homo sapiens
gagacgctgcttctcacccattaaagtggccaagactgagaattccacgagaccacctgctggagagggtgggagagccatagtagctgtggagcagtacwgccacattgggaaaagaatctggtattttcttaggaggttttgagtaaagtttgacctcagcattcccattcttacgggtggattacaagagaaatattc

SEQ ID NO: 463893 - DNA, 201 bp, Homo sapiens
gtaacttgctttatgtgtccagcatctccgtgagcatctggtgtctcagctcaagtcaaccctggccagactccaataacagacacaagaactgagaaggkggccctggttaccaaaaaccagaggaccctcattaacatccccaaatttcaagccagactgaaatctgtcagaagaaatgacggtcccagcctacccccg

SEQ ID NO: 463894 - DNA, 201 bp, Homo sapiens
acgttgtgtgttccacttatattacattctagaatgaacaaaacctatgaaggaaagaatctcagcagtggttgcctcaaggttgagagtcagggataaastgggaaagggtatgcaggatgtctgtggggtgacggaagttggcatcctgatgcgtctgggttccaggcacacacacacatttatcaaaacccatcacct

SEQ ID NO: 463895 - DNA, 201 bp, Homo sapiens
acacaagaactgagaaggtggccctggttaccaaaaaccagaggaccctcattaacatccccaaatttcaagccagactgaaatctgtcagaagaaatgasggtcccagcctacccccgacacgggtggaacagagtaggctgggcccagctagagcctcggcctgggctgctgcacctgcggggcccacagactgaggag

SEQ ID NO: 463896 - DNA, 201 bp, Homo sapiens
cacggccagcagcatggggggcggctcccaccaccggagcccttgccgcagcgggaggagtaacagctgttcacacacacaggcttcatccactctatccrgggtaggacaggcaggcctctgtgcaggcccaggtcctggaaactaaaagaggagcacagcagaccatctgcaaacatactctgtttgctgctaaggatg

SEQ ID NO: 463897 - DNA, 201 bp, Homo sapiens
cccaaatttcaagccagactgaaatctgtcagaagaaatgacggtcccagcctacccccgacacgggtggaacagagtaggctgggcccagctagagcctsggcctgggctgctgcacctgcggggcccacagactgaggaggcggtcggcctccctccatcccgacagcagagccccgtgcgtcgtggagtaaaacgtgc

SEQ ID NO: 463898 - DNA, 201 bp, Homo sapiens
ccatggggaacccagggcggatcccgggtcagcagggccagctgtccaccaagctgacccacccgacatgccaggactaaggaaagaagggctgccccacmcccttagtcggatggcaagtgtttggggtgcagcccccgccacgagtgtcacctgttctgcctgagcaggcttctctcttactccctgctcttgggcctg

SEQ ID NO: 463899 - DNA, 201 bp, Homo sapiens; identical to SEQ ID NO: 199666

SEQ ID NO: 463900 - DNA, 201 bp, Homo sapiens
ccccgcaggacgtcgaggtccagcatcacggaacccagcagcccacggcggaaagtctgcaggaagtcacgggctgccgcaggatagttaggctgaataaygttcacgttacctgggggacgggagggttcagtgaggaaggagccttcacagcaggacaggcccagcccttacccacctgagggaccagccctaagaggc

SEQ ID NO: 463901 - DNA, 201 bp, Homo sapiens; identical to SEQ ID NO: 199667

SEQ ID NO: 463902 - DNA, 201 bp, Homo sapiens
agacccaccggagccccctcaactttgcagatgcccacctggaaaatgggctgagctgcaccagaccctcacacaccacagcactgcaagctgatggaatrttccagttatgatggacacttcgtgatctgcaatgactgttgattcagcacattagcatctgacacagccaacctgaatacttcctgccccaggcggtca

SEQ ID NO: 463903 - DNA, 201 bp, Homo sapiens
cccagctacttgggaggctgaggcagagaactgcttgaacccaggaagcaggggttgcagcgagccgagatcgtgccactgcactccagcctgggtgacasagtgagactccttctcaaaaaaaaaaaaaaaaaagacttaaatctaagacctgaaacttcaaaactgctagaagaaaacgtaagggaaacgcttctggaa

SEQ ID NO: 463904 - DNA, 201 bp, Homo sapiens; identical to SEQ ID NO: 199668

SEQ ID NO: 463905 - DNA, 201 bp, Homo sapiens
atctccaaggccgtcgcaaccctaaacggttacctccaagcgagcaggacgcatacttactcgcgttttttcttacggtgaaacccttaattccaaagcaygtaattgctacaaaacataacagaatcattccttccacctatctggaacttactagaacgaaaatgtgagcttcgtacacaagcaaacgccccagagcca

SEQ ID NO: 463906 - DNA, 201 bp, Homo sapiens; identical to SEQ ID NO: 199669

SEQ ID NO: 463907 - DNA, 201 bp, Homo sapiens
ccactttgctccaacaacttgaaacaagtcactttaccctccttaggacccattttgggggggaaaaaccaacacattccagagctttccaagtcctttgracttcaggttcacattcagggatcacacagttctgcctgttctcagggcacagcaactgccaatcccgctgaagaggcctccctgggcacagcacaggct

SEQ ID NO: 463908 - DNA, 201 bp, Homo sapiens
gggctctgctactggcggccgccttcctctgcgacagcggcgcagccaagggcggccgcggaggtgcgcggggcagtgcccggggaggggtccgcgggggygcgcgcggggcctcgagggtgcgcgtgaggccggcgcagcgctacggtgccccgggctcctccctgcgcgtggctgccgccggggcggcagccggggcgg

SEQ ID NO: 463909 - DNA, 201 bp, Homo sapiens; identical to SEQ ID NO: 199672

SEQ ID NO: 463910 - DNA, 201 bp, Homo sapiens
acccgatctccatggaaactaagggccctttccctctcttcccgcaggtttagccccacgaagatgaactgggcacccgcaacgtgctgggctctgctacwggcggccgccttcctctgcgacagcggcgcagccaagggcggccgcggaggtgcgcggggcagtgcccggggaggggtccgcgggggtgcgcgcggggcc

SEQ ID NO: 463911 - DNA, 201 bp, Homo sapiens
agccctccgcccctgggcacccgatctccatggaaactaagggccctttccctctcttcccgcaggtttagccccacgaagatgaactgggcacccgcaaygtgctgggctctgctactggcggccgccttcctctgcgacagcggcgcagccaagggcggccgcggaggtgcgcggggcagtgcccggggaggggtccgc

SEQ ID NO: 463912 - DNA, 201 bp, Homo sapiens
cgcgcccccccaggcctcagtgggcctccaagatgctgggggcaccctgatcccacaaaagatgggggtccctctgctctccagccttgagccctccgccyctgggcacccgatctccatggaaactaagggccctttccctctcttcccgcaggtttagccccacgaagatgaactgggcacccgcaacgtgctgggctc

SEQ ID NO: 463913 - DNA, 201 bp, Homo sapiens
ccccacccactccaggatgttagggtcccctcagccaaaaaggcagctgcctgtggctcctgtaccaaccgcccagccacgctccatcgccgcccaaagggaggtgccaaggccaggaacccaagccaccccggctcccctcgcctgcccaggggccgtggtgactcacgggcagggaggcgacatcaggctggttctgcc

SEQ ID NO: 463914 - DNA, 201 bp, Homo sapiens
gtcctccatcagatgaaggcctatgagccagccactcgcagaacttctcagggagcaaacgtacgcaaaggcaggcaggaccacaaagccaatgagcttcyggaaccaggcgtcctgtagctcaggggcagcatcctccaggggcgacgtgtcctcccacaccagctggatcagctggcagtctggctcccagaagggctc

SEQ ID NO: 463915 - DNA, 201 bp, Homo sapiens
ggcaaagccaccccttggagacaggagttagggctgcggaggctcctgcttttcatcacacacctgtcaatcacacctagatttccaagtgagtgctgggmatcgctagctttgtgaacttgggcaattaagtgacttctctctacttgcctagatgttcaaatctgtcatatgtgggacaatgacagacacctcccaagg

SEQ ID NO: 463916 - DNA, 201 bp, Homo sapiens
ccacagagaacgtggacagacctgcatggagaaagagagccctgggatgaccagacctgcatggagaaagagagccctgggatgaccagacctgcatggagaaagagagccctgggatgacagtgtccagcccagctctccgcccgcgtttctcagcaaggaaccactgatggagcaggggccccagaggcacaaagagcc

SEQ ID NO: 463917 - DNA, 201 bp, Homo sapiens
cgtgctgcctctggctcctgggggcagtccttctgatggacgcgtctgcacggcctgccaaccactcgtccactcgagagagagtagccaacagggaggakaatgagatcctgcccccagaccacctgaacggggtgaagctggagatggacgggcacctcaatcgcggcttccaccaggaggtcttcctaggcaaggacc

SEQ ID NO: 463918 - DNA, 201 bp, Homo sapiens
tatctggagtttggtcctgtccgttctaaatcctgcaaattggacattaaaaaaactaaaagtaagaggatctccctgtgttgcccaggctggtctcaaastcctgggctaaagggatctgcctgccgcagcctcccagcatgccgggattacaggcacaagccccagtgcccggccaaattggacgttattacttccttt

SEQ ID NO: 463919 - DNA, 201 bp, Homo sapiens
tgtcttgggacgagtataaggtgaagtttttggcgagtaaaggccatagcgagaaggaggttgccgacgccatcaggctcaacgaggaactcaaagtggaygaggaaagtgagtgctcagccaggctcccgccaccggtctcaggcatcctgtgtgtgcgcgcgtgtgttgtgtgtacatgagtgtgccgtgtgtgtcgtg

SEQ ID NO: 463920 - DNA, 201 bp, Homo sapiens
cacgggcgccttactccttacggcacggccggggtgccctgcggtgtggccctggaacctacttgcactcagcgctggcctcacccctggaggcagagcakggtcagggcgtgcccgtgagtcccccaggccagccagggtgccgggcagggagccgaggtgcaggtgagagaacaccctgggcctcctgggacctgcgag

SEQ ID NO: 463921 - DNA, 201 bp, Homo sapiens
cctgtctgagggacgggcggtggggaagtgtcagccggagaccccgaggtgtggtggggtgcacggaagctgggttcatgatgccagaatcctggtgacaraggtgtgtgtgccaagcactgggcgtggcccatggagggcgcctcttatgtcttcggggccttcatctggtggtgtctatgcctcttggtggccccgagg

SEQ ID NO: 463922 - DNA, 201 bp, Homo sapiens
tgtgccgtgtgtgtcgtgtatgagtgtgccgtgcgtgtgctcgtgagtacgtgtgtgcgtgccgtgtgtacgagtgtgctgtgcgcgtgctcgtgagtacgtgtgtgcatgttgtgtgtacgtgtgctgtgtgtgtgctcgtgagtacatgtgtatgcgtgtcgtgtgtacgagtgcactgtgcatgtgcttgtacgtgtg

SEQ ID NO: 463923 - DNA, 201 bp, Homo sapiens
gtcttaggggctgggccatgttctggggacgtgtgaatcctggagggtggggccccggtctcgcgggtggctgtgtccctcgagttcaggcagcacctctyggaactttctggatttgcgtgctggcgtctgtcggcctcgatacccacaggctgcgcccctctcagcacaggaagtcctggagaacctgaaggaccgctg

SEQ ID NO: 463924 - DNA, 201 bp, Homo sapiens
tctgagggacgggcggtggggaagtgtcagccggagaccccgaggtgtggtggggtgcacggaagctgggttcatgatgccagaatcctggtgacagaggygtgtgtgccaagcactgggcgtggcccatggagggcgcctcttatgtcttcggggccttcatctggtggtgtctatgcctcttggtggccccgaggcaca

SEQ ID NO: 463925 - DNA, 201 bp, Homo sapiens
ccgggacctgggtgaggctgggtccagcctggccggcacgccaggacccaggaccgactggcaggggccgggcatcgtcgggaggtcggggcaggtcctgygggagccccagcctgggtgtgggctgacccattcccgtctcgcagaccaggacggtgacaagcagctctctgtgcccgagttcatctccctgcccgtggg

SEQ ID NO: 463926 - DNA, 201 bp, Homo sapiens
catgatgccagaatcctggtgacagaggtgtgtgtgccaagcactgggcgtggcccatggagggcgcctcttatgtcttcggggccttcatctggtggtgyctatgcctcttggtggccccgaggcacagacgttgccggctggcctcacaggtgaggaaacgggtgtggggtgctggccggggccctggggctccagacg

SEQ ID NO: 463927 - DNA, 201 bp, Homo sapiens
ttgggctgagggccaggcgggagggccctgaggatccaggctttcgggcggagcacaggtgagctggtgggacggaggcacggtgccagctggaggacctkggcaccaggtgtggtgtccccttgcacctctcctcagatggtacggttcgggggtccttgcgtggcctgagttcacttggtggtgagctgaccaacccac

SEQ ID NO: 463928 - DNA, 201 bp, Homo sapiens
ggggccttcatctggtggtgtctatgcctcttggtggccccgaggcacagacgttgccggctggcctcacaggtgaggaaacgggtgtggggtgctggccrgggccctggggctccagacgctggcatcctgccgcttccagcctgggcagcagagcaagaccccatctcagttgagaaggaagttcagctcagtatcaga

SEQ ID NO: 463929 - DNA, 201 bp, Homo sapiens
ctcattggcctggctccgtgctgcctctggctcctgggggcagtccttctgatggacgcgtctgcacggcctgccaaccactcgtccactcgagagagagyagccaacagggaggagaatgagatcctgcccccagaccacctgaacggggtgaagctggagatggacgggcacctcaatcgcggcttccaccaggaggtc

SEQ ID NO: 463930 - DNA, 201 bp, Homo sapiens
ggccacacacccagaggcagtgccgtgtcccggctgggagggttcctgggaagctctgctcagccccagtctcagtcatttctagaaactgtgttttcctycctgtgacgtcacacgtgaaggaaacggaaaagggcagtgagtccttcgccccgcggcgccgtgcgcacgtcagccttcagggtgattccgctcctccag

SEQ ID NO: 463931 - DNA, 201 bp, Homo sapiens
tctgctcagccccagtctcagtcatttctagaaactgtgttttcctccctgtgacgtcacacgtgaaggaaacggaaaagggcagtgagtccttcgccccrcggcgccgtgcgcacgtcagccttcagggtgattccgctcctccagaggggcaggcgcgggtgtggggggtggggcccaggcccatcctgaggggtccca

SEQ ID NO: 463932 - DNA, 201 bp, Homo sapiens
ctggtggtgattctgtgtgacagagggggagggtccatgtgtttccccggggaggggaccgtggcatccaccttccccagtgtctctggcgtggcccggcrccccacaagccccacgtcccggacgcttttcgcgttgcctggtggagcctgtcgctgttggtggcaggttcacgcagccatggagtcctgggccggcggc

SEQ ID NO: 463933 - DNA, 201 bp, Homo sapiens
tgctgcggctgctgagggaggggcgcgtgtgagcggcagcctggccttcttccatgaggatctctgcccagtgcttctgagccgtgcctgcggtgtgtgcrccctcgaagcttgcctggcccaggtcccagaggccacacctgcctgacgagggcctgcttgccacctcataacgtggccgcggctgcccctgagcggagc

SEQ ID NO: 463934 - DNA, 201 bp, Homo sapiens
gagtgcactgtgcatgtgcttgtacgtgtgtgcgtgtcgtgtgtacgagtgcgctgtgcgtgtgcttgtgagtacatccaggtagctgttcatgtaggctygtgagtacatgcaggtgagtgcgccctcacacccgctgtgtgcacacgtgttcgtcttaacagcatggcccaacctggttggtggtggctgtcaggaggg

SEQ ID NO: 463935 - DNA, 201 bp, Homo sapiens
gggactgtggagctgagggtgcctcccaggcccgtccacctctgggctgctgcggctgctgagggaggggcgcgtgtgagcggcagcctggccttcttccrtgaggatctctgcccagtgcttctgagccgtgcctgcggtgtgtgcaccctcgaagcttgcctggcccaggtcccagaggccacacctgcctgacgaggg

SEQ ID NO: 463936 - DNA, 201 bp, Homo sapiens
tggtctggccctgggtggcgatggcgtccaggtggggtcccctcattggcctggctccgtgctgcctctggctcctgggggcagtccttctgatggacgcrtctgcacggcctgccaaccactcgtccactcgagagagagtagccaacagggaggagaatgagatcctgcccccagaccacctgaacggggtgaagctgg

SEQ ID NO: 463937 - DNA, 201 bp, Homo sapiens
gtgccgtgtgtgtcgtgtatgagtgtgccgtgcgtgtgctcgtgagtacgtgtgtgcgtgccgtgtgtacgagtgtgctgtgcgcgtgctcgtgagtacgtgtgtgcatgttgtgtgtacgtgtgctgtgtgtgtgctcgtgagtacatgtgtatgcgtgtcgtgtgtacgagtgcactgtgcatgtgcttgtacgtgtgt

SEQ ID NO: 463938 - DNA, 201 bp, Homo sapiens
ggcctgggaagcgctggcaggcgtcactcctgcgacctcccacccctccctgcatggctcctgcgagggtcaccgcgtgagtccgggggctgctgtcctcrcgcctcagacctgattctggggaccgcggtgaaggcgtggcaggcgggcatcactcccttcccccgcctccatcgctgcctctctctgggtctgcgtcct

SEQ ID NO: 463939 - DNA, 201 bp, Homo sapiens
cgtgagtacgtgtgtgcatgttgtgtgtacgtgtgctgtgtgtgtgctcgtgagtacatgtgtatgcgtgtcgtgtgtacgagtgcactgtgcatgtgctygtacgtgtgtgcgtgtcgtgtgtacgagtgcgctgtgcgtgtgcttgtgagtacatccaggtagctgttcatgtaggctcgtgagtacatgcaggtgagt

SEQ ID NO: 463940 - DNA, 201 bp, Homo sapiens
gtccggagaaaacaaatgccacgtgtggtccagagaaaacaaatgccacgtgtggcccggagaaaacaatgccacgtgtggtctggagaaggcagtgccaygtgtggtctggagaaggcgatgccacatgtctggatcctgtgaatcgaggatatgtttcatgttgcaggatagacgtgcttggggaagtctttgctgagt

SEQ ID NO: 463941 - DNA, 201 bp, Homo sapiens
cccttgcacctctcctcagatggtacggttcgggggtccttgcgtggcctgagttcacttggtggtgagctgaccaacccacgaagaggccgctggtgccmctggggcctgtcaggttcaccacccctgagctcacgaaggcctggctcgcggcatcacaggggaagggtccccgtccctgctcagccggtgctgggggtg

SEQ ID NO: 463942 - DNA, 201 bp, Homo sapiens
atttggtttctggctcaggaagagcagctgccgggtcctggaggaggggcctgggaagcgctggcaggcgtcactcctgcgacctcccacccctccctgcrtggctcctgcgagggtcaccgcgtgagtccgggggctgctgtcctcgcgcctcagacctgattctggggaccgcggtgaaggcgtggcaggcgggcatca

SEQ ID NO: 463943 - DNA, 201 bp, Homo sapiens
caagatggggcaggaggtggtgtttctgtcctggagacccagggtggcttgggtccttgggatgtgtggggacctcggggtgagggcccgttggggccggrtgggcacggcaggagagcgggggccacacacccagaggcagtgccgtgtcccggctgggagggttcctgggaagctctgctcagccccagtctcagtcat

SEQ ID NO: 463944 - DNA, 201 bp, Homo sapiens
tggtggggtgcacggaagctgggttcatgatgccagaatcctggtgacagaggtgtgtgtgccaagcactgggcgtggcccatggagggcgcctcttatgwcttcggggccttcatctggtggtgtctatgcctcttggtggccccgaggcacagacgttgccggctggcctcacaggtgaggaaacgggtgtggggtgct

SEQ ID NO: 463945 - DNA, 201 bp, Homo sapiens
ggggtgcacggaagctgggttcatgatgccagaatcctggtgacagaggtgtgtgtgccaagcactgggcgtggcccatggagggcgcctcttatgtcttyggggccttcatctggtggtgtctatgcctcttggtggccccgaggcacagacgttgccggctggcctcacaggtgaggaaacgggtgtggggtgctggcc

SEQ ID NO: 463946 - DNA, 201 bp, Homo sapiens
cagcgcgcaccccggcggggctttggctgtgacgcggtcggggcgcggggctgggctgtggccccgcggcgccgcctcctccctggtccctcgaaatcgtkgcatctcacttctgagaacgaaatctcgcttcagtcactctgccgaaggcgctgacggcatcgcggccggaacctctgggcccggcccctcccagggccg

SEQ ID NO: 463947 - DNA, 201 bp, Homo sapiens
gtccttgcgtggcctgagttcacttggtggtgagctgaccaacccacgaagaggccgctggtgcccctggggcctgtcaggttcaccacccctgagctcaygaaggcctggctcgcggcatcacaggggaagggtccccgtccctgctcagccggtgctgggggtgggctgcacgcctgggcgaggggagttgaggcttct

SEQ ID NO: 463948 - DNA, 201 bp, Homo sapiens
gccctccgtggtgcccggggattggattggagccaggacctcacttcctcctctgcccctgcccctgcccctcccagcacctggcccacaccctgcagccygccccatggtctggccctgggtggcgatggcgtccaggtggggtcccctcattggcctggctccgtgctgcctctggctcctgggggcagtccttctgat

SEQ ID NO: 463949 - DNA, 201 bp, Homo sapiens
tggcctgagttcacttggtggtgagctgaccaacccacgaagaggccgctggtgcccctggggcctgtcaggttcaccacccctgagctcacgaaggcctrgctcgcggcatcacaggggaagggtccccgtccctgctcagccggtgctgggggtgggctgcacgcctgggcgaggggagttgaggcttctgctcggtgc

SEQ ID NO: 463950 - DNA, 201 bp, Homo sapiens
tgtgctgtgtgtgtgctcgtgagtacatgtgtatgcgtgtcgtgtgtacgagtgcactgtgcatgtgcttgtacgtgtgtgcgtgtcgtgtgtacgagtgygctgtgcgtgtgcttgtgagtacatccaggtagctgttcatgtaggctcgtgagtacatgcaggtgagtgcgccctcacacccgctgtgtgcacacgtgt

SEQ ID NO: 463951 - DNA, 201 bp, Homo sapiens
cccgttggtccggcctgttggcgatgtgcttggggcaggaggccttgcccgtgcccgccccccaactctgattgtgtctgtctttccttggtgccactttrtttgggtcttttctgcccaggacatggcccacctggacctagagctctgtgacatttctgtgaagcctccgtctacctttgggactcagcagaggtgtgt

SEQ ID NO: 463952 - DNA, 201 bp, Homo sapiens
ctgtcgttcctccaccccgagcacagccggggaatgctcaggttcatggtgaaggagatcgtccgggacctgggtgaggctgggtccagcctggccggcaygccaggacccaggaccgactggcaggggccgggcatcgtcgggaggtcggggcaggtcctgcgggagccccagcctgggtgtgggctgacccattcccgt

SEQ ID NO: 463953 - DNA, 201 bp, Homo sapiens
gtgtggtgtccccttgcacctctcctcagatggtacggttcgggggtccttgcgtggcctgagttcacttggtggtgagctgaccaacccacgaagaggcygctggtgcccctggggcctgtcaggttcaccacccctgagctcacgaaggcctggctcgcggcatcacaggggaagggtccccgtccctgctcagccggt

SEQ ID NO: 463954 - DNA, 201 bp, Homo sapiens
cacgtgaaggaaacggaaaagggcagtgagtccttcgccccgcggcgccgtgcgcacgtcagccttcagggtgattccgctcctccagaggggcaggcgcrggtgtggggggtggggcccaggcccatcctgaggggtcccaggcatgaggggctctgagctgtgtcctggggtggtctgggccatggggaggttctggat

SEQ ID NO: 463955 - DNA, 201 bp, Homo sapiens
accctgcagcccgccccatggtctggccctgggtggcgatggcgtccaggtggggtcccctcattggcctggctccgtgctgcctctggctcctgggggcrgtccttctgatggacgcgtctgcacggcctgccaaccactcgtccactcgagagagagtagccaacagggaggagaatgagatcctgcccccagaccacc

SEQ ID NO: 463956 - DNA, 201 bp, Homo sapiens
agtcacatctgtgttctgccagccctgttcacgtgtgtgtgctgtgtacacgtgggtaccggcctgtgcacttgcgtgtgtgcgtgccagctccatgtacktgcaccgccctgcagccgtgtcttcaggcacctgagtttggatgagtgactccttgccgacatcttgactggaatcctgcgccatgtggtttctttccac

SEQ ID NO: 463957 - DNA, 201 bp, Homo sapiens
agtctagtatgtcagatagctaaaaccatattttatcatagtttttctttttttggtgtgtgagatttgaaataaataagaatgttaattgttttcctaastctggtaggataaaggatcatagacttaattttccaaaacataagcttcattatattacttattctacgttatctatcaggatttaaaataaaaagtcat

SEQ ID NO: 463958 - DNA, 201 bp, Homo sapiens
agatgtgtagtaactaaaaaataataataataataataataataataataattactaagtggctctttctttcttgggatctgtgtagggccaaggcctartgagtcagattctgatgatctggatgatgaagactttgaatgtttagatagtgatgatgacttggactttgaaacacacgaacctggcgaagaggcttcc

SEQ ID NO: 463959 - DNA, 201 bp, Homo sapiens
aggtgcagtggcgcgatcctggcttactgcaagctccacctcctgggttcacgccattcatctgcctcagcctcctgagtacctgggacaacaggtacccrccaccacgcccagctaatttttttttttttttttttttttagtagagacggggtttcactgtgttagccaggatggtctcgatctcctgacctcgtgatc

SEQ ID NO: 463960 - DNA, 201 bp, Homo sapiens
tccctaatacctataccaaaataaattccaattggatcaaatatttgaacataaaaattgaaactatacaatttgaaaaaaaaccaagaaccttttataayttgaataggaaaggcctttctatgcatgacttgaaaccagaagctataaagggaagactgatgaatttgattatgcaaaaattaagcatttctgcacggg

SEQ ID NO: 463961 - DNA, 201 bp, Homo sapiens
tttttctgactgcaagaaatcccttgtgactgcctcaccactctgggccagtttccttgaaagtctgaaaaagaatgattactttaaggtaggacttgcartatatttgcttttaagtattcaatccagggaaaatcaagccagcgacttaaagtcctatagtccatatttaaatgtatgacataattatggaagctagac

SEQ ID NO: 463962 - DNA, 201 bp, Homo sapiens
aactcgtcatttatattagatatatctcctaatgctgtccctcccccctccccccaccccacaacaggccccggtgtgtgatgttcgccttcctgtgtccrtgtgttctcattgttcaattccccacctatgagtgagaacatgcggtgtttggttttttgtccttgcaatagtttgctgagagtgatggtttccagcttc

SEQ ID NO: 463963 - DNA, 201 bp, Homo sapiens
ggtagtgtcttccaagaggtatagaaaggttcaaacttggaaccttcactttgaataatctttttaaaggaaatatccaagaagtggaaaagtcccgaagmatatgatgatgataaagatggcacagcaatacgaaaagtactaatgatattatagtatatatatggtatttttttttttttgagatggagttttgctctt

SEQ ID NO: 463964 - DNA, 201 bp, Homo sapiens
caagactccgtctcaaaaaaaaaacaaaacaaaaaaaactgttacttgtgtatcaaatatatcattattagtgttgatgctcttgaacctgatgaaagatmtaaatttatatttggtattctctctttaagaaagcagggataagggaagatatgttcttgtttattttttaagctttagttcttaaaagaacaggcttta

SEQ ID NO: 463965 - DNA, 201 bp, Homo sapiens
ggtgtatatgtgccacattttcttaatccagtctatcattgttggacatttgggttggttccaagtctttgctattgtgaatagtgccacagtgaacataygtgtgcatgtgtctttatagcagcatgatttataatcctttgggcatatacccagtaatgggatggctgggtcaaatggtatttctagttctagatccct

SEQ ID NO: 463966 - DNA, 201 bp, Homo sapiens
ggatttttaaaacttaaactacaacttttcttgctgtgcctccttagaaattctatctttggtagctttcctaagaatggcaccactttagaaaagtttcraagagttgtatttagaataaattaattgtctttgtcctttaatattgcagagaaccttctgaggctccaatcacttttgatgcagattcttttcttaatt

SEQ ID NO: 463967 - DNA, 201 bp, Homo sapiens
aagccaacaaaaaattaaccagcacatttagcttctcttttttctttttaaataaatattgaatatgattctgttcatttctagtttagattactcatttrgtaaaaatgtttcttcattacaagttttacagattgacttctccatgagccccaaatgtggccctcttggcacaagtctttgtgatctcagctgtgggtt

SEQ ID NO: 463968 - DNA, 201 bp, Homo sapiens
ggtctcggactcctgacctcaggtgatccatccgccttggcctcccaaagtgctgggattacaggcgtgagccaccgtgcccagctattactgttgttgttattgttgttgtatagggtcttgctttgtcacgcaagccagtgttgtggtaggatcatagctcactgcagcctcgatctcctaggctcaagtgatcctcct

SEQ ID NO: 463969 - DNA, 201 bp, Homo sapiens
gtctcggactcctgacctcaggtgatccatccgccttggcctcccaaagtgctgggattacaggcgtgagccaccgtgcccagctattactgttgttgttattgttgttgtatagggtcttgctttgtcacgcaagccagtgttgtggtaggatcatagctcactgcagcctcgatctcctaggctcaagtgatcctcctg

SEQ ID NO: 463970 - DNA, 201 bp, Homo sapiens
cattctaattattttgagatgtgtagtaactaaaaaataataataataataataataataataataattactaagtggctctttctttcttgggatctgtrtagggccaaggcctaatgagtcagattctgatgatctggatgatgaagactttgaatgtttagatagtgatgatgacttggactttgaaacacacgaacc

SEQ ID NO: 463971 - DNA, 201 bp, Homo sapiens
cattcatatgtacctgcagtttgccagtgcccactgtgaaaattgaaatgtaccgtttgcaggtatttttctgccatggggaattgtgtattatccctgcwccaagaaaatctggagcagaatcttggttacccaccacacccccaacaattccacaagcattgaatataatcacagcacattcagaaaaaatacttgctt

SEQ ID NO: 463972 - DNA, 201 bp, Homo sapiens
tcttttcttaattattttgataagattttaggtaagtagtggtgtgatgttgactttcattttgaaactgttagtagtatggctgttgctagagcattggkttatgagatatctcagaagccaaaatgtttgctttctcttcctggtttgagttgctttcaaccatgaattactacccatgaataattttgtagaggctgc

SEQ ID NO: 463973 - DNA, 201 bp, Homo sapiens
ctcaccagatcagctggaccagctgctgcaggaagctgttggcaaaaaagaatccgagtctgtttccaaggaggagaaggagcagaactatgacttaactsaagtctcagagagcatgaaagctttcatatccaaagtctcaacccacaagggagcagagctgcctcggtaatttgtgttaaagtataaatatataaatag

SEQ ID NO: 463974 - DNA, 201 bp, Homo sapiens
tttgcctactgcgtatatgcaatgacactgttttccttggtatgttcccagctatgccctgcaatgtttgggttctcaggacctgctcctctgctaggcaygatggctttggcttgccagctggcctttgaagtttaagcagcagacatatacccttaagtagtctggtggggaactggtcacattacagttctatcattt

SEQ ID NO: 463975 - DNA, 201 bp, Homo sapiens
tttcttctttttcagatgaccagtggttagatctctcaccagatcagctggaccagctgctgcaggaagctgttggcaaaaaagaatccgagtctgtttcyaaggaggagaaggagcagaactatgacttaactgaagtctcagagagcatgaaagctttcatatccaaagtctcaacccacaagggagcagagctgcctc

SEQ ID NO: 463976 - DNA, 201 bp, Homo sapiens
taactgtacattgattttcgtgtgttgaaccatccttgcatcccaggaataaatctcgcttggtcgtggtgaataatctatttaatgtgttgttgaattcwgattgctgatattttgttaaggatttctgcattgatactcatcagggatattgatctacagctttctcatattgtctttgtctggctttggtattagggt

SEQ ID NO: 463977 - DNA, 201 bp, Homo sapiens
gcagtattatgctttcttctttttcagatgaccagtggttagatctctcaccagatcagctggaccagctgctgcaggaagctgttggcaaaaaagaatcygagtctgtttccaaggaggagaaggagcagaactatgacttaactgaagtctcagagagcatgaaagctttcatatccaaagtctcaacccacaagggag

SEQ ID NO: 463978 - DNA, 201 bp, Homo sapiens
ttttaaatatacaaaatactatacaggctgggcgcagtggctcacacctgtaatgccagcattttgggaggccaaggcgggtggatcacgaggtcaggagytcaagaccagcctggccaatatggtgaaaccctgtctctactaaaaattcaaaaattagctgggcgtgttggcacgcccctgtaatcccagctgctcggg

SEQ ID NO: 463979 - DNA, 201 bp, Homo sapiens
aaagaaagataatggaaggcttcagggaggaggtatttgagttaagtcttaaagaatgaggattttttttctttttatggagtctcttttttttttgagamggagtcttgctctgtgcccaggttggaggtgcagtggcgcgatcctggcttactgcaagctccacctcctgggttcacgccattcatctgcctcagcctc

SEQ ID NO: 463980 - DNA, 201 bp, Homo sapiens
ctggcttactgcaagctccacctcctgggttcacgccattcatctgcctcagcctcctgagtacctgggacaacaggtacccaccaccacgcccagctaatttttttttttttttttttttttagtagagacggggtttcactgtgttagccaggatggtctcgatctcctgacctcgtgatccgcccgccttggcctccc

SEQ ID NO: 463981 - DNA, 201 bp, Homo sapiens
tgggttcacgccattcatctgcctcagcctcctgagtacctgggacaacaggtacccaccaccacgcccagctaatttttttttttttttttttttttagkagagacggggtttcactgtgttagccaggatggtctcgatctcctgacctcgtgatccgcccgccttggcctcccaaagtgctgggattacaggcgtgag

SEQ ID NO: 463982 - DNA, 201 bp, Homo sapiens
tgctgcaggaagctgttggcaaaaaagaatccgagtctgtttccaaggaggagaaggagcagaactatgacttaactgaagtctcagagagcatgaaagcyttcatatccaaagtctcaacccacaagggagcagagctgcctcggtaatttgtgttaaagtataaatatataaatagctagaacccaaatgttgaagtca

SEQ ID NO: 463983 - DNA, 201 bp, Homo sapiens
aattgtgcaaccatccctaccatctaattctagaatattagaaaccccatactcactaatagtctctcattcccttctactcccagcccctagaaaccacwagtctactttctgtctctatggatttgcctattttggatatttcatacctgatactgtacttaattgttttaattaattaattggtttgatatttaatat

SEQ ID NO: 463984 - DNA, 201 bp, Homo sapiens
ttccctctatgaataaggaacctgtatcccagactaccgataacaattcagatgaggaagattctggtacgggagaatctgttatggcaccagtagatgtwgacctgaacctggtttcaaatatattggaatcctatagctcccaagctggactggcaggacctgcttccaatcttttacaaagcatgggagtgcagctgc

SEQ ID NO: 463985 - DNA, 201 bp, Homo sapiens
ttggttacccaccacacccccaacaattccacaagcattgaatataatcacagcacattcagaaaaaatacttgcttcagaatctatacgagctgctgtgrataggcgcatcagagggtaagaaaaatatcactttcattgctaattaaggaaccttttggtttcgtgtagttcagtctttctttgatttttgtttgtttt

SEQ ID NO: 463986 - DNA, 201 bp, Homo sapiens
caatatacccttggagtaattctaaatatttaaatttctcccttactgctattcatcctcagatcaaaatttcaagttgacaaatttggatttgaaaactsattcactttttcaatttttttaatgaggcataacatgcatatggttaagtgcacaaatcttaagtgtacagtcagtgaatttttgcatgtatgtatgtac

SEQ ID NO: 463987 - DNA, 201 bp, Homo sapiens
tgggagaccgagatgggtgaatcacctgaggtcaggagtttgagaccaacctggccaacatggtgaaaccccatctctactacaaatacaaaaaattagcyggatgaggtggtgggcacctgtaatcccagctactcaaattaaaaataaataaatagccaggcacagtggctaatgcctgtaatcccagctacttgctga

SEQ ID NO: 463988 - DNA, 201 bp, Homo sapiens
aaatttctcccttactgctattcatcctcagatcaaaatttcaagttgacaaatttggatttgaaaactcattcactttttcaatttttttaatgaggcayaacatgcatatggttaagtgcacaaatcttaagtgtacagtcagtgaatttttgcatgtatgtatgtacctgaagcaagatatagaacttatttacttgt

SEQ ID NO: 463989 - DNA, 201 bp, Homo sapiens
tcacagcacattcagaaaaaatacttgcttcagaatctatacgagctgctgtgaataggcgcatcagagggtaagaaaaatatcactttcattgctaattmaggaaccttttggtttcgtgtagttcagtctttctttgatttttgtttgttttccttaaagctctgttggagttgatcagtctttctttgactataaaat

SEQ ID NO: 463990 - DNA, 201 bp, Homo sapiens
  misc_feature (1)...(201): n = A,T,C or G
gacacagtggagtactgcctgttcctgataccagatgagtcaagggactcagataaacataaagagattcttcagaagtacattgagagaataatcactcngtttgcacctatgctggtcccctacatctggcagaatcagcctttcaatcttaaatataaacctgggaaaggtaaggctcttttacttgtttggattagt

SEQ ID NO: 463991 - DNA, 201 bp, Homo sapiens
aatctcagctactttggaggctgaggcaaggagaatcgcttgaacccgggaggcggaggttgcagtgagctgagatcacgccactgcactccagcctgggygacagtaggaaactccatctcaaaaaaaaaaaaaaaaaaaaaagtagaaacctaatggagcacaaacaaggtgctcaggttttttctgttgttctgggtc

SEQ ID NO: 463992 - DNA, 201 bp, Homo sapiens
aaactcctgacctccagtgatctgcctgtctcggcctcccaaagtgataggattacatgcatgaaccactgtgcccggcctaactaaattttagaaaacartgttcatagaaccatctaaaagagttcagatgttacttctgcattgttctatgtggtttatattttggaactttaaacatagttttcaaagaagaatgga

SEQ ID NO: 463993 - DNA, 201 bp, Homo sapiens
accatttgtagaagggatttttgtgaagtagactgactgtgtgtattagtctttttctgtgggtaacattctaattattttgagatgtgtagtaactaaawaataataataataataataataataataataattactaagtggctctttctttcttgggatctgtgtagggccaaggcctaatgagtcagattctgatga

SEQ ID NO: 463994 - DNA, 201 bp, Homo sapiens
gtttcaaatatattggaatcctatagctcccaagctggactggcaggacctgcttccaatcttttacaaagcatgggagtgcagctgcctgacaacaccgrtcacagaccaacaagtaagccaacaaaaaattaaccagcacatttagcttctcttttttctttttaaataaatattgaatatgattctgttcatttctag

SEQ ID NO: 463995 - DNA, 201 bp, Homo sapiens
agctttcctaagaatggcaccactttagaaaagtttcaaagagttgtatttagaataaattaattgtctttgtcctttaatattgcagagaaccttctgargctccaatcacttttgatgcagattcttttcttaattattttgataagattttaggtaagtagtggtgtgatgttgactttcattttgaaactgttagta

SEQ ID NO: 463996 - DNA, 201 bp, Homo sapiens
ccatgcaacctaatgatacattagcccataattttcttttccctctatgaataaggaacctgtatcccagactaccgataacaattcagatgaggaagatkctggtacgggagaatctgttatggcaccagtagatgtagacctgaacctggtttcaaatatattggaatcctatagctcccaagctggactggcaggacc

SEQ ID NO: 463997 - DNA, 201 bp, Homo sapiens
taatacctcacaaacagaggcagccaaaacaaaaatggacaaatgggagcacatcaagttaaaaagcttctgcacagcaaaggaaacaatcaacaaagtgragagagaacccacagaatgggagaaaatatttgcaaactacccatctgacaagggattaataaccaaaatatataaggagttcaaacaactctctaggaa

SEQ ID NO: 463998 - DNA, 201 bp, Homo sapiens
gatcatttggttgtcttgttttaccctgagctcctcaggagtaggcttcttcttcaggattgcaacccctgctccccagtacttagagcaatcagtcaatkaatgtgtattcagttgaatgattatgtgcattttatttgcagtaacaaatttatctggttacatggttgcttttctcttgtttttaggaggtgttcctgc

SEQ ID NO: 463999 - DNA, 201 bp, Homo sapiens
gtgcagtcactatggagaacagttttggagattcctcaagaaactaaaaatagagctactatatgatccagcagtcccactgttgggtatttacccaaaaraaaggaaatcagtatatcaaagagatatctgcactcccatgtttatcgcagcactattctcagtagccaagatttggaagcaacctaagtgtccatcaac

SEQ ID NO: 464000 - DNA, 201 bp, Homo sapiens
ctgcacactcctgttctagagttcattatcttgttttgagatcatttggttgtcttgttttaccctgagctcctcaggagtaggcttcttcttcaggattrcaacccctgctccccagtacttagagcaatcagtcaatgaatgtgtattcagttgaatgattatgtgcattttatttgcagtaacaaatttatctggtta

SEQ ID NO: 464001 - DNA, 201 bp, Homo sapiens
agagttcagatgttacttctgcattgttctatgtggtttatattttggaactttaaacatagttttcaaagaagaatggaagaaaccatgaagcttgctamgatggaagacacagtggagtactgcctgttcctgataccagatgagtcaagggactcagataaacataaagagattcttcagaagtacattgagagaata

SEQ ID NO: 464002 - DNA, 201 bp, Homo sapiens
acgcttttccacaacattaaatgcacacatatctgccagcattaccatttgtagaagggatttttgtgaagtagactgactgtgtgtattagtctttttcygtgggtaacattctaattattttgagatgtgtagtaactaaaaaataataataataataataataataataataattactaagtggctctttctttcttg

SEQ ID NO: 464003 - DNA, 201 bp, Homo sapiens
ctatctttggtagctttcctaagaatggcaccactttagaaaagtttcaaagagttgtatttagaataaattaattgtctttgtcctttaatattgcagaraaccttctgaggctccaatcacttttgatgcagattcttttcttaattattttgataagattttaggtaagtagtggtgtgatgttgactttcattttga

SEQ ID NO: 464004 - DNA, 201 bp, Homo sapiens
tggtctcggactcctgacctcaggtgatccatccgccttggcctcccaaagtgctgggattacaggcgtgagccaccgtgcccagctattactgttgttgttattgttgttgtatagggtcttgctttgtcacgcaagccagtgttgtggtaggatcatagctcactgcagcctcgatctcctaggctcaagtgatcctcc

SEQ ID NO: 464005 - DNA, 201 bp, Homo sapiens
tggcaagtagatgagtttattaggacttacagacaagacactcctgggcagcatcaggacagctctagaaatccaccccacctcccatatttaagttgctwgtaagctaattttttggctctttgcctactgcgtatatgcaatgacactgttttccttggtatgttcccagctatgccctgcaatgtttgggttctcagg

SEQ ID NO: 464006 - DNA, 201 bp, Homo sapiens
gagcctagactggggaaagagcactagactccaagtcaagcccctgctgcttggtcgcttctttttctgtactctgggttttctcatatgtacagtgaggyattagcctgagtgatcatagagtcccttccagttctgacaccaaattctgcatgatgacgtgtgtttggcgttatggggtggatgggtaaaattactgtc

SEQ ID NO: 464007 - DNA, 201 bp, Homo sapiens
actttagttactacactatgccataatgtatctaagtatctatactaaatagtttcaggcatctggctttaatcatggttccttttgctgttactcaggaytccttattttggtgatgtgtttggtaggctgccttgtttcatatagccattttggtgaggatctgagtggctctgcccagcttataaagataaataattg

SEQ ID NO: 464008 - DNA, 201 bp, Homo sapiens
cttgggaataagtttatatttttcataaaattcaaaaagtgttataattgtccaaatgcccatgtatccagtcatctagttctagagtgtggctcaatggraaaaaagtaatgtgttataataagatacgggaaaaaaggaacttagtaacaaaaattctacctatctcatctaggctcatggatttgagatcttatgctc

SEQ ID NO: 464009 - DNA, 201 bp, Homo sapiens
accccgtctctactaaaaatacaaaaattagctgggcatggtggtgggcacctgtaatcccagctactcaggaggccaaggcaggagaatcgcttgaaccyggggtgtggaggttgcagtgagccaagatcacaccacttcactccagcctgggtgtaagagtgaaactccatctcagaaaaaaaaaaaaaaagaaagaaa

SEQ ID NO: 464010 - DNA, 201 bp, Homo sapiens
gatctgtgtgaacctcaaaaactcctaccgctgtgagtgtggggttggccgtgtgctaagaagtgatggcaagacttgtgaaggtgagaatgggcaaaaasggacccaaatcaagagcccagaggaagccactggcttattctctgatgttcaggaaactgccttagtgtccgaagagagcaaccgtttggctgtgcaaag

SEQ ID NO: 464011 - DNA, 201 bp, Homo sapiens
cataatttaatttaaaatctttgtgggcagttatggttgaaaagccagtgtggtgattggtcaaatggcaagggatatggacaggaaattcacagaaaagrcaaatagtgaaatgttcactgaaaatagtacttaagtgctgatgaaaacaattataagacaccattttatacatattaaatttatgaaaattataaaata

SEQ ID NO: 464012 - DNA, 201 bp, Homo sapiens
accttctgcataccagaaaaccactgtggaacccacgcacctgtctggctcaatggcagccaccccctagaaggcgacggcattgtgcaacgccaggcttktgccagcttcaatgggaactgctgtctctggaacaccacggtggaagtcaaggcttgccctggaggctactatgtgtatcgtctgaccaagcccagcgtc

SEQ ID NO: 464013 - DNA, 201 bp, Homo sapiens
gagggcagtgggaaaaaaaaacaaaacaaaacttcatccttaggcaaccaaatctctaatgtgttttgaggtagatagaatgttaaggtgagaggaggggraaaaaaaactgtagaaacaaacagacaatctctttcctctcctcaccctggcctggctcaggtggtgaatgacaagattgtggccagcaacctcgtgaca

SEQ ID NO: 464014 - DNA, 201 bp, Homo sapiens
atgtcttttttcaaatttcctcaaaggataggactcactttccagctgtagaaaaatgttccctttctcctgctttgtggtgtccaaactgttggaagaaygaatgagtcacgctgactcgaagacttgacatcttgaaggctgacagctgtggtgtcactcaaaaccaggaaggaatcacttcttcctcataactcttcc

SEQ ID NO: 464015 - DNA, 201 bp, Homo sapiens
tatgaaagagatatttgggagaatgaatcaacaggacattgcttgcaggaagtaacttgacctgaccctagattagcagcaggtactttttcagcctctgyagaaacagaatagaatgatactccctttcatagggcacactgaattattcacatttctaagccctcacaccttcacctccagactgcactctagacattg

SEQ ID NO: 464016 - DNA, 201 bp, Homo sapiens
gccactcttgccttggatctgagaaaggctaccagtgtgaatgtccccggggcctggtgctgtctgaggataaccacacttgccaaggtagtacatggggyagggggacttgtctctactctgattacacttcttcctctcccaaagctctttgtcttcctcccccaagtgtgtcagggttctcatcttttagaacaatgg

SEQ ID NO: 464017 - DNA, 201 bp, Homo sapiens
gtggcttatgcctgtagtgccagctacttgggaggccaaggtgagaggattgcttgagcccaggggttcgaggccagcctgggcaacatagggataccacsccccccgaccccccgcaccatctctaaaaagaatgaaagagtgtcttctggtctcctgccctcatgaagataatctttattcttccatagatttttatga

SEQ ID NO: 464018 - DNA, 201 bp, Homo sapiens
ggcttggaaagcttggtggagagctgctttgccacccccacctccaagatcgacgaggtcctgaaatactacctcatccgggatgggtaatgctgctgcargaatggtctcatcacccctagttcacatccggcctctaagttcacagcacacccagtcatttactaaaactgcatggtaccactgtcagcaatttattag

SEQ ID NO: 464019 - DNA, 201 bp, Homo sapiens
gatggtgaatgtagtacccaataggtagtttttcaatcctcaccctgctccctcctcctaccttttggagttcccagtgtcttttttttttttttttttttgagataaggtctcactctgtcacccaggctagagtacagtggtaccatcttggctcactgtagcttccacctgcctgggctaaggtgatcctcccacctc

SEQ ID NO: 464020 - DNA, 201 bp, Homo sapiens
acaatttactttataagtttgtatttatttagcaacttctcaggaactcattaaagaaagtgaaattcaccaatacaaataggtaggtgtacccacgactsaaaaggaacttcattttcccattgtttttccctgaagagaaggtaattggcaagcaattaggtaccttccactcagcaaagggcagatgaaccaataacg

SEQ ID NO: 464021 - DNA, 201 bp, Homo sapiens
tggtggatttccaacttttgagtatggagaacccctttttaagatagatagatgatagatagatagatagatagatagatagatagatagatagatagatagatagatgatagatagataatcagacatccatgtgattggattgtgtttagtgtccactgatttttttaagtgatatacaatgggaagaagctactttat

SEQ ID NO: 464022 - DNA, 201 bp, Homo sapiens
gctcctttcatgacttaaaacaatttactttataagtttgtatttatttagcaacttctcaggaactcattaaagaaagtgaaattcaccaatacaaatargtaggtgtacccacgactcaaaaggaacttcattttcccattgtttttccctgaagagaaggtaattggcaagcaattaggtaccttccactcagcaaag

SEQ ID NO: 464023 - DNA, 201 bp, Homo sapiens
taaatggtggatttccaacttttgagtatggagaacccctttttaagatagatagatgatagatagatagatagatagatagatagatagatagatagatagatagatagatgatagatagataatcagacatccatgtgattggattgtgtttagtgtccactgatttttttaagtgatatacaatgggaagaagctact

SEQ ID NO: 464024 - DNA, 201 bp, Homo sapiens
gtaataataatcataaaatcgtcatattcttttatctaaaaattccaattctgacagtttcttaaaaacaaaacaaaacagaggcaggagaattgcctgargccaggagtttgagaccagcctgggcaacatagcaagacctctactctacaaaaaattttaaaattagctgggcatagtggcacacacctgtagtcctag

SEQ ID NO: 464025 - DNA, 201 bp, Homo sapiens
aaaattttaatatgactactaaaaaattttaaatatgtaatttgctttatatttctgttgaacagcactggtctggtctagaattatctaaggacttactyctctagcttcactgatacaattttggttgttctgagtagcaagaaagatgagtcagattgtctgtaggaaatccagagttcttgaattttatattatgtt

SEQ ID NO: 464026 - DNA, 201 bp, Homo sapiens
tgctgccataagttaagtataatccctgatgcaaagtgccagaattcttggggtagagggttacgagattattcccttttctgttggtttctactgcagaygttgaaggatgccacaataacaatggtggctgcagccactcttgccttggatctgagaaaggctaccagtgtgaatgtccccggggcctggtgctgtctg

SEQ ID NO: 464027 - DNA, 201 bp, Homo sapiens
agaattcttggggtagagggttacgagattattcccttttctgttggtttctactgcagacgttgaaggatgccacaataacaatggtggctgcagccacycttgccttggatctgagaaaggctaccagtgtgaatgtccccggggcctggtgctgtctgaggataaccacacttgccaaggtagtacatggggcagggg

SEQ ID NO: 464028 - DNA, 201 bp, Homo sapiens
aagatgtcagcccctaatgagttctactctcatcgcactcatcccttcctgaccatagatcatttcttactctcgtataccatactgtctttgaagcttakttttatttttatttttattttaagttcaggggtacatgtgcagcatgtgcaggtttgttacatatgtaaatgtgtgtcatgggggttggttatacagatt

SEQ ID NO: 464029 - DNA, 201 bp, Homo sapiens
cacatcaatacatgaaaaccatgagcaccaaaaccccctaagttctgtaaagtggttttataataactcttcaagttagatttgacattagagtaatagakctgatgttccgcatcctatccacctacctacctgcgttcacataggctaaaccatgacaaccaaaacaaggagaatatttgtacctttacatgttcctct

SEQ ID NO: 464030 - DNA, 201 bp, Homo sapiens
ctgacttttttggttttcttctgcatccacttattatcacagtagtgttttacatgattaatgggctaatcatgttctaatgaaacttacactttagaacstggattccagaatcagaaagcagattcttgctttgtgagttattttggaagtcgctgcagactgtactgttccctttgctattttaggcgtgggctttgc

SEQ ID NO: 464031 - DNA, 201 bp, Homo sapiens
gatagctcaaccgtggcatgcatgactatgatcaggcaagattgagttcaaaaaggaagactaaagcaatagactacaaggatatactatactcctgaacrtcacatcaatacatgaaaaccatgagcaccaaaaccccctaagttctgtaaagtggttttataataactcttcaagttagatttgacattagagtaatag

SEQ ID NO: 464032 - DNA, 201 bp, Homo sapiens
tttttaatatattaaatttttgtatttagatgtatactttttaatcaaattatgaattcaaatttacataatagaaaatctagaagtaatagaaataacamtaggataattaactgatcatgatttattcaattatacaactctttcaaaaatcacatcgtcttccgtatcagaaatctgaattgtatttattgctatgtt

SEQ ID NO: 464033 - DNA, 201 bp, Homo sapiens
cacatttttttggcaacaatcaataaaagaaaggactcatttctaaaagattcgctctgaagttctcctttatgcttttacctccatttttttccagaacrcagaaaagtagatagctcaaccgtggcatgcatgactatgatcaggcaagattgagttcaaaaaggaagactaaagcaatagactacaaggatatactat

SEQ ID NO: 464034 - DNA, 201 bp, Homo sapiens
cctcagacactttttgtgtgacctgcaatggtatattgatgatactgacataggtgggtaggctcattcaattttggaggagggtgtgagaatgctttacrtagtccttgtacgatgacagcagagaaagttttgttgtttaagaatggggactcatgtttccttctccccttgactactgcaatcagcactgttctgcat

SEQ ID NO: 464035 - DNA, 201 bp, Homo sapiens
ttaaaaacttgttactccaagcaacttgcccaattttaatctgaaaatttatcatgttttataatttgaattaaagttttgtccccccccccttttttttwtaaacaagtgaatacattttataatttcttttggaatgtaaatcaaatttgaataaaaatcttacacgtgaaattttgttgttgtttctaatatcattaa

SEQ ID NO: 464036 - DNA, 201 bp, Homo sapiens
cgtatcagaaatctgaattgtatttattgctatgttctgcattttgttgttggtctcagtctgttgttagcctggatggagacaaacttgttcacatacaraaatgggatggcaaagaaacaaattttgtaagagaaattaaggatggcaaaatggttatggtaagtaatgacaattctccattcttccttgtttttttct

SEQ ID NO: 464037 - DNA, 201 bp, Homo sapiens
tttaaaaacttgttactccaagcaacttgcccaattttaatctgaaaatttatcatgttttataatttgaattaaagttttgtcccccccccctttttttwataaacaagtgaatacattttataatttcttttggaatgtaaatcaaatttgaataaaaatcttacacgtgaaattttgttgttgtttctaatatcatta

SEQ ID NO: 464038 - DNA, 201 bp, Homo sapiens
ttagcctggatggagacaaacttgttcacatacagaaatgggatggcaaagaaacaaattttgtaagagaaattaaggatggcaaaatggttatggtaagyaatgacaattctccattcttccttgtttttttctcctctccgcacacctctcacctccttccttcttcttccctcctccttccattcttcctccttcctt

SEQ ID NO: 464039 - DNA, 201 bp, Homo sapiens
tttgccactaggcaggtgggaaatgtgaccaaaccaacggtaattatcagtcaagaaggagacaaagtggtcatcaggactctcagcacattcaagaacayggagattagtttccagctgggagaagagtttgatgaaaccactgcagatgatagaaactgtaaggtgagaaactgcttcttcttcagagtggggatgggg

SEQ ID NO: 464040 - DNA, 201 bp, Homo sapiens
agattagtttccagctgggagaagagtttgatgaaaccactgcagatgatagaaactgtaaggtgagaaactgcttcttcttcagagtggggatggggagrggggaataaagataaagatttccaatgcatgttttttttaagatgttggaaagtgtagaatattttcagtatttcaatccaaggagaaatacaccaaagt

SEQ ID NO: 464041 - DNA, 201 bp, Homo sapiens
tatttgctcacatttttttggcaacaatcaataaaagaaaggactcatttctaaaagattcgctctgaagttctcctttatgcttttacctccattttttyccagaacacagaaaagtagatagctcaaccgtggcatgcatgactatgatcaggcaagattgagttcaaaaaggaagactaaagcaatagactacaagga

SEQ ID NO: 464042 - DNA, 201 bp, Homo sapiens
tccacttattatcacagtagtgttttacatgattaatgggctaatcatgttctaatgaaacttacactttagaacctggattccagaatcagaaagcagaktcttgctttgtgagttattttggaagtcgctgcagactgtactgttccctttgctattttaggcgtgggctttgccactaggcaggtgggaaatgtgacc

SEQ ID NO: 464043 - DNA, 201 bp, Homo sapiens
taccacaaacttggtggcttaaaacaacagaaatgaattttctcagttctgaaagctggacgcctgagatcaaggcgaccctagtgttgccgtccttctgygggccccctcccttgcttcttcctacttcccggatggctcctggcaatcattgaggttgttgggcttacagttgttattactctgatccatttctgactc

SEQ ID NO: 464044 - DNA, 201 bp, Homo sapiens
acaacaaagtaccacaaacttggtggcttaaaacaacagaaatgaattttctcagttctgaaagctggacgcctgagatcaaggcgaccctagtgttgccrtccttctgtgggccccctcccttgcttcttcctacttcccggatggctcctggcaatcattgaggttgttgggcttacagttgttattactctgatccat

SEQ ID NO: 464045 - DNA, 201 bp, Homo sapiens
gtgtgagaatgctttacatagtccttgtacgatgacagcagagaaagttttgttgtttaagaatggggactcatgtttccttctccccttgactactgcartcagcactgttctgcattgagatattcatgtttctgtggagatggaggtggggagcagagggacagttttcctttcatgttaaaggatatttgctcacat

SEQ ID NO: 464046 - DNA, 201 bp, Homo sapiens
ctggtctcgaactcctgggctcaagcacctcacctacctcggcctcccagtgttgggactataggagtgaaccactttgcctggcctgaatggttggtctytaaaaaaaattactgattttagatgttctttatgtatgagagtcaagctctttagtgatgtgaattataaataactttttgtagagtttgtcatttatat

SEQ ID NO: 464047 - DNA, 201 bp, Homo sapiens
ttatctgaagaccattgagtcatttgcatcaaacagtgagatccactttttttttttttccccggagacagaggcttactccgttacccaggttagagtgyagtggtgtgatcctgactcgctgcagccttgacctcctgggctcaacaattctcccacctcagcctcctgagtagctcacactacaggtggagaccacca

SEQ ID NO: 464048 - DNA, 201 bp, Homo sapiens
gttagtggttttcctgttgagaatctctatgtgtaatgagagatttgctgttgagattgtgttatacatgtgtaaagtatgaatgcagacaaaaggttgargattactagtgtaggaatgaagacctgctccatctgtaatcttgttttgcttgctcttccttgcccttctctaccacggttggtcattctcactgccaag

SEQ ID NO: 464049 - DNA, 201 bp, Homo sapiens
gtgtgatacatttaaggaacattaaggccatcagggctggagtggtaggagaggaggtcagagagggtcacaaagggccagtacaattgtagggccttatmggacatggtaaggacttgagtaaaatctgaatgtgttaggaaccctttgaagggtgttgagtgaagtgatgtgataaacattttcaaaaatgtttgactg

SEQ ID NO: 464050 - DNA, 201 bp, Homo sapiens
tcttggctaactgcaacctctgcctcccgggttcaagcagttctcctgcctcagcctcctgagtagctggaactacaggtgcgcgccaccacgcccagctwatttttgtatttttagtagacagggtttcaccatgttggccaggctggtcttgatctcttgagctcgtgatttgcctgcctcggcctcccaaagtgctgg

SEQ ID NO: 464051 - DNA, 201 bp, Homo sapiens
taaaaaaagctgaacaagcctgaacacggaggagccactattgctgtcaaagttaagtgaagcagcttggcttatgtctatttcagaataaaaaaaaaaaattcaacttaggcatgcacggtgggtcatgcccgtaatcctagcactttgggcgtttgaggctggcagattacttgaggtcaggagtttgagaccagcctg

SEQ ID NO: 464052 - DNA, 201 bp, Homo sapiens
aatatatactaaatgtactgtatttttaaaagtctaaatttataaagaagaagtaggattaactgtagctttttgttgtagttctgaagtaaattcttctttgaagcctgtgcttctttggtaaggaatgagaaatcttgacccactaatattgctttcttaaattaattggcaccagtaattatgccagtctaagacgtt

SEQ ID NO: 464053 - DNA, 201 bp, Homo sapiens
tggtatgttgcgttggctggtctcgaactcctaggcttgagtgatccttctgcctcagcctctctagtggctggaactgtaagtgcacaccaccatggcayattggatattatttatgaaactatttattacaaatgttagtatatgcttactcttaccttttgcatattcaattatttactctaatcgggttatctaagg

SEQ ID NO: 464054 - DNA, 201 bp, Homo sapiens
ttaatatatactaaatgtactgtatttttaaaagtctaaatttataaagaagaagtaggattaactgtagctttttgttgtagttctgaagtaaattcttctttgaagcctgtgcttctttggtaaggaatgagaaatcttgacccactaatattgctttcttaaattaattggcaccagtaattatgccagtctaagacg

SEQ ID NO: 464055 - DNA, 201 bp, Homo sapiens
gtgctggaattataggcatcagccaccgtgcccagccttatataaatatattattatttttttgagacgaagtcttgctgtgtcgcccaggctggagtgcrgtagtgcgatcttggcttactgcagcctctggctcctgggttcaagtgattctcctgcctcagcttccagagtagttgggattacaggcgtgtgccacaa

SEQ ID NO: 464056 - DNA, 201 bp, Homo sapiens
tcttgttgatgacgtctttcaaaatcatattcttgaggatatgaaacacgattaaaaacttggttggtggggattattattattatttattattattattwctttttgagatggagtctcgctctgttgcccaggttggagtgcagtggcgtgatctcggctcactgcaacctccacctcctgggtttaagtgattcttgt

SEQ ID NO: 464057 - DNA, 201 bp, Homo sapiens
attacaggcataagccaccgggcctggcctattttaattttttatgaaattcaagatatgtgaacttgagctaaaatttcccattttctatctgcattgastattttcttatctattatgtctaaggtaaatttggtgttgtctctttttaatatatactaaatgtactgtatttttaaaagtctaaatttataaagaaga

SEQ ID NO: 464058 - DNA, 201 bp, Homo sapiens
gcctcagcctcccaaagtgctggaattataggcatcagccaccgtgcccagccttatataaatatattattatttttttgagacgaagtcttgctgtgtcrcccaggctggagtgcagtagtgcgatcttggcttactgcagcctctggctcctgggttcaagtgattctcctgcctcagcttccagagtagttgggatta

SEQ ID NO: 464059 - DNA, 201 bp, Homo sapiens
taaagattgatgtttcttgttgatgacgtctttcaaaatcatattcttgaggatatgaaacacgattaaaaacttggttggtggggattattattattatwtattattattattactttttgagatggagtctcgctctgttgcccaggttggagtgcagtggcgtgatctcggctcactgcaacctccacctcctgggtt

SEQ ID NO: 464060 - DNA, 201 bp, Homo sapiens
tgatcttgtgatccgccctcctcggcctcccaaagtgctaggattacaggcataagccaccgggcctggcctattttaattttttatgaaattcaagataygtgaacttgagctaaaatttcccattttctatctgcattgactattttcttatctattatgtctaaggtaaatttggtgttgtctctttttaatatatac

SEQ ID NO: 464061 - DNA, 201 bp, Homo sapiens
attttattttttttgagacatggccacagtctgttgcccaggcaggagtgtagtggcgcaatcacagctcactgcagccttgatcttcagtgggctcatgygatcctgcttcaacctcccaggtagctgggaccagaggtgcacggcaccatgcccagctaacttttaaattttctgtggaggtctcactgtgttgcccag

SEQ ID NO: 464062 - DNA, 201 bp, Homo sapiens
aaagaatggtaataataaattaatatagacatttatttatattgagtgcttattacatgtgattttatgtgtaataggccacattggtattgtatgtatttaatatgtaatttatatttaattataatatgtaataaatgtataatataaaagtgaacatatgttttattagtatgataaactacactttacaaatgtgaa

SEQ ID NO: 464063 - DNA, 201 bp, Homo sapiens
aaaagaatggtaataataaattaatatagacatttatttatattgagtgcttattacatgtgattttatgtgtaataggccacattggtattgtatgtatttaatatgtaatttatatttaattataatatgtaataaatgtataatataaaagtgaacatatgttttattagtatgataaactacactttacaaatgtga

SEQ ID NO: 464064 - DNA, 201 bp, Homo sapiens
tgtaagagtaagtaggtaggatgaagtcagaggcttggttaatctggtgtgaatgttaacctcatatctatgatatttgaagggatttaagatccataacwtggcaaattttgtgctataaatttgtggtcctttagatgaataggtaatcttgtaaaatactaacatgttttctgtccaaattgctaaatctttgtttat

SEQ ID NO: 464065 - DNA, 201 bp, Homo sapiens
tcacttgaacctgagaggcggaggttgcagtgagctgagatcgcaccattgcactccagccagggcaacagagcaagactccgtctcaaaaaaaaaaaaawttttttttcattgtacttcattttatgtaggtcagggaacatactagatcttcagaagttaaatgagtttatcatgcatatgttattttatgttttgtta

SEQ ID NO: 464066 - DNA, 201 bp, Homo sapiens
taaaaagaatggtaataataaattaatatagacatttatttatattgagtgcttattacatgtgattttatgtgtaataggccacattggtattgtatgtatttaatatgtaatttatatttaattataatatgtaataaatgtataatataaaagtgaacatatgttttattagtatgataaactacactttacaaatgt

SEQ ID NO: 464067 - DNA, 201 bp, Homo sapiens
aatacaaaaaatagaaattagccaggcttggtagcgggcgcctgtaggacgctgaggcaggagaatggtgtgaacctgggaggcggagcttgcagtgagcygagatcacgccactgcactccagcctgggcgacagagcaagagtctgtcttaaaagaagtagaattcaggacctagtaactcatcctggggtaggaagaa

SEQ ID NO: 464068 - DNA, 201 bp, Homo sapiens
ttaattatatgacatacattaacttttttgattatagagaggcaagatataaaatacatattgtgcaacaattattaaatgaatctattcattatagaaakcaaaatatagatgattttaacatttacttaatggttggttattagatttttatcttatctatacatatttcaaagagtgaggtttcaagtttatattaat

SEQ ID NO: 464069 - DNA, 201 bp, Homo sapiens
tttaaaaagaatggtaataataaattaatatagacatttatttatattgagtgcttattacatgtgattttatgtgtaataggccacattggtattgtatgtatttaatatgtaatttatatttaattataatatgtaataaatgtataatataaaagtgaacatatgttttattagtatgataaactacactttacaaat

SEQ ID NO: 464070 - DNA, 201 bp, Homo sapiens
aacacagtgaaaccccgtctctactaaaaaaatacaaaaaatagaaattagccaggcttggtagcgggcgcctgtaggacgctgaggcaggagaatggtgygaacctgggaggcggagcttgcagtgagccgagatcacgccactgcactccagcctgggcgacagagcaagagtctgtcttaaaagaagtagaattcagg

SEQ ID NO: 464071 - DNA, 201 bp, Homo sapiens
cttagctgctcatacctattcttgaactgcttctgtcactaatttctacgtgatctgattgttaagtacaaaatcttctttaaaaagaatggtaataatamattaatatagacatttatttatattgagtgcttattacatgtgattttatgtgtaataggccacattggtattgtatgtatttaatatgtaatttatatt

SEQ ID NO: 464072 - DNA, 201 bp, Homo sapiens
agcttgaacacgggaggtggaggttacagtgagccgagatcatgccattgcactccagcctgggtgacaagagcaatactctgtctcaaaaaaaaaaaatwtttttcttgaaaactacatggaaccattgaaagttgttgagaattgcttgaacccaggagctggaggttgcggtgagctgagatcaggccactgcaaaaa

SEQ ID NO: 464073 - DNA, 201 bp, Homo sapiens
atagtacagaagtcagaggcctataaaatgaccatttgacagtggtttccattatctgtaagtttgtattaaaagagagtggcttttgagttaaccatagwttttgagtacaaatgaacataaacatttccttcatgaaaaaaagatgataattcagttatgtgttgtactcaaatgggctttaatttttctttgtgtatt

SEQ ID NO: 464074 - DNA, 201 bp, Homo sapiens
aacataaaaataaaccatcatctctgtaaaggagagataatttactttttttaagtttaagaacagctgtgtaggctgagtgcggtggctcatgcttgtartcctagcactttgggaggccaaggctggcggatcatctgaggtcaggagttcgagaccagcctggccaacatggtgaaaactcgtctctataaaaataca

SEQ ID NO: 464075 - DNA, 201 bp, Homo sapiens
agatttggttttatacttgtacagttccgtaagaataaataattcttagctactatatgactacattttatcaggtacaagtatacattttctacattttracatctctgaaatcaggatgcatttagcagtcaattgatggtatatcgtagtttaattggcagcttttttcttttttagtggtaggtgtggtttacaatt

SEQ ID NO: 464076 - DNA, 201 bp, Homo sapiens
ttaggcctagtgttggattttcctactcttaccattgtgcctgtttttagtatgcatttgatttagcacatgataatcataattcaaagataagtctgcarcagacttaacatttatatataaagtgtttttaaggcagaaggtattatttaccctctttttagaagtggagaaactgagaatcagggagtaaaaatcagt

SEQ ID NO: 464077 - DNA, 201 bp, Homo sapiens
tttttgtttttttaagacagtcttgctatgtcacccgggctattttttagtattttttgtattttttagtagagacggggtttggccacgttggccaggcyagtctcaaattcctggcctcaagtgatctgcccacctcggcctcccaaagtgctggaattaacaggtatgagccaccacgcctagccttgtgtgttctta

SEQ ID NO: 464078 - DNA, 201 bp, Homo sapiens
tggcgaatttttaacttttttcatagagacagggtctcactatgttgcctaggctgatcttgaactccccggttcaagtgatccccctgcctctgcctccyaaagtgctgggattataggcgtgagtccccgtgcctggcccatttaaaattttaattctcaaaataccctgagaggtacatagatatattcttattttac

SEQ ID NO: 464079 - DNA, 201 bp, Homo sapiens
tttgttttgtattttaatcattcttagatgcctatcaaccttcacataggtaatgaatcatctagagagagcagccaaatttcttttcactttttttttcyagtaatgagctcattcatctttattctaatatctttgaaactagaattttctatctttaggaaagctgtgttttagcttccctggggggagagtttaatc

SEQ ID NO: 464080 - DNA, 201 bp, Homo sapiens
agcttgtgttgcttggtttatttttggtggctaattaaacttataatctctaggtgacatttagacatgattcttcaacagtggaagttcaggatgaccayataaagggcccactaaaggtaattcatgtattcattgttaattctaatggttgtttgggaaaaaataatcatacttggtattaattcattggctcttttg

SEQ ID NO: 464081 - DNA, 201 bp, Homo sapiens
actacactccatgaaaacaaagactgagttttaaatcaagtctctggttcctaaccagcacctgatacattataggctttagtttaaatgtatgaataagsctgggtgcgatggctcatgcctgtaatcccagcactttgggaggccaaggtgggaggatcacttgagtccaggagtttgagaccagcctgggtaacatag

SEQ ID NO: 464082 - DNA, 201 bp, Homo sapiens
tagcttgaacacgggaggtggaggttacagtgagccgagatcatgccattgcactccagcctgggtgacaagagcaatactctgtctcaaaaaaaaaaaawttttttcttgaaaactacatggaaccattgaaagttgttgagaattgcttgaacccaggagctggaggttgcggtgagctgagatcaggccactgcaaaa

SEQ ID NO: 464083 - DNA, 201 bp, Homo sapiens
acaaaacaaggtgaagtatctggaaactgtaagtaatttggtgtgactgaattaacttaaagcatgatatgtttgggtaggaataaaagggcagtggtggragatgaagctgagtgagggagtcgaaaattttcttggccaggcatggtggctcacacctgtaatcccagcactttgggaggttgaggcaggtggatcacc

SEQ ID NO: 464084 - DNA, 201 bp, Homo sapiens
gtagttgggattacagacgcccaccaccacacctggctaatttttttgttgttgttgtatttttagtagacatggggtttcaccatgttggccaggctggycttgaactcctgacctcaggtgatccatccgcctctgcctcgcaaagtgctgggattttgggcatgagccaccatgcccagccccaatcctagtaactct

SEQ ID NO: 464085 - DNA, 201 bp, Homo sapiens
cgtactggaaaatgaacaaaacaaggtgaagtatctggaaactgtaagtaatttggtgtgactgaattaacttaaagcatgatatgtttgggtaggaataraagggcagtggtgggagatgaagctgagtgagggagtcgaaaattttcttggccaggcatggtggctcacacctgtaatcccagcactttgggaggttga

SEQ ID NO: 464086 - DNA, 201 bp, Homo sapiens
tacataaaagtgatgacttttatgtttaaaatgtgatgggttttgacaaaagtatacagtgttacaaccatcaccgtgatcgtaatagaacatttccatcrttggaagagcctcttagcctctttgaaacccagtttctttgcatgttacatagagataaaagccagcaacctcgggtggctgtatacacaggacctaata

SEQ ID NO: 464087 - DNA, 201 bp, Homo sapiens
tgggaggccgaggtgggcggatcacctgaggttgggagttcgagaccagttcgagaccagcctgaccaacatgaagaaaccccatctctactaaaaaaaaacacaaaattagccaggcatggaggcacatgcctataatcccagctactaggtagggtgaggcaggagaatcgctcgaacctgggagacggaggttgcggt

SEQ ID NO: 464088 - DNA, 201 bp, Homo sapiens
atgagtattccaacataaaataattgtaggaaatgctatgagaggacagaagaggacagctaaatcagagagctatggaaagttttctggtggagttgacrtctaagctgagtgcgaaggcttttgctaggcaaagaagggaagaaaagtttttcagatagaggataacgtactggaaaatgaacaaaacaaggtgaagta

SEQ ID NO: 464089 - DNA, 201 bp, Homo sapiens
attgtaggcacatgccaccatgcccagcaaatttttgtatttttagtagagatggggtttcaccatgttgaccagactggtctcaaacgcctgacctcagrtgatccacctctgcccccgtaagtggtgggattataggcgtgagccactgcgcccgacctgtataaatctttaatataattttcatgtatgtccctattt

SEQ ID NO: 464090 - DNA, 201 bp, Homo sapiens
ctcccacctcagcctcctgagtagctgggactacaggcacacctggctaatttttgtagtttttgtagagatgaggttttgccgtgttgcccaggctggtstcgaacttctgggctcaggtgactctcccgccttagcctcccaaagtgctgggattacaggcgagagtcaccgtgcctggtgtaatttctgtattacgat

SEQ ID NO: 464091 - DNA, 201 bp, Homo sapiens
ccaagtagctgggattgtaggcacatgccaccatgcccagcaaatttttgtatttttagtagagatggggtttcaccatgttgaccagactggtctcaaaygcctgacctcaggtgatccacctctgcccccgtaagtggtgggattataggcgtgagccactgcgcccgacctgtataaatctttaatataattttcatg

SEQ ID NO: 464092 - DNA, 201 bp, Homo sapiens
taaaaggtaaaataaaaagcaagtcaggtaatctgaccctagaaactgaactgtattgtggttctatcagttacactgatgaaagagaatcttatttattrtgtgaacagtactgtaaaattttagcagaaaactctttgactcgtcacaaaaataatttaattgaaagatttaaaaagagaatttttgtgattttttaca

SEQ ID NO: 464093 - DNA, 201 bp, Homo sapiens
ctttttgtttaaaaatactgtttttaggccaggcacgggtagctcatgcccataatcccagcactttgggaggccgaggcgggcagatcacctgaggtcasgagttcgaaaccagcctggccaacatggcgaaacctcatctctactaaaaatacaaaaattagccagacatggtggcaggtgcctgtaatccgatctact

SEQ ID NO: 464094 - DNA, 201 bp, Homo sapiens
agtagagatggggtttctccatgtttgttaggctggtctcaaactcctgacctcaggtgatccacctgcctcagcctcccaaagtgctgggactacaggcrtgagccaccgtgcccggccaaggcttattttctattaattggctctttaaacaaaaaaggcttagtagatataagaactgagtcattcatgaaactgttt

SEQ ID NO: 464095 - DNA, 201 bp, Homo sapiens
cttaaattttttgttgtcctgttgtgtaataggaagctcatgatctaatctgattacctttcttattttgagaaaagtaccagtccgatccattctgatgyttggaagaaaatagcaaatagcaaatagcaacttaagtcatgaggagatgttcagaagttttgttttggtctcattctttattatgtctaatcaggatac

SEQ ID NO: 464096 - DNA, 201 bp, Homo sapiens
tatctcatttttatatgatgattctgaggtgcatgataaatctcttttattgtggccacaataaaatatgcttcttttccccactatgcaaagatagagtmttatgacttaggcaagtattctttcaaaaaaaattgttttaatttactatataaaataaaattcctcataataatttatcattgataatcccatttctgt

SEQ ID NO: 464097 - DNA, 201 bp, Homo sapiens
tacctgtggtcaactgtggtctgaaaacaggtgagtacagtgcaataaaatattttgagagagtgagacaagaccatattcacataactgttattatagcmtattataattgctttgttattagtcattgcttatctcatgctgtgccttattaataaattaaactttatcagaggtatgtatgtataggaaaaaacacag

SEQ ID NO: 464098 - DNA, 201 bp, Homo sapiens
taaaatttttagctagagcaaagtactttttaggtctgctgaattacttgataatataaacttggggctatgtccatgttttatatattgtatgttggctrtagattctgagagttgtatttatttcttaagcaaaagcaagagtggaaaaatactaaagttttaaaaggccaaaaattgtatgttctattttatgtgata

SEQ ID NO: 464099 - DNA, 201 bp, Homo sapiens
ggttcgggggctggcgcctggtgcggctctttcttcggggttcggacgtcgctcgcttctttccctccgcctccgccagtgcagaggggctcctgtggtgktgactgggtgtcttttgtttcccctccaggtgcagctgaacctggtgttttagaggataccttggtcccagagtcatcatgaaggtaagattgcctgcgg

SEQ ID NO: 464100 - DNA, 201 bp, Homo sapiens
ggctcaagcaatcttccaacctcagcctcctgaacaggtgggactgcaggtgtgtgctaccatgcccagctaattaaaacaaatttgtttgtacagacacrgtagcactatgttgcctaggctgttcttgaacacctcctctcaagagatactgccacttggcctcctgaagctctgggattacaggcgtaagcctccaca

SEQ ID NO: 464101 - DNA, 201 bp, Homo sapiens
ttaattctcaaaataccctgagaggtacatagatatattcttattttacagatgaaaaactcaaggccgagagagattatataatttacctaactaaggtyatgccactagtaagtggcatagtgaggatttaaacctaaactacttcaaaccagagctcctactaatattaatgctgtttctgcctctttaatatatatc

SEQ ID NO: 464102 - DNA, 201 bp, Homo sapiens
tctttaaaattttgatatgtctgaattgtcctatgatgattttatctgaagaccattgagtcatttgcatcaaacagtgagatccactttttttttttttycccggagacagaggcttactccgttacccaggttagagtgtagtggtgtgatcctgactcgctgcagccttgacctcctgggctcaacaattctcccacc

SEQ ID NO: 464103 - DNA, 201 bp, Homo sapiens
agcaagattccctctcaaaaaaaaaaaaagaagaaaaaaaaagaattatcttgaactctttaaaattttgatatgtctgaattgtcctatgatgattttayctgaagaccattgagtcatttgcatcaaacagtgagatccactttttttttttttccccggagacagaggcttactccgttacccaggttagagtgtagt

SEQ ID NO: 464104 - DNA, 201 bp, Homo sapiens
gtgtcttttattaactctgcaattttttaaacctttcaagagatgaaacgaataaagaagaagatgaagatgatgaagaagcagaagaggaggaggaggargaagaagaagaagaggatgaagatgatgatgacaacaatgaggaagaggagtttgagtgctatccaccaggcatgaaagtccaagtgcggtatggacgag

SEQ ID NO: 464105 - DNA, 201 bp, Homo sapiens
acacacaaaattaggcctagtgttggattttcctactcttaccattgtgcctgtttttagtatgcatttgatttagcacatgataatcataattcaaagayaagtctgcaacagacttaacatttatatataaagtgtttttaaggcagaaggtattatttaccctctttttagaagtggagaaactgagaatcagggagt

SEQ ID NO: 464106 - DNA, 201 bp, Homo sapiens
cttattaaaatatgatttgttgggtccctcatatgtgcatagtcattgaataggcagagcggtctgcgcgcgtgcacacacacacacacacacacacacacacaaaattaggcctagtgttggattttcctactcttaccattgtgcctgtttttagtatgcatttgatttagcacatgataatcataattcaaagataag

SEQ ID NO: 464107 - DNA, 201 bp, Homo sapiens
tacttattaaaatatgatttgttgggtccctcatatgtgcatagtcattgaataggcagagcggtctgcgcgcgtgcacacacacacacacacacacacacacacaaaattaggcctagtgttggattttcctactcttaccattgtgcctgtttttagtatgcatttgatttagcacatgataatcataattcaaagata

SEQ ID NO: 464108 - DNA, 201 bp, Homo sapiens
taagatagtttgtccttattttacttattaaaatatgatttgttgggtccctcatatgtgcatagtcattgaataggcagagcggtctgcgcgcgtgcacrcacacacacacacacacacacacacaaaattaggcctagtgttggattttcctactcttaccattgtgcctgtttttagtatgcatttgatttagcacat

SEQ ID NO: 464109 - DNA, 201 bp, Homo sapiens
tatgtgcactttttccccctctgcatctgttttatttcttacttcctctcagcagactggttttctctacttctccctgtgcatgccagaaaatggctacyataggctgcatcacatcctttctctaccggctaattggttaacctagctttaacttcatagcagagtaaaaccgatcggcccagtttggatcaggtggct

SEQ ID NO: 464110 - DNA, 201 bp, Homo sapiens
aaagtgctgggattataggcatgagccaccgcgcctggccaacatctcttttttaagagaaataacttgtaatttctttctttccttttttaaagagacagggtcttgctgtgtctcccagactggagtgcagtggtgtgatcatagctcaatacagccttgaacttctgggctcaagcaatcctactgcctcagcctcac

SEQ ID NO: 464111 - DNA, 201 bp, Homo sapiens
caaagtgctgggattataggcatgagccaccgcgcctggccaacatctcttttttaagagaaataacttgtaatttctttctttccttttttaaagagacagggtcttgctgtgtctcccagactggagtgcagtggtgtgatcatagctcaatacagccttgaacttctgggctcaagcaatcctactgcctcagcctca

SEQ ID NO: 464112 - DNA, 201 bp, Homo sapiens
ccaaagtgctgggattataggcatgagccaccgcgcctggccaacatctcttttttaagagaaataacttgtaatttctttctttccttttttaaagagacagggtcttgctgtgtctcccagactggagtgcagtggtgtgatcatagctcaatacagccttgaacttctgggctcaagcaatcctactgcctcagcctc

SEQ ID NO: 464113 - DNA, 201 bp, Homo sapiens
cccaaagtgctgggattataggcatgagccaccgcgcctggccaacatctcttttttaagagaaataacttgtaatttctttctttccttttttaaagagacagggtcttgctgtgtctcccagactggagtgcagtggtgtgatcatagctcaatacagccttgaacttctgggctcaagcaatcctactgcctcagcct

SEQ ID NO: 464114 - DNA, 201 bp, Homo sapiens
atattgttaattgtcttttgctttctttggtatattttccatatcctctataaagttccaaaatcaatatattgtataatattattctttattatttgtttattttcttcattaagtgctacttttgtataatttttatcataacttcaaaatagctgttagctatttttgtctagagctttaaagtagcaggagtttctt

SEQ ID NO: 464115 - DNA, 201 bp, Homo sapiens
gatattgttaattgtcttttgctttctttggtatattttccatatcctctataaagttccaaaatcaatatattgtataatattattctttattatttgtttattttcttcattaagtgctacttttgtataatttttatcataacttcaaaatagctgttagctatttttgtctagagctttaaagtagcaggagtttct

SEQ ID NO: 464116 - DNA, 201 bp, Homo sapiens
agatattgttaattgtcttttgctttctttggtatattttccatatcctctataaagttccaaaatcaatatattgtataatattattctttattatttgtttattttcttcattaagtgctacttttgtataatttttatcataacttcaaaatagctgttagctatttttgtctagagctttaaagtagcaggagtttc

SEQ ID NO: 464117 - DNA, 201 bp, Homo sapiens
gataatttctcatatatatatacatatatatgtatatatacacacacatatatatacgtgtgtatatatatatatatacgtgtatatatatataaaatackataaatacttgtattatttgaatcttttgaaattttaaattaaaaatgtagtgtggatctaatatagtttgtgttttctgtaacaggtacacctattaac

SEQ ID NO: 464118 - DNA, 201 bp, Homo sapiens
aacaagataatttctcatatatatatacatatatatgtatatatacacacacatatatatacgtgtgtatatatatatatatacgtgtatatatatataawatactataaatacttgtattatttgaatcttttgaaattttaaattaaaaatgtagtgtggatctaatatagtttgtgttttctgtaacaggtacaccta

SEQ ID NO: 464119 - DNA, 201 bp, Homo sapiens
tctagaaaatagatgtccttagatttgtatttgatcaccttaccaaaacctgaatgtatggagtgtgtttaaattgagaaatacagattcatcattagcarattaatggttgtcatttatttttctctgcccaattagaaaacctaatagttgatcaacataggctttaaaaaaaaaattacctttctttgttgtactagc

SEQ ID NO: 464120 - DNA, 201 bp, Homo sapiens
tctgtagtgtagtgtaaacattttcttgagttaaaagcttaccttaaatgtttttggaataggaaaaattgtgctgtttattaaagttaaatattgtaccrtgggaacatttaagataacatctagaaaatagatgtccttagatttgtatttgatcaccttaccaaaacctgaatgtatggagtgtgtttaaattgagaa

SEQ ID NO: 464121 - DNA, 201 bp, Homo sapiens
acatatgttgctgctactcacctttgcatatgctagtacctctgtaggcaccaccttttcctcccctccttccttagtcagcatggtacattcctgttcarttttcagaaccctacttaggtgccatctctctaaagagaaacctgtgaaccatcacctccctcacctcaggaaagcaccagttcatttgctagtctaaac

SEQ ID NO: 464122 - DNA, 201 bp, Homo sapiens
tacgacgtgggaatttcaatgcgttttgttgtagatgctaacgtgtcagaatcctttacattcaacttttctaagaaaagcattttcagtcttgtagtgtrtgcttacagtaactaattttgttgaaaatggtttcaagttattcaaatttgtacaggactgtaaagatttgttgacagcaaaatgttgaagaaaaaagct

SEQ ID NO: 464123 - DNA, 201 bp, Homo sapiens
tctctgagatcctaagatagatttacgtccttcttcgtgctcctcttgtgcagaatctgaccatagtagttaacttcatatggtaacttaactgtttaacwgattcctccactacactccatgaaaacaaagactgagttttaaatcaagtctctggttcctaaccagcacctgatacattataggctttagtttaaatgt

SEQ ID NO: 464124 - DNA, 201 bp, Homo sapiens
atgtcttcctttgttgctcagggtttttcttggcaaaagcatattgccagaacatatcttttttttttttttttcggagatggtgttttgctccatcaccyaggcttgattgcagtgcacaatctcgactcactgcaatctccacctcccgggttcaagcgattctcctgcctcagcctcccgagtagctgggattacagg

SEQ ID NO: 464125 - DNA, 201 bp, Homo sapiens
ggaatggccaagaaaagccatttagtgccaccattaaaatcctgaaagatgctgggcaaggtcatcaggagaaaaatgtaaaacaaaacaaaaccaatgamacacacacacacacacacacacacacacacacacacaatataaggcattaaaaatggtctcatttacattattattattattttttttttttttttgaga

SEQ ID NO: 464126 - DNA, 201 bp, Homo sapiens
aggaatggccaagaaaagccatttagtgccaccattaaaatcctgaaagatgctgggcaaggtcatcaggagaaaaatgtaaaacaaaacaaaaccaatgacacacacacacacacacacacacacacacacacacacaatataaggcattaaaaatggtctcatttacattattattattattttttttttttttttgag

SEQ ID NO: 464127 - DNA, 201 bp, Homo sapiens
aattaagagaatgtgttggatatttccagcaccagtgttagatttggtaattcacaaggtgcgctcacaggactcagtgtattgtattagtcatgtttacrgctgcgatttattacaagaggataggaagcattatcagcaaaaggaaaagatacattgggtaaagtctggaggaaaccaggtgcaaatttctcccggtag

SEQ ID NO: 464128 - DNA, 201 bp, Homo sapiens
cagtgaaggtgtcctgttctttactgtacaagaactaagcatgtgattcaaataaggttactggatatgttaaaaagaataagacaatggaaataaaataatattaaaatgttttattttattaatgggtggagtaagagtaatacaaatgttttagacttgaagttactgtcagtgtttttatcattatatgactgtcaa

SEQ ID NO: 464129 - DNA, 201 bp, Homo sapiens
tcagtgaaggtgtcctgttctttactgtacaagaactaagcatgtgattcaaataaggttactggatatgttaaaaagaataagacaatggaaataaaataatattaaaatgttttattttattaatgggtggagtaagagtaatacaaatgttttagacttgaagttactgtcagtgtttttatcattatatgactgtca

SEQ ID NO: 464130 - DNA, 201 bp, Homo sapiens
gtcagtgaaggtgtcctgttctttactgtacaagaactaagcatgtgattcaaataaggttactggatatgttaaaaagaataagacaatggaaataaaataatattaaaatgttttattttattaatgggtggagtaagagtaatacaaatgttttagacttgaagttactgtcagtgtttttatcattatatgactgtc

SEQ ID NO: 464131 - DNA, 201 bp, Homo sapiens
tgtcagtgaaggtgtcctgttctttactgtacaagaactaagcatgtgattcaaataaggttactggatatgttaaaaagaataagacaatggaaataaaataatattaaaatgttttattttattaatgggtggagtaagagtaatacaaatgttttagacttgaagttactgtcagtgtttttatcattatatgactgt

SEQ ID NO: 464132 - DNA, 201 bp, Homo sapiens
atttttttttctgttattttctagcttctgaaagttctgctgaagacagtgagcaggaagatgagagaggtgctcaagacatggataataatggcaaagargaatctaagattgatcatttgaccaacaacagaaatgatcttatttcaaaggaggaacagaacagttcatctttgctagaagaaaacaaagttcatgcag

SEQ ID NO: 464133 - DNA, 201 bp, Homo sapiens
ttgtcagtgaaggtgtcctgttctttactgtacaagaactaagcatgtgattcaaataaggttactggatatgttaaaaagaataagacaatggaaataaaataatattaaaatgttttattttattaatgggtggagtaagagtaatacaaatgttttagacttgaagttactgtcagtgtttttatcattatatgactg

SEQ ID NO: 464134 - DNA, 201 bp, Homo sapiens
tatccccactgccttgccagtccttcccgccagcaggactggaagcctggcgactccctaggtcacagggtctcccttgccataaccaagtgggctctgcrcgtggctgatggcagccccaccctgcgcccctgctgttaggcaccgagcaaggaggggcccctggctgttcttcgcctgggcactggtgtgctttcggcg

SEQ ID NO: 464135 - DNA, 201 bp, Homo sapiens
cagatctaatagtaatttcggatctaatagtaatttcagactcctcagcatgggtgattgaggttctccatgctcagccaaccttacttaacagctgtatytgccttcaatttctccctgcatgttatcttgatgctgtagtcaaaatgaaaccagtcaataattcctgaatacatcgcttgttttctaatatcatgcttt

SEQ ID NO: 464136 - DNA, 201 bp, Homo sapiens
tagtaatgagctcattcatctttattctaatatctttgaaactagaattttctatctttaggaaagctgtgttttagcttccctggggggagagtttaatmtcaaaatctgagcatattcttaaattgatttggtttaaaacaaagaaggcacttgcaaagtgttaattttttgatgggtttatgttcttacccacagaca

SEQ ID NO: 464137 - DNA, 201 bp, Homo sapiens
taggcaaagttgtatgtgtagattacattagtttggataaaaagaaagcactgtggtttcctgcattggtgagtagcttcagtatacaagagtttaatttmaaactttataagtttatgaagaaaacaattttcttactaatgtttttcataggtacaaaatgaggaaatgtttttagcattatttagttcacactaagct

SEQ ID NO: 464138 - DNA, 201 bp, Homo sapiens
ttgggcaggggactctggtatttgggaacacgttggtgtttataaaatagctcttatggtaggatccttctgtagatgattacgtattttaacatcctgtmttgtatgttatttctgacttgctactctgtgtgcaatcacttttattgtaaacgtcaacattcccatattttcagtatctttctgtgatatgtaatcatc

SEQ ID NO: 464139 - DNA, 201 bp, Homo sapiens
caatcacttttattgtaaacgtcaacattcccatattttcagtatctttctgtgatatgtaatcatctggattcttaattaatctcagtcatattttgggktttttttcttctcttataattaaaaaaaatatatagtacttcagttccaagaaaagatgtccatgaaattactagtgacactgcaccaaagcctgatgct

SEQ ID NO: 464140 - DNA, 201 bp, Homo sapiens
gctctagcagtgaagcagaggaagaagaggaggaggaagatgatgaaaaagaaaaggaggataatagcagtgaagaagaagtaagtgaaaacagttgataycttttaaaattataaataacagttgggtttcccttgtgggttaggatttggcattaagtcattactcatataagtatttttagtatgagaaatatttcat

SEQ ID NO: 464141 - DNA, 201 bp, Homo sapiens
agactgaattgaaagaagatagctctagcagtgaagcagaggaagaagaggaggaggaagatgatgaaaaagaaaaggaggataatagcagtgaagaagargtaagtgaaaacagttgataccttttaaaattataaataacagttgggtttcccttgtgggttaggatttggcattaagtcattactcatataagtattt

SEQ ID NO: 464142 - DNA, 201 bp, Homo sapiens
tctagggaagtaaaaagaatttattagaatctatacctacacattctgatcaggaaaaagaagttaacattaaaaaaccagaagacaatgaaaatctggaygacaaagatgatgacacaactagggtagatgaatccctcaacataaaggtagaagctgaggaagaaaaagcaaaatctgggtaagaaaattgtttttggt

SEQ ID NO: 464143 - DNA, 201 bp, Homo sapiens
tgttagctatttttgtctagagctttaaagtagcaggagtttcttaaaagtaatttataacttttaatattagaattggttgatacctcctgttgctaagrgataaaccatggatataggttgaaaatttttacttttgttggtttctttcctctgatctttttctagggaagtaaaaagaatttattagaatctatacct

SEQ ID NO: 464144 - DNA, 201 bp, Homo sapiens
ctctgagaatttcatacacgtggaacctgcttttcctggaacaatcacagccacaacttttatcaatatatgtggtttggaactgaaaaacttatgaagtrtcttttattaactctgcaattttttaaacctttcaagagatgaaacgaataaagaagaagatgaagatgatgaagaagcagaagaggaggaggaggagga

SEQ ID NO: 464145 - DNA, 201 bp, Homo sapiens
acataattgtttttgtgatgaaaatgaatgtgttttaaaagatacataaaacttcttattttgttataaaatgaagtagtatcggccaggtgcggtggctyacgcctgtaatcccagcactttgggaggccaaggcaggtggatcacaataggagtcgagaccatcctggctaacacggtgaaaccccgtctctactaaaa

SEQ ID NO: 464146 - DNA, 201 bp, Homo sapiens
cccacctccctcccggacggggcggctggccgggcagaggggctcctcactttccagtaggggtggccgggcagaggcgccccttacctcccggacggggyggctggccgggcggggggctgacccccccacctccctcctggacgggtggctgccgggcagagacgctcctcacttcccagacggggtggttgccgggcg

SEQ ID NO: 464147 - DNA, 201 bp, Homo sapiens
taatgaacataaagcattttatttgattttaacattttctggttattaaaaaactcatggtagaaagtatggaaaatccagaaaatcaggtaggaaaaagrtcactcgtaattcagacgttacagaggtaactactattaacattttagtatatactttcaaatctttacctgtgtatttcttaaaacatagtttgtaatc

SEQ ID NO: 464148 - DNA, 201 bp, Homo sapiens
ttgatccctttcactctcaagtttctaagtcgtgtcgtaaatatgggattgatttttgaaagtaagggtacacattgaaattaacatgccgtaaactagtygagtgtgttggatttctttgtttagtaacaactgagtgaaactatctagactaattggcatggaatttaaaatacatcaatattttgtaatagtgtatca

SEQ ID NO: 464149 - DNA, 201 bp, Homo sapiens
ggagtttgagaccagtctggccaacatatcgaaaccccgtctctactaaaataaaaaaaaaattagcagggtgtggtggcgcatgtctgtaatcccagctrctcgggaggctgaggcatgagaatcgcttgaactgggaggcggaggttgcagtgagccgcgattgcaccattgcactccagctggagcaagactgtcttg

SEQ ID NO: 464150 - DNA, 201 bp, Homo sapiens
gagggatattggtctgtagagatgtggttttgctatgttgcccaggctggtcttgagctcctggcctcaagcagtcctctcctctcagcctcccaaagtgwtgggattataggcatgagccaccatgtccagcctctagttttattttctcataatgtcattatatatcagaataatgctggctttgtagaatgagttggg

SEQ ID NO: 464151 - DNA, 201 bp, Homo sapiens
aggatcacttgacttcaggagttggaggttgcagtgagccaagatggcaccactgaactgcagcctgggtgatagaacaagaccctgtctccaaaaaaaaatatatatatatattgtttgcatttttgctcatgagggatattggtctgtagagatgtggttttgctatgttgcccaggctggtcttgagctcctggcctc

SEQ ID NO: 464152 - DNA, 201 bp, Homo sapiens
cacctcatgaaatgcttacatctccatattttattgattaacccagaaaagtataaaatacatctttcatttaatatttaaaagaaaaatcaggccgggtrctgtggctcatgctgggatgactaatcctagcactctgtgaggccgaggcgggcagatcatgagatcaggagttcgaggccagcttggctaacatggtga

SEQ ID NO: 464153 - DNA, 201 bp, Homo sapiens
gacttcaggtgatccacccgccttggcctcccaaagtgctgggattacaggcatgagccactgcgcccagccacattaatgttttattatttttacaaggataatatgctcatagactgtacaactaaaggccaatttaaaatttatttggaaaaaatacattgttttgtacataggtccctgtaaaggcagagtaagact

SEQ ID NO: 464154 - DNA, 201 bp, Homo sapiens
aaattaatggtgatttctgttcaagatgccagattgttaaactcctctaggattagaaaagttttggttgaaaatagaacacttaactgtaactaagagtyttcttttttcattatgtgttggcctttaaggcaccagaattatacttcagaaattccttgggagaatttgggttatgtcttaaaataaaaaatgttcatg

SEQ ID NO: 464155 - DNA, 201 bp, Homo sapiens
gagttttctatgtgcctttaatacagctttcaggagcctctggtttttgctctttaggtctaagatgggacaaattctaccctacccccaggtctttttartcccttgaaacaaacatgcccctactttcctggacattgagatagggacagagatattgcttatgtttcttcttgttatgtactagggagagactgtggt

SEQ ID NO: 464156 - DNA, 201 bp, Homo sapiens
ttttcaagtgttgagtccattgtaattctttttatatgaaatatccttttatgtcatatgcccatttttctgttgaatggttggcttttttttttttttttgaggcagaatctccttcctgtcccccaggctggagtgcagtggtccaataacggcttactgcagccttgaacctcccaggctcaagtgatcctcccacct

SEQ ID NO: 464157 - DNA, 201 bp, Homo sapiens
caatgttctgtcacccattgtactccagtgtgtaattcctgataaatagaacagaataacttcaacttcggtctgtctactttttctcatttccagttacycttggcagatataccacagaaagttgctcttttgatactacagtgcaaaacgttgcacaattacaccactaaaaataattcagtagtattcaaagatgat

SEQ ID NO: 464158 - DNA, 201 bp, Homo sapiens
ctttgtacatatattatttcatacatctgtaagagtatctgtaggattaattcctaagagtagggttactgattaaagcacatgtgcttttttttttttttggtgatggaatctcattctgtcgtccaggttggcgtcatcttggctcactgcaacctctgcctccctggttcaagcagttctcctgcctcagcctctgga

SEQ ID NO: 464159 - DNA, 201 bp, Homo sapiens
attaaagtccaaatatcctagtttaattttttgaatattcaaacatatggctgaaaagttttaaaaaatacttataaaagaatatagtaaaaaccctttcrtcctaccttttacctccaattgttaaatttcccttctttctgtacagtcattgtttttgtgtattgtttccacacgtagaaaggcaaacacaagtttgcc

SEQ ID NO: 464160 - DNA, 201 bp, Homo sapiens
gataaattacgacatactttttttcttaacctagaataaattagacaaagaaaaagacaaagatgaaaaatactctccaaaaaactgtaaacttcggcgcytgtccaaaccaccatttcagacaaatccatctcctgaaatggtatccaaactggatctcactgatgccaaaaactctgatactgctcatattaagtccat

SEQ ID NO: 464161 - DNA, 201 bp, Homo sapiens
ctccagcctgggtgacagagtaagactctgtctcaaaaaaaaaaaaaaaaaaaatgctgctggtttgcatatcattattctgcccatatcctatcagtaaygaaagaggtattattttactgtatgtttttacttaaaatttaatttatgcttacattaatttttaaaggttcagatttgaaagtccagtgtcaattttcc

SEQ ID NO: 464162 - DNA, 201 bp, Homo sapiens
aaatttatttggaaaaaatacattgttttgtacataggtccctgtaaaggcagagtaagactggaaaaataccctaaataaggagacagtagttatgtccmcgagggatgtgggaacagagaagataaaaggagacatttgctttttgtatacttctgtatttttatagttttataaagcaaatgaattcatgcattaatt

SEQ ID NO: 464163 - DNA, 201 bp, Homo sapiens
agaatttgagctttaaagatctgccttctggccaacggacccttttcttgtaagtggtcatagaataaataaatatttgaatgaatgagtgactagagggrtatacttgtgagtgagctaattcatatcatggaccatatgtatttaatggaaataagatacctttatattttatgtgatgtacatttaaatagtctttat

SEQ ID NO: 464164 - DNA, 201 bp, Homo sapiens
gccatggtaagtgtgaaaactcccataggcaatatgtaaacaaataggcatggctgtgttccagtacaatttttctttccaaagacaagtaagccagatttgcccctggggtagtttttttgccagccttttttctagagttgtaatgaatatgaatcaactggtagcaatggggaagggaatttgggtgattaggaggtt

SEQ ID NO: 464165 - DNA, 201 bp, Homo sapiens
cagtggcgcgatctcagctcactacaacctccgcctcctgagttcaagcgattatcctgcctcagtctcccgagtggctgggattacaagcgtgctgccaygcccagctaattttttatttttagtagagatggggtttcaccatgttggccaggatgcaggatggctcgatctcttgacttcgtgatccgcctgcttcag

SEQ ID NO: 464166 - DNA, 201 bp, Homo sapiens
cagtgtcaaaatctccagaaagattaaggaaagatatagaagtattatccgaagatactgattatgaagaagatgaagtcacaaaaaagagaaaggatgtyaagaaggacacaacagataaatcttcaaaaccacaaataaaacgtggtaaaagaaggtattgcaatacagaagagtgtctaaaaactggatcacctggca

SEQ ID NO: 464167 - DNA, 201 bp, Homo sapiens
tgagccaccgtgcctagcctattgttgtagtttttaagaggttgtatccttattatgttcgtaatatcttacaaaagattaaaattaacaacaaaaaaaaagaggatatcttctctgctaatagactaagtcaacactgcccttttgaatcttaatcttgactaggttaataattgtggaatttgaaagctactcctaaat

SEQ ID NO: 464168 - DNA, 201 bp, Homo sapiens
atgtctggtcaagtattcagggacagtggcctaaaaaaacgctgaaagagcttttttcagactctgatactgaggctgcagcttccccaccgcatcctgcyccagaggagggggtggcagaggagtcactgcagactgtggctgaagaggagagttgttcacccagtgtagaactagaaaaaccacctccagtcaatgtcg

SEQ ID NO: 464169 - DNA, 201 bp, Homo sapiens
atgagccaccgtgcctagcctattgttgtagtttttaagaggttgtatccttattatgttcgtaatatcttacaaaagattaaaattaacaacaaaaaaaaagaggatatcttctctgctaatagactaagtcaacactgcccttttgaatcttaatcttgactaggttaataattgtggaatttgaaagctactcctaaa

SEQ ID NO: 464170 - DNA, 201 bp, Homo sapiens
agtattcagggacagtggcctaaaaaaacgctgaaagagcttttttcagactctgatactgaggctgcagcttccccaccgcatcctgccccagaggaggrggtggcagaggagtcactgcagactgtggctgaagaggagagttgttcacccagtgtagaactagaaaaaccacctccagtcaatgtcgatagtaaaccc

SEQ ID NO: 464171 - DNA, 201 bp, Homo sapiens
tttgcctttttaaaaaccctgacttttattatgtataagaattgagcttccattaatgacagtttatttaaaaattgtagtaagttctgtgacaacttatraatgtcataaagaacatgtagttttggattgttctatgtttctaaaatgtggaattaatttatacttagggaatgttggattttattttgtgttacttaa

SEQ ID NO: 464172 - DNA, 201 bp, Homo sapiens
catgagccaccgtgcctagcctattgttgtagtttttaagaggttgtatccttattatgttcgtaatatcttacaaaagattaaaattaacaacaaaaaaaaagaggatatcttctctgctaatagactaagtcaacactgcccttttgaatcttaatcttgactaggttaataattgtggaatttgaaagctactcctaa

SEQ ID NO: 464173 - DNA, 201 bp, Homo sapiens
ctatttgacagtgggcactgatgtgagtgctaaatacagaggagccttttgtgaagccaagatcaagacagcaaaaagacttgtcaaagtcaaggtacagkatttatagatttcataaattgtatgttcagcatttgatatgtaaacttttatttggtgagtgtatttaagatttttctgcaaaataagtttctaggagtg

SEQ ID NO: 464174 - DNA, 201 bp, Homo sapiens
gcatgagccaccgtgcctagcctattgttgtagtttttaagaggttgtatccttattatgttcgtaatatcttacaaaagattaaaattaacaacaaaaaaaaagaggatatcttctctgctaatagactaagtcaacactgcccttttgaatcttaatcttgactaggttaataattgtggaatttgaaagctactccta

SEQ ID NO: 464175 - DNA, 201 bp, Homo sapiens
agatcaagacagcaaaaagacttgtcaaagtcaaggtacagtatttatagatttcataaattgtatgttcagcatttgatatgtaaacttttatttggtgmgtgtatttaagatttttctgcaaaataagtttctaggagtgaaggttgtaaaaatacctcaaaacaaagcattttttgttattttaaaagtattataatt

SEQ ID NO: 464176 - DNA, 201 bp, Homo sapiens
ttatttttatttatttatttattttgagacagagtttcactcttgtcgccaggctggagtgcaatggcgcaatctcggctcactgcaacctccacctcctrggttcaaacagttctcctacctcagcttcctaagtagctggaattacaggcatgcaccaccaagcccggctaattttgtattttttaggtagagacaggg

SEQ ID NO: 464177 - DNA, 201 bp, Homo sapiens
ggtagtgacaaactggctgtattgctgaattgagttgctagactgtatttggccctttcctgctttcatctttccaccttctctttcatcattttttttttggtttatgtgctttttagaatattctatatagttaaatccaaacttgacttaacctaggtttgagcaacaatttgcttttgcttacaatttatactatct

SEQ ID NO: 464178 - DNA, 201 bp, Homo sapiens
taaagtcagacttccagattacattgcttaaatttgccaaactaggcatttttctggtggaggagaaaggaatcttttcctaaaagtctggtatatatatwttttttgcttaatgcctagttaccatggaaatagatgttagaatcagctcttaagtaggtaggtagtgacaaactggctgtattgctgaattgagttgct

SEQ ID NO: 464179 - DNA, 201 bp, Homo sapiens
cgggaggcggaggttgcagtgagccgagatcacacctctgcactccagcctgggtgacagagtaagactctgtctcaaaaaaaaaaaaaaaaaaaatgctrctggtttgcatatcattattctgcccatatcctatcagtaacgaaagaggtattattttactgtatgtttttacttaaaatttaatttatgcttacatta

SEQ ID NO: 464180 - DNA, 201 bp, Homo sapiens
gaacccgggaggcggaggttgcagtgagccgagatcacacctctgcactccagcctgggtgacagagtaagactctgtctcaaaaaaaaaaaaaaaaaaaatgctgctggtttgcatatcattattctgcccatatcctatcagtaacgaaagaggtattattttactgtatgtttttacttaaaatttaatttatgctta

SEQ ID NO: 464181 - DNA, 201 bp, Homo sapiens
ggaagatcacccgagcctggaggtcaaggctgcagtgagttgagattgtgccactgcaccctagcctgggtgatagagtgagaccctgtctcaaaaaaaaagagaagaataaattttcaattcatactgatatttccagttttcatgaaaaattacagaggttttgtttaacttattttatgatttatttatttattttat

SEQ ID NO: 464182 - DNA, 201 bp, Homo sapiens
ggcacaaacttttattggtaagatgaataaaatgtacaggatctgatgtacagtgtggtaactagtattctggcagcctcccaagtagctagcactacagrtgtgtgccaccacgctcggcaaatttttgtagggttttttttttttgccatgttgcccaggctggtcttgaactcctgagttcaagtgatctgcccactt

SEQ ID NO: 464183 - DNA, 201 bp, Homo sapiens
ttgctgagacattaatgacatcaaatatatatataaaaagaaaagaacaagtagccctggttttctcaagtgggaaatggtttttagagatcacaatcagrgtgttaagggtgctcattgctgctgggttggtcatgacttctatggttttttagtatttagatacaggaagtactctctcccttccttccctccctcctc

SEQ ID NO: 464184 - DNA, 201 bp, Homo sapiens
ggctggagtgcagtggtgcagtttcggctcactgcaacctctgcctcctgggttcaagctattctcctgcctcagcctcctgagtagctgggactataggygcatgccaccgcacccagctaatttttatatttttaatagagacggggattcactgtgttgtccaggctggtctcgaactcctgatctcgtgatctgccc

SEQ ID NO: 464185 - DNA, 201 bp, Homo sapiens
atataaggattgcaaaacggtgattttggaattatatcactcctacatttattagttgaaattcttttgtaaagaaaacttttatttcatgtatttactgkctttaaaatctagaagtgcaggctataaaaatttaattcctctcccacctcgttttgccagtttttataataatgagttggtgtcctaggaacccactaa

SEQ ID NO: 464186 - DNA, 201 bp, Homo sapiens
atattatcttaatgtgttgtagtcttatagtatgtttttccttactaattttggtaatcttttccaaactagacactcagtactgtctaatttgtcaacayttgtccacataatagctggttatttgaggcaaatttgccatatctaatgtatttaatactttattgatttttttgttttttttgagacggagtctcactc

SEQ ID NO: 464187 - DNA, 201 bp, Homo sapiens
cactttcagtattgctgggattggtcagtggttttagattatgttggcttgatctatcctttataaagttcttatcaactttcacacaaaggttttcgcarcatctgaggattgttgactagatccattatataaggattgcaaaacggtgattttggaattatatcactcctacatttattagttgaaattcttttgtaa

SEQ ID NO: 464188 - DNA, 201 bp, Homo sapiens
ccaatttaaaattgcttgtgtgtgctcccacgtgtgtgtgtgcctgtttaccctcaaactaaaattagtttttaaacttcaagcttacactttttaaaagratttaaatggtgggtacttacctatctatgagttcttttagttataatagcttcaccctttttcttaaaaggtggtttgtcctgattgtagtgatgagat

SEQ ID NO: 464189 - DNA, 201 bp, Homo sapiens
accatgtagcattttaaagcaaattccagatatcatttcacccatatgtatttcggtatgtatctctgacacacttgaactttcctttcatagtacaactrtcataccattgtcacaatgaataacattaacattaattccttaatggcatctggtagcaagaacatgttcagattagcctgtctctaaaatgtctttgca

SEQ ID NO: 464190 - DNA, 201 bp, Homo sapiens
caatgccttgcctatgccaaaaattctagattatccagcagctggaaggatgtaggatgccaatttaaaattgcttgtgtgtgctcccacgtgtgtgtgtkcctgtttaccctcaaactaaaattagtttttaaacttcaagcttacactttttaaaaggatttaaatggtgggtacttacctatctatgagttcttttag

SEQ ID NO: 464191 - DNA, 201 bp, Homo sapiens
gtaatacggtaattgatttttagactaaatatataagttgaaacataacattttctaatttttggaaaattagtggtgttaattctggagactagtaaaartaaatgattagagacgaatacacttcatggtaacaaacatgctggtgatacagctttaaaactttatggaaatttacaacatacaaaaataaagttcact

SEQ ID NO: 464192 - DNA, 201 bp, Homo sapiens
gagataaagtgaccaagaaaataacatacatgggtgaatgggataaaatgcatattgtcgttctgtggcagaactggacagtgagcccacttactcatacrccagtgtcatcactggccaaagctatcacatgtgcagttttcgaaatccttcgctcatcagggaaaagtaatgagtggatttggctcacaagccccaagt

SEQ ID NO: 464193 - DNA, 201 bp, Homo sapiens
tattttccaatttcattttaagagggggaaatcttagattccatggctcatgcagttctccttttcagtttttttcaccaggttctcctcttctaatcacsctttcaagctgtaattcaggattcagaatgtatcgctgtattttctttacggtgatctcatctccttttaaagcttcaccttgcagagatagcaaagaga

SEQ ID NO: 464194 - DNA, 201 bp, Homo sapiens
ttagtaacatcataagaaaacagttaactgggtctgggtggcctgtgcctgtagtcccagctacttgggagactgaggtgggaggatcgattgaaccctgrgaggttgaggctgcattgagtcgtgatcacgccactgcacagagtgagaccttgtctcaaaaaaaaaaaaagaaaaagaaaaaggaaacaactacatagt

SEQ ID NO: 464195 - DNA, 201 bp, Homo sapiens
gcattccagcctgggtgacagagcaagacttttatctcaaaaaaaaaaaaaaaaaaaaaaaaaatatatatatatatatatatatatacacatatatatawatatatatatatattttataaaaccgttttgtgggccaggcgcggcggctcacacctgtaatcccagcactttgggaggccgaggtgggcagatcacttg

SEQ ID NO: 464196 - DNA, 201 bp, Homo sapiens
ggcatgagccaccgtgcctagcctattgttgtagtttttaagaggttgtatccttattatgttcgtaatatcttacaaaagattaaaattaacaacaaaaaaaaagaggatatcttctctgctaatagactaagtcaacactgcccttttgaatcttaatcttgactaggttaataattgtggaatttgaaagctactcct

SEQ ID NO: 464197 - DNA, 201 bp, Homo sapiens
cataagagtataaacttggggccaggcgtggtggctcacgcctgtaatcccagcactttgggaggccgaggagggcgggtcacgaggtcaggagatcaagmccatcctggctaacacagtgaaaccccgtgtctactaaaaatacaaaaaattagccgggcgtggtggtgggcgcctgtagtcccagctgctcaggaggct

SEQ ID NO: 464198 - DNA, 201 bp, Homo sapiens
gcactccaacctgatgacagagcaagactcagtctcaaaaaaaaaaaaagcaaataactaaagaaaaattccagaactgacagacacaaatctttacattraaattgctcactaggtaccgaataaattaatagagtcataccgtagtacatcattatgaaattataaaatatcaagaatgaaaaaatcaccacaaaggaa

SEQ ID NO: 464199 - DNA, 201 bp, Homo sapiens
aatcacttgaacctgggaggtggaggttgcagtgaactgagattgcaccactgcactccaacctgatgacagagcaagactcagtctcaaaaaaaaaaaaagcaaataactaaagaaaaattccagaactgacagacacaaatctttacattgaaattgctcactaggtaccgaataaattaatagagtcataccgtagta

SEQ ID NO: 464200 - DNA, 201 bp, Homo sapiens
tctgctaaaaatacaaaaattagcttggcgtgtgcctgtagtcccagctattggggaggccgagacaggagaattgcctgaacccgggaggtggaggttgyagtgaactgagatcttgccagcgcactccagcctgggcaacagagcgagactctgtctcttaaaaaaaaaaaaaaataagcaaattcagtagagcattaa

SEQ ID NO: 464201 - DNA, 201 bp, Homo sapiens
atagaaaacagttagccgggtgtggtggcacatgcctgtagttccagctgcttgggaggctgaggcaggagaatcacttgaacccacgaggcggaggttgyggtgagctgagatcacgccattgcgctccagcctgggtaacaggagtgaaactccgtctacaaaaaaaaaaaaaaaaaaaagaataagatgcagtgaaaa

SEQ ID NO: 464202 - DNA, 201 bp, Homo sapiens
gataccttggtcccagagtcatcatgaaggtaagattgcctgcggaaaacgaatctctggggttatcgaattcaggaagtaggaggtttcgacgaggtcgkcgtgtggggcttccgagttttgcagaggaaggtgtgtttggtgacttggtgaccgagcccttccccagagagaccggggtcagctggcgggctttgctgt

SEQ ID NO: 464203 - DNA, 201 bp, Homo sapiens
tatctgttgcacagctattttcctagggagatcccattctagggatctcctttaatgtagttcttggatttctttgtttttggcatctcaggttcctccccacccccatactttcattttggtggagcacattctctagtagcttctaaagaacaagtgcatgagatggaatttttagagattggctgcatttaaatatct

SEQ ID NO: 464204 - DNA, 201 bp, Homo sapiens
ggaggcagaggttgcagtgagtcaagatcacaccattgcactctagcctgggtagcaacagcgaaactccatcttaaaaaaaataaaataaaaagaatatstgacacattcgcagtggatgttatgtgggagtgtgctcagtcgtagtagcagactactctatatatattctcattctaggcttatggtgatttaccccta

SEQ ID NO: 464205 - DNA, 201 bp, Homo sapiens
cgcttgaacccaggaggcagaggttgcagtgagtcaagatcacaccattgcactctagcctgggtagcaacagcgaaactccatcttaaaaaaaataaaataaaaagaatatgtgacacattcgcagtggatgttatgtgggagtgtgctcagtcgtagtagcagactactctatatatattctcattctaggcttatggt

SEQ ID NO: 464206 - DNA, 201 bp, Homo sapiens
agaatcgcttgaacccaggaggcagaggttgcagtgagtcaagatcacaccattgcactctagcctgggtagcaacagcgaaactccatcttaaaaaaaataaaataaaaagaatatgtgacacattcgcagtggatgttatgtgggagtgtgctcagtcgtagtagcagactactctatatatattctcattctaggctt

SEQ ID NO: 464207 - DNA, 201 bp, Homo sapiens
atgccagtgtgagctcaagcagtagtaatcagccagaaccagaacatcctgaaaaaggtgagaaggaaaatgtgtatgttgacttattttagggtttcccstcttaaagtttcaatgatttcacagtatctcttgttataacctgaggcgattaagtgtcatatttgtgtgaacatggtaaaaatggaaattttaaaggta

SEQ ID NO: 464208 - DNA, 201 bp, Homo sapiens
ttttcatatatatggatatatataaatatacattatattcatatatatggatatatataaatatacattgtattcatatatatggatatatataaatataygttatattcatatatatggatatatataaatatacgttatattcatatatatggatatatataatgtaatacggtaattgatttttagactaaatatata

SEQ ID NO: 464209 - DNA, 201 bp, Homo sapiens
tgaatcttaaagccttccatcagtgttataaatctattttctaatgtattcttcaaattttttatacttttttaatttatttttatttttgttctacaaayagatttttatttcacctacagtagtatgtattttttccaacattctaaaataatgattaaaaagtatttgtcctagattggtagccatttattccagtat

SEQ ID NO: 464210 - DNA, 201 bp, Homo sapiens
ccctgtttacagatagggaaaatggggaccagagaaagttatagagcatagagttgaactcaattttgacctccagagtctgtttttctttttttttttttatgagacggagtctcattctgtcgcccaggctggagtgcagtggcatgatctcggctcactacaacctccacctcctgggttcaagtgattcttgtgcct

SEQ ID NO: 464211 - DNA, 201 bp, Homo sapiens
ttagttttgaatcttaaagccttccatcagtgttataaatctattttctaatgtattcttcaaattttttatacttttttaatttatttttatttttgttytacaaatagatttttatttcacctacagtagtatgtattttttccaacattctaaaataatgattaaaaagtatttgtcctagattggtagccatttatt

SEQ ID NO: 464212 - DNA, 201 bp, Homo sapiens
ctttaatgtagaataagctaaatatagtaataataataataattaaaaatgatgaagtttattgagtactgctttgtatgtgttatgttgtcttctaagcmcagatatctcatttaatcttcatgatagcactatgagaatactttaattttccctgtttacagatagggaaaatggggaccagagaaagttatagagcat

SEQ ID NO: 464213 - DNA, 201 bp, Homo sapiens
tctttaatgtagaataagctaaatatagtaataataataataattaaaaatgatgaagtttattgagtactgctttgtatgtgttatgttgtcttctaagyacagatatctcatttaatcttcatgatagcactatgagaatactttaattttccctgtttacagatagggaaaatggggaccagagaaagttatagagca

SEQ ID NO: 464214 - DNA, 201 bp, Homo sapiens
ctcttgtaaatcaagtagaaatcagacttgtgaggactgtcgttactgtcccaagctgtgtgtctatgtgtagggtcttattctccactaatgtaaaggtrgttgagttttcttattgttacctactttctaagtagagattgaacttctttaagtgccattgaagtacaatacatcttttttttttttttgagacggagt

SEQ ID NO: 464215 - DNA, 201 bp, Homo sapiens
atattaaaaaaaaaaaaaaaaaaaaaaaaagaatacttaaaaaaatgtattgttggctgggcgtagtggctcacgcctataatcccagcactctgggaggmcgaggcaggcagatcatgaggtcaagagattgagaccatcctggccaatatagtgaaaccccgcctctactaaaaatatacacacacaaaattagctgga

SEQ ID NO: 464216 - DNA, 201 bp, Homo sapiens
gcctacggagttttctatgtgcctttaatacagctttcaggagcctctggtttttgctctttaggtctaagatgggacaaattctaccctacccccaggtytttttagtcccttgaaacaaacatgcccctactttcctggacattgagatagggacagagatattgcttatgtttcttcttgttatgtactagggagaga

SEQ ID NO: 464217 - DNA, 201 bp, Homo sapiens
gttttttgagacagagtcagccaggcacagtggcttatgcttgtaataccagcactttgggaagccgaggtgggtggatcacttgagcctaggagtttgaraccaggttgggcaacatggcgaaaccccgtttccactaaaaatataaaagagttagttggctgggcgcggtggcccatgcctgtaatcctagcactttgg

SEQ ID NO: 464218 - DNA, 201 bp, Homo sapiens
ccgcctcagcctcccaaagtgctgggattacaggtgtgagccaccgtgcccggccacgcccagctaatttttaaatatttgttagtagagacagggttttrctctgttagccagggtggtctcgatctcctgacctcatgatctgcctgccttggcctcccaaagtgctgagattacaggcttgagccaccacgcccagcc

SEQ ID NO: 464219 - DNA, 201 bp, Homo sapiens
actggcttttagaaccactggaaaatatttgttttgggggcagtgtctttagataacataaaattcaggaatacaaattttgggtggaagatagtacagcstcattggttaagaatataaactctctggccgggtgtggtggctcaggcctgtaatcctagcactctgggaggccgaggcaggcggatcacaaggtcagga

SEQ ID NO: 464220 - DNA, 201 bp, Homo sapiens
gattacaggagtgagctactgtgtccagcctaatcttcgttcttggagtcaagttgtgtaggctttgttttttgctttgcttttttttttttcccccaccyctagtttttaatttaaaaaaggactggcttttagaaccactggaaaatatttgttttgggggcagtgtctttagataacataaaattcaggaatacaaat

SEQ ID NO: 464221 - DNA, 201 bp, Homo sapiens
ataaatgcttcctcctctatgtctttcgtgagctctctacccaaattggtcgttttgcacttctcttgcttattcttgttttaggacctttttttttttttaacttttctcatttttgctgtaagattttaagctgttttaggggaatatcctttctttcctcacttgataggccccccttttcctagcaatttctacaca

SEQ ID NO: 464222 - DNA, 201 bp, Homo sapiens
ggtttgataaactccaatttgagtgcctgactcttctaaaggcagatgtttgttttagaattcagcctttccagacctttgcatgatgaggatagtgatgrtttatagcacaatggtggaaaaacagatgagtgccccttaactcttaatttgttttatgatttgaatctgtcttaatctctaagatacagttcacttttt

SEQ ID NO: 464223 - DNA, 201 bp, Homo sapiens
accggtagaacatgggccttctttccatcaggcctgatcagggtgttgatattggccatgtcagtgccacagagctttttcttagcctgtttgatctggtrtttgttggccttgacatccacagtgaacacaagaatgttgttgactttctgttcttttcatggctgactcagtggtcaggggaaacttgatagcatagtg

SEQ ID NO: 464224 - DNA, 201 bp, Homo sapiens
tataaatgcttcctcctctatgtctttcgtgagctctctacccaaattggtcgttttgcacttctcttgcttattcttgttttaggacctttttttttttttaacttttctcatttttgctgtaagattttaagctgttttaggggaatatcctttctttcctcacttgataggccccccttttcctagcaatttctacac

SEQ ID NO: 464225 - DNA, 201 bp, Homo sapiens
tagcttcttaggcctcgctataaaatgagattagtatttactatttaccacaaaggaattttatgaagatggaaattacgtactaatacagacaggccatkcatagaatacacttaattagcagatgctttctgcttgatcttatctgctaggtatatgcttgtggtgatgggtagtctccaaggtaaccactgggtttga

SEQ ID NO: 464226 - DNA, 201 bp, Homo sapiens
ttttatgtcatttaaaaaaattttttgctaatttggacataaagtagtatctcagttttgtttcagtatgcccttcccatgattactagtgagattgaacrtcttttcatatgtttattgaaaggaacataatttcatttgtgttttctccgttttgagttgctggctcttttattctttccctttttctcttgagatgat

SEQ ID NO: 464227 - DNA, 201 bp, Homo sapiens
ggccaaggtaggcggatcacctgaggtcgggagttcaagaccagcctgaccaacagggagaaacctcgtctctactgaaaatagaaaacagttagccgggygtggtggcacatgcctgtagttccagctgcttgggaggctgaggcaggagaatcacttgaacccacgaggcggaggttgcggtgagctgagatcacgcca

SEQ ID NO: 464228 - DNA, 201 bp, Homo sapiens
ctactcttaccattgtgcctgtttttagtatgcatttgatttagcacatgataatcataattcaaagataagtctgcaacagacttaacatttatatataragtgtttttaaggcagaaggtattatttaccctctttttagaagtggagaaactgagaatcagggagtaaaaatcagtcaactaataggttgcagatcgt

SEQ ID NO: 464229 - DNA, 201 bp, Homo sapiens
atatcagctccaccatgtctagctctgtaaacttggaccaggtacttacactttctgttttttgttttgttttgttttgcttttgagacggagtcttgccstgtcccccaggctggagtgcagtgacgcaatctcggctcactgcaacctccacctccctggttcaagtgattctcctgcctaagcctccggagtagctgg

SEQ ID NO: 464230 - DNA, 201 bp, Homo sapiens
tcaaagttaatatatttttaacaaatttgttgatatgttttcactacctgttttcatttgttgaacatttactatgtgctaagctctatctaaaggtgaamctctagtgttaagacctagtctccatctgtaagtagcttatagtttaagtgaagggcacagatatctaaacatgtgatttaaataaaaagtgtgataatg

SEQ ID NO: 464231 - DNA, 201 bp, Homo sapiens
ttctgcaagtctttctaaaggcattttctttatatgccttgtaattccttttcctgtgttctagcatgaaggaaagaaaatattgcccttcaaaagaatartttgccccacaataatttgaagtaataaatacccttctcccgtcaacacggatttttatattgttgaagatgtgggatgggcttaatttgggggcggagg

SEQ ID NO: 464232 - DNA, 201 bp, Homo sapiens
tggcagggaaggggacatatctatgagataaaagaatggatctccataaaaatatcttatcatttctcataacttaaaagaggtttcatttttacttattytgaatgttaatagaagctagtttttgtttcttattgtagatgtgtgtttatattaactcattattttataaaccaaatgctgtactatatttttatttac

SEQ ID NO: 464233 - DNA, 201 bp, Homo sapiens
aagttgtaggtttgctagtcctaatcacctatctgattgctaatttgattcccgttattaaagtataaatacaaaaccttttgatcatcctgtgtagtatwttgttaagtagctttaaaaatctggctgttttgaggggcttcttatgttctttctttttatgttaaatatttaacaacatattctgtaatagtgagttaa

SEQ ID NO: 464234 - DNA, 201 bp, Homo sapiens
tttttatgttaaatatttaacaacatattctgtaatagtgagttaaaagtggacattaacattgtttctgataaatgccttatgataaattacgacatacyttttttcttaacctagaataaattagacaaagaaaaagacaaagatgaaaaatactctccaaaaaactgtaaacttcggcgcttgtccaaaccaccattt

SEQ ID NO: 464235 - DNA, 201 bp, Homo sapiens
tacaagctaatctccccctttcaaggtcaactaattagcaactctgattccatgtcagctttaaatttccccttgatagataacattttcacatgttttgsagattcggatgtggtcattttgtggggagggggagtgcattctgcctaccagagtttccttagtgtggcaaaatgatttagcttcttaggcctcgctata

SEQ ID NO: 464236 - DNA, 201 bp, Homo sapiens
cagatattgttaattgtcttttgctttctttggtatattttccatatcctctataaagttccaaaatcaatatattgtataatattattctttattatttgtttattttcttcattaagtgctacttttgtataatttttatcataacttcaaaatagctgttagctatttttgtctagagctttaaagtagcaggagttt

SEQ ID NO: 464237 - DNA, 201 bp, Homo sapiens
ttatattaaatagggctcacccagataatacaagctaatctccccctttcaaggtcaactaattagcaactctgattccatgtcagctttaaatttccccktgatagataacattttcacatgttttggagattcggatgtggtcattttgtggggagggggagtgcattctgcctaccagagtttccttagtgtggcaaa

SEQ ID NO: 464238 - DNA, 201 bp, Homo sapiens
gtcaccttttattttgtaattttagttttgaatcttaaagccttccatcagtgttataaatctattttctaatgtattcttcaaattttttatactttttwaatttatttttatttttgttctacaaatagatttttatttcacctacagtagtatgtattttttccaacattctaaaataatgattaaaaagtatttgtc

SEQ ID NO: 464239 - DNA, 201 bp, Homo sapiens
gtgctatcacgactcaagtgacctcctgggctcaagcgacctttccatctcagcctcctaagtagctggaactacaggtgtgtgccaccatgccaggctawtttttgtagtttttgtagagatggggtttcaccctgttgcccaggcttgtctcaaactcctggactcaagcaatccaatccatctgcctcagccttccaa

SEQ ID NO: 464240 - DNA, 201 bp, Homo sapiens
aactgtcatcagtcttgtcttgttctgaaatagcattaaaatatttatcacaccagcctctttcctggtcatcatgttctttatgctgtaattattattgkttttgttattatcatatgataattttgccactgcttattcagtgcttaatatatgtcagtcttttcttacattatatgtagttttttcttatttgaagac

SEQ ID NO: 464241 - DNA, 201 bp, Homo sapiens
tcacctcccagacggggtcgcggccgggcagaggcgctcctcacatcccagacggggcggcggggcagaggtgctccccacatctcagacaatgggcggcygggcagagacgctcctcacttcctagatgggatggcggccgggaagaggcgctcctcacttcctagatgggatggcggccgggcagagacgctcgtcact

SEQ ID NO: 464242 - DNA, 201 bp, Homo sapiens
tccaaactggatctcactgatgccaaaaactctgatactgctcatattaagtccatagaaattacttcgatccttaatggacttcaaggtaaacataacaatcgttctgttgcatgcaagtatttgattttaatttatgagtcaagttctataaaggtaattcagtgacattaccaactactgttttttctaccagagttt

SEQ ID NO: 464243 - DNA, 201 bp, Homo sapiens
acttctcagatggggcggttgccaggtggagggtctccccacttctcagacggggcggccgggcagagacgctcctcacctcccagacggggtcgcggccrggcagaggcgctcctcacatcccagacggggcggcggggcagaggtgctccccacatctcagacaatgggcggccgggcagagacgctcctcacttccta

SEQ ID NO: 464244 - DNA, 201 bp, Homo sapiens
tcctgcttcggcctcccaaattgctgggattacaggtgtgagccacaatgcgtggccatttttatgattttggagcgaagtggtgtgagtcccttttcatrttattgcttaaataaagccactagtatgcctggaatgtaaccataattttggccagggaaaatgatattttaagagacctaagacaggtaggtaaagtag

SEQ ID NO: 464245 - DNA, 201 bp, Homo sapiens
atacggtgcttttctattacacaatgccatttaaaactgaagctattaccttagctctctgatgtgtctagagaaaaattgcctacctgctgcttaagaaygaaacaaagtaaaacaaaatgtagaaaatactgtgatttatcttaatacttactgtacagattcagtttctctttgttgtagccgagtaagcagtgctag

SEQ ID NO: 464246 - DNA, 201 bp, Homo sapiens
ctcctcacttctcagatggggcggttgccaggtggagggtctccccacttctcagacggggcggccgggcagagacgctcctcacctcccagacggggtcrcggccgggcagaggcgctcctcacatcccagacggggcggcggggcagaggtgctccccacatctcagacaatgggcggccgggcagagacgctcctcac

SEQ ID NO: 464247 - DNA, 201 bp, Homo sapiens
ctcctgagatcaagcgattcttctgcctcagcctcccgtgtagctgggattacaggcgcccgccaccatgcctggctaattttttatattttaagtagagrtggggtttcaccatgttgaccaggcttgtctcgaactcctgaccttcaggtaatccacccgccttggcctcccaaagtgctgggattacaggcatgagcc

SEQ ID NO: 464248 - DNA, 201 bp, Homo sapiens
ctgcctcagcctcctgagtagctggggctacaggcccccaccaccacgtctggctaattttttgtatttttagtagagatggggtttcaccgtgttagcgwtgatggtcttgatctcctgacttcgtgatctgcccgccttggtctcccaaaagtgctaggattactggtgtgagccactgtgcctggctgtaatacggtg

SEQ ID NO: 464249 - DNA, 201 bp, Homo sapiens
cagagggggatttggcagggtcataggacaatagtggagggaaggtcagcagataaacaagtgaacaaaggtctctggttttcctaggcagaggaccctgyggccttccgcagtgtttgtgtccctgggtacttgagattagggagtggtgatgactcttaaggagcatgctgccttcaagcatctgtttaacaaagcaca

SEQ ID NO: 464250 - DNA, 201 bp, Homo sapiens
gctcaacaaagggatggtaatttagtagtttaatttcctttttggcatggaggtgctacataaaaacatcttattttagcctctgagatgatccatactaytgatcagaattagagaagcagagcaaaaagaaaaggcaagagtttttttttctggctacgtatagatagacatgcatatttatcagggttggtgttggtc

SEQ ID NO: 464251 - DNA, 201 bp, Homo sapiens
attttatgagcaagcattttttttttctagttgattttgcattatccatacgttacaatatggtgcttttcttttcttatttcttttttttttttttttttgtgaaacagagtctcgctctgtcgcccaggctggagtgcagtggcgcgatctcagctcactgcaagctccgctcctgggttcacacgattcttctgcctc

SEQ ID NO: 464252 - DNA, 201 bp, Homo sapiens
aaataaataataaagttgttgccatttagtgactttttgatggctttattgaatagtaagtgtagtttacaaaccttttgcctacttactttgttgaaaaagttttaaatttagaatttacttgtatcatggtatgaaacatttttatgtaaatttccctgtttctttttttttatttttttttattgatcattcttgggt

SEQ ID NO: 464253 - DNA, 201 bp, Homo sapiens
tggcatcttgaaggattattatccactaatagctaattttaaaattgcttatgctttttagtgttcccatggaattcagtggtttttaggtgccacttagsacatttcgtagactggctaggaaaataattatttaagcaatgctggaaaactgtgaggtagctgttgccttgacaaccagaaaactgttctgtttgctca

SEQ ID NO: 464254 - DNA, 201 bp, Homo sapiens
gttgactcagctgtctgtacatgtagggagcatttcagaatactgaaaaactttgcagagtaatgtttttctggtattttatgagcaagcattttttttttctagttgattttgcattatccatacgttacaatatggtgcttttcttttcttatttcttttttttttttttttttgtgaaacagagtctcgctctgtcgc

SEQ ID NO: 464255 - DNA, 201 bp, Homo sapiens
tattcagtaggtactgtttttgtttgtttgtttgtttgttttgttttttgtttttgagacagggtcttgctctgttgcccaggctggagtgcagtggcacagtcttggctcactgcaacctctgcctcccgggttcaagagattctcatgtttctgcctcccaagtagctgggactacagtcccgtgccatcacacccagc

SEQ ID NO: 464256 - DNA, 201 bp, Homo sapiens
ctgtgcttccttggcattttggcatcttgaaggattattatccactaatagctaattttaaaattgcttatgctttttagtgttcccatggaattcagtgktttttaggtgccacttaggacatttcgtagactggctaggaaaataattatttaagcaatgctggaaaactgtgaggtagctgttgccttgacaaccaga

SEQ ID NO: 464257 - DNA, 201 bp, Homo sapiens
aaagcttgttttgttttcttttaaaaacaaagttgatatcttgacttcttctttccataactcttctaatagagcaacttctaggagttcatactgaaatytacagaggatggaggtgttttcttttcgtttcccaccatgcccccgattttggaaggaagtaaattgctttcctaagcattatacaattttcgatattaa

SEQ ID NO: 464258 - DNA, 201 bp, Homo sapiens
gtattcagtaggtactgtttttgtttgtttgtttgtttgttttgttttttgtttttgagacagggtcttgctctgttgcccaggctggagtgcagtggcacagtcttggctcactgcaacctctgcctcccgggttcaagagattctcatgtttctgcctcccaagtagctgggactacagtcccgtgccatcacacccag

SEQ ID NO: 464259 - DNA, 201 bp, Homo sapiens
cggctggagtgccgtgttgcagtcatggctcactgcagcctccatttcctgagctctagcgatcctcccgcctcagcctccttagtagttgggaccatacstgcatgccactatgcctggctaatttttgtatttctggtagagacggggtttcaccctgttacccaagctggtcttgaactcctgagctcaaacaatcta

SEQ ID NO: 464260 - DNA, 201 bp, Homo sapiens
ggacatttgtaattcgaaaaagcttccccaaccaaaattctcacatgttattttctccttttcttcctcttcacgccactggtctctcactcttcactaarcttactctgaatagggcctggaatgccccctaccgttattttcgtgttagaatcttttcccgggcagtccatttccttctcttctctaattctccacagg

SEQ ID NO: 464261 - DNA, 201 bp, Homo sapiens
agcctccttagtagctgggaccataagtgttcaccacctcttctggcttatttttcaaaattatttgtagagatgaagtctcgctatgttgcccaggctcrtctcaaactcctgggctcaagtgatcctcctgccttggtctcccgaagtgctgggattacaggactggcccagtagggattttaaggattttttttttta

SEQ ID NO: 464262 - DNA, 201 bp, Homo sapiens
aagaagtaggattaactgtagctttttgttgtagttctgaagtaaattcttctttgaagcctgtgcttctttggtaaggaatgagaaatcttgacccactratattgctttcttaaattaattggcaccagtaattatgccagtctaagacgttctttcttatataattttaatgtctgtaggaaatatggggttttcatg

SEQ ID NO: 464263 - DNA, 201 bp, Homo sapiens
tcatccaggctggagtgcagtgatatagtcactgcggccacaacctcctgggctcaagcagttctcccacctcagcctccttagtagctgggaccataagygttcaccacctcttctggcttatttttcaaaattatttgtagagatgaagtctcgctatgttgcccaggctcgtctcaaactcctgggctcaagtgatcc

SEQ ID NO: 464264 - DNA, 201 bp, Homo sapiens
atatatactaaatgtactgtatttttaaaagtctaaatttataaagaagaagtaggattaactgtagctttttgttgtagttctgaagtaaattcttctttgaagcctgtgcttctttggtaaggaatgagaaatcttgacccactaatattgctttcttaaattaattggcaccagtaattatgccagtctaagacgttc

SEQ ID NO: 464265 - DNA, 201 bp, Homo sapiens
agcctcccaaagtgttgtgattacaggtgtgagccatggcatccgacctatcatttttttagcttggtcatccaggctggagtgcagtgatatagtcactrcggccacaacctcctgggctcaagcagttctcccacctcagcctccttagtagctgggaccataagtgttcaccacctcttctggcttatttttcaaaat

SEQ ID NO: 464266 - DNA, 201 bp, Homo sapiens
tgagtggttccataaactgccgctaaaggagacctgagccaactccacccctctgccaacaagaatggaggctggttgcctggcaaccatgatgccccccctcccccgtttagtattagaagttttaattagtcaagcaaggctgctcttgatgttattctcatctggtttcatctgtccaaacttattaatgctgaagga

SEQ ID NO: 464267 - DNA, 201 bp, Homo sapiens
ctgccagccctgagcctatttttggaaccagcatttggggaaactgatcttgtcaggatggatatgtttagggacacagggcttttgagagcagcaccacyccactggggcaaccccagacttggaaaatgtgactcttctaatgccactggcttttagtcaggccacagtgagaaggaacagccctaacaggcctccagt

SEQ ID NO: 464268 - DNA, 201 bp, Homo sapiens
tcaagcaaggctgctcttgatgttattctcatctggtttcatctgtccaaacttattaatgctgaaggacaggggctcccacagtggcttgcctcagtccygtactgcgtgggtgaccctatctctaaaatcatagtccgtgagcactgttagagtatctaaggtctgcggctttaattttacagctgagacccagagaat

SEQ ID NO: 464269 - DNA, 201 bp, Homo sapiens; identical to SEQ ID NO: 134620

SEQ ID NO: 464270 - DNA, 201 bp, Homo sapiens
gcctcagccacgcccccacactcgctcactctctggccctgccattcattcccccccgccccaccccaactcacctgcttcttccatccttatcctttctrggcaccaggctgtctgggggacaggcatgcacacgtgtgcacccgctcacacacgtggccgggctctgggacctcggggccacttctcccaggcacccat

SEQ ID NO: 464271 - DNA, 201 bp, Homo sapiens
agcctcagccacgcccccacactcgctcactctctggccctgccattcattcccccccgccccaccccaactcacctgcttcttccatccttatcctttcygggcaccaggctgtctgggggacaggcatgcacacgtgtgcacccgctcacacacgtggccgggctctgggacctcggggccacttctcccaggcaccca

SEQ ID NO: 464272 - DNA, 201 bp, Homo sapiens
gcccgggcagagcctgggaggcagagctatgcagggcacccggatggagggcatgagcagagagatgggaagccggccccaagggaaaaaactggaggccrtgggagtggtgtggtccagggtggcctgagtccctggtggagaggtcacaggctgcccattccaggggcaacctgggctccttgcagctggaggtgcggc

SEQ ID NO: 464273 - DNA, 201 bp, Homo sapiens
atgtctgggcttgggccgagcctcagccacgcccccacactcgctcactctctggccctgccattcattcccccccgccccaccccaactcacctgcttcytccatccttatcctttctgggcaccaggctgtctgggggacaggcatgcacacgtgtgcacccgctcacacacgtggccgggctctgggacctcggggcc

SEQ ID NO: 464274 - DNA, 201 bp, Homo sapiens
tggaaaatgtctgggcttgggccgagcctcagccacgcccccacactcgctcactctctggccctgccattcattcccccccgccccaccccaactcaccygcttcttccatccttatcctttctgggcaccaggctgtctgggggacaggcatgcacacgtgtgcacccgctcacacacgtggccgggctctgggacctc

SEQ ID NO: 464275 - DNA, 201 bp, Homo sapiens
gtaggctcctatgggaggagcgggcggtagtgagaatcttcatcaaatggagtaacatgacccaaatctctagaggtttcataattttgctcttgcttctraaaacataatcatctcttatggggtgttatgtgctttgtatcctgaaattttccacttgctgcttcttggtgtgaggcgagaaatgccaccacgtggcac

SEQ ID NO: 464276 - DNA, 201 bp, Homo sapiens
cagtggctcttaaaacaaggtttttgacctaaggagcctgttctccaggctgacctgaacccctcaaagacatggcaagcaggtgacatttctgcccaggrgatttgctgagagatctggaaggtacaaagccaccttaggcttcaatgggtgagtgaatttttaccacaaaccccaaagggctgatttgactttctctat

SEQ ID NO: 464277 - DNA, 201 bp, Homo sapiens
ggcttgctgcctgcatggcatgaggctgctgtcttgtgggtgctggcagccacaatctccatttttctgaagaccaccatttatggctagatccagtagargtccagaactttcccaacactgctggagaggaagtgtttcacagtcagaggagagagccatggggaatggaagcaggggaagaaggggtggggaggggag

SEQ ID NO: 464278 - DNA, 201 bp, Homo sapiens
acacaggttgtagtgcagtggcaatcataactcagctgcagccttcaactcctgaactcaaacaaccctcatgtcttagcctcccgagtagctgggactamaggcacatgccacgaggcccagctttttttttttttttttagagctagtggtcttgctctgttgcccaggctggtattgaactcaagcgacatcctcctg

SEQ ID NO: 464279 - DNA, 201 bp, Homo sapiens
tgtgaggagctggccagtgtccagggccccatccccagccaccccttgggaaaatgtcctctttccctgggatgctctgaggtcctcagagggaaaggttygggatcccccgtgcctctccctgcagggcccagggcagctgatcccactcatcgaggagacaaccagcaccgagtgtcgccaggacgtggccacgaacct

SEQ ID NO: 464280 - DNA, 201 bp, Homo sapiens
ttttccacttgctgcttcttggtgtgaggcgagaaatgccaccacgtggcactgcaggaggagactggtggaagccacagggctaggccttcacttcccaktgacactgttcccaattccctccaggataagctgagactcctcaggatgtggttctgcagcagatgaggtgcgaacaaagcctgctctgccctgggcacc

SEQ ID NO: 464281 - DNA, 201 bp, Homo sapiens
tgacttaaagtctattttgtctgatataagtatagctagtcctgcatgcttttagtttacatttgagtggaatatcttttttcatcccatcacttagtctrtatgcatctttttagtgagttccttataggcagcatatagctggatcttgtttttgttaaattcattttacaaaatttattttagagacaaggtcttgtt

SEQ ID NO: 464282 - DNA, 201 bp, Homo sapiens
ctgagattacaggcatgtggcaccatgcccggctaaacaaggctatatattttaattgggaagtttgaactctttacattcaaggttgttattgatgagtkaggacttattcctgtcattttgttaattggtttctgatgttttatatgtcctttgttactttcttcctcttgaaaaatttttttcctttcctttttttaa

SEQ ID NO: 464283 - DNA, 201 bp, Homo sapiens
tacaggcatgcgccaccacacctggctaattttgtatttttagtagagatggggtttctctatgttgatcagctggtctcgaactcctgaactcgtgatcygcctgcctcgaccttccaaagtgctgggattacaggcgtgagccaccgcgcccggcactaattttttttttttttttttttttgagacagagtctcattc

SEQ ID NO: 464284 - DNA, 201 bp, Homo sapiens
tcctgttggctgtcctgtaaccactcaatgggttcttctttcctgttgctcagatacagctgatctatcaagatcagagaaagagtataatacacatagarccagctaaatgggagactagagttttattattactcaaatcagcctccccgaaaatttggaggctaagatttttaaagaatagtttggcaggcagggggc

SEQ ID NO: 464285 - DNA, 201 bp, Homo sapiens
caggagggaggcaaggaacagagccaagggcagaggtgggacagtgggctgggaggtggcgaggaggccctttattgaggggccagcttagatcccccagmcccaaggtcctctgtcctccccctcccccaaaagctttgtcccagccccctacccactgggacctctgtttgtagtcagagtttgtttggctacttcctt

SEQ ID NO: 464286 - DNA, 201 bp, Homo sapiens
tcttcctggggcaggggctggccaaggacttcctggacctgctcttccagctggagctgagtcgcaccagtgaggcctgggaaggagctgggcccagaacrctgggaggtgtttgggggtgggtgggctcctcctgtaggaggcagatggggtcagacaggagggaggcaaggaacagagccaagggcagaggtgggacag

SEQ ID NO: 464287 - DNA, 201 bp, Homo sapiens
agccttttgagccattgtgggtgggctgggggacagcagggttgaaagaccggctataagtggcagctctgctgttgccctccaacgtggagcccagctgygcacctgccttcaaggggagctctgatgcaggcagctggatgcctgcaagcacacctgtctggggcaagggagaagataagaaggacaggaaggaagtag

SEQ ID NO: 464288 - DNA, 201 bp, Homo sapiens
ataactcagctgcagccttcaactcctgaactcaaacaaccctcatgtcttagcctcccgagtagctgggactacaggcacatgccacgaggcccagcttwttttttttttttttagagctagtggtcttgctctgttgcccaggctggtattgaactcaagcgacatcctcctgcctcagcttcccaaagcatggggatt

SEQ ID NO: 464289 - DNA, 201 bp, Homo sapiens
gggctttccaaaaacagaaaataaatagcccgggcagagcctgggaggcagagctatgcagggcacccggatggagggcatgagcagagagatgggaagcyggccccaagggaaaaaactggaggccatgggagtggtgtggtccagggtggcctgagtccctggtggagaggtcacaggctgcccattccaggggcaacc

SEQ ID NO: 464290 - DNA, 201 bp, Homo sapiens
gaggcagatggggtcagacaggagggaggcaaggaacagagccaagggcagaggtgggacagtgggctgggaggtggcgaggaggccctttattgaggggscagcttagatcccccagccccaaggtcctctgtcctccccctcccccaaaagctttgtcccagccccctacccactgggacctctgtttgtagtcagagt

SEQ ID NO: 464291 - DNA, 201 bp, Homo sapiens
tgagtcgcaccagtgaggcctgggaaggagctgggcccagaacactgggaggtgtttgggggtgggtgggctcctcctgtaggaggcagatggggtcagasaggagggaggcaaggaacagagccaagggcagaggtgggacagtgggctgggaggtggcgaggaggccctttattgaggggccagcttagatcccccagc

SEQ ID NO: 464292 - DNA, 201 bp, Homo sapiens
cagtggcagtaggcctgtgcgcctgtccttctaaacccattctgcagagcagaaacctgaggtctggggatgtgaggagctggccagtgtccagggccccrtccccagccaccccttgggaaaatgtcctctttccctgggatgctctgaggtcctcagagggaaaggttcgggatcccccgtgcctctccctgcagggcc

SEQ ID NO: 464293 - DNA, 201 bp, Homo sapiens
tgcctgatccctttcttatcttttgcgatttggtggttttctgtgatgataatgcttgatttgtttctcattcgtgtatctagtctatcagtgacttttawactttcacatggtttctgtctataattcccttttcctcctaccatatcttgcataccgtaagtgctaatcaatgctctgatgccacttaacataactgga

SEQ ID NO: 464294 - DNA, 201 bp, Homo sapiens
gtgcacctgctgtgccacgaggtcaagctgggcatgcaggtgagggggcctgggcagggtgggagggtccagtggcagtaggcctgtgcgcctgtccttcyaaacccattctgcagagcagaaacctgaggtctggggatgtgaggagctggccagtgtccagggccccatccccagccaccccttgggaaaatgtcctct

SEQ ID NO: 464295 - DNA, 201 bp, Homo sapiens
tcctttcctttttttaataagagacagggtctcactatgttgccttggctggtctcaaactcttgaccttaggcagttctcccacctcagccttccaaagkgctgggattacagggatgagccaccatgcctgatccctttcttatcttttgcgatttggtggttttctgtgatgataatgcttgatttgtttctcattcg

SEQ ID NO: 464296 - DNA, 201 bp, Homo sapiens
aggtgcggctgcgggacgagacggtgctgccctccagctactaccagccactggtgcacctgctgtgccacgaggtcaagctgggcatgcaggtgaggggrcctgggcagggtgggagggtccagtggcagtaggcctgtgcgcctgtccttctaaacccattctgcagagcagaaacctgaggtctggggatgtgaggag

SEQ ID NO: 464297 - DNA, 201 bp, Homo sapiens
aaaatattcacatttaactgggtgtcttgggtcgttttgctaaatctggcagcctgtctaggaagccctctggcttgtttgctgtggcccacagccctcartggttcagctttgtgtctctgtggaaggccccagacccccactcccccagttcccatccttaacagggtaggagcaggtggacggctgtgtgtccagcac

SEQ ID NO: 464298 - DNA, 201 bp, Homo sapiens
gtatttttttggagatagagtctcactctgtcacccaagctggagtgcagtggcatgatcttggctcactgcaacctccacctcccgggttcaagtgattstcctgcctcagcctcctgagtagctgagattacaggcatgtggcaccatgcccggctaaacaaggctatatattttaattgggaagtttgaactctttac

SEQ ID NO: 464299 - DNA, 201 bp, Homo sapiens
gggattacagttgtgagtcaccatgcctcgcctggatcttgtttttctaacccactcagcaagggtattatgtgtgtgtatatatatatttttttaattgkatttttttggagatagagtctcactctgtcacccaagctggagtgcagtggcatgatcttggctcactgcaacctccacctcccgggttcaagtgattct

SEQ ID NO: 464300 - DNA, 201 bp, Homo sapiens
ttctgggttcaagtgattctcctgcctcagcctcctgagtagctgggattacaggcatgcgccaccacacctggctaattttgtatttttagtagagatgsggtttctctatgttgatcagctggtctcgaactcctgaactcgtgatccgcctgcctcgaccttccaaagtgctgggattacaggcgtgagccaccgcgc

SEQ ID NO: 464301 - DNA, 201 bp, Homo sapiens
ttacagaggcagtttaggtttgtgtgttttttttgttttttgtttttttgagatggagttttgctctggttgcccaggctggagtgcaatggcacaatctyggctcactgcagcctccgccttctgggttcaagtgattctcctgcctcagcctcctgagtagctgggattacaggcatgcgccaccacacctggctaatt

SEQ ID NO: 464302 - DNA, 201 bp, Homo sapiens
tacctatactaaaaatattcaaatttaggccgggtatggtggcgcatgcctataatctcagcactttgggaggccaaggcaggaggatcacttgagcccasgagttcaagaccagcctgggcaacatagcaagaccccatctctaaaaaaaaaaaataagtaaataaaatattcacatttaactgggtgtcttgggtcgtt

SEQ ID NO: 464303 - DNA, 201 bp, Homo sapiens
tgtccttctaaacccattctgcagagcagaaacctgaggtctggggatgtgaggagctggccagtgtccagggccccatccccagccaccccttgggaaamtgtcctctttccctgggatgctctgaggtcctcagagggaaaggttcgggatcccccgtgcctctccctgcagggcccagggcagctgatcccactcatc

SEQ ID NO: 464304 - DNA, 201 bp, Homo sapiens
aaaaacagaaaataaatagcccgggcagagcctgggaggcagagctatgcagggcacccggatggagggcatgagcagagagatgggaagccggccccaasggaaaaaactggaggccatgggagtggtgtggtccagggtggcctgagtccctggtggagaggtcacaggctgcccattccaggggcaacctgggctcct

SEQ ID NO: 464305 - DNA, 201 bp, Homo sapiens
gctttccaaaaacagaaaataaatagcccgggcagagcctgggaggcagagctatgcagggcacccggatggagggcatgagcagagagatgggaagccgkccccaagggaaaaaactggaggccatgggagtggtgtggtccagggtggcctgagtccctggtggagaggtcacaggctgcccattccaggggcaacctg

SEQ ID NO: 464306 - DNA, 201 bp, Homo sapiens
gctcactgcaacctctgcttcctgggttgaagcgcttctcctgcctcagtctcccgagtagctgcgattacaggcacctgccacaatgcctggctaatttwtatatatatattttaatagagatggggttttgccgtgtcagccaggctggtcttgaactcatgacctcaagtgatctgcctgccttggcctcccaaagtt

SEQ ID NO: 464307 - DNA, 201 bp, Homo sapiens
aatctggcagcctgtctaggaagccctctggcttgtttgctgtggcccacagccctcaatggttcagctttgtgtctctgtggaaggccccagacccccaytcccccagttcccatccttaacagggtaggagcaggtggacggctgtgtgtccagcacaaggtgtttccatagaaccagccaaggcccatcttgccatct

SEQ ID NO: 464308 - DNA, 201 bp, Homo sapiens
gatagaggtgccttgagtgcagagacaggaagggctttccaaaaacagaaaataaatagcccgggcagagcctgggaggcagagctatgcagggcacccgratggagggcatgagcagagagatgggaagccggccccaagggaaaaaactggaggccatgggagtggtgtggtccagggtggcctgagtccctggtggag

SEQ ID NO: 464309 - DNA, 201 bp, Homo sapiens
cagtgggctgggaggtggcgaggaggccctttattgaggggccagcttagatcccccagccccaaggtcctctgtcctccccctcccccaaaagctttgtsccagccccctacccactgggacctctgtttgtagtcagagtttgtttggctacttcctttgcaacccccacccccaacctttttctgcatggtagatgaa

SEQ ID NO: 464310 - DNA, 201 bp, Homo sapiens
cataactcagctgcagccttcaactcctgaactcaaacaaccctcatgtcttagcctcccgagtagctgggactacaggcacatgccacgaggcccagctwtttttttttttttttagagctagtggtcttgctctgttgcccaggctggtattgaactcaagcgacatcctcctgcctcagcttcccaaagcatggggat

SEQ ID NO: 464311 - DNA, 201 bp, Homo sapiens
aaaaaataaataaataaagaagaagaatgaccatgcactatttgagacatacctatactaaaaatattcaaatttaggccgggtatggtggcgcatgcctrtaatctcagcactttgggaggccaaggcaggaggatcacttgagcccaggagttcaagaccagcctgggcaacatagcaagaccccatctctaaaaaaaa

SEQ ID NO: 464312 - DNA, 201 bp, Homo sapiens
acccatgatggtgccattatctgggagttgatcgattcaaggctggcagctccacatacccaagcttggaggtggcagggagccagacctcgaagacagakagaggtgccttgagtgcagagacaggaagggctttccaaaaacagaaaataaatagcccgggcagagcctgggaggcagagctatgcagggcacccggat

SEQ ID NO: 464313 - DNA, 201 bp, Homo sapiens
tctgtttaacaaacgttactggaactgggatatcagtatggataaaaatgaaccttgaccccctttctacactgtgcacaaaattaatatgaggtgtatcrtagacctaaatacaaaagctgacactgtaaagtttctagaagaaaacacaggaagataccgtccagacctcaaagtaggcaaaggtttcttagacaagat

SEQ ID NO: 464314 - DNA, 201 bp, Homo sapiens
ccgggcatggtggtgcacacctgtagtcccagctaatccggagcctgaggcaggagaatcgcttgaacccgggaggtggaggttgtagtgagctgagatcrtgccactgcactccagcctgggcaacaagagtgaaactccgtttcaaaataaataaataaattcaaatatgccaggctgatctatggtcacagaagtcag

SEQ ID NO: 464315 - DNA, 201 bp, Homo sapiens
atagaaataacccagatgctcaactatggtgatgaaccaacaaatcatgaggtgtccatatgacgggacggcactcagcaacaagacacaccggcgcccaygacgcacgtccatatgacgggacggcactcagcaacaaagacacaccggcgcccacgacggtacatgtgagtgtcaaaaacagtaagtgaaagaagctgg

SEQ ID NO: 464316 - DNA, 201 bp, Homo sapiens
atttcactacctccgtattcataacagccccaaaatagaaataacccagatgctcaactatggtgatgaaccaacaaatcatgaggtgtccatatgacggracggcactcagcaacaagacacaccggcgcccacgacgcacgtccatatgacgggacggcactcagcaacaaagacacaccggcgcccacgacggtacat

SEQ ID NO: 464317 - DNA, 201 bp, Homo sapiens
agggctgagtgacagaaaaacagagtgtgacaaagctgtcctcaccccagccctcctcgctcccactctgagtcctgcacgtccagcccctcttattctgyttagctcaggggtgagagaagtgtttcttaaagggtcggagcacagataattgaggcttggcaggccctgtggtctatgttgcaacaactcaaccctgct

SEQ ID NO: 464318 - DNA, 201 bp, Homo sapiens
ggcaccttcccactgggagatcacaggccgtcctgagatcccgcatcagaggccgggagctgtgacttcgtggctcctgccgagactaatccctggcaccraggccacaccaccgggcagccgccccctccttctcaggagccagtgtccctcttgagggggctgggcaagagcccctcatccttccccatgggtgcaggg

SEQ ID NO: 464319 - DNA, 201 bp, Homo sapiens
agaggggcttgagcagggccttggggggggtcaccagcagcttgtgagaggccatggtccgcacccaacctgccgctcgggaacctggggctgcactggcyttggccaaagcctggaatatttcccagcagggcggacacagaggtgagaggtgaggattggtggatgggcttccgtggcagccctgccttttgttccctg

SEQ ID NO: 464320 - DNA, 201 bp, Homo sapiens
cagcaggagctggttggggatggagaggggcttgagcagggccttggggggggtcaccagcagcttgtgagaggccatggtccgcacccaacctgccgctygggaacctggggctgcactggccttggccaaagcctggaatatttcccagcagggcggacacagaggtgagaggtgaggattggtggatgggcttccgtg

SEQ ID NO: 464321 - DNA, 201 bp, Homo sapiens
gccaccgaatccaccaggagcaggcacttgtacctggagaggtgggggacagaatggagggcagcaggtgaggcagggggccactggagggcctggccccmggctggatggggtttctgagcctcaggctggcaaggaaggcagggcacctcccacctccaccccaggagttggccagttgccttctcctgcctgtcagga

SEQ ID NO: 464322 - DNA, 201 bp, Homo sapiens
ggccaggccgttccagccaaggccagcagcagcagcgccctgggagtggcctctcgcagctgtgaaacgggagctgagggcaccacctgctcagctcagcygcctttctgggccctggggtgggcctgggctggcaggatggggcgtgaagtccgggtcaggacccgggactggcctgccttgccctcctgggcaggactg

SEQ ID NO: 464323 - DNA, 201 bp, Homo sapiens
aggcatggtggccagctcctcacttggctgaggtccagggatggacacaggtgtctggggttggggagctgcagcctgcaggtgggggccagcagagaggsctgcaggtgagaggtgatgaggggcaggggctaagttggcagcaggaggagggctgtggagtgtcctgggcaggtgaggcaagtcgaggggccggcgtga

SEQ ID NO: 464324 - DNA, 201 bp, Homo sapiens
gtccagggatggacacaggtgtctggggttggggagctgcagcctgcaggtgggggccagcagagagggctgcaggtgagaggtgatgaggggcaggggcyaagttggcagcaggaggagggctgtggagtgtcctgggcaggtgaggcaagtcgaggggccggcgtgacttgggtctttgcaggttcgctgaacgcggcc

SEQ ID NO: 464325 - DNA, 201 bp, Homo sapiens
tcagcttccacgtggtgcccgtggtgagaaggaagcttggggcgcctgccctggagggggtgcagcagatgcccggattccctgagggcagcttgagaagratcctcagccaaggggtggacctggtgccggccagcgcccagctctggaggtaggcgcaccctcctggtcacaaggttcttggggagggggcaggaaggg

SEQ ID NO: 464326 - DNA, 201 bp, Homo sapiens
gggctggccccatctgccgcccctgccctgccttcatgaggccagcattctggatactggggagttctgctggggaaacagcaccctccacacatctcagyggtgatcagtgggtgcggggtgcattgcagctcccagaatatgtgtgtcctagaactaacctctgtgaaactgaccttgtactagggtctttgccaacgt

SEQ ID NO: 464327 - DNA, 201 bp, Homo sapiens
ttggggcgcctgccctggagggggtgcagcagatgcccggattccctgagggcagcttgagaaggatcctcagccaaggggtggacctggtgccggccagygcccagctctggaggtaggcgcaccctcctggtcacaaggttcttggggagggggcaggaaggggccactgcccccatgctcccctggccccagccagga

SEQ ID NO: 464328 - DNA, 201 bp, Homo sapiens
gcagcagatgcccggattccctgagggcagcttgagaaggatcctcagccaaggggtggacctggtgccggccagcgcccagctctggaggtaggcgcacmctcctggtcacaaggttcttggggagggggcaggaaggggccactgcccccatgctcccctggccccagccaggaggatctgcagggtcctccgtctgcc

SEQ ID NO: 464329 - DNA, 201 bp, Homo sapiens
gctcagtggaaacactggggtgctgggtagttcatggagccgctcttgccgcagtaaggagtgagtgtttccctgggcctggtggagatggggccgaatcygcagcatcggctgctggacgcacgcttccagcagggcttcctgcacgcggagccccaaggctgcttgggctgggtagggctctcagagcccacccttacc

SEQ ID NO: 464330 - DNA, 201 bp, Homo sapiens
agtgcaggggtgctgtatactgggagccccactatactggtccagtttaacggcttataaattggcagtgatgagatagagtcagatttttttttttttttgagatggagtctcactcagttgcccaggctggagtgaagtggtgtgaccttggctcactgcaacctctgctcctgggttcaagcgattctcctgcctcag

SEQ ID NO: 464331 - DNA, 201 bp, Homo sapiens
ctgtggttcaaagaataaatcacaaggaaattataaaatattttgatctgagtgattccaaaaacaccattgatcaaaatttgggagatgcagtgaagaargcgctcagagggaaatgtttagctttaaatgctcatactagaaaacaaataaatgtttaaaatcaattaagcttctaccataggaagctagaaaaagagg

SEQ ID NO: 464332 - DNA, 201 bp, Homo sapiens
gggaggcgaggagagctgagctgggccacctggtctcagccacctgttcttggctccccaacagactctgcactgcaccatgggaggctcctgggatgttwggaagaagaaacgggcttctccttgagggggtagtggagggattttgtccccagcagtggcctctgagagtctttcagtgcctggtggggcagggcaggc

SEQ ID NO: 464333 - DNA, 201 bp, Homo sapiens
cattacacagtataagtctaaatagtctgtggttcaaagaataaatcacaaggaaattataaaatattttgatctgagtgattccaaaaacaccattgatyaaaatttgggagatgcagtgaagaaagcgctcagagggaaatgtttagctttaaatgctcatactagaaaacaaataaatgtttaaaatcaattaagctt

SEQ ID NO: 464334 - DNA, 201 bp, Homo sapiens
ccccagtgatacaaagaagacttgaacaatgctgtcatccaggtggacctgaggatctgtagaagctcacacctgacaatgacgaagacacgttcatctcktgtccatgggatagtcaccgagactgctgctagtttataaaacagactctcagtacatgttcaaaatactgaagtccatatacagtatgagctctgacca

SEQ ID NO: 464335 - DNA, 201 bp, Homo sapiens
aatatcttctaagtaatgaggacgttctccaatggcacagacatgaggacagtgaaactgttggcgccagcaccggcctcaacagccggcagcgtcctgcygtccagcttcttttctcaggaccccctctgtattacttgtttaattttgctgaagatttaaagcaaaccccgacagtgtgttcttccacccagatcttcc

SEQ ID NO: 464336 - DNA, 201 bp, Homo sapiens
gtacttcatagaaaaagcaggcaaaaaaccaaaccaaaacaaacaacaacaacaaaaccccagtgatacaaagaagacttgaacaatgctgtcatccaggyggacctgaggatctgtagaagctcacacctgacaatgacgaagacacgttcatctcttgtccatgggatagtcaccgagactgctgctagtttataaaac

SEQ ID NO: 464337 - DNA, 201 bp, Homo sapiens
tgaatgcataaagggagaaggagacaagaccacattcatgctgggagaactgaacaccccactctcagtacttcatagaaaaagcaggcaaaaaaccaaamcaaaacaaacaacaacaacaaaaccccagtgatacaaagaagacttgaacaatgctgtcatccaggtggacctgaggatctgtagaagctcacacctgac

SEQ ID NO: 464338 - DNA, 201 bp, Homo sapiens
gagaattgcttgaacctgggaggtggaggttgcggtaagccgagatcccaccattgcactccagcctgggcaacaagagcgaaactccgtctcaaaaaaaraaaaaaaaaaaaagaaaagaaaagaaatagaaatcgttcatctcttttgtatggagagacaagtggcccaaggaaagaaaacacacaaacattaagacaa

SEQ ID NO: 464339 - DNA, 201 bp, Homo sapiens
ggaggccggggtgggtggatcacctgaggtcaggagttcgagaccagcctggccaacatggtaaaaccccgtctctactaaaaatacaaaaaattagccgrgcatggtggcaggtgcctgtaatcccagctactcgggaggctgaggcaggagaattgcttgaacctgggaggtggaggttgcggtaagccgagatcccac

SEQ ID NO: 464340 - DNA, 201 bp, Homo sapiens
gcccaccatgagctgaatgttatggggtcctaagtttgggggtggcagtggtggtgcaacagcaatccattgtacatggacatggcctcttcagggccagrccaagcagggtgggtggaaacaagtcagttagatgaacaatggcctgggtcaccctatcatcacctacgtgcacctgtgcctctcctttaacctcacaca

SEQ ID NO: 464341 - DNA, 201 bp, Homo sapiens
ctctggcaaaccccaaaagaggaggtgaagtcctggaacgagagcaaattgtctgcagcagagaagtactcactgttcaaaagcagcatttggtgtgacaytgggcccctggccaggggacaccaagtaactgtgtgacctgagctgcccaccatgagctgaatgttatggggtcctaagtttgggggtggcagtggtggt

SEQ ID NO: 464342 - DNA, 201 bp, Homo sapiens
ctgcagggcaggcaactgacctttgtcacccaggagtccaggggataagggccacctggccacgtggccaggccgttccagccaaggccagcagcagcagygccctgggagtggcctctcgcagctgtgaaacgggagctgagggcaccacctgctcagctcagccgcctttctgggccctggggtgggcctgggctggca

SEQ ID NO: 464343 - DNA, 201 bp, Homo sapiens
ttctggggaacttattggaatttttaagctgaatgatgacaggagtggctgatattgaacggccaggaatagaagttttccaaacctcaaatggcacttgktttagaatgtgaggttctacagattgtagcagctcttttggtgatgtgtgagttaaaacagctagaaggtgaagccttagctataaattagcttgtaatt

SEQ ID NO: 464344 - DNA, 201 bp, Homo sapiens
tgccctaataatggaacaggtcagcttggcaggactaaaaaggagtgcgtaaaggaatagccttccatttcacaagggagtggtggtgtgaaacagcctcrttggggttttccattcacacctgtgaggaaaatgagggactggaacattgggctacagtaaatatttaaagctgaataactggcccttgtatccctgagg

SEQ ID NO: 464345 - DNA, 201 bp, Homo sapiens
cagctgctatgagtcccaagtcggagttggggggattctgagggcctgcccaggttctgaggaggtgaggccgtggctcatgagggtcaagggaatgtggycgcgggtgccgtggtgccgcaggctggccttcgccatccctaggccgtgacctcggaggccctcctggccctgggacactgttgggtagaatctcagggt

SEQ ID NO: 464346 - DNA, 201 bp, Homo sapiens
ctgccagccctgactggcaggcagctgctatgagtcccaagtcggagttggggggattctgagggcctgcccaggttctgaggaggtgaggccgtggctcmtgagggtcaagggaatgtggccgcgggtgccgtggtgccgcaggctggccttcgccatccctaggccgtgacctcggaggccctcctggccctgggacac

SEQ ID NO: 464347 - DNA, 201 bp, Homo sapiens
catccagcatgcacgcagcaagtcatctggtgtgagctgctctgagctgtgggcataggcagggctggggtgtggagcagagattctgagcccatcatgcrgccacccctggaggctgccgccctgggcttcctgaaggggccatgagtggagctgtcacacccccgggctgagtggttccaacctgggcaggtctgagag

SEQ ID NO: 464348 - DNA, 201 bp, Homo sapiens
ctgggggttcccaggagagtccaggcacacccttctctctgcttcctgggccacagtgacattctgcagaaccctgtccttctggggctttgtaacatcaratgctgagaagaacaaggaacaggcaggggccagggattccaacccaccccaaccccgaggaagcaggtgggggctgtgctgtcttggggtctgctcggc

SEQ ID NO: 464349 - DNA, 201 bp, Homo sapiens
attccaacccaccccaaccccgaggaagcaggtgggggctgtgctgtcttggggtctgctcggctggccccttcctggagtgtgtggccagccgggcgctrctccacagatggggctggcccctccacctggctcagtgttgagggagaggtgcccctcctggtgtccggagtccctaggtgacctctggccatgccctct

SEQ ID NO: 464350 - DNA, 201 bp, Homo sapiens
ttggactgcagggggtgagtaggagctcaaaggggcggagggaaggagagaaaggcccagaggatgctgggagctgcagaggcccccaagggaggtcctgktgggtgaaaggaggagctggggtggggcgccagggccagagccaggcaggggaggagagagaggggttcatgccttcgggagccagcaggctgggggcag

SEQ ID NO: 464351 - DNA, 201 bp, Homo sapiens
tggactgcagggggtgagtaggagctcaaaggggcggagggaaggagagaaaggcccagaggatgctgggagctgcagaggcccccaagggaggtcctgtkgggtgaaaggaggagctggggtggggcgccagggccagagccaggcaggggaggagagagaggggttcatgccttcgggagccagcaggctgggggcagc

SEQ ID NO: 464352 - DNA, 201 bp, Homo sapiens
ttgtattttattttttaatttattatttattttattttattttgtttattttttagactgagttttactctgtcacccaggctagagtgcagtggcatgawcttggctcattgcaacctccgcctgccaggttcaaacaattcttctgccttagcctcctgagtagctgggactacaggcacctgtcaccacacccagctc

SEQ ID NO: 464353 - DNA, 201 bp, Homo sapiens
ggggcgccagggccagagccaggcaggggaggagagagaggggttcatgccttcgggagccagcaggctgggggcagcgggtgggaggggcctgggactcygactgggacgtggaggggagggcacagggtaggaagaggtgtgggtaggagcagggaggggcagccagggtgagggtgggagcgcagggtgggagcacag

SEQ ID NO: 464354 - DNA, 201 bp, Homo sapiens
gggaaatgtcccatagagttggggctaggctaggttaggcccttgaaaaagaggatctcttaaggcttgtaaagtttccacccccaggtggttagcttgayggagattttagaggattttccattgtggaacctcagggaggagaagtttattttcagagttttgaagccatccttcaggaatgaatgtgaaaccctgttt

SEQ ID NO: 464355 - DNA, 201 bp, Homo sapiens
cgggtgggaggggcctgggactccgactgggacgtggaggggagggcacagggtaggaagaggtgtgggtaggagcagggaggggcagccagggtgagggygggagcgcagggtgggagcacagggtgggccgggtgggccaggaggccagggctgaccctgctgtcctgcagatggtgctgctgtgggcctctgtgctct

SEQ ID NO: 464356 - DNA, 201 bp, Homo sapiens
tacgcccctgggacaggccctctacgttgaataggttggaggagggcagggggttcattgcaccctccggatttgattgacagcaaattgggcaggattgrgaaatgtcccatagagttggggctaggctaggttaggcccttgaaaaagaggatctcttaaggcttgtaaagtttccacccccaggtggttagcttgacg

SEQ ID NO: 464357 - DNA, 201 bp, Homo sapiens
tgggccgggtgggccaggaggccagggctgaccctgctgtcctgcagatggtgctgctgtgggcctctgtgctcttcccggcgcccgaggactgggcagarctgcagggcgccgtgtaccgcctgctggtggtgctgctctgttgcctggccacgcggaagctgccccacttcctccacccgcagcgcaacctgctgcagg

SEQ ID NO: 464358 - DNA, 201 bp, Homo sapiens
tgggaattactctagatcttaacagggcaataggaagaaaagttatccaaaacagttgagtttctatagagagcttagtgagaagggttttcaaagctagsttggcccttggatgactgtgggtggtaagcagcatgtaagtgatattttatttggagggcctcactgattcctggagtaatagaagaaataaaggccagg

SEQ ID NO: 464359 - DNA, 201 bp, Homo sapiens
ccttggtgccatctaccagcgcgtggagggcttcgccagccagcccgaggcggccctgcgcatccacgccacccacctgggccgcagccccccgccgcgcrtcggctccgggctcaaggcgctcctgcagctgccagccagtgaccccacttactgggccactgcctacttcgacgtcctgctggacaaggtgggtgctgg

SEQ ID NO: 464360 - DNA, 201 bp, Homo sapiens
caagtgactgtagaatctgaaccggaaagtagaacagatgatgaagaagatgcccgggcaggtgtggcctcagactctgctggggctggccccatctgccrcccctgccctgccttcatgaggccagcattctggatactggggagttctgctggggaaacagcaccctccacacatctcagcggtgatcagtgggtgcgg

SEQ ID NO: 464361 - DNA, 201 bp, Homo sapiens
tcctgcagctgccagccagtgaccccacttactgggccactgcctacttcgacgtcctgctggacaaggtgggtgctggccgcgggggccttgggcaggcycgggggcatgggagggtggaatggagccctggcctggctccctgcccattctctcccgggtcagcagccccaggaatgctgaggccaggtcagggctcgg

SEQ ID NO: 464362 - DNA, 201 bp, Homo sapiens
tctgtgggtgggaacatgggtgagacccaggccccccgagtgacccccactcctacctggtacatatccttgctcatggacccgatcatctgcagcccccyggctgccatgatgcgaggaggcaggttggaaggaccaggccccagcaggagctggttggggatggagaggggcttgagcagggccttggggggggtcacc

SEQ ID NO: 464363 - DNA, 201 bp, Homo sapiens
ccaaaatggactttcccaactcagggttcctagaagagagtggtgagggaaaatactccgcatgggcagagtatcaagaaatagaaactgggccaggcgcrgtggctcacatctgtaatcccagcactttgggaggccggggtgggtggatcacctgaggtcaggagttcgagaccagcctggccaacatggtaaaacccc

SEQ ID NO: 464364 - DNA, 201 bp, Homo sapiens
catcggctgctggacgcacgcttccagcagggcttcctgcacgcggagccccaaggctgcttgggctgggtagggctctcagagcccacccttaccttgcyggtccatgtaaaggggggtcccgcccagggatgccaccgaatccaccaggagcaggcacttgtacctggagaggtgggggacagaatggagggcagcagg

SEQ ID NO: 464365 - DNA, 201 bp, Homo sapiens
ggagtgagtgtttccctgggcctggtggagatggggccgaatctgcagcatcggctgctggacgcacgcttccagcagggcttcctgcacgcggagccccmaggctgcttgggctgggtagggctctcagagcccacccttaccttgccggtccatgtaaaggggggtcccgcccagggatgccaccgaatccaccaggag

SEQ ID NO: 464366 - DNA, 201 bp, Homo sapiens
catgccaattcgaactggagaggattgactggaaagttctttggatgccttctaagaccattcattccagagggtgggagacaaactttacagtctcaggrcctggcccagagattaagactttagaggctcagtggtctggggcatgctgagacattgcttccaaggtaaaggggaagtttttgtaccttgccccaccta

SEQ ID NO: 464367 - DNA, 201 bp, Homo sapiens
tccaccttcccatccctgccaggcctcacatcctgggctggtcgtcacagccccagaagttggccagccacttgatgtccaggtagaaggagaagggcttygtcttgcgggagtacatcttctttctggggagaaagaagcaggctgagcaccagcctctcagtttgggctgaaggccagggcagtctcgctggctgtcct

SEQ ID NO: 464368 - DNA, 201 bp, Homo sapiens
ctctggaacttgtatgtggtcactggactgggagaaaggcattctttccaatccccatcagaggggaggctcagacacggtttgcattcacttggaagagrtaacattataagttcactgtctggcccagactgatgttaaccctctcttctctgtcacaatgtaggcctaatgggccttcatcacctggatggtctatag

SEQ ID NO: 464369 - DNA, 201 bp, Homo sapiens
aatagtttttagcggggctgctaagccataagagcccaggaggggcaggatgattattttaattaaaatgttgggaaaaaaggaaatgggccttttgacarttttaagaggactcatatgggggaaagactatgtttatgtactgatggaggaggtttaaaagcaggcgggtgccagtgcatggcataggatgtaaaccag

SEQ ID NO: 464370 - DNA, 201 bp, Homo sapiens
tagacgtggtatccttagtacaacaggacagcagggcctctggaacttgtatgtggtcactggactgggagaaaggcattctttccaatccccatcagagrggaggctcagacacggtttgcattcacttggaagagataacattataagttcactgtctggcccagactgatgttaaccctctcttctctgtcacaatgt

SEQ ID NO: 464371 - DNA, 201 bp, Homo sapiens
ctgcagccccccggctgccatgatgcgaggaggcaggttggaaggaccaggccccagcaggagctggttggggatggagaggggcttgagcagggccttgrggggggtcaccagcagcttgtgagaggccatggtccgcacccaacctgccgctcgggaacctggggctgcactggccttggccaaagcctggaatatttc

SEQ ID NO: 464372 - DNA, 201 bp, Homo sapiens
agcatatgtgacaatttttgtgtaattttgggttttgggataaagccaaaaagacttgaacacatgggacctctgcatcctttctgaggttccagcaaaaygagtctagctgtaaaataatattccaatccagggtcccattcagaggccaatataaattattggggagcatatattgaaccccagatatattacaaaaga

SEQ ID NO: 464373 - DNA, 201 bp, Homo sapiens
cgaatgtgtcttcccaggtcaaatcaaaggcaagaattaaagctcgaaattcttgaatgaacttagtgggatcctggctaaatgaacccagtgtggattcragaaagatcagacattggaaaagggacatgaacttgaattgttcccaaatctccatttgccaccttgtggagaggtaaaacccttgtgggatcttctgag

SEQ ID NO: 464374 - DNA, 201 bp, Homo sapiens
cttaaccaagctgtaacccgtagtccaggtgctgtgctagacgtggtatccttagtacaacaggacagcagggcctctggaacttgtatgtggtcactggmctgggagaaaggcattctttccaatccccatcagaggggaggctcagacacggtttgcattcacttggaagagataacattataagttcactgtctggcc

SEQ ID NO: 464375 - DNA, 201 bp, Homo sapiens
ggtcagtggctttcctgtccccaggcctggaggaccttgcagggtctgtttgctcctgatccctcagggtgggcatgggacaggtgtgtgccagtgccagytgtgtgccagtgggcaggtcacagcttcttcttggggcagtgctgcagggccgccctcagggcctccgtcacgcggtccacattctcgcgggtggcattg

SEQ ID NO: 464376 - DNA, 201 bp, Homo sapiens
ctgcctcccgggctgggtcagtggctttcctgtccccaggcctggaggaccttgcagggtctgtttgctcctgatccctcagggtgggcatgggacaggtktgtgccagtgccagctgtgtgccagtgggcaggtcacagcttcttcttggggcagtgctgcagggccgccctcagggcctccgtcacgcggtccacattc

SEQ ID NO: 464377 - DNA, 201 bp, Homo sapiens
ccaggccccttgaaggctgcaagatccagggcctgagctgacacacacacaaggggacacaaaatgccatcactcctcccccattagaatgggggctggtrgaagcagaatcttggttcacatctgattcataatggaaccgaagggccaggcccaccctgtggccatccccttggcatttgattgtgaagcagggtggct

SEQ ID NO: 464378 - DNA, 201 bp, Homo sapiens
gcctaggcctcccaatgtgccggggttacaggcgtgagccaccactaccagccaaagcccacttttacaacggtgggggtgtgtgtcactttctcatgttyattttgccacgtttttgtccgtataactgaaatcattcaatatacactgatatttgaatggagtaaacaccagaacaatcttgggccccagtggaaggta

SEQ ID NO: 464379 - DNA, 201 bp, Homo sapiens
cattctttgtgcccacaactcacattctctcatcagcccagcactgcctgcctgcagcccatgacctgcatgggtcctgcccattggacatttcctattcyccatctttggcctctcaggggcattgacccctcagtgcctgagccacagctcacacctttggctcttggaggggacctgcaattcatgcagcagcagctc

SEQ ID NO: 464380 - DNA, 201 bp, Homo sapiens
tgatgcctacttgagatgcactttttaaattgattttttttacaataaaagtattgtgtgctcattgtaaacacttttaaaacatcaaaatacattgtttwaaaaattaaatgcctttataccctctatttagatgagcccacttttatttttttttgagatggagtctggctctgttgcccaggctggagtgcagtggtc

SEQ ID NO: 464381 - DNA, 201 bp, Homo sapiens
gggaaacggcacagtgaagaggggtgtccagtgcgcctgactacttgctgctgaaagggagttcaggggggtaggtcacgtttttccctttcttgctctcrgtcatgaagggaataaagggtcatgaaaacttgtgcacggaggcacgtgatgggattccatcaagaagccccacgtaaatgggagctgcagttgcaggcc

SEQ ID NO: 464382 - DNA, 201 bp, Homo sapiens
ctttctcaggaaattggccctcagtcctcccagatagtctgaaggaatggagactcaccagatcgtggcatctagacaaagggatgccagacccttccccygtcatggctgcctgtccggccacctgcttcctcctgaccaactcctcttcctcactctccctagttcctgttttcctgcatatagttacatttctgctct

SEQ ID NO: 464383 - DNA, 201 bp, Homo sapiens
atctgtgggtgggaacatgggtgagacccaggccccccgagtgacccccactcctacctggtacatatccttgctcatggacccgatcatctgcagccccmcggctgccatgatgcgaggaggcaggttggaaggaccaggccccagcaggagctggttggggatggagaggggcttgagcagggccttggggggggtcac

SEQ ID NO: 464384 - DNA, 201 bp, Homo sapiens
agcggtgatcagtgggtgcggggtgcattgcagctcccagaatatgtgtgtcctagaactaacctctgtgaaactgaccttgtactagggtctttgccaaygtgatcaggttaagggcatactggatgagggtgggccctagcccagatgaggtaggaggccagcaggagtcatactccggactggactgaagacaggcca

SEQ ID NO: 464385 - DNA, 201 bp, Homo sapiens
gtggcatctgacactgggtgatgagagacctggaattgtggatggctgccctagaccagacctttcactacccagcttttgcttggggcaggaaaatagckgagaggtcaggcaacctgtccaggcaggtgggttcccagagaagctgagagggttcccacacagtgggggtgcgtccacattgatgtctgtgagaggaag

SEQ ID NO: 464386 - DNA, 201 bp, Homo sapiens
agaaaaaccaccctgcaaataaaaatctagtgcaagctgaataattgtatgtgggtcttgagaaatggggattggataaagagacagtaaattggctgggygtggtggctcatgcctgtaattccagcactttgggaggctgagacgggcggatcacctgaggtcagaagtgtgagaacagcctggccaacatggtgaaac

SEQ ID NO: 464387 - DNA, 201 bp, Homo sapiens
acccgtggccctgctgagcagggccctgtgagggctggaccccacccaccgtggcaccctggctgcctgcctgaagaggagggtggactctgcccaatgaragcctctctgtgtgtagagccagggccatcttgacccccctgctgttggagccaacgctcctggggcactcttgacagagctcagctcaaatgccctttc

SEQ ID NO: 464388 - DNA, 201 bp, Homo sapiens
ggtggcatctgacactgggtgatgagagacctggaattgtggatggctgccctagaccagacctttcactacccagcttttgcttggggcaggaaaatagstgagaggtcaggcaacctgtccaggcaggtgggttcccagagaagctgagagggttcccacacagtgggggtgcgtccacattgatgtctgtgagaggaa

SEQ ID NO: 464389 - DNA, 201 bp, Homo sapiens
cccatgcctatgctgtgaccccatccctggaacaacccctcccatgctgagcctgctgctgcatccctgctcggcacaggtacctatgcccaggactgggygtaaaaccaagtcctgtgtggacagcctgcccgtgcaaagccaggagtccagccaggtggaggcagggctgtccctggacctcttatctgtgaagtggag

SEQ ID NO: 464390 - DNA, 201 bp, Homo sapiens
tgcagggtcctccgtctgcctctgcccccatgggcatgtgtgttccactgagattactggggtctctggctgtagggagggtggaaatgtgtcctctcccwagtggaaaggggcctggtggcatctgacactgggtgatgagagacctggaattgtggatggctgccctagaccagacctttcactacccagcttttgctt

SEQ ID NO: 464391 - DNA, 201 bp, Homo sapiens
tgcagggcaggcaactgacctttgtcacccaggagtccaggggataagggccacctggccacgtggccaggccgttccagccaaggccagcagcagcagcrccctgggagtggcctctcgcagctgtgaaacgggagctgagggcaccacctgctcagctcagccgcctttctgggccctggggtgggcctgggctggcag

SEQ ID NO: 464392 - DNA, 201 bp, Homo sapiens
atcccaattgtccaatgtcctcagctgccaccaggccactcaccccatctgttgcatcatctgttgactgcctgtcctccctggggcgggaccccctttaygcagctctgtgtgcctggcatggcatgtgcgagggcatagaagatctggacacagagttggctgactggtcccggagggtgggtgggcagcccttggaaa

SEQ ID NO: 464393 - DNA, 201 bp, Homo sapiens
ctcatccttccccatgggtgcagggctgcccaatgccaggggcctccttaccgggtccttcacgaagagctgcagccccagtgcctgcaggcgcccatgcrgatacgccgcggcctcgcggtgctggcgccagctgttctccaggccctgtgtgggagatggcgctggtgggcagtgacatgggtggggtgggcaggaagc

SEQ ID NO: 464394 - DNA, 201 bp, Homo sapiens
tcccaccagcagacgcagcacagcacgaccctggccagggcccgaacctccggggctcagaagctccccatgctgggggccaacagcggcgggggctgacscagtgcgtctgtctgggccccaggacctccactgactacctgctcacgaggctgctgggggagctgggctccctgcagggtcatcgcctggacagcctct

SEQ ID NO: 464395 - DNA, 201 bp, Homo sapiens
gctggacaaggtgggtgctggccgcgggggccttgggcaggcccgggggcatgggagggtggaatggagccctggcctggctccctgcccattctctcccrggtcagcagccccaggaatgctgaggccaggtcagggctcggatggagagcgtctgcggggacatgtgatgtctgggggtcacacgggccgtgggggtcc

SEQ ID NO: 464396 - DNA, 201 bp, Homo sapiens
ccatcaagaagccccatgtaaatcgagctgcagttgcaggccagtgttgggaatgcatagccttctgcaggtggaattgttctcatgtagaacatagaaamgcaatcagagcattaaaaaggcagggaccaaatattaaaagaaaaatgacagaagataaaggtctaaggaatgggggaagccaagtgattttttgaaaac

SEQ ID NO: 464397 - DNA, 201 bp, Homo sapiens
catgtccacctgcttcctgttggggtctcaagaaaggggaaacggcacagtgaagaggggtgtccagtgcgcctgactacttgctgctgaaagggagttcaggggggtaggtcacgtttttccctttcttgctctcagtcatgaagggaataaagggtcatgaaaacttgtgcacggaggcacgtgatgggattccatcaa

SEQ ID NO: 464398 - DNA, 201 bp, Homo sapiens
tggcaggccctgtggtctatgttgcaacaactcaaccctgctgcgtgcttgcaaagcagctgccagaggtgtgggcgtgttcctataaaactttatttacwaaaagcaggtggcaggccagattgggcccatggactgtggtttgctgaccctggcgcagctgatgggaaggcttgtaaaccaaaaataaaattcgaaggc

SEQ ID NO: 464399 - DNA, 201 bp, Homo sapiens
gtcgtcacagccccagaagttggccagccacttgatgtccaggtagaaggagaagggcttcgtcttgcgggagtacatcttctttctggggagaaagaagyaggctgagcaccagcctctcagtttgggctgaaggccagggcagtctcgctggctgtcctgtttcacgggagtgagacggggtggggcccccaggagggc

SEQ ID NO: 464400 - DNA, 201 bp, Homo sapiens
atgacggggattgtgtgatggtacctggaagacacgagggggcttggtccagcaccatgggcagggtcgggggcagatggggcattagctctgtctgcccyagccccaacagcacaggctctctgaccacaggccggtatcctccgcagaggagtcctgtccgggttcagaactttggaccgggaaggcagcttcgtctgc

SEQ ID NO: 464401 - DNA, 201 bp, Homo sapiens
tctgagctgtgctccagtccaccgccctggggccaggctcacctgtggcagagttccccgaagccatcaaggggctgcagcacgccggtggacgactcccygtgggttaagaacagcagcactggcttgtgctgggccaggccctgaggaagcagggacggctgtgggtggagctcagaggggcaggggccagaacacccc

SEQ ID NO: 464402 - DNA, 201 bp, Homo sapiens
agggccaggctctctctcaggctgtacaggctgatgacggggattgtgtgatggtacctggaagacacgagggggcttggtccagcaccatgggcagggtygggggcagatggggcattagctctgtctgccccagccccaacagcacaggctctctgaccacaggccggtatcctccgcagaggagtcctgtccgggttc

SEQ ID NO: 464403 - DNA, 201 bp, Homo sapiens
cagggccacaaggtgggtaagcgctcacccaggaacgggggctgccagcttcaaacagagggaggccttgaaggatggatccagggccatccccacctggrcctctcccttacctatgcgctccccgatgtccacggctcgctgcccccaaatgccattggccccaaccaggaaggagtccccaggctccagcacattgac

SEQ ID NO: 464404 - DNA, 201 bp, Homo sapiens
tggaaccaggtgccaactttagatgatggggaagtttaattacttccaaattcctcaaatatggagctttgccatggatggcctgcctgatggtcaccagrtggtcttagctgtcctcagccagctcacggggccttcccagctctgcctcctgcccacccccaagcacactcccctctgctccagtcaaacccatgcgcc

SEQ ID NO: 464405 - DNA, 201 bp, Homo sapiens
ccgagtaaagaaccagaccatcaagggaagcagggagggaaaagaagggagaaatcccagtaaagtcctgtacgcacaaccgaggtgcctggcgaggtgtyggagccccagcctcgggaaggggccgactcgagggctggtaagaacttaccaatgacagtatgggtttggaagaggaaagttttattaggaagaaagaac

SEQ ID NO: 464406 - DNA, 201 bp, Homo sapiens
taagccacagagagggaggaaatattcatgccacacgtatctgatagtatctagaatatattttaaaatgatcacacattgacaataagaagataaaaatycaaatatgaacaaaatatttgaactgacacttttcagaagatctacaaacggccgatagcttatgagaagttgctcaacatcaataggcatcagggaaat

SEQ ID NO: 464407 - DNA, 201 bp, Homo sapiens
gggtttcaccatgttggtcagactggtctcgaactcctgacctcaggtgatccacccacctctacctcccaaagtgttaggattacaggtgtgagccagcrcacctggccagagtcagagttttgattgtaggaggcgaaggcctcaaatgagtcaaagttagctgcatgagtgtcattataacaaggtgtacctcccaaa

SEQ ID NO: 464408 - DNA, 201 bp, Homo sapiens
gggggtcccctcactggtggcctcacagggcctggggcttctccctggaaccagggcagtgggtctgaccctgcttctgtttcccaccagaattgcccccmagctcacacttggtaaatgctcagagccccagctgcccaccctggagttccattcctcatgaagggatatggccttacctgggccccagagggaccattt

SEQ ID NO: 464409 - DNA, 201 bp, Homo sapiens
cctgcacatgctccagaaacagctcaaggagactggggggatcggggcacctgtgctgctcccagccctatcagagtcaggcctcatgagtgcccgacacmgcctggaggaggcagtgggctggcaggaggttcgtgcgcacagggccacaaggtgggtaagcgctcacccaggaacgggggctgccagcttcaaacagag

SEQ ID NO: 464410 - DNA, 201 bp, Homo sapiens
tcctcctgcatgttcacgaactctcaccctcctccacctgcatgttcacgaactctcaccctcctccgcctgcatgttcacaaactctcaccctcctcctscatgttcacgaactctcaccctcctcctcctgcatgttcacgaactctcaccctcctcctgcatgttcacgaactcttatcctcctccacctacatgttc

SEQ ID NO: 464411 - DNA, 201 bp, Homo sapiens
cccactgagggcctctctctggcaggctcccttttctctgtgcaccagggatggttccttctctgcaggccgcgcccttgacaatccagccagtggccctktctcctcctgtggagtgcagcccatgcacctgttccgcaatgagggccaggctctctctcaggctgtacaggctgatgacggggattgtgtgatggtacc

SEQ ID NO: 464412 - DNA, 201 bp, Homo sapiens
aaggccctcgaggcgctccctctcaccttccccgtggagggcccaaggccacccatgatctcaatgtcgaagtggtctatgacgtagctgacgatgtctcwccagtcatagccagcgggtacagccacagtggtgactgtgggaagccggagcgcctgcaggaggggcctggctcagtgcgtgggtgagaggccctgtacg

SEQ ID NO: 464413 - DNA, 201 bp, Homo sapiens
gcccaatgccaggggcctccttaccgggtccttcacgaagagctgcagccccagtgcctgcaggcgcccatgcagatacgccgcggcctcgcggtgctggygccagctgttctccaggccctgtgtgggagatggcgctggtgggcagtgacatgggtggggtgggcaggaagccccgccctctgtggtgcgggaggaaga

SEQ ID NO: 464414 - DNA, 201 bp, Homo sapiens
cccatgggtgcagggctgcccaatgccaggggcctccttaccgggtccttcacgaagagctgcagccccagtgcctgcaggcgcccatgcagatacgccgyggcctcgcggtgctggcgccagctgttctccaggccctgtgtgggagatggcgctggtgggcagtgacatgggtggggtgggcaggaagccccgccctct

SEQ ID NO: 464415 - DNA, 201 bp, Homo sapiens
cacccaggaacgggggctgccagcttcaaacagagggaggccttgaaggatggatccagggccatccccacctgggcctctcccttacctatgcgctcccygatgtccacggctcgctgcccccaaatgccattggccccaaccaggaaggagtccccaggctccagcacattgaccagggcggcctccagggcacagtgt

SEQ ID NO: 464416 - DNA, 201 bp, Homo sapiens
cggctccgggctcaaggcgctcctgcagctgccagccagtgaccccacttactgggccactgcctacttcgacgtcctgctggacaaggtgggtgctggcygcgggggccttgggcaggcccgggggcatgggagggtggaatggagccctggcctggctccctgcccattctctcccgggtcagcagccccaggaatgct

SEQ ID NO: 464417 - DNA, 201 bp, Homo sapiens
aggaccagagggaccagtgcccacccctccccatagcctggctctgagctgtgctccagtccaccgccctggggccaggctcacctgtggcagagttcccygaagccatcaaggggctgcagcacgccggtggacgactccccgtgggttaagaacagcagcactggcttgtgctgggccaggccctgaggaagcagggac

SEQ ID NO: 464418 - DNA, 201 bp, Homo sapiens
caggggcagaaggaccagagggaccagtgcccacccctccccatagcctggctctgagctgtgctccagtccaccgccctggggccaggctcacctgtggyagagttccccgaagccatcaaggggctgcagcacgccggtggacgactccccgtgggttaagaacagcagcactggcttgtgctgggccaggccctgagg

SEQ ID NO: 464419 - DNA, 201 bp, Homo sapiens
cggagccccaaggctgcttgggctgggtagggctctcagagcccacccttaccttgccggtccatgtaaaggggggtcccgcccagggatgccaccgaatycaccaggagcaggcacttgtacctggagaggtgggggacagaatggagggcagcaggtgaggcagggggccactggagggcctggccccaggctggatgg

SEQ ID NO: 464420 - DNA, 201 bp, Homo sapiens
ctgcacagaggtgaggatctgtgggtcactcacttggccttgtcactgaaggagatgagcgaggtccctggaggggcgttcagggccttctgggagcccgrgtacaggatgtcgatgcctgtagatgggtggtttgctcgggacgggtgagtcccacctcagggcaggccagtccagcgggatgcctgcctagctaatggg

SEQ ID NO: 464421 - DNA, 201 bp, Homo sapiens
cccatccctgccaggcctcacatcctgggctggtcgtcacagccccagaagttggccagccacttgatgtccaggtagaaggagaagggcttcgtcttgcrggagtacatcttctttctggggagaaagaagcaggctgagcaccagcctctcagtttgggctgaaggccagggcagtctcgctggctgtcctgtttcacg

SEQ ID NO: 464422 - DNA, 201 bp, Homo sapiens
tcccatccctgccaggcctcacatcctgggctggtcgtcacagccccagaagttggccagccacttgatgtccaggtagaaggagaagggcttcgtcttgygggagtacatcttctttctggggagaaagaagcaggctgagcaccagcctctcagtttgggctgaaggccagggcagtctcgctggctgtcctgtttcac

SEQ ID NO: 464423 - DNA, 201 bp, Homo sapiens
cccaatgccaggggcctccttaccgggtccttcacgaagagctgcagccccagtgcctgcaggcgcccatgcagatacgccgcggcctcgcggtgctggcrccagctgttctccaggccctgtgtgggagatggcgctggtgggcagtgacatgggtggggtgggcaggaagccccgccctctgtggtgcgggaggaagaa

SEQ ID NO: 464424 - DNA, 201 bp, Homo sapiens
cacctggtgcacagtcctgctcaaggaggggtggcgggtttggtttctgcaaaaggccctcgaggcgctccctctcaccttccccgtggagggcccaaggycacccatgatctcaatgtcgaagtggtctatgacgtagctgacgatgtctctccagtcatagccagcgggtacagccacagtggtgactgtgggaagccg

SEQ ID NO: 464425 - DNA, 201 bp, Homo sapiens
ccacctctcagccatgcccagcgccctccaccttcccatccctgccaggcctcacatcctgggctggtcgtcacagccccagaagttggccagccacttgrtgtccaggtagaaggagaagggcttcgtcttgcgggagtacatcttctttctggggagaaagaagcaggctgagcaccagcctctcagtttgggctgaag

SEQ ID NO: 464426 - DNA, 201 bp, Homo sapiens
cctcacttactgcttcacacagcaatggaagggttgggagcatccacacctgccccattgctgcatctgtctctggggctgtatccccctggccctgcccrcagccagtgtacccggggccctgtcctctctcccccacccccactgagggcctctctctggcaggctcccttttctctgtgcaccagggatggttccttc

SEQ ID NO: 464427 - DNA, 201 bp, Homo sapiens
gcctgcaccatctgccccagcttcaggttccagaggagccgggggagaaagggccgggagagagcagggaccccaccccttaggaggcggtggatgggcamcttcccactgggagatcacaggccgtcctgagatcccgcatcagaggccgggagctgtgacttcgtggctcctgccgagactaatccctggcaccgaggc

SEQ ID NO: 464428 - DNA, 201 bp, Homo sapiens
cttgagcctggttcatggatatgatggcttggtcttttggtgcgaaccaaaatggactttcccaactcagggttcctagaagagagtggtgagggaaaatmctccgcatgggcagagtatcaagaaatagaaactgggccaggcgcagtggctcacatctgtaatcccagcactttgggaggccggggtgggtggatcacc

SEQ ID NO: 464429 - DNA, 201 bp, Homo sapiens
ctggtacatatccttgctcatggacccgatcatctgcagccccccggctgccatgatgcgaggaggcaggttggaaggaccaggccccagcaggagctggytggggatggagaggggcttgagcagggccttggggggggtcaccagcagcttgtgagaggccatggtccgcacccaacctgccgctcgggaacctggggc

SEQ ID NO: 464430 - DNA, 201 bp, Homo sapiens
attagaaaaaccaccctgcaaataaaaatctagtgcaagctgaataattgtatgtgggtcttgagaaatggggattggataaagagacagtaaattggctrggtgtggtggctcatgcctgtaattccagcactttgggaggctgagacgggcggatcacctgaggtcagaagtgtgagaacagcctggccaacatggtga

SEQ ID NO: 464431 - DNA, 201 bp, Homo sapiens
tggaggcttccacgtgtcatgggctcaggtcctggctgtgcgctctccagcacgcaggtacccttgtccatgacaggggtctccaaccagccctgtgcgcyatgtgggttcacctggatgtggtgcgtgaggacgtttgggggtgtgacatctggggctagagtgtggtgacagcacctcctccaggggaggatctaccct

SEQ ID NO: 464432 - DNA, 201 bp, Homo sapiens
ggaggcttccacgtgtcatgggctcaggtcctggctgtgcgctctccagcacgcaggtacccttgtccatgacaggggtctccaaccagccctgtgcgccrtgtgggttcacctggatgtggtgcgtgaggacgtttgggggtgtgacatctggggctagagtgtggtgacagcacctcctccaggggaggatctaccctg

SEQ ID NO: 464433 - DNA, 201 bp, Homo sapiens
ggcgggctgacgtcagcctcccgcctgggacctgcctgaccctgaccgacagctggccagagccaggatgggctcacctgagtgaggaccacccacccagygtccatgaggggagttgacagccctgtgcaggtcacagagggggcccttgagcacccaggccagggcaggctctcctccctctgcacccgcagccacacg

SEQ ID NO: 464434 - DNA, 201 bp, Homo sapiens
ggtggcgggtttggtttctgcaaaaggccctcgaggcgctccctctcaccttccccgtggagggcccaaggccacccatgatctcaatgtcgaagtggtcyatgacgtagctgacgatgtctctccagtcatagccagcgggtacagccacagtggtgactgtgggaagccggagcgcctgcaggaggggcctggctcagt

SEQ ID NO: 464435 - DNA, 201 bp, Homo sapiens
ccccagtgcctgcaggcgcccatgcagatacgccgcggcctcgcggtgctggcgccagctgttctccaggccctgtgtgggagatggcgctggtgggcagygacatgggtggggtgggcaggaagccccgccctctgtggtgcgggaggaagaaactgactctgcaggccttggtgcaggggagcccctggagcccccagt

SEQ ID NO: 464436 - DNA, 201 bp, Homo sapiens
tgttgacccagccacgtggtgttgtcaagcaaacagcatcggcaggagacctggagctgaggacttggccctgcctgcactgtatgccattccttggtgayaaaatgctgtatatttggttttgaaaaaatgaatgtgctgggtatacacagcagaaagggtactgtccactttttgtatatcagtgtggaaaatatttcc

SEQ ID NO: 464437 - DNA, 201 bp, Homo sapiens
gttgacccagccacgtggtgttgtcaagcaaacagcatcggcaggagacctggagctgaggacttggccctgcctgcactgtatgccattccttggtgacraaatgctgtatatttggttttgaaaaaatgaatgtgctgggtatacacagcagaaagggtactgtccactttttgtatatcagtgtggaaaatatttccc

SEQ ID NO: 464438 - DNA, 201 bp, Homo sapiens
ttccttggtgacaaaatgctgtatatttggttttgaaaaaatgaatgtgctgggtatacacagcagaaagggtactgtccactttttgtatatcagtgtgraaaatatttcccctagaagtagaaaaggctcatgtgctgatggataattttgagtcttctccattctctgtgaatgacccccttccccaggcatccccac

SEQ ID NO: 464439 - DNA, 201 bp, Homo sapiens
cccctgcaatctgcactctgccaggtccctgtgcctctgcccttgactgtgccctgctgtctggtcctgttctcttccttctctgcccagctcacaccccycacccacctttacgaccctagagcctttccctgtgtgagcgcctgacccctcgccttcccccgcgggtgcgggtggcatttagcttacaggggcaccctg

SEQ ID NO: 464440 - DNA, 201 bp, Homo sapiens
cccctagaagtagaaaaggctcatgtgctgatggataattttgagtcttctccattctctgtgaatgacccccttccccaggcatccccacctcctacctygttcttagagcaaactaaagccaactgagggtgcacacacagccatgagcccacctgcccaggactactcccatctgcttcttcccgtccccgtggaagt

SEQ ID NO: 464441 - DNA, 201 bp, Homo sapiens
aaaggctcatgtgctgatggataattttgagtcttctccattctctgtgaatgacccccttccccaggcatccccacctcctacctcgttcttagagcaarctaaagccaactgagggtgcacacacagccatgagcccacctgcccaggactactcccatctgcttcttcccgtccccgtggaagtggcccctgatatgg

SEQ ID NO: 464442 - DNA, 201 bp, Homo sapiens
cctggttctgcctcccgggctgggtcagtggctttcctgtccccaggcctggaggaccttgcagggtctgtttgctcctgatccctcagggtgggcatggkacaggtgtgtgccagtgccagctgtgtgccagtgggcaggtcacagcttcttcttggggcagtgctgcagggccgccctcagggcctccgtcacgcggtc

SEQ ID NO: 464443 - DNA, 201 bp, Homo sapiens
tcttccacccagatcttccagtgcacacctaaaaagatggacctttttcacacagcctcaatgccattgtcacacttaaaaaagccaataacaattccttyctatcacctgggagcctggccatagacatgtttgcccagtcatctaaaagacatctttttaaagaattgagatgtaaacaagtcccagtatcacatgctg

SEQ ID NO: 464444 - DNA, 201 bp, Homo sapiens
agtgacagctggcatgtccatgtggggcaggaggacctgcagaaaggcccaaagaggacctgtgcctcccgcgccgtccctgcctggagcaagctcggccygcggtatgtaggcacagactccgcagcccgcctgggcctgcagctcagggaagcggctggacaccgacctgccttgggaatcctgacgggtgtgcttggc

SEQ ID NO: 464445 - DNA, 201 bp, Homo sapiens
aggacaggtggggacttcctgcctctgagagcagggcagctgcagaaaccccactgctgccgtcagcctgacgctgagacattaaacacgtctccaaggcragaaggtgcacgctcatcactgagattcagcactgtatttgtggcctacaccgttgcaatgaagcaagaaaaagtacataaaaggcagaagatgtacaac

SEQ ID NO: 464446 - DNA, 201 bp, Homo sapiens
agtgcgggcatctttttgacctgagcatcctccctgtggggtcctggccaacgtctgagcccctgggagaccccatgaggctctgcccagatcagtggccycaacgcggcagctcaggcttgacttacatatcagcaggaagcccaggggacggagctcccggtggagccaggaccagctcaggggggacgggtctggggt

SEQ ID NO: 464447 - DNA, 201 bp, Homo sapiens
ctctgcaaactaggacaggtggggacttcctgcctctgagagcagggcagctgcagaaaccccactgctgccgtcagcctgacgctgagacattaaacacrtctccaaggcaagaaggtgcacgctcatcactgagattcagcactgtatttgtggcctacaccgttgcaatgaagcaagaaaaagtacataaaaggcaga

SEQ ID NO: 464448 - DNA, 201 bp, Homo sapiens
tacaggggcaccctggcactaacccagccctaggcagtggctttatgagtggacccaggaggacaaacgtggcaggcacggccttgcaacctcatgggaasctggctgcagcccggggatccttcctggactctggactggtggctggcaatgggccctgtgggacacaggacccagatgaaagtaggtgggacttcctgt

SEQ ID NO: 464449 - DNA, 201 bp, Homo sapiens
gttaagagctctgggcagcgcccggagtgcgggcatctttttgacctgagcatcctccctgtggggtcctggccaacgtctgagcccctgggagaccccaygaggctctgcccagatcagtggccccaacgcggcagctcaggcttgacttacatatcagcaggaagcccaggggacggagctcccggtggagccaggacc

SEQ ID NO: 464450 - DNA, 201 bp, Homo sapiens
acccacccagcgtccatgaggggagttgacagccctgtgcaggtcacagagggggcccttgagcacccaggccagggcaggctctcctccctctgcacccrcagccacacgggaggacagggtggtgcagtgaaggtccctccccactgccactcagagacacagccaggcccaggcgtggggcttccggcctggttccag

SEQ ID NO: 464451 - DNA, 201 bp, Homo sapiens
ggatgaggagtgtccccctaaagtccacaatcaggcagctcagggagcagagatgctctcctctcactctttcacagaccaccccacacagtgaggagagktggccaggccctttattaaacattcccgggaggctcatggcctggggactgcagctcatttggaaggcactgggttttgcgcccaagtggactgtttcca

SEQ ID NO: 464452 - DNA, 201 bp, Homo sapiens
gcagagctgctgggcctgaggccactctcagccgcctgtgtcctgagagtgtggatgttgcagtgtcctgagagtgtggatgttgcagtggccaaatcaamccctggtcacacccaagtgctcatgctcagctcttgccctgccataggagctggacaagcctgcaggaactgccaaccctcactttacatccacgcccac

SEQ ID NO: 464453 - DNA, 201 bp, Homo sapiens
cccttctcccagcccacccactcactgggcctcacttactgcttcacacagcaatggaagggttgggagcatccacacctgccccattgctgcatctgtcyctggggctgtatccccctggccctgcccacagccagtgtacccggggccctgtcctctctcccccacccccactgagggcctctctctggcaggctccct

SEQ ID NO: 464454 - DNA, 201 bp, Homo sapiens
gatgtccacggctcgctgcccccaaatgccattggccccaaccaggaaggagtccccaggctccagcacattgaccagggcggcctccagggcacagtgtyccgagccagagatgaccagtgtgagtgggttcctggtctggaacacgtactggatgccttccttgatctcgtccatgatctgcatgcgggtggtataggg

SEQ ID NO: 464455 - DNA, 201 bp, Homo sapiens
gccctgtcctctctcccccacccccactgagggcctctctctggcaggctcccttttctctgtgcaccagggatggttccttctctgcaggccgcgccctygacaatccagccagtggccctgtctcctcctgtggagtgcagcccatgcacctgttccgcaatgagggccaggctctctctcaggctgtacaggctgatg

SEQ ID NO: 464456 - DNA, 201 bp, Homo sapiens
cctgggacctggggttgtctttagactcagcccagagcaaagaggacctgggaggtgcctgcaccccataccatgtgacagaggctggggtggggaccagrggcagaaggaccagagggaccagtgcccacccctccccatagcctggctctgagctgtgctccagtccaccgccctggggccaggctcacctgtggcaga

SEQ ID NO: 464457 - DNA, 201 bp, Homo sapiens
gggccaggctctctctcaggctgtacaggctgatgacggggattgtgtgatggtacctggaagacacgagggggcttggtccagcaccatgggcagggtcrggggcagatggggcattagctctgtctgccccagccccaacagcacaggctctctgaccacaggccggtatcctccgcagaggagtcctgtccgggttca

SEQ ID NO: 464458 - DNA, 201 bp, Homo sapiens
atctggacaccaggagcgggaggtgagattgggactgcagggggcactgtgtgtggcccacgttgtcccttggggcagcccctggaagctgagccagggcrgaggccggtcagggcactgggcctcaggccctcagtcctttcctggtcactccttgctgtgaagctgggaacttccagagcagtggactctgcaccctgc

SEQ ID NO: 464459 - DNA, 201 bp, Homo sapiens
acaccaggagcgggaggtgagattgggactgcagggggcactgtgtgtggcccacgttgtcccttggggcagcccctggaagctgagccagggcggaggcyggtcagggcactgggcctcaggccctcagtcctttcctggtcactccttgctgtgaagctgggaacttccagagcagtggactctgcaccctgcacacgc

SEQ ID NO: 464460 - DNA, 201 bp, Homo sapiens
gtgctggaggagcatggggagcccttcctgcctggctcccgcccctcccgcctcgggccacctgagctccctgcaagcccagccctgcacagaggtgaggrtctgtgggtcactcacttggccttgtcactgaaggagatgagcgaggtccctggaggggcgttcagggccttctgggagcccgagtacaggatgtcgatg

SEQ ID NO: 464461 - DNA, 201 bp, Homo sapiens
gcacgcaggtacccttgtccatgacaggggtctccaaccagccctgtgcgccatgtgggttcacctggatgtggtgcgtgaggacgtttgggggtgtgacwtctggggctagagtgtggtgacagcacctcctccaggggaggatctaccctgtgggctccaggatgaggagtgtccccctaaagtccacaatcaggcagc

SEQ ID NO: 464462 - DNA, 201 bp, Homo sapiens
cctcccgcctcgggccacctgagctccctgcaagcccagccctgcacagaggtgaggatctgtgggtcactcacttggccttgtcactgaaggagatgagygaggtccctggaggggcgttcagggccttctgggagcccgagtacaggatgtcgatgcctgtagatgggtggtttgctcgggacgggtgagtcccacctc

SEQ ID NO: 464463 - DNA, 201 bp, Homo sapiens
gccgctgggggccggggaggctgcctggtcctgcctcctgggctggatctgtggctttcctgttcctgggttcctggctttccttaaataaccccctcccrctttgctgtatgttgaaaactagaaacattgctgaaagtaattttaaaatacttacatttctgtttgtgaaatggaatttatactttatttccattttcc

SEQ ID NO: 464464 - DNA, 201 bp, Homo sapiens
gtccccaacgcctgattgactggagccctggcccttcctcttcccactgcttctgctacagctctggggcatctcaaatgtcccccaccagaagctgtccstcctgccagtccccacgcctggatctgaaagctcagtggaaacactggggtgctgggtagttcatggagccgctcttgccgcagtaaggagtgagtgttt

SEQ ID NO: 464465 - DNA, 201 bp, Homo sapiens
atctacgcccaagtgggctgtttccaggaggttctacttggagggagaagggccgctgggggccggggaggctgcctggtcctgcctcctgggctggatcwgtggctttcctgttcctgggttcctggctttccttaaataaccccctcccgctttgctgtatgttgaaaactagaaacattgctgaaagtaattttaaaa

SEQ ID NO: 464466 - DNA, 201 bp, Homo sapiens
acctgtagtcccagctaatccggagcctgaggcaggagaatcgcttgaacccgggaggtggaggttgtagtgagctgagatcgtgccactgcactccagcstgggcaacaagagtgaaactccgtttcaaaataaataaataaattcaaatatgccaggctgatctatggtcacagaagtcaggcagttgaggggtgggca

SEQ ID NO: 464467 - DNA, 201 bp, Homo sapiens
cctctccatcctcgaccgggtcaaccacgagagctggcgtgacagtggccagactgacggcctgacctttggccacctgaaggtacccagggcgggactcrgcgggttgtctgtcaccagggcccaggggtaggtgcacccaggcgtgtccctcctgccagccctgactggcaggcagctgctatgagtcccaagtcggag

SEQ ID NO: 464468 - DNA, 201 bp, Homo sapiens
cccaaactcaactgcagggtgagaggccatgggagaagagggtttgaaaagccgctgtgagacagggcctgtgagacagggcctggggcaggatggagggkaagggtgtctggagcggccgcaggcagctcaggtcttgtggttcaggccaggggtcatgagcacacaggctaggactgtgacaatgccatgggcccgttg

SEQ ID NO: 464469 - DNA, 201 bp, Homo sapiens
tgggtgggagctattgttcccaggctacaatcaccatagtgaagagaatgatcaaggtgggatagggccaaagcttgaaaagggtttaaatagtttttagyggggctgctaagccataagagcccaggaggggcaggatgattattttaattaaaatgttgggaaaaaaggaaatgggccttttgacagttttaagaggac

SEQ ID NO: 464470 - DNA, 201 bp, Homo sapiens
gaagccaagtgattttttgaaaaccaatcagtaaaagttttggcccagtcttggttgctttgggaaagtgtgtgtagccatttggcttgtttgatgatttyttgggcatcggtttccacttctccagacacataaatgtaggtgcaacgggtcctgttgatgacagcacagacccctccttgttcagctaggaggtaatcc

SEQ ID NO: 464471 - DNA, 201 bp, Homo sapiens
cacctgcttcctgttggggtctcaagaaaggggaaacggcacagtgaagaggggtgtccagtgcgcctgactacttgctgctgaaagggagttcagggggrtaggtcacgtttttccctttcttgctctcagtcatgaagggaataaagggtcatgaaaacttgtgcacggaggcacgtgatgggattccatcaagaagcc

SEQ ID NO: 464472 - DNA, 201 bp, Homo sapiens
gatgcatctcccaccttcttggctgcagctccccattaaagccttcttattggctttctgtgtggcaagcagcaggactgataccagactcctggtgtttyggtaacaagaggacacttgggaaactacagccacgaatcagctcagccccagtgctgatgagaagctggtggccttgcccttctcaaggattttctcagg

SEQ ID NO: 464473 - DNA, 201 bp, Homo sapiens
ccagctcacggggccttcccagctctgcctcctgcccacccccaagcacactcccctctgctccagtcaaacccatgcgcctgtgccttggcatatgctgscctctctgccagcagtgcttgctcctgtctttactcagctccccctcactccccagggagtcatcccaattgtccaatgtcctcagctgccaccaggcca

SEQ ID NO: 464474 - DNA, 201 bp, Homo sapiens
gtatagaaattctagttatgtataagttttaggttgaaaagaggcctggaaccaggtgccaactttagataatagggaagtctaattcattctacatttcycaaataaagaggctcccctccacccaccccacctggggcctgcttgatggtctccaggtgatctttgctgtcctcattttccctctgacaaatatcttgg

SEQ ID NO: 464475 - DNA, 201 bp, Homo sapiens
gtccctgtaacccttctcccctgcaaccctgcctgtagttccaggtcttcaacatccaggataaggaccggatctctgccatgcagagcatcttccagaaraccaggactctgggaggcgaggagagctgagctgggccacctggtctcagccacctgttcttggctccccaacagactctgcactgcaccatgggaggct

SEQ ID NO: 464476 - DNA, 201 bp, Homo sapiens
ttgtttgcaaaacaaaaatcatagatcttccaagggctcaaagtgtaagcaggctggagttctggcggcagtacagactttatgtggcaaaggtggacccmaggggagaatccctgcagttaacagctgtgggagaggctatgaggacttgaaagggtccagtccagagggctggaaggggttttctgtctggaggcaaag

SEQ ID NO: 464477 - DNA, 201 bp, Homo sapiens
cctgcaatctgggctttcggatgaccccggcctcccctgcacctggtgcacagtcctgctcaaggaggggtggcgggtttggtttctgcaaaaggccctcraggcgctccctctcaccttccccgtggagggcccaaggccacccatgatctcaatgtcgaagtggtctatgacgtagctgacgatgtctctccagtcata

SEQ ID NO: 464478 - DNA, 201 bp, Homo sapiens
ggtcaccggaggcagccttcaagcagcaccgtgtggggcctcctcctcagtgtaggcccatgccagggacgccgtgtgtgaggaggggctcagggagcagyagaggctggggccgctccgcctctaggatgcctgtccaggcagatacccggggcaggaaggcccggcatggcccagggagggccagttgttccacgctgt

SEQ ID NO: 464479 - DNA, 201 bp, Homo sapiens
gaaaacattagaagtcattaaaaaaatccttcccataaagaaagctcctgtcccataaagcttcactggacaattctaccaaaatataaggaaaaaaaaaatagtccctattctagacaaatttaattgataaataaaggaaaagaaaatactgtccaaaccactttacaagaccaatgtaaccttgctatcaaaacctga

SEQ ID NO: 464480 - DNA, 201 bp, Homo sapiens
aagagtggaaatcaatacaaagcaaacaattgagaaaatgatggtaaatgtcgcttttttggagagactaataaaatcagtaaccccctagcaagactgaycaatgggagaaaaaaaaggagaaaatataaattaccaataccaggaatgaaacagggaaatcaatagagagcccgtaagcattaaaggataataaaggga

SEQ ID NO: 464481 - DNA, 201 bp, Homo sapiens
gctcagtgcgtgggtgagaggccctgtacgggcctttgtgacagctcttggcctgcaccatctgccccagcttcaggttccagaggagccgggggagaaarggccgggagagagcagggaccccaccccttaggaggcggtggatgggcaccttcccactgggagatcacaggccgtcctgagatcccgcatcagaggccg

SEQ ID NO: 464482 - DNA, 201 bp, Homo sapiens
gggccgggagagagcagggaccccaccccttaggaggcggtggatgggcaccttcccactgggagatcacaggccgtcctgagatcccgcatcagaggccrggagctgtgacttcgtggctcctgccgagactaatccctggcaccgaggccacaccaccgggcagccgccccctccttctcaggagccagtgtccctctt

SEQ ID NO: 464483 - DNA, 201 bp, Homo sapiens
gacttcctgcctctgagagcagggcagctgcagaaaccccactgctgccgtcagcctgacgctgagacattaaacacgtctccaaggcaagaaggtgcacrctcatcactgagattcagcactgtatttgtggcctacaccgttgcaatgaagcaagaaaaagtacataaaaggcagaagatgtacaactctcattagtca

SEQ ID NO: 464484 - DNA, 201 bp, Homo sapiens
ttttgccacgtttttgtccgtataactgaaatcattcaatatacactgatatttgaatggagtaaacaccagaacaatcttgggccccagtggaaggtaamagaaaggacagactggtgctgtgcactgtgtgatctaccatcccacagaacttttgaaagaaacaactgaagtcatctgacagcacttaaagaggcagcg

SEQ ID NO: 464485 - DNA, 201 bp, Homo sapiens
agtgcgtctgtctgggccccaggacctccactgactacctgctcacgaggctgctgggggagctgggctccctgcagggtcatcgcctggacagcctctcyatcctcgaccgggtcaaccacgagagctggcgtgacagtggccagactgacggcctgacctttggccacctgaaggtacccagggcgggactcggcgggt

SEQ ID NO: 464486 - DNA, 201 bp, Homo sapiens
cctcccacctccaccccaggagttggccagttgccttctcctgcctgtcaggatccatcaggacctgtggctcttcctttctcagccctgaacattggagyagagggagctgggggagtgagggagcatcacggccctggtgagacccagctgcagggcccggcagtggtgctgaagagggtcagccgggcagtctgtggt

SEQ ID NO: 464487 - DNA, 201 bp, Homo sapiens
aggcccagttggcccagggaagatacggagggcagcagggcctgggccgggagctggggtagagggcggagcagctggctactcactgcatgaatttacaygagggcccctccgggcagaatcccacgaggtaattcacacagatgactctccgtgtgtgccggtgcctgcagaggggacctgcagagccaagtgtccggt

SEQ ID NO: 464488 - DNA, 201 bp, Homo sapiens
agtggagctccataagctgaagcttgctgaactaaagtaagaatgaatgtcttgctcgtggtttggagacgagcaaataaagcaagattttttttttttttgagatagagtcttgctctgttgccaggctggagtgcaatggcacgatctcggctcactgcaacctctgactccctggttcaagggattctcgcacctcag

SEQ ID NO: 464489 - DNA, 201 bp, Homo sapiens
gccagaggggtaacaagatggcgaccaagacagtggagctccataagctgaagcttgctgaactaaagtaagaatgaatgtcttgctcgtggtttggagaygagcaaataaagcaagattttttttttttttgagatagagtcttgctctgttgccaggctggagtgcaatggcacgatctcggctcactgcaacctctga

SEQ ID NO: 464490 - DNA, 201 bp, Homo sapiens
ttggaaggccaagacaggagaatcacttgagccaagaagttcgagatcagcctgagatcttgtcttcactacataaataaataagtaagtaagtaagtaadccagccaagcaagcttggggaccaggcacagtggctcacacctgcaatcgcagtagtttgggaggccaaggcaggtgcatcacctgaggtcaggagttcg

SEQ ID NO: 464491 - DNA, 201 bp, Homo sapiens
gggagcctgcagagccacatgacaaatccagccctgaccctgcctcatcccagtcctgattatccaggcccttccatagcttctctttactctatgactcstaaaacggcagcctcaagcactgaacaaaagggtcaggaggcagctgggggcactgactctgtactgacacccacccctgagtccctgctgccctgaggg

SEQ ID NO: 464492 - DNA, 201 bp, Homo sapiens
gcctgcccaggagagccagctgctgcctctggggacagatgggaggccactgccccatcccagtgctgccccagtgctgctatgggcaaggcatcggggggaacatgctacattgcacaatgacagggacagcacttggggagctgggaagcttgggtcctatttcttctcagcttatgccacctccacaaaacaagccac

SEQ ID NO: 464493 - DNA, 201 bp, Homo sapiens
ttttgtgatttttaatctggactcattcttcagaactccagctgtaggaattgtgtgcgccttgggttgagaacatactcttcaaagagtactgggggttrctcctgccacgtgccagggacacaccaatcctggggcgattttagattagaaaacttagtttgtaactttccagccttaaccaaggacatgaatacaggc

SEQ ID NO: 464494 - DNA, 201 bp, Homo sapiens
accttggggacaggttttgattacaggatcagagagatgggacgatgcttagacttgggtaaggggagcctgcagagccacatgacaaatccagccctgaycctgcctcatcccagtcctgattatccaggcccttccatagcttctctttactctatgactcctaaaacggcagcctcaagcactgaacaaaagggtcag

SEQ ID NO: 464495 - DNA, 201 bp, Homo sapiens
ttgtgccgggagtcccagaaaggaggcatcgatgcccagccaaacatgatgtcgactgcagggacccacaggacacatgtccctttttcaaaaaatactamggcaaaatgataggaaactaacagacgtggcccctcagagtgatgaaacccacgtgtctgcgggccagctcgagccacagtcgcgccaacaagcgcatga

SEQ ID NO: 464496 - DNA, 201 bp, Homo sapiens
ccccattcatgggagacggggcagggacctcacctcccaacactggcctccttatcaaaaaagcgggtggaccaccacccacccagcattcttgggagagkcaagggagatgaggagtgtgagaaagccgctagctgcagaatgtcaggttttgctgggacaggtagaccagctggcagcctccagggtcgtgggcagaga

SEQ ID NO: 464497 - DNA, 201 bp, Homo sapiens
tacagaactatcaccatgtaaagttgtgggacaggcaggaaaaaaaaaaaaaaaaaaatatatatatatatatatatgccaggtgcagtggctcatgcctrtaatcccagtacttccgaaggccgaggtaaaaggatcacttgagcccaggagttcaagaccaaccctgggaaacatgatgaaatagtgtctctaccaaga

SEQ ID NO: 464498 - DNA, 201 bp, Homo sapiens
caagagaaaattaagcccagagaagaaaacctcaggcttgagagccctgtacccctcctcaaccgctgccacctgggaccagggccagcctgaggcaatgkgggcacctgaatttgccccaaagggctccctcattcaaatcacagatataggcacagctttaggattcagcagggcagggagggaggaagcaggcgtgag

SEQ ID NO: 464499 - DNA, 201 bp, Homo sapiens; identical to SEQ ID NO: 257805

SEQ ID NO: 464500 - DNA, 201 bp, Homo sapiens
ccctggtactgacatcacccagtgaccaaggcccagttggcccagggaagatacggagggcagcagggcctgggccgggagctggggtagagggcggagcrgctggctactcactgcatgaatttacacgagggcccctccgggcagaatcccacgaggtaattcacacagatgactctccgtgtgtgccggtgcctgcag

SEQ ID NO: 464501 - DNA, 201 bp, Homo sapiens
agggttcccacagacctggagactgttatcctgctgtaggttcagcagtgtgggcgaggcagccgggaggaagggaggcttgtctgtggccccagtgccaycccaggcagaagcccaggtccacaaccaaagtgacagatgggcactgggctccaaggacaagaaaatggagccacaagaggggtgctaaccccacagagc

SEQ ID NO: 464502 - DNA, 201 bp, Homo sapiens
gtggtacagagtttctttcaaattagagggtgagggagctcaggatggaaagtgcagtggtgcagaaactagccagcaactccgcagatgcaagggagaayaaggccgccagaaggcgacctgctagcgacctgctctttcaggcccacaactctcccacctggacacatggcctgcccagggagggactcccaagtgggt

SEQ ID NO: 464503 - DNA, 201 bp, Homo sapiens
gagaagcagggaccagggttcccacagacctggagactgttatcctgctgtaggttcagcagtgtgggcgaggcagccgggaggaagggaggcttgtctgyggccccagtgccaccccaggcagaagcccaggtccacaaccaaagtgacagatgggcactgggctccaaggacaagaaaatggagccacaagaggggtgc

SEQ ID NO: 464504 - DNA, 201 bp, Homo sapiens
cctcagtgcagtgtggtaggaaataggacagtctctagcccaccacagtggatggtaactagactgtaactttatgcttacaatcagcaaaaatgaatgtkttcatttttctcatttcaccaaacacatggggcatgagggaatggccactgacggtaagggaagaccccaccctgtcccccagcccagggactcaccttg

SEQ ID NO: 464505 - DNA, 201 bp, Homo sapiens; identical to SEQ ID NO: 257809

SEQ ID NO: 464506 - DNA, 201 bp, Homo sapiens
ccagaggggatgagaacaagagaaggagtggggtcaggggatgagaagagaagccaggccatgctcttaaattccagccctaggaaaatcacactcagctrccccagcacaaagtgactgacacaagctgcatggatggggtggtggctggcactcagctctgctcctgggaggccacaggagtggcggggagaacagaac

SEQ ID NO: 464507 - DNA, 201 bp, Homo sapiens
agaccagctggcagcctccagggtcgtgggcagagaagggaggactggcttcttgcccggggcccagcccaccctggcacctaccgtgcttgcagaagccrcggtcataccaaggacagtccttgatcttggactcggggtcgatgtgcaggaagggacattccttgttgctgcactcccctgcagggaaactcagacgtg

SEQ ID NO: 464508 - DNA, 201 bp, Homo sapiens
ggagacggggcagggacctcacctcccaacactggcctccttatcaaaaaagcgggtggaccaccacccacccagcattcttgggagaggcaagggagatraggagtgtgagaaagccgctagctgcagaatgtcaggttttgctgggacaggtagaccagctggcagcctccagggtcgtgggcagagaagggaggactg

SEQ ID NO: 464509 - DNA, 201 bp, Homo sapiens
gtaactaaaggggaggatcccaggacccggaggaggtgggagggactctcaagacctagagggaggagtcctgcgaccaaaggggaggggtcccaggatcyagaggaagccgggggaggtctcaggaccgaggcgagggagtcccgggatcacagaggagcgggtcccgggttcgagtcgctcttgccctcccgcccgggc

SEQ ID NO: 464510 - DNA, 201 bp, Homo sapiens
gagggcccctccgggcagaatcccacgaggtaattcacacagatgactctccgtgtgtgccggtgcctgcagaggggacctgcagagccaagtgtccggtyacttagatgtcccctctaccagttagagagctggagcatggtttcaaatgctggctgtcccccattcatgggagacggggcagggacctcacctcccaac

SEQ ID NO: 464511 - DNA, 201 bp, Homo sapiens; identical to SEQ ID NO: 140671

SEQ ID NO: 464512 - DNA, 201 bp, Homo sapiens; identical to SEQ ID NO: 140667

SEQ ID NO: 464513 - DNA, 201 bp, Homo sapiens; identical to SEQ ID NO: 140660

SEQ ID NO: 464514 - DNA, 201 bp, Homo sapiens
aatacccaccggtaagaggctgggctggttgttgggggcaggggtagaggtcccctggacatgcagacagcttgtgggttgcctctgagtcctttgtcttrcagggtggtaagcacacaggccccagacaggggctggatggcactgaagctggtagccctgatctacctagcactgcagctgggctgcatcgccctcacc

SEQ ID NO: 464515 - DNA, 201 bp, Homo sapiens; identical to SEQ ID NO: 140661

SEQ ID NO: 464516 - DNA, 201 bp, Homo sapiens
ccggggaggcggggacccgagggccctgggctcgcgccggcggccccatgcgcggtccccatcgagggccggggccgctccagctgctcgcgcccctccgrctgctcgcgcccttccgctcctgccctctggaagcactgagggtatcaggcccaggcttagggctcgggtccggcgtcccgatgcaggactccgggttta

SEQ ID NO: 464517 - DNA, 201 bp, Homo sapiens; identical to SEQ ID NO: 140664

SEQ ID NO: 464518 - DNA, 201 bp, Homo sapiens
gctctgtggcggcctggcctttggcaggggagctactgacccgaagacacaatgctgttccaggtggatgcgatggcgacaaccgggcccgggctgtgcgcctccgtttggaagacagtcttcgacgagagccactccagcaccgacagcgtgccgtccgtgtgccccaccactggcaggtacctgcgagtgggaagagcc

SEQ ID NO: 464519 - DNA, 201 bp, Homo sapiens
cccgatcccacggaagcgcgctcggaggggtgggacccggccggaccggagatggcgccgccagcgggcggggcggcggcggcggcctcggacttgggctycgccgcagtgctcttggctgtgcacgccgcggtgaggccgctgggcgccgggccagacgccgaggcacagctgcggaggctgcagctgagcgcggaccct

SEQ ID NO: 464520 - DNA, 201 bp, Homo sapiens
ctgaggttgggcctcagaattgccagccccgcggggccccagcctacaaaacggcccacggcacccagcgggcccagcacggtcaccagccccgtaagccsgacaggcgccagcagcgtctcctgtgcccagccgtcttccttgtgcaggtgcaggcggcccgcgccgtccagcaccacgaagcgtccacccaccgggtcc

SEQ ID NO: 464521 - DNA, 201 bp, Homo sapiens
cagccgacaggaggtagaccgagccgtcggcgcacgcgcacacgaggcgcgtaggcagcgactggtgcgcaggcgcgggcaacgcgggcgccacctgcacktggagcaccttggcgggcagttgcgccaacggcgagtagagctcgcgtacgcgccacagctgcatgctgctcgcgcacagggacagcaccggccagcccg

SEQ ID NO: 464522 - DNA, 201 bp, Homo sapiens
gggtgacagagcaagactccatctcaaaaaaaaaaaaaaaaagaagatggaattagctgagtttcatggctgcttgggaggttttttgcagacaaagactccctctctcacccagactggagtgcagtagcgtgaccctaactcactggagccttgaactcctggtctacggtgatcctcctgcttcagcctaagtagctg

SEQ ID NO: 464523 - DNA, 201 bp, Homo sapiens
tggtcagcagccacagcgcctcgcgcggcaggcagtaggccacggctgccgcgcagtcctccggctccagcagcagtgagctcactatgcgcccggtggcmgccgacaggaggtagaccgagccgtcggcgcacgcgcacacgaggcgcgtaggcagcgactggtgcgcaggcgcgggcaacgcgggcgccacctgcacgt

SEQ ID NO: 464524 - DNA, 201 bp, Homo sapiens
tcactggagccttgaactcctggtctacggtgatcctcctgcttcagcctaagtagctgttattggcatgagccactgcccctggctcacatggctgcttmaatggaagagttagcagttgagactgagaaacatgaaggactaggtagtatggggctcccagatagagggcagcccacaaacgagataagcagagctgcc

SEQ ID NO: 464525 - DNA, 201 bp, Homo sapiens
ggcgccacaaccacagggcatcctggcttgcccctggctgcagaggggcaagagatggtgcctgatgggttgcaaggacagcagagccctcccctgccggyaaaacccccagccctgccccttgcctcgagctttctctgggaggcgagctgagtcggggatccgaggctgctgacctccgcatttagccacatctgctgt

SEQ ID NO: 464526 - DNA, 201 bp, Homo sapiens
cagtggattctaaagggccaggttcccttgactttgctcctctaaagggcagggattctgatcttccaggaaaagtccctaggggacctgccctcccagcrcctccacgggggaaaggggtgtgtggcataaccggctggggggactggctttgcctgatgtcagctcccagagcagcaaggagcctgtggccacaaacac

SEQ ID NO: 464527 - DNA, 201 bp, Homo sapiens
cgaggcacagctgcggaggctgcagctgagcgcggaccctgagaggcctgggcgcttccggctggagctgctgggcgcgggacctggggcggtgagtgggrgcggagggcgcgcggtcagtcctcttggcccgggcagggcacggagcccaaagttaggcccctccgcttgccacctgggtgcccttaagcagttatgttt

SEQ ID NO: 464528 - DNA, 201 bp, Homo sapiens
aagtgacactcagtgcacgcggccaaatgggcgaggtgggggtacaggtgggcaccggggccggcccaagaccagagccggtgactgctggggcctgctcrtggggcctccggccacagaccctttgggctggagtgtgcaggcccagtagaaatacaaaaataaactctgcggtccagctgtccctgctgtggcagttca

SEQ ID NO: 464529 - DNA, 201 bp, Homo sapiens
tggcccagcatcgtgtggccctgagtgttcagcttcaggaggcctgcttcccacctggccccatcaggtgaggcctggggctgcttcttcaccttgtcctygtgaccatcccaggtcccccatccatccctgaacccacattctggcacaggctgcaggtcacacttgaagacgctgcctctgccgcatccgccgcgtcct

SEQ ID NO: 464530 - DNA, 201 bp, Homo sapiens
gctcggtttcccgccagccgtgcaacgctgggtcatcggacggtgcctgtgtgtgcctgagcgcagccttgcctcttacggggttcggcaggatggggacyctgctttcctctacttgctgtcagctcctcgagaagccccaggtcagtcctcgatgggggtggggtgtgggaggtggggtgcagccccacagtcctgagc

SEQ ID NO: 464531 - DNA, 201 bp, Homo sapiens
cctgccctgatgctctggccacaggtgttctcagagctcggtttcccgccagccgtgcaacgctgggtcatcggacggtgcctgtgtgtgcctgagcgcasccttgcctcttacggggttcggcaggatggggaccctgctttcctctacttgctgtcagctcctcgagaagccccaggtcagtcctcgatgggggtgggg

SEQ ID NO: 464532 - DNA, 201 bp, Homo sapiens
cagaactaggttgtagccttctgcctcccacacctctgcctccatttcagcaactgcggtcccagagcccaacagctcccaggacttagcggtcacggccsgcagcggcagttgctaggataccagatgccgccggccactcccacaccgcaggccccacccccacaccgcatcaggtccacactaagtcacagaaacttt

SEQ ID NO: 464533 - DNA, 201 bp, Homo sapiens
aaaaagaaagtctgttagatggtgtgggaatgagaatggtggagctgggaggattgctgtttaaaacggtggcaggggccgggcgcggtggctcacgcctrtcatcccagcactttgggaggccgaggtgggcagatcacctgaggtcgggagttcaagaccagtctgaccaacatggagaaatcccgtctctactaaaaa

SEQ ID NO: 464534 - DNA, 201 bp, Homo sapiens
cagggacccgggtcatggcccccatcacacacctgtcctcctccatggtgctggtctcctcggccccactgcccctgcttctgctttcttcctccacctcytcctcccccagctccatgtccagctcgttgcctgcctctgagggtgtgtaggtggagccactgaggggaggcagggaaaccagtttcaggacccctaccc

SEQ ID NO: 464535 - DNA, 201 bp, Homo sapiens
caggtgggatgctgggtggcatgccagtgggctggggcagaggctgggacaaggaccaaccccaaacgggtgtgccagggctcaggcaggcttgtatcaaytccagagggccccacaccgccaggcccccacccagagtgggaaaggagggcctccaggagggctgagcaggcctgcatgggacctgaggctggctgcccc

SEQ ID NO: 464536 - DNA, 201 bp, Homo sapiens
tccaagtctgggttatagctggggagtatagggtgacaggtggtgtgaggcgccaagtgccccacaaacctggaggcctggaggccatctgcagggatgcyggcccacctgtagatgtcacattcagccaggcagatctcctcgtccaccgcgttccacagctgtggtttcagatccttgaagtcctcccgcacagctgag

SEQ ID NO: 464537 - DNA, 201 bp, Homo sapiens
tctggggccttccggcacatcttctgaataggggaaggagcctgtatccctggctgggggaacctgggtctgccccccaaggtgagcaaggggggcccacyttgctcactctgtcctcaccacacaccttaactaggtaggatgtaggcaggtagagcctgtgggacaccaggcagaggcgggatcccagcgccagcacca

SEQ ID NO: 464538 - DNA, 201 bp, Homo sapiens
ctaaaagaagcacaggggccagggaggaaggaaggagcttggagaaagggcaatgaagagcatgatggtggcacccaggcccaaagagtcaattacccacstgggcaggtgacagtgccaggaatatgctgggggaggggctgaggcctgcctgggcacctggtgtacgtgagggtgggaagacagtggattctaaagggc

SEQ ID NO: 464539 - DNA, 201 bp, Homo sapiens
accagaccatgggtatctatctggccccttggggccctgccttcagccctcctacccactaagtggagccgctaggaacaagctgagtctggcctctgtcyaggctgcacatcaggagctcccctctctgcccggccaggagaggtgacagagatcctgttttacctgagggtggtaagtccaggctccaggtcagccata

SEQ ID NO: 464540 - DNA, 201 bp, Homo sapiens
gacctgaggctggctgccccatggaggttggtgagcctctgcagttgggcggaagtcagtgactcctggctcatcagtggcagcggagggtcgtccaccaygtctggggccttccggcacatcttctgaataggggaaggagcctgtatccctggctgggggaacctgggtctgccccccaaggtgagcaaggggggccca

SEQ ID NO: 464541 - DNA, 201 bp, Homo sapiens
gtgtgggaggtggggtgcagccccacagtcctgagctccaccccctcagccacaggacctagccctcagcacccccagaagatggacggggaacttggacrcttgtttcccccatcattggggctacccccaggcccccagccagctgcctccagcctgcccagtccactccaggtgggcacgggactgggcagggagggc

SEQ ID NO: 464542 - DNA, 201 bp, Homo sapiens
cggtctccacagtcagctgtgagttgatggcttcaaagctcgagttctccaatagcttcatgtctttggggaaggagctccgtgctccagaggggctagtrttgcctggggagtgagagaccagaccatgggtatctatctggccccttggggccctgccttcagccctcctacccactaagtggagccgctaggaacaag

SEQ ID NO: 464543 - DNA, 201 bp, Homo sapiens
accctgttgtacccactccaggcttcagggacccgggtcatggcccccatcacacacctgtcctcctccatggtgctggtctcctcggccccactgccccygcttctgctttcttcctccacctcctcctcccccagctccatgtccagctcgttgcctgcctctgagggtgtgtaggtggagccactgaggggaggcagg

SEQ ID NO: 464544 - DNA, 201 bp, Homo sapiens
ggggaggaaccggcgccacagccagacgcatgagcctgcctgttgggctcgggggcgggtgcagtgctgaccctcgcagcaccaggcggcgaccacctgarcggaactgccagagcgccaggctgctgttcatctccgcaacgagcagcagcctgaggtcgggaaccggcaggcagcaggtgggcgcccaacccggggccc

SEQ ID NO: 464545 - DNA, 201 bp, Homo sapiens
agcatgcttcccccaggttccactgaagggcgcggcagtgtgacctccgagatgccagcccccccagcctgcctcacctgccaatgatgtgggcatctccrgtctccacagtcagctgtgagttgatggcttcaaagctcgagttctccaatagcttcatgtctttggggaaggagctccgtgctccagaggggctagtat

SEQ ID NO: 464546 - DNA, 201 bp, Homo sapiens
tcctataggatgcagagagaaccatgaagcatgcttcccccaggttccactgaagggcgcggcagtgtgacctccgagatgccagcccccccagcctgccwcacctgccaatgatgtgggcatctccggtctccacagtcagctgtgagttgatggcttcaaagctcgagttctccaatagcttcatgtctttggggaagg

SEQ ID NO: 464547 - DNA, 201 bp, Homo sapiens
cctggacctactttacagggctattgtgaggatttgatgataggcgtacagggcttaggaccgtgtaaatggtctataaatgttaccttgtatttctttgytcctcgtgcgatgtagggcggggggacgccctgagcctggactctccctcttctcaggttaatttggagtggcccctggagtcagtttcctacaccatcc

SEQ ID NO: 464548 - DNA, 201 bp, Homo sapiens
agtcgctcctcccaccaggccccctgctgacaagtccggccacagcatgggcagcaggagtctgaggggtgagtgggcatccacaggatggagccaaaggrctaggcaggtatggccttgggcagtgccaggactgtggcagcgccagggtctggccagcagctggggaggccccaggggcctctcaggtggacaggtcca

SEQ ID NO: 464549 - DNA, 201 bp, Homo sapiens
cagggctcaggcaggcttgtatcaactccagagggccccacaccgccaggcccccacccagagtgggaaaggagggcctccaggagggctgagcaggcctscatgggacctgaggctggctgccccatggaggttggtgagcctctgcagttgggcggaagtcagtgactcctggctcatcagtggcagcggagggtcgtc

SEQ ID NO: 464550 - DNA, 201 bp, Homo sapiens
caggcagaggcgggatcccagcgccagcaccaggtctccactgttgctgcagaaagccagggcctgaggggcaccattcagctgcaggagcctggagaggyacccagggcagccgaggctcagcagggacaaggccttctccactcagtccagccagtgggctctggtgaggagcagaggtaggagaccccagccctcccc

SEQ ID NO: 464551 - DNA, 201 bp, Homo sapiens
gggaccctgggcggaggttggcacacagtgggccttcaggagccaccacttagaccaagtagaggaggcccccaccctgttgtacccactccaggcttcarggacccgggtcatggcccccatcacacacctgtcctcctccatggtgctggtctcctcggccccactgcccctgcttctgctttcttcctccacctcctc

SEQ ID NO: 464552 - DNA, 201 bp, Homo sapiens
tatcagaacgcactcactgcctgccacatggacagctcacctcagtcccctgacatggaggccttcacagacggggactccactaaggcccccacaacccrgggcacaccccagacccctaaggatgaccccgccatcacgctcctcaacaacaggaacagcctgccgtgtaagtcagctgggcagacgggcaggctgggc

SEQ ID NO: 464553 - DNA, 201 bp, Homo sapiens
ttctactaaaaatacaaaaattagccaggcatggtggcaggcatctgtaatcccagctactcgggaggctgaggcaggaaaatcacttgaacctgggaggyggaggtggcagtgaactgagatcgtgccactgcactccagcctgggtgacagagggagactcggcctcaaaaaaaaaaaagaaaaaacaaaacaaaactt

SEQ ID NO: 464554 - DNA, 201 bp, Homo sapiens
ggaatggcttatctctgcttcacagtgtctggggccacagctgggagctgcttgaaaggctggggagaggctgggcgaggtggctcatgcctgtaatcccmgcactttgggaggccgaggcaggtggatcatgaggtcgaggcagatggaccatgaggtcaagagatcgagaccatcttggccaacatggtgaaaccccat

SEQ ID NO: 464555 - DNA, 201 bp, Homo sapiens
aggaaacagaaattaaacgaacaggatagtgattaagaacataagatttggccaggcgtggtagctcactcctgtaatccgagcactttgggaggccgagrcaggtggatcatttgaggtcaggagttagagaccagcctggccaacacagtgaaaccccgtctctactaaaaatacaaaaattagccgggcagtaatggt

SEQ ID NO: 464556 - DNA, 201 bp, Homo sapiens
cagctaattgggaggctgagacaggagaattgctgagacaggaggcggaggttgcagtgagctgagatcgcaccactgtactccagcctgggtgacagagmaagactctgtctcaaaataaataaataaataagaaaaaaataatttttaaagctggtctttaatagctcttccattttccttacttccttgcttctcaag

SEQ ID NO: 464557 - DNA, 201 bp, Homo sapiens
aatatcacagccatataaacaaaatttccagtttagtaattcattgtgtgcccaccataaatgtgaggtcagcagtttttatcctcattttgtatatgcarcaccagagatctaaagacagaagtgtcctgctcaatgttagtgacagaggtggaaccagaactcacatgtctgacttgccacctcagaccatggagccat

SEQ ID NO: 464558 - DNA, 201 bp, Homo sapiens
gtcagccaagaaagatacataatctcatgggacttcagtgggagttacacaggaatgttgaagaatcattcttctttttcatgcatttgtccttctcccayccccttactacaccctagcagatcagctgagtgtactttattccaagaacttactggatctctggtttttctcctgaagttggggcaggtgcaattccaa

SEQ ID NO: 464559 - DNA, 201 bp, Homo sapiens
aggagggagggagggaagaaagaaaggctggggagtgagtgagacaaggggctggatcagctgagactggcagatccacttccaagaccacttcttctgcmaaactgcctggcactttggtgggaaacctggaagggtgggctcagctgggactggcacctaagcacctacatgtggcctctccactatggtggcctcagg

SEQ ID NO: 464560 - DNA, 201 bp, Homo sapiens
cagggtaatggatgccacctactgtcgtattgagccccaggcctgatctcatagaggaagaaatgagtataactcaactcttctaccagagaaaagagctraagaaaccattgctgcacttttccctcttctactcacttcctcgctgaagcccgaggccatctccctgtctgttagacttgcagtgccctagagcagtgc

SEQ ID NO: 464561 - DNA, 201 bp, Homo sapiens
caggagaatcgcttgaacctgggaggcagaggttgcagtgagctgagatcacaccactgcacttcatcctaggcaacagagcgagactctgtctcccccckcaaaaaaaaaaaagaaagaaagaaagagaaaagaaaagaaaagcaaccacagccagccttagggaaaacttggaagtaagtgaaatttgtcttcagaata

SEQ ID NO: 464562 - DNA, 201 bp, Homo sapiens
tttttaatataagattctgccttagattaactttgaaaattacctcctcctgattgattagactgtgttagggacgttatttaggccactcatttatctasttccctcacctgtctctccccatctttccttctgttgttattgtgttttttaacatgagggttttgggggaagctaaagagaagactgcaagatgagtgt

SEQ ID NO: 464563 - DNA, 201 bp, Homo sapiens
tgggattacaggtgtgagccaccgcactcggcctagattttatcttgacctgacttagaaatggtccaatcttggactaaaccagtggggcagtttatgargccctggattagctggtgcttaggcctgcatcatggaagggccactacagtatgcaaggacagcttggttattcatgactggatgctattttatgaacaa

SEQ ID NO: 464564 - DNA, 201 bp, Homo sapiens
agaagttgctggagacgttgcgggccgcagacccctacagtgacctggtgaaggaggagctcaacatcatacagggtgccctggagctgcgcaccaaagtkgtggaggaggtgctgacccccctgggagactgcttcatgctgcgctcagacgcggtgctcgacttcgccactgtctccgagatcctgcgcagcggctaca

SEQ ID NO: 464565 - DNA, 201 bp, Homo sapiens
tggccaggctggtctgaaactcctgacctcaggtgatctgctcacctcggcctcccaaagtgctgggattacaggcatgagccaccgtgaccgcccggcaygtcttttatgattgagaaaactgaggcacagaaaggacaaatactaaaaagagaaatgataatccctcgtagttgcaaaggcgttacgtttatttattgg

SEQ ID NO: 464566 - DNA, 201 bp, Homo sapiens
atatgttaagtctggttggttttcgtgttggacatgtgatctgtgaggaaagaaatggaaaatcatagtatgactacatgattcaacaaatatttaatggrggcctgctctgttcttggcactgttgagatactgtggtgaagacagcaagctgctgcccttcgggagctcacaggctaatgagggagaaagacaacaacc

SEQ ID NO: 464567 - DNA, 201 bp, Homo sapiens
aaactgtatataataagaaaacaaaattgaaagctgtttactttgggtagggcccaggggatgaaaattggaccgtaggaggttccttccatttcttttaycctgttatcagttagaattcagtttcctcccccatcactctgctcttcctcagacatctcaggcaaataaaaaaacctgaccatttaaacaaataacaca

SEQ ID NO: 464568 - DNA, 201 bp, Homo sapiens
taattcagtggagattaaatgatttgtcaaggaatagtaactgggatagttagtggggaagggggcttaggggaggagaatgacttttaccataattctgmctctaaattcttgctctttcaattagtatatattatatcagctaacatatacttgctaatatgtaaaagttcaaagaaaaaaaactaactggttttgaat

SEQ ID NO: 464569 - DNA, 201 bp, Homo sapiens
gataaatgaaatagtcactgggtttctttttaatcgggtaacaattcctcatagagctagacaatgattcaatgactgagtagaatgccacaaatctgaaygatcaaccgtttgttttcatctccagtggttgttctcttgggctcatagagcaagtaatgactaaaccaggaatgtatttgttaaattgccctgcagtta

SEQ ID NO: 464570 - DNA, 201 bp, Homo sapiens
gggtgcctgcctggctggtcttcatcacctgaggccaccaggctcaagccactgctgttgcattacacccatccctttgcaaaatccctatggagcctgtyaccactcccctccctatatacccccaccccacaaagattttcttcaggttaaaaaaaaagtttaaaaaaaagattttaaaataaagcatttatgaaggct

SEQ ID NO: 464571 - DNA, 201 bp, Homo sapiens
gctgttagtgtttacagtgaccacttcaatgccaaatagggtctttcctctcatcataaaaaaagattttacatattgccttgtggtgggaattatcagarggtcccagagcttgatatcatagtccctggaacatggcaaggtagataccattttaacatgagtgaaactaaggaaatgacttgcttcaaatcacccagt

SEQ ID NO: 464572 - DNA, 201 bp, Homo sapiens
aatagtcactgggtttctttttaatcgggtaacaattcctcatagagctagacaatgattcaatgactgagtagaatgccacaaatctgaacgatcaaccrtttgttttcatctccagtggttgttctcttgggctcatagagcaagtaatgactaaaccaggaatgtatttgttaaattgccctgcagttagaacacagt

SEQ ID NO: 464573 - DNA, 201 bp, Homo sapiens
tgctggggtaatgatactaagaccccaccatatcctcagtcatcgagaaatcgcttatgtttctctgtctatatagtagaccctcaacatttaaaaaaggycatgttttgagacttcaaaccctccaatttgcaacctcagaagtatttatgttgacttctgttttttcccaaaatcactttttttcatcaaaaaccatct

SEQ ID NO: 464574 - DNA, 201 bp, Homo sapiens
ctacccataaagaggtaagcttattcccacccttggtttaactctgcagggtggagcaatggtgggtacagtgggagaaaaccagaggtagggaatgcctmgtttctcctttggcttattcctctccaccttgtgtctggtctctatctagagctaatcactgtgccttcccagtgatcagctgacatccacaggacctat

SEQ ID NO: 464575 - DNA, 201 bp, Homo sapiens
aggcttttcgttacactagttatttgttttgtcatctgctagcacatattagcagaaaagtgagaataggtgccataagttaagaaaaatgtgttagaaaygaaaaactttaaattgagcacattctaacaattaatataatctaatttaagctacaaagtactttggccaaactgggtaggatgtagttgtttccaagaa

SEQ ID NO: 464576 - DNA, 201 bp, Homo sapiens
tattaggtaggcagagggacaaggactggaatctaagtcttagatcctgctctccacctactgcctgggaccttgctgtacctctgaatatagacattttrtgccccctagagggctgtgatttatttgcattttgaaagcagtgctaattacgaatctggtgctcgcactagattgaggctaggggtctctgcaccaaat

SEQ ID NO: 464577 - DNA, 201 bp, Homo sapiens
atcccagcactttgggaggctgaggcaggcagatcacttgaggtcaggagttcaagaccactctggccaacatggcgaaaccccatctctactaaaaatamaaaaattacccagtcatggtggcaggcacctgtaatcccagctactcgggaggctgaggcaggagaattgcttgaacccaggaggcggaggttgcggtga

SEQ ID NO: 464578 - DNA, 201 bp, Homo sapiens
gggcacagctgtttaggccgtccactaaaccttcaccatccagtacagcagccagtagccatgtataaatacagccatttagttacatgtggctgttgaaygcatgaagtgtgtctctttccaactgatgtgctataagtgcaaaatacacattgtatttcaagaccagtgcgaaaaagaatgtaaaattcctcactaatc

SEQ ID NO: 464579 - DNA, 201 bp, Homo sapiens
aaaaacaaacaaacaaacaaacaaataaacaaacaaatagccaggcctgctggcttgagtctgttgtcttagctactcaggaggctgaggtgggaggatcycttgagcctgggaggcggaggttgcagtgagctgagattgcaccactgcactccaacctgggcaacagagtgaggccctgtctcaaaataaaaaaataga

SEQ ID NO: 464580 - DNA, 201 bp, Homo sapiens
ctcgctctgtcacccaggctggagtgcagtggcccgatctcagctcactgcaacctctgcctccctggttcaagtgattctcctgcctcagtctcctgagyagctaggactacaggcatgcaccaccacacccagctaatttttgtatgtttagtagagatggggtttcaccatattggccaggctagtctcaaactcctg

SEQ ID NO: 464581 - DNA, 201 bp, Homo sapiens
tgcatgctatgcattacatatcagctatcactattattggcaatgaattaaacaagcttcacacagaattagattttatcttttttttttttttttttttwtgagacagagtctcgctctgtcacccaggctggagtgcagtggcccgatctcagctcactgcaacctctgcctccctggttcaagtgattctcctgcctc

SEQ ID NO: 464582 - DNA, 201 bp, Homo sapiens
catgggtgccatgctgggctcctgggctgtgtgacatccaggagggaaagtgccacctctgccagccaccctcctgttttcccccagtgactctcaacatygtctgggcaggtcagttcagtagcatgtactgagtaccagggctcggcagatagacatggatataaatgcagtgctgaacctgccctccaggaacgagaa

SEQ ID NO: 464583 - DNA, 201 bp, Homo sapiens
caaataaaacatggaataaaatgtagtagcaagagtgtacgctcagaaatttgaaaaatatggctttaaaattccattgttgccatttcctaactaacctkgaccaagttattcaatctctgagcctcaaaattgagttccctgtaaatcagggataaaaatggcataggcttcatggggttgtggggctaattgcatgag

SEQ ID NO: 464584 - DNA, 201 bp, Homo sapiens
cgtgagccaccgcgcccagcctgttttgtttcctagtattctgcaaaccatgacaaactttgtcctgagatctagctagagccccatttatcccaggccascagaacacccagtgggttcacttggtagctgttgcacagttgcaggctgggtcatgagaggtgcactgaaatcaccagggtggaagaaggtccttctttc

SEQ ID NO: 464585 - DNA, 201 bp, Homo sapiens
aaaaaaacaaaaaaaaaagcgggggccgggggggaagtagatatatttagacaagctttaaaaagaatgagaacaaattaaattggaaaaagcaaatgtttcaaccaataattacatgcctgatacataggctcttgggaggtaccagaccctgcctgaggcccccatccagaaaacccacctttagagattataggtcca

SEQ ID NO: 464586 - DNA, 201 bp, Homo sapiens
gcaggtaagatgggctagcagtttcaaaattttactcaaaactcagggaaagcaaaagagaaagaaccaaagaaaacatttcctctaccaaaaaaaaaaaacaaaaaaaaaagcgggggccgggggggaagtagatatatttagacaagctttaaaaagaatgagaacaaattaaattggaaaaagcaaatgtttcaacca

SEQ ID NO: 464587 - DNA, 201 bp, Homo sapiens
gcaggagaattgcttgaacccgagaggcagaggttgcagtgagccaggatcacaccattgaactccagcctgagcaacagagtgagactcagtctcaaaasaaaacaaaaaaacacaaaaaacagctatctggaccctgccccacccagcaagatcctgattctgtagggcagggatgggacctcagatcttgcattttga

SEQ ID NO: 464588 - DNA, 201 bp, Homo sapiens
gaaataatctgtataccaaacctctgtgacacgaatttacctagataacaaacctgcacatataccccgaacctaaaataaaagttaaaagaaaaaaaaaacacagcagctagagttccttttaaaatataagtcagccaggcacggtggctcacacctgtaataccagcactttgggaggcggaggcaggtggatcacga

SEQ ID NO: 464589 - DNA, 201 bp, Homo sapiens
aggtgatctgctcacctcggcctcccaaagtgctgggattacaggcatgagccaccgtgaccgcccggcacgtcttttatgattgagaaaactgaggcacrgaaaggacaaatactaaaaagagaaatgataatccctcgtagttgcaaaggcgttacgtttatttattggcaaatgttttttaatgaccatataaacaaa

SEQ ID NO: 464590 - DNA, 201 bp, Homo sapiens
gcagtttgtgaaggtaactcccccaggaaggttatcctctccctcccagtgggcagtgttggctggctgagcgggacaagaagactacccccattcctagragggatgtgtgcaccattcccctgtgttccaatacagtgctgggtggtaactgctactggctgtataaaggctgttttcagtaagctttaggacggttca

SEQ ID NO: 464591 - DNA, 201 bp, Homo sapiens
aaaattcctgtcacctagtgatgtcctagcagtcataacacctaacatcgtcctaaggcaacacattacctttactatgtttagatacgcaaatacttacmattgtgttacaattacctacagtatttggcacagtaacatgctctacaggtttgtagcctaggagcaatagattataacatatagcctatgtgtgtagta

SEQ ID NO: 464592 - DNA, 201 bp, Homo sapiens
tttattcaacaaatagttgtgttggcacagtggagaacatcatcaacatagtccttgtctccatagagcttcactctaatacaggaaacagaaattaaacraacaggatagtgattaagaacataagatttggccaggcgtggtagctcactcctgtaatccgagcactttgggaggccgaggcaggtggatcatttgagg

SEQ ID NO: 464593 - DNA, 201 bp, Homo sapiens
tggttaggatattggtgcagttgtccaagatgggatgagggcatagaaattaaggacactttgaattagaggaggaaaaaaatctcttagacttcattacrtgtgaacactcctcctcagtctcctttactggttctgcctacatcatatccacagatgtatcttcagcacctggcacagtgcctacccatagcagatgct

SEQ ID NO: 464594 - DNA, 201 bp, Homo sapiens
aaaaaaaaggaatccacaatggaaatagaaaagttccaatcataagggtgggaagagaagtagggtagtcttgaccaggatttctgatacccaagtgtgcrtaagaatcacctggagatattgaggaaatgcaaattctgattcagaaagctaagatgagagcctgaatttctgcttccctcacaagctcccaagtgatac

SEQ ID NO: 464595 - DNA, 201 bp, Homo sapiens
ttccccgcttccttccttccttcctgcctgcctgcctgcctgcctgcctgcctgcctgtattgaatggccattctctgtcaggcctgtgttaggcactggrgatgcagtgtggacaagacagacaccattcctgccctcctagggcttgcagtcgagtaggcgacaccaagcaataaataattacaaattgtcctaagtga

SEQ ID NO: 464596 - DNA, 201 bp, Homo sapiens
aagatcctgattctgtagggcagggatgggacctcagatcttgcattttgaacaaaggcccaggtagtgttcatgctgctactccaaggaatacatttccrttggtaccaagtgaccaagaccaaggtaagaaagaggagacactcaatgctgtctaccaaatgaataaaagatgctgcaagcacacctggaagaagaacg

SEQ ID NO: 464597 - DNA, 201 bp, Homo sapiens
caaagattaggagctcagagccctttataaacacaagaggctctaacagcactgttaaaattctggcatatatcattgcaaagaagtatcctgtaaaaccraactgttttgtagcccagaactgtttagacttataaaagcataaaattttagagccagaaatggaaacttggtgatcacctagtcccatctttttttttc

SEQ ID NO: 464598 - DNA, 201 bp, Homo sapiens
ttcaaaacagtgggaagtcagacctccagataatgggttgttactctgctatttttacagtgttgcttagcaagccaaaccaccaactggcttagattctrgtgacgaacaactattttttcatgccctagtgatgttggttaccatggtgctctggatgacacagttggcttttttataattgccttttagtggctcaag

SEQ ID NO: 464599 - DNA, 201 bp, Homo sapiens
ctgaggtgggcagatcacctgaggtcaggagtttcagaccagcctggccaacgtggtgaaaccctgtctctactaaaaatacaagaaaaattagccaggcmtggtggtgggcatctgtaatcccagctattcaggaggctgaggcaggagaatcgcttcaacccaggacacggaggttgtagtgagccgaggccattgcac

SEQ ID NO: 464600 - DNA, 201 bp, Homo sapiens
tccagatacattaatttacatatatgctaaatctcaaccgtatcttatatgggaggaaaataaatcctagagattagtagggtcttgaagtctaagaaagwattgtcattgtctgatttgactccccacaatcactttgggagataggcaggaatagtcattgaaaaacaacagattaaaaaacaggttctgagaaagtca

SEQ ID NO: 464601 - DNA, 201 bp, Homo sapiens
atctcaccacagcttctgctagccacacaccgcttcatggccacaggtaggacaagtctccactccagagaagctaaaacagaatctctagggtgggaccyaggcaccaatcgttgttaataccttccagcctgattccagtgtgctgtcaggactgagaagcactgttctaggaaggaggttgccttagacagggtaatg

SEQ ID NO: 464602 - DNA, 201 bp, Homo sapiens
gaaattattttggatatattgggttaaatgaaatatgttattaaaattaacttgtttttactttttaaaatgtgactactagaaaactttgaattaccgaygggactcacgttacatttctcttcaacagtattacgctagattaaaataagttgtcatgagttgttgaacaaggggaaggaactgacaagaagtgatacc

SEQ ID NO: 464603 - DNA, 201 bp, Homo sapiens
ttttggatatattgggttaaatgaaatatgttattaaaattaacttgtttttactttttaaaatgtgactactagaaaactttgaattaccgacgggactsacgttacatttctcttcaacagtattacgctagattaaaataagttgtcatgagttgttgaacaaggggaaggaactgacaagaagtgatacccgaacct

SEQ ID NO: 464604 - DNA, 201 bp, Homo sapiens
tccagcctgagcaacagagtgagactcagtctcaaaacaaaacaaaaaaacacaaaaaacagctatctggaccctgccccacccagcaagatcctgattcygtagggcagggatgggacctcagatcttgcattttgaacaaaggcccaggtagtgttcatgctgctactccaaggaatacatttccattggtaccaagtg

SEQ ID NO: 464605 - DNA, 201 bp, Homo sapiens
tctgcctgtgacacattgtagtttatagtcttttcacatattcactaggtcatttgagctccacagtcaccttataggtactgattgttcaaactaccatygctgctaacaaactaccccaaaacttagagccataaaacaacaactattttattatgctcacagattctgtgagtcaggaattcaaaagaagtacagcgg

SEQ ID NO: 464606 - DNA, 201 bp, Homo sapiens
ctccaagactctcaggtaaagcctcatttgatttatagaaagggtgtcagggcaaaccctgtgccctgatgtgtgtcagccacctatgccaggtgctgctrtggcaagataccctagttggaatcacttctgagtcactgggaacatgctagctaagtgtttatcaggagggaaccttcaggaactgagccaagactatga

SEQ ID NO: 464607 - DNA, 201 bp, Homo sapiens
gttccagcagcctggggcagtatgtctcagctggaatggaaagaatgtgagatggaacctcaagtcactgtttttaccagggacacatctgttttggctcycaatcagcagtcttcaatcgatcaataattctgctctggaagagaaggaacagggagcagagagacccaactgggagccagagatggaacttcaggtctt

SEQ ID NO: 464608 - DNA, 201 bp, Homo sapiens
tttaagcaggggattctgggtatggttaggctgaacccagagagagagagtcaaactgaccacccaggcagtctccaagaccagttctgtatctgagaggyctgagcttaatgtatccagacttttctagttgggtcttgaagctttccagaaatcctaaccagggctcaattttggcttcaccatttattggcggagtat

SEQ ID NO: 464609 - DNA, 201 bp, Homo sapiens
atctacatattagtaataacaaccccccttttgcagagatattatgaagaccagaggtaacatatgcacccaatgtacagtaggtattacagaaactactrtggcaaaaactaggaaatggagtctcaggattcagcttggtttacatcaaaaatgatatggagaacactgacgaatctgtaggctgtcttcagctgcaat

SEQ ID NO: 464610 - DNA, 201 bp, Homo sapiens
cccttcccagttcaaagccgttctcctcccttgctaatcactagggaggtgccgggcattagctcagcatgccttcctgcagcctccaggcatttacagartatgtgcccattgctcttaacacgtcagagacagtaaacctgagatttggcctggaatgtggagtctgcattgtgttggaaagagcacaaggtcaagagg

SEQ ID NO: 464611 - DNA, 201 bp, Homo sapiens
tgcttgatccatttttagttcacttttatgtatagtatgaggtaggcatccaacttcacttttttgcatgtggatatccagttaccagctactatttgttracttctcaatgttaagcatcttttcatgtgcattgaccaattatttatcttccttggagaaatatctaatcaaatcttttgcccacttttggagttgtct

SEQ ID NO: 464612 - DNA, 201 bp, Homo sapiens
ttttcaaggaatgaggcccagaagtgaaatgtacctttttctgcccaactcttctgctttttacaattaattaccttggtgcttcatgttgttctctacaktaccatcactgtccctgtccccgtcagttcttagtcactctggagaagggtctggtccttcatcacacagtggatgggtagggccctgggcatctgactt

SEQ ID NO: 464613 - DNA, 201 bp, Homo sapiens
agatcagtacagaaggaggctgaaggttaggttgaaggtggggaaaaaattagagaccattcttgggtgatacaaatgccgtctttccgatttcgtttcastttaaaaactccaaggggtagctatcttatgatttcagatatttgatacagaagttcatttacattttaatggttaattatgcctcccactaactgatga

SEQ ID NO: 464614 - DNA, 201 bp, Homo sapiens
tgaccgcccggcacgtcttttatgattgagaaaactgaggcacagaaaggacaaatactaaaaagagaaatgataatccctcgtagttgcaaaggcgttaygtttatttattggcaaatgttttttaatgaccatataaacaaatatcacagccatataaacaaaatttccagtttagtaattcattgtgtgcccaccata

SEQ ID NO: 464615 - DNA, 201 bp, Homo sapiens
ttgttccttttgtggcactaaaatgcctcttgctaactaatgacaccctgtacttccctgggcgtccctgccttgttacaccaccctcaccttggctcacrtcttaaacttcacttgctgagggatgtcatcactcagaatcaccctctcttgatgcctgagtgtgtaggttgagacaacttgagttctctcctttccttt

SEQ ID NO: 464616 - DNA, 201 bp, Homo sapiens
ttattcactgattttattcaacaaatagttgtgttggcacagtggagaacatcatcaacatagtccttgtctccatagagcttcactctaatacaggaaayagaaattaaacgaacaggatagtgattaagaacataagatttggccaggcgtggtagctcactcctgtaatccgagcactttgggaggccgaggcaggtg

SEQ ID NO: 464617 - DNA, 201 bp, Homo sapiens
aatgaaactcctgtgaactcattcattcatttgtttaggtttgtttgtttgtttgtttgagacagagtttcactctgtcgcccaggctggaatgcagtggygccatcttggctcactacaaactctgtctcctgggttcaagtgattcttctgcctcagcctcccaagtagctgtgattacaggagtgcaccaacacgcct

SEQ ID NO: 464618 - DNA, 201 bp, Homo sapiens
ctagcattaggtttgtaaggattttcttaaaacttgccgatgggctgggtgcggtggctcacacctgtaatcccagcactttgggaggccaagatgggtgkatcacctgaggtcaggagtttgtgaccagcctggacaacatggcgaaaccccgtttctactaaaaatacaaaaattagccaggcatggtggcaggcatct

SEQ ID NO: 464619 - DNA, 201 bp, Homo sapiens
gtcagattggattagagcccaccctaatggcctcattttaactcagtcacctcttaaaactgatagttaagatacagagcagttaagatagtgtctcattrtcatgtgctggcagaagatgttttaaatgaaactcctgtgaactcattcattcatttgtttaggtttgtttgtttgtttgtttgagacagagtttcactc

SEQ ID NO: 464620 - DNA, 201 bp, Homo sapiens
ttccttttaaaatataagtcagccaggcacggtggctcacacctgtaataccagcactttgggaggcggaggcaggtggatcacgaggtcaggagttcaaractaacctggccaagatggtgaaaccccatctctactaaaaatacaaaaaaattagactggcatggtggcaggcacctgtaatcttagctacttgggagg

SEQ ID NO: 464621 - DNA, 201 bp, Homo sapiens
ggaagggggcttaggggaggagaatgacttttaccataattctgactctaaattcttgctctttcaattagtatatattatatcagctaacatatacttgmtaatatgtaaaagttcaaagaaaaaaaactaactggttttgaatatattcagtaacttccctaaatagaaacacaaatctagaagaataaggtttgcatt

SEQ ID NO: 464622 - DNA, 201 bp, Homo sapiens
tcaggcctcagaggccgagggttccaagcaccccagcgaggctgcccccgagcctgggaaggctggctgcatccgggtggtctctgcctagctgctcctawgctcctgccctcttccttccagatcacacggcagcaatatcagaacgcactcactgcctgccacatggacagctcacctcagtcccctgacatggaggcc

SEQ ID NO: 464623 - DNA, 201 bp, Homo sapiens
tttaatccactatttgttccacttaggttattcactgattttattcaacaaatagttgtgttggcacagtggagaacatcatcaacatagtccttgtctcyatagagcttcactctaatacaggaaacagaaattaaacgaacaggatagtgattaagaacataagatttggccaggcgtggtagctcactcctgtaatcc

SEQ ID NO: 464624 - DNA, 201 bp, Homo sapiens
tgcagaccttccccagaaggggaagtagggaaaaagtgggaaaagaggaactctaatatgttaagtctggttggttttcgtgttggacatgtgatctgtgrggaaagaaatggaaaatcatagtatgactacatgattcaacaaatatttaatggaggcctgctctgttcttggcactgttgagatactgtggtgaagaca

SEQ ID NO: 464625 - DNA, 201 bp, Homo sapiens
aagttgatattgatctgaaatgaatccctgtgcagaatttctaaacctggtcgaaaaaagctcctttagtgttctattaatagctactttgtatttaggtrgagcactaaagagaagcaagccattacagagaatactataccaaggaagatatttccacttcctttcatagccttgctacttcctcaaagtaaggtccgt

SEQ ID NO: 464626 - DNA, 201 bp, Homo sapiens
tgggcaagcattactgtctgagccccacctcctgtcagatcagctggggcattaggagcgagaaccctattgtgaactgcatatgcaaggaatctaggttrcgtgctccttgtgagaatctaatgcctgatgatctgaggtggaacagttccatccccaaaccatgccccctcccaccctagttcatggaaaaatcatctt

SEQ ID NO: 464627 - DNA, 201 bp, Homo sapiens
gaaccttgagtgagtagctagttcttcacccaaatgagagccaccctgctgatggttagtaggaaaagcatgttagcatcttcctcttgggggaggagccrtggactcctcttagaaaccctaatgaggtacaattgtggaaatccgcagaaggggttgggccagcactgcacccttgatagttttgggatctgtcccatt

SEQ ID NO: 464628 - DNA, 201 bp, Homo sapiens
agcgattttgaggaaaacgtgggcaagaagctgctgagaaccttgagtgagtagctagttcttcacccaaatgagagccaccctgctgatggttagtaggraaagcatgttagcatcttcctcttgggggaggagccgtggactcctcttagaaaccctaatgaggtacaattgtggaaatccgcagaaggggttgggcca

SEQ ID NO: 464629 - DNA, 201 bp, Homo sapiens
ggaggagccgtggactcctcttagaaaccctaatgaggtacaattgtggaaatccgcagaaggggttgggccagcactgcacccttgatagttttgggatmtgtcccattcagttgtttgtcctctaggacagaagtctgcacaccatgcccacaggtcaattctgacctccctcctttacttgtttttgtaagtaaggac

SEQ ID NO: 464630 - DNA, 201 bp, Homo sapiens
ctgtcctctgtgaccccacagctgacaatcggaaaaagcagagggtcccgcaacgggagcggaagcggcatgacttctccttgtttaagctttcggacacrgagatgcgggtgaagatctcaccacagcttctgctagccacacaccgcttcatggccacaggtaggacaagtctccactccagagaagctaaaacagaat

SEQ ID NO: 464631 - DNA, 201 bp, Homo sapiens
acttccttggctttagttccttcctctgcaaaatgggtgtatgaatcacttttcattcagttagtgcttaaaaaaaaagtgacaaaaaattgaattgtaamaagcagtaatattgtcaagtgttagggatctagggtggtagatttcagtatgaaaagacaagtttattttgctttttatacttgttccctacccttccat

SEQ ID NO: 464632 - DNA, 201 bp, Homo sapiens
tcttaagtgcaaatcaaagcaaaaaacaaacaaaacttacatggaaaaactgtaagtgctgaaagcaagtttagccatgacaaaccaaagagtgcccaggycagccaagaaagatacataatctcatgggacttcagtgggagttacacaggaatgttgaagaatcattcttctttttcatgcatttgtccttctcccacc

SEQ ID NO: 464633 - DNA, 201 bp, Homo sapiens
ctgccaggaacactgcttcctgccaggtacccacagaccatgggagcttaggttctgtgtgtctggaatgttttctgctgcttctctgctcacatggttgsggggatgcaggggttgtgagggaaggcactgcttattgccaccttccagtgaatgcaggcaggtgatttgtgtgcttgggcagaggctcagcccttcctt

SEQ ID NO: 464634 - DNA, 201 bp, Homo sapiens
atcaactgctttactgggcttaccaagtgtcatttagggaattttcccatcctttggtgttagagccaaatttcctcatctttgggggaaattttggaacstgacttctcacttcccaacagagggaattgcaaaagtcaggtgttttcaacaagaacattgaatcgattgaagactttggataaatgctaagtggagacc

SEQ ID NO: 464635 - DNA, 201 bp, Homo sapiens
tggacagctcacctcagtcccctgacatggaggccttcacagacggggactccactaaggcccccacaacccggggcacaccccagacccctaaggatgaycccgccatcacgctcctcaacaacaggaacagcctgccgtgtaagtcagctgggcagacgggcaggctgggctggtgtggggtgaggatgaccctgcctt

SEQ ID NO: 464636 - DNA, 201 bp, Homo sapiens
taagtccatgggagtccctaggctgggaagtgtttcctcctgagaatttcatctcatggaatagccatccttttcttccttgcagataactcgtttcagamtttggtccttagtttgtgagatgcggcctttcagaaactggctcctggtagaaagagctttgataccataaggcagtgagcagtgcagaaagagtgcctt

SEQ ID NO: 464637 - DNA, 201 bp, Homo sapiens
caagggatgggttggttgcttggcctgctgcctgctgacaggtcccgggttggtgtcacatatcatactgtttgatctgtctccttccagacctccttgcmttatacttaggattttcctcctcgcttcactcccccaagctgtgcctctgtgctcttaggatatgccaaggggaattacacaacttgaactagtttgcca

SEQ ID NO: 464638 - DNA, 201 bp, Homo sapiens
gtcagctgggcagacgggcaggctgggctggtgtggggtgaggatgaccctgccttcctcttctagcccttcccagggctcacaccacctgagccctgggkcttctccaaagcagagaggtgatgcactcactgtcctccccaggcagccgctcagacgggctgagaagccccagcgaggtagtgtacctgaggatggagg

SEQ ID NO: 464639 - DNA, 201 bp, Homo sapiens
gtctctatctagagctaatcactgtgccttcccagtgatcagctgacatccacaggacctattctgtggtatttcctctgtcactcttgcttttgttccawatcattaaaagaagtagcctcagaggtctgggatttttgtagaaagaagttccaggtaacttctggccctgtaagcacagactttggaaccaagggctct

SEQ ID NO: 464640 - DNA, 201 bp, Homo sapiens
tcggcttgtgcttgtacatctgattccaagatgtgttgcacatcttttcagatgaccttcagcaaaatccattttattttcttgtctttctggagtgtgastttgtaagaggatgtgattcctgtgttttcagagtcaagattcctttttgcagagaaatgtgatgttgtgaagatccaggaacagactgtctcacccact

SEQ ID NO: 464641 - DNA, 201 bp, Homo sapiens
gtggccgggcatggtggctctcacctgtaatcccagcactttgggaggccaggacgggtggatcacatggtcaggagatcgagaccatcctggccaacatkgtgaaaccttgtctctactaaaaatacaaaaattagccaggcatggtagcacgtgcctttgatcccagctactagggaggctgaggcaggtgaatcactt

SEQ ID NO: 464642 - DNA, 201 bp, Homo sapiens
accataacaacattccccttttcatcttttctgcgggcattggtgatatcctggaagaaattatccgacagatgaaagtgttccaccccaacatccacatygtgtctaactacatggattttaatgaagatgtgagccaaatcctgtttgggctgggaaaggacgaggggtggggaccaccagccagggcagttaactctg

SEQ ID NO: 464643 - DNA, 201 bp, Homo sapiens
ctggagatgcaaggcccctgaaggcgcaggctccagcccggcctgcaggccgtggtgaggaggggcgcctccccagagtctgctcccccgtgaacacagarcagaggccagggtggccagcagtggctgggtccttccgcgcccctccgtcctcctttccctgagcaccttcatcaccagaggcttgaaggaaccccgcca

SEQ ID NO: 464644 - DNA, 201 bp, Homo sapiens
aagccgggcgtggtggtgtgtggctgtaatcccagctccttcgaggctgaggcaggagaattgcctgaacccaggaggcagaggttgcagtgagccaagakcacaccactgcactccatcctgggtgacagagtaagactctgtcttcagaaaaaaacaaaaacaaaaaaactttcaaaggatcctctctctttggtgttt

SEQ ID NO: 464645 - DNA, 201 bp, Homo sapiens
ttatgggcctgccctgccctatgtcactgtcatattattatgtgccattctgggtcctaaagggcttgggctttgatttgtttttcccaagccagaggtgkgctgctccaactcatccacgttctgacttttttccccataaaactgatggttggaattttcatcatgttgacctgcagtgaggatgtggcccgcagctga

SEQ ID NO: 464646 - DNA, 201 bp, Homo sapiens
gaaggacgagactctggatgtggtcaacgggctactgcagcacatcctgtgccagggggtccagctggagatgcaaggcccctgaaggcgcaggctccagyccggcctgcaggccgtggtgaggaggggcgcctccccagagtctgctcccccgtgaacacagagcagaggccagggtggccagcagtggctgggtccttc

SEQ ID NO: 464647 - DNA, 201 bp, Homo sapiens
tggttggaattttcatcatgttgacctgcagtgaggatgtggcccgcagctgagcactagcacatgtgtaacctgagtggcatttatatcacagcttcgtrcatccaccagaacagatgatctgcaatattgggtggctcctgttcatttaaactaggagttacaaacttatgctgtaaaaggccctgtcgtcgatattta

SEQ ID NO: 464648 - DNA, 201 bp, Homo sapiens
ccagaacagatgatctgcaatattgggtggctcctgttcatttaaactaggagttacaaacttatgctgtaaaaggccctgtcgtcgatatttaggctttrtgggctgtggcatcactgttgcaactgcccaactttgcctttatagcacaaaaaagcagccataggcatcatgtaaacaaatgagtttggctgtatccca

SEQ ID NO: 464649 - DNA, 201 bp, Homo sapiens
gagacagtggagagctggtgccacatgggtccctgcagcccttccatctgtctcttgtcttcattatttagggttttctccagggatttaagggccagctsatacacacatacaacaagaacagctctgtgtgtgagaactgtggttacttccagcaacttgagggcaaaaccaatgtcatcctgctgggagactctatcg

SEQ ID NO: 464650 - DNA, 201 bp, Homo sapiens
attgctcgaacccgggaggcggaggttgcagtgagccgagattgcgccactgcactccagcctgggcaacagagtgagacttgtctcaaaaaaaaaaaaaattgtacatgaaaatgaatccaaaacttctgagttgaaaagcgcttctccatgaattccctaaagttttcttacctatcacctgagaaagtggaccacatt

SEQ ID NO: 464651 - DNA, 201 bp, Homo sapiens
tagagatgggcttttgccatgttgcctgggctggtctcaaactcttgggctcagatgatccttctgcctcagcctcccaaagtggcaacatctggtttttygtttttattccttgttactgttcttttgtattgacccaagggttaattgtggtagcccatgcccatccctcgtctgtctccaaagggtaggcccggtaac

SEQ ID NO: 464652 - DNA, 201 bp, Homo sapiens
ccctgtctctactaaaaatacaaaaaattagctgggcgtagtggtgcctgcctgtaatcccagctactcgggaggctgaggcagaagaattgctcgaaccygggaggcggaggttgcagtgagccgagattgcgccactgcactccagcctgggcaacagagtgagacttgtctcaaaaaaaaaaaaaattgtacatgaaa

SEQ ID NO: 464653 - DNA, 201 bp, Homo sapiens
tcccaagtagctgggactacaggcacccgccaccactcccggctgattttttgtatttttagtagagacggggtttcaccatgttagccaggatggtctcratctcctgacctcgtgatccgcctgccttggcctccaaaagtgctgggattacaggcatgagccactgcacccagcttttttttcttttttttttttttt

SEQ ID NO: 464654 - DNA, 201 bp, Homo sapiens
caattgagatcgacccacaccggaccgtcaaggagaagctacctcatatggtggaatggtgagtgatggtggtggagaaaagcttctgggcccttgagatrgagtaggctgggaggggcatatttttccagacccttgatgagatgacaggctcccttacttcactgagggcttaatttaatactattagtccagctattg

SEQ ID NO: 464655 - DNA, 201 bp, Homo sapiens
tttcaccgtgttggccagatggtctcaatctcttgaccttgtgatccgcccacctcggccttccaaagtgctgggattacaggcgcgagccaccgcgcccrgccaagtctagctcatttttcacaatggtaaaagacttttggggtctgtctggtgactggtgttcttcatggtgactgggagttggctaggctgggacgc

SEQ ID NO: 464656 - DNA, 201 bp, Homo sapiens
tctgttttgtgctgctgtcacagaataacagactaggtgaattatatattttttctattttttgagacagagtcttgctctgttgcccaggctggagtccratggcatgatcgtggctccctgcagcctcaactgcctgggctgaagagattctcccacctcagcttcccaagtagctggtactacgggcacgtgccactg

SEQ ID NO: 464657 - DNA, 201 bp, Homo sapiens
cagagggtacttggctctgtaaagggaaagggtgagttatttacttcagtgatttgaatttggggttttctggggtgtctgtttctaggtggaccaaagcrcacaatctcctatgtcagcagaagattcagaagtttcagatagcccaggtggttagagagtccaatgcaatgctcaggtaagcgtcttgctctggaaaac

SEQ ID NO: 464658 - DNA, 201 bp, Homo sapiens
aaaatttttaaacatgggaagttcaaacaaatataatgtgtgaaacagatcaaaatttttaaaatgaaaaaaaagctgctctgattcaggggatgtgggtsggggtagaacctggacctcttggccctgggggcacatgggatgcttctaggaacacagtttgagaaccaccacaaattggcctgagaccccatccgagca

SEQ ID NO: 464659 - DNA, 201 bp, Homo sapiens
gtctagctcatttttcacaatggtaaaagacttttggggtctgtctggtgactggtgttcttcatggtgactgggagttggctaggctgggacgcttgatygttggcggccttcactgaacagctgtctctgctggagatttcttttctggaggaaagaaatcctcataaaggaaggagtgacatgggtgcctgccctcaa

SEQ ID NO: 464660 - DNA, 201 bp, Homo sapiens
ctgagcacttaggattagcacactttaaccgcttattgaatatatcgtatgctctattttatttatttattttttgagatggagtcttgttctcttgcccrggctggagtgcagtggcgcgatctcgcctcatgcctgtaatcccagcactttgggaggccagggtgggtgggttgcttgagcataggagttcaagaccag

SEQ ID NO: 464661 - DNA, 201 bp, Homo sapiens
cttgcccgggctggagtgcagtggcgcgatctcgcctcatgcctgtaatcccagcactttgggaggccagggtgggtgggttgcttgagcataggagttcragaccagcctgggcaacagaggaaaaccccgtctttacaaaacataaaaaaattagccaggtgtggtggcatgcacctgtggtctcagctacttgggagg

SEQ ID NO: 464662 - DNA, 201 bp, Homo sapiens
cctcaccatggccgatggggttcctggtgtgcagaacattctcaaaattggcttcctgaatgacaaggtgggtagaggaccagggctgcttctcttcatgkctttcttctctttgaatgcccattaacaaatgcctttgaacacattctctttttttatttctatttttattttattttattttatttttttttgagacgg

SEQ ID NO: 464663 - DNA, 201 bp, Homo sapiens
ccaccgcccctggccatgaagttgcctcttctaggtgacttttttctcatactaagctgtaggacgttgctgggaagaacttgatatggactaatggcctytctccccatttggatatcccagctcacagcgctccttcaccactattacccaattgagatcgacccacaccggaccgtcaaggagaagctacctcatatg

SEQ ID NO: 464664 - DNA, 201 bp, Homo sapiens
gcgattctcctgcctcagcctcccgagtaagctgggattacaggtgcccgccaccacacccggctaatttttgtatttttagtagagacagggtttcaccrtgttggccagatggtctcaatctcttgaccttgtgatccgcccacctcggccttccaaagtgctgggattacaggcgcgagccaccgcgcccggccaagt

SEQ ID NO: 464665 - DNA, 201 bp, Homo sapiens
tccctgcagcccttccatctgtctcttgtcttcattatttagggttttctccagggatttaagggccagctcatacacacatacaacaagaacagctctgygtgtgagaactgtggttacttccagcaacttgagggcaaaaccaatgtcatcctgctgggagactctatcggggacctcaccatggccgatggggttcct

SEQ ID NO: 464666 - DNA, 201 bp, Homo sapiens
agaatctcgctctgtcgccaggctggagtgcagtggcgcaatctcagctcactgcaacctccacctcctgggttcaagcgattctcctgcctcagcctccygagtaagctgggattacaggtgcccgccaccacacccggctaatttttgtatttttagtagagacagggtttcaccgtgttggccagatggtctcaatct

SEQ ID NO: 464667 - DNA, 201 bp, Homo sapiens
ttccatctgtctcttgtcttcattatttagggttttctccagggatttaagggccagctcatacacacatacaacaagaacagctctgtgtgtgagaactstggttacttccagcaacttgagggcaaaaccaatgtcatcctgctgggagactctatcggggacctcaccatggccgatggggttcctggtgtgcagaac

SEQ ID NO: 464668 - DNA, 201 bp, Homo sapiens
aagggattcagaagagtgccgacttcagcagtcagcttgcccagcacttgtctctgttgggttgcttttctcatcctcttcctttttttttttttttttttgagatggagtctcgctctgtcacccaggctggagtgcagtggccccgatcttggctcactgcaacctccccctcctgggttcaagtgattctccagcctc

SEQ ID NO: 464669 - DNA, 201 bp, Homo sapiens
gcccaggctggagtgcagtggcatgatctcagctcattgcaagctccgcctcctgggttcacgggagcctctggctcccaagtagctgggactacaggcayccgccaccactcccggctgattttttgtatttttagtagagacggggtttcaccatgttagccaggatggtctcaatctcctgacctcgtgatccgcctg

SEQ ID NO: 464670 - DNA, 201 bp, Homo sapiens
gaagggattcagaagagtgccgacttcagcagtcagcttgcccagcacttgtctctgttgggttgcttttctcatcctcttcctttttttttttttttttttgagatggagtctcgctctgtcacccaggctggagtgcagtggccccgatcttggctcactgcaacctccccctcctgggttcaagtgattctccagcct

SEQ ID NO: 464671 - DNA, 201 bp, Homo sapiens
cacaccagtacctagggccgatattatcctccccaagccagcggctccccagtaagttgaagatgtccagatgggccgtaatggtagagatctcttaggarggacctgatattgaaggagtcagaggggtcctgagtattcacccttgcccccacactaggagactgcgttttcctcagggttaacgggtactaattagga

SEQ ID NO: 464672 - DNA, 201 bp, Homo sapiens
gggaggctgaggcagaagaattgctcgaacccgggaggcggaggttgcagtgagccgagattgcgccactgcactccagcctgggcaacagagtgagacttgtctcaaaaaaaaaaaaaattgtacatgaaaatgaatccaaaacttctgagttgaaaagcgcttctccatgaattccctaaagttttcttacctatcacc

SEQ ID NO: 464673 - DNA, 201 bp, Homo sapiens
caggctgatctcgaactcccaacctcaggtgatccgcccgccttggcctcccaaagtgctgagattacaggcatgagccatcttgcccagcctgatttttrgagaaaggttctcactccaaaaaaacacacagattgagaatcttaatacatttcagaagttttctgcctttgttactatgtcatctttcatttaatcttc

SEQ ID NO: 464674 - DNA, 201 bp, Homo sapiens
gggtgtggtggttcacgcctgtaatcccagcatttctgggaggctgaggcgggcagatcggttgaggtcaggagatcgagaccagcctggacaacatggcraaaccctgtctctactaaaaatacaaaaaattagctgggcgtagtggtgcctgcctgtaatcccagctactcgggaggctgaggcagaagaattgctcga

SEQ ID NO: 464675 - DNA, 201 bp, Homo sapiens
tttctgggaggctgaggcgggcagatcggttgaggtcaggagatcgagaccagcctggacaacatggcaaaaccctgtctctactaaaaatacaaaaaatyagctgggcgtagtggtgcctgcctgtaatcccagctactcgggaggctgaggcagaagaattgctcgaacccgggaggcggaggttgcagtgagccgaga

SEQ ID NO: 464676 - DNA, 201 bp, Homo sapiens
gtagctgggactacaggcgtgcaccaccatgcccagctaatttttgtatttttagcggagacagggtttcaccatgctggccaggctggtctcaaactccygatctcaggtgatccacccgccttgacctcccaaagtgctgggattataggcatgaaccactgtgcccggccaccctcttccttttaagggcagctaacg

SEQ ID NO: 464677 - DNA, 201 bp, Homo sapiens
tgaaggaaccccgccatgtggcagggcacaggcactgttcctggtgaaccttggaccacagcatgtcagtgctctagggattgtctactccagggattttyttcaaaatttttaaacatgggaagttcaaacaaatataatgtgtgaaacagatcaaaatttttaaaatgaaaaaaaagctgctctgattcaggggatgtg

SEQ ID NO: 464678 - DNA, 201 bp, Homo sapiens
acaaaatggccagggcactatctctgagaagaaaccaagtctagctcttctttctttctctctccttctcttgtcttctcttctcttctcttctcaagacrgaatctcgctctgtcgccaggctggagtgcagtggcgcaatctcagctcactgcaacctccacctcctgggttcaagcgattctcctgcctcagcctccc

SEQ ID NO: 464679 - DNA, 201 bp, Homo sapiens
gtggtggcatgcacctgtggtctcagctacttgggaggttgaggcgggtggatcacttgaactcgggaggtcgaggtcgcagtgaactgtgattgtgccaytgccctccagcctgggcaacagagcaagaccctgtctcacaaaaaacccaaaaaacaacccaaataggaaacaaagaacagcagtagaggcagtgccatt

SEQ ID NO: 464680 - DNA, 201 bp, Homo sapiens
ccggccgggctgggggcggctggagaggcttcctgcccattgggccttcccgctttgctctgccgcggacccctcctagctctctgccccaagaaatggcygggagcttgaaggagagcgggttggttcgcctgtcctaaaacccaaatttcagatttctcaatatggtcatgctgcttcctctaattggacagaaggcgc

SEQ ID NO: 464681 - DNA, 201 bp, Homo sapiens
tggatctagtggatgaaggggagaaggatgcgtgagatgcgttggaataaggagtttggatttcactaagtgtgataggaagctgggtaaagaaatagctsatttaaatattttaatattattctgccactgtgttaaacggattgtagggagcaggaatgctccagagactggttagaaggcaggtaataccgtttatag

SEQ ID NO: 464682 - DNA, 201 bp, Homo sapiens
gaatcgcttgaacccaggaggcagaggttgcagtgagcagagatcgcgccagtgtactccagcttgggcagcaagagtgaaacaccgtctctaaacaaaaragaagaaaaacctccagccagacacagtagcatgtgcctgtagtccctgctactctggaagctgaggcagaaggattgcttgagcccaggagtttggggc

SEQ ID NO: 464683 - DNA, 201 bp, Homo sapiens
atgtgtcactattgcctcgttatgggcaaaacatggatgtgatcatggttattggaggtgtgtcagaaggaggggactatttaagtgaatgtgtgggataytttgttgatgaggacagatgggtaaatctgccacatattcataatcacctcgatggacatgctgttgcagtaacagaatcctacgtgtatgttgctggat

SEQ ID NO: 464684 - DNA, 201 bp, Homo sapiens
agtttgagaccagcctggctaacatagtgaaaccctatttctactaaaaatacaacaaattagccagatgtggtggcgcgcgcctgtaatcccagctactygggaggctgaggcaggagaatcgcttgaacccaggaggcagaggttgcagtgagcagagatcgcgccagtgtactccagcttgggcagcaagagtgaaac

SEQ ID NO: 464685 - DNA, 201 bp, Homo sapiens
tctttggtttgtttgtttgtgctagctaaataagatcttattaaggacaagtggaaaaatcaggtgtagttgcttagctgttttcctgccaacgagttatractcctttgtcttgaggacttacgttttgaacatgctttaagcaccaattttatttgcacatttactttgatattctttttcattttttattaaatgatt

SEQ ID NO: 464686 - DNA, 201 bp, Homo sapiens
agatacatcgtcacgccctgaacatgaggcgagtgccaagctctcagattgaatgctaggttctctcaagcgtgccgattaaaactgttacacccgtttcrtgaagctgaagatacccaggctgttatttaaaaaagtatgtcgataacttattttctacatgaactgattattaccccatataaaggaaatagagttaaa

SEQ ID NO: 464687 - DNA, 201 bp, Homo sapiens
aagtgggtcacctgaggtcaggagtttgagaccagcctggctaacatagtgaaaccctatttctactaaaaatacaacaaattagccagatgtggtggcgygcgcctgtaatcccagctactcgggaggctgaggcaggagaatcgcttgaacccaggaggcagaggttgcagtgagcagagatcgcgccagtgtactcca

SEQ ID NO: 464688 - DNA, 201 bp, Homo sapiens
cagagcctgggaaggttgaggctgaaatgagctgtgatcatgccactctaccttgggtgacagagagacggtgtctcaaataaaaattaaaaagatcactkaagctatcttttatttagttttatacgttattcgaattatcttatgtctcctgagctttataaaagttagcactcaaattgacttttttttttttttggg

SEQ ID NO: 464689 - DNA, 201 bp, Homo sapiens
tttttaagatgtgaggtctcaccttattggccaggctggtctcaagctcctttcctcaagcaatcctcccaccttggcctcccaaagagccacctgtccartgatttatcctgtttcttaaggactgtctttaccttcttagacattttgtcataccattctagaagtcaaattccaagtgcagtgattttttttttccct

SEQ ID NO: 464690 - DNA, 201 bp, Homo sapiens
gtagggccttgatggcctgtggaaggacatgagcttttactctgattgaaatgggaaggtttggggcagaggaatgatgcagtctgatttgatgaatagtkctgtgctgaaaaaaggatgtggcggccaggcgcggtggcccacgcctgtaatctcagcactttgagaggccgaggtgggtggatgcttgaggtcaggagt

SEQ ID NO: 464691 - DNA, 201 bp, Homo sapiens
ggtgggtggatgcttgaggtcaggagttcgagaccagcctggccaacattgtgaaacccctgtctctactaaacgtacaaaaattagccgggcgtggtggygtgcctgtaatcccagctgttggggaggctgagacacaagaatcgcttgagcctgggaggtgggaggctgaggttgcagtaagctgagattgcaccgctc

SEQ ID NO: 464692 - DNA, 201 bp, Homo sapiens
ggtacccaccatcacgcctggctaatttttgtgcttttagtagagacagggtttcaccatgttgaccaggctggtcttgaactcctgacctcaggtgataygcccgcctcagcctcccaaagtgctgggattacaggcatgagccaccgtgcccagtccattattcttttctacaagaaactgtttttttccaaaatggga

SEQ ID NO: 464693 - DNA, 201 bp, Homo sapiens
tggtggcgtgcctgtaatcccagctgttggggaggctgagacacaagaatcgcttgagcctgggaggtgggaggctgaggttgcagtaagctgagattgcrccgctctactccagcctggcggacagaacaagactctgtctcaaaaaaaaaaaaaaagaacaaaggatgtggcattggggaggagggggcaccaagggca

SEQ ID NO: 464694 - DNA, 201 bp, Homo sapiens
aatgtatagcctgttggatgattgtcatcactgatgaaaaataaagcatggggggagtacatagaaactgctgggggagaggaagtgttttccaaattggrtggatagagaatgccctatgaagaagacgttttgctaagaaccgaaggaggtaaggtagactgtgtcaggtaggggacacaggtacagaggctctgaggt

SEQ ID NO: 464695 - DNA, 201 bp, Homo sapiens
gctcgagagtcatacaaaatatgaaaactctaagggtgactgaagtttttataccatcctgtggttatagaaaggaataggggcttggaatgcatcaagayaggttatgggagagccaggagaggaaagcctggcaagcacaggctgtcctgttatgcaggtgaaacctcacgggcagcagctgtcagaaaaaatggatgt

SEQ ID NO: 464696 - DNA, 201 bp, Homo sapiens
gagagaggtttgttgcatgaaaatgggtggaaaagggtcattgcactcactcaaacctaggtttgattctgtcatatcatcttgagtttgtcagatttgcycctgctctattggggagttagaggagaggagacgatactctgggcattttactaaaaactcttaacttctctccatctgtcagcagctaagccaatggct

SEQ ID NO: 464697 - DNA, 201 bp, Homo sapiens
agtggcgtgatctcagctcactgcaacctctgaccccaggttcaggcaattcttatgcctcaggctcctgagtagctgggataacagatgcacgccaccaygcccagctaatttttgttgttgttgttttgttttttgttttttgtttttttgagatagcatctcattctgtcgctggagtgcagtggcatgatctcggct

SEQ ID NO: 464698 - DNA, 201 bp, Homo sapiens
tcatcatgttggccagggtggtctcgaactcctgacctcaggtgatccacccacctcagcctcccaaagtgttgggattataggcctgagccactgcaccyggcctgaaccactgcgcccaaccctacacaatttttttgttgtgtttttgttttgttttctgcttcttcagatgtttgagtttgctttgcatccctgctt

SEQ ID NO: 464699 - DNA, 201 bp, Homo sapiens
tttttagtagagacaaggtttcaccatgttggccaggctgctttcgaactcctgacctcatggtccacccgccttggcctcccaaagtgctgggattacasgtgtgagccactgcgcccggcctgtatacgcttttttttaaagagacagtcttgctatgttgcccaggctggagtgcagtggctattcacaggcacgatt

SEQ ID NO: 464700 - DNA, 201 bp, Homo sapiens
aggttggtagatggacggtaaataagtaaaatgtatagcctgttggatgattgttaaatgtatagcctgttggatgattgtcatcactgatgaaaaataaagcatggggggagtacatagaaactgctgggggagaggaagtgttttccaaattgggtggatagagaatgccctatgaagaagacgttttgctaagaaccg

SEQ ID NO: 464701 - DNA, 201 bp, Homo sapiens
taggttggtagatggacggtaaataagtaaaatgtatagcctgttggatgattgttaaatgtatagcctgttggatgattgtcatcactgatgaaaaataaagcatggggggagtacatagaaactgctgggggagaggaagtgttttccaaattgggtggatagagaatgccctatgaagaagacgttttgctaagaacc

SEQ ID NO: 464702 - DNA, 201 bp, Homo sapiens
ttaggttggtagatggacggtaaataagtaaaatgtatagcctgttggatgattgttaaatgtatagcctgttggatgattgtcatcactgatgaaaaataaagcatggggggagtacatagaaactgctgggggagaggaagtgttttccaaattgggtggatagagaatgccctatgaagaagacgttttgctaagaac

SEQ ID NO: 464703 - DNA, 201 bp, Homo sapiens
cttaggttggtagatggacggtaaataagtaaaatgtatagcctgttggatgattgttaaatgtatagcctgttggatgattgtcatcactgatgaaaaataaagcatggggggagtacatagaaactgctgggggagaggaagtgttttccaaattgggtggatagagaatgccctatgaagaagacgttttgctaagaa

SEQ ID NO: 464704 - DNA, 201 bp, Homo sapiens
ctcgttgtagagccactgcttgtcacgtgaggatcccataccggtacttgcatggcacacagagataccctatgcctcaaaacctgatgtggcagaaggaycgcatcagacagatgcaagagatacatcgtcacgccctgaacatgaggcgagtgccaagctctcagattgaatgctaggttctctcaagcgtgccgatta

SEQ ID NO: 464705 - DNA, 201 bp, Homo sapiens; identical to SEQ ID NO: 207406

SEQ ID NO: 464706 - DNA, 201 bp, Homo sapiens
gcaagagatacatcgtcacgccctgaacatgaggcgagtgccaagctctcagattgaatgctaggttctctcaagcgtgccgattaaaactgttacacccrtttcgtgaagctgaagatacccaggctgttatttaaaaaagtatgtcgataacttattttctacatgaactgattattaccccatataaaggaaatagag

SEQ ID NO: 464707 - DNA, 201 bp, Homo sapiens
gggtcccactttgtcacccaggttggagtacagtggtatgatctcggctcactacaacctccacctcctggatgcaagccatcctgccacctcagcatackgagtagctgggactatgggcacgcgccaccacgcccagctaattttttttttgtatttttggtagagatggggtttctccatgttgccgaggctggtctc

SEQ ID NO: 464708 - DNA, 201 bp, Homo sapiens
agtgagggaaggagaagcagaagatggctgagcagccctaccccactggagaggggcctagaggaacaggggtgttaagcgcagtagccgacccccattcrtgcttcccgcaggccaggcattctttcaaagactgtgtgcacggactcatcctatctgtatctgttcaggaacactatgaaggaagtgttattagcttga

SEQ ID NO: 464709 - DNA, 201 bp, Homo sapiens
accacacctggctaattttttgtgtttttagtagagacagggtttcaccatgttggctaggctggtctcaaattcctgacctcaggtgatccaaacgcctyggcctcccaaagtgctaggattacaggcgtgagccaccatgcccggccctgttttgttttttgagacgaagtctcactatgttacccaggctagactgca

SEQ ID NO: 464710 - DNA, 201 bp, Homo sapiens
ttgtgtgatttcttttctttctttttttttttttttgaaacggagtcttgttctgtcatccaggctggagtgcagtggtgcaatctcagctcactgcaacytccatctcagcctcccaaagtgctgggattacaggcatgagccactgtgcctttttttttttgaaatggagtctcccctctgttacccagtctggagtgc

SEQ ID NO: 464711 - DNA, 201 bp, Homo sapiens
tctccctggcacctacattcagttaacactttagtgcgacagctgtggaccatcaggaaatgccctctccatgacactggctgccaatttatcacttttttttgtttgtttgtttgttttgagacggagtctcactctgtcacccaggctggagtgcaatggcacaatctcagctcactgcaacctctgcctctaggttca

SEQ ID NO: 464712 - DNA, 201 bp, Homo sapiens
tcccgagtagctggactacaggcgcctgccaccatgcctggctaatttttgtatttttagtagacagacagggttttgccagcttgtctaggctgatctcraactcctgacctcaggtgatctgcccacttcagcctcccaaagcgctagagacatgagccaccacgccagcctcaactgttgtattaaattccacattcc

SEQ ID NO: 464713 - DNA, 201 bp, Homo sapiens
ggaggcttcgaagaggaaaaatcttctacctccaactccaaaagatgcccaggagttttccaggagagaagtgggagaagaaaggcatttttccagcaggraacagcagggccagaggcacagagacagaataacagtagctacactttgggggctcttactgtgtgctaggcactgggttaagcaccagacaggagtgat

SEQ ID NO: 464714 - DNA, 201 bp, Homo sapiens
ctccctggcacctacattcagttaacactttagtgcgacagctgtggaccatcaggaaatgccctctccatgacactggctgccaatttatcacttttttttgtttgtttgtttgttttgagacggagtctcactctgtcacccaggctggagtgcaatggcacaatctcagctcactgcaacctctgcctctaggttcaa

SEQ ID NO: 464715 - DNA, 201 bp, Homo sapiens
agtcttgctctgtcacccaggctggagtgcagtggcataatcttggctcactgcaaccttcacctcccgggttcaagtgattcttctgcctcagcctcccragtagctggactacaggcgcctgccaccatgcctggctaatttttgtatttttagtagacagacagggttttgccagcttgtctaggctgatctcgaact

SEQ ID NO: 464716 - DNA, 201 bp, Homo sapiens
aggccaggcattctttcaaagactgtgtgcacggactcatcctatctgtatctgttcaggaacactatgaaggaagtgttattagcttgactttatggagracatggaggcagaggggttagaggctacagtggttttcagtcttgggcagtctgctctagaacccacgcgtcggcccgtgccacactgtttctagtgaca

SEQ ID NO: 464717 - DNA, 201 bp, Homo sapiens
agcgggaggtttctgggcacctgagcagccagatgacagccctttattatccagcacctgctctgtggtggctggaccccctcagaggggctctgtctccrcccccacatgccctttgagctgctctgagaagccacaggagcaacagctgtggagagagactctgcggggaagcagccaacaccccagtctccctaccct

SEQ ID NO: 464718 - DNA, 201 bp, Homo sapiens
tccctggcacctacattcagttaacactttagtgcgacagctgtggaccatcaggaaatgccctctccatgacactggctgccaatttatcacttttttttgtttgtttgtttgttttgagacggagtctcactctgtcacccaggctggagtgcaatggcacaatctcagctcactgcaacctctgcctctaggttcaag

SEQ ID NO: 464719 - DNA, 201 bp, Homo sapiens
ccctggcacctacattcagttaacactttagtgcgacagctgtggaccatcaggaaatgccctctccatgacactggctgccaatttatcacttttttttgtttgtttgtttgttttgagacggagtctcactctgtcacccaggctggagtgcaatggcacaatctcagctcactgcaacctctgcctctaggttcaagc

SEQ ID NO: 464720 - DNA, 201 bp, Homo sapiens
ggctaattttttattttttgtagactcagggtcttactctgttacccaggctggtatcaaactcctggactcaagtgatcctcctgcctcgggcttccaawgtgctgggactgagccactgtacccagccctcattttctcttatcagcagtccccaagctttttggcaccaggctccagttttgcagaagacagtttttc

SEQ ID NO: 464721 - DNA, 201 bp, Homo sapiens
cctaggctccctctccacaggtagcctttctgtcctgttagactttggactttggaaggtgctattcccagcatctgccacacagtgggcatgtaatgaaygtgtgctaagtgactgaataatttgagatggagtttcactcttcttgcccaggctggagtgcaatggagtgatctcggctcactgcaacctgcaacctcc

SEQ ID NO: 464722 - DNA, 201 bp, Homo sapiens
cactgttggccactgagtcccaagccagaagaccggaggcttcccagatacctccttcccctctctgtttttgccatatcgctcaagttggtctggatgayaggcgtgagccactgcgcttggccccctcactgttcatgcccagcaatggccatgtcttgtcctgtccatactttctctgtttccctcccacaactcagt

SEQ ID NO: 464723 - DNA, 201 bp, Homo sapiens
ttgctaagaaacggagcttccacaaaccagatagaggttctccagcttttctttgattgtctctgctttagcgtctctaaatccggtcaccatgtcggacyccgaaggcgagaccttgcgaagcacctttccctcttatatggccgaaggcgagcggctctacctgtgcggggaattttctaaagccgcgcagagcttcag

SEQ ID NO: 464724 - DNA, 201 bp, Homo sapiens
ctgtctcacttgcacacttgcagtgtgaccattgtgtgatttcttttctttctttttttttttttttgaaacggagtcttgttctgtcatccaggctggartgcagtggtgcaatctcagctcactgcaacctccatctcagcctcccaaagtgctgggattacaggcatgagccactgtgcctttttttttttgaaatgg

SEQ ID NO: 464725 - DNA, 201 bp, Homo sapiens
ttccaggggattttgcaaaaggctgagacactgtacaccatgggagactttgagtttgccttggtattctatcatcgaggctacaagctgaggcctgatcrggaattcagagttggcattcagaaagcccaggaagccatcaacaactcagtgggaagtgagtgaccacagggcctatgcccttatccaggaaggtccttg

SEQ ID NO: 464726 - DNA, 201 bp, Homo sapiens
gcccagccgtggaacctgagataagccactttagctccctcagcctcagggtctcctcctgttagctgggcaccctgtagggcagaagggaggatgaaatrcagaagtacctgtgcagaccttaggacagtgcctggtatccacaatagtagtaacaccagctctccagaaatgagatcttctcaagacttgctgacttcc

SEQ ID NO: 464727 - DNA, 201 bp, Homo sapiens
gaggggccaagaggaggctgaaggaagtgggcaggggatggatcaagcagggtcttttaaaaccggtgctgatcaagagcacgggctgtggagtcaggcaracctaggctgtggaacttgcaccgcccagccgtggaacctgagataagccactttagctccctcagcctcagggtctcctcctgttagctgggcaccctg

SEQ ID NO: 464728 - DNA, 201 bp, Homo sapiens
atattcttagtaatttttttctttctttccttttttttttttttgagacagggtctcactttgtcacccaggtgggagtgcagtggcacgattatagctcwctgcaatttcaacctctcaggcttaagcgatccccctaccttagcctcccaagtagctgggctacaggcgcacaccactgtgcctggctaaattttgtat

SEQ ID NO: 464729 - DNA, 201 bp, Homo sapiens
ccttgtgagtcccatgtgctccaggagctccctcattctaatcagccacttgctagattagccacttactagtctaagtggttttttcagtgcccacggcactcatttatttctctgaataatctataaattatttgatcacatgctttatttttgctattatgatttttagtacatattgttatgaaaaatggacatatt

SEQ ID NO: 464730 - DNA, 201 bp, Homo sapiens
ggaggaaggggacattgagtggcaactgaatgccagtgttctggtggcccaggcacaaggtatgggctcagagatgaccaccctaccttttccagccttcrggcccagctcacaccagggctaggagtcttgtggactgagtttaccatcccagtgtttctccttcccagattattctgagagtggggataagccactcta

SEQ ID NO: 464731 - DNA, 201 bp, Homo sapiens
cctgttttgttttttgagacgaagtctcactatgttacccaggctagactgcaggggcacgatctcagctcactgcaaccttggcctcccgggttcaagcrattctcctgcttcagcctccagggtagctgggattacaggcgcgcaccaccacacccggctaatttttgtatttttagtagagacggggtttcaccacgt

SEQ ID NO: 464732 - DNA, 201 bp, Homo sapiens
ctcaggtgatccaaacgcctcggcctcccaaagtgctaggattacaggcgtgagccaccatgcccggccctgttttgttttttgagacgaagtctcactakgttacccaggctagactgcaggggcacgatctcagctcactgcaaccttggcctcccgggttcaagcgattctcctgcttcagcctccagggtagctggg

SEQ ID NO: 464733 - DNA, 201 bp, Homo sapiens
tttaaaaccggtgctgatcaagagcacgggctgtggagtcaggcagacctaggctgtggaacttgcaccgcccagccgtggaacctgagataagccacttkagctccctcagcctcagggtctcctcctgttagctgggcaccctgtagggcagaagggaggatgaaatgcagaagtacctgtgcagaccttaggacagtg

SEQ ID NO: 464734 - DNA, 201 bp, Homo sapiens
accaggtgtctgagcccctggtctctcagacctgcagatggtgtctgcaggaagaggagttaccctgtcagctaagaggaggctgccctggcctccacagmacccctttcctttctcagtgctcacaagtggcagtgctgaagggagtcttcagaaagctgagaaagtgctgaagaaggtactggaatggaacaaggaaga

SEQ ID NO: 464735 - DNA, 201 bp, Homo sapiens
caaagtgcttcctgaagatgggagacttggagagatccctgaaggatgctgaggcttcgctccagagtgacccagctttctgtaaggtgactgcatgggcrggaggactggatcctgccattgcctgtagcaacttctggttacaagtagttgttacaagtagaaccagccagactgcctagtgtttgatgccattttctc

SEQ ID NO: 464736 - DNA, 201 bp, Homo sapiens
gtgggtagatcacctgagatcaggactttgagaccagcctttccgacatggcggaaagcttgtctctactaaaaatataaaaattagctgggtgtggtggygggcacctgtaatcccagcaactcaggggctgaggcaggagaattgcttgaacccggcaggtagagttgcagtgagccaagatcatggcactgccctcca

SEQ ID NO: 464737 - DNA, 201 bp, Homo sapiens
tttcacttcttttgtgattcttcagttacttcgggccatctggttgtatacgtgcaggtcacaggagatatgatggcttagcttgggctcagaggcctgayatgggaggcttaggcaggaggattgcctgagaccaggagtttgagaacagcctgggcaaattagtcagatgtggtttcttgagcatatagacctagttac

SEQ ID NO: 464738 - DNA, 201 bp, Homo sapiens
caccgggaggaaacaggaggcaaatcccttagaggcctgttctccttggcgcctcctcacaccccttccccacagacctgatcaaaggcaccatgaagggyggcctgactgtggaggacctcatcatgacgggcatcaactacctggatactcacagcaacttctggaggcagcagaagccgatctacgccagggagcggg

SEQ ID NO: 464739 - DNA, 201 bp, Homo sapiens
cagagggttgcagtgagccaagatcatgccattgcactctagcctgggcaacaagagtgaaactctgtctcaaaaaaaaaaaaaaaaaagaccaggtcagrtggctcatgcctgtaatcccagcactttgggaggccaaggcaggtggatcacctgaggtcaggtgtttgagaccagcctggctaacatggtgaaaccctg

SEQ ID NO: 464740 - DNA, 201 bp, Homo sapiens
tatgcccttatccaggaaggtccttggaatccttaggtttagaggaaggttgagtcacagcaggtgagcagccaccaccaggcccgcagggagtcctacayctggatttggctgctgcagtgttgttgaggattagccgggcatggtggcgggcaccacctgtctgctgggaggaccattccctgatgcacacactgatct

SEQ ID NO: 464741 - DNA, 201 bp, Homo sapiens
gggaggccaaggcaggtggatcacctgaggtcaggtgtttgagaccagcctggctaacatggtgaaaccctgtttctactaaaaatacaaaaaatcaaccrgacgtggtggcgagtgcctgtaatcccagctactccggaggctgaggcaggagaattgcttgaacccgggaggcggaggttgcagtgagccgagatcgtg

SEQ ID NO: 464742 - DNA, 201 bp, Homo sapiens
gccatttcaggtttgtagttgagtttggtgtgcacaaaataccctacagttctattgcctgaggggactgaggggctctcagacattggtggaaagtcagygtatccacagagcagcatattcctactcttcagccagtggcttccacaatagccatgatttgaccttgttcaaggtgagccatatgcagataatcaagtt

SEQ ID NO: 464743 - DNA, 201 bp, Homo sapiens
agcttttctttgattgtctctgctttagcgtctctaaatccggtcaccatgtcggaccccgaaggcgagaccttgcgaagcacctttccctcttatatggscgaaggcgagcggctctacctgtgcggggaattttctaaagccgcgcagagcttcagcaacgtgagtcgagctctcaacctatccatcaccccatcaccc

SEQ ID NO: 464744 - DNA, 201 bp, Homo sapiens
tcctgcctggtttctacccatctcaccagtctgagcctccttgatctcccatcatcccatttgccctcacagtgcccagccctcagccgacctgagtcctrctgcttcccctgcctctgctgtctctctccagctcctcccacaaatctccagagacacatgctatgaactctccctcccctgctcacaagtgggcctggg

SEQ ID NO: 464745 - DNA, 201 bp, Homo sapiens
gcacaatcttggctcactgcaacctccgcctcccgtgttcaagctattctcctgcctcagtctcctgagtagctgggattacaggcgtgcgccaccacacytggctaatgtttgtatttttagtagagacgggatttcaccaagttggtcaggctggtcttgaactcttgacctcgtgatctgcctgcttcagcctcccaa

SEQ ID NO: 464746 - DNA, 201 bp, Homo sapiens
caccctggagaagacctggctgttccacgagatcggccgctgctacttggagctggaccaggcctggcaggcccagaattatggcgagaagtcccagcagwgtgccgaggaggaaggggacattgagtggcaactgaatgccagtgttctggtggcccaggcacaaggtatgggctcagagatgaccaccctaccttttcc

SEQ ID NO: 464747 - DNA, 201 bp, Homo sapiens
atgttggccaggctggtctcgaactcctgaccttaggtgatctgcccgcctcggccttccaaagtgatggtattactggtatgagccaccatgcctggccttttttttttttttttttttttaaatagagatggggccatgtatggtgggacctagcctgggacccaacgtgttgctgggactcggcaacatggcgaaacc

SEQ ID NO: 464748 - DNA, 201 bp, Homo sapiens
cttttttcttttctttttttgagacaaggtcttgctctgtcacccaggctacagtgcagtggtgtgactacagctcactgcagccttgatctctgggctcaagagataagtatctgggactacaggtgtgggccaccatgcctggctgatatttttaatttttattttttgtagagatgaggtctcactatattgcccagg

SEQ ID NO: 464749 - DNA, 201 bp, Homo sapiens
gcgaaactccatctcaaaaaaaaaaaaaaaaaagtaaataaaatgtaaaattctcagtcacactagccacatttcaagtcattatagccacatgtgaggcygggtgcggtggctcacacctgtaatccgaacactttgggaggccgaggcgggtggatcacgaggtcaggagattgagaccatcctggccaacattgtctc

SEQ ID NO: 464750 - DNA, 201 bp, Homo sapiens
ttttttcttttctttttttgagacaaggtcttgctctgtcacccaggctacagtgcagtggtgtgactacagctcactgcagccttgatctctgggctcaagagataagtatctgggactacaggtgtgggccaccatgcctggctgatatttttaatttttattttttgtagagatgaggtctcactatattgcccaggc

SEQ ID NO: 464751 - DNA, 201 bp, Homo sapiens
ggagaatggcgtgaacccaggaggcggagcttgcagtgagctgagatcgtgccactgcactccagcatgcatgatagagcgagactctgtctcaaaaaaamaaacaaacaaacaaacaaaaaacaaagcacaaaccctggttcatgaccagtgccataggggactaggggaattcagagtgagagagccccagctgggagg

SEQ ID NO: 464752 - DNA, 201 bp, Homo sapiens
atttacttagtgggatcaacaattagacgtatcatgtagatatgcctagtgacactctgaaggtgccatttatataatggtcaatatttgcaacatctctkagacttttgcagcatatatcctgtagcactgagtatagatagatacttgtagcctaaaactttgggtatacattttttaaatcctaagaaacaaaattaa

SEQ ID NO: 464753 - DNA, 201 bp, Homo sapiens
agagcaggaaattaggaaatatatttataatgagtaaatacaagttgagaataaaagatatgataacaaaataattgctaaagactagtttataaaatackttattgaatcatcttattttggtttgcagtttagagcaagttacttagataaaatataggttctctacctactcaagagacattaagaatttttgttgta

SEQ ID NO: 464754 - DNA, 201 bp, Homo sapiens
tttagtatcttcataaacctggttcaatatcttcctaaacttaacatttttcttaactacaaaaataattcagatattattaatataataatttggaaagygttgttcaaactctgctgccattccattttatgaaaaacttaaggaatgaaaagttatgttattcagtgatgaatattgtagtactatttttaaaataga

SEQ ID NO: 464755 - DNA, 201 bp, Homo sapiens
aaggctaatgtcatttttatgttcaagatgtcagtttcattatctcctcttcagaatgaccttcctagccacgtggccaaagttcccaaatacacacactmaacctctatttactacattgttctgctattatcttcttcatagcacttcactatatgaaatttatcttctttgttttcttacgtattatatgtctctcat

SEQ ID NO: 464756 - DNA, 201 bp, Homo sapiens
gcatacatgcattcatcaagtaattatgttcatttctatgtgacaggcattatagaaataatattaaaatgtaagatagcactttttaagtttttatatgrttatattcttaccagttgtttgtttttaaaacttgcagatagatggacttcaaggcaattgcccaacaaactgcccaagaagttttaggttataatcgag

SEQ ID NO: 464757 - DNA, 201 bp, Homo sapiens
aggaagccaggggtcagatcgtgtagtgccactgctacgcactttaaataatcctcaagaacacataaccaacagctcataatgcttcacaagacaaaggrcgtgtgattaaactgttagaaattaaaattatttattgaatgactatcgcatgccaggcactggatagaaccttaagcatatcatctcatctaatcctca

SEQ ID NO: 464758 - DNA, 201 bp, Homo sapiens
gcaccaaaatctcaagaaattaccaccacagaatttatccatgtagccaaaaaccacctgtttccccaaaacctattgaaataagtccaaacattttatcrtgatgtgcaggtaactatctgggccccacttacctctctgacctcatttctgaccacttctcttcattgtccctgtgtcacagccacaatggacttctgt

SEQ ID NO: 464759 - DNA, 201 bp, Homo sapiens
caattttttaccattggacaaagctgatatgctttctcccactcactttaacaatgatcaggaaaataatccctaccttattgaaataatggttctaatamaggcactttcaaaaataaacagggaggagtgggtatggtcaagcctaggtacactaggggaattaacttttggataatttggctttttggtatcttacag

SEQ ID NO: 464760 - DNA, 201 bp, Homo sapiens
gttgagtctattctctttttttgcgtacatctagctaaacatttatcaattctgttgatcttttcaaagatacaacttgtggttttattaattttcttatytttctattcacaatttcattactttctactgtaatccttattatttcctgccttctgctagctttgggtttagtttgctcttcattttctagtttcctaa

SEQ ID NO: 464761 - DNA, 201 bp, Homo sapiens
gtaaagtgtatttcttcattttattttattttcttgagacagggtcttgctctgtcaccaggctggagtgcagtggcacaatctcagctcactgcaacctstgccttctgggctcaagcagtccttccgcctcggcctcctgaataactgggactacaggtgcacaccaccacacctgactaatttttatatgtttttgta

SEQ ID NO: 464762 - DNA, 201 bp, Homo sapiens
ccaggtttctgatttcaaagtctagatttttccactataccacagtttctcatttgaaagactgtaaggagagaggggttcatgcatacatgcattcatcmagtaattatgttcatttctatgtgacaggcattatagaaataatattaaaatgtaagatagcactttttaagtttttatatgattatattcttaccagtt

SEQ ID NO: 464763 - DNA, 201 bp, Homo sapiens
gtagtcttactgtttgcactttcttctttttaccctttgtagcctactaaattttaccttcccttttctcttagcaaatgaaaaagtccggaagctataaygttcagtttagtggttaaacacaggtctattgtggcagtaatagttggtgatttgaaaataagacataccctgctagtggtatgtcccaataatcttcaa

SEQ ID NO: 464764 - DNA, 201 bp, Homo sapiens
cggagatgagggagcggccggagaagagaggatgctgttgagcgttaggtcgcgacccctgctggaaggtgctgtttctccctcctttctggggctgggartggggggatgtgggctgcatccaagtcgctgccccccacgcccttccaacctccgtcacagctattctcggccagtttgcgcggggacttgctgatctcc

SEQ ID NO: 464765 - DNA, 201 bp, Homo sapiens
ataaaactagttgcagaaaaatatctccattaaaaaataaaactatatttatatatgtggggaacatattcatttatgtacaaatgtatgctgtttttgtrtatatatatagagagagagaaagatagtcacgcgaaaatataacaattaaaactgtaaacagtgattatctctgggaaacaggataagggaaatgaggga

SEQ ID NO: 464766 - DNA, 201 bp, Homo sapiens
tgaaaaagacacatgcacacacatgcttataggagcacaatttgcaattgcaattatatggaaccaatgagtggataaagaaaatgtggtatatataaacyatggaacactactcagttataaaaagcaacaaaataatagcattcacagcaacctgaatggagttggagaccattattctaagtgaagtaactcaggaat

SEQ ID NO: 464767 - DNA, 201 bp, Homo sapiens
tgatccaattatctccacctggtcctgcccttgacatgtggggattacaattcaaggtgggatttgggtggggacacagagccaaaccacatcagtaaagwtaaagtaaggaaataacattatatagaaggttgaagtttaggaacactttcaaatacattatctcagttaaatagatataaagagagagaataaaaacaa

SEQ ID NO: 464768 - DNA, 201 bp, Homo sapiens
cacccagagctaacacataaatgaatgagtgtggctatgtttcaataaaacattacagttgacccttgaacaatgtgggagttaggggtgccaacccaccrtacagtcaaaaatcccattataagttttgactccccaaaaacttaattactaatagcctacttatagaaaaatgaattttgaaataatgtatttattgca

SEQ ID NO: 464769 - DNA, 201 bp, Homo sapiens
gagtttgaggctgtcatgcaccatgattgtgcctgtgaatagccagtacactacagactgggcaacatagtgagaccctgtctctgaaaaatatatatatwtatttttttcttttacaaaccagaaaaaaaagtgtttttacttttgttagtttttcattttcatttttcctgcatttgacagctaattatttgtggattt

SEQ ID NO: 464770 - DNA, 201 bp, Homo sapiens
aaaacttcagtaagaaaataagttaaattatgtttcaagactttgtttttaagtaagaaacaattcattgtaaagacttttttaaaaaaatattttctgtkccaggtgcagtggtgtgcacctatagtcccagctactcaggaggctaacacaggaggactgcttgagcacaggagtttgaggctgtcatgcaccatgatt

SEQ ID NO: 464771 - DNA, 201 bp, Homo sapiens
gagaaatggaaaaacagaaatattaagtaacatgcttcacacaataggtggcagagacaagatatgacccaggtttctgatttcaaagtctagatttttcyactataccacagtttctcatttgaaagactgtaaggagagaggggttcatgcatacatgcattcatcaagtaattatgttcatttctatgtgacaggcat

SEQ ID NO: 464772 - DNA, 201 bp, Homo sapiens
aagccaggggtcagatcgtgtagtgccactgctacgcactttaaataatcctcaagaacacataaccaacagctcataatgcttcacaagacaaaggacgygtgattaaactgttagaaattaaaattatttattgaatgactatcgcatgccaggcactggatagaaccttaagcatatcatctcatctaatcctcacgc

SEQ ID NO: 464773 - DNA, 201 bp, Homo sapiens
ttgcagaagacagtgacaagcagaaggaacagcaagtacaaagaacctgaagtcagaaattgctttattgtatgtgaggaacagccaggagatcaaatgaytggagctaagtggacaagaagaagactggtaggaggtatatttgaagaggaagccaggggtcagatcgtgtagtgccactgctacgcactttaaataatc

SEQ ID NO: 464774 - DNA, 201 bp, Homo sapiens
gatcctggaagtctgagatctgggtgccagcatggttaggttctggtgagggccctcttctggttgcagactgctaacttctggcagtgtcctcacatggmagaaggggccattgagctccctggggtctcttttgtgagggcactaatcccattcataagggctttgccctcatgacctaatcatctcctaatatcaccc

SEQ ID NO: 464775 - DNA, 201 bp, Homo sapiens
aagtgcttaaggaagcagatctttggagagttttttaaatgatggatttatatgtgtccatttttttaaagagaaactaactattttgataacctagtatrgggctccacactgtttaaagcatttttacatatattaactcaactaatccttataatgattcggtgagatagatattattatccccattctatagatatg

SEQ ID NO: 464776 - DNA, 201 bp, Homo sapiens
catggtgaaaccccatctctaccaaaaatacaaaaattagccaggcatggtggcacaggcctgtagtcccagctactcgggaggctgaagcaggagaatcrtttgaacccgggaggcggggcttgcagtgatcccagatcactccacggcactccagcctgggtgacagagtgagaccccgtctcaaaagaaaaaaaaaaa

SEQ ID NO: 464777 - DNA, 201 bp, Homo sapiens
taataataaataaaaataaaatttgagaattatataaaaatattttttattttatttttatataaaaaatttatgaattatataccataaattatgtagtracctatcatcaaaaaatgtttatcattaaaaaaagacctggccaagcacagtggctcacacctgtaatcccagcactttgggaggctgaggcgggtggat

SEQ ID NO: 464778 - DNA, 201 bp, Homo sapiens
aaatctcttagctaaaagtgtggattttccagaatatcctccatcttcaaattatatccgcggttataaccatccttgtggctttgtatgttcaccaatgraagagtaagtgttgtttgcacttatttattttaacaggtttttttagttcaacttgtgatttagtttaagattgctggctcatcagtagaaatatgtagc

SEQ ID NO: 464779 - DNA, 201 bp, Homo sapiens
gaagtgtgagtcttacaacttttctgtttttcaagactatcttggctatactggttcccttgcatttccatatgaattttagacactccagcctcagcaayagagcaagaccccatctcaaaaaaaagtcagctgggattttgacaaagatgctttgattctgtagttcaatttggagaattattgccattttaaaaatat

SEQ ID NO: 464780 - DNA, 201 bp, Homo sapiens
cgaagaactcaaaagcaaatgcaacaaaaccaaaaataaatagttgggacctaattaaactaaaagccttctgcatcgtaaaagaaataatcggcagaggraacaggtaacccacagaatgggagaaaatattcacaaactatgcatgcagcaaaggactaatacccagaatctataagaactcaagcaaatcagtaagaa

SEQ ID NO: 464781 - DNA, 201 bp, Homo sapiens
tagaaaataacattgggaaaactcttctagacattggcttaggcaaagagttcatgacgaagaactcaaaagcaaatgcaacaaaaccaaaaataaatagwtgggacctaattaaactaaaagccttctgcatcgtaaaagaaataatcggcagaggaaacaggtaacccacagaatgggagaaaatattcacaaactatg

SEQ ID NO: 464782 - DNA, 201 bp, Homo sapiens
gtttgaggctgtcatgcaccatgattgtgcctgtgaatagccagtacactacagactgggcaacatagtgagaccctgtctctgaaaaatatatatatatwtttttttcttttacaaaccagaaaaaaaagtgtttttacttttgttagtttttcattttcatttttcctgcatttgacagctaattatttgtggattttt

SEQ ID NO: 464783 - DNA, 201 bp, Homo sapiens
tgtggtaatttttaccctctactgtcaaatatgtatgtggattgaagaccgcttttgtaattcagggagttttgtggttttgctctggatttagccagggwctggtagcttggaagttttgtcaccagtcactcctcagagggtgcagccttcagcatacacagtcttccagacccagctatgagtatattttattttaaa

SEQ ID NO: 464784 - DNA, 201 bp, Homo sapiens
tacaaatttgtagaaattttactcattattttatttctatatttttttgcatatttttctttttctctatcctttcttgttttgagagacgggtctcactytcttatccaggctggagtgcagtgtcagttctttccttctggtactctcaaaatgtgtatattgatgtgtttaatggcatatcacatttctctgaggcac

SEQ ID NO: 464785 - DNA, 201 bp, Homo sapiens
cggctgtcgttccggtcgctgagagtctgccccacagctccagtttttccaagtgagttcagcctccccgcttccagagcatcccccgccaaaaataagayatcgtctcagctagtaggcagtcccccctcaccacttctttcactccctcttcagtgcctttcctctcacaccccggagcctctcacacacaaagcagat

SEQ ID NO: 464786 - DNA, 201 bp, Homo sapiens
tactacttagaattcaatgaacttcttgaatgtagtattttcctacaaatttgtagaaattttactcattattttatttctatatttttttgcatattttyctttttctctatcctttcttgttttgagagacgggtctcactttcttatccaggctggagtgcagtgtcagttctttccttctggtactctcaaaatgtg

SEQ ID NO: 464787 - DNA, 201 bp, Homo sapiens
taaatgtgcttttatttcttttagaaactgcgggttttgatgtatccctatccccactcccaaatatgtcattctgtaaaatgcaaatgtgtaatcatttyctaacttgcattattgatgagaacataccatttcataccatacagatctatggactcagataacttaagataactcatggtgaaggaacttgggtatcac

SEQ ID NO: 464788 - DNA, 201 bp, Homo sapiens
tatttaagtgcttaaggaagcagatctttggagagttttttaaatgatggatttatatgtgtccatttttttaaagagaaactaactattttgataacctrgtatagggctccacactgtttaaagcatttttacatatattaactcaactaatccttataatgattcggtgagatagatattattatccccattctatag

SEQ ID NO: 464789 - DNA, 201 bp, Homo sapiens
aaatatattgacctaattcatggatcaaaataattctacttctgccttgtttcctcacaggttaagagatatggagatttccacaaggatttggagaggarccccagtagttactaaaattctgcattagatctgtcaggaaaggtaaagaaaccaggactctgctaggaaagaggaggttataataatggtttactaaaa

SEQ ID NO: 464790 - DNA, 201 bp, Homo sapiens
tagtttcttaaagattctttttataaacagtatcttttaaagttttttgtactatatttttctttcatcttggggcatatatgtagcaaatgtttcctaakgaagacaaagtatagataaaggacactgagaagatataaagaaaattatcaaatatattgacctaattcatggatcaaaataattctacttctgccttgt

SEQ ID NO: 464791 - DNA, 201 bp, Homo sapiens
atggccaagactttattctccatagcaggagaaaacaaaacaaatgaagggtaattactccaattcagcaaggtaaatcaactgctggcatggactagagwtggaaaattacacagcttaaagtgtgcttcacaggccaagtccccttcttgcaccttgtcaatgtagaagtgcactccagtaaatattagaaaggctttc

SEQ ID NO: 464792 - DNA, 201 bp, Homo sapiens
ttttttttttttttttgatggagtctcactctgtcgccaggctggagtgcagtggcacgatctcggctcactgcaacctccgcctcctgggttcaagcgawtctcctgcctcagcctcccaagtagctgggatgacaggcacatgccaccacgcccagctaattcttgtatttttagtagagacggggtttcaccatgttg

SEQ ID NO: 464793 - DNA, 201 bp, Homo sapiens
gaaacctgggttctatttctgtacttatctctagatgtgaatgtgatttaatctgttaggcttcaatttctccatctaaaaattgaaagagtagatgataycaagattgcttcttgaattttctacactcgtagatttaatgctcctttaacactcaaaatccaagctgatttggtgacgagatcttaaaatttcaaagcc

SEQ ID NO: 464794 - DNA, 201 bp, Homo sapiens
ccaaactcttttttaaaaaattgaatttctttttatcgttgagttggaagagttatttatacactgtggatactagtttagtatcacatatatgatttgcractattttctcccattctgtaggttgtcttctcactctcttgatggtatcctttgaagcacaatttttaaaaattttcttgaagttcaatttatccgtct

SEQ ID NO: 464795 - DNA, 201 bp, Homo sapiens
tgcagaaaaagcactggacaaaatccagcatctctttttgactaaaaccctcaacaaaataggcatagaaggaacttacctcaaagaagtaaaagccatcyataacaaacccacagccaacattatgctgaacagggaaaagttgaaagcattcctcctaaaaactggaacgggaaaaggatgcccattttcaccacttct

SEQ ID NO: 464796 - DNA, 201 bp, Homo sapiens
tgcttataatgcacatatccagtaactgataaaactgttaaagaaatttccactagatggctctttacataaatgtgcttttatttcttttagaaactgcsggttttgatgtatccctatccccactcccaaatatgtcattctgtaaaatgcaaatgtgtaatcattttctaacttgcattattgatgagaacataccat

SEQ ID NO: 464797 - DNA, 201 bp, Homo sapiens
aaattttgatcatctcaatagatgcagaaaaagcactggacaaaatccagcatctctttttgactaaaaccctcaacaaaataggcatagaaggaacttayctcaaagaagtaaaagccatctataacaaacccacagccaacattatgctgaacagggaaaagttgaaagcattcctcctaaaaactggaacgggaaaag

SEQ ID NO: 464798 - DNA, 201 bp, Homo sapiens
aaatcagcaaaaagttatgaggctatgagagtaatctaaatgagacattatggtggcttgtgcaagggtggtagacgtggagagggaggtaagtcagggarcccaaagatatatagagtcaatagggcttactgatgcagggagagaggaatcagataagtcttctaaaactggattgtgatgaaattgcacaaataaagt

SEQ ID NO: 464799 - DNA, 201 bp, Homo sapiens
acaatcatggcagaaggcgaaggggaagtaagcacattttaccatggcagagcaggagagagagggagcaaagggggagatgccacacatttttaaaccaycagacctcgtgagaactcactcactatcatgagaacaggaacaatgcagacatataccataaggacttaaagaacgaacggcatataatgtttaagagta

SEQ ID NO: 464800 - DNA, 201 bp, Homo sapiens
aatacttacaagtctgcactacatcttgctctgactggtactgagtaggcagagccggtgcataaacacagccttccagaccccagagatgagtgtgctcktagtgggccactttagctgtatgtttccctgcttctctctgttaaacttctggctggtcgtctttgtttctttgttgctattagttttatgcagctattg

SEQ ID NO: 464801 - DNA, 201 bp, Homo sapiens
tacacagtcttccagacccagctatgagtatattttattttaaagtggatagaatatattattttccagtcagtgatgcattacaggttgtactatacttwtgtccctgagtcagtaaggcatcagctctttgctaatcaatctgaatgtggcttgggaaatacttacaagtctgcactacatcttgctctgactggtact

SEQ ID NO: 464802 - DNA, 201 bp, Homo sapiens
ctgtggatttgagttactatctgctgttattttttttattcacatatagctttatttccatccccctctgttgtgtttattgtcaattatatgtatacatkttataagcccaataaaatgttatattgttttaggaaattgactttaatcagttaatagaagaaaggggaagaaatatgtaattatactgtattgtaacat

SEQ ID NO: 464803 - DNA, 201 bp, Homo sapiens
acatattatgtctatatatgttacaaatcaaataccatattgttataattattgctttatatagtatcttttaaagaacttaataggagaatacaaacatrcttcaagatatttctatcttacccatctaaatacacatatatatccgtaagaatacatctatatagaaatatagctttagaaatatattctttcttattt

SEQ ID NO: 464804 - DNA, 201 bp, Homo sapiens
gtttgatgttagcagtggatttttcataggtgccctttatcaagttgagggcatttccctatacccctcattctatgaatgctttatcctgaatgggtgtyggattttgtcgtatgctttttccacatctattgaaatgatgtggttttgttgtttagtctattaaaattgtgtattgtagtaattgataattcatatggt

SEQ ID NO: 464805 - DNA, 201 bp, Homo sapiens
aagctagaaaatctagaggagatcgataaattctgggaaaaaatacaaccctcctagattaaatcaggaagaaatagaaaatctgaaaaaaaaaaaacaawaacaagtagcaagattgaaacaataattttttaaattgccaacaaaaaagtccagaacgagatggattcacagctgaattttatcagacattcaaagaaa

SEQ ID NO: 464806 - DNA, 201 bp, Homo sapiens
ggggggaaacaatacaaagaatagatattaagtaacgtttgttatctttacggtttgatttgttgcaggacacattcatatgtcataccattacacaaagytttgccgtgggctccatttcccctcgagactttatcgacttagtgtacatcaagcgctacgaaggaaatatgaacattatcagttgtaagttgaaacatt

SEQ ID NO: 464807 - DNA, 201 bp, Homo sapiens
gaattttgactatgatatatctggaagtggatgtttttccacctatactacttagaattcaatgaacttcttgaatgtagtattttcctacaaatttgtaraaattttactcattattttatttctatatttttttgcatatttttctttttctctatcctttcttgttttgagagacgggtctcactttcttatccaggc

SEQ ID NO: 464808 - DNA, 201 bp, Homo sapiens
ttttggtagctttttttcttcagctcttcaaacgtcatttacttccttctggcctccattgtttctaatggcatgccagctgtcagtcttattatggttcycttctatgtaatgccttttttttttttaactgctttcaagactttatttttattttcatgttcagaattttgactatgatatatctggaagtggatgttt

SEQ ID NO: 464809 - DNA, 201 bp, Homo sapiens
gggttaaaagaaatactgtcgacaatctctaccttctgattggcttgtttaatccagtcacacctaatgttactgttatatggttgtatttatgtctgccrtattcagtcacacctaatgttattgttatatggttgtatttatgtctgtcatttttcctgtattttaaaaatttattttgttttctgtatgtctcatggc

SEQ ID NO: 464810 - DNA, 201 bp, Homo sapiens
atctctgctaatagtttttatcttaaagtctactttatttgataccagtaaagccacctcagctcactatggttccatttacagggtgtatctttttcaarccttttacattcacctatatgtatctttgaatttaaagcgtatcttttatagacagcaagcatatagttggaacttgtttggggttaaaagaaatactgt

SEQ ID NO: 464811 - DNA, 201 bp, Homo sapiens
cactgcattcattgcagtatccctagcacaagaacagtgtctctcaccaagacacttaataaatattgaatgaatttatggacttcagttatattatattsgctaccaaatgggaagttatatatcttataactgcagtacaaaaaaataaactcaagataatttttcaacacttatgccttttcttaataatttgctact

SEQ ID NO: 464812 - DNA, 201 bp, Homo sapiens
tcaattaatatcaagtaggtttccaataggaaatcaagaacggtgttttatatgctaagacgagccctggtcggggattaacaatccttgttaattgttartgacgtaagcttaaaaacttaaatttttgtatccacgttccacctaagtgtctttttaaactgagttcctttaaaatagtttcttaaagattctttttat

SEQ ID NO: 464813 - DNA, 201 bp, Homo sapiens
ggcaagctattcccccaaatgtttccaaggctaatgtcatttttatgttcaagatgtcagtttcattatctcctcttcagaatgaccttcctagccacgtrgccaaagttcccaaatacacacactcaacctctatttactacattgttctgctattatcttcttcatagcacttcactatatgaaatttatcttctttgt

SEQ ID NO: 464814 - DNA, 201 bp, Homo sapiens
caatgacttttgttaaatttatttcaaagctttattctttttgatgttattgtaaatggaattgttttctgaattacttttaaaaaattttaatcctagcrtatagaaatacaattgatttttatatattgatcttgtatcctgaagctttactggacttcttagttgtattattttagtggattctgttgtttttttcta

SEQ ID NO: 464815 - DNA, 201 bp, Homo sapiens
tgtcccaataatcttcaaagtctctagatcaattaatatcaagtaggtttccaataggaaatcaagaacggtgttttatatgctaagacgagccctggtcrgggattaacaatccttgttaattgttagtgacgtaagcttaaaaacttaaatttttgtatccacgttccacctaagtgtctttttaaactgagttccttt

SEQ ID NO: 464816 - DNA, 201 bp, Homo sapiens
ggacttcaaggcaattgcccaacaaactgcccaagaagttttaggttataatcgagatacatcaggctggaaagtggttaaaacttcagtaagaaaataarttaaattatgtttcaagactttgtttttaagtaagaaacaattcattgtaaagacttttttaaaaaaatattttctgttccaggtgcagtggtgtgcacc

SEQ ID NO: 464817 - DNA, 201 bp, Homo sapiens
ttcagtatatgtcttaaacgtgttctatttttttttattttactctaacaccattcaatgacttttgttaaatttatttcaaagctttattctttttgatrttattgtaaatggaattgttttctgaattacttttaaaaaattttaatcctagcatatagaaatacaattgatttttatatattgatcttgtatcctgaa

SEQ ID NO: 464818 - DNA, 201 bp, Homo sapiens
gtatgtcccaataatcttcaaagtctctagatcaattaatatcaagtaggtttccaataggaaatcaagaacggtgttttatatgctaagacgagccctgstcggggattaacaatccttgttaattgttagtgacgtaagcttaaaaacttaaatttttgtatccacgttccacctaagtgtctttttaaactgagttcc

SEQ ID NO: 464819 - DNA, 201 bp, Homo sapiens
ccacactgtttaaagcatttttacatatattaactcaactaatccttataatgattcggtgagatagatattattatccccattctatagatatggaagtkgaagttcaaaggttaagcaatttatccaaaataatatagctgtactaagtgacaaagtcaggatttgaatccagttctgttttcaccttacctgccagct

SEQ ID NO: 464820 - DNA, 201 bp, Homo sapiens
ttcactcaaacccagtgagatttaagttagttatcagcattaactattttctgagatttgagctatcttttgcttcaaatctcagaaaatagttcaatgayacttttaaccatttttcttgtatacagaagttgacagcatctttagaaataactagcaggaaaaagttcaagaggacaatagtgttgatactggtatttt

SEQ ID NO: 464821 - DNA, 201 bp, Homo sapiens
actaggttgcataattctaaaataaactctattgatttttagttagagtttgaagttagctacagggaattgcagaaggaagcattttaaagtacctttaytgacagaccatctaactactttgaatattttatttaaaaaaaaaaacatgattaacacaaaaatctatgaacccaggaccctagcagaatagtattcacc

SEQ ID NO: 464822 - DNA, 201 bp, Homo sapiens
aataaacaaatatatcttttaaaatagttttagaagagtatatatattatcataaatgaaatcataaaccacccccctctgcattcacatagaatacagayactaggttgcataattctaaaataaactctattgatttttagttagagtttgaagttagctacagggaattgcagaaggaagcattttaaagtaccttta

SEQ ID NO: 464823 - DNA, 201 bp, Homo sapiens
ttggcaggctgaggcaggagaatggcgtgaaccctggaggcggaggttgcagtgagccgagatcgcgccattgcatgccctccagcctgggcaacagagcragactctgtctcaaaaagaaaaaagaaaatgacctattgaggtatctaattattattgtgaaattatctatttctccctcgagatatgtccattttccct

SEQ ID NO: 464824 - DNA, 201 bp, Homo sapiens
ctgattttcttctgattgtttcattcattattgaaaatgacgtgggccgggcacggtggctcacgcctgtaatcccagcactttgggaggctgaggtgggyggatcatgaggtcgggagatcgagaccatcctggctaacacggtgaaaccccgtctctactaaaaatacaaaaaattagccgggcgcagtggcgggcgcc

SEQ ID NO: 464825 - DNA, 201 bp, Homo sapiens
tgcagaaaaatatctccattaaaaaataaaactatatttatatatgtggggaacatattcatttatgtacaaatgtatgctgtttttgtgtatatatatakagagagagaaagatagtcacgcgaaaatataacaattaaaactgtaaacagtgattatctctgggaaacaggataagggaaatgagggagggaaaatttt

SEQ ID NO: 464826 - DNA, 201 bp, Homo sapiens
ctctaattcagaaaaaaaggacttgtggaactaattcatttttaacaattttattgagataatttatgtaccctaaatttcacctactttaagtgtacaaytcagtgattgttagtatatatacagagttgtaccaggatcaccataatttcatttagaacattctcctccccaaaaaagaaacttgtgcctactagcatt

SEQ ID NO: 464827 - DNA, 201 bp, Homo sapiens
tcccaagtagctgggactacaggtgcccgccaccacgcccggctaattttttgtatttttagtagagacagagtttcaccgtgttagccaggatagtctcratctcctgaacttgtgatcagcctgcctcggcctcccaaagtgctgggattacaggcgtgagccaccgcacccagcccagaaatttctattgttgttgca

SEQ ID NO: 464828 - DNA, 201 bp, Homo sapiens
cgagttcttgatgtaaggccttggaagttctccagggatagtggtagtaagaagtatctggctgtggaggaccccaaagtttttaggggacaaaggcttcytctgcctcaggtcctatagcatgtctccatctgtcctacaggtgaatctcatgggcaccttcaatgtgatccgcctggtggctggtgagatgggccagaa

SEQ ID NO: 464829 - DNA, 201 bp, Homo sapiens
ccatctctactaaaaatcaaaaaaactagctggccatggtgatgcatacctgtggccccactactcaggaggctgaggcaggaggatcacttgaactcagkaaagtgagactgcagtgaggtatgatcgtgacactgcactgagccactgcactcaacttagtttaggctgctataacagattgccatagactgggtggct

SEQ ID NO: 464830 - DNA, 201 bp, Homo sapiens
agatgttgtattgccttcagctgtactttgttagtcaaggcagttgcaaagtcatgtgcaggctgaaggggagggaacagagactccatgtgaggacacamgaagaaggcagccatctgcaagccagaaagtaaggcctcaccagaaaccaaattttccaacaccttaatcttggacctcttgccttcagaactgtgagaa

SEQ ID NO: 464831 - DNA, 201 bp, Homo sapiens
aattttaaaatgtgaaatggcaaaatggaaagagagcattcaaagagaaaggaaattcttggtcagttaaaacatttcacacctccctaactgcctttctstgcttcttgattcaaagttctaaggcaagtaaacactagaaattagtgtttcctttaaaaagccttcttgggttatgccaaatcaaaaaaaaaaaaaaaa

SEQ ID NO: 464832 - DNA, 201 bp, Homo sapiens
agtttcccttctcattttagttatcaggaatttaaatcaatcaaggcataaattggaccaaacattattaccactgttcattgatatccttaactaagaaygttactgaaactttcccttaatacttattatatatcttccaagtcaatcctgagaaaatccataaagctcatctcagggcgaaagcttgtacatttaagt

SEQ ID NO: 464833 - DNA, 201 bp, Homo sapiens
cttgggtcctagagaccacctgtggctccttacaatgtgggctttctcaacatggctacttactgcatgaagccagcaaaaagaatctcccagtccagtaygctaagacagagccttgtataacataagtcccaccctcactcaaggggaggggaatgttaagaagacataaacaacaagaggtgaaaattattgaccgta

SEQ ID NO: 464834 - DNA, 201 bp, Homo sapiens
gacactggctatactatacagtgacttcatggtatgtcagaagaagcaaatacatttggtagctaattgttgatgctgatacctttactcacaaacttggytaatctccagaaacatactagctgctgagggtatagcagtagaggagaaataatcttcaaggggctataatctgaaagggatatgatattgaatcatttt

SEQ ID NO: 464835 - DNA, 201 bp, Homo sapiens
catccctgggtgattttgcccccaggggacatttgacaatgtctggaggcatttttgattgtcacaaatggagttgtgctataggtatctaatgagtagargttaagtattttgctcaccatctgcagtgcacaggaagctcccacaacaaagatttttctagcccaaaatgtcaatagtgctgaggctgagtaacccttc

SEQ ID NO: 464836 - DNA, 201 bp, Homo sapiens
tttcaaagaaagtaattcaaacacaggtggggtcccggcttacatctgttggatttggctgccatttggcagctgctcgttggacagggagaggagaggargtgactcagagccgggagggcagcaggtgtgtgtgcctaagcagttggctgcaatccaggacacagacggaaacttcccggtctccgttgctctgcttct

SEQ ID NO: 464837 - DNA, 201 bp, Homo sapiens
cagtagcgtacaaggcccgtaaacgggggtcacagatgtgggagtgactaactaggctggctctcgctcttctggcctttcctgaggctcggaaccagtawcgaggttccaaatagctgaattcaaagttttctcttctgaggactgccagtgcacaagaaagtccctagccccacccgtatgcggcataaggaaatgttg

SEQ ID NO: 464838 - DNA, 201 bp, Homo sapiens
cctcaggaggtcctgagaacatgtgcccaaggtgactgggttatagcttgattttatacattttagggagacagtagtgacaggcagtgacatagatcaayacatttaagatatacattgattcagccaaaaaaggcaggacatcttgaagcaggtgggaaggggcgtccaggtcacaggtgtattcaaagctttcctggt

SEQ ID NO: 464839 - DNA, 201 bp, Homo sapiens
attttcttctgtatatggtttgtttgtttgtttgaagagatggggccccactctgccccaggctttagaggtgtgatcctagctcaccacagcctacaacytctgtgctcaagcggggaaccctcccacctcagcctcccgagtagctgggactactggcatgtgccaccatgcccggctgatttttatttatttatttat

SEQ ID NO: 464840 - DNA, 201 bp, Homo sapiens
ggaagttgttacttgggattgtgattccggttgcagtcagatggcatctggagctgggatcctctgaaggtttgattgggttagaagttcaaaatggcttygtcatgcacatgtctcttgcctgggttaagatgacgagaatgcgagggcctggctgagcatttctttctctccacgaagccctctccgtgtggctggcct

SEQ ID NO: 464841 - DNA, 201 bp, Homo sapiens
taaaatctgagacaatccaactttgttggacatgagacaacttagatccctgcttttccactggaataaaatacatcgcataaatctttcttagaatgcayagcagaagcagcagggttttagaagcagagttaaaaggcaatgagatagctctaaaatttctttttatttttttgagacagagtttcactcttgttgccc

SEQ ID NO: 464842 - DNA, 201 bp, Homo sapiens
gagttggatttaaccaagactgtgactttggtgaggatgtatgaccaaaagagagaggaggggggtatatggaagagattgcttgtatggatgaagcatgsaataaccgtggcaaggagagaaataacgagatgaggggtgagggacagtgaggtggaggatggatcaatgtgttgtgggtcctgcaatggtagaaagacc

SEQ ID NO: 464843 - DNA, 201 bp, Homo sapiens
ataatcttcaaggggctataatctgaaagggatatgatattgaatcattttatgacttttcataacattttcatatttgttttaatatgatacaaaatatrgagaaaagagtgaggcctccaactccaagtcctctaattggataaaagtcaatcattctgtacaagactaaatatgtggaataacatttttcacttcttt

SEQ ID NO: 464844 - DNA, 201 bp, Homo sapiens
gtaataaaatgttttttctcaactggacagtcattgatcaatgatctcaaagctatctgttgattagtccatcctccccccactaatttgatattttgtctttcttgtatcttgaattggaatttacatatagatattttactagaagctcatttgtttaactgccttaattttcaaacctttcagtgtcaagctttttca

SEQ ID NO: 464845 - DNA, 201 bp, Homo sapiens
tcctttgcttttcacatggaacatttgctgatcttctttctcagattgcacaaaccatgctaatggccagcatggatggagggagcgtgtgagatgtgtgrggcagcgtgctgcatctcagccaactccaggaggtaagtgcgtctgctgtggtgaaatctatatttggtcttcatttctgttttcctggcatatgatttc

SEQ ID NO: 464846 - DNA, 201 bp, Homo sapiens
taataaaatgttttttctcaactggacagtcattgatcaatgatctcaaagctatctgttgattagtccatcctccccccactaatttgatattttgtctttcttgtatcttgaattggaatttacatatagatattttactagaagctcatttgtttaactgccttaattttcaaacctttcagtgtcaagctttttcag

SEQ ID NO: 464847 - DNA, 201 bp, Homo sapiens
aaaccttaccattttgtactaatatgtttaacatgttcaagatgctgtcataaatctcaggctcctcatggctcagtccacttcaactagtaatggcttcyagtcatttttgatgactggtaaagggttggctaagggcctaatctgcataatgagaatgctaggactataaaggcaagcgtcacgaatcctatgcaatag

SEQ ID NO: 464848 - DNA, 201 bp, Homo sapiens
gaaagaccatcaaggtgcttgagggagtgaggaggaaaataggaaatagtggctggagagtggttacttgaaactgagtttatggcaaggatgtagaggggtgtgtgtgtgtgtgtgtgtgtgtgtgtgtgtgtgtgttccgtaatgggaatgtctaaggtataatcatggaagtcaagctttttggaggtggggagagaa

SEQ ID NO: 464849 - DNA, 201 bp, Homo sapiens
gaaaaaaaaatgttattatctcttgtggttctatgtgttggctgagctcagatcggaagttgttacttgggattgtgattccggttgcagtcagatggcayctggagctgggatcctctgaaggtttgattgggttagaagttcaaaatggcttcgtcatgcacatgtctcttgcctgggttaagatgacgagaatgcgag

SEQ ID NO: 464850 - DNA, 201 bp, Homo sapiens
aaagaccatcaaggtgcttgagggagtgaggaggaaaataggaaatagtggctggagagtggttacttgaaactgagtttatggcaaggatgtagaggggtgtgtgtgtgtgtgtgtgtgtgtgtgtgtgtgtgtgttccgtaatgggaatgtctaaggtataatcatggaagtcaagctttttggaggtggggagagaac

SEQ ID NO: 464851 - DNA, 201 bp, Homo sapiens
tagtttttttttttttttttagactgccagatttttttcttgcaaggattttgtaaatacagaatttcctgtattaaatccctttctacttgagatccctrtagtggcttctgtgtccagctctaacccttggctgacatggctcaaacttcagacccagtgctcttaaccaagactggaagaccaaagagatgacctcct

SEQ ID NO: 464852 - DNA, 201 bp, Homo sapiens
gatttctatgtgagacagtacattccttattttttaaatcaccttaactggattttctgttccttgcaactcaatacattttttgttttagccaactcatytaaactaattttgatcaatttatttttattgctacatctctctagaccactaagtagtgaagaagaaaggagcctggagccacagtagaagaactttaat

SEQ ID NO: 464853 - DNA, 201 bp, Homo sapiens
tgggagtctgagtggtgggacttacacgtggtagttcacttcacaaaagtaaacattacaacagtcctaggaggaagctgcaaggctttggatggtctggrctcagcagtcatgcagtgtgtcttctgtcacattctattagtcaaaagcaagtcacaaggccagcccagattcaaggggtgaatcataggaggcacagct

SEQ ID NO: 464854 - DNA, 201 bp, Homo sapiens
aagaccatcaaggtgcttgagggagtgaggaggaaaataggaaatagtggctggagagtggttacttgaaactgagtttatggcaaggatgtagaggggtktgtgtgtgtgtgtgtgtgtgtgtgtgtgtgtgtgttccgtaatgggaatgtctaaggtataatcatggaagtcaagctttttggaggtggggagagaact

SEQ ID NO: 464855 - DNA, 201 bp, Homo sapiens
tattgtttcagtattcctcacagcctacaaggtaggaagttatctccatttttttttagataagaagttggaacacagggaagttacagtcaattgcttaraggttatttagtaaataaatggcaaagccaggaatgaaagccctctctgtctcatagcaaagtccatgctctttccgtttgtgaaactaatcctgcacta

SEQ ID NO: 464856 - DNA, 201 bp, Homo sapiens
gggatgtctgtaagtcatgagggctttgccctcatgaatggattaatgctgctatgaaaagggcttgtggaagtgggctttctctctctcgctctctcttytactcttctgccatgtgaggacacagtgttcccccttgctggagaatgcagcaatgatgcaccatcttggaaccagagactaaatatgctggcaccttaa

SEQ ID NO: 464857 - DNA, 201 bp, Homo sapiens
aggtctaaactgatttagaggtttattttgccaaagttgagggggccagtaacacagcctcaggaggtcctgagaacatgtgcccaaggtgactgggttayagcttgattttatacattttagggagacagtagtgacaggcagtgacatagatcaatacatttaagatatacattgattcagccaaaaaaggcaggacat

SEQ ID NO: 464858 - DNA, 201 bp, Homo sapiens
ggaaagtgcctgattccacagaccattcccagcactgaatattcaactcggaatcgtttaaaaccagatgtttaaaaagtggtatcttgttttaatttgcrtgttcttgatgattagtgaagttgtgcatctcttcaaatgcttaaccatttctatttccttttctctgaattgtcttgtcatatattttgtgcattttct

SEQ ID NO: 464859 - DNA, 201 bp, Homo sapiens
tgtaagtcatgagggctttgccctcatgaatggattaatgctgctatgaaaagggcttgtggaagtgggctttctctctctcgctctctcttctactcttytgccatgtgaggacacagtgttcccccttgctggagaatgcagcaatgatgcaccatcttggaaccagagactaaatatgctggcaccttaatcttggac

SEQ ID NO: 464860 - DNA, 201 bp, Homo sapiens
tgccctctgtgctctgcctattcatccctctctccttgcaacccctgacagccactgatctttttactgtcttcatagttttgccttttccaaaggtcacrttgttggaatcatactgtatatggccttttcagattggtttctttcacttactaatatgcatttaaggttcctccatatcttttcttggcatgatagatt

SEQ ID NO: 464861 - DNA, 201 bp, Homo sapiens
atgtaataaaatgttttttctcaactggacagtcattgatcaatgatctcaaagctatctgttgattagtccatcctccccccactaatttgatattttgtctttcttgtatcttgaattggaatttacatatagatattttactagaagctcatttgtttaactgccttaattttcaaacctttcagtgtcaagcttttt

SEQ ID NO: 464862 - DNA, 201 bp, Homo sapiens
atgctgggaattccatttatgtattcaaagtttctattaacttctttggaatccagcataaacctttgatagtatttataaaaaattttaaaatgtgaaakggcaaaatggaaagagagcattcaaagagaaaggaaattcttggtcagttaaaacatttcacacctccctaactgcctttctctgcttcttgattcaaag

SEQ ID NO: 464863 - DNA, 201 bp, Homo sapiens
gtgtgtatggatagtttgtttatttatttagttagttagttatttttgagagggtgtcttgctctgtcacccatgcttggagtgcagtggtgcaatctcgkctcactgcagcctctgcctcccaggttcaagcgattgtcctgcctcagcctcccaagtacctgggattgcaggcaccctccaccacacccagctaatttt

SEQ ID NO: 464864 - DNA, 201 bp, Homo sapiens
cgtggcaaggagagaaataacgagatgaggggtgagggacagtgaggtggaggatggatcaatgtgttgtgggtcctgcaatggtagaaagaccatcaagktgcttgagggagtgaggaggaaaataggaaatagtggctggagagtggttacttgaaactgagtttatggcaaggatgtagaggggtgtgtgtgtgtgtg

SEQ ID NO: 464865 - DNA, 201 bp, Homo sapiens
tgtaataaaatgttttttctcaactggacagtcattgatcaatgatctcaaagctatctgttgattagtccatcctccccccactaatttgatattttgtctttcttgtatcttgaattggaatttacatatagatattttactagaagctcatttgtttaactgccttaattttcaaacctttcagtgtcaagctttttc

SEQ ID NO: 464866 - DNA, 201 bp, Homo sapiens
cttgatgattagtgaagttgtgcatctcttcaaatgcttaaccatttctatttccttttctctgaattgtcttgtcatatattttgtgcattttctgtgcrgttgtttatcatgtagatttgttgaagctttttgtatatgatagatatcaacaccgtgtcattttatatgttacaaatacatcctcccattaagttgctt

SEQ ID NO: 464867 - DNA, 201 bp, Homo sapiens
tatttaagacttaaagttttaaagttttgtcacttagctctaatgtttttcttattacatttcaaccaaggttttataatttatgttgcaattgtgagtgrgaatctatttttcctgatatttccttttatagttattgctgaaaaaataagaaactaaaatatagaaaccattatttctgttatcttgattttttttttc

SEQ ID NO: 464868 - DNA, 201 bp, Homo sapiens
taatgataatagcaattttctctagttgttatgaaaaaaaacaccaggtatgagaaataacatatacattataaagtgttgaacaaatggttttttatttwaaaaaaaaactttattaaagagatagtttggggcattttttctttacattattttaaaatgacaatatccttctatgttagaaatacaacaattttggaa

SEQ ID NO: 464869 - DNA, 201 bp, Homo sapiens
atggttttttattttaaaaaaaaactttattaaagagatagtttggggcattttttctttacattattttaaaatgacaatatccttctatgttagaaatrcaacaattttggaaatcatttctaaatatctttagcaccccactattcttaatgtcatgttacatgaaatttacataatctagtttagaatcagcattac

SEQ ID NO: 464870 - DNA, 201 bp, Homo sapiens
atatccttctatgttagaaatacaacaattttggaaatcatttctaaatatctttagcaccccactattcttaatgtcatgttacatgaaatttacataatctagtttagaatcagcattactgggaaaaagacaatgttcctatataaattctactacatataatatatatatgctactgtttatgagaagggtcaatag

SEQ ID NO: 464871 - DNA, 201 bp, Homo sapiens
ttattttaaaaaaaaactttattaaagagatagtttggggcattttttctttacattattttaaaatgacaatatccttctatgttagaaatacaacaatkttggaaatcatttctaaatatctttagcaccccactattcttaatgtcatgttacatgaaatttacataatctagtttagaatcagcattactgggaaaa

SEQ ID NO: 464872 - DNA, 201 bp, Homo sapiens
taaagagatagtttggggcattttttctttacattattttaaaatgacaatatccttctatgttagaaatacaacaattttggaaatcatttctaaatatmtttagcaccccactattcttaatgtcatgttacatgaaatttacataatctagtttagaatcagcattactgggaaaaagacaatgttcctatataaatt

SEQ ID NO: 464873 - DNA, 201 bp, Homo sapiens; identical to SEQ ID NO: 436644

SEQ ID NO: 464874 - DNA, 201 bp, Homo sapiens; identical to SEQ ID NO: 436582

SEQ ID NO: 464875 - DNA, 201 bp, Homo sapiens; identical to SEQ ID NO: 436637

SEQ ID NO: 464876 - DNA, 201 bp, Homo sapiens; identical to SEQ ID NO: 436540

SEQ ID NO: 464877 - DNA, 201 bp, Homo sapiens; identical to SEQ ID NO: 436584

SEQ ID NO: 464878 - DNA, 201 bp, Homo sapiens; identical to SEQ ID NO: 436605

SEQ ID NO: 464879 - DNA, 201 bp, Homo sapiens; identical to SEQ ID NO: 436614

SEQ ID NO: 464880 - DNA, 201 bp, Homo sapiens
tgcagagagggtaacgttggagcaagagaacccagtggggctcctgagatactgcctgacaccagattgtgaggcctgaattaagctggtgacagcagagmtggagggcacagatacgaaatatatcaggaagtaaaatcagtaggaatcaataactgctgaaatattatagggagaaaggaatgggggtggcgtgtagtc

SEQ ID NO: 464881 - DNA, 201 bp, Homo sapiens
tcaggtgagtgttaacacagagtggcagctttgaaaaccagtgcatagtgcctgccgtaagaagttggctagggtattagtgttctgattgagatccagcygacaagctgacaagcatttcctcggggcctgctctgtgccaagcactgtgttgggcagtggggatacgaaaatgactaaggcccagtttctgccctgaaa

SEQ ID NO: 464882 - DNA, 201 bp, Homo sapiens
aggaagtaaaatcagtaggaatcaataactgctgaaatattatagggagaaaggaatgggggtggcgtgtagtcaaagacggtggtcggcactgatgggcyattccacctcccttttgctccagatgtataacataaaacagtcaacagataccaaggaagcagcagccatcgaggctagaagaaatcgagaaaaagagcg

SEQ ID NO: 464883 - DNA, 201 bp, Homo sapiens
ttagttgctttgtttctcctccacttaagtaaatattcctcgagttgatgtgccaaacctctcttttggaataacagaaggtttaacacatatatgctcayagggacagcgctttcacacgttactgacagcttcatagacatcatttctatttctcctcaagacaagctaaggcagaaggtaaggcagacattatgatgt

SEQ ID NO: 464884 - DNA, 201 bp, Homo sapiens
atttatatcagaaaagtagctaatttttgactgccaggattaagctgcttttgacaaagttatatgtttagcccatgtgttcctgatggttagcttcctcwttatgatcatgcactacaaatggagggggattctcttttgtattttctcttaggtagttcgaggacactacaaaggtcagcaaattggcaaggtagtcca

SEQ ID NO: 464885 - DNA, 201 bp, Homo sapiens
cttataaaatctaaaatcatggccaggcgcggtggctcacgcctgtaatcccgacactttgggaggctgaggtgggtggatcacctgaggtcaggagttcragaccagcctggccaacatggtgaaaccccacctctactagaaatacaaaaattaggtgtggtggcacacacctgtaatcccaagtactcgggaggctga

SEQ ID NO: 464886 - DNA, 201 bp, Homo sapiens
tgccaggcaagagtgactgctcttcaggccagatcttccttcgagatggatgttatctcctttttaggaaggaggaaacagagagacctcgtaacttggcrtggccacacagtgagtcacacagttagtaaagatggaattcatacccaggtctgcctgactctgggattacgaagaattacatggttccacctcagtccc

SEQ ID NO: 464887 - DNA, 201 bp, Homo sapiens
atacgcctgtagtcccagctactcaggaggctgaggcaggagaatcacttgaacccgggaggtggaggttgcagtgagccaaaactgcaccactgcactcyagcctgggcgacagagcgagactctatctcgaaaaaaaaaaaaaatcctgacaccaaaccaatgaggtaagtactatcattattcccatttttcagatgg

SEQ ID NO: 464888 - DNA, 201 bp, Homo sapiens
acccctttagacgggcatgcgacctccacacacgcctcactttatgtgatagtcagactagtcgcatctctctgtcctccctcagttgccttttcagaggmtacctcccctgtagagcctttgttgggggatgaggagtgtcttgggtcgagaacaggcccctgtaacccactgagcgccccttcattccgtctctctccg

SEQ ID NO: 464889 - DNA, 201 bp, Homo sapiens
tcctcattcttcgggtcctaccttaaatgtccgttcctcagagaagccttcccagatcctttaaccaatattatagcctagcattctttattttttcttcrtagcagtaagcacaatttgaaatcattttatttttaactgaggcataatttacacacagtaaaatgcacaggtcagttttggcaaatgtaaaaccaaata

SEQ ID NO: 464890 - DNA, 201 bp, Homo sapiens
accctaattatgattagaccattaaaaagaccatttttaatcatcccagtaagttcctatgtgacttattccagttagtggtcatgtatttgtctatgtastcattaactgcttactggccatcaggctaagctccatgaaaccagagagttcatcttgtttgttgtctgacctcagtgcagagcctgacacttagagagg

SEQ ID NO: 464891 - DNA, 201 bp, Homo sapiens
cctcacctctccagtctagtcgaccagccgacttagtcttatcctgtctcctgtcttcctcttcactatgtccagaggttgtccacttctctttttaaaawttttttaaattaattttttattttattttattttgagacaggatctcactctgtcacccaggctggagtacagtggtgcaaaaacaggttgctgcagact

SEQ ID NO: 464892 - DNA, 201 bp, Homo sapiens
cagaagtacaatgtccgctccatgcccatccgcaaggacgacgaggtccaggtacgtctccctccggcgctagtggcgctcggacaccgttgcctaagaaygtcatgcgtggagcagtcacagactcacatgcctcaggactctggaaagtagtgtgacccttcagatgtgttaggccagagatagggttcagagccacca

SEQ ID NO: 464893 - DNA, 201 bp, Homo sapiens
cttccagagtttcagttccttaaaagctgaatggctgaggtcttacttaacttatgatgtctatattgctcaatagctggtggggatgcagaaataaagayctgttttctcactcccaacaggtggttatcaccaggctaaaactggacaaggatcggaaaaaaattcttgaacgcaaagccaagtctcgacaagttggaa

SEQ ID NO: 464894 - DNA, 201 bp, Homo sapiens
tctttggagcttttgggatttcagattttcagatttggggtgcttagctagtaatgcagatattccaaaatcccaaaaaccctaaatccaaaacacttctrgtctcaagcatttcgaataagggatacttgacatatatatgtatatatatatagttcagagtatattctatatgtagttttgtattctcctttttcctct

SEQ ID NO: 464895 - DNA, 201 bp, Homo sapiens
gtggacttgattgattcagtagctttgtgatatcatcaaggatccagatttttcttctcttctcttttctgttttgcctttcttggtgatggctgtgtctttttttttttttttttttttttttgagacggatgctcgctctgtcaccaggctggagtgctgtggtgcgatctcggctcactgcaacctccacctcctggg

SEQ ID NO: 464896 - DNA, 201 bp, Homo sapiens
tggacttgattgattcagtagctttgtgatatcatcaaggatccagatttttcttctcttctcttttctgttttgcctttcttggtgatggctgtgtctttttttttttttttttttttttttgagacggatgctcgctctgtcaccaggctggagtgctgtggtgcgatctcggctcactgcaacctccacctcctgggt

SEQ ID NO: 464897 - DNA, 201 bp, Homo sapiens
tggctgctgtaacaccacacttgcatgatttcccattcgctctggccacattaatctctcacaagctcttccaaaatgctggcttttctcacatgtgtacmttctgcccttttctcataccatcactccttgagcaacatgaagctcctaattgcctctctgtggatgactcccacgtctctattgctggcccagttggca

SEQ ID NO: 464898 - DNA, 201 bp, Homo sapiens
atgatgaaaccccgtctctatagaaaaaatacaaaaattagtgggcgtggtggcctgtagtcccagccacctgggaggctgcggtgggggcaggggcggcrggggggaagtggggggagtggtggaggctgcagtgaaccaagatctagccgctgcactccagcctgggtgacagagtgaaactctgtctcaaaaaagaga

SEQ ID NO: 464899 - DNA, 201 bp, Homo sapiens
ggaaggaggaaacagagagacctcgtaacttggcatggccacacagtgagtcacacagttagtaaagatggaattcatacccaggtctgcctgactctggrattacgaagaattacatggttccacctcagtcccaaggtcatctttgctgtgccaaaagggaaaactggaaataggggtggtcagagcaggaggtgcttt

SEQ ID NO: 464900 - DNA, 201 bp, Homo sapiens
ctccagaatccaactctactcccatcttccacatctccagtaagtgccatttatatctccccagctgcatatgcccctaaacctttgttatctttaacaaygctccttaaccccctcttgtaatctaccatcaaggcttgttgattctacctccaaagtaagtcttgaacctatttcctgtccagttcaaggcagcattgc

SEQ ID NO: 464901 - DNA, 201 bp, Homo sapiens
ccatttatatctccccagctgcatatgcccctaaacctttgttatctttaacaacgctccttaaccccctcttgtaatctaccatcaaggcttgttgattmtacctccaaagtaagtcttgaacctatttcctgtccagttcaaggcagcattgcagttccctcttttacctttgtccattttccacagagtggtattatt

SEQ ID NO: 464902 - DNA, 201 bp, Homo sapiens
gttgtgcaaccacggtttaaccggagattttgaggctagggtgtgtttctttcgaacttttcggaatgtctggaacatttcatttcctgttttgttacctrtgcctctgtaaatctacttttgcaattttaagtaataattttatgaataaaaatgggaaatgcttcctaattccacatagtatttgcattgttttataaa

SEQ ID NO: 464903 - DNA, 201 bp, Homo sapiens; identical to SEQ ID NO: 192155

SEQ ID NO: 464904 - DNA, 201 bp, Homo sapiens; identical to SEQ ID NO: 192274
  misc_feature (1)...(201): n = A,T,C or G

SEQ ID NO: 464905 - DNA, 201 bp, Homo sapiens; identical to SEQ ID NO: 192322

SEQ ID NO: 464906 - DNA, 201 bp, Homo sapiens; identical to SEQ ID NO: 192323

SEQ ID NO: 464907 - DNA, 201 bp, Homo sapiens; identical to SEQ ID NO: 192156

SEQ ID NO: 464908 - DNA, 201 bp, Homo sapiens
aggggctggggctggaggggacacgaaggcccagggaggggcggtctgaggaggtcgcgttctccgaagcttgctgtcatccaccctccctgcccccggtgtcaccgagggggctgggcagacctggcggggtggagacctgggcagatccggggtttgtgccctgggagctctggggggcacagggcaggtgtcgggtgg

SEQ ID NO: 464909 - DNA, 201 bp, Homo sapiens
gaggggctggggctggaggggacacgaaggcccagggaggggcggtctgaggaggtcgcgttctccgaagcttgctgtcatccaccctccctgcccccggtgtcaccgagggggctgggcagacctggcggggtggagacctgggcagatccggggtttgtgccctgggagctctggggggcacagggcaggtgtcgggtg

SEQ ID NO: 464910 - DNA, 201 bp, Homo sapiens
agaggggctggggctggaggggacacgaaggcccagggaggggcggtctgaggaggtcgcgttctccgaagcttgctgtcatccaccctccctgcccccggtgtcaccgagggggctgggcagacctggcggggtggagacctgggcagatccggggtttgtgccctgggagctctggggggcacagggcaggtgtcgggt

SEQ ID NO: 464911 - DNA, 201 bp, Homo sapiens
cacgggaggactcaggcctctttacagagggggacccaggactgcagccccggcactggccccttaatgtccctgggggtctgaaacagccacttggaacytttcaggcctgggatcgtccgtggagagaagctgagtgtggttatgatgagtcctgtcacccagacatctgcttagcgcgttttccaatggatttccctt

SEQ ID NO: 464912 - DNA, 201 bp, Homo sapiens
gagaggggctggggctggaggggacacgaaggcccagggaggggcggtctgaggaggtcgcgttctccgaagcttgctgtcatccaccctccctgcccccggtgtcaccgagggggctgggcagacctggcggggtggagacctgggcagatccggggtttgtgccctgggagctctggggggcacagggcaggtgtcggg

SEQ ID NO: 464913 - DNA, 201 bp, Homo sapiens
cccagggttcaagggattctcttgcctcagcctcccgagtagctgggactacaggcgcccgccaccacacctggataattttcgtacttttagtagagacrgggtctcgccatgttggtcaggctggtctcgaactcctgacctcaggtgatccgcctgcctcggcctcccaaagtgttgggattacaggcgtgagccacc

SEQ ID NO: 464914 - DNA, 201 bp, Homo sapiens
tatttaggtgtttaggagttgcaaagtcaaatctttaaacccacatatggccaggcgtggtggctcacgcctgtaatcccagcactttcagaggccgaggygggcagatcacctgaggtcaggagttcgagaccagcctggccaacatggtgaagccccgtctccactaaaaatacaaaattagccgggcgtggtggtggg

SEQ ID NO: 464915 - DNA, 201 bp, Homo sapiens
ttatttaggtgtttaggagttgcaaagtcaaatctttaaacccacatatggccaggcgtggtggctcacgcctgtaatcccagcactttcagaggccgagrcgggcagatcacctgaggtcaggagttcgagaccagcctggccaacatggtgaagccccgtctccactaaaaatacaaaattagccgggcgtggtggtgg

SEQ ID NO: 464916 - DNA, 201 bp, Homo sapiens
acggcaagcactgtgtgcgcacccgcggtgcagagtaggtgctcggtgcccgctgtacgcagcaggcgctccctgtgcacacgctaacgccccctctccckcaggcaagaagaattccatcctcctgcacaaggtgcagcatgacctcaactcgggcgtattcaacaaccaggagaacgccatcatccaggagatcgtcaa

SEQ ID NO: 464917 - DNA, 201 bp, Homo sapiens
ggaggaatgcccggggctggtcccataggtgcctgggggaaggcaccagcctgaagtgtgggtacccctcgcccccagggaggagtgcccagggctggtcstgcaggcgcctggggggaaggcaccagcctgaggtgtgggcaccctcgccccccagggaggaatgcccggggctggtcccataggtgcctgggggaaggc

SEQ ID NO: 464918 - DNA, 201 bp, Homo sapiens
cgccgtgtttgtccctccgtttggtgatgggcacctgggctgcctctgcctttttgctactgtggatcgagctggtgtgaacacagcggagtggtcgtcgbccgcagtcgagctggtgtgaacacggtggggtggttgtcgtccgcaatcaagctggtgtgaacacggcggggtgctcgtccgtccttgttttcatttctt

SEQ ID NO: 464919 - DNA, 201 bp, Homo sapiens
ggccagagatgctacatatgtgcttattgtatacagtaggtggtaaatgcatgcttgctctacacggcaagcactgtgtgcgcacccgcggtgcagagtargtgctcggtgcccgctgtacgcagcaggcgctccctgtgcacacgctaacgccccctctcccgcaggcaagaagaattccatcctcctgcacaaggtgca

SEQ ID NO: 464920 - DNA, 201 bp, Homo sapiens
gcacgtggttcgtggtggacttcgtgtcctccatccccgtggactacatcttccttatcgtggagaagggcattgactccgaggtctacaagacggcacgygccctgcgcatcgtgcgcttcaccaagatcctcagcctcctgcggctgctgcgcctctcacgcctgatccgctacatccatcagtgggaggaggtgaggt

SEQ ID NO: 464921 - DNA, 201 bp, Homo sapiens
tgctgctctgccactgggacggctgcctgcagttcctggtgcccatgctgcaggacttcccgcgcaactgctgggtgtccatcaatggcatggtggtgagygccgcgggccctgacggagggggagacgcaggctcccatacagaggggggacccaggcccccttatcccgcttacagagggttgaacccaagcctttcag

SEQ ID NO: 464922 - DNA, 201 bp, Homo sapiens
tgaaatgggaaagtggtatcaccatgccaaagaaataataaatgggccaggcatggctgctcatgcctgtaatcccagcactttgggaggctgaggcaggyggatcacctgaggtcaggagtttgagaccagcctgaccaacatgctgaaaccctgtctctactaaaaataaaaaattagccaggcgtggtggcgcgcacc

SEQ ID NO: 464923 - DNA, 201 bp, Homo sapiens
cctagctgagatgtgctgactgttaagaagggttagttatgggagccctcggccgctacagtcaggttagtggccagtgagcctttgtccctgcctggggrgtgctgtgccccagcgtccagccacatatgggacttgggatgtgtttggtttggacacagagcaggtgggcattgatggggtcaggagctacagagggaa

SEQ ID NO: 464924 - DNA, 201 bp, Homo sapiens
ccctggaacttttgccccctcttgacctcacagatgctctgatctcagaggctgcaaaaggcgggacccagactctcgcccttggggtctcagtttccccrggagtgaagcgggcaggtagaatcagccctggccctcctgccaactcactgtgacaagtgtgcaaaccatgtcatctacctgggtctccatttctcttgg

SEQ ID NO: 464925 - DNA, 201 bp, Homo sapiens
cagtttccccaggagtgaagcgggcaggtagaatcagccctggccctcctgccaactcactgtgacaagtgtgcaaaccatgtcatctacctgggtctccrtttctcttggttacctctgaacatggggagctcaccacctccagtgcttggcagagggtgggcgctgggcccttgaggaccgagggctcctggggcgtga

SEQ ID NO: 464926 - DNA, 201 bp, Homo sapiens
tcttggttacctctgaacatggggagctcaccacctccagtgcttggcagagggtgggcgctgggcccttgaggaccgagggctcctggggcgtgagcacmtgcccaccaccgcccctcctgctggccttgcagaaccactcgtggagtgaactgtactccttcgcactcttcaaggccatgagccacatgctgtgcatcg

SEQ ID NO: 464927 - DNA, 201 bp, Homo sapiens
ccttcttcctcatggacctggtgttgaacttccgcaccggcattgtgatcgaggacaacacggagatcatcctggaccccgagaagatcaagaagaagtayctgcgcacgtggttcgtggtggacttcgtgtcctccatccccgtggactacatcttccttatcgtggagaagggcattgactccgaggtctacaagacgg

SEQ ID NO: 464928 - DNA, 201 bp, Homo sapiens
tgggcgctgggcccttgaggaccgagggctcctggggcgtgagcacctgcccaccaccgcccctcctgctggccttgcagaaccactcgtggagtgaactstactccttcgcactcttcaaggccatgagccacatgctgtgcatcgggtacggccggcaggcgcccgagagcatgacggacatctggctgaccatgctca

SEQ ID NO: 464929 - DNA, 201 bp, Homo sapiens
gcagtctcagcccttcactcagcttcaagtggcgcgctcagggcagagaccgcgtgatggggagcaggggaccctgggggtctgtggctgtgattaggagragaaacggccggtggtgagaggttctctgaccctgtgacagggagggaggtccagagcctggagatggacgtggggcgggggctggggaggggatgcagg

SEQ ID NO: 464930 - DNA, 201 bp, Homo sapiens
aagcccaacatcaaggcgtgggccgggccgtgctacccccccggagcccctggggaggatccttcctgcctcttccggcgtctggggctccaggcgccctyggcttgcagattgatctccctgatctctgcctccatctgctcacagccttctcccctgtgtgtctctgtctcttcttgtaaattcatccgtcgttggatc

SEQ ID NO: 464931 - DNA, 201 bp, Homo sapiens
gcctggagatggacgtggggcgggggctggggaggggatgcaggctgggcaggaaggggtgagttgggatcagggcaggacagggtcagtctttggacatygggaagcccccgggctgaaggggcattgccaggaggctgggcccacctgggggtctctaggccggctcaggatggggctgggttagggaagggcctggcg

SEQ ID NO: 464932 - DNA, 201 bp, Homo sapiens
gttatgtcccctggggtccccgagaggactggtcggggaggagctgctccaagaccccaccaggacaggcggcccctgggccccgcctcagatggctgagygggtcagcgggagatcagcctgggggtgcagctctgcaaatccgcagtgatgaatcccagcattagggcgtgggaataaaccccccattatcctgggggg

SEQ ID NO: 464933 - DNA, 201 bp, Homo sapiens
tcagtctttggacatcgggaagcccccgggctgaaggggcattgccaggaggctgggcccacctgggggtctctaggccggctcaggatggggctgggttrgggaagggcctggcggggtctgagaggcctggggttgcttcaggacacgccggtggccggcagtcagggccaggcttcagggagagcaaggctgccccac

SEQ ID NO: 464934 - DNA, 201 bp, Homo sapiens
tctgaacatggggagctcaccacctccagtgcttggcagagggtgggcgctgggcccttgaggaccgagggctcctggggcgtgagcacctgcccaccacygcccctcctgctggccttgcagaaccactcgtggagtgaactgtactccttcgcactcttcaaggccatgagccacatgctgtgcatcgggtacggccgg

SEQ ID NO: 464935 - DNA, 201 bp, Homo sapiens
gtcgcgccgtgtttgtccctccgtttggtgatgggcacctgggctgcctctgcctttttgctactgtggatcgagctggtgtgaacacagcggagtggtcrtcgtccgcagtcgagctggtgtgaacacggtggggtggttgtcgtccgcaatcaagctggtgtgaacacggcggggtgctcgtccgtccttgttttcatt

SEQ ID NO: 464936 - DNA, 201 bp, Homo sapiens
ttcaactttgatttaaatagaagcatgtttatttgctcttgttgaatctggccgcccctgtgtgtggcggaggcctgtctccccgctgtgggcgggggctktgtctgacccagccctgaccccccacagtacaagcaggtgtgaaggcctatctccccgccacaggccggggggctgtctgacccacaagcaggtgcccgt

SEQ ID NO: 464937 - DNA, 201 bp, Homo sapiens
accccaggtcccctctctggggtcctgtcttctggagctgcctccccctccccagggcgagaggcaggagagggtctcccaaggtcactcagtctagtgttgggcaaggagagggttggggtggagagggttggggtgcaccggcagagacagtgacgccctgcagggctctggggtcccctctgccccaggcctcggttt

SEQ ID NO: 464938 - DNA, 201 bp, Homo sapiens
gccgcccctgtgtgtggcggaggcctgtctccccgctgtgggcgggggctttgtctgacccagccctgaccccccacagtacaagcaggtgtgaaggcctmtctccccgccacaggccggggggctgtctgacccacaagcaggtgcccgtgtgcccgctgcaggctgggggcggtgtctgacccagcctcgcctccccac

SEQ ID NO: 464939 - DNA, 201 bp, Homo sapiens
tcgcctccccacagtacaagcaggtgcccctgtgcccgctgcaggccgggggcggtgtctgacccagcctcgcctcctccccacagtacaagcaggtggarcagtacatgtccttccacaagctgccagctgacttccgccagaagatccacgactactatgagcaccgttaccagggcaagatgtttgacgaggacagca

SEQ ID NO: 464940 - DNA, 201 bp, Homo sapiens
caccctcccctccccgccccgtgagcctctgcacccccaggacccccgccacccccgccttgcttcccgctgcccccttagcagaactgcctgggtctgtrcctgacagggcggggcagaagcagggcagggggtggggagggaggagccgcagaggccccgctgagcaccaggtcctgggggcgctgaggctgattggag

SEQ ID NO: 464941 - DNA, 201 bp, Homo sapiens
aggtcccaccctcaggaagcggggcctagggatggcggccgtgatcacgcaggcagcagagagcagctctgggaagcggggagggacgaggacggggaggygacatcagcaaggccgtgtgtgagccaggcagggtgtccccggtgtagcacctggctcgggcagaggccccgaggaggggctggaggagctgggcgagga

SEQ ID NO: 464942 - DNA, 201 bp, Homo sapiens
ggacccaggcccccttatcccgcttacagagggttgaacccaagcctttcagaggtggggacccaggcgcccccttatggaggggaggactcgggcccttwcagaggtggggacccaggcgcccccttatggaggggaggactcgggccctttcagaggtggggacccaggcgcccccttatggaggggaggactcgggcc

SEQ ID NO: 464943 - DNA, 201 bp, Homo sapiens
agcggggcctagggatggcggccgtgatcacgcaggcagcagagagcagctctgggaagcggggagggacgaggacggggaggcgacatcagcaaggccgygtgtgagccaggcagggtgtccccggtgtagcacctggctcgggcagaggccccgaggaggggctggaggagctgggcgaggaggcgggcaggacgggcc

SEQ ID NO: 464944 - DNA, 201 bp, Homo sapiens
ctcggggctgggtggccttcctggggtgggagcctggtcccgagggaggagtgcccagggcttgtcctgcaggcgcctggggggaaggcaccggcctgagstgtgggcaccctcgccccccagggaggaatgcccggggctggtcccataggtgcctgggggaaggcaccagcctgaagtgtgggtacccctcgcccccag

SEQ ID NO: 464945 - DNA, 201 bp, Homo sapiens
acacggagatcatcctggaccccgagaagatcaagaagaagtatctgcgcacgtggttcgtggtggacttcgtgtcctccatccccgtggactacatcttycttatcgtggagaagggcattgactccgaggtctacaagacggcacgcgccctgcgcatcgtgcgcttcaccaagatcctcagcctcctgcggctgctgc

SEQ ID NO: 464946 - DNA, 201 bp, Homo sapiens
ggccttcctggggtgggagcctggtcccgagggaggagtgcccagggcttgtcctgcaggcgcctggggggaaggcaccggcctgaggtgtgggcaccctygccccccagggaggaatgcccggggctggtcccataggtgcctgggggaaggcaccagcctgaagtgtgggtacccctcgcccccagggaggagtgccca

SEQ ID NO: 464947 - DNA, 201 bp, Homo sapiens
gggctggggctctgaaggtgggggccgggggtcagcgggtagggtgggctcacggcgccttcctgcagatcttccacatgacctatgacctggccagcgcrgtgatgaggatctgcaatctcatcagcatgatgctgctgctctgccactgggacggctgcctgcagttcctggtgcccatgctgcaggacttcccgcgca

SEQ ID NO: 464948 - DNA, 201 bp, Homo sapiens
cccggtgacctcggggagcagcaccccgcctccctccagcactggcaccgagaggcaggcctggctgcgcagggcgcgggggggaggctggggtcccgccsccgtgatgaatgtactgacgagccgaggcagcagtgcccccaccgtggccccccacgccccattaacccccacacccccattccgcgcaataaacgacag

SEQ ID NO: 464949 - DNA, 201 bp, Homo sapiens
gaggtcgcgttctccgaagcttgctgtcatccaccctccctgcccccggtgtcaccgagggggctgggcagacctggcggggtggagacctgggcagatcyggggtttgtgccctgggagctctggggggcacagggcaggtgtcgggtggagagaggctggcggcttcctgactgccctcggtccagttccagggctaag

SEQ ID NO: 464950 - DNA, 201 bp, Homo sapiens
cccccctcatcgccccgcgcccacccccatcgcccctgcccccggcggcggcctcgcgtgcgagggggctcccttcacctcggtgcctcagttcccccagstgtaagacagggacggggcggcccagtggctgagaggagccggctgtggagccccgcccgccccccaccctctaggtggcccccgtccgaggaggatcgt

SEQ ID NO: 464951 - DNA, 201 bp, Homo sapiens
gggttccagaggctcaagttcccttccttgtaggtgatcacggttggtgcctgaattggaacaggcgtgaaaaccaagaaggaaggggtttggccttatgsaacccccagggcttcggcagggtcttctgtgcctcccagagcaaaattaggtcaaaaataagtatagttcattcctactcccttcaccccagccgccgct

SEQ ID NO: 464952 - DNA, 201 bp, Homo sapiens
tcgcccccaggttctactgggacttcaccatgctgctgttcatggtgggaaacctcatcatcatcccagtgggcatcaccttcttcaaggatgagaccacygccccgtggatcgtgttcaacgtggtctcggacaccttcttcctcatggacctggtgttgaacttccgcaccggcattgtgatcgaggacaacacggaga

SEQ ID NO: 464953 - DNA, 201 bp, Homo sapiens
gagggaggccttgccctggggtctgagggcggaggtagtccttgtcccggggtctgaggggaggggcgggcccggccccggggtctgaggggagaggcagwctcagcccttcactcagcttcaagtggcgcgctcagggcagagaccgcgtgatggggagcaggggaccctgggggtctgtggctgtgattaggaggagaa

SEQ ID NO: 464954 - DNA, 201 bp, Homo sapiens
ttacaggcgtgagccaccgcgcccggcctggttggatcccttgagcccagaagttgaggctgcagtgagccatgattgcaccactgcactccagcctgggycacagagcaagacctgatctctaacaactaaagaaaaatttacaacatggccctgaaatgggaaagtggtatcaccatgccaaagaaataataaatgggc

SEQ ID NO: 464955 - DNA, 201 bp, Homo sapiens
ggcacgatctcggcttaccacaaaccccacctcccagggttcaagggattctcttgcctcagcctcccgagtagctgggactacaggcgcccgccaccacrcctggataattttcgtacttttagtagagacggggtctcgccatgttggtcaggctggtctcgaactcctgacctcaggtgatccgcctgcctcggcctc

SEQ ID NO: 464956 - DNA, 201 bp, Homo sapiens
ggcaccggcctgaggtgtgggcaccctcgccccccagggaggaatgcccggggctggtcccataggtgcctgggggaaggcaccagcctgaagtgtgggtrcccctcgcccccagggaggagtgcccagggctggtcctgcaggcgcctggggggaaggcaccagcctgaggtgtgggcaccctcgccccccagggaggaa

SEQ ID NO: 464957 - DNA, 201 bp, Homo sapiens
aactgcctgggtctgtacctgacagggcggggcagaagcagggcagggggtggggagggaggagccgcagaggccccgctgagcaccaggtcctgggggcrctgaggctgattggagcgggtttaactcccagctctgttccggtagcctgagtgaccctgggcaagtttcccagggttgcgggaacaaatacccacaggc

SEQ ID NO: 464958 - DNA, 201 bp, Homo sapiens
agatcatcctggaccccgagaagatcaagaagaagtatctgcgcacgtggttcgtggtggacttcgtgtcctccatccccgtggactacatcttccttatygtggagaagggcattgactccgaggtctacaagacggcacgcgccctgcgcatcgtgcgcttcaccaagatcctcagcctcctgcggctgctgcgcctct

SEQ ID NO: 464959 - DNA, 201 bp, Homo sapiens
cgcgcgcgtcccccggtgacctcggggagcagcaccccgcctccctccagcactggcaccgagaggcaggcctggctgcgcagggcgcgggggggaggctrgggtcccgccgccgtgatgaatgtactgacgagccgaggcagcagtgcccccaccgtggccccccacgccccattaacccccacacccccattccgcgca

SEQ ID NO: 464960 - DNA, 201 bp, Homo sapiens
agtccgcccagaagccatagacgagacgtaggtagccgtagttggacggacgggcagggccggcggggcagccccctccgcgcccccggccgtcccccctyatcgccccgcgcccacccccatcgcccctgcccccggcggcggcctcgcgtgcgagggggctcccttcacctcggtgcctcagttcccccagctgtaaga

SEQ ID NO: 464961 - DNA, 201 bp, Homo sapiens
ctcgccgaccgccccgcgggcccaggcgggccgggggcggggccgtcatccagaccaaagccatgccattgcgctgccccggccgccagtccgcccagaarccatagacgagacgtaggtagccgtagttggacggacgggcagggccggcggggcagccccctccgcgcccccggccgtcccccctcatcgccccgcgcc

SEQ ID NO: 464962 - DNA, 201 bp, Homo sapiens
gtggggtccgcagcggacccagccctgcctcccccctgcaggagatcgtcaacttcaactgccggaagctggtggcctccatgccgctgttcgccaacgcygaccccaacttcgtcacggccatgctgaccaagctcaagttcgaggtcttccagccgggtgactacatcatccgcgaaggcaccatcgggaagaagatgt

SEQ ID NO: 464963 - DNA, 201 bp, Homo sapiens
gaactcctgacatcaggcgatccacccaccttggcctcccagagtgctgggattacaggtgtgagccaccacgcccggccttatttttcccccattttctttttttttttttttgagtcagggtcttgttctgcgctcaggctggagggcagtggtgtggggatcacggctcactgcagcctcgacttcctgcaccaccac

SEQ ID NO: 464964 - DNA, 201 bp, Homo sapiens
cgaactcctgacatcaggcgatccacccaccttggcctcccagagtgctgggattacaggtgtgagccaccacgcccggccttatttttcccccattttctttttttttttttttgagtcagggtcttgttctgcgctcaggctggagggcagtggtgtggggatcacggctcactgcagcctcgacttcctgcaccacca

SEQ ID NO: 464965 - DNA, 201 bp, Homo sapiens
cacccgccaccacacccagctaattttttgtatttttagtagagatggggtttcaccatgttggccaggctggtctcgaactcctgacatcaggcgatccrcccaccttggcctcccagagtgctgggattacaggtgtgagccaccacgcccggccttatttttcccccattttctttttttttttttttgagtcagggt

SEQ ID NO: 464966 - DNA, 201 bp, Homo sapiens
ggattgcttgagcccataggcggaggctgcagtgagctgtgattgcaccactgcactccagcgtgggccacagagcgagacagtgtctcagaaaaaaaaaatggaatttatcattgaaacgaattcaactttgatttaaatagaagcatgtttatttgctcttgttgaatctggccgcccctgtgtgtggcggaggcctgt

SEQ ID NO: 464967 - DNA, 201 bp, Homo sapiens
tcccctggtcccgaggccgcccaccggccttgaagggaacccggagcatcaacctccgcacctgctgcccctcttcagccactgccctcccctcaccatcycatccacccacacgccacctcctccaaggagccctcccacctgcctggggctgacaggcccatcccatgtgtctgtcttggggctgggcctgtgtggtca

SEQ ID NO: 464968 - DNA, 201 bp, Homo sapiens
caggaggggctgacccgatggtttctggaaagatcatcagggaagggccagagcccccgggaagggggtcctgtgtgtcagggtacctggggcctctcctygtagagtcaggtgcccacccattcctcagggatagggttgctagataaagttcagggcacccggcctggtgcagtggctcctgcctgtaatcccggcact

SEQ ID NO: 464969 - DNA, 201 bp, Homo sapiens
ggccccagagcccagaggtttttgttttgttgtgttttgttctttgagacagagtctcgctctgttgccccggctggaatgcagtggcacgatctcggctyactgcaacctccacctcccgggttcaaacaattcacctgcttcagcgtcccgagtagctggtactacaggcgcccgccaccacgcccggctaatttttgt

SEQ ID NO: 464970 - DNA, 201 bp, Homo sapiens
cttagcgcgttttccaatggatttcccttttaattaacccacattaattattattattttatttacttatttttttttgagactgagtttcactctgtcgyccaggctggagtgcagtggcacgatctcggcttaccacaaaccccacctcccagggttcaagggattctcttgcctcagcctcccgagtagctgggacta

SEQ ID NO: 464971 - DNA, 201 bp, Homo sapiens
actgcactccagcctgggcgacagggtgagactccgtctcggaaaaaaaaagaaatggcttctctcactgaacgtgacgtcctcaaggggcatctgcgccrtggcctgggtcagagcctcactccttttcgtggctgagtcgtgttccatggtggacgggtcgcgccgtgtttgtccctccgtttggtgatgggcacctgg

SEQ ID NO: 464972 - DNA, 201 bp, Homo sapiens
tgggcaccctcgcccccaggttctactgggacttcaccatgctgctgttcatggtgggaaacctcatcatcatcccagtgggcatcaccttcttcaaggaygagaccactgccccgtggatcgtgttcaacgtggtctcggacaccttcttcctcatggacctggtgttgaacttccgcaccggcattgtgatcgaggaca

SEQ ID NO: 464973 - DNA, 201 bp, Homo sapiens
ggagggcgggggtcccggggcagggctgcagggtggggcgggggtcctgtgcggggccttggatttgggggagggggccaggagctcccgcagtgggggcrcacggggctggggctctgaaggtgggggccgggggtcagcgggtagggtgggctcacggcgccttcctgcagatcttccacatgacctatgacctggcca

SEQ ID NO: 464974 - DNA, 201 bp, Homo sapiens
aacctcaagaactaagaaggctgagttggtacagggatgggaaggggtcccgtgtgtgtgtgtgtgtgtgtgtgtgtgtgtgtgtgtgtgtgtgtgtgtgkcagagggtctcatgttacccaggctggtcttgaactcctgggctcaagcgatcctcctacctcagcctcccaaaatgttggaattataggcatgagccag

SEQ ID NO: 464975 - DNA, 201 bp, Homo sapiens
ttaattaacccacattaattattattattttatttacttatttttttttgagactgagtttcactctgtcgcccaggctggagtgcagtggcacgatctcrgcttaccacaaaccccacctcccagggttcaagggattctcttgcctcagcctcccgagtagctgggactacaggcgcccgccaccacacctggataatt

SEQ ID NO: 464976 - DNA, 201 bp, Homo sapiens
agcgcgttttccaatggatttcccttttaattaacccacattaattattattattttatttacttatttttttttgagactgagtttcactctgtcgcccrggctggagtgcagtggcacgatctcggcttaccacaaaccccacctcccagggttcaagggattctcttgcctcagcctcccgagtagctgggactacag

SEQ ID NO: 464977 - DNA, 201 bp, Homo sapiens
aagcggggcctagggatggcggccgtgatcacgcaggcagcagagagcagctctgggaagcggggagggacgaggacggggaggcgacatcagcaaggccrtgtgtgagccaggcagggtgtccccggtgtagcacctggctcgggcagaggccccgaggaggggctggaggagctgggcgaggaggcgggcaggacgggc

SEQ ID NO: 464978 - DNA, 201 bp, Homo sapiens
gcaggctcctcggaggaggcactggctcgaggtgtgggcgcccctcgtcccccaaggaagagtgcccggggctggtcccgcaggtgccccggggaggcacyggcctgaggtgtgggcaccctcgcccccaggttctactgggacttcaccatgctgctgttcatggtgggaaacctcatcatcatcccagtgggcatcacc

SEQ ID NO: 464979 - DNA, 201 bp, Homo sapiens
gggcccttacagaggcggggacccaggccgccttacagagggagagacacaggcccttcaggggtggggacaagacccccttacacgggaggactcaggcytctttacagagggggacccaggactgcagccccggcactggccccttaatgtccctgggggtctgaaacagccacttggaacctttcaggcctgggatcg

SEQ ID NO: 464980 - DNA, 201 bp, Homo sapiens
aggtggggacccaggcgcccccttatggaggggaggactcgggccctttcagaggtggggacccaggcgcccccttatggaggggaggactcgggcccttwcagaggtggggacccaggcgcccccttatggaggggaggactcgggcccttacagaggtggggacccaggcgcccccttatggaggggaggactcgggcc

SEQ ID NO: 464981 - DNA, 201 bp, Homo sapiens; identical to SEQ ID NO: 464980

SEQ ID NO: 464982 - DNA, 201 bp, Homo sapiens
tgcagttcctggtgcccatgctgcaggacttcccgcgcaactgctgggtgtccatcaatggcatggtggtgagcgccgcgggccctgacggagggggagaygcaggctcccatacagaggggggacccaggcccccttatcccgcttacagagggttgaacccaagcctttcagaggtggggacccaggcgcccccttatg

SEQ ID NO: 464983 - DNA, 201 bp, Homo sapiens
gggtttaactcccagctctgttccggtagcctgagtgaccctgggcaagtttcccagggttgcgggaacaaatacccacaggctgagtggcttgaacagcrgagattcggcctcccaccgtcctggaggccggaagcccaacatcaaggcgtgggccgggccgtgctacccccccggagcccctggggaggatccttcctg

SEQ ID NO: 464984 - DNA, 201 bp, Homo sapiens
ccagagagatggcggctcatgctgctgttcgtgggaatgggaatgaagaccatggctgaaacgcaggacaggtgcgacggagtggtgtcagggagctcccyggtgtacagtaggaagctctccacaacttgctctatacagtgagtatgcaacccgttcctgagtatcaggtgcttaggttataacttctgtatacagcag

SEQ ID NO: 464985 - DNA, 201 bp, Homo sapiens
gagggccgcggcgcccgcctcgtccagcaacccccccctgcgcgccacgtgcagagatctgcctgctcacccggggccgccgcacggcgagcgtgcgggcygacacctactgccgcctctattcgctgagcgtggacaacttcaacgaggtgctggaggagtaccccatgatgcggcgcgccttcgagacggtggccatcg

SEQ ID NO: 464986 - DNA, 201 bp, Homo sapiens
ggcccccttatcccgcttacagagggttgaacccaagcctttcagaggtggggacccaggcgcccccttatggaggggaggactcgggccctttcagaggyggggacccaggcgcccccttatggaggggaggactcgggccctttcagaggtggggacccaggcgcccccttatggaggggaggactcgggcccttacag

SEQ ID NO: 464987 - DNA, 201 bp, Homo sapiens
tgacctatgacctggccagcgcggtgatgaggatctgcaatctcatcagcatgatgctgctgctctgccactgggacggctgcctgcagttcctggtgccyatgctgcaggacttcccgcgcaactgctgggtgtccatcaatggcatggtggtgagcgccgcgggccctgacggagggggagacgcaggctcccatacag

SEQ ID NO: 464988 - DNA, 201 bp, Homo sapiens
ggtgtgggcaccctcgccccccagggaggaatgcccggggctggtcccataggtgcctgggggaaggcaccagcttgaggtgtgggtgcccctcgtcccayagggaagagggcccggggctggtcccataggtgcctgggggaatgcaccagcctgagctgtgggcaccctcgccccccagggaggaatgcccggggctgg

SEQ ID NO: 464989 - DNA, 201 bp, Homo sapiens
cttcctcccctctcctcctgcgtggacgccccactccctcctctctcctcctgcgtggacgccccacttcctcctctcctgcgtggacgccccactccctyctctctcctcctgcgtggacgccccactccctcctctctcctcctgcgtggacgccccactccctcctctctcctcctgcgtggacgccccactccctcc

SEQ ID NO: 464990 - DNA, 201 bp, Homo sapiens
tgtggccaataaaacctttaaatgttaagtgtcaaaaaaccgcactctcccttcttaagaactgcctaaagtgtaaaatacatttgaatgcaatttttggaaaaaaaaaaaaaaaaaactaaaatgaattttaatacacctactttttaacatttcaatattttttcaaatacattaatattcttgaaaataaccattaaa

SEQ ID NO: 464991 - DNA, 201 bp, Homo sapiens
cgcgaagttggctgcggaattattgccaagttgctgcttcttccaccgccccttaaagttagtcagtttttcttctcttctttgacattctaagaacttayagataacctaaaacttttgtgagaaagattaatgtggccaataaaacctttaaatgttaagtgtcaaaaaaccgcactctcccttcttaagaactgccta

SEQ ID NO: 464992 - DNA, 201 bp, Homo sapiens
tgccgaacaccaagtcctctgagttccgcagcgcagcaccggaagcggccgagcgcgctcagcccggcgacccctgcgggctccagacccctgcgccgctkcgccctgggtttcgccgcacccaagacccagcgagtgcagcggcggccgccgaggaggttcgaaaacacggccaaaagaaatgccgagaaggaactgaca

SEQ ID NO: 464993 - DNA, 201 bp, Homo sapiens
aaggcagcggcagagcccaaggtagcctttggttctcttgctgcaaatggccctaccgccttggttgataaagtttcaaatcccaaaactaatggggacastcagcagccctcctcctctggccttgcttccagtaaagcttgtgtcggaaatgcctatcacaagcagttggccgccttgaactgctccgtgcgggattgg

SEQ ID NO: 464994 - DNA, 201 bp, Homo sapiens
ctccagtttatttggcaaagatactacccagagtaaaccagtctcttcaccatttcccactaaaccattggagggccaagcggaaggtgacagtggtgaaygcaaaggtggagatgaagaagagaatgatgagccgcccaaagtagtagttaccgaagtaaaagaagatgctttttactccaaaaagtgtaaactgtttta

SEQ ID NO: 464995 - DNA, 201 bp, Homo sapiens
gcttaagaggtgggaacattctccatggccagtgaggaagtcttgaagaatagagccataaagaaagcaaagcgcagaaatgttggattcgaatctgacastggaggagcctttaaaggttttaaaggtttggtggtaccttctggaggaggacgctttcctggatttggtagtggcgctggagggaagcctttggaagga

SEQ ID NO: 464996 - DNA, 201 bp, Homo sapiens
gaggaggttcgaaaacacggccaaaagaaatgccgagaaggaactgacagataggaattgggatcaagaagatgaagcttaagaggtgggaacattctccrtggccagtgaggaagtcttgaagaatagagccataaagaaagcaaagcgcagaaatgttggattcgaatctgacactggaggagcctttaaaggttttaa

SEQ ID NO: 464997 - DNA, 201 bp, Homo sapiens
tgggatcaagaagatgaagcttaagaggtgggaacattctccatggccagtgaggaagtcttgaagaatagagccataaagaaagcaaagcgcagaaatgktggattcgaatctgacactggaggagcctttaaaggttttaaaggtttggtggtaccttctggaggaggacgctttcctggatttggtagtggcgctgga

SEQ ID NO: 464998 - DNA, 201 bp, Homo sapiens
gtgaatgcaaaggtggagatgaagaagagaatgatgagccgcccaaagtagtagttaccgaagtaaaagaagatgctttttactccaaaaagtgtaaactrttttacaagaaagacaatgagtttaaagagaaaggcataggtactctgcatttaaaacctacagcaaatcagaagacacagcttttggtgcgggcagaca

SEQ ID NO: 464999 - DNA, 201 bp, Homo sapiens
acgttcttatcgtctgtgttccaaatccaccaattgacgagaagaatgccaccatgccagtcaccatgttgattcgggtaaaaaccagcgaggatgcagaygagttgcacaaaattttactggagaaaaaggatgcctgaacacgcgaagttggctgcggaattattgccaagttgctgcttcttccaccgccccttaaag

SEQ ID NO: 465000 - DNA, 201 bp, Homo sapiens
ttactccaaaaagtgtaaactgttttacaagaaagacaatgagtttaaagagaaaggcataggtactctgcatttaaaacctacagcaaatcagaagacayagcttttggtgcgggcagacaccaatttaggcaacatattgctgaatgttctgattccacccaatatgccatgtacgcgaacagggaagaataacgttct

SEQ ID NO: 465001 - DNA, 201 bp, Homo sapiens
gatgcagacgagttgcacaaaattttactggagaaaaaggatgcctgaacacgcgaagttggctgcggaattattgccaagttgctgcttcttccaccgcyccttaaagttagtcagtttttcttctcttctttgacattctaagaacttatagataacctaaaacttttgtgagaaagattaatgtggccaataaaacct

SEQ ID NO: 465002 - DNA, 201 bp, Homo sapiens
gaatacaaaccccctctgtgatctgacacctatctttaaggactatgagaaatatttagcaaacattgaacagcaacacgggaacagtggcaggaattctraaagtgaatctaacaaagtggcggctgaaacacagtctccttccctttttggctcaacaaaattacagcaagagtcaacgtttttgtttcatggcaacaa

SEQ ID NO: 465003 - DNA, 201 bp, Homo sapiens
ccctgctgaacacagcgtgaggaccccccctccatggacatggtgtttgagtctctgggcttgccgaacaccaagtcctctgagttccgcagcgcagcacyggaagcggccgagcgcgctcagcccggcgacccctgcgggctccagacccctgcgccgctgcgccctgggtttcgccgcacccaagacccagcgagtgca

SEQ ID NO: 465004 - DNA, 201 bp, Homo sapiens
gcgagtgcagcggcggccgccgaggaggttcgaaaacacggccaaaagaaatgccgagaaggaactgacagataggaattgggatcaagaagatgaagctkaagaggtgggaacattctccatggccagtgaggaagtcttgaagaatagagccataaagaaagcaaagcgcagaaatgttggattcgaatctgacactgg

SEQ ID NO: 465005 - DNA, 201 bp, Homo sapiens
tctcgcctccctgctgaacacagcgtgaggaccccccctccatggacatggtgtttgagtctctgggcttgccgaacaccaagtcctctgagttccgcagsgcagcaccggaagcggccgagcgcgctcagcccggcgacccctgcgggctccagacccctgcgccgctgcgccctgggtttcgccgcacccaagacccag

SEQ ID NO: 465006 - DNA, 201 bp, Homo sapiens
aatgaacaaatgataagttacttaaaatctgctttttcttaggaggagaaagaactaacagagatgcagaagtcctcttctactcgggctggggatatgcrtgagaaagacacgcgtggatgccgtatgagctctcgttctgaatgcggaaatctgacctcccaccggatactcagttcagggggctcctggaccctccag

SEQ ID NO: 465007 - DNA, 201 bp, Homo sapiens; identical to SEQ ID NO: 117320

SEQ ID NO: 465008 - DNA, 201 bp, Homo sapiens; identical to SEQ ID NO: 117322

SEQ ID NO: 465009 - DNA, 201 bp, Homo sapiens; identical to SEQ ID NO: 117324

SEQ ID NO: 465010 - DNA, 201 bp, Homo sapiens; identical to SEQ ID NO: 117507

SEQ ID NO: 465011 - DNA, 201 bp, Homo sapiens
attcttttgaacctgcctggataacccaggacaatttcctgatctcagggttctagatcctaatcacatctgcacagttcctttgtccgtgtaaggtaacrtattcatattctgacattaaggtgtgaacacctttgactaatatttttatttttattttttagagacagggccttgctatgttggccaagctggtctcga

SEQ ID NO: 465012 - DNA, 201 bp, Homo sapiens
aaaaaagaagctaagagggactcggaaatccgaaaacaagacaccaagtccccaagacccctgatccaggagctcagcgacgaggacccctctggccagcyactgatgccccccacctgccaaagagatgctgcaccactcacttccactggagacagggacagcgacttccttgcagcctcttctccgggtaagagcgtg

SEQ ID NO: 465013 - DNA, 201 bp, Homo sapiens
ctgggctcaagtgctccacccaccttggcttcccaaagtgctgggattataggcatgagctgctgcacctggccagggatttttttaaaaccatttcctcwcaacctgcagatccatctgcagttggcctcacctacctgccagcaccagtgagaacctcaaacagtgatgagctgtttcaaaccacttttactgattgga

SEQ ID NO: 465014 - DNA, 201 bp, Homo sapiens
ccaggctgatctcgaactcctgggctcaagtggtcctcccactttggcctccaaagtgctaggattacaggcatgagccactgtgccctgctggttttttwaaataatactttatttatggtatactttgcatgacaaaaatttttaattttgatggagtccgatttctctattttttctcttgtcacttgtgcttttggt

SEQ ID NO: 465015 - DNA, 201 bp, Homo sapiens
ttttccaggtacaagacccttatcaaatatatgatttgcaagtatcttctcacattctttgagttgtctttttactttttttcagtagagacagggttttkctatgttgcccaggctgatctcgaactcctgggctcaagtggtcctcccactttggcctccaaagtgctaggattacaggcatgagccactgtgccctgc

SEQ ID NO: 465016 - DNA, 201 bp, Homo sapiens
taaaaaagaagctaagagggactcggaaatccgaaaacaagacaccaagtccccaagacccctgatccaggagctcagcgacgaggacccctctggccagscactgatgccccccacctgccaaagagatgctgcaccactcacttccactggagacagggacagcgacttccttgcagcctcttctccgggtaagagcgt

SEQ ID NO: 465017 - DNA, 201 bp, Homo sapiens
gcctgccttttcatttttttaaaactttgctcattttgaaattgtgtcatctttttattaatgagttgtgaggcttatttatattttccaggtacaagacycttatcaaatatatgatttgcaagtatcttctcacattctttgagttgtctttttactttttttcagtagagacagggttttgctatgttgcccaggctg

SEQ ID NO: 465018 - DNA, 201 bp, Homo sapiens
acagacactctgtcaaatatatttgcagtctctaaagacacctcaaaggcggctcgggtgcccttcacagacatctttaaaaaagaagctaagagggactyggaaatccgaaaacaagacaccaagtccccaagacccctgatccaggagctcagcgacgaggacccctctggccagccactgatgccccccacctgccaa

SEQ ID NO: 465019 - DNA, 201 bp, Homo sapiens
cttatttgccatctctatatcttttttggtgaggtaccctgatcatttgcccagttttttattgggttgtttccttatctttgaatttcaaaagttctttrtatgttttggatccaagccctttcccagttatctttttttgcaaatattttctcccagtctgtagcctgccttttcatttttttaaaactttgctcattt

SEQ ID NO: 465020 - DNA, 201 bp, Homo sapiens
aatagaatatgtgctttccgaagattgaggtcatctcgagcttgagtgatgacagtgaccctgaactggactacacgtcactccctgtgctggaaaacctscccacagacactctgtcaaatatatttgcagtctctaaagacacctcaaaggcggctcgggtgcccttcacagacatctttaaaaaagaagctaagaggg

SEQ ID NO: 465021 - DNA, 201 bp, Homo sapiens
cctgaggacacgtgatgtggagcatcttttcacaggcttatttgccatctctatatcttttttggtgaggtaccctgatcatttgcccagttttttattgsgttgtttccttatctttgaatttcaaaagttctttgtatgttttggatccaagccctttcccagttatctttttttgcaaatattttctcccagtctgta

SEQ ID NO: 465022 - DNA, 201 bp, Homo sapiens
tccatgtgcaggtttgcgtgtggacataagtcttcaactcatttgagtaaatactcaggagcacaattgctggatcatatggtgagagtatttttagtccygtaagaatccgccacaccattttccaaagtggctgtaccatttcgcattcccacctagaacaagtgagcgttgccgggactccacatcctcattagcgca

SEQ ID NO: 465023 - DNA, 201 bp, Homo sapiens
tttagtccctgaacctggatccaaggcatctccctgtaggaaacatcagaccggggcagagattgacaaagcaacccacaacagcagctgccaacggccgytgtgcccacctcatcagcagctctgcaggggcctcactccaccctcaccaaacacgaggagccagcactcctggcccccattccactggacaggaaggcg

SEQ ID NO: 465024 - DNA, 201 bp, Homo sapiens
ccagacccatgtcccaagggagaaggaacatcagccatcatctctctgcatgagctcagtgtcaggtagtagctgtggcgggacgctgtccagcctaaaamacgtgaccattccaattcatcttcagctgccaagtgtatttagtccctgaacctggatccaaggcatctccctgtaggaaacatcagaccggggcagaga

SEQ ID NO: 465025 - DNA, 201 bp, Homo sapiens
cccagcccagccaagctctgcccacgtgggacctcactgcattcccagcaccgaaagcatcatagttttccccagttatatgtagcataaatggtttaatyataaatgtctcccttaggcatgataaacattttaacacccacgcgagtcagtgtatgattgggctagctcctgtttgtgtgagtcacatgcaattccttt

SEQ ID NO: 465026 - DNA, 201 bp, Homo sapiens
acctagaagtgaaatttacatagtctttgccaatgctttaaaaattgttacacatttaaagattactgttctctctctctctctttttttttttttttttyttttttttttttttttttggtgagacggggtctcactttgttgccaggctggagtacagtggtgtgaacacagctcactgcagccttgacttcccaagct

SEQ ID NO: 465027 - DNA, 201 bp, Homo sapiens
ccgtgcagcctcgggcgggggcaggcctggaggacgttgaataatttgtttttgtttgttttgtttgagacagtctcgcactgtggcctaggctggaatgyagtcatgtgatcttggctcactgcaacctctgcctcctaggttcaagcaattctcctgcctccgcctctgaagtagctgggattacaggcacccgtcaag

SEQ ID NO: 465028 - DNA, 201 bp, Homo sapiens
ccagaccgtgctactctcatccagcacgcatcggtggccaggctttttcctgaagacagctgcctggctgactccagacttgcaggcaggaagcagggagyggcctgagtgcatttcccgggaacactgagtggccttctcttccactctaggaaccagcacagaaaagtgcagtctgagctggagcccgtgcagcctcgg

SEQ ID NO: 465029 - DNA, 201 bp, Homo sapiens
ggtctgaagctgccacttgctggtagccagcctgggccaggaagccaccgagccagcctcctcttgggcagccgagtctgactgtgtgtgggggtcacaakccccctgtggtcatgcagatctcctggggcgggggcctaatgaccgtgcatttccaccccctcctcaccatccctggcctcagcctttctagaccagggc

SEQ ID NO: 465030 - DNA, 201 bp, Homo sapiens
cttttatattatgggcaagaagtggtgtttttttttgtcttttttttgtttttttttgagacagagtcttgctctgtcgcccaggctggagtgcagtggcrcgatctcagctcactgcaagctctgcctcccgggttcatgccattctcctgccttagcctccaaaatagctgggactacaggcacccaccaccacacctg

SEQ ID NO: 465031 - DNA, 201 bp, Homo sapiens
caaagcagctgcaccattttacatccccatcagcagtgtaggaaggttccaattttcccgtatcctcaccaacacttcgggttgcctgtcttttttttccyctctctctctctttttctttttttttttttttaagatggagtcttgccctgtcgcccaggcaggagtgcagtggtgagatctgagctcactgcaacctct

SEQ ID NO: 465032 - DNA, 201 bp, Homo sapiens
cagttcctaatagtaggcaaaaacaagggtgaccgtgacccctctgccctgggagtaggagcttaattcccacgtgcttcctttttgttaggttttgatckcattgagaacctggaagagtacacagggctgcgctgtctctggctgcagagcaatggaatacagaaaatcgaaaacctggaggcccaaactgagttgcgt

SEQ ID NO: 465033 - DNA, 201 bp, Homo sapiens
atgtgcccgccagtgcggaaggcaaggaggagcctcccggggacagagaaacaaggcagaagatggagctatttgttaaggaaagctttgaggccaaggasgagctctgcccggaaaagccaagtggagaggagccgcctgtggaggctaaaagagaggatggaggtccagagccagaggggaccctcccagctgagaccc

SEQ ID NO: 465034 - DNA, 201 bp, Homo sapiens
ctgaggcgcagcggagccctgcctcccagcacagactaaaatcccagcaacacaggcccaccggcacctccagcctgccttgcgggatgatcttcaggcgmatatacaaaatacaaaagaaactactactgtattttgttgccctgtcccttcaacttggctccaaattgcttggctcatcatcacagtggcctccagaag

SEQ ID NO: 465035 - DNA, 201 bp, Homo sapiens
cacgtgccagacccgtaccctgagggagaaggaggcatcagccatcatctctgagcacgagctcagcagcaaagaaaacagacacagttactgtggggggsctgctgtccaaggagctaagtcccagagagtctgtgaaggaaacggggttcaggggcatgccaagcagagcccagggctcaggggtgcgccctctcaggt

SEQ ID NO: 465036 - DNA, 201 bp, Homo sapiens
ttcatgtacttattggcagtttttatatcttctttggataaatgcctgttcagtttctttgctgatttttaaaaaattaatagacttttttttttttttgkgggggacagcgttttgctctgtcaccaagcaaccctcccacctctcagcctcctgagtagctgggactgcaggtgtgcaccaccatgcctggctagtttt

SEQ ID NO: 465037 - DNA, 201 bp, Homo sapiens
acccttgtcctcccaggacactcccacattcacctttgcattttctgccattaggggagatgacatcttcagatgatggtgagaatgtgcccgccagtgcrgaaggcaaggaggagcctcccggggacagagaaacaaggcagaagatggagctatttgttaaggaaagctttgaggccaaggacgagctctgcccggaaa

SEQ ID NO: 465038 - DNA, 201 bp, Homo sapiens
aaaactctgcaagcagcacaagctttatattaccccagcattgaatgatacgctgtatttacactttaaaggtaaggacctaagagaggaagtgcttcacrtcaggtggaaagattctgtctagcggtataaaaaattacttgcagggatcacctttagttctcagaatgtatctaagcaggaaatttcaaagtttagtgg

SEQ ID NO: 465039 - DNA, 201 bp, Homo sapiens
aaatacaaaaattagctgggtgtggtggcgggcgcctgtagtcccagctacttgggaggctgaggcaagagaatcgcttgaacccgggaggcggaggttgyagtgagccaagatcacgccactgcactccagcctgggtgacagtgggagactgtctcaaaaaaacaaaaaaaaaagaaataccatccccattagcagcca

SEQ ID NO: 465040 - DNA, 201 bp, Homo sapiens
actgtggaaggcacatctggtcccagaggaaggatgaggggctctctggggcttgagggcagcccaccttgtgtcctcagaagcccattcgaggcttcttmcggaggggctgagagctagagaggacgggtgtgtgctgctgggagcgagtggcccggacgctggaggcctgggagtggggaggtgtggtggcacagcctg

SEQ ID NO: 465041 - DNA, 201 bp, Homo sapiens
cagaatcttccactgcagctagagaaactccgaggaagagggacttgatgctttagacatcaaaatgagaaggggagggaggaaagaaaggggggagtctstgaggcacaacagagaattcccccaaactgacatgaccgtgaccctctgctcagagggcactatcgacagcccacaggtgccagacccatgtcccaaggg

SEQ ID NO: 465042 - DNA, 201 bp, Homo sapiens
tgtgttcccttgggcctttcttggatgtggcaacagaatactttgtgacattgggtgaaaaagcagaactggcatggtgcattgtagagcgattctgttgygaaaacagaaactttcagacaccttttcttctgtaaatagaatatgtgctttccgaagattgaggtcatctcgagcttgagtgatgacagtgaccctgaa

SEQ ID NO: 465043 - DNA, 201 bp, Homo sapiens
ttacatccccatcagcagtgtaggaaggttccaattttcccgtatcctcaccaacacttcgggttgcctgtcttttttttcctctctctctctctttttctttttttttttttttaagatggagtcttgccctgtcgcccaggcaggagtgcagtggtgagatctgagctcactgcaacctctgtctcccaggttcaagca

SEQ ID NO: 465044 - DNA, 201 bp, Homo sapiens
agcccagggctcaggggtgcgccctctcaggtaccaggagggtgaggaatagccagtggctgggggagcagagggcagagagaagggcatagacatgagcwgtgcccagggagtggccacccccaggcctaactttcagagtcctgtgttcccttgggcctttcttggatgtggcaacagaatactttgtgacattgggtg

SEQ ID NO: 465045 - DNA, 201 bp, Homo sapiens
ttcccgtatcctcaccaacacttcgggttgcctgtcttttttttcctctctctctctctttttctttttttttttttttaagatggagtcttgccctgtcrcccaggcaggagtgcagtggtgagatctgagctcactgcaacctctgtctcccaggttcaagcaattctcctgcctcagcctccctagtagctgggatta

SEQ ID NO: 465046 - DNA, 201 bp, Homo sapiens
tgaccctactccacccagaggccattactggcattaccaggagcccacacgtgccagacccgtaccctgagggagaaggaggcatcagccatcatctctgwgcacgagctcagcagcaaagaaaacagacacagttactgtggggggcctgctgtccaaggagctaagtcccagagagtctgtgaaggaaacggggttcag

SEQ ID NO: 465047 - DNA, 201 bp, Homo sapiens
ctagtagctgggattacaggcatctgccaccacacccagctaatttttctatttttagtagagacagggtttcaccatgttggccaggatggtctcaatcycttgacctcatgatccacccacctcggcctcccaaagtgctaggattacaggtgtgagccaccgcacccagccctgtctttttatttctagtcctctgga

SEQ ID NO: 465048 - DNA, 201 bp, Homo sapiens
actttcagacaccttttcttctgtaaatagaatatgtgctttccgaagattgaggtcatctcgagcttgagtgatgacagtgaccctgaactggactacaygtcactccctgtgctggaaaacctccccacagacactctgtcaaatatatttgcagtctctaaagacacctcaaaggcggctcgggtgcccttcacagac

SEQ ID NO: 465049 - DNA, 201 bp, Homo sapiens
ggaaatgccatttgttcttgttcaatttctttaagattttatgatgaaccacttgaaaatctattgctggtttgtaacagctgagtacagtgcatagttasctgaaagtactttctgtcattaagatgtatttctatgtccatcctatgaatgtctgtctgaatataggggaaggaaatgaaaacaggagaggggaaagaa

SEQ ID NO: 465050 - DNA, 201 bp, Homo sapiens
gtttcatgtacttattggcagtttttatatcttctttggataaatgcctgttcagtttctttgctgatttttaaaaaattaatagactttttttttttttkgtgggggacagcgttttgctctgtcaccaagcaaccctcccacctctcagcctcctgagtagctgggactgcaggtgtgcaccaccatgcctggctagtt

SEQ ID NO: 465051 - DNA, 201 bp, Homo sapiens
caccttgcaagttccctttcatttattagatccagacacctgaggtggcaacgcttgctttgtgtgtatctagagttccttttggtggggaacaggcaggsgagtcacctgagtgatttgagtaactgtaactaaggctgggttgactgcgtgtttgcctttatcgtgcctatcagaacgttgacagtgcgtgtacctccc

SEQ ID NO: 465052 - DNA, 201 bp, Homo sapiens
ccagctgagaccctgctactgtcaccgcctgtgaaggttaaaggagaggatggagatcgagagccagaggggaccctcccagctgaggccccaccaccacygcccctgggagctgccagggaaggtaatgtgagcggagaaacacacacagacacacacacctctcagggagccccagccttcgactcacgtctctgtggg

SEQ ID NO: 465053 - DNA, 201 bp, Homo sapiens
tatgtcatcagaaaccagacagacccgggtccctgcaaaatctcaagtgagcattttccccacaggaaaacagaatcttccactgcagctagagaaactcygaggaagagggacttgatgctttagacatcaaaatgagaaggggagggaggaaagaaaggggggagtctgtgaggcacaacagagaattcccccaaactg

SEQ ID NO: 465054 - DNA, 201 bp, Homo sapiens
tgggttgtttccttatctttgaatttcaaaagttctttgtatgttttggatccaagccctttcccagttatctttttttgcaaatattttctcccagtctrtagcctgccttttcatttttttaaaactttgctcattttgaaattgtgtcatctttttattaatgagttgtgaggcttatttatattttccaggtacaag

SEQ ID NO: 465055 - DNA, 201 bp, Homo sapiens
gtttgtacagaggtgcatttggtttgggtcccattatttcccccaagatgaactggctgtgtctcttaataaaaaagcagaaaaaagatgtggaaattctktaaacacgtcacaccttgcaagttccctttcatttattagatccagacacctgaggtggcaacgcttgctttgtgtgtatctagagttccttttggtggg

SEQ ID NO: 465056 - DNA, 201 bp, Homo sapiens
tgcttgaacctgggaggcagaggttgcagcgagccgagatcgcaccatcgcactccagcctgggcgacaagagcgaaactccatctcaaaaaaaaaaaaamcccacaaatctgttttaccctattgcagttctgtgggtcagaagcccaaaatgggtttcactgagctaaaatcgaggtgtctcagggttgtgtaccttct

SEQ ID NO: 465057 - DNA, 201 bp, Homo sapiens
gaggtggagcttgcagtgagccgagatcacgccactgcactccaacctgggcgacagagcgagactccatctcaaaaaagaaaaaaagagttaaagtgatsacggtcagaattcacagtgggtttctagttttctggagctatgtaaaaaaaagaaacaaaggccaggtgtggaggcttacacctgtaatcccagcacttt

SEQ ID NO: 465058 - DNA, 201 bp, Homo sapiens
gataatggacactagttatcttgttttctagaacagggctgcccaacagaaatggaacaggagccactactagattctctaatagctctatttaaaaaagyaaaaggaactttcggaggccaaggcagaaggactgattgaggccaggagtttcagaccagcctcagaaatatagagagacctcatccctaccaaaactac

SEQ ID NO: 465059 - DNA, 201 bp, Homo sapiens
attctctaatagctctatttaaaaaagtaaaaggaactttcggaggccaaggcagaaggactgattgaggccaggagtttcagaccagcctcagaaatatagagagacctcatccctaccaaaactacaaaaattagctgggaattgtggtgtgcccctgtagtcccagctactcaggaggctgaggcaagaggattgctt

SEQ ID NO: 465060 - DNA, 201 bp, Homo sapiens
ttctctaatagctctatttaaaaaagtaaaaggaactttcggaggccaaggcagaaggactgattgaggccaggagtttcagaccagcctcagaaatatasagagacctcatccctaccaaaactacaaaaattagctgggaattgtggtgtgcccctgtagtcccagctactcaggaggctgaggcaagaggattgcttg

SEQ ID NO: 465061 - DNA, 201 bp, Homo sapiens
attgcttgagccccagaggttgaggctgcagtgagccaagattgtgccactgcactccagcctgggtgacagagtgagaccctccctcaaaaaataaattrattaataaattaattaaaaagtaaaaagtaaaaaaacagtaaaactattaatgacatgtttaatttaacgcaatatataaaaaatataatcatgttaaca

SEQ ID NO: 465062 - DNA, 201 bp, Homo sapiens
cgcctgtggaggctaaaagagaggatggaggtccagagccagaggggaccctcccagctgagaccctgctactgtcgtcacctgtggaggttaaaggagasgacggagatggagagccagaggggaccctcccagctgaggccccaccacccccgccacctgtggaggttaaaggagaggatggagatcaagagccagagg

SEQ ID NO: 465063 - DNA, 201 bp, Homo sapiens
tccccaagacccctgatccaggagctcagcgacgaggacccctctggccagccactgatgccccccacctgccaaagagatgctgcaccactcacttccastggagacagggacagcgacttccttgcagcctcttctccgggtaagagcgtggggccgagagcacagtggagacaatgttggctccccggcctgggatgg

SEQ ID NO: 465064 - DNA, 201 bp, Homo sapiens
tgtacctccctggtgatgtgcggctcacttgctctttcaggacctacctgacttggaagatgatgatgaaacaggcaaatctctggaagaccaggttaagktcattagaaaccattttcccacaggcagcttaattccaccttcgttcttgtcgtttaccgtttctctcctaaacttgaaagtaaaatgttccctgtgcat

SEQ ID NO: 465065 - DNA, 201 bp, Homo sapiens
aatcaattttagaacattctcatcaccctaaaaaggaaatactggatgggcatggtggctcacacctataatcccagcactttgggaggcgggggcgggcrgatcaccaggtcaagagattgagaccatcctggccaacacggtgaaacctcatctctactaaaaatacaaaaattagctgggtgtggtggcgggcgcctg

SEQ ID NO: 465066 - DNA, 201 bp, Homo sapiens
ttctcctgtctcagcctcccaagtagctgggattacaggcatgagccaccacgcccagctaatttttgtatttttagtagagatggggtttctccatgttsgccaggctggtctcgaactcctgacctcaagtgatccacccgcctcagcctcccaaagtgctgggattacaggcgtgagccaccgcacccagcccacatc

SEQ ID NO: 465067 - DNA, 201 bp, Homo sapiens
atgaagttgggcattttcttcattgttattggacacttatagttcctcctttatgaatattctgtcagtgactttttccaagtttctttttgaagtgcttytcttaccgatttgtaagggcttctttaatatcaggaacatcgtaccctggactgccatgtttatcatcactgcttttatctgtgtttttaacttactttt

SEQ ID NO: 465068 - DNA, 201 bp, Homo sapiens
tctagttgttttctagagagtttgtaccaatttacaacctcacataacataaccatgaaaggaaatctttgccaagtttgttgatgggtgaagatcgtacsccattgttttaaattgccatttttggataattgatgaagttgggcattttcttcattgttattggacacttatagttcctcctttatgaatattctgtca

SEQ ID NO: 465069 - DNA, 201 bp, Homo sapiens
aggagaaagagaaaaagacgaacttaaaataggtatcagggatataggatgttatagaattttgggcaggaatggatgtggtaaagaactgtgagaatatrttttacagctgacaatttgcaataagcttattcatatttttccattttaacagaatgactaaaagttccctgcaaaaactctgcaagcagcacaagcttt

SEQ ID NO: 465070 - DNA, 201 bp, Homo sapiens
tgtatcagtcgtttacctctttgctgatgagttccttggaatggaatttttggagtagtatcactgcattgaagaaagtggtttcagactttgtaaaaacycttacaaatattttctagttgttttctagagagtttgtaccaatttacaacctcacataacataaccatgaaaggaaatctttgccaagtttgttgatgg

SEQ ID NO: 465071 - DNA, 201 bp, Homo sapiens
taattgactataatgggaatttgagcacttattcatagatttttttatattcctttgataaatatctttgtatcagtcgtttacctctttgctgatgagtwccttggaatggaatttttggagtagtatcactgcattgaagaaagtggtttcagactttgtaaaaacccttacaaatattttctagttgttttctagaga

SEQ ID NO: 465072 - DNA, 201 bp, Homo sapiens
aaaatggatcctggctgggaagaaaagaaaacaatcaattaggcagagattcatttcagtaaaagaggttgggtagcaaaactaatataatcaactgcackcagaaaaagcctcaggaaatgttttccagtattgttctggagggacgatgagatctaagatctgaagttcatgtggaagaaagggctgctgaatgatcta

SEQ ID NO: 465073 - DNA, 201 bp, Homo sapiens
tgggaggccaaggtgggcagatcacgaggtcgggagatcgagaccttcctggctaacatggtgaaaccgtctctactaaaaatacaaaaaattagccgggygtggtggcatgcacctgtagtcccagctactctggtggctgaggcaggagaatggcgcgaacctgggaggcagagcttgcagcgacccgagatcgcgcca

SEQ ID NO: 465074 - DNA, 201 bp, Homo sapiens
cctagattaattatttaatgatgagtcacacaatgacaactttccagttttctcactctctcagcatctgttagctagaatgcttctacacttctacaaasagctttcattcgccaactagtggttcatgcagttcatgcagaaaaggccaggatcaatgtttgacccttttatttatcatttttcttttcttttcttttc

SEQ ID NO: 465075 - DNA, 201 bp, Homo sapiens
ttccccgtcagtccttctcccagttattttagcagtcactgatgaacattgcctagattaattatttaatgatgagtcacacaatgacaactttccagttytctcactctctcagcatctgttagctagaatgcttctacacttctacaaagagctttcattcgccaactagtggttcatgcagttcatgcagaaaaggcc

SEQ ID NO: 465076 - DNA, 201 bp, Homo sapiens
cctgtccttgcagtcacagtgacagggagaaagcacaggtcacccttccttccacagtgccgactgagagcgccgccacacccccagagacgtgtgtcggrgttgcccagcccagccaagctctgcccacgtgggacctcactgcattcccagcaccgaaagcatcatagttttccccagttatatgtagcataaatggtt

SEQ ID NO: 465077 - DNA, 201 bp, Homo sapiens
agtcctgaacacattgcagatggcccacaatcacctggagaccgtggaggacattcagcatctacaagagtgtttgaggctttgtgtccttgacctttcgyacaacaagctgagtgacccggagatcctgagcattctggaaagcatgcccgatttggtaaaaaacaaaaacaaaaacaacgaaaaagcaccacaggaaac

SEQ ID NO: 465078 - DNA, 201 bp, Homo sapiens
aggaaggatgaggggctctctggggcttgagggcagcccaccttgtgtcctcagaagcccattcgaggcttcttacggaggggctgagagctagagaggaygggtgtgtgctgctgggagcgagtggcccggacgctggaggcctgggagtggggaggtgtggtggcacagcctggggtgtccctctggggtggtagcttg

SEQ ID NO: 465079 - DNA, 201 bp, Homo sapiens
tattaaactttttaaatttctgattcttgagaaatttcacatatcaaaaatgttctttggaaataggcttgatggctacataattgactataatgggaatytgagcacttattcatagatttttttatattcctttgataaatatctttgtatcagtcgtttacctctttgctgatgagttccttggaatggaatttttgg

SEQ ID NO: 465080 - DNA, 201 bp, Homo sapiens
ttaatgatcctaaggaaatatgtgtgggttcttctgacacatcctaccacagccagcagaaacagagtggtgataatgggtcaggtggtcacttcgcacayccaagagaagacagggaagatcggggccccaggtatgtgggcatactcctaattagtgcacatttatggagtaaggtagatggcgtaatcacccccttgt

SEQ ID NO: 465081 - DNA, 201 bp, Homo sapiens
gattcctaattacagaaggacagtcactgtacgactaaagcacttaacatacctggatgatagaccagtgtttccaaaggacaggtaagaagagaaaagcsttctgatcacattttaatatttagtagttgaccatgcttaatattaaactttttaaatttctgattcttgagaaatttcacatatcaaaaatgttctttg

SEQ ID NO: 465082 - DNA, 201 bp, Homo sapiens
tcaaacttcagaatttcacatggcccagtaggagttaaagtgatcggccaggcatggtggcttacgcctgtaatcccagcactttgggaggccgaggtggstggatcacgaggtcaggagatcgagaccatcctggctaacatggtgaaaacccatctctactaaaaatagaaaaaaattagccaggtgtggtgatgggca

SEQ ID NO: 465083 - DNA, 201 bp, Homo sapiens
caaagaagctatcttgctaagtggttctgactagttgccttatccaaattcgtggtgagagttacattgtatcatcagttacattgtatctttatacattrtatcttttcccccctccgtggacaccgcccagcaggtagcttaggctctcactggccttctggctcatggaggtgtgacggttcagtgtcccatcccctt

SEQ ID NO: 465084 - DNA, 201 bp, Homo sapiens
cactttgggaggccgaggtggctggatcacgaggtcaggagatcgagaccatcctggctaacatggtgaaaacccatctctactaaaaatagaaaaaaatyagccaggtgtggtgatgggcacctgtagtcccagctacttgggaggctgaggcaggagaatggcaggaacctgggaggtggagcttgcagtgagccgaga

SEQ ID NO: 465085 - DNA, 201 bp, Homo sapiens
gattctctaatagctctatttaaaaaagtaaaaggaactttcggaggccaaggcagaaggactgattgaggccaggagtttcagaccagcctcagaaatatagagagacctcatccctaccaaaactacaaaaattagctgggaattgtggtgtgcccctgtagtcccagctactcaggaggctgaggcaagaggattgct

SEQ ID NO: 465086 - DNA, 201 bp, Homo sapiens
tagaaaaaaattagccaggtgtggtgatgggcacctgtagtcccagctacttgggaggctgaggcaggagaatggcaggaacctgggaggtggagcttgcrgtgagccgagatcacgccactgcactccaacctgggcgacagagcgagactccatctcaaaaaagaaaaaaagagttaaagtgatcacggtcagaattca

SEQ ID NO: 465087 - DNA, 201 bp, Homo sapiens
agttatcttgttttctagaacagggctgcccaacagaaatggaacaggagccactactagattctctaatagctctatttaaaaaagtaaaaggaactttsggaggccaaggcagaaggactgattgaggccaggagtttcagaccagcctcagaaatatagagagacctcatccctaccaaaactacaaaaattagctgg

SEQ ID NO: 465088 - DNA, 201 bp, Homo sapiens
ttgggaggctgaggcaggagaatggcaggaacctgggaggtggagcttgcagtgagccgagatcacgccactgcactccaacctgggcgacagagcgagaytccatctcaaaaaagaaaaaaagagttaaagtgatcacggtcagaattcacagtgggtttctagttttctggagctatgtaaaaaaaagaaacaaaggcc

SEQ ID NO: 465089 - DNA, 201 bp, Homo sapiens
gtggtgataatgggtcaggtggtcacttcgcacacccaagagaagacagggaagatcggggccccaggtatgtgggcatactcctaattagtgcacatttrtggagtaaggtagatggcgtaatcacccccttgtacggataatgaaatagaggctggtagagattgaattgcctgcccaatgtctgagaatggagtgagg

SEQ ID NO: 465090 - DNA, 201 bp, Homo sapiens
tgaacctgggaggcggaggttgcagtgagccaagatctcaccactgcactccagcctgggcaacacagcgagactctgtctcaaaaaaaagaaaaagaaakggacataattgggcaatttatctctcacatttgagaactgaccatatagataactacaacactaatagctaatgttaattggtttcttattatatgggtg

SEQ ID NO: 465091 - DNA, 201 bp, Homo sapiens
cctgggagctgccagggaaggtaatgtgagcggagaaacacacacagacacacacacctctcagggagccccagccttcgactcacgtctctgtgggaccwggggcctgagtttcacttcttctgtattgctgtttctagaagataatggacactagttatcttgttttctagaacagggctgcccaacagaaatggaaca

SEQ ID NO: 465092 - DNA, 201 bp, Homo sapiens
caggtagtagctgtggcgggacgctgtccagcctaaaaaacgtgaccattccaattcatcttcagctgccaagtgtatttagtccctgaacctggatccamggcatctccctgtaggaaacatcagaccggggcagagattgacaaagcaacccacaacagcagctgccaacggccgctgtgcccacctcatcagcagctc

SEQ ID NO: 465093 - DNA, 201 bp, Homo sapiens
gaaggcaaggaggagcctcccggggacagagaaacaaggcagaagatggagctatttgttaaggaaagctttgaggccaaggacgagctctgcccggaaargccaagtggagaggagccgcctgtggaggctaaaagagaggatggaggtccagagccagaggggaccctcccagctgagaccctgctactgtcgtcacct

SEQ ID NO: 465094 - DNA, 201 bp, Homo sapiens
gcctcaagtgatccaccctcctcggcctcccaaagtgctgggattacaggcacgagccaccgcgcccagccccttgaggacacttttttaactgtgttcckgaccttttccctggtctcagaagtttgctgtgagcccttgatgtacccacaaacacccttgtcctcccaggacactcccacattcacctttgcattttct

SEQ ID NO: 465095 - DNA, 201 bp, Homo sapiens
ctgacaatttgcaataagcttattcatatttttccattttaacagaatgactaaaagttccctgcaaaaactctgcaagcagcacaagctttatattaccmcagcattgaatgatacgctgtatttacactttaaaggtaaggacctaagagaggaagtgcttcacgtcaggtggaaagattctgtctagcggtataaaaa

SEQ ID NO: 465096 - DNA, 201 bp, Homo sapiens
ttaaaacaaatacccgtgttttgccagcaagaattgaaaatgagtaacattttatcatatttatttgaagtcttttttaattaaagaaataagcccccccmaaaaaaaaaataaaaataaataagggtgggcacggtggctcacgcctgtaatcccagcactttggaaggccaaggcgggtgggtcacctgaggtcaggag

SEQ ID NO: 465097 - DNA, 201 bp, Homo sapiens
gacagacccgggtccctgcaaaatctcaagtgagcattttccccacaggaaaacagaatcttccactgcagctagagaaactccgaggaagagggacttgmtgctttagacatcaaaatgagaaggggagggaggaaagaaaggggggagtctgtgaggcacaacagagaattcccccaaactgacatgaccgtgaccctc

SEQ ID NO: 465098 - DNA, 201 bp, Homo sapiens
aaaggaaaccttttagtgattacattaaaaaaccacttgatttgtgttccagtttctgaacgcaggcaacaaataaaccagctgatttgtgttccaggcarcaaatatatcttaagcatcaactgtccagatgaaccttgtatgaggagccatagggaactggcattactcagtggaaagacactggtcttggagccattg

SEQ ID NO: 465099 - DNA, 201 bp, Homo sapiens
agacgtgtgtcggagttgcccagcccagccaagctctgcccacgtgggacctcactgcattcccagcaccgaaagcatcatagttttccccagttatatgyagcataaatggtttaattataaatgtctcccttaggcatgataaacattttaacacccacgcgagtcagtgtatgattgggctagctcctgtttgtgtga

SEQ ID NO: 465100 - DNA, 201 bp, Homo sapiens
aacaaacaagcaaacaaaacccaccagactcaggcccagacagtctgggtctccagagccccagccctaacccaccacgctattctccctggtcccaactytgatgctttaaatgtgtccctttattgctatcactatgtaagatcaaaggctttctctccctccagactgcatgttgtgtcagggcaagacatcttgatt

SEQ ID NO: 465101 - DNA, 201 bp, Homo sapiens
catattctggtttttctttctttcttttttttttttttttttttttgtagagacggggttccactatgttgctcaggctggtctcaaactcctgggctcaratgatcctctcaccttggcatcccaaagtgctgttattacaggcatgagccactgtgccgagccagttctttacattctggatttcagtccatttgcaaa

SEQ ID NO: 465102 - DNA, 201 bp, Homo sapiens
catgcagtggaagaattctactcttctggataccagtaaagcagtagcgatagagaaggcaccacagttttcaaatgtctcagcaattttcagtgagttgyacacacaggggaacatttctcatctatgttggaaaagcaaagtattttttctcttgaatgatttctaagctaagtctatcagttggattgcctttggcta

SEQ ID NO: 465103 - DNA, 201 bp, Homo sapiens
ccactcccataggaatgactttaagactgctgagtctgggaagattctctgttcaaatatttgtccattttcttattgaggatttgttttcttattattgmgttttcatagttcttcatattctggtttttctttctttcttttttttttttttttttttttgtagagacggggttccactatgttgctcaggctggtctc

SEQ ID NO: 465104 - DNA, 201 bp, Homo sapiens
ggcaacaagagcagtaacgagtgagacatcatcacttctgcacagcaaaagaaacaatcaacagagtaaagagataacctaccaaaatggaaggaaatatktataaatcatatatctgataaaggagtaaataattaaaatgcgtaaggaactcttataactgaatagcaaaattaagcaaaaaaaacaacctgattgaaa

SEQ ID NO: 465105 - DNA, 201 bp, Homo sapiens
tttattctacaggattaagtttgcaccatggtatggccagttctcttctgagctattcagtcacagactcttatgcagaatacaagagttttgaagagagytttccatcacctgaactgttcagaaaatcagattatttaggtgagaaagtaattccaaccttaaattgctctactatagaaattattcttttgtccacaa

SEQ ID NO: 465106 - DNA, 201 bp, Homo sapiens
aaattatgatggggagatatgatacaagagattgcagtttttgctataagccttgtagaactatttgtcattttaacaatgaacaatttgataaaaatatkttttttaattgcatttacatttctaacttgtgacaccaggacagcctcccactgatacagcattaacatttattattttttctactcaactacccagatg

SEQ ID NO: 465107 - DNA, 201 bp, Homo sapiens
agtgcaagtttttttattttgtttttttatatggatacctagttgttccagcacattttgtttaaaagactatcctttctccactgaattgcctttacatrttggtcaaaaatcagttgcttatctatgtgtgagtctatttccatgctctcttattaaattcctttaatatatttgtgtatgtgtaggctcattgttttt

SEQ ID NO: 465108 - DNA, 201 bp, Homo sapiens
attcagtcacagactcttatgcagaatacaagagttttgaagagagctttccatcacctgaactgttcagaaaatcagattatttaggtgagaaagtaatyccaaccttaaattgctctactatagaaattattcttttgtccacaaatcctccaatgaataaacgtccctttcgagaaggcatactcctcttcctcacca

SEQ ID NO: 465109 - DNA, 201 bp, Homo sapiens
aaagcagtagcgatagagaaggcaccacagttttcaaatgtctcagcaattttcagtgagttgcacacacaggggaacatttctcatctatgttggaaaarcaaagtattttttctcttgaatgatttctaagctaagtctatcagttggattgcctttggctacagataatatctaataatagcataagtatgtatgagt

SEQ ID NO: 465110 - DNA, 201 bp, Homo sapiens
ctagttaatttttgtatttttatagagatggggtttcactatgttggccaggctggtcttgaactcctgacctcaggtgatctgcctgccttggcttcccaaagtgctgggattacaggtgtgagccactgctcccaggcacatcaagctaatttaaacaattttttctagagatggagtctcgctatgttgcccaggctg

SEQ ID NO: 465111 - DNA, 201 bp, Homo sapiens
tatttagagaaaataccatttaatcataatcagcattttctaaaatcatagtttaaatatatgagaaatgtccttgattactaggtttatcaagttgacaygtgaaaggtataaggaaatagaaaattagttgtctctaacttacaaactgcttgtattctgagagttcatttgctgattgatatttgaaacctgaaatac

SEQ ID NO: 465112 - DNA, 201 bp, Homo sapiens
aagcaggcggatgacttgaggtcaggagttcgagaccagcctggccaacatggtgaaaccccgtctctactaaaaatacaaaatttagccaggcgtggtgrcaggcgcctgtaatcccagctactcgggaggctgagacaagagaatcgcttgaacccgggaggcggaggttgcagtgagccaagattgtgtcattacact

SEQ ID NO: 465113 - DNA, 201 bp, Homo sapiens
acagagtgactgaatggataaaagaacaagacctaatgatgtgatgtctacaagtgaccctctttagattttttttttttttttttttgagacggagtttygctctgtcgcccaggctggagtgcagtggcgcgatctcaactcactgcaagctccgcctcccgggttcatgccattctcctgcctcagcctcccgtgtag

SEQ ID NO: 465114 - DNA, 201 bp, Homo sapiens
agtggcgcgatctcaactcactgcaagctccgcctcccgggttcatgccattctcctgcctcagcctcccgtgtagctgggactacaggcgcgcgccaccrtgcccggctaatttttgtatttttagtagagacggggtttcaccgtgttagccaggatggtctcgatctcctgacctcgtgatccgcccgtctcggactc

SEQ ID NO: 465115 - DNA, 201 bp, Homo sapiens
tctgataaaggagtaaataattaaaatgcgtaaggaactcttataactgaatagcaaaattaagcaaaaaaaacaacctgattgaaaaaatagacaaatarcttgaatagatatttctccaaagcagcagcagcaatagccagcaagtatatgaaaaaatgctcaacatcattaatcatcaggaacatgcaaatcaaaacc

SEQ ID NO: 465116 - DNA, 201 bp, Homo sapiens
caatatccctgatgaacatagatgtaaaaatcctcaacaaaatactagcaattgaaattcatctctatattaaaaggatcatacaccatgaccaggtggcrtttatctctggaatgcaaggatggttccaaatacaaaaatcaactaaagtgatacactacattaacagaatgaagggtaacaattacacgataatttcag

SEQ ID NO: 465117 - DNA, 201 bp, Homo sapiens
ataatcccaatgctttaggaggctgaggtgggaggatcacttgagccaaggagtttgatgttacagtgagctatgattatgctactgcactccagcctggrtgacagagcaagactgctctaaaaaaaataaaaaagaataaaagaaaaattcagtagagcaatataacagcacactagctcaagaagaataaagaattag

SEQ ID NO: 465118 - DNA, 201 bp, Homo sapiens
atcatatgtctatatgaatattgatctaacttaatatatgatataacaatatgggaacgatgggagaggtaggaaaggtggggatgggcgaatatacaggkaatagccttattccatagtgggaagtcactagaaagcttaaaactgatattaagtaatagcagtttacgtacagttgtcccttggtatccatgggggttg

SEQ ID NO: 465119 - DNA, 201 bp, Homo sapiens
caatgaaactgaccaggtggaagaccctacagtgaagccaactatgtgacaagccccacctaggccatagggataccacttagccttttaggacccacttytaaatatgaacagagagccaaggatcaccagacttctgaggaaagcctctaacattaaaaagagatatcaaaacaaaacaaaatgtgagaatggtgtcag

SEQ ID NO: 465120 - DNA, 201 bp, Homo sapiens
attataacaaatttatcaccatcaaaaatagaatgattgtccaagatcaaattaaaatagtttaaaatattatgcctttttagttgtatgtagaagcagtyttatgttctagtaataatatataactaagcatgtacatttccatacatttcaatttttaggatttcacattgttttgtatcaaaagatttatcaattttt

SEQ ID NO: 465121 - DNA, 201 bp, Homo sapiens
ttttaaaagaagttttagagttttaggagttacatttagatatatgatgcatttagagttaatttctttacatgatggaaggtatgagtgcaagttttttwattttgtttttttatatggatacctagttgttccagcacattttgtttaaaagactatcctttctccactgaattgcctttacatattggtcaaaaatca

SEQ ID NO: 465122 - DNA, 201 bp, Homo sapiens
ggagaagagaaagcaaaagatgctcagagggaaagcctactactctgacagttgaggatatggagaaggatggtagattgagtcagtcaatttaagtgttscagtggcagctggagaagatggccaggtagaaaacaattctcatttttaacaagggagttggcataggagaaaaagttgtgatgaggtcttaggaggaag

SEQ ID NO: 465123 - DNA, 201 bp, Homo sapiens
tttttttttaacttaatattcctttataacatgtttttgggggaaggcagtttcaacacaagacatttttttaaaaggcttttatccatagtttaacagtstaaagtagtccttgtagagtatttatactatgaaaaaatagtgttttgaaagtttcttaaaatttttatatatttctgttccttttctcctgtgctttaa

SEQ ID NO: 465124 - DNA, 201 bp, Homo sapiens; identical to SEQ ID NO: 281201

SEQ ID NO: 465125 - DNA, 201 bp, Homo sapiens
tttcacctcgggagcagcgggcagctgagccgcgccttcccggtccccgctaccccgtcccctctacccccaccctctacccgacccgcgccttgggatamagggatgctctgtcttaatgagtgagcaggtgcactcgcgggccccaggcagcctgggaggccgctgccaagacacgcagtgggttgtccggggcctgta

SEQ ID NO: 465126 - DNA, 201 bp, Homo sapiens; identical to SEQ ID NO: 281202

SEQ ID NO: 465127 - DNA, 201 bp, Homo sapiens; identical to SEQ ID NO: 281190

SEQ ID NO: 465128 - DNA, 201 bp, Homo sapiens
gcccccctcctcctcctccagcgcaccctccttgcagctcggaggcaccaacacaaaagccagggagaggaggagagagggaggagagtggacgagccgcsagccttctgcctgtgtgcgccctcggaccggatgctctggcgaaggaccctaccgcgctgctccagccgccgccgcgcctcggcccacaccctcccctgc

SEQ ID NO: 465129 - DNA, 201 bp, Homo sapiens
aaggtggagaggggtaactattaattaggtacatcctgtacacaaagtagaaaggggctttgccctttgccaattcacagctagaattaatgctaacttcytgagagatattaaaaaaacatatgtacataataagattatttcaatgtaagcttctagcaaaaacttgtcactgagtctacttttgtaaggaagaaactt

SEQ ID NO: 465130 - DNA, 201 bp, Homo sapiens
ttatattttttggaattaattcaatgagtatatattgcttttgaaaaaagataaaaatataatttttaattaaaaggacaggaaaactaccttattgtacytattgtaaaaaaattaaatgtactgtacaatgccctttgtgttaattgtgcattattaaattactttcaaatacatgcagttgttttcataggtacctga

SEQ ID NO: 465131 - DNA, 201 bp, Homo sapiens
ttgagctgccatcttatttgggaggttgagctgcaggaagagacaaacatgaccaaatccatttctgctgagagaaaaacaattcagtgcatcagtgatayacctgaaagcaaattggaatgtgactactcaaggacgtccaagttactcagaatggcatcttccagttaataagtttattagctgagctagcagatatat

SEQ ID NO: 465132 - DNA, 201 bp, Homo sapiens
gacacatccgagactgggcaatttatacaggaaaaatgctgaatagacttacagtttcacatggctggggaggcttcacaatcatggcagaaagcaaggasgagcaagtcacatattacatggatgacagcaggcaaaatgagtttgtgcaggcaaactcccatttttaaaaccatcagatttcataagacttattcacta

SEQ ID NO: 465133 - DNA, 201 bp, Homo sapiens
ctcccaaagtgctgggattacaggaatgagccaccacacccggctattaagtttgtcgttatgtggcctatcttggtgaatgtttcaaccaaagttgagaygattttatattctgtacttgtagaagagattattctgtaactgttagatcaagttgattgagagtgctattcaggccaactatgttcttactgatttctt

SEQ ID NO: 465134 - DNA, 201 bp, Homo sapiens
cgtagagcattcatcccagtgggggaggcagccagtatataagtcagtgcacagatcccattccttcgtgagtgccccaagggctccctttgctcaaatgwctcccccaacccgtcagccttcttctgtctgtgatcccatagacttggccccttgagggcagaggttgcatcttgatgaggctgcagaaggcgtttgatg

SEQ ID NO: 465135 - DNA, 201 bp, Homo sapiens
ccacttattccccatctagccttctacccatccactcatccatttacccattcacccatgcttcccctccatctacccgtccacccatctgcccattatcmctcatccacccatccatccatccagaattcatttagcaaaaatgtgttgattacttactgtctctcaggcactgggctaggcagtgaaggtatagggaac

SEQ ID NO: 465136 - DNA, 201 bp, Homo sapiens
tttcccttggtttccttgttgttgctgacttgttacttgttgacagaaacatgtcttatattgattatattcttttttgtacatcacatggtaccttacaratttactaagtaagagtcagctaatggccttcaataactggatgaagcagaagtgagcggggaaaggaagaaaaggaagacgaagaaagcccttgcctac

SEQ ID NO: 465137 - DNA, 201 bp, Homo sapiens
gtcccaaacatagatgagttacctcggactgagcagtgcaatcgttggagcctctgtttgcgtaatagtaagtcagaaaaatacagaattctgctctgccygcatcacttaacagtgtgggtggaggggagaagtgtgggaggacttgtttacattgcagggcagagaaaatcattggttaccgatgctgctgatcctttc

SEQ ID NO: 465138 - DNA, 201 bp, Homo sapiens
atcccagaacttaaggtaaaataaaaaataataataaaataactaaatgccttcattagttctgattgaatggtggattcacagtgaatgaatcctttttytatttgtctttgttttcagatgtatttttaccataacataaattaatttttttctatgtagctttccttcgctttatagaggtatgattaacatatcata

SEQ ID NO: 465139 - DNA, 201 bp, Homo sapiens
gtaacaaacctgcacgttcagcacatgtatcccagaacttaaggtaaaataaaaaataataataaaataactaaatgccttcattagttctgattgaatgrtggattcacagtgaatgaatcctttttttatttgtctttgttttcagatgtatttttaccataacataaattaatttttttctatgtagctttccttcgc

SEQ ID NO: 465140 - DNA, 201 bp, Homo sapiens
tgaggaggctctgaagctaagggagccagggtgggcagggctggtgctgggggctgcagggctggatctgtatgtccttgggaggaacaggttgagaaacygagttttgatctgtgggtcccaatcctgagcatccaacggtggtcactcactccatgttttccccacagtattggtaactcctcaccccctctcttctct

SEQ ID NO: 465141 - DNA, 201 bp, Homo sapiens
accatggcacatgtaaacctgtgtaacaaacctgcacgttcagcacatgtatcccagaacttaaggtaaaataaaaaataataataaaataactaaatgcyttcattagttctgattgaatggtggattcacagtgaatgaatcctttttttatttgtctttgttttcagatgtatttttaccataacataaattaatttt

SEQ ID NO: 465142 - DNA, 201 bp, Homo sapiens
attgtggaaggaagccccctttctgggagtgcctcaggtaaactacacgaagaatagaacgttgcacctgagcctggagggccgagcagcaggctgtgtcrgtgaagggtgttggaagcagaaggaacagcatgtgctcaggcttgaggtgcagtgccagtgctgtagggattttactgtggctggagagacaggagtgag

SEQ ID NO: 465143 - DNA, 201 bp, Homo sapiens
gcggaggttgcagtgagccgagatcacaccactgcactctagcctggcaacagagtgaaactccgtctaaaagaataaataaataaaataaaagatggtamattatatatgtatattttgtctcaatttttaaaggtcactcaaaaaaagaaggaaaacaaattgaatgaagatcttagatctgttagtttacaggaaata

SEQ ID NO: 465144 - DNA, 201 bp, Homo sapiens
atgagcgaatgtctcctggagaggagctcactatctacatggggacacagatcccatacagggccatctataggtgttgtgaagcattgtggaaggaagcyccctttctgggagtgcctcaggtaaactacacgaagaatagaacgttgcacctgagcctggagggccgagcagcaggctgtgtcagtgaagggtgttgga

SEQ ID NO: 465145 - DNA, 201 bp, Homo sapiens
agttaagaaaaaaaaaaaaaaagaggtggatgttaaaatcattagatgcacggttgatgggaaatatattgcagggatcatgttggcaccacttgaacctrtggattcacgctagccttaccttatagtatggccgtaaaggaagcacacagtatgaatatagtaccattatgggggaatcctcaaaaactaaaaatagaa

SEQ ID NO: 465146 - DNA, 201 bp, Homo sapiens
gaagaataactaatgggtattaggcttaatacctgcatgacaaaataatatgcacaacaaacccccatgacacaagtttacctgtataaaaaacctacacrtatacccctgaacttaaaagttaagaaaaaaaaaaaaaaagaggtggatgttaaaatcattagatgcacggttgatgggaaatatattgcagggatcatg

SEQ ID NO: 465147 - DNA, 201 bp, Homo sapiens
ggcactattgctaatcctctcagtgactttcgtttgatgtaggtgataatattctcacatagccaacagggaaactaggctcagagatacgaataaaccayctgagctcatgtggttcctgaggggtaaagctgatattagaagctaagttaatgtgacttccaagcccatgcttccaaacataatgaaatatcacccagg

SEQ ID NO: 465148 - DNA, 201 bp, Homo sapiens
aatagctatgtcagttcccttttttttttcaattttattattattatactttaagttttagggtacatgtgcacaacatgcaggtttgttacatatgtatrcatgtgccatgttggtgtgctgcacccactaactcgtcatttagcattaggtatatctcctaatgctatccctgccccatccccccaccccacaatggtc

SEQ ID NO: 465149 - DNA, 201 bp, Homo sapiens
aaagcctgatcgtaagaggcactattgctaatcctctcagtgactttcgtttgatgtaggtgataatattctcacatagccaacagggaaactaggctcasagatacgaataaaccacctgagctcatgtggttcctgaggggtaaagctgatattagaagctaagttaatgtgacttccaagcccatgcttccaaacata

SEQ ID NO: 465150 - DNA, 201 bp, Homo sapiens
gtgaaccagcgaggggtccagccaccgtgcacagtcaggcacaccagctgctgcaatggggtgggcagctccaggtgccggcgtgggcaccgactctctgygaggctgtggctagaccaggtgcaccacaggtagcttccatggctgccactggggaatgcggtggcacacggaagcttggagaatccaggaaccactggg

SEQ ID NO: 465151 - DNA, 201 bp, Homo sapiens
atgagacatcaatcaatacatgtaagatgtacattggtttggtccagaaaagtgggacaacttgaagtgggggcttccagatcataattcgatgaaaagaktttctgattggcagttggttgaaagagttattgtcaatagaaaggaacatctgggttacactaagggggttgtggagaccaaggttttatgatgcagatg

SEQ ID NO: 465152 - DNA, 201 bp, Homo sapiens
acaactgtgttgctactttaagcattgatctagaccctgctccactaaactgcccacagtacctctactcttcagtttctcttggcaatgcccttgtggcyaaaggaaagtaagatctcaagatgtggatttagaaggtggaagtggaaagaggaagagatttgaggtagcctgactcacctgtccacttccacttcatga

SEQ ID NO: 465153 - DNA, 201 bp, Homo sapiens
tgattaaatggcgctctctctctctctctctctctctctctctctctctctctctctctatatatatatatatatatatatatatatatatatatatatatggcgattaaaacaaagcctgatcgtaagaggcactattgctaatcctctcagtgactttcgtttgatgtaggtgataatattctcacatagccaacaggg

SEQ ID NO: 465154 - DNA, 201 bp, Homo sapiens
tacccagtacaggttaagtgcctaatcaatgatggctagttgtgttgtattattgatgaaattatattgacattataacaatatatcttaatataaaaatkgtaggttagttttattgttgctattcagtttcaaaattatgttaatgaatatttgatgacctgagaaagctttagtaaataatggtaataaaaaaagaag

SEQ ID NO: 465155 - DNA, 201 bp, Homo sapiens
atgattaaatggcgctctctctctctctctctctctctctctctctctctctctctctctatatatatatatatatatatatatatatatatatatatatatggcgattaaaacaaagcctgatcgtaagaggcactattgctaatcctctcagtgactttcgtttgatgtaggtgataatattctcacatagccaacagg

SEQ ID NO: 465156 - DNA, 201 bp, Homo sapiens
catcagctggaaaatgggtaaatgctttaaatcactatgaagaaaatctgtgtggcagaatgggagatgcacatgtgggcattgtcaggggacagcccctrtgttaggctctgcttagcccctcagactacctgtgagaccctggacaagttcttcaacctctttactactcattgtattcccctgtcgaaggaggatatg

SEQ ID NO: 465157 - DNA, 201 bp, Homo sapiens
aagagagatgttaatcacctaccttataggatttttttgtgatgattaaatggcgctctctctctctctctctctctctctctctctctctctctctctcyatatatatatatatatatatatatatatatatatatatatatggcgattaaaacaaagcctgatcgtaagaggcactattgctaatcctctcagtgactt

SEQ ID NO: 465158 - DNA, 201 bp, Homo sapiens
aaatttctgcagctggcttgaatttctccacagaagataggattttcttttctattgcgttctcaggctgcaaattttccaaacttttatgctctgtttcycctttaaaactgaatgcctttaacagcacgcaagtcacctcttgaatgctttgctgctagaaatttcttccgccggataccctaaatcatctctttaagt

SEQ ID NO: 465159 - DNA, 201 bp, Homo sapiens
tctacccatccaatcttccatccagccagctagccatctatcgacccatctattcgcctacccgtgcattcctccattcatacatccatcatccattcatycatctatccctccgtctgtcgtctatccattcatccattcttccatctagcccttcacccatctgtccatctgtccattcacccatgcagccatccaccc

SEQ ID NO: 465160 - DNA, 201 bp, Homo sapiens
ctcatcaccagcacctgagtcccagccattgctatttctttcttggcctctgccaccaacttcacgtccatccctaaccgtccagtccattcacacaccakccagaggcaccttttcagtgaactcggttgggtcacatgtgctgaaaagccttcgccagcttccccctgttccctggtaaaactcaaatccccaccatgg

SEQ ID NO: 465161 - DNA, 201 bp, Homo sapiens
caagaggtgagttcccctagtcttgggcaactctacccctgtgtctttgaagggcacagcccccctcctggctgctttcatgggctggcattgagtgtctrcagcttttccaggtgcatgatgcaagctgtcagtggatctaccattctggggtctggagtacagtggccctcttctcacggctccactaggtgatgcccc

SEQ ID NO: 465162 - DNA, 201 bp, Homo sapiens
acagtccccggagggtgcgtctgtccttaaccggaaatccatttatacagtgtcacatgtggtaaacatggtgtttactacaaacaactggctgaattgcrttgccatcctgacgcagcctctcctcacctccacactggtccctgcgtgggacttccctctccctcctggagctctccacctcttaccacctcatcacca

SEQ ID NO: 465163 - DNA, 201 bp, Homo sapiens
aaataaaaatgtattagttattagttataatgttgtaaatgccaaatatttacttaaattgtgcttgaattgcattagatatctggagagagaggaagaaygtatatgtgtgtatatacatataagaaggagagtttagtcctcatctccgtagtagaaggtcagtatgtaaaatggataacaaaacactgagaagttaca

SEQ ID NO: 465164 - DNA, 201 bp, Homo sapiens
ctgggcagctgacagtccccggagggtgcgtctgtccttaaccggaaatccatttatacagtgtcacatgtggtaaacatggtgtttactacaaacaactrgctgaattgcgttgccatcctgacgcagcctctcctcacctccacactggtccctgcgtgggacttccctctccctcctggagctctccacctcttacca

SEQ ID NO: 465165 - DNA, 201 bp, Homo sapiens
ggtattttgaagtcaatcccagataccttataatttcatccataaatatttgtgtacatctacaaaagataagccttttttatacaagccagttattaackctaagaaatagaaaaaggtacaccaggaaggaaatttaattcaaatgcactatatggctcagctttaaataaaaatgtattagttattagttataatgtt

SEQ ID NO: 465166 - DNA, 201 bp, Homo sapiens
acaggaaacacatgcagttctccatctcagtgctgggcagctgacagtccccggagggtgcgtctgtccttaaccggaaatccatttatacagtgtcacatgtggtaaacatggtgtttactacaaacaactggctgaattgcgttgccatcctgacgcagcctctcctcacctccacactggtccctgcgtgggacttcc

SEQ ID NO: 465167 - DNA, 201 bp, Homo sapiens
gccttaaaattgcctccaggcaccaatcaaaggcaactgtggttgtgcttcatttattcatggccctgtgccatctgttgcctgtctgtgaatagctgttycctataacttggccagctctctagttgtttaagttgggagtgtagattcagcctctgcgactctatcatagccaggagcccttccagggtattttgaagt

SEQ ID NO: 465168 - DNA, 201 bp, Homo sapiens
attatcgcaacatgctacattctttccaaaatgtgagaggtatatccgtaaaacaaaagctatggtaataactgttttggtgactaattttaggtcttttatgtgtagattttagaatttcatttgttatctattattatcataattacttataataaggaaaaaacccctcacatttattgaaaccctagtatggggagg

SEQ ID NO: 465169 - DNA, 201 bp, Homo sapiens
cacaggaaacacatgcagttctccatctcagtgctgggcagctgacagtccccggagggtgcgtctgtccttaaccggaaatccatttatacagtgtcacatgtggtaaacatggtgtttactacaaacaactggctgaattgcgttgccatcctgacgcagcctctcctcacctccacactggtccctgcgtgggacttc

SEQ ID NO: 465170 - DNA, 201 bp, Homo sapiens
tgcggactctgtttgggtttcccctgcttgatctgcagccttaaaattgcctccaggcaccaatcaaaggcaactgtggttgtgcttcatttattcatggycctgtgccatctgttgcctgtctgtgaatagctgttccctataacttggccagctctctagttgtttaagttgggagtgtagattcagcctctgcgactc

SEQ ID NO: 465171 - DNA, 201 bp, Homo sapiens
ttggaactactgtatcgtgcttcttttcctgctctgatagtttcctctctgtatgcacagatcatcactcaaagacttatggaagcccttctgttgctatstagtgttctttgtctctctacctcggcttcctcttcagtattctgtctcataaattctagttgtctcagttcattgtctgtctcctcagctcatctagac

SEQ ID NO: 465172 - DNA, 201 bp, Homo sapiens
ttttctctggcaaatcagttatcgcatttgtaattctaacatgaagcttagctgggattcgaaatatgccattacgtgacttgattgccccctcatttcargccccatgagagctgtaactttgctctatcctgccgagttatttttgacaaagagcatttccgaggtgtgcgtggtggtttatcttttacattgcttatt

SEQ ID NO: 465173 - DNA, 201 bp, Homo sapiens
cattttggggagggatcattattctgttgactgtgccaaacaaggtgccagtgttagcactggagtgacagtgtccaaacagggcaggggaggagctggtrcttcctgaacacctgccatgcctgttattcatttaatccttgcagaaagatgggaaacaggcagtattatcctgttttatgaataaagggactgaggcaa

SEQ ID NO: 465174 - DNA, 201 bp, Homo sapiens
cacagccttggctcagggagctcccaggtctgggcttactgaagggctgaagctcttctcttctcttcaaccacaacatggcgagcaaggggtatgtttcrgccctgtttgtgttatagctctttcagcctgccttccgcaggtcccaagttcttatcctgcgtccaagaagaatgaagcacgcagacaagtggagggtaa

SEQ ID NO: 465175 - DNA, 201 bp, Homo sapiens
gccagatatgatgtaacattatctgttacactgtgtaattactatagcttcaaaactgcagccttggaattctgagttaagggaactattagtcaaataasctcacgcctgtaatcccaacactttgggaggctaagtcaggaggatcgcttgaggtcaggagttcaaaagcagcctgggaaacatagtgagacccccatc

SEQ ID NO: 465176 - DNA, 201 bp, Homo sapiens
ttcagtggatgtgatttctgggcagtgaaattacagatgattttcattcatcctatcacgctcttctgtgtaaatgcatcaaagtgcagttctgtcccatygaaataattgtgagggggccccatctgcgtggttggagggaaatgctcaaaggcattggcttgatttagcctgggattttagggcatatagtattcatat

SEQ ID NO: 465177 - DNA, 201 bp, Homo sapiens
cttgagtgtctgtgatgtgctaggcgtgcggctggatggtgctattgtgtgcaaatcaccatgcctcaggtctttgacaggcttgtcatgcactgaggaarttcaggctcagagaggaccagcgagggcctccaggcagccagctggtagctggcagagcgagactcaaatgcaagcgagtcccctggtccctgcttggtc

SEQ ID NO: 465178 - DNA, 201 bp, Homo sapiens
accccagccatagagactttctgtctctacagatttgttgagacttggtttttagcccttgtcatggttaagtccagagttcatgtattcccactattaargcagtgatatggtttgggtccatgtgcaccaaatctcatgttgaattgtcatcctcaatgttggaggtggggcctggtgggaagtgattggatcatgggg

SEQ ID NO: 465179 - DNA, 201 bp, Homo sapiens
gctcaggttacagaaaaatgccttagtcgcgtctgtaatgagaattacatgggttgctgagctcactgggctgcaagctctaagtcccaaggtctggttcttttttttttttttttgagacagcgtttcactcctgtcgcccaggctggagtgtaatggcgcagtctgggctcactgcaacctccgcctcccaggttcaag

SEQ ID NO: 465180 - DNA, 201 bp, Homo sapiens
tcggagagttcagggagagcttgcttagggctgcgacttcagacaccagctcccctctttctaggtccccagagaggtggcccagcggctggcctgtttcycactgggaatgcgaggggcacccgggccggcccagggctgacccacagcaggctcgggcagtgggtgctcagctggtctgcactgaacgcaaccggaagt

SEQ ID NO: 465181 - DNA, 201 bp, Homo sapiens
catacattgcagttttacattattgggtgctggattttgttagatacttgtaaatagttttggattttgttctggcacgctgtgaggtcagttgggatcarttgaattgtgtaaggctttattttttcttttaacagcttgagatataatttacatattctagagttcacccatttaaagtgaacactttagtatattgac

SEQ ID NO: 465182 - DNA, 201 bp, Homo sapiens
ttttttttttgagacagcgtttcactcctgtcgcccaggctggagtgtaatggcgcagtctgggctcactgcaacctccgcctcccaggttcaagcgattytcctctctcagcctcctgagtagctggaattacaggcacccaccaccacacctggctaatttttgtatttttagtagagacagggtttcaccatgttggc

SEQ ID NO: 465183 - DNA, 201 bp, Homo sapiens
ccctcagcaattcatcaaaatgaccatgaaggtttcttactggttatggttccagcagcttctaactccagataagcaggtcacagctgtgacgctatagrtgagcttgtctttccagatttggaggtagtggttggctttgtggtctcagttctcggatgggtccaagaaaagacactgattttcagttttctcaacttt

SEQ ID NO: 465184 - DNA, 201 bp, Homo sapiens
accattctcttgagacttcattgtcccatgtgttgtttagaaatgtgttatttaatctgaatatattacgctatattctgtttatttccctttattgattyctagtttaattctatggtgatctgagagcatattttctataattgctattattttaagtttgtcttttttttttttttttttttttttttgagacggagt

SEQ ID NO: 465185 - DNA, 201 bp, Homo sapiens
taatttttatatttagctgagccatatagtgcatttgaattaaatacatttccttctttgtgtaactttttgtttttcttagagttaatagttggcttgtwtaaaaaggactcatcttttggagatgcacacaaatatttatggatgaaattatatgttatctgggattggcttcaaaatactctggaagggcttctggct

SEQ ID NO: 465186 - DNA, 201 bp, Homo sapiens
tggggcctggtgggaagtgattggatcatgggggatatttctcataaatggttcagcaccatcccctttggtactgtcctcacaatagcgagtgagtgctygcaagatctgtttgtttaaaaccacccaccccccaccaactccacttgctcctgctcctggcatgtgagacatgcctgcttccccttctccttctgccat

SEQ ID NO: 465187 - DNA, 201 bp, Homo sapiens
ccactggtggttggggctgtagagatgtacacagtgggcagagtggtctgagagatgaggggcactcatgatatggacaggatgggcagggaaggtgctgwaaggaggtgacagctgagcggatccccgaatggagtgggggacgggcaaggccttgtttctggccaggactccgacagttgttccgagtaagatgggatg

SEQ ID NO: 465188 - DNA, 201 bp, Homo sapiens
ctgagcctagataaggcctcagaatccttcttaacacgctattattgacagaagctactagtggagcttgcccacaagtagtgacctttttgctggctctsatttaaatgatgtcataaaagttgttatgagatgtcccagctaagtgaccttcagtgctttcctgccttcaatgatataaagatgaatccgctattctta

SEQ ID NO: 465189 - DNA, 201 bp, Homo sapiens
cggtgattctctagggtgactcacgggacttacatatacagtcacgcgccacataatgacattttggtgaacagtggactgcatatatgaaggtggtcccrcaggattacaatgcagctgaaaaattcctgtcacctagtgataatgtggttgtgtaatatccatcgtagcatggtgcgtttactcacctgtttggtgatt

SEQ ID NO: 465190 - DNA, 201 bp, Homo sapiens
aaaagggctaagctagttccctggagcccttttataagacactaatcccattcttgaaggcagagcccttatgacctcatcaccttcagaaggcccccctycctaatagtggcatttgtggttaagtttcaacatgagttttggaagagacacaaatgttcaaacaatagcactctgctgaagaattggctctatgcagaa

SEQ ID NO: 465191 - DNA, 201 bp, Homo sapiens
gaggctcacatggaccatgtgatggaagagcccacttctctttaagatctagcacactgccggctctcgcattcacctttgacactaagtataaatacagrgatggttgtcttggattccaaatggtttttctgagcagcacctgggatcctgtggtcaagtgtatggtggtgtcacagagttctaagtgccatcctttgc

SEQ ID NO: 465192 - DNA, 201 bp, Homo sapiens
aagcttacagagtaaggatataaagaaaggaactatttttgtatagctgtacagtgtgtttgtgttttaagctgtgttattaccaaagagtcaaaatgttaaaaaaaaaaattacaaaggtaataaagtcacagggaggggaacatcacacactgggacctgtcgggggatggggggcaagggcaattacatgtggggctt

SEQ ID NO: 465193 - DNA, 201 bp, Homo sapiens
tatttctcataaatggttcagcaccatcccctttggtactgtcctcacaatagcgagtgagtgcttgcaagatctgtttgtttaaaaccacccaccccccmccaactccacttgctcctgctcctggcatgtgagacatgcctgcttccccttctccttctgccatgatttggtttcctgaggcctccacagaagctgagc

SEQ ID NO: 465194 - DNA, 201 bp, Homo sapiens
agtgaagtttctgccttcagagtcacccaaggtgcttggttttcagatggaaatggctgtggccactgcctcagaggaggcagatgtcatcttccttttcrcgaaggtgctcgctccacattctccagagggaaggctgggccagcacggtcaggcttttgcacggatggagccgcagctcccttcgcttgctcagtcccg

SEQ ID NO: 465195 - DNA, 201 bp, Homo sapiens
gcttctcttaaagtaataatagttgagactgaaaacatattaaaattactgaagcttacatgatctcacctgaagttcacagcagtgctaagaggtaatawggtgtcccattttacagatgagaaaacagcccagcagaggaaaagtgagtggccctataggaggtagagaactgggctgggagctggtgtttcctgactt

SEQ ID NO: 465196 - DNA, 201 bp, Homo sapiens
tccacgaaagacctttctagcagatccacagccccacattcccacactgagatctgggtatggtaaacctgactctggccaaccacgttgggtgttctgcygataactctgaattttaaagcatcggtcaatgctggctgcattgacagaacattaccagaacattcaaacacatctacagctaatctttgttcaacgaat

SEQ ID NO: 465197 - DNA, 201 bp, Homo sapiens
ccagatatgatgtaacattatctgttacactgtgtaattactatagcttcaaaactgcagccttggaattctgagttaagggaactattagtcaaataagstcacgcctgtaatcccaacactttgggaggctaagtcaggaggatcgcttgaggtcaggagttcaaaagcagcctgggaaacatagtgagacccccatct

SEQ ID NO: 465198 - DNA, 201 bp, Homo sapiens
ggctgctgcagtttccaaaggttgctttaaaaatcgttgggccccatgaagtgaggaacccaagacgggtgtcacatgacctgggggtcaggcctcagagygttgtcagcagagggcccccgtggtctctgaaggtctcattctctttccacgaaagacctttctagcagatccacagccccacattcccacactgagatc

SEQ ID NO: 465199 - DNA, 201 bp, Homo sapiens
cttgatttcaaactccttcagggcaaagatctcgcctcctgtatttctgtattctcttggcacttacgtaacagaggattaagacaagagtgctcagggcygatgtggtttgaaagtggcaggaataatgactgagagtcatctcagagttgctttcactttggattcggcgtaatcagcaaacagcggggcaaaggcctt

SEQ ID NO: 465200 - DNA, 201 bp, Homo sapiens
actgtacccgccaagccccacccccacttaattttcttttctgaaactccagcacagggagcagcgtagggagcaggcgtccgtcggcgaggccttccgarcggttgaggatgccggccagtacctgcaccagaagaggagcctgatggaggagcacggtgccaccctggaggagctgcaggagcgtctggaccaggccgc

SEQ ID NO: 465201 - DNA, 201 bp, Homo sapiens
ttgcagctacttgggtgtcttgaggcacaagaatcgcttgaacccaggaggtggagattgcagtgagccgagatcgcaccattgcactccagcctgggcarcagagcaagattcaatctcaaaaaacaaacaagcaaacaaaaaaccagaataacttccaaatgtgagattgttggggaaaaggctataaacattctgtgc

SEQ ID NO: 465202 - DNA, 201 bp, Homo sapiens
atcaattatacttaaaatgactttggtggctatacttatttcccttttatccccttttatatattgaccttctactatggagatgatgacccaactctccktcttacacacatgcatgtgcagagacacacacacacacacacacacacacgcttcctctctctagttatctaatgcaattaaagcacaattttaagtaaa

SEQ ID NO: 465203 - DNA, 201 bp, Homo sapiens
atgtcatcttccttttcgcgaaggtgctcgctccacattctccagagggaaggctgggccagcacggtcaggcttttgcacggatggagccgcagctcccttcgcttgctcagtcccgagatagcggcagagaaggtggtgggagagcctgctctcagtttcctaagcaccaaggcctggggataaaattgttgttttaat

SEQ ID NO: 465204 - DNA, 201 bp, Homo sapiens
tgtcatcttccttttcgcgaaggtgctcgctccacattctccagagggaaggctgggccagcacggtcaggcttttgcacggatggagccgcagctccctycgcttgctcagtcccgagatagcggcagagaaggtggtgggagagcctgctctcagtttcctaagcaccaaggcctggggataaaattgttgttttaatc

SEQ ID NO: 465205 - DNA, 201 bp, Homo sapiens
actttggaaggccgaggcgggtggatcacgaggtcaggagtttaagaccagcctggccaagatggtgaaaccccgtctctactaaaaatacaaaaaaaatyagctggcgtggtggcacgcgcctgtaatcccaactactccggaggctgaggcagagaattgcttaaagttggaggggcggaggttgcagtgagccaagat

SEQ ID NO: 465206 - DNA, 201 bp, Homo sapiens
ccttctcagctattctttgaggtgacttaattgtaaagaacaaaatttattcttttaggttacaaaaagctctgaaatgaatagggacatgactataaagyggctttcttatgacaatctgttgttttactgtggttccgctactaggtaaccttgttgggactttgaccctctcctgctctgtttaatgaggattccgta

SEQ ID NO: 465207 - DNA, 201 bp, Homo sapiens
catcctctgctgcagaagctatggtctgtgtggtgacagccagattctctactcttatgttttgtatttgttacatattctatttttataaagggaatttwaaaaaataaatgtgttttgcacaaagctgtttattacaaaacccatgtttgctttatgtaggaagcatttatttgaaattacgtcttacgttttgttccc

SEQ ID NO: 465208 - DNA, 201 bp, Homo sapiens
catttgtctagatcttttgattaccttcatcagagttttatagctttctgcatacagatcctgtacatatttttagatttaaacctaaattatattatttwggtggtattttaaatggtatttttaacatttcgaattccagtcatttatttctgttatataggaaagcaatcaatttttgaatattaaccttgtatcctg

SEQ ID NO: 465209 - DNA, 201 bp, Homo sapiens
tttagaaatataaatgttaaaatcataagaaatagctaaacaaatgaaagtacttgtttctggaaaaaggaatgaggggtgtattaccctattttcacgcygctgataaagacatacccgagactgggtaatttatacaggaaaaaggttttatggacttacagttccacatgactggggaggcctcacaatcatggcaga

SEQ ID NO: 465210 - DNA, 201 bp, Homo sapiens
ctgtaagtagcaggaaatacaacttcagacagtggtgaatgcgagccacacgactccagagaggtgctcgctgatgcagtgacatcagggtcatgttctgygattctttccacagttccttctcacagttccagctgcaataactttcagagcaaggagggaagaggtcaaagaactgccaccatgcccgttctttctcat

SEQ ID NO: 465211 - DNA, 201 bp, Homo sapiens
taccaagattccagactcccagaaggaaaggaggtgctcagcataagccacactgtttgtacagacagtttgaaaacagagagccactcttaccagaaaayagtggaaaccctcccaaaatccatgttcccagacatcagctgaggcccagccctacaggaagggctttcagaggatgccagtctctggctggagatgtta

SEQ ID NO: 465212 - DNA, 201 bp, Homo sapiens
atcacaggactctagctgatctatcacacaccagagggaagatgaaatattcctggctgtttgtgaactttgggaattgcttggaactactgtatcgtgcytcttttcctgctctgatagtttcctctctgtatgcacagatcatcactcaaagacttatggaagcccttctgttgctatctagtgttctttgtctctcta

SEQ ID NO: 465213 - DNA, 201 bp, Homo sapiens
tgccgggcaccaggagaacagatcacagtgttctgctgccaggatctcaggtctaatcagagagagacatttaaaccaattgttatggtaccccaattcayttagagtgcaattccaatactaattttgtttttgttgttcttaagatggagttttgctcttgttgcccaggctgaagtgcaatggcgcgatctcggctca

SEQ ID NO: 465214 - DNA, 201 bp, Homo sapiens
attcgttatcattttactctcatgatgagcagtggctgactctcaatgccagagcactcaagttaaaaagaatgcatgctattgtgaatgatattatgccrgaaagtaactccacaggtgataacagtactgccctacaagctttcttgaccagagctatgagagtatttaaggataccaattctgaatttccttacaaca

SEQ ID NO: 465215 - DNA, 201 bp, Homo sapiens
cactaaatcctcagtgagcatacataaagcacaaattctgtcatattcatagcttggtattcagacgccatggcgttacttagatattcacagattcgttrtcattttactctcatgatgagcagtggctgactctcaatgccagagcactcaagttaaaaagaatgcatgctattgtgaatgatattatgccagaaagta

SEQ ID NO: 465216 - DNA, 201 bp, Homo sapiens
ataacttgctagaattttgattgatattctatagacctatagattctataggtcgggttgggaagaattgacatctccacaatattgaatcttccaaatcrtgaataggaaatattactcctccatttgtctagatcttttgattaccttcatcagagttttatagctttctgcatacagatcctgtacatatttttagat

SEQ ID NO: 465217 - DNA, 201 bp, Homo sapiens
ttcgtcacctataagatgagtgtgatagaatgcccacactcacgagggtgtgatggaaatttgatgagctgactcgtggaaagttagtgcttggcataacrtatgtttaatgtatatagcagtggaaaggaaatacaggccaggcttggtggctcccagcactttaggaggccaagatgggaggattgcttgagcccagga

SEQ ID NO: 465218 - DNA, 201 bp, Homo sapiens
tggcattccatataaacttcaggatcagtttgtcaatatctgaaaaataacttgctagaattttgattgatattctatagacctatagattctataggtcrggttgggaagaattgacatctccacaatattgaatcttccaaatcgtgaataggaaatattactcctccatttgtctagatcttttgattaccttcatca

SEQ ID NO: 465219 - DNA, 201 bp, Homo sapiens
ttcccccccccagtctactgcgtgaacttgagcaagttacctcacttctttgagccttagtttcgtcacctataagatgagtgtgatagaatgcccacacycacgagggtgtgatggaaatttgatgagctgactcgtggaaagttagtgcttggcataacatatgtttaatgtatatagcagtggaaaggaaatacaggc

SEQ ID NO: 465220 - DNA, 201 bp, Homo sapiens
ggaattctctggatttcttaaatgatgtttttaatctgcatatgataaagtcaattttgcattgacatgacattatgtatttgttaaaatgattgtataawatgatacaaatttgtataaaatgatacacaatcattttgataagcatatagtgccatgtatccacaattacactatcatacaaagtagttttactaccct

SEQ ID NO: 465221 - DNA, 201 bp, Homo sapiens
gaactcgggctgacctggattggaatttcagttcccccccccagtctactgcgtgaacttgagcaagttacctcacttctttgagccttagtttcgtcacytataagatgagtgtgatagaatgcccacactcacgagggtgtgatggaaatttgatgagctgactcgtggaaagttagtgcttggcataacatatgttta

SEQ ID NO: 465222 - DNA, 201 bp, Homo sapiens
gattattttgacacattctgcattgcttcctggaattctctggatttcttaaatgatgtttttaatctgcatatgataaagtcaattttgcattgacatgrcattatgtatttgttaaaatgattgtataaaatgatacaaatttgtataaaatgatacacaatcattttgataagcatatagtgccatgtatccacaatt

SEQ ID NO: 465223 - DNA, 201 bp, Homo sapiens
atcttacaattattgcagggagtaaaatagaaagcaaactcccgtacccgggtacccagtacaggttaagtgcctaatcaatgatggctagttgtgttgtrttattgatgaaattatattgacattataacaatatatcttaatataaaaattgtaggttagttttattgttgctattcagtttcaaaattatgttaatga

SEQ ID NO: 465224 - DNA, 201 bp, Homo sapiens
cttcggcagagatatgattctaaaaaaggcccaaatattttattttaggatttgtgtgtgtgtctgctttttatcttgcctgtgagaagctaaatggaaaytaccccgtatttcatttctattaattaaaataaattgaagtttgggacttgtcaaattctatactgtcaaaaaaagaaggtcgctttgatggatgaaccg

SEQ ID NO: 465225 - DNA, 201 bp, Homo sapiens
cttttgcatttaaagacttcactcatttccaaagttacttaggtcagcatctttttcttccagccttttcagtaaagttgtttcttacatttgaaatgcarttagattattttgacacattctgcattgcttcctggaattctctggatttcttaaatgatgtttttaatctgcatatgataaagtcaattttgcattgac

SEQ ID NO: 465226 - DNA, 201 bp, Homo sapiens
ccgtagattctcccactcattccaccccacttccaactcttccttaccatagcacctatcacatggttaatttgttccacaagtattttggggaggcaacagtgtcccaggcgctgtgtcagttaactctggggttgcagcagtgactgaggcagccctggtccctgctctccagtagaggcgagcccgttctagttgggg

SEQ ID NO: 465227 - DNA, 201 bp, Homo sapiens
aaaatcgtggctcccatcatttcccagccatttacttatgtggtcagttccagtacatatgtggagcattatcagggttttgataacctggacccatgtgsgaaacaactttctcagtagagtagagtacttatgtgcagtttcttttgcatttaaagacttcactcatttccaaagttacttaggtcagcatctttttct

SEQ ID NO: 465228 - DNA, 201 bp, Homo sapiens
aggccaggcctttattggccatttgggatggctgtacccacgcatcctgcacgcgtaagcctttccctgccttcgcttcaccaacaagctccactgtcacwgccttgagtggtttcagagcttggagcctgaacacttgctttcaacacgcttcctcccctagctgagcatgggtgagaatttgggaaagctcttaccttc

SEQ ID NO: 465229 - DNA, 201 bp, Homo sapiens
ctaactgctgatttaccttttgtaaactcactgcacaaaaaaatgccaagatgtgttggggaaagcctgtgtttctggaatcagatagaccaggtttaaaytgtggctctacaactttttagcagtcattttaccactctaaacttcagtctctttatctgtaaaacaaagatcctaatgtcgtactttacagtagggacg

SEQ ID NO: 465230 - DNA, 201 bp, Homo sapiens
ttgggaaattggggagcaagtgatgctatttactgaaaccagagaattctggtgggtgatagagcattccaaccttgtttagcctgaaggagctctggccyttgccctgtgcaccggagccccttctgccttcctcgggcttctactcagcccagccatggcatgatgccacacctgcctgcttcccaaggccaggccttt

SEQ ID NO: 465231 - DNA, 201 bp, Homo sapiens
gcagcaccccaacaagtaccttcgctggggttgcacttctcccaggggacagcagctgtgcaccgttttcagctgccacttgactgcatgactgcattggyagaaaggtgcaggtaagcagtttgaatgcaggagagaagagatgatggcgccagttttcccatccatcagaaggtccagtgggcctcgagtgagaacaga

SEQ ID NO: 465232 - DNA, 201 bp, Homo sapiens
tttagggtacatgtgcacaacatgcaggtttgttacatatgtatacatgtgccatgttggtgtgctgcacccactaactcgtcatttagcattaggtatayctcctaatgctatccctgccccatccccccaccccacaatggtccctggtgtatgatgttccccttcctgtgtccatgtgttctcattgttcaattccca

SEQ ID NO: 465233 - DNA, 201 bp, Homo sapiens
tccatgccaaccctcagtcccaaattgatatggcccttgtctggactcttccatccaacagaaggggaaagagaggccaggaggcattgggaaaattgtcygcagccacaccagcatcgagtggtggagttggtgtgtctgcctccatagcccgggactgtggctgggactgcagggagctgttaggatgagaaggccttc

SEQ ID NO: 465234 - DNA, 201 bp, Homo sapiens
atgttggtgtgctgcacccactaactcgtcatttagcattaggtatatctcctaatgctatccctgccccatccccccaccccacaatggtccctggtgtrtgatgttccccttcctgtgtccatgtgttctcattgttcaattcccacctatgagtgagaacatgcggtgtttggttttttgtccttgcgatagtttgct

SEQ ID NO: 465235 - DNA, 201 bp, Homo sapiens
aaaatggcactgggttggggaattcaggacccaaggagggattctcttggagaactcagaacactccagagggttcattgccaaaaatattgaatttgatmttttgctatttctttagcatattaaagaagacatgtctccctctcagagagaggatgatattctctggaaaaggaagttggccacacctgtcactggagc

SEQ ID NO: 465236 - DNA, 201 bp, Homo sapiens
ctgatgtcacactaacaacatgatgacagtgggctcgcaaaactcctgaaaatgggccgggtttggtggcttatgcctgtaatcccagcactttgagaggycgatgtgggcggatcatgaagtcaagagaccaagaccatcctggccaacatggtgaaaccccgtctctattaaaagaaattagctgggcatggttgcacg

SEQ ID NO: 465237 - DNA, 201 bp, Homo sapiens
ttatgctttaagttttagggtacatgtgcacaatgtgcaggttagttacatatgtatacatgtgccatgctggtgtgctgcacccattaactcgtcatttmgcattaggtatatctcctaaagctatccctcccccctctgcccaccccacatcagtccccagagtgtgatgttccccttcctgtgtccatgtgttctcat

SEQ ID NO: 465238 - DNA, 201 bp, Homo sapiens
tttgctcatgtaggtgactatttttactctcatttaacctctcattacaatttggacagcaaatatactcaggaggtatttttctccccaaatttccattgtctatgccttcaaatggatagtttataaacatgattgatggtcccagagaggaatcttgcagtattatctgtccattggaattagcttctgatgaggaaa

SEQ ID NO: 465239 - DNA, 201 bp, Homo sapiens
tcacaggcactccacaactcatgcaccaaggcagaaccgaaatcctgccccttgcctcccttcctgtcagtggttcctttgtctttttcttgctgggcccrgaggccttggcaccctccttgcctcctccctctccccaagccccacatttagtcagcatatcgcatgggtttcattttcaaaacacacccacaatcaaca

SEQ ID NO: 465240 - DNA, 201 bp, Homo sapiens
agctcacggtggcttcccattgtccccagagcagaaaccactcactcgccctgctcaggcaccctggcctccttgtgttccttgaacaccctgggtgtgtkcccacctcagggcccttgcacgggtctttcctctgcctgaactaatgctcctccccctgataccctgacagccactctgtcaccctgttaaagcctttca

SEQ ID NO: 465241 - DNA, 201 bp, Homo sapiens
ctagctgtggacacttgagcatttcatgtgtcaacttataaatatttattgggtactcttgatgcttctgtgcagctcctggggatgtagcactcaacgtrcctgagtctctattctcctgaagttggtgctcagtccagctttgagattcacattcctcatctacaaagtggcgattttatagttacttcttggcattat

SEQ ID NO: 465242 - DNA, 201 bp, Homo sapiens
tttattgggtactcttgatgcttctgtgcagctcctggggatgtagcactcaacgtgcctgagtctctattctcctgaagttggtgctcagtccagctttsagattcacattcctcatctacaaagtggcgattttatagttacttcttggcattatcagagatgatgatgatggtgatgataagaacagtaacaagagcg

SEQ ID NO: 465243 - DNA, 201 bp, Homo sapiens
atctgagctgcagcatttaatagaactagtttccttccagtccatgcaagtgattccatctcacaaaaccacagactgctttataattatccatcatgtgktatagtcatctttaaataaaatacataaaaatattttggatgtattattccaccaagaattagttttaaaaaagaaaagcaaaaggagcagtatcagctt

SEQ ID NO: 465244 - DNA, 201 bp, Homo sapiens
gtatctgagctgcagcatttaatagaactagtttccttccagtccatgcaagtgattccatctcacaaaaccacagactgctttataattatccatcatgkgttatagtcatctttaaataaaatacataaaaatattttggatgtattattccaccaagaattagttttaaaaaagaaaagcaaaaggagcagtatcagc

SEQ ID NO: 465245 - DNA, 201 bp, Homo sapiens
aactgttgccttgtaaccaggtttcattagcctgcttttagagtgaggctcataggtgtactcataaatgtttaacaattggcttgtggggaggggggcaktggtttctgatttgtagcatttgccagtttccatggtgtaaatattcccaccatggctgatctgatgtcacactaacaacatgatgacagtgggctcgca

SEQ ID NO: 465246 - DNA, 201 bp, Homo sapiens
tgaggttaggatctaggcatatcttttttggggggtgggagtgtcaccattcagtccactgcagcctccctcaccgacactgccctgtaatgcccagtctwtgactgtgctgctcaacatcccacatccttgagccgagcccttaggaagaatgtattgaatgcactgttcggtgattcagctcctaaatgatcccattat

SEQ ID NO: 465247 - DNA, 201 bp, Homo sapiens
taatcaaattatttccagagaaaataaatttgaatctcagagggctctgtgaaagcagggaccaatcaattccttctgctgttgatccactatttgacaayttgcagataaaggttgtgaaaacagaattttctctctttttttttttttccataacaacttcatttccatttctagccaacattcattttgcaaaaagcc

SEQ ID NO: 465248 - DNA, 201 bp, Homo sapiens
tcaaagtgtgccacactcttctatggcaaacgcattttgcctgacttctaactgttgccttgtaaccaggtttcattagcctgcttttagagtgaggctcrtaggtgtactcataaatgtttaacaattggcttgtggggaggggggcattggtttctgatttgtagcatttgccagtttccatggtgtaaatattcccac

SEQ ID NO: 465249 - DNA, 201 bp, Homo sapiens
ccacctaaataatccaggatgatctcataagatcttaaattaatttcatgtggaaagacccttattctaaataaggtcctgaggttaggatctaggcataycttttttggggggtgggagtgtcaccattcagtccactgcagcctccctcaccgacactgccctgtaatgcccagtctatgactgtgctgctcaacatcc

SEQ ID NO: 465250 - DNA, 201 bp, Homo sapiens
cttccaggcttgcgctctttaccttcaccccaatgcctttttccttggctgtggctatcacacacctacagacagagggaagtgaggggcagagtggtctyaaattgctgcaaaccattgtccaatgtcttctgtgattccagctagagaagatgtggaaacaaaaagcaacatcaggtagattcataaggggttaaacag

SEQ ID NO: 465251 - DNA, 201 bp, Homo sapiens
tgtcctagtttcctgtggctgccataataaatcaccacaaatttagtggcttaaaacaacagaaattttttctgttatataatagttctggaggccagacrtccaaaatctagttgtcagtaggatccttccatgtttggttcagcttctggtggctccgggtgttcctggggttgtaactgcgtcacttaaatctttgct

SEQ ID NO: 465252 - DNA, 201 bp, Homo sapiens
cttccaggcttcgcctgtactttcccaacttctgtatttgtatatgcataaagcagttgtggagctcccactgtgtcctctctcttaggtactagggctaygtggagggtaagagacaaagccctgcttgcgtagagcattcatcccagtgggggaggcagccagtatataagtcagtgcacagatcccattccttcgtga

SEQ ID NO: 465253 - DNA, 201 bp, Homo sapiens
aaatcagttcacgtaaaaaaatgagacattattcagtcatgttataatagaggtatgttcacaatgctgtagaattcatgggtagagaagaaaggcttcaytcatagcagagcacgtctgtagagggcatggttcacagaaagttgtgatgtcagagtccacgtgtccccctctggactatatagcctgttaggttacagt

SEQ ID NO: 465254 - DNA, 201 bp, Homo sapiens
tgcacggacatgcaggtggcaagtattcaaggtgactctggagtaggaacgtgtgtggctgcggggaggccacttccgcctgcctaccacccctgtggacyttgtttttggtgcttccccttcagccagcttagtttgggaggccagtggggagagatggacaggccaagctgggacgaggcaagagggcttgaggtcaat

SEQ ID NO: 465255 - DNA, 201 bp, Homo sapiens
tttttatcagagtatctgaccccaaaatccaagaagcgctgctgagggtgaatagagtctgaccagggtgagggggagggtggggaagagggaacatctgygggtgtgggcaggaggccacagtgtcgaagagccttcctagtggccttggggcccagtatagtcaggaagtgggttgtggaccgcagtcagagggctggc

SEQ ID NO: 465256 - DNA, 201 bp, Homo sapiens
agtacgatcggaagatggtggcattgacagctgaatgtgacctggaaacaagaaagaagatggaaaaccagtaccagagagagatgatggcaatggaggargcagaagagttgctgaaacgtgctggtgagagggtaagacaggtctgaaaggaaggcgttcacttccctttctctcagggatttgtcatttatccatcta

SEQ ID NO: 465257 - DNA, 201 bp, Homo sapiens
ggacaggatgggcagggaaggtgctgtaaggaggtgacagctgagcggatccccgaatggagtgggggacgggcaaggccttgtttctggccaggactcckacagttgttccgagtaagatgggatgctgtggatgggctttcagcaagaaagtgacccactctcatgtttcctttccaggcacccccgtggcaggggtga

SEQ ID NO: 465258 - DNA, 201 bp, Homo sapiens
ctgggattccgtccaggatatgacattacatgtactagtcatgtccataaattgatttttaatgggaagaaaagtaaaataaactttatttttaaatcctycaaatatattagctatccatttttcccttggtttccttgttgttgctgacttgttacttgttgacagaaacatgtcttatattgattatattcttttttg

SEQ ID NO: 465259 - DNA, 201 bp, Homo sapiens
gcggagcggagcaggccgacgtgggcaggcggaggtgagtgccgtggaggggctgcctcccggggcacgtccctgtccacaagggtccccatgagtcctcraggtcatgggaggcccatgtattttgtccatactttttaattttgttaccaatttattttttaaatagaatcttaagaaaataagttcacccagagccat

SEQ ID NO: 465260 - DNA, 201 bp, Homo sapiens
ttattattaatatttattatttatttttttcagagagggtctcacttcgtcttctgggctggagtgcagtggcatgatcatagctcactgcagcctcgacytcctgggctccaagtaattccttctgcctcagcctcccaagtagctgggagtataggcatgtgccactacacctggctaattttctttttttcttttttt

SEQ ID NO: 465261 - DNA, 201 bp, Homo sapiens
gggccacgcttcgccggctcctgagtgtggtactgcccacagcctcacagcctcagctgctggccctgctggattcggccaccgagagacatgtggaccaygcagctgagagcgatggcggagcggagcaggccgacgtgggcaggcggaggtgagtgccgtggaggggctgcctcccggggcacgtccctgtccacaagg

SEQ ID NO: 465262 - DNA, 201 bp, Homo sapiens
ttccatattatggctgagtagtattctatggtgtatatataccacattttctttattcacttgttggttgatgggcactttggttggttccatatttttgyagttgtgaatcgtgctgctataaacatgcatgtccatgtgtctttttcatataataacttattttccttgcatatatacccagcagtgggactgctggat

SEQ ID NO: 465263 - DNA, 201 bp, Homo sapiens
acaggtggggattatgagaactacaattcaagatgtgatttgggtggggacacagccaaaccatatcacatcccttctcccgtgtttcttcccttggggcrggctgttcacatgcacagtgacctgccagcacttgggaggagccacatatgcagtgtttttacagaagttgtgcacatgctcacttgaggctttcttcct

SEQ ID NO: 465264 - DNA, 201 bp, Homo sapiens
ttatttacacatgagaacagcacagctgtgccaagtgttctgtgatgctgacagtgaatgttttgcatcagggcctcatgccccaatgcccacgggggctrcacaggtgctataagtgtacgtcaggctcagtgcgagatgctaggaagtaatggagcgtgcggcagcatggacactcgggttgcctgtcacccaccatcc

SEQ ID NO: 465265 - DNA, 201 bp, Homo sapiens
tttttttctatgtagctttccttcgctttatagaggtatgattaacatatcataaaattcacacagtttaagagtacagtctgatgtgttactggaagtayatacagttttacaactaccgccagtcaggtttcagaacaccgtgactctgcgaactacctcgcattttcaagtagactttatttttagagcagtttcgga

SEQ ID NO: 465266 - DNA, 201 bp, Homo sapiens
gttcaagcaattctcctgcctcggcctcctgagtagctgggattacaggcacccaccaccaggcccagctaattttgtattattagtagagatggagtttsaccatgttggtcaggctggtcttgaactccggacctcaggtgatccacccacctcagcctcccaaagtgctgggattacaggcatgagccaccgcaccca

SEQ ID NO: 465267 - DNA, 201 bp, Homo sapiens
gatgtatttttaccataacataaattaatttttttctatgtagctttccttcgctttatagaggtatgattaacatatcataaaattcacacagtttaagrgtacagtctgatgtgttactggaagtacatacagttttacaactaccgccagtcaggtttcagaacaccgtgactctgcgaactacctcgcattttcaag

SEQ ID NO: 465268 - DNA, 201 bp, Homo sapiens
ggagtttgaccatgttggtcaggctggtcttgaactccggacctcaggtgatccacccacctcagcctcccaaagtgctgggattacaggcatgagccacygcacccaggctccaatactaattttaatgggactttagaggggatgtgaaaaaaaatcatagtttcatctgaaaatataaattatgaacccagatgggaa

SEQ ID NO: 465269 - DNA, 201 bp, Homo sapiens
catcagaccaatggaacaaaagataaaatctacacacacatctatcaatatgttttaaaccaacgggaggaggaggatgtatcatgcatgaatttggtaayaactgactgggtcttttgaaataaagacaaagatgaatttcctaattagattaaaatctaaatatagcaattagtaaaaagtaaatatgggctactagga

SEQ ID NO: 465270 - DNA, 201 bp, Homo sapiens
ttgtaatatacataagagacaaaagattaatgtttttaatatgtaaagagcatcttaatttataagagatggaatgccacaataggtagctatctatgatrtgagaatttcccaaagacgaggcttaggaggtgcccttgaagcacagtggcggcccgtgtcactctgtaggcaaaatcacgtggctgtgagttgcatttg

SEQ ID NO: 465271 - DNA, 201 bp, Homo sapiens
atgggaaggcaaaaagggctaagctagttccctggagcccttttataagacactaatcccattcttgaaggcagagcccttatgacctcatcaccttcagmaggcccccctccctaatagtggcatttgtggttaagtttcaacatgagttttggaagagacacaaatgttcaaacaatagcactctgctgaagaattggc

SEQ ID NO: 465272 - DNA, 201 bp, Homo sapiens
tcgaagggttgggtgggtgggatttaatataaggccactgtgggcattttgaagaaatgtcctcttcttaccaccaccctccacgtgcagaaaagttggamgaataaaatagcttcatgccgtaatcccaccagcagggagaaccattgctaacatgttcacatctcgccatccacaagactgtgaatatatttagtacat

SEQ ID NO: 465273 - DNA, 201 bp, Homo sapiens
gaccacaaacagcagcttatcacagctacaaacttaccttaaagttctggaggtcagaaatccaacatcggtttctccaggcaaaaatcaaggtgttggcrgatttgcctgcctttcggaagctttagggggagaatctgtttcctgctcacttaagtaattggcagggttcagcccattgtggttgtaggactgaggtcc

SEQ ID NO: 465274 - DNA, 201 bp, Homo sapiens
gcagggagatgcaatccatatcaagcagttgcaggagtctttctggcttaaaatatttctaccccacaggtggcaatatctcttgtaacaactcacagacrtagcttccaaggttcccgcaaggtatatgcccagttccaagagtcattttcctcagggaggtacaaagtatggcatccctgttaggtatttaatttactt

SEQ ID NO: 465275 - DNA, 201 bp, Homo sapiens
tttgaaaggcctgtttatccagcatcgctcttcataaatgcagtgacagaatgcatcaaaggcatctgctcctgctaatatgtgattaaagggtggtaatygtggatgattcttttccagagacaagaaggaaagtgaggaggactctggggggtgggaagccgggataaccatctctttttctttattcttagacaatga

SEQ ID NO: 465276 - DNA, 201 bp, Homo sapiens
aagaactgccaccatgcccgttctttctcatcaaggaagcaaatgcctccaagtccctgcagcaggtttccctcgcaacctgagagctgacccgtgggccytgctagctgcaggggaggtgcgagtcactttgccccccagcctctaagaagggagtcagcaggaaggaggggttagggcgcttttaggcgtccagctggc

SEQ ID NO: 465277 - DNA, 201 bp, Homo sapiens
ataaacatgattgatggtcccagagaggaatcttgcagtattatctgtccattggaattagcttctgatgaggaaaatttcagtttcactcgtattgaatwggttttgggggtctattgtgcttacacctgctaccttgaagatgccagatttatattgtaaaaaatggctgtggtgatttcattttccttctgaattaat

SEQ ID NO: 465278 - DNA, 201 bp, Homo sapiens
cgcacggtgcactgtacccactgtcctgcgcccagtgtctggcactccctagtgagatgatcccggtacctcagatggaaatgcagaaatcacccatcttstgcgtcgctcacgctgggagctgtagaccggagctgttcctattcggccatctttgctccaccccctagaatgggaatcttcaaatgcacatttatattt

SEQ ID NO: 465279 - DNA, 201 bp, Homo sapiens
taagaatccttggaaaaacacaatttttaacagcttcatacttttccactgtgaataaaaaatggacatggaaaggactggaggcaaagtctatacacagygtggttaatttttgcaaacacacgcacacgctaattggaaggaaatagaccaaatttcagtggatgtgatttctgggcagtgaaattacagatgattttc

SEQ ID NO: 465280 - DNA, 201 bp, Homo sapiens
gtgtgaaagagggttaggagggaagcgcaggaaggacagggaggatttgaggcagagagaggtagtcctacttcccctttttgcctcttccagggctgacycttctgtcatagtctggccagtgggtggagtagggagtgggcagtaatatggaaatcccaggaaggaagagttagtggcatctgtctgcatctttgcccc

SEQ ID NO: 465281 - DNA, 201 bp, Homo sapiens
caagaggcccactgtggagcccaagtctggcaggccatgtggtgtccccagagggactttgaattcaccgttgggctgcagagtatgctgggactgggagyacctgctgggtgaccccttcctttactgaaatcttctgcagatatccatgccaaccctcagtcccaaattgatatggcccttgtctggactcttccatcc

SEQ ID NO: 465282 - DNA, 201 bp, Homo sapiens
cagcacccaaatgcttgggggggatagaaggttctccgtgcgatggtgtccatgctatagagagatgcagtctatctctggcggattttcttctgtcatgkttcttgaatagtgtttcagagtctttagggggctttgagacccttttgagtgtttgatgcaagctttggcctttctgcagaaaattagaccattttgtac

SEQ ID NO: 465283 - DNA, 201 bp, Homo sapiens
tgtgtgaaagagggttaggagggaagcgcaggaaggacagggaggatttgaggcagagagaggtagtcctacttcccctttttgcctcttccagggctgastcttctgtcatagtctggccagtgggtggagtagggagtgggcagtaatatggaaatcccaggaaggaagagttagtggcatctgtctgcatctttgccc

SEQ ID NO: 465284 - DNA, 201 bp, Homo sapiens
aactagagtttttcctgaatataccaaatcaaacctgatttctgttttcctatgtgaaagaaatggcttattcatttcatgtgacctgagtctgcatatcytcttctgaacatctactcccctagggagggcttccaactacttaagaacaagcttctgaactcggcttcccttccgcagactgtggccatctatggatgc

SEQ ID NO: 465285 - DNA, 201 bp, Homo sapiens
ctctctctctccccgtttctgtgtgtgtctttcttcccctccttcccttttccctccctccatccacacttccatccatccatcatcaacatctatgtatstattcattcattcagcagatacctgtggagtgattactaggggcgttagagctgagtgatgggacccagagtcagagacacctgaaatcacccctgactc

SEQ ID NO: 465286 - DNA, 201 bp, Homo sapiens
agcccttcacccatctgtccatctgtccattcacccatgcagccatccacccatccatccacgtgtttatcatgtttcccctgcatcttcttttctgtgcygtaaaaaatgatatcaagaaagacatgacagacataacagcagcaacaacaatgagaagtcacattttccagcatctgttctgtgccagagactgggcta

SEQ ID NO: 465287 - DNA, 201 bp, Homo sapiens
gcacactttgcctttccaaataagagtttcaaatgttatttctctatctacctacctatcagtcattcattcatccactaatccatccatccatctacccrcccacccattcacttgttcttccacctacccatgcacccatacacctactcattccgccatccatcatccatttactcatctgtccttccacccatcttt

SEQ ID NO: 465288 - DNA, 201 bp, Homo sapiens
aggggatgtttctgaaaaataaaagtgatgattcacagccccatccccagctctacatttaaaaatcccacctttcaccactccctctctcagatcctgcmttttagcccctggaccttcttgctgccccctgagcattggagacacattcaggcatgggtccctttgaaggatctctgcctagaatgcttctgctctacc

SEQ ID NO: 465289 - DNA, 201 bp, Homo sapiens
aagacagtgcaacctgggacaatgatggaaattttagggagacaaatgtcagctaattatgaagaaggcctttctacttctctaagctcagctataagggsagttagcctggaggggcagctagctccccattgtggtgggtgcacatagcagaggctggggaatgcctggcagagaagatgttcagaaagcccgggtgtt

SEQ ID NO: 465290 - DNA, 201 bp, Homo sapiens
gcacagggcagtggggcactgggcctggcccaggaaaccattcttccctcctaggcctctgggactgtgattaaagggctgccgtgaagttctctgaaaasccttctgtttcccattctcttggctatggtgggctgcaaattttccacacttttacactcagcttcccttttaaatataaggtccagtttcaggtcattt

SEQ ID NO: 465291 - DNA, 201 bp, Homo sapiens
ggggctgtgtgacttgttcaggaccatccaactaatgggttgtgactcttgcaactcaaagccacgtccatttggataggaaacctgggtctttccagctyacccatcctagtctacttgccacacattcatagatacttaaggaagttccacaggaggcatttggcaaaaaaaaaaaaaaaaagaaaaggaaaaaggagc

SEQ ID NO: 465292 - DNA, 201 bp, Homo sapiens
caaatgattacaactttgtagcctcccaattcttacacctcgtttctttttctaattgctgtttcaatgtccttatctgcttgttccaccgtctctctcayttctattgattgggttttctctggtttatggatcttatattcctgcttttttgcatgcttggtaattttagattggatgctgggcattgtaaatttcatg

SEQ ID NO: 465293 - DNA, 201 bp, Homo sapiens
aaataaaataataaaataacaagatgctaatctctttcagaaacatccacacagacacaccccaaaataatgttttaccagccacctgggcacctcttagyccagttcagtgacacataaaattaaccatcacaatcatgtcttgagagtgggaggtcccttggagttcatgaagctggaaagatggagctgcatcttgct

SEQ ID NO: 465294 - DNA, 201 bp, Homo sapiens
ataaagcggctttcttatgacaatctgttgttttactgtggttccgctactaggtaaccttgttgggactttgaccctctcctgctctgtttaatgaggaytccgtaaggtgcaaattatgcaaacactccccacctaaatatgctaatgaatttatcactgcaatttacttcgcattcctgattttaatttgcactcaag

SEQ ID NO: 465295 - DNA, 201 bp, Homo sapiens
gcttacagacccaggtaggcggtagcggaggggcccttggggtcctggtaacctcggggagcaggggagtgacccgctctgattcggtttgggcgcaagcraacccaggcctggccgccgggcgcctgggccgcgccaactcgctctccccctcccacgcccgtccggcacctcctggcccgccaagccccagatgcgggt

SEQ ID NO: 465296 - DNA, 201 bp, Homo sapiens
tccattcattcatctatccctccgtctgtcgtctatccattcatccattcttccatctagcccttcacccatctgtccatctgtccattcacccatgcagscatccacccatccatccacgtgtttatcatgtttcccctgcatcttcttttctgtgccgtaaaaaatgatatcaagaaagacatgacagacataacagca

SEQ ID NO: 465297 - DNA, 201 bp, Homo sapiens
gacagtccccggagggtgcgtctgtccttaaccggaaatccatttatacagtgtcacatgtggtaaacatggtgtttactacaaacaactggctgaattgygttgccatcctgacgcagcctctcctcacctccacactggtccctgcgtgggacttccctctccctcctggagctctccacctcttaccacctcatcacc

SEQ ID NO: 465298 - DNA, 201 bp, Homo sapiens
gctgggcagctgacagtccccggagggtgcgtctgtccttaaccggaaatccatttatacagtgtcacatgtggtaaacatggtgtttactacaaacaacyggctgaattgcgttgccatcctgacgcagcctctcctcacctccacactggtccctgcgtgggacttccctctccctcctggagctctccacctcttacc

SEQ ID NO: 465299 - DNA, 201 bp, Homo sapiens
ttgatacattattattagctaaagttcacagtctgttcagatttccctagtttttaccaaatgccccttttctgtccagaggaaaagactttttaccgtgrccttacctttcttaggggaaagagcattgtcccagctcatgagttaagagctaacctgaagataaagcagtttacaccttcccaggaaaacagaatctta

SEQ ID NO: 465300 - DNA, 201 bp, Homo sapiens
gagcttctgagagacccctcaaaaactgccatctctgccgcagggcctttcctggactccagggctgactccaggcctcactccaggcctcctcttctccstataggatatataggctgtttccaacctcttttttttttgagacggagtctcactctgtcactcagcctggagtgccgtggcacaatcttggctcactgc

SEQ ID NO: 465301 - DNA, 201 bp, Homo sapiens
ccagcattgcagtggcagcttccacccgacctgtgacactcaacatgtttctcactctgttcccaactgcttgttctgcttagttatggccataggggccygactcaacaacagagtggtctccttcagcggcctggaagtgtgtccttacacccctggacgtggattaaccatgcatggattaaccatgcacgcccaggc

SEQ ID NO: 465302 - DNA, 201 bp, Homo sapiens
tgaggaaggaagtggagacttgagggacctcgagaagaagtgaaaggagggggtcagtgagttagaggactcgatggggtgtgtcagagaatggtttatgraatgttcctgaggagctgaggggtcttcttagacactggcatgctgggaacggttacctctccatcagcaatggttggtccagggctcaaacccaggtct

SEQ ID NO: 465303 - DNA, 201 bp, Homo sapiens
ttggcagtattgtttctttcattgtgctagggaggacaacagtgtatcttcctattagcagcatcctaaatgcaacagtgtactgggttatttattatttwaaaaattctaattattagcattatcgcaacatgctacattctttccaaaatgtgagaggtatatccgtaaaacaaaagctatggtaataactgttttggt

SEQ ID NO: 465304 - DNA, 201 bp, Homo sapiens
agagtcaaagaacgtaagacaaaaaaagaagttcagacctatgtctgttttctctattattagaatgagcttaggactctttctggatgctaccaacattrcctctaaactgtctcgaaattgtgtttgtacaaagtaagtgttccatgagtatttgtcgaattgaggtttttaaatatgtgtgtttagtagttttttatg

SEQ ID NO: 465305 - DNA, 201 bp, Homo sapiens
accaagacctgcccctgctcttgaggaacctgcattcttggagcaggaaaaaggcaggaatcatgttactatgtggtgtgtccactggtggttggggctgwagagatgtacacagtgggcagagtggtctgagagatgaggggcactcatgatatggacaggatgggcagggaaggtgctgtaaggaggtgacagctgagc

SEQ ID NO: 465306 - DNA, 201 bp, Homo sapiens
tgcgtggtggtttatcttttacattgcttattcataggctgtctcttacagagaggatttgaggaaggaatatttcctttgatttttatcaggctccttgrctgtggttataatggaggtggactcagtctcagcacatgctgggaccaggaggagggaggaactgggcaggactggctggtcctggaagcttctaggggc

SEQ ID NO: 465307 - DNA, 201 bp, Homo sapiens
ggtttcataggggtagaaacatgtcaaagtttatcacattgtgtactgtaaatatgtgcaggttattataaagaagttatacctcaattaagctgttttgytaaaaaaacaaactaaactctgtgtgttggatggaattattttctccactttatagatgaagaagcgtaggcatgcagagcttaatgatttgcctgaggt

SEQ ID NO: 465308 - DNA, 201 bp, Homo sapiens
tcagaataaccctatgagggacttctgcttgtgaccaagacagaataaaaagtatcagaattactccttacctaaaacaaaacaaacaaaatctatggaayagtgattttcaggacactggacagcagacaaaactgatccctaagaaataaaaaataaaggaattcaccccgtcattgtcccaggttactgccctaaaag

SEQ ID NO: 465309 - DNA, 201 bp, Homo sapiens
caggaggcccattcagtcagttaggggcttagaattttatttttattgatcacctcttaccaattcttgccatgccttgcccatcactcaactttttcctsttcagggacatccagctctcttgcccttctcattgtctgaggggaagctctgccttcttgtccctgacagttcagggcctctgcagtatgggttcttctc

SEQ ID NO: 465310 - DNA, 201 bp, Homo sapiens
tccaaggagggcatttgtgattaaagaaggaatgggacaggttcagctcagcccccttctctctgggagccagcattcctgtaggaagcccctcttatctsttttttaagtgatgaatttggtaaggaggcctgctcttgggggattgtgaatttgtttggatacagatgtgagccacattctccagtctagttttcatca

SEQ ID NO: 465311 - DNA, 201 bp, Homo sapiens
tctacccatccactcatccatttacccattcacccatgcttcccctccatctacccgtccacccatctgcccattatccctcatccacccatccatccatscagaattcatttagcaaaaatgtgttgattacttactgtctctcaggcactgggctaggcagtgaaggtatagggaacaatgagacatggttcttccatt

SEQ ID NO: 465312 - DNA, 201 bp, Homo sapiens
ggtaagacaggtctgaaaggaaggcgttcacttccctttctctcagggatttgtcatttatccatctacccactcatctgcccatttgcctcctccatccrtctacccatcatccatccaaccacccactcattcatctattcatccttccattcattcatccaaccattcccaccgtccatccatcatcatctgtccatc

SEQ ID NO: 465313 - DNA, 201 bp, Homo sapiens
ctgaaacgtgctggtgagagggtaagacaggtctgaaaggaaggcgttcacttccctttctctcagggatttgtcatttatccatctacccactcatctgyccatttgcctcctccatccgtctacccatcatccatccaaccacccactcattcatctattcatccttccattcattcatccaaccattcccaccgtcca

SEQ ID NO: 465314 - DNA, 201 bp, Homo sapiens
ttttccttctctgcggccaccccctcctccccgagctttcctgaaccttctgggtgctccaggactcccggccccgcgctccaaatgcttctccgttttcyaagcggggatggggaaactctggattcacatccgtgtgtcaggaaaccgttcccaggggaagtgcgtctgagctgaggcttacagacccaggtaggcggt

SEQ ID NO: 465315 - DNA, 201 bp, Homo sapiens
ttggttccaagtctttgctattgtgaacagtgccgcagtaaacatacatatgcatgtgcctttatagcagcatgatttatagtcctttgggtatatacccrgtaatgggatggctgggtcaaatggtatgtctagttctagatccccgaggaattgccaccctcacttccacaatggttgaactagtttacagtcccacca

SEQ ID NO: 465316 - DNA, 201 bp, Homo sapiens
ggagctttattgagtgacacagtagctcagaggaggcccaggagtgggtagctcctctctgcagctggtcatcctgatgtctgctcagctttggctgaacytggggcttgtatgggcttcagaggggaggaagtgtatgccagttggtccatggatggccatgaatggcctggaaaaggcaccacaagttcccactctggt

SEQ ID NO: 465317 - DNA, 201 bp, Homo sapiens
agtattaaatgatagtacccagccttcaatcactgtctattcagggagggagggagggagggacggaagaaagaaagaaggaaggaaggaaggaaggaagggctcttgttttagtaagtgagtacatataaataaaaacaacaaggaaagtagagcaaatgttagcactgcttgtccctggagggtcatctacaggtgatt

SEQ ID NO: 465318 - DNA, 201 bp, Homo sapiens
cagtattaaatgatagtacccagccttcaatcactgtctattcagggagggagggagggagggacggaagaaagaaagaaggaaggaaggaaggaaggaagggctcttgttttagtaagtgagtacatataaataaaaacaacaaggaaagtagagcaaatgttagcactgcttgtccctggagggtcatctacaggtgat

SEQ ID NO: 465319 - DNA, 201 bp, Homo sapiens
gcagtattaaatgatagtacccagccttcaatcactgtctattcagggagggagggagggagggacggaagaaagaaagaaggaaggaaggaaggaaggaagggctcttgttttagtaagtgagtacatataaataaaaacaacaaggaaagtagagcaaatgttagcactgcttgtccctggagggtcatctacaggtga

SEQ ID NO: 465320 - DNA, 201 bp, Homo sapiens
agcagtattaaatgatagtacccagccttcaatcactgtctattcagggagggagggagggagggacggaagaaagaaagaaggaaggaaggaaggaaggaagggctcttgttttagtaagtgagtacatataaataaaaacaacaaggaaagtagagcaaatgttagcactgcttgtccctggagggtcatctacaggtg

SEQ ID NO: 465321 - DNA, 201 bp, Homo sapiens
ccagtggcgattcctaggcacaatcacagaacgttacaacttggaactcctgggcttaagcagtcctcctgcttcagccttccaggtagctgggactgcasctacacaccaacatgcctggtttagtcatttttaaaacttctaagcagcaaccaggtgggagaaccactgcagccattaccccatacaaagcccatcacc

SEQ ID NO: 465322 - DNA, 201 bp, Homo sapiens
agaaagctttagtaaataatggtaataaaaaaagaagcagtattaaatgatagtacccagccttcaatcactgtctattcagggagggagggagggagggacggaagaaagaaagaaggaaggaaggaaggaaggaagggctcttgttttagtaagtgagtacatataaataaaaacaacaaggaaagtagagcaaatgtt

SEQ ID NO: 465323 - DNA, 201 bp, Homo sapiens
gggttcttcctctggcctctgcaaaattctacctgtgattctcagaaaatgtcacggatccctagtgcttcctttggattatcatgtttttgatttggaarcttaacattcttgagtgtctgtgatgtgctaggcgtgcggctggatggtgctattgtgtgcaaatcaccatgcctcaggtctttgacaggcttgtcatgc

SEQ ID NO: 465324 - DNA, 201 bp, Homo sapiens
gagaaagctttagtaaataatggtaataaaaaaagaagcagtattaaatgatagtacccagccttcaatcactgtctattcagggagggagggagggagggacggaagaaagaaagaaggaaggaaggaaggaaggaagggctcttgttttagtaagtgagtacatataaataaaaacaacaaggaaagtagagcaaatgt

SEQ ID NO: 465325 - DNA, 201 bp, Homo sapiens
gctgttccctggcaccagctgcaaccaattattattttaaagaggcagttaacaaccacttgaccatcacctgatggccacctgacattcctggtatttgkcggggctctctcctgccctgctcacatctgactagttacctactgtaacaataagacctctctcaatgcctcttttgccactggaggttgttgctagtgg

SEQ ID NO: 465326 - DNA, 201 bp, Homo sapiens
actctgcagtgagcaaattttgcctaatcataataatattgtcttttaaaatttgtagttgctgggattaacctataaacaataatcaggattgaattctkgttgcagaacaaaatatatatgctataaacctaaaaaatgctagaaggcagaagcagggaaggaggggcgggggtaaatgtggcccactaatctcaccag

SEQ ID NO: 465327 - DNA, 201 bp, Homo sapiens
tgagaaagctttagtaaataatggtaataaaaaaagaagcagtattaaatgatagtacccagccttcaatcactgtctattcagggagggagggagggagggacggaagaaagaaagaaggaaggaaggaaggaaggaagggctcttgttttagtaagtgagtacatataaataaaaacaacaaggaaagtagagcaaatg

SEQ ID NO: 465328 - DNA, 201 bp, Homo sapiens
gtgtatttctttgcaaagttacattactatataagactttttatatattattagaaatgtattcaaatatcttctttaaaatgctaagatattcagaactrtagggaaaagggagaaatcttaaaaagcacccagaaaacaaaaacagattcttctaaaaggccatcaggcacacttctgtcagaagacagtagaatggca

SEQ ID NO: 465329 - DNA, 201 bp, Homo sapiens
agagaattcacccttttcccaactttctgttctattcaggccctggggattcgatgacagccaccaacattggggagggtaatctctactatctgctgatwcagatactcatctcttccaggctggcaccgtggctcatgcctgtaatcccagcactttgggatgccgaggcgggtgaatcacttgaggtcaaattcaaga

SEQ ID NO: 465330 - DNA, 201 bp, Homo sapiens
aatggagattatactgtgtgtatttctttgcaaagttacattactatataagactttttatatattattagaaatgtattcaaatatcttctttaaaatgytaagatattcagaactatagggaaaagggagaaatcttaaaaagcacccagaaaacaaaaacagattcttctaaaaggccatcaggcacacttctgtcag

SEQ ID NO: 465331 - DNA, 201 bp, Homo sapiens
aaacagaacccatagcagatagatacatagatagggaggtaagagggtagatagataggaggagattttttcagatttattcagggaattggaacatgcarttatagaggctgagaaggtccactgtctgccatctggaggctacagaacccgcaaacctggtggtataattcagtctcaaggcctcagaactaggggagc

SEQ ID NO: 465332 - DNA, 201 bp, Homo sapiens
tttttttttttttttttttttttttggagacagagtctcgctctgtcacccaggctggagtgcagtggcacaatcctggctcactgcaagctctgcctccygggttcacgccattctcctgcctcagcctcccaagtagctgggactacaggcgcccgctactactcccggctaattttttgtatttttagtagagacagg

SEQ ID NO: 465333 - DNA, 201 bp, Homo sapiens
aatgagggtcatgagtgggtttgccccatggaggtaggctctacctaggtttgcttgttacttggtgtcagaaagcaggaattgtaagagaagggggtgamaggtgatgggatctgcagaactggccctggtttttccctcttcctaggtccaggcttccattcccacaactgtgttgctactttaagcattgatctagac

SEQ ID NO: 465334 - DNA, 201 bp, Homo sapiens
tcttctgtctttgtggaattacttttccacctctatttacctggataaataacttgtgtccttgctgtcctgaggtgttccctcagctcttggatgtctcsccttccaagaagccttacccgaacaccgtagattctcccactcattccaccccacttccaactcttccttaccatagcacctatcacatggttaatttgt

SEQ ID NO: 465335 - DNA, 201 bp, Homo sapiens
tgtgatctcggctcactgcaacctccgcctcctgggttcaagtgattcttctgcctcacccttccgagtagctgggattacaggcacccaccatcacaccygctaatttttgtatttttagtagacatgtggtttcaccatgttggccagattggtctcaaactcctgacttcaggtgatccgcccacctcagcttcccaa

SEQ ID NO: 465336 - DNA, 201 bp, Homo sapiens
gaaatggagtcttactctgtcacccaggctggagtgcagtggtgtgatctcggctcactgcaacctccgcctcctgggttcaagtgattcttctgcctcasccttccgagtagctgggattacaggcacccaccatcacacctgctaatttttgtatttttagtagacatgtggtttcaccatgttggccagattggtctc

SEQ ID NO: 465337 - DNA, 201 bp, Homo sapiens
ctgagaaagctttagtaaataatggtaataaaaaaagaagcagtattaaatgatagtacccagccttcaatcactgtctattcagggagggagggagggagggacggaagaaagaaagaaggaaggaaggaaggaaggaagggctcttgttttagtaagtgagtacatataaataaaaacaacaaggaaagtagagcaaat

SEQ ID NO: 465338 - DNA, 201 bp, Homo sapiens
agcccccctcctggctgctttcatgggctggcattgagtgtctgcagcttttccaggtgcatgatgcaagctgtcagtggatctaccattctggggtctggagtacagtggccctcttctcacggctccactaggtgatgccccagtagggactctgtgtgggtgctccaaccccacattttcctttcacactgccctggc

SEQ ID NO: 465339 - DNA, 201 bp, Homo sapiens
ccccttttatatattgaccttctactatggagatgatgacccaactctccttcttacacacatgcatgtgcagagacacacacacacacacacacacacacgcttcctctctctagttatctaatgcaattaaagcacaattttaagtaaatatttggcatttacaacattaataactaataatttttatatttagctgag

SEQ ID NO: 465340 - DNA, 201 bp, Homo sapiens
tccccttttatatattgaccttctactatggagatgatgacccaactctccttcttacacacatgcatgtgcagagacacacacacacacacacacacacacgcttcctctctctagttatctaatgcaattaaagcacaattttaagtaaatatttggcatttacaacattaataactaataatttttatatttagctga

SEQ ID NO: 465341 - DNA, 201 bp, Homo sapiens
atccccttttatatattgaccttctactatggagatgatgacccaactctccttcttacacacatgcatgtgcagagacacacacacacacacacacacacacgcttcctctctctagttatctaatgcaattaaagcacaattttaagtaaatatttggcatttacaacattaataactaataatttttatatttagctg

SEQ ID NO: 465342 - DNA, 201 bp, Homo sapiens
tatccccttttatatattgaccttctactatggagatgatgacccaactctccttcttacacacatgcatgtgcagagacacacacacacacacacacacacacgcttcctctctctagttatctaatgcaattaaagcacaattttaagtaaatatttggcatttacaacattaataactaataatttttatatttagct

SEQ ID NO: 465343 - DNA, 201 bp, Homo sapiens
tcctgtctcagcctcccaagcagctggtattacagatgcctgccaccatgcccggctaattttttgtatttttagtagagatgggatttcactatgttggscaggctggtcttgaactcctgacctcgtgatccgcctgcctcagcctcccaaagtgctgggattacaggaatgagccaccacacccggctattaagtttg

SEQ ID NO: 465344 - DNA, 201 bp, Homo sapiens
atggggagagaggctgccaggggccaggctcgctggcctgagactttatagacagcctaacagcctgccccgcaggaaggctggcgggagtggagccctcycccgtcaacaggtgtcagctgtcacccaggacctaggcagggatgaggaagcacacaaaaggctccaccagtccccctttttgtgtctttctcctcctcc

SEQ ID NO: 465345 - DNA, 201 bp, Homo sapiens
ttttctagaatgtccttataattggaatttgtcaaaggtcagttaactatatttgtgtgggtctatttctgggctctctgttctgttccaatgatctatgyacctgttccttcaccaataccacactatcttgattactgtagctatatagtaagtcttgaaattagtatgagttctccaactttgtttttctttagtact

SEQ ID NO: 465346 - DNA, 201 bp, Homo sapiens
cagctcccctctttctaggtccccagagaggtggcccagcggctggcctgtttctcactgggaatgcgaggggcacccgggccggcccagggctgacccamagcaggctcgggcagtgggtgctcagctggtctgcactgaacgcaaccggaagtgagggtccttttccttctctgcggccaccccctcctccccgagctt

SEQ ID NO: 465347 - DNA, 201 bp, Homo sapiens
tccatctccacccaaccgctcactcactcaggtgctaaggtaagaaagagttggaagaccctccccctgggcctttcccctgtgcattctgtttggaaccstctccctccacttctcagtctggggatctcaccggatccttcaggcttcacctcgggtgctgcctccactggctgagtcacttgctgtatttgtgcctgg

SEQ ID NO: 465348 - DNA, 201 bp, Homo sapiens
aaggcagagttttgcagttctgggagctgcagaaacttctcttgacctgcaaagccctcgggggagctgcatggacttgctggtgattgccttcttacccrcgtcttccccaacccctctccagcaacagtccaaggtgagaaagtcacggtccaagagtaaaagcaagggagagcttctgaagaagtgcatcgaagacaa

SEQ ID NO: 465349 - DNA, 201 bp, Homo sapiens
agacagaagacctgttagttccttccttccttcagtgatgccacctagcagataaggacataggccctggagtctcacacgccttgccatgaactgggctyccttagtaatgcccatgtgactttgcctaagttacttaacccctctgggcctcacatgaggttatcataaggataggtaatcaatacatgtgaattctct

SEQ ID NO: 465350 - DNA, 201 bp, Homo sapiens
ttgtgtgaagatcaaaggctctgaaactgagctccttccagaagaacatacctctctcctcccctctctggcctaaggcagagttttgcagttctgggagmtgcagaaacttctcttgacctgcaaagccctcgggggagctgcatggacttgctggtgattgccttcttacccacgtcttccccaacccctctccagcaa

SEQ ID NO: 465351 - DNA, 201 bp, Homo sapiens
acccatacctgagtgcagtggcgccatctccactcactgcaacctctgcctcctgggttcaagtgattctcctgcttcagcctcccaagtagctgggattmaggcacccaccaccatgcccagctaatttgtgtatttttagtagaggcagggtttcaccatgtgggccagactggtctcgaactcctgacctcaagtgat

SEQ ID NO: 465352 - DNA, 201 bp, Homo sapiens
ctctgctcctagtgtccttatttagtttccatgttttcagactgttttctccgctgtcatggaagcattgcaagaacagaacagggacctcattcatagcrtccccttctcagagaggctgacaggtctgaggtcccgtggctagttaggaggtggacacgccttgggtctgctctctgactgcagagctgaggttctgcc

SEQ ID NO: 465353 - DNA, 201 bp, Homo sapiens
aggcggatcacgaggtcaggagatggagaccatcctgactaatatggtgaaaccccgtctctactaaaaatacaaaacaaaaaaattagctgggcgtggtsgtgggcgcctgtagtcccagctactcgggaggctgaggcaggagaatggcgtgaacctaggaggtggagcttgtagtaagtcgagatcgcgccactgcac

SEQ ID NO: 465354 - DNA, 201 bp, Homo sapiens
ttgtaggatttgcccatttccatggtgtaaatcctcccaaggccagtttcaggctaccggcttgacatcactgcctgggagttgggcagagatgtgcctgrtgggctccctgcctggccctctctagggctatcccctcccagccccagcctataccccgggcttccaggtcctgtccgccaacgtggctctgctcctagt

SEQ ID NO: 465355 - DNA, 201 bp, Homo sapiens
aagtagatcattccctgaccttacagaactagggcagtgtacctccacctcaaagctggccgaagcgttagtgcacagtggaacctagggtgaggtaggcyctttttgatatcccctgaaggcatttggtgaatgaaacagaacgtgtgaattaaatgggtatatcagtttcctgtggcttccctaacaaatgttcacaaa

SEQ ID NO: 465356 - DNA, 201 bp, Homo sapiens
gagagcctgctctcagtttcctaagcaccaaggcctggggataaaattgttgttttaatcttcatgttttcatctgtaaaatgggtgtaatgagggtatayggggccaggtggagcaatgttagtggatgcttagtgcattccccatctcttggccgttctcacccaccgttgtgtcaccaccagggaacccctgcatttc

SEQ ID NO: 465357 - DNA, 201 bp, Homo sapiens
tttgtgatctgcccgcctcagcctcccaaagtgctaggattacaggtgtcagctgcggtgcctggcccaggagtcatttcctattggagggctcagcaggygtttgtgtctggccgtgcacacatcctctttaggatggtggttggtggtgttcactgagggcttactctgcagtaggcgggtgcccagaaggacctagtg

SEQ ID NO: 465358 - DNA, 201 bp, Homo sapiens
ttgccactgccaagagaggttgttttagaaatagggacacttcagacagaagacctgttagttccttccttccttcagtgatgccacctagcagataaggrcataggccctggagtctcacacgccttgccatgaactgggcttccttagtaatgcccatgtgactttgcctaagttacttaacccctctgggcctcacat

SEQ ID NO: 465359 - DNA, 201 bp, Homo sapiens
ctgggccagcacggtcaggcttttgcacggatggagccgcagctcccttcgcttgctcagtcccgagatagcggcagagaaggtggtgggagagcctgctytcagtttcctaagcaccaaggcctggggataaaattgttgttttaatcttcatgttttcatctgtaaaatgggtgtaatgagggtatacggggccaggtg

SEQ ID NO: 465360 - DNA, 201 bp, Homo sapiens
gcaatacaaagggcttccttgctgcaggcatcactgccatggtggcctcccttggaaccactgaagccaggggccaggatgtgtctggggtgtggtggggygcagctgggggcgtggccaagccctccctgagtcacatgtgcttttctctgcgcagtgggagatgcctttgctgtcagctacgcagccacgctccaggct

SEQ ID NO: 465361 - DNA, 201 bp, Homo sapiens
ccccacacccagctgtgtgcaatacaaagggcttccttgctgcaggcatcactgccatggtggcctcccttggaaccactgaagccaggggccaggatgtrtctggggtgtggtggggcgcagctgggggcgtggccaagccctccctgagtcacatgtgcttttctctgcgcagtgggagatgcctttgctgtcagctac

SEQ ID NO: 465362 - DNA, 201 bp, Homo sapiens
agtgtttagcattgattatcaagcatgcacggagagtgttcagcttgtgagctaaattcattcctctcttcctctcccccagcctcccatcctccctcccrtcccaacattcaatatttattgaactccaattcagtttcaggcattgtggttggacactagttttaagaacccagtcttttttttttttttttcaattat

SEQ ID NO: 465363 - DNA, 201 bp, Homo sapiens
atactgtcatgtgtaatgatgtgaaagagacttgtgatggggatgcatccttatggtgatagctgcctgtgagccctggtcagattagcagaccataaagagaagtggtcagggcgagtagcccttccttgagtctttctcaagagaattgaaagcatactgaaaatgggagatctgggaagcaaaactgagcagcttcct

SEQ ID NO: 465364 - DNA, 201 bp, Homo sapiens
tgctcatgtcacgccccttatttaatttggtactgctttttggtatggcatcttattttcagtgtttgatagttgaagcagctgaggctcagctaggctgrgaggtttacccacagtgatacatctggtgagtgaagaatgggacttgagcttcctcactatttaggctcaggcacatttatattttacagacattctctg

SEQ ID NO: 465365 - DNA, 201 bp, Homo sapiens
tgttaccaatttattttttaaatagaatcttaagaaaataagttcacccagagccataaatatttcatgcatgcccattaaagaaaacgtaaaaaaaaaaatgcataaaaagaggaagaagagaaagaaatatccatggttttatgacctagaaaaatgactgctagcatcctgttacatttcttcctccagaatgtgttt

SEQ ID NO: 465366 - DNA, 201 bp, Homo sapiens
agtggtctgctctaaagcagaaggcagccttcagagttggattggggtaaaaaatcaaccgggctcttctgagctgtgtgaccttcaataacgttatttcrcttctgtgagcctcagttttcctatttgtaaaatgggggcaccaacactgcgttgttgtaacagcttcatgataacacaaagaaagcactgaaaataata

SEQ ID NO: 465367 - DNA, 201 bp, Homo sapiens
attcagtaaatgccagctgctgtcatccccatcatcatcatcattgttgttattgttgctgtttcttctttgatgagctatgcactgtgctgactgctgggagaaaggagaacatgtcaacgatgctcctgagtccctgacctcagcatttaaaatctggtgaggaaatcagctattagggaagacaattccagaaccaag

SEQ ID NO: 465368 - DNA, 201 bp, Homo sapiens
aatgaactcttctcacatttttctttatttttttgccagcatagtggtggtcagtggtctgctctaaagcagaaggcagccttcagagttggattggggtwaaaaatcaaccgggctcttctgagctgtgtgaccttcaataacgttatttcacttctgtgagcctcagttttcctatttgtaaaatgggggcaccaacac

SEQ ID NO: 465369 - DNA, 201 bp, Homo sapiens
tttttttttgaaaaaagtctaataaaatatacaaacccttggcaagagcaaccattaaaaaatataaaagacaataatattaagagtataaaaagcaacaygactatagatgcagtagagttttttaaaataagagaatgttatgaacaactttatacagatgaattcaaaaactgaaatgaattcaaaaactagaaaaat

SEQ ID NO: 465370 - DNA, 201 bp, Homo sapiens
gggaaaagggagaaatcttaaaaagcacccagaaaacaaaaacagattcttctaaaaggccatcaggcacacttctgtcagaagacagtagaatggcaccrtcaacatcttgagggaaagttattttagccatgaattatgtagccagccatactatcagtcaaactgagaactaagtgacagcattgccagatgtgagaa

SEQ ID NO: 465371 - DNA, 201 bp, Homo sapiens
tgtgtttcttctgaagtacagcataaacaaaataaaaaacaaaactaccatagaattgataaagtgaagagatttttttttgaaaaaagtctaataaaatatacaaacccttggcaagagcaaccattaaaaaatataaaagacaataatattaagagtataaaaagcaacacgactatagatgcagtagagttttttaaa

SEQ ID NO: 465372 - DNA, 201 bp, Homo sapiens
gaagctcctgtttttgacctaacttagctttgacagtctagaaggtcagggtggcctcattggtctgtcagaaaaaatgtaaccttgactacaatctgcaytgtggctgcaagaatgaggaataggctagttgtcttctagctcctaaataatacattcggtatcccatggtctggagccattttgaattaaactaattgt

SEQ ID NO: 465373 - DNA, 201 bp, Homo sapiens
ctgtgtttcttctgaagtacagcataaacaaaataaaaaacaaaactaccatagaattgataaagtgaagagatttttttttgaaaaaagtctaataaaatatacaaacccttggcaagagcaaccattaaaaaatataaaagacaataatattaagagtataaaaagcaacacgactatagatgcagtagagttttttaa

SEQ ID NO: 465374 - DNA, 201 bp, Homo sapiens
actgtgtttcttctgaagtacagcataaacaaaataaaaaacaaaactaccatagaattgataaagtgaagagatttttttttgaaaaaagtctaataaaatatacaaacccttggcaagagcaaccattaaaaaatataaaagacaataatattaagagtataaaaagcaacacgactatagatgcagtagagtttttta

SEQ ID NO: 465375 - DNA, 201 bp, Homo sapiens
aactgtgtttcttctgaagtacagcataaacaaaataaaaaacaaaactaccatagaattgataaagtgaagagatttttttttgaaaaaagtctaataaaatatacaaacccttggcaagagcaaccattaaaaaatataaaagacaataatattaagagtataaaaagcaacacgactatagatgcagtagagtttttt

SEQ ID NO: 465376 - DNA, 201 bp, Homo sapiens
aaactgtgtttcttctgaagtacagcataaacaaaataaaaaacaaaactaccatagaattgataaagtgaagagatttttttttgaaaaaagtctaataaaatatacaaacccttggcaagagcaaccattaaaaaatataaaagacaataatattaagagtataaaaagcaacacgactatagatgcagtagagttttt

SEQ ID NO: 465377 - DNA, 201 bp, Homo sapiens
ccaaagatggctctatttcattgctctgagaagcaacccttttggattttaacatctctgaaacttggcaggtgccatgggttcattggcagtattgtttytttcattgtgctagggaggacaacagtgtatcttcctattagcagcatcctaaatgcaacagtgtactgggttatttattatttaaaaaattctaattat

SEQ ID NO: 465378 - DNA, 201 bp, Homo sapiens
ttaacggctaaaattttgcctaatttgatgacaactataaactcacagatttaagaagctcagtgtatcccaagcataagaaacttgaggaaaatttttcyaaggtgcatcataatcaaattgctccaaaccattgataaagagaaaatcttcaaagcaactgaaggaagaagatacattatgtaccctacaaagcaaaga

SEQ ID NO: 465379 - DNA, 201 bp, Homo sapiens
gccctttgttccagcgcaccatggtgcacaggtgtactgtcagcccacacctggtaagcacacggtacatgttaaatgatatcttcactgctctgcccacrtcccccttgctggtatgtcagtcttggttggctgagccctgtgacaacaggtgtcccacacttgcacccagaccaggaatacactgtggtgtaagctcat

SEQ ID NO: 465380 - DNA, 201 bp, Homo sapiens
ctcttttaaaaaataagacttcaagattacttaaggattagtagcagtaatctttctaccctctgtaaaaatttcattatcttgtacttttattaaatatrtatagcatgaaatatttctcattttctaataacttttacattttattgtagtatggggacatttcaagagaagttcaagggacttctgaaaatggagtaa

SEQ ID NO: 465381 - DNA, 201 bp, Homo sapiens
ccctttgaaagataagtgtctatttcagaatgggatcctttcatcattttcaccatttcattatgctaatagtatcatttcgttattttacttgaagtacyacacaacagtaatttaggttggttgtgatgccaagttcagtggattgggtgtgtcccagatttgtagaaaagaacaacaaaaaatcagccagatatgatg

SEQ ID NO: 465382 - DNA, 201 bp, Homo sapiens
atagggtacctgacagttttcaaagttgtttaatgttttttaggtctttaaccttcctaatcctacaaggtggttacaatcccacatattatccttgtgtsaggggtctccagcacctgccttagggtcagtgatttgctagaagtacttacagaactcagaaaagccattctgctcagttacagttcattacagagaaag

SEQ ID NO: 465383 - DNA, 201 bp, Homo sapiens
agataagtgtctatttcagaatgggatcctttcatcattttcaccatttcattatgctaatagtatcatttcgttattttacttgaagtaccacacaacaktaatttaggttggttgtgatgccaagttcagtggattgggtgtgtcccagatttgtagaaaagaacaacaaaaaatcagccagatatgatgtaacattat

SEQ ID NO: 465384 - DNA, 201 bp, Homo sapiens
atatagctgtgtgtgatagcacatgcctgtattcccaggttttcaggaggctgaggcaggaagatggcttgaaaccaggagttcgaggatgcagtgagctrtgatctcaccactgcactccaacctggatggcagaacaagaccctctctcaaacaacaacaacaacaaaacaaaacttcctgagagcttggtcaggaaag

SEQ ID NO: 465385 - DNA, 201 bp, Homo sapiens
gggtggtgttttctaccttctgacatcagaatgtgaagaagaggacactaaaaccctcactgagcatcctccatagactgtcctgaaccactctgtggtcmgtgtgtattatccggaaggaatgctggttggttgctttgtcaaaacagcaaaaaggaggggcagtgtcaggcagttggttgatattggggtggagtcttt

SEQ ID NO: 465386 - DNA, 201 bp, Homo sapiens
gggggcagttaccctcatgctgttctcgtgatagtgagtgagttctcatgagatctgatggttttgtaaggggcttttcccccttttgcttggcacttctkgctgctgccatgtgaagaaggatgtgtttgcttccccttctgccatgactataagtttcctgagggctggggaggcaattaaatttcttttctttataaa

SEQ ID NO: 465387 - DNA, 201 bp, Homo sapiens
ttcacggttctgcagggctggggagacctcaagaaacttacaatcatggcagaagtgggaagcaaacatatacttcttcacatggcagcagcaaggagaaktgcagagcaaagagggagaaaaatcccttaaaaaaccatcagatctcatgagaactcactctcaggagaacagcatggaggtaatcacccccatgattca

SEQ ID NO: 465388 - DNA, 201 bp, Homo sapiens
gccttgcagttcaatgtcagactgccgtgctagcaatcagcgagactccatgggtgtaggaccctccaagccaggtgggggatataatctcctggtgcgtygttttttaagcccttcggaaaagcgcagtgttagggtgggagtgacccaattttccaggtgccatctgtcacccctttctttgactaggaaagggaactc

SEQ ID NO: 465389 - DNA, 201 bp, Homo sapiens
ctacagaggcaggcaggcctccttgagctgtggtgggctccacccagtttgagcttccgggctgctttgtttacctaagcaagcctgggcaatggcgggcrcccctcccccagcctcgctgccgccttgcagttcaatgtcagactgccgtgctagcaatcagcgagactccatgggtgtaggaccctccaagccaggtgg

SEQ ID NO: 465390 - DNA, 201 bp, Homo sapiens
tttaagtctgcagaggttactgctgtctttttgtttgtctgtgccctgcccccagaggtggagcctacagaggcaggcaggcctccttgagctgtggtggkctccacccagtttgagcttccgggctgctttgtttacctaagcaagcctgggcaatggcgggcgcccctcccccagcctcgctgccgccttgcagttcaa

SEQ ID NO: 465391 - DNA, 201 bp, Homo sapiens
ctgtcagacagggacatttaagtctgcagaggttactgctgtctttttgtttgtctgtgccctgcccccagaggtggagcctacagaggcaggcaggcctscttgagctgtggtgggctccacccagtttgagcttccgggctgctttgtttacctaagcaagcctgggcaatggcgggcgcccctcccccagcctcgctg

SEQ ID NO: 465392 - DNA, 201 bp, Homo sapiens
gttctcttcttccttctgtcagtactcacacccttggtgatctatcccctggcagctcccgaatttccatctccagccaagaccttctctgagctccaccrtggatctgcatgcctacctgacatggcccgtggaggctcacaggcactccacaactcatgcaccaaggcagaaccgaaatcctgccccttgcctcccttc

SEQ ID NO: 465393 - DNA, 201 bp, Homo sapiens
gtcagccaacctctcggagctgctcttgctggacagcattgctggtctcaccatttgggactctgtgggaaacaggacctcggaaggattccaggcttttrgcaagaagtttctgcaaggtaacagcaaagcgttctgaagtcagggatgacaaatgagaatatgtacagatacttccaggtgaatgtgttctgggtcagg

SEQ ID NO: 465394 - DNA, 201 bp, Homo sapiens
ctttgttcgtttctttttattcttttttctctaaacttcccttcttgctttatttcattcatttcatcttccgtcactgatagcctttcttccagttgatygcatcggctccggaggcttctgcattcttctcgtagttctctagccttggttttcagctccatcagctcctttgagcacttctctattggttattctagt

SEQ ID NO: 465395 - DNA, 201 bp, Homo sapiens
ggctgcttggttggcttgtagactctgccaccctcactggttggctttcagaggttcgtttcctgaggtgggctgttattggtcaattaagcaggtttaaraccaattctgggattcagttggtaccatggcttcagaacttagtttccctaggagggcaaagacatcttttattcttagtaggacctcatttacagatga

SEQ ID NO: 465396 - DNA, 201 bp, Homo sapiens
tggatggaagctcaactgaatcagaggcctgggtcaggctgatgctgttgcatattgtccgcgtgttctttggaaaatggcatttttgttaattttctttytttttttttttttttttttgagacggagtctcgctctgtcgcccaggccggactgcggactgcagtggcgcaatctcggctcactgcaagctccgcttcc

SEQ ID NO: 465397 - DNA, 201 bp, Homo sapiens
gctgcccttaacattttttccttcatttcaactttggtgaatctgacaattatgtgtcttggagttgctcttctcgaggagtatctttgtggcattctctrtatttcctgaatctgaatgttggcctgccttgctagattggggaagttctcctggataatatccttcagagtgttttccaacttgtttccattctccccg

SEQ ID NO: 465398 - DNA, 201 bp, Homo sapiens
agctcaggcagtgtggctccctgtgcaccgtggtaacctttaaaccgtcatgcttctcacacgcctggaactcttaccgactccatgcctccgtactcacsgcacacatcgctcatcagtcatgctgttccttccctctgagcctagataaggcctcagaatccttcttaacacgctattattgacagaagctactagtgg

SEQ ID NO: 465399 - DNA, 201 bp, Homo sapiens
catattgtccgcgtgttctttggaaaatggcatttttgttaattttctttttttttttttttttttttttgagacggagtctcgctctgtcgcccaggccrgactgcggactgcagtggcgcaatctcggctcactgcaagctccgcttcccgggttcacgccattctcctgcctcagcctcccgagtagctgggactaca

SEQ ID NO: 465400 - DNA, 201 bp, Homo sapiens
atggtctttacaatttggcatgattttgcggtggctggtaccagttgttcctttccatgtttagcgcttccttcaggagctcttttagggcaggcctggtsgtgacaaaatctctcagcatttgcttgtctgtaaagtattttatttgtccttcacttatgaagcttagtttggcgggatatgaaattctgggttgaaaat

SEQ ID NO: 465401 - DNA, 201 bp, Homo sapiens
atgtcccagctaagtgaccttcagtgctttcctgccttcaatgatataaagatgaatccgctattcttaactcgtgttcaaagcatggagcatggagccaygagcagagcatagatgcagcctcagatggacctgggtgactcccagccttgtgactgagaagctgcgtggcttctgcaaagctattgaagtgctctggtt

SEQ ID NO: 465402 - DNA, 201 bp, Homo sapiens
ctgcggactgcagtggcgcaatctcggctcactgcaagctccgcttcccgggttcacgccattctcctgcctcagcctcccgagtagctgggactacaggygcctgccaccgcgcccggctaattttttgtatttttagtagagacggggtttcaccttgttagccaggatggtctcgatctcctgacctcatgatccacc

SEQ ID NO: 465403 - DNA, 201 bp, Homo sapiens
tcaggtgatccacctgccttggcctcccaaagtgctaggattacaggcgtgagccaccatgcccggccactgttgttgttatttttattcttattgctccmttcttgttatttatgcccatgcttatctctacctactgggctctacattccctgagggcagtgtccaaatcatatttatctgtgaactcaccgctacgcc

SEQ ID NO: 465404 - DNA, 201 bp, Homo sapiens
ggactgcagtggcgcaatctcggctcactgcaagctccgcttcccgggttcacgccattctcctgcctcagcctcccgagtagctgggactacaggcgccygccaccgcgcccggctaattttttgtatttttagtagagacggggtttcaccttgttagccaggatggtctcgatctcctgacctcatgatccacccgcc

SEQ ID NO: 465405 - DNA, 201 bp, Homo sapiens
ccaaagtgctaggattacaggcgtgagccaccatgcccggccactgttgttgttatttttattcttattgctccattcttgttatttatgcccatgcttakctctacctactgggctctacattccctgagggcagtgtccaaatcatatttatctgtgaactcaccgctacgccaaggaatgtgacattgattttcacct

SEQ ID NO: 465406 - DNA, 201 bp, Homo sapiens
tccagaggtcatttcagtacagcagggtccaaggcacccatcacaactcattggcatcagctatctggtgaggtcaaaggacccaggcatattaaaaaaamaaaaaaaaacaacaacccacactgtaatcaggcaaggatattctgcaggctttagaggttatctttcaggagctgctcaagggccagtcctttctcctga

SEQ ID NO: 465407 - DNA, 201 bp, Homo sapiens
tcactgtatggggaaggtctgactatgacttctttccccgtcattgtcattgtcactgccattatctttatcactttacgttcattatcttagctctaggwtatataaaaataaaatgagatgagcatggtccacacctaaagtcccagctactcaggaggctgaggcaggaggatcactggagcctgggagttcgagact

SEQ ID NO: 465408 - DNA, 201 bp, Homo sapiens
aggtcatttcagtacagcagggtccaaggcacccatcacaactcattggcatcagctatctggtgaggtcaaaggacccaggcatattaaaaaaaaaaaamaaaacaacaacccacactgtaatcaggcaaggatattctgcaggctttagaggttatctttcaggagctgctcaagggccagtcctttctcctgaatgtg

SEQ ID NO: 465409 - DNA, 201 bp, Homo sapiens
caaagggcttccttgctgcaggcatcactgccatggtggcctcccttggaaccactgaagccaggggccaggatgtgtctggggtgtggtggggcgcagcygggggcgtggccaagccctccctgagtcacatgtgcttttctctgcgcagtgggagatgcctttgctgtcagctacgcagccacgctccaggctggagac

SEQ ID NO: 465410 - DNA, 201 bp, Homo sapiens
tgtggcgttttagggctataagtaaactctgttagggagaaaggcagattggaggacaagcttaggtgagaacagtgactggcagagttagacgggctccrtcacccacccggccacatcaggcgaaggcctccagtcctggtacagcctctcccgagcaggatgggctgagcacagcccacccaaacttacctatgggat

SEQ ID NO: 465411 - DNA, 201 bp, Homo sapiens
aagtgtgagccacagcgcccagccagtctggttctatataatgatactactgctactactattgctattgcttttaaaaaattttattattattattattwtttttttttgagacagcatttcactcttgtcacccaggctggagtgcaatggcatgatctcagctcactgcaacctcctcctcctgggttcaagccattc

SEQ ID NO: 465412 - DNA, 201 bp, Homo sapiens
ctcaggtgatccacttgccttggccttccaaagtgctgggattacaggtgtgagccaccgcccccggcctgctattgctactactgctgctgctgctgctratgttactactactacctacagccaccaatagcagtaatattttatagcattccctagtgccaggcactcttcagggttctatattacctaagttaatct

SEQ ID NO: 465413 - DNA, 201 bp, Homo sapiens
atttgatcctgtcatgatgatgttagctcgttattttgctcattagttgatgcagtttcttcctagcctcaatggtctttacaatttggcatgattttgcrgtggctggtaccagttgttcctttccatgtttagcgcttccttcaggagctcttttagggcaggcctggtggtgacaaaatctctcagcatttgcttgtc

SEQ ID NO: 465414 - DNA, 201 bp, Homo sapiens
gttggtgtataagaatgcttgtgatttttgtacattgattttgtatcctgagactttgctgaagttgcttatcagcttaaggagattttgggctgagacartggggttttctagatatacaatcatgttgtctgcaaacagggacaatttgacttcctcttttcctaattgaataccctttatttccttctcctgcctaat

SEQ ID NO: 465415 - DNA, 201 bp, Homo sapiens
tccattaatgttttatgcagtcataatgtcaacaaatgattacaactttgtagcctcccaattcttacacctcgtttctttttctaattgctgtttcaatgtccttatctgcttgttccaccgtctctctcatttctattgattgggttttctctggtttatggatcttatattcctgcttttttgcatgcttggtaattt

SEQ ID NO: 465416 - DNA, 201 bp, Homo sapiens
gtgatctcggctcactgcaacctccgcctcctgggttcaagtgattcttctgcctcacccttccgagtagctgggattacaggcacccaccatcacacctgctaatttttgtatttttagtagacatgtggtttcaccatgttggccagattggtctcaaactcctgacttcaggtgatccgcccacctcagcttcccaaa

SEQ ID NO: 465417 - DNA, 201 bp, Homo sapiens
tttcacctccatcacattctttttctctctcacactctcctccatgttcccacaaactcaccaggctctcccttcagccccatttttttttgtttgtttgkttttggtttttttgaaatggagtcttactctgtcacccaggctggagtgcagtggtgtgatctcggctcactgcaacctccgcctcctgggttcaagtga

SEQ ID NO: 465418 - DNA, 201 bp, Homo sapiens
cctttagagaaagaaaaaaactcagacatatcctttctgaatgtaaaccagtggatgcagaaacaacttggaatctttgacattcttttaattttttttttaagtactgttgtttttttccctacttctgttcttacaaggatgtgggagatacagaataagagtaaggagtaaattatcaaaaattttaaatatttttga

SEQ ID NO: 465419 - DNA, 201 bp, Homo sapiens
ccatacttggatctgtttatatatacaaatacttagtacgtgttacagttacctacagtattcagtacagtaacatgctgtacaggtttgtagccaggagsaatagactataccgtagagcttaggtgtgtagtaggctagatcatctaggttggtgtaagtcactctgtgatgtttgcacaattaggaatttgcctaaca

SEQ ID NO: 465420 - DNA, 201 bp, Homo sapiens
ttgttggcttaaacatcccaccagccaagcaccagatgtgtgcaaaacatcggggcttctcttaaagtaataatagttgagactgaaaacatattaaaatyactgaagcttacatgatctcacctgaagttcacagcagtgctaagaggtaatatggtgtcccattttacagatgagaaaacagcccagcagaggaaaagt

SEQ ID NO: 465421 - DNA, 201 bp, Homo sapiens
tcattatctgaaatgtgctggttccttgacttcccctttgtctgggcttccactaaaaataagctccccggcccattcaccactcaagggtgctaagtgcrtagtaggtgcacagtaaattttgttggcttaaacatcccaccagccaagcaccagatgtgtgcaaaacatcggggcttctcttaaagtaataatagttga

SEQ ID NO: 465422 - DNA, 201 bp, Homo sapiens
tgtatgaacttagacagcctggccctaactaccaccctatagacagcctgtcagtggcaagctattctgcctttacccccaggaagaagtatgttctcacrgtgggtcttgtcggtcaccatgcggttagacaggtggataccatgacacactttatttttctgtttcctgtatcttctcagcagaggaatattagagagc

SEQ ID NO: 465423 - DNA, 201 bp, Homo sapiens
ggtctcagctcaaatgccacctccactaggaagccttccctgagcacctgtctaaaattaccctctccctaggcattctttatcacatgctgggtttcatkattttctttatcattatctgaaatgtgctggttccttgacttcccctttgtctgggcttccactaaaaataagctccccggcccattcaccactcaaggg

SEQ ID NO: 465424 - DNA, 201 bp, Homo sapiens
aacttattactgaagaaacctgcacagcatatatttttaaaataaatttagtggccaggcatagtggctcatgcctgtaatctcagtactttgggaggctsaggtgggctgatcacttgaagccaggagttcaagatcagcctggccaacatggctaaaccggtctttactaaaaatacaaaaaaaattagctgagcatgg

SEQ ID NO: 465425 - DNA, 201 bp, Homo sapiens
caaaaaaaattagctgagcatggtggtgcgtgtctgtgattccagctactcgggagactgagacatgcgaattgcttgaacctgggaggcggaggttgcaktgagccgagatcatgccactgcactccagcctggttaacagagtgagactctgtctcaacataaataaataaatgtagtgtagcctaagggtacagtgtt

SEQ ID NO: 465426 - DNA, 201 bp, Homo sapiens
aacatgctgtacaggtttgtagccaggaggaatagactataccgtagagcttaggtgtgtagtaggctagatcatctaggttggtgtaagtcactctgtgrtgtttgcacaattaggaatttgcctaacaatgcatttctaggaacatctcttccttgttaggtgatgcatgcctgtagttgtacccactgctatgactta

SEQ ID NO: 465427 - DNA, 201 bp, Homo sapiens
cccagggaccagtttaggctcaactttacctgagaccacagccttgcttggctcttccctttcctgtcctgttcccttgttccccaacaggttgatcctaragagacctccttcaggaaaccacctgcacctaatccctgcctcaggctccgcttctggggctcccaacataagataaggccttcgaacttctgttttctc

SEQ ID NO: 465428 - DNA, 201 bp, Homo sapiens
cctggcacaatggttcacagctgtactaccagcagtttaggaggccgaggtgggtagatcacttgaggtcaggagttcaagaggagctcagccaacatggkgaaaccccaactctataaaaaatacaaaaattatctgggtgtggtggtacacacctgtaatcccagctactggggaggcagaggcagcagaatcacttga

SEQ ID NO: 465429 - DNA, 201 bp, Homo sapiens
gtagggcctggaagggaatgcagcagcaagtcaatgggggcatggtgtgccgtgctaaggggttaccttccatccaaggatagtggggaatgttgaagggycttccggaggtgagagagacatcagatctgtgatttaggaagctgaggtgagcaccatgtcagatggagttgaggaacctgggaatacaaaccccatggg

SEQ ID NO: 465430 - DNA, 201 bp, Homo sapiens
ttatataagatatcttgtttaatctgtatattaaccctatgagggagataccactgggtttgtgtgtgtgtgtgtgtgtgtgtgtgtgtgtgtgtgtgtgtatggtcaaggtcaaatatctagtaagtggcacgcatggcatgtatttggggactctaagaatatgatgaggctggagtgtgcagagggacgagggtaggg

SEQ ID NO: 465431 - DNA, 201 bp, Homo sapiens
gttatataagatatcttgtttaatctgtatattaaccctatgagggagataccactgggtttgtgtgtgtgtgtgtgtgtgtgtgtgtgtgtgtgtgtgtgtatggtcaaggtcaaatatctagtaagtggcacgcatggcatgtatttggggactctaagaatatgatgaggctggagtgtgcagagggacgagggtagg

SEQ ID NO: 465432 - DNA, 201 bp, Homo sapiens
tgttatataagatatcttgtttaatctgtatattaaccctatgagggagataccactgggtttgtgtgtgtgtgtgtgtgtgtgtgtgtgtgtgtgtgtgtgtatggtcaaggtcaaatatctagtaagtggcacgcatggcatgtatttggggactctaagaatatgatgaggctggagtgtgcagagggacgagggtag

SEQ ID NO: 465433 - DNA, 201 bp, Homo sapiens
gtgttatataagatatcttgtttaatctgtatattaaccctatgagggagataccactgggtttgtgtgtgtgtgtgtgtgtgtgtgtgtgtgtgtgtgtgtgtatggtcaaggtcaaatatctagtaagtggcacgcatggcatgtatttggggactctaagaatatgatgaggctggagtgtgcagagggacgagggta

SEQ ID NO: 465434 - DNA, 201 bp, Homo sapiens
aagttggaggggcggaggttgcagtgagccaagatggtgccactgcactccagcctgggcaacagagccagactccatctcaaaaaaaaaaaaaaaaaaaacaagaagaacgtttcatctgggccagtcaagttggtccataaaattaaccatcacacagagtattccctgcctttgcctctttgactttgtttgtgctgt

SEQ ID NO: 465435 - DNA, 201 bp, Homo sapiens
tccattgtatgggtgatatttccacagatagaaaaaggacaacgaagccagtccatagagtagttctactgatgttcctggtctaattactatgcctctgsttaaagtgggatttttggaagcaggctattatgatgttagagcacaggtcctggaattagactgctgagttcaaatccctgctcagccatttgtctgatg

SEQ ID NO: 465436 - DNA, 201 bp, Homo sapiens
ttaattttcccaccttgaaattccctacttgtgctagaaggacagattccacccatagcagaatgagccacatccatctagggtgaatcagggcttatgaycagcctctgttactccattgctaagacagtggcgaaagatgaagtccagaggaggtgcgggcacaggcggccttccctgcgtctgtgagcaggtcctcag

SEQ ID NO: 465437 - DNA, 201 bp, Homo sapiens
tggattgtgctttaaccagaccgagtgactcccagctattaaagatgactgtgcccataatagcagtgaacatttcacaagcatttactatgggtcgggcrctgggtttagcactttctatgtataatctcacttgagcctcattatgagtttcttaaacagtaatatttttattctcattttacagacgggaaattgagg

SEQ ID NO: 465438 - DNA, 201 bp, Homo sapiens
tctatgtgtgtgccttgtttttgctgtgtgtgtatatgctgtgtgcgcacatgtacttgtgccttgtgtgtgtgcaagttctgtgtgtgcccatgtgtgcrtgtacatattgcatgtgtgtacattgccttacacattgtgtatgtgcctgtgcacacatgtgcatgcacacactgcatgcgcatgtgtgtatatattgta

SEQ ID NO: 465439 - DNA, 201 bp, Homo sapiens
gctccgtgctcttgctgttgttttctattctgattttatgtaacgtgggttcagtgacttaacgtagtatgagaactgttgagcttggccaatgagctacratggccaagagccgttttttgggctccctgctaagtagtgatgttaatttcctggggctgctgtcacaaatgaccacaaacagcatggctgaaaacaaca

SEQ ID NO: 465440 - DNA, 201 bp, Homo sapiens
cagagggcggagtttgcagtgaaccaagatagcagcacttcactccagcctgggcgaaagagtgagactctgtctcaaaaaaaaaaaaaaaaaaaaaaaaagcacatttgttgacagtatttaaaatataaacttttatttaagaaaacccagatttccagctaaaggatgggaagactgagctgtgttgagtccgtattc

SEQ ID NO: 465441 - DNA, 201 bp, Homo sapiens
atgggacactccctccaggggacacttgcttttctaggtgttggaagccataggatgcatgtgccttatctccctgaagtctttttcattgagaagttcartagtgggttgggggtgagtaatcattactttcacattcctttataatgcacatttgtggccaggtgtggtaatcccaacactttgggatgccgagacagg

SEQ ID NO: 465442 - DNA, 201 bp, Homo sapiens
ctgttgttttctattctgattttatgtaacgtgggttcagtgacttaacgtagtatgagaactgttgagcttggccaatgagctacgatggccaagagccsttttttgggctccctgctaagtagtgatgttaatttcctggggctgctgtcacaaatgaccacaaacagcatggctgaaaacaacaggaatgtattttct

SEQ ID NO: 465443 - DNA, 201 bp, Homo sapiens
gtgattccatctcacaaaaccacagactgctttataattatccatcatgtgttatagtcatctttaaataaaatacataaaaatattttggatgtattatwccaccaagaattagttttaaaaaagaaaagcaaaaggagcagtatcagctttcctgagtaaagtttagtacagtacagtcatccctcccttgatacccag

SEQ ID NO: 465444 - DNA, 201 bp, Homo sapiens
aatctttattcagtgggctgagtttagaagctgaagatgagcttgtggctagcagtgagagaatgttctcaacatttattaacatttacattctgtatttrttttagctaatggctatttttaatggaatgtaattagaagaattccttatagctactgttcacaaagccctttcatgtcttgctgcattgagccttccag

SEQ ID NO: 465445 - DNA, 201 bp, Homo sapiens
tcctggggctgctgtcacaaatgaccacaaacagcatggctgaaaacaacaggaatgtattttctcactgctggggaggttagaagtctggaagcccggtrctggtggggccacgctccctctgcaggctctaggggagcatcctcctccctcttccagcttctggtggctccaggccatccttggctgtggctggatcac

SEQ ID NO: 465446 - DNA, 201 bp, Homo sapiens
caggcaccatcactccggatgtcctaggtcactctgttcaaagacaagcagccgccttatttgaaccaatctgtttccagaaatagtatctgagctgcagmatttaatagaactagtttccttccagtccatgcaagtgattccatctcacaaaaccacagactgctttataattatccatcatgtgttatagtcatcttt

SEQ ID NO: 465447 - DNA, 201 bp, Homo sapiens
gcatcctgcgatgggcttcctgtgcttctggtgtctgtaagtagcaggaaatacaacttcagacagtggtgaatgcgagccacacgactccagagaggtgytcgctgatgcagtgacatcagggtcatgttctgtgattctttccacagttccttctcacagttccagctgcaataactttcagagcaaggagggaagagg

SEQ ID NO: 465448 - DNA, 201 bp, Homo sapiens
accactgcgcacactgccccctcctgcagtggaggttacgtccccctgctgtgcgccccatgtgaacccgtcctgtggggcacctagaatgtttctagtgsctttgctatcaaaagactgcctggggcaatgcttttttatgcggagagcatgaggataggatgctgggtcggtgccctactcccatctgtcacgcagtcc

SEQ ID NO: 465449 - DNA, 201 bp, Homo sapiens
tctgcgtggttggagggaaatgctcaaaggcattggcttgatttagcctgggattttagggcatatagtattcatatgctcctggaggagatggcttgtgwtcaaacttttgatttgagttgcacttgcagaaggtctggggtgtattagccaggaagagcacgaggcagatccacaaagctgacttgcattagctaaggc

SEQ ID NO: 465450 - DNA, 201 bp, Homo sapiens
cacaactcagtggcagaggatcattcattctgcccattgttgagtttctattgtatacctaaccctggagatacagggatggctcaggcagccttcacacytgccctcagttgccagcatacattttagccttttgctttatccatttatttttataaagtaaggattatgcagtttgtatagttgtatatatgtcttatt

SEQ ID NO: 465451 - DNA, 201 bp, Homo sapiens
gctacattctttccaaaatgtgagaggtatatccgtaaaacaaaagctatggtaataactgttttggtgactaattttaggtcttttatgtgtagattttmgaatttcatttgttatctattattatcataattacttataataaggaaaaaacccctcacatttattgaaaccctagtatggggagggaagcgctactaa

SEQ ID NO: 465452 - DNA, 201 bp, Homo sapiens
aggcactgggctaggcagtgaaggtatagggaacaatgagacatggttcttccattcaagaagttcataatcttataaaaaaatcagttcacgtaaaaaaatgagacattattcagtcatgttataatagaggtatgttcacaatgctgtagaattcatgggtagagaagaaaggcttcattcatagcagagcacgtctgt

SEQ ID NO: 465453 - DNA, 201 bp, Homo sapiens
gaagaaaaggaagtaacgcacacttgaaagaagggcaggcaggtgactggagagaccaactgcacagcttaacttttgacttgagcttttatacagtggcrtacttctggaaggttgcatcctgtattagtccattctcacactactataaggacatacccgagactgggtgatttataatggaaagaggtttaattgatt

SEQ ID NO: 465454 - DNA, 201 bp, Homo sapiens
gcttggctcttccctttcctgtcctgttcccttgttccccaacaggttgatcctagagagacctccttcaggaaaccacctgcacctaatccctgcctcargctccgcttctggggctcccaacataagataaggccttcgaacttctgttttctctgccacatatatgctttgcaggccattgaggtctcagctcaaatg

SEQ ID NO: 465455 - DNA, 201 bp, Homo sapiens
atggaagagcccacttctctttaagatctagcacactgccggctctcgcattcacctttgacactaagtataaatacagggatggttgtcttggattccaratggtttttctgagcagcacctgggatcctgtggtcaagtgtatggtggtgtcacagagttctaagtgccatcctttgcctctctgcagcattccttctc

SEQ ID NO: 465456 - DNA, 201 bp, Homo sapiens
catcttttctgtgtgtgtctacaaatctccctctcctcatgaagacacgatcattggatttaggactcactgtgacccagtatgacctcatcttaacttgwctacatctgcaaagacaatttctaaataaagtcacattcataggtattggggttaggacttcaacatgtctttttggagggcacaactcaactcaactca

SEQ ID NO: 465457 - DNA, 201 bp, Homo sapiens
tggggatgttaactgcaaaacagggacagaatttgggctaaagggtctttttcccagtctggtaaattaagtatgtgataagacttctagaagagtagatytaaggtactttcttttgtgcacactaatgggaggtgtgaagggaaagcagaattgcaatttccagcctagggaggccaagccagtcggccttgccaaaca

SEQ ID NO: 465458 - DNA, 201 bp, Homo sapiens
tggggttcctggaagacaggcgatcaggttcagctcttgccttgccctttatggttaaatgttctttggaaagcttctatatctttcaaatcctgggggcrttatgatctctcttctgcctatcccaaaccatcttcagccagtactgttgggagaatacaagctccagggcatggtccctggtccgtctggatgacccct

SEQ ID NO: 465459 - DNA, 201 bp, Homo sapiens
cattatgatctctcttctgcctatcccaaaccatcttcagccagtactgttgggagaatacaagctccagggcatggtccctggtccgtctggatgacccstccggatctggcatatagctggcgctctatggaaccagatatttatgtaaaagcagggacaatggaatgtgaaaacgtttcgcaaactccaaagcgattc

SEQ ID NO: 465460 - DNA, 201 bp, Homo sapiens; identical to SEQ ID NO: 310365

SEQ ID NO: 465461 - DNA, 201 bp, Homo sapiens
gaagttatagccagaaaacaaggagctgggggttcaaagaggccttgaagtcacttgtctagtccttctgtcctttgcttcaagaaataaatttggggccrggcgcggtggctcacgcctgtaatcccagcactttgggaggccgagacgggcggatcacgaggtcaggagatcgagaccatcctggctaacacggtgaaa

SEQ ID NO: 465462 - DNA, 201 bp, Homo sapiens
ggaatggaggctggacccctctccccaaagccgaggctcggtccgcgctcctgcgactaggctgaagctgctcccctctccccgccgcctccgggcgttcyggccgtacacccacactgggactgggactgggactgggctgtgatcccgaggccgcagctccgctctcggcccgccacctcccccgggcccacctgctcc

SEQ ID NO: 465463 - DNA, 201 bp, Homo sapiens
ctgctagctgtctttcatctctcttggaccactgagtttgtaatccagtgtacactcaataagcccccaggagacttgctaggatgtaagccagcagttgktgaggagaggtgaactcatcctacccttccccacctcttgttccctccacattgtcctctgggactttgcccagtctagtttaaagggactctagagatc

SEQ ID NO: 465464 - DNA, 201 bp, Homo sapiens
taaactaaagatatggtgatgctgggtccacttttccacaaggcagtaatcagtagtctctgagtagcatttggcccttttagacagcgtatgctccttargcatctttggttctttccaggccccttcactcattggcataacctgtacacatttaaagcaggaccttgagtttaattgggatcccaaatggctttcaat

SEQ ID NO: 465465 - DNA, 201 bp, Homo sapiens
cgggcactgtggtgggcactgcagtgggcctctcctcccacccccgagctctcagccactccctagcactcacaggtaagtgtgttgcatgaagggcaaastcgctacccacttgaacttagaattttggaaaatttggggttaactttgaggtggcaattaaaaagtagactatgtctttcctttcattatttttcaatt

SEQ ID NO: 465466 - DNA, 201 bp, Homo sapiens
gtaccacagcaacctccttcccgagggttttttatctgccgcctgtctccctctaaaggcatcgttggccttgaggtgggatggagaggttggggtgactragatcccacagactttcattttgattccctagatccagatctgtcaaagccaactggcagggcctggcctctctgagccttccaggcctcacctgggcaa

SEQ ID NO: 465467 - DNA, 201 bp, Homo sapiens
gccctggtttctctcaccagctgccctttcatgtttctcttcctccattcccaaatcagctggaagtacaggaggcagtgggagtcaatggcgccaggcgyaccacagcaacctccttcccgagggttttttatctgccgcctgtctccctctaaaggcatcgttggccttgaggtgggatggagaggttggggtgactaa

SEQ ID NO: 465468 - DNA, 201 bp, Homo sapiens
ccagaagatactgagctttcccatttccagcctttccacttgctattccttctctctagaaaatgcttgtctcactgcctccgggatgattccactccccrttctgtgctcagtgcagatcctcccacctccaggaagcactccctggtgaaccagtctgtgttgggagcatctcctctagattcccagatcaccccgtgc

SEQ ID NO: 465469 - DNA, 201 bp, Homo sapiens
cctaagcttgctctgacaaaagagttttgagttggtcttttggctgagcctgcccaggaaggcaggctcctgcaggagtcttggagggtcggatgcggcgscggatgaggatgaggcgtggcggaagatgcgtttggctctgcagacactgcatcgggcagcaggggactctgggaggctggtgcagccagaaggcatggc

SEQ ID NO: 465470 - DNA, 201 bp, Homo sapiens
agttcagcttgttgtctttctccgaacaggcctgctttcccttctctgttgtctgtctagtcaatggcaccgcctcccaccctgttgcctgagccggagcmctgggcgcccgcctggggagtgcatcatagtgacctggaacagcatgcctggaactggatctcagtttgacacttggctctgccacacttgctgtatgac

SEQ ID NO: 465471 - DNA, 201 bp, Homo sapiens
gcaatacattactaaataatgcaaattttttaaaaattagtatttttggccaagcgcggtggctcatgcttctcatcctagcactttgggaggccgaggcrggtggatcacctgagatcaggagttcaagaccagcctggccaagttggtgaaaccccgtctctactaaaaatagaaaaataaggcaggtatggtggcacg

SEQ ID NO: 465472 - DNA, 201 bp, Homo sapiens
aataactacatagcatttacattgtattaggtattttaagtaatctagagatgatttaaagtatgtgggaaggccaagcacagtgtctcccacctgtaatmccagcactttggaaggccaaggtgggaggatcacttgagctcaggagttcaagaccagcctgggcaatatagtgagaccctatctcttatttaaaaaaaa

SEQ ID NO: 465473 - DNA, 201 bp, Homo sapiens
tagagatgacaaaattgaggctcacaaagactcggtgactcgcccaaggtcatacagcttcccagtgacgaagcccgggctccaacttgtttttctggctycccagtcagtgtttgcccagctctgccctgttccctcctagtcccttcacccactgccgcctggattcagcctggctgagagggtgaagccatgtggcct

SEQ ID NO: 465474 - DNA, 201 bp, Homo sapiens
cacccctggctctgtcatctgtgacctcctgccactcctccacatccactgaagactctcctgccccgttctcttcttcccaggtcaatccgtttctcacycacttgaatggagtaagcattgctaagtattggtaggagggcaggcaaattgacccatcactcactcactcactcaccagtactcaattccttgtcccgc

SEQ ID NO: 465475 - DNA, 201 bp, Homo sapiens
gcagccacccctgcagcgggcactgtggtgggcactgcagtgggcctctcctcccacccccgagctctcagccactccctagcactcacaggtaagtgtgytgcatgaagggcaaactcgctacccacttgaacttagaattttggaaaatttggggttaactttgaggtggcaattaaaaagtagactatgtctttcctt

SEQ ID NO: 465476 - DNA, 201 bp, Homo sapiens
acaccatttttatataagggatttgtgcatctgcagagtttggtatctgggtaactaatccccagcagattcagagggacgactgtacttaagggaatgayggaagccagcctagcagagctagagaatcaaacaccagatgaggaggaactggaatcccaaggcagtttcactgtcttcatacatagttccctgggccca

SEQ ID NO: 465477 - DNA, 201 bp, Homo sapiens
gagcaaaaggagcaccctgctctccccagagaccccgttgctcacggtggtaattaccgtgctggggccgtgagtccttgcacctgcgtctgctcgcttgmtcctcacagcacatttgtgaggtaggggtttttaaacattttgctacctttgctcttctcatggtttctcttaagattgactttttttccttaggcaaaa

SEQ ID NO: 465478 - DNA, 201 bp, Homo sapiens
gtggatcaactaggtcaggagatcgagaccatcctggctaacatggtgaaaccccatctctactaaaaatacaagaaaattagccgggcgtggttgcgggygcctgtagtcccagctactcgggaggctgaggcaggagaatggcgtgaacctgggaggcggagtttgcagtgagccgagatcatgccactgcactccagc

SEQ ID NO: 465479 - DNA, 201 bp, Homo sapiens
taccctccaccagcatgccgctcctgaagatgcccccaccattctcggggtgcagccacccctgcagcgggcactgtggtgggcactgcagtgggcctctyctcccacccccgagctctcagccactccctagcactcacaggtaagtgtgttgcatgaagggcaaactcgctacccacttgaacttagaattttggaaaa

SEQ ID NO: 465480 - DNA, 201 bp, Homo sapiens
acagcctccaaaggtcaaggccccatctcctcccgcagccactcacctgtaggcctctgttctattactcctccctgggccctgctgcccatgctcctgamggtccccttcctggactggcatctcctaaggcataaccatcagggtcttaaccagctgatttcaaaagtgcccaggtagccatcagacccatggggctgc

SEQ ID NO: 465481 - DNA, 201 bp, Homo sapiens
actgtctgtttgcatccttgagtcctggccacctgttgggcaaagcagtcaagtactcagcttcactctctaccactgcaaagtggggataatgacacttrttttggaggacttgggggatggttagaaataatatgccaaggccgggcgcagtggctcacgcctgtaatcccagcactttgggaggccgaggcaggtgga

SEQ ID NO: 465482 - DNA, 201 bp, Homo sapiens
gtcattcaagaaatcaaatgcaactgtctccttccactgcctcctcttgaccctttttcacctggtctggcctcttttccaagatagaagatgcccctctycccaccccctagtaagcgctctcctttgagcctcttcaccctcccccgggctgtgcacctacagtcagaggcaggagcacagctgcacagctggcctccc

SEQ ID NO: 465483 - DNA, 201 bp, Homo sapiens
ctccaaaacctagtggtttaaaacaataccactttctatctctcatgagtctgctctcggctgggctcactcatgtttctctgatcagctggccaatcagstgggaagactttgctttctccacaagtctctcacatccctccagcagctagcctggtctcgctctcaggccatggcagaggttcaggagtgagcaagccc

SEQ ID NO: 465484 - DNA, 201 bp, Homo sapiens
ggctggcagtcccaaaactgagaaggagaagggcagctcctggcgaaactggccaggcgaggccaaggcacggcctcaggagcaggagtctgtgcagcccycaggcccagcaaggccacagagcttgccccagggcaagggccgcagccgccggagccgcaacaagcaggagaagccagcctcctccttgggtgagtgcac

SEQ ID NO: 465485 - DNA, 201 bp, Homo sapiens
aggtgccctctctgtgcccacagccctctgtgcctccctctggtagcactcccctttctgtgatgaaacattgtgttgatatgtctgttgcctgccctggrctgtgaactccacagggacacaggctatgccatctttctctgatcttccacgcctcgcccagggccttgctaacacagaataaaaataactaggtgaatg

SEQ ID NO: 465486 - DNA, 201 bp, Homo sapiens
tataactacaaaaccatatacagtcattcctccacatctgtggattcaaccaattgtggatagaaaatattcaaggaaagaaaaggatggttgtgtctatrctgaacaagtatagactttttgcctcgtcattattccctaaacaatacggtatagcagctatttacatagcatttacactgtattaaatataagtaatct

SEQ ID NO: 465487 - DNA, 201 bp, Homo sapiens
aagcctagaggaggttggacttaaattgagcctttagtctcagctagtcattggaaaaacatgagaagaaagtgggttttaagcaaggaatcacctttagygaaagcatgaaatagaaaaaggcagagattattttgggaacttagggaatgacttcatggggttgaggggagagattaagatttctaacaagtcagttta

SEQ ID NO: 465488 - DNA, 201 bp, Homo sapiens
gctgggggctgagtggctctgcagtttcatatctcaaccctcagctgtgtccctggggtcaggccttttccggctggcaaccacacagctgtcctggagamtggaaggctggggcaggcagactgagctcacaaacaactcacttcccccatgatggccccacctgtctttctcctctttccagtgccaggccagctcctc

SEQ ID NO: 465489 - DNA, 201 bp, Homo sapiens
cagacatcagctttaggggtggcccctcaaactgcctgggcctcaaagaaggactcaagtgtaccaaactcagagaggacagtggataaactagtcttcartgtagacttagaacagaacagccaaggggcttagataatagattgagtgcctgcagcctggatcccttgagctaagtgctttgtatctctaatgtgactt

SEQ ID NO: 465490 - DNA, 201 bp, Homo sapiens
tcattggatgaacatttactgatctcttctttgtgtaggaatactgtgccaggtgctaaaagtacagcttgggagcagctgattgaaagtctgggttgacygacttttcagggcataaggggtcatgaatgccagaatttgggaaatggcagcagatcacagtcaaagggaactctgaaccaagagctgttctctgccaaa

SEQ ID NO: 465491 - DNA, 201 bp, Homo sapiens
taggaggattccccaaagcttccagcttgccacctggaagaaggtcactttcttttgagcaaaggagataacgggaggtaccctgccaaagttcactgagmggcgggggtgacatgggccacggttgctctgggagggttgtggcactcggggctgggtggctctccctaagcttgctctgacaaaagagttttgagttgg

SEQ ID NO: 465492 - DNA, 201 bp, Homo sapiens
agtagtccttgacagctgtctggtctggcaatgggttattcccaaattgtggacagaaaggccaagctagaaaattgagtcatgcccccagagagctatcttttttttttttttttttgagacaggctctcactgttacccagtttggagtacaatgatgcaatcttggctcactgcaacctccgtcacttgggcttgagc

SEQ ID NO: 465493 - DNA, 201 bp, Homo sapiens
attctgctctttttttctttctcaggccctgcccaggctgagctgcttcagggcatcctgaggccctgactgccagctgaaggcgtataatttttccctcygtgtgccccacctacccgtccaagaccctctgtgctccccaccatcctggaccaaccaaaagctgaacggatgccacactgtgctggggccccttgacct

SEQ ID NO: 465494 - DNA, 201 bp, Homo sapiens
cccaagtggcatggggaggctggagcatggctcattgcttactgtgattctgctctttttttctttctcaggccctgcccaggctgagctgcttcagggcrtcctgaggccctgactgccagctgaaggcgtataatttttccctccgtgtgccccacctacccgtccaagaccctctgtgctccccaccatcctggacca

SEQ ID NO: 465495 - DNA, 201 bp, Homo sapiens
acctacagtcagaggcaggagcacagctgcacagctggcctcccagcccctgctgatggacagcaagtgccaaaggctggatctactcaaggattgtcccmcaccttgtcaggatcctgggactggggctctgtctcccaacccgttaacctgcatcctctgctacaggtgatccagggaatcttcaacattttcagccca

SEQ ID NO: 465496 - DNA, 201 bp, Homo sapiens
agagtaagactctgtctcaaataaataaaaataaaaatataataactacatagcatttacattgtattaggtattttaagtaatctagagatgatttaaartatgtgggaaggccaagcacagtgtctcccacctgtaataccagcactttggaaggccaaggtgggaggatcacttgagctcaggagttcaagaccagcc

SEQ ID NO: 465497 - DNA, 201 bp, Homo sapiens
actataccgagatccgggagaagctccgctcgaggctgaccaggcggaaagaggagctgcccatgaaggggggcaccctgggcgggatccctggggagccygccgtggaccaccgagatgtggatgagctgctggaattcatcaacagcacggagcccaaagtccccaacagcgccagggccgccaagcgggcccggcaca

SEQ ID NO: 465498 - DNA, 201 bp, Homo sapiens
ggttttattcccatttcataaatgaggaaattgaggctcaaagaaattgagtaatattccaagatcatattgaaaatggcaactgggatttgaactcacarctgtgtgtctcgtccccaaaattcatgctcttcctcctccatgagtaacgtgtgctggggttagagtagcagagtggcagtttgacctgaggattcaggt

SEQ ID NO: 465499 - DNA, 201 bp, Homo sapiens
aggcctcgggactgaggacagaacctggtgatctattcctcggcagccctcctgccagatgagccccagagcttgatggcttgtcccttgtggcttctttrcctcttcacctgcctactcccaactgcatctgcacagtgacacgtttaggagcccagcatccgaagagatttgggtgtaacaaccagctagttccagttc

SEQ ID NO: 465500 - DNA, 201 bp, Homo sapiens
gttggcagcaggcggagggggggaaccgggcgccgccatattggctgttgtcctgtgaggggagcggtagcggcggcggcggcggcggcggcggcggcggyggcggcggcggcggcgcggcgtgtggagcgagggagcggcgcgagcggcggcatgacgcggaggcggagcaggccgagcggcggtgcgggcaggcgcgag

SEQ ID NO: 465501 - DNA, 201 bp, Homo sapiens
cttgtgagtaatctcacactctccagagattctggttatgcttagagtgaagaaaaattatcttggagcttttttgaggagatcccaaatcagtagaaccsccagaacttttcttccctcatcttttgcctaaggctagacctgcatcctcagaggctctgaaatttaaactgaggtgagcaggaacaatgggctgctgcc

SEQ ID NO: 465502 - DNA, 201 bp, Homo sapiens
cttcaagtatttggaagctgtcaaactcatggtggtagatgcaagtttcagaattttaattttcacttgaaagcttgcattttatatcattgcccacaaayactgtcagttgttttccttgaagtgacaggctcattttattcattgttcatttttttgagaaaatgtctgccaatacccaagtctaaatagtaagtcatt

SEQ ID NO: 465503 - DNA, 201 bp, Homo sapiens
caaaattagaagaatggccaggtgtggtggctcatgcctgtaatgccagcactttgagaggctgaggcaggcggatcacttgaggtcaggagttcaagacyggcatggccaacatggtgaaaccctgtctctactaaaaatataaaaattagtcaggcgtattggcaggcgcctgtaatcctagccacttgggaggctgag

SEQ ID NO: 465504 - DNA, 201 bp, Homo sapiens
aaggccaagctagaaaattgagtcatgcccccagagagctatcttttttttttttttttttgagacaggctctcactgttacccagtttggagtacaatgrtgcaatcttggctcactgcaacctccgtcacttgggcttgagcaatcctccaacctcaggagaccttatatattcctaaaaattattgaggaacccaaag

SEQ ID NO: 465505 - DNA, 201 bp, Homo sapiens
accagcaagagcttcattgacctttgaccagaatcttagggaatgaataggaattgtcaagggtagatgtttcccggcacttagcacaattggcaggagayagggactctgacaatgttgaatgagggaataaatgggtgaatggaagagtgactgatgataactatgacaatgagtttttctaggctgaggattaatcat

SEQ ID NO: 465506 - DNA, 201 bp, Homo sapiens
atattgtgctttataggccacataaagaatttcaggctgggcacagtggctcacgcctgtaatcctagtactttgggaggccgaggcgggcggatcacgargtcaggagattgagaccatcctggctaacaccgtgaaaccccgtctccactaaaaatacaaaaaaattagccgggcgtggtggcgggcacctgtagtccc

SEQ ID NO: 465507 - DNA, 201 bp, Homo sapiens
ccatgagtaacgtgtgctggggttagagtagcagagtggcagtttgacctgaggattcaggtaaatctgcggcttgggccctccttgtggctcattgcacycaggaggcagttcagcggatgagctagccttgtggggatattaaaacagaaagttttagggttaaggtcactaggatcagagagactcactcccaaccga

SEQ ID NO: 465508 - DNA, 201 bp, Homo sapiens
tacagcctccaaaggtcaaggccccatctcctcccgcagccactcacctgtaggcctctgttctattactcctccctgggccctgctgcccatgctcctgraggtccccttcctggactggcatctcctaaggcataaccatcagggtcttaaccagctgatttcaaaagtgcccaggtagccatcagacccatggggctg

SEQ ID NO: 465509 - DNA, 201 bp, Homo sapiens
ctgcagagtttggtatctgggtaactaatccccagcagattcagagggacgactgtacttaagggaatgacggaagccagcctagcagagctagagaatcraacaccagatgaggaggaactggaatcccaaggcagtttcactgtcttcatacatagttccctgggcccaatccagaagcccccaagccagcaaagctcc

SEQ ID NO: 465510 - DNA, 201 bp, Homo sapiens
gaatatatatgataagctctattctagagatacgtttttaaacaaaagagtgttaggatatcctagagcaaagccaagttcattcttcctgtggacttaasaggatgtaacacccagatcgagcctaaaaaaaagagaagaaaaaggcagaaggaacagcatatgggaaggtgtgactactttatgtatttggtccttctt

SEQ ID NO: 465511 - DNA, 201 bp, Homo sapiens
tcaatacattctctgatagcatgtgaggaagtaattctcagtgggagagacagctgtgattgcttgattccacctctcccttgccccaagctaataatcaycagatcccctgtgctttgctggaccctatcccagacttacagagtcagtctccaggtctggatcccaggtatctattgttgaattgttcccaagtgactc

SEQ ID NO: 465512 - DNA, 201 bp, Homo sapiens
caccttattttttggcaaatagcctcactttttatttcaatgaggaaaaaagccattatacagggattctcccactgttttgccattcccacctgcaaacwtactttcttccttgtcatgagagtcacccttttcccgcctaaggcctgtgcggtactttcttgacccctcagcccagcagcaggctcctggtctagctta

SEQ ID NO: 465513 - DNA, 201 bp, Homo sapiens
ttagagataggatcttgctatgttgcccaggctatcctcaaactcctggactcaagtgatacttctccttaagcctcccaaatagctgggactacatgtgyatgccactacacccagctgagttttaaatttttaatttttgatatcagatggatgatcctaacacctttacttacctcatctagaattttttagagcagg

SEQ ID NO: 465514 - DNA, 201 bp, Homo sapiens
caaagttgtaggatataggaagctattaattggaggcattaaatgtaatcagtctcccagtcaggacccctcaatgtgaaagcaaacctacagacttatakttgtttttctttttttttttttttttttgagacggagtctcgctctgtcgcccaggctggagtgcagtggcgcgatcttggctcactgcaagctccgcct

SEQ ID NO: 465515 - DNA, 201 bp, Homo sapiens
ataggatcttgctatgttgcccaggctatcctcaaactcctggactcaagtgatacttctccttaagcctcccaaatagctgggactacatgtgtatgccwctacacccagctgagttttaaatttttaatttttgatatcagatggatgatcctaacacctttacttacctcatctagaattttttagagcagggtctat

SEQ ID NO: 465516 - DNA, 201 bp, Homo sapiens
agccctagtgctttggaaagcagaagtgattcaccatcctttttcagccccaaggacaaccaggatccttctcccgccgcctgaagtagtgagccaagggktcccaccgctgccttctgaaggtggtcagcactgtctttctcccatgcagtcacctagccagaaaggttcagtgggctgcagtagtctctggcctttcct

SEQ ID NO: 465517 - DNA, 201 bp, Homo sapiens
cctgtgctgcactgtgagggatccagacaggaatcagacctggcacctgcctcttgtagaagggatggaagatacaggaaaataaattgtgcagaagacayaactactgtaaccaaggcacagtgtactaggaggagatgggagaggagaagtgaattacgagaggagaaagcctagaggaggttggacttaaattgagcc

SEQ ID NO: 465518 - DNA, 201 bp, Homo sapiens
agaccatcctggctaacaccgtgaaaccccgtctccactaaaaatacaaaaaaattagccgggcgtggtggcgggcacctgtagtcccggctactcgggargctgaggcaggagaatggcgtgaacctgggaggcggagcttgcagtgagccgagatcgtaccactgcactccagcctgggcgacagagcgagactccgtc

SEQ ID NO: 465519 - DNA, 201 bp, Homo sapiens
ggagtgagccaccatgcccagcctctttcattaatttctgttcttatctttattatctcctttctactttctttgatttattctgtgctttttaaaaattktcttaggtgaaactcaactcattaatgggttttttttttctaacatagcatttaagatcttaaattcccatcaagcatgactttacttgcatcacacagc

SEQ ID NO: 465520 - DNA, 201 bp, Homo sapiens
agagtaacggcgaacaaaatggagtcccggccgtcaaccagcgctctgcgcgttgcggcccctttcacgacacagccgggcctctttacggtcaggggggygagctgcgggcgcgcgcacgtctagaaagagaggcaccggcggcggcgtcgcggccgcacggacgcgcacgcaggcacgcgcaggtacgggaccgcacgc

SEQ ID NO: 465521 - DNA, 201 bp, Homo sapiens
accgtgttagccaggatggtctcgatctcctgaccttgtgatctgcccaccttggcctcccaaagtgctggaattacaggcatgagccacggcgcccggccttttttttttttttttttttttttttagtagagatggggtttcaccatgttggcccaggctggtcttaaactcctgacctccctcaagtgatctgcccac

SEQ ID NO: 465522 - DNA, 201 bp, Homo sapiens
cagaccagtctgaggactagctaaacaggggaagaggtaaaagcacctctacagaatccatgcccactgacaacacccggacattactgccactttccatkacaacagccttatgacccagaagttaccaccctatttctagaaatttctgtataatctccccccttaattttcacataattaaaagtgggtataggccgg

SEQ ID NO: 465523 - DNA, 201 bp, Homo sapiens
taaaggtcaggtgcagtggctcatgcctgtaaccccagcactttgggggaccaaggtgggaggtttgcttgagctcagaagtttgaggcttcagtgagctrtgaacataccactgcactccagcctaggcaacagagtgagatcctgtttcttaaaaagtaaaataaaaaatacagtagtcagtaaaggtttaagttttag

SEQ ID NO: 465524 - DNA, 201 bp, Homo sapiens
cgagtagctgggactacaggcgcccaacaccacgcccggctaattttttgtatttttagtagagacggggtttcaccgtgttagccaggatggtctcgatytcctgaccttgtgatctgcccaccttggcctcccaaagtgctggaattacaggcatgagccacggcgcccggcctttttttttttttttttttttttttt

SEQ ID NO: 465525 - DNA, 201 bp, Homo sapiens
aatattcctgaaaacttttaccctttttcaacttttcttctcagagaagccacggacaagcgacttacgcgcagagtaacggcgaacaaaatggagtcccrgccgtcaaccagcgctctgcgcgttgcggcccctttcacgacacagccgggcctctttacggtcaggggggcgagctgcgggcgcgcgcacgtctagaaa

SEQ ID NO: 465526 - DNA, 201 bp, Homo sapiens
cgcttcgacctcccaaagtgctgggattacaggcgtgagccaccgcgcccggccccatctctcttctatcagcttccgtgtgcgcggtccagcttctgagstctttgtttgctctggtctgaatgtttttgtccccctaaattcatataccgaaccctaatcccccagttgatggtattaggaggtggggatgttgggagg

SEQ ID NO: 465527 - DNA, 201 bp, Homo sapiens
ccatgacaacagccttatgacccagaagttaccaccctatttctagaaatttctgtataatctccccccttaattttcacataattaaaagtgggtatagsccgggcatggtggctcatacttgtaattccagcactttgggaggccgaggcgggcggatcacctgaggtcaggagtttgagaccagcctggccagcatgg

SEQ ID NO: 465528 - DNA, 201 bp, Homo sapiens
gttcttatctttattatctcctttctactttctttgatttattctgtgctttttaaaaattttcttaggtgaaactcaactcattaatgggttttttttttctaacatagcatttaagatcttaaattcccatcaagcatgactttacttgcatcacacagcttttgatattggcattttcattatttagttctaagtgta

SEQ ID NO: 465529 - DNA, 201 bp, Homo sapiens
tgttcttgtgcagggcagaaatgccaggtgcacaacatgcatccagggactgatgagctagcgtttctttgttttctcttttatttatttctttcgaattkctttttcttttttttttgaaacagagtttcactctgtcgcccaggttggagtgcggtggtgcgatctcggcttagtgcaacctctgcctcccgggttcaa

SEQ ID NO: 465530 - DNA, 201 bp, Homo sapiens
gcggccaagctggggccgctcctcggcctggcgcgggtgcccgacttaccgccgaccgcgctcacgacgactcgctcttctctatccgccggaccagctcsaccagcatctctgccatcttcgcaatctccttggccttctcctcggccttctcgcacctcttggccgcccggccctcggccgcgtcgcccgggttctgga

SEQ ID NO: 465531 - DNA, 201 bp, Homo sapiens
cgcacctcttggccgcccggccctcggccgcgtcgcccgggttctggaggtggttgagggcgctctcctccgaggcctccacctgcgttttgatctggatragcatattgtccatctcccacagcttgctccggttccgcaggtacgcccgcccgtgctcgcgcgtcagcgacgcgatgtcctcgcgcatctcgttgatga

SEQ ID NO: 465532 - DNA, 201 bp, Homo sapiens
cgaagagcggccaagctggggccgctcctcggcctggcgcgggtgcccgacttaccgccgaccgcgctcacgacgactcgctcttctctatccgccggacsagctccaccagcatctctgccatcttcgcaatctccttggccttctcctcggccttctcgcacctcttggccgcccggccctcggccgcgtcgcccgggt

SEQ ID NO: 465533 - DNA, 201 bp, Homo sapiens
cgcgcagagtaacggcgaacaaaatggagtcccggccgtcaaccagcgctctgcgcgttgcggcccctttcacgacacagccgggcctctttacggtcagsggggcgagctgcgggcgcgcgcacgtctagaaagagaggcaccggcggcggcgtcgcggccgcacggacgcgcacgcaggcacgcgcaggtacgggaccg

SEQ ID NO: 465534 - DNA, 201 bp, Homo sapiens
tagctgggattacaggcacccaccaccacacccagctaatttttttatttttagtagagatggggttttgccatgttggcctggctggtcttgaactcctsacctcaagcaatccacctgccttggcctcccaaattgttgggattacaggagtgagccaccatgcccagcctctttcattaatttctgttcttatcttta

SEQ ID NO: 465535 - DNA, 201 bp, Homo sapiens
agctactctggctgaggcaggagaatcacttgaaacccggggggaggaggttgcagacactgcgccactacactccatctgcatctgcctggcgacagagygagactccatctcaaaacaaaaaaaagaaaaaagctggattcttcctctacaccctcaaaatgtatcacccaaaatgaatattctgcagaggaaataacc

SEQ ID NO: 465536 - DNA, 201 bp, Homo sapiens
cccagttgggtcccctttacctcggccacaccaccctgctggtcagttgttcctgtactgactgaatcacccagcactactcgctttgaaacggaaggaaygctgagggagttcagtttatcactgtcctgctgctttgattttgtttgactttcttcttctgagaaaagaaatgtaaaagccttatgtatttattccata

SEQ ID NO: 465537 - DNA, 201 bp, Homo sapiens
aaaagaagaattacaaatctgagaagttagaggaaaggtacagaataggaattctgattaacaagaaaaatcaattaatgacattggtactctattcttcmtatcagtaataatacaaactcagcccttttaaatcagagaatctgccattctatatctaataaagtagctttacaacccctaaagtaaaagaattacatg

SEQ ID NO: 465538 - DNA, 201 bp, Homo sapiens
gaactagcgggcagttcagtaaagacaggctgatgtgggcggacaggagttacacagcaaaaggcaaaagaaggtagacgctagagaaggcactgtaaggraaagcacttggaaccttaagaaggaaagccatcttcctaaggggagcagtagacatgacagtctggggatacaacgtgcgcccttcaagaaaggcgagga

SEQ ID NO: 465539 - DNA, 201 bp, Homo sapiens
gttggccagtatggtctagaactcctgacctcgtgatccacccacctcggcctcccaacatgctgggattacaggtatgagacaccgcgcctggcaattgmtttttttttttaagatggagtctcgctctgtcacccaggctggagtgcagtggctcaatctcagctcactgcaacccctgcctccccagtccaagcaatt

SEQ ID NO: 465540 - DNA, 201 bp, Homo sapiens
ggcattaatggtcccagttacttgggaggctgagacaggaggattgcttgagcccaggaggtcaatcaaggctccagtgagccatgattgtgctaccactrcactccagcctggacaacagtggtaaacactgtttggaaaaaaaaaaaagcaccaaaagagtaaacatgtgcaatgtgcaattgaagaccactagtatct

SEQ ID NO: 465541 - DNA, 201 bp, Homo sapiens
cctcaacactgaagataaagtgcactgctattaagtgtccaatatgaagtacaatgagataatcaaatccattttttaattaatttcctttattatagacmaaatgaattactaaatttactaattaaatttaatactttgcttaaacaagtactattcacactttttcatgaaggacctcaatccacagtatttttgtaa

SEQ ID NO: 465542 - DNA, 201 bp, Homo sapiens
ccccgtctctactaaaaatacaaaattagctgggcgtggtagtgcatgcctataaactcagctactcgggaggctgaggcaggagaattgcttgaaccccrgaggcagaggctacagtgagccgagattgtgccattgcactccagcctgggcaacaagaacgaaactctgtctcagaaaaaaaaaaaacaacacaaacaa

SEQ ID NO: 465543 - DNA, 201 bp, Homo sapiens
acgagcggctctactgtgagagccacgccaaggcgcgcgtgaagccgcccgagggctacgacgtggtggcggtgtaccccaatgccaaggtggaactcgtytgagctgggaccctgctcccacgcctgcttcttaaggtccctgctcggccggtgtaaatatgtttcaccctgtccctctaataaagctcctctgctccac

SEQ ID NO: 465544 - DNA, 201 bp, Homo sapiens
atcccgagtgcttcatgtgcagtgactgcggcctgaacctcaagcagcgtggttacttctttctggacgagcggctctactgtgagagccacgccaaggckcgcgtgaagccgcccgagggctacgacgtggtggcggtgtaccccaatgccaaggtggaactcgtctgagctgggaccctgctcccacgcctgcttctta

SEQ ID NO: 465545 - DNA, 201 bp, Homo sapiens
cacttggcctagcccagggtggaggaaggatagtaacttattactatccttctgggttagtagggttttctggaaggagtggcaattatgctcagaaccasgtgatggggagaagcaagtcaggtggagcaggcagtccttgcacactcagcctgtcctccccagaccagcagagagctagaactgagcctctaggagatg

SEQ ID NO: 465546 - DNA, 201 bp, Homo sapiens
acagcccagagcccagcccctcttgatcctggctcccaggcatggtgggcgtggtaggagacatatctgaccatcacaatttctgccacaggcctgagggyaggagctggcccagtgcccctgatgacagcaaggctcaggcacacaggatccacatcgatcctgagatccaggtatgtacagacactgcctggcctggcc

SEQ ID NO: 465547 - DNA, 201 bp, Homo sapiens
ccatctgccttcccactccctgcagtgcccaggttgccccctagcgaccccacgtcccgcctcgcagtcacctgccctcttcggtctctgcggcccggtcscacgcccttgctacaaccttgctacgccctggcttcccgattccctctccaccccctgtcgctgcccctcaccccacgcccgccaaacccgttccccagt

SEQ ID NO: 465548 - DNA, 201 bp, Homo sapiens
cctgcagtgcccaggttgccccctagcgaccccacgtcccgcctcgcagtcacctgccctcttcggtctctgcggcccggtcccacgcccttgctacaacyttgctacgccctggcttcccgattccctctccaccccctgtcgctgcccctcaccccacgcccgccaaacccgttccccagtctcgggtgccgatggccc

SEQ ID NO: 465549 - DNA, 201 bp, Homo sapiens
caatccaggcgcacagggagcgggggcgggggctgggccgagtggggacaggggcgggcgggccgggggcggggcgcggcgtccaggcggcggcggcggckgcggcggcggcggctcctcctcagagtccggctcaggctccggctgcggctccagcccgcgatgccccattccgtgaccctgcgcgggccttcgccctgg

SEQ ID NO: 465550 - DNA, 201 bp, Homo sapiens
ggaattttggcttccaggggaaagggagacttaactgtgaggttgtgagacccctccccacaagatgacacaaagccgggggccaggacagcctcaggccygttcctcaagtttcccagggccctgccttgcccacagagaaggaaaaggagccggcacagccctggagcgtggctagtctgaggatagaggagtggagga

SEQ ID NO: 465551 - DNA, 201 bp, Homo sapiens
gccctgccttgcccacagagaaggaaaaggagccggcacagccctggagcgtggctagtctgaggatagaggagtggaggaggtgactcaggccctgttckagggggtgcctgtctaggggagacaggatcctggcccagcctcgacatcctcgtgtctggagggccaaaagagaggactcagaccctgcccttgggggtc

SEQ ID NO: 465552 - DNA, 201 bp, Homo sapiens
tttttctcaaatagtccttacaacagcctttagaagtaaggactccctctggccttacatagatggagacccaggcacagagaggctaatgtaatcaaccyagagaagcagagtggagacaggaggaatccaggcagtctgcagtttgctgtgactgtgtaggacaatgtggcacctggttctgacttggactcccagccc

SEQ ID NO: 465553 - DNA, 201 bp, Homo sapiens
tctgtaaaatagggatgagaacagcctctgcctcaccaggtggttgaggggttgctgtgagctagttatgggtaaagcatagagcccaggccctggcacarggcaggtatccatgaaggggaggaggcagaggatggccttgaggggagggtgggatggtgccaagtgggtgtctcccccaggatgacaggcttgcacagg

SEQ ID NO: 465554 - DNA, 201 bp, Homo sapiens
ccccgagtgggatgggacagggccagctggaacttcaggcccaccttccctgtggggcgataggagaacctccttctctcaggcctcttgtgggaacacasgaggcacttggcctagcccagggtggaggaaggatagtaacttattactatccttctgggttagtagggttttctggaaggagtggcaattatgctcaga

SEQ ID NO: 465555 - DNA, 201 bp, Homo sapiens
tgctacgccctggcttcccgattccctctccaccccctgtcgctgcccctcaccccacgcccgccaaacccgttccccagtctcgggtgccgatggcccgyctggcgcccaaccaaacaccccgcagaaatggagttctgacctcctcaccccgttcatgccacctacgctccgggtttcaggggattggcccgggcctgg

SEQ ID NO: 465556 - DNA, 201 bp, Homo sapiens
gcccctcccggaccctagccttccagggccctggatgcgggcgcagtcgtgaacccatcagtcactcgacgctgtcctgtctcgttccccccatcaggggyaccatcgtcaaggcacgggacaagctctaccatcccgagtgcttcatgtgcagtgactgcggcctgaacctcaagcagcgtggttacttctttctggacg

SEQ ID NO: 465557 - DNA, 201 bp, Homo sapiens
cctccaagaggctccctcctgtctctaagtcaattccacccctcctcgaagtcccggcttccacccctctcctcagagtcccggcgtttacctcgtggtgkgtttgccttgggcctttcatgccccggctgcacacatcgtctgtgaattgtggctgttcactcccgaggatgtgtcctagactccgggtcgcgtggatct

SEQ ID NO: 465558 - DNA, 201 bp, Homo sapiens
ataaatgatcctgggatagaaggtccactgggggtgggggtggggggacccagccttgctcaggtcctgggtctttactcagctctgagaagcagttggcytaagcctggctgagtgggatctccccactcccctgcccaccttgatccacagaagtcgggcataacttatcagctctgccgtgttcactgctgaggggat

SEQ ID NO: 465559 - DNA, 201 bp, Homo sapiens
tgtttacattgctgtggggtgcttgtgtgcacttgcaagctgggaactgcacagctctggactctgcagggacaaagatccccagtccccactcagacccmcacacacagagatactgccctctcctcatggctgagggggcaggttcaggacactcccacccaaaatgtttcagccatgggcaccaggctggctgtgggg

SEQ ID NO: 465560 - DNA, 201 bp, Homo sapiens
gcctggtctctgcccctcatctgctgtgcctgcagaaggctactcattgtggcctggaaagcaggaaatgggggacaggtgtaggcccagaaggggctgasctcacaatggcactcttgagcctcagcctgcccaaagggccttggacacatgacagtcaaggaccctttctgactgtaggacaggagttacgttttttga

SEQ ID NO: 465561 - DNA, 201 bp, Homo sapiens
tgatccctcaaatctcacccagtcccactctgacccctgacacttgatccttgggtcttagctggttgcattctgactcataagccttaccagaccccaartccacagggtgaaggctggaactgcatcccttcctcctctatttctttctccctcccagcgctgacccagccagaggcctcccgcggagccgggactgca

SEQ ID NO: 465562 - DNA, 201 bp, Homo sapiens
tctttctccctcccagcgctgacccagccagaggcctcccgcggagccgggactgcagagtcgacctgggctccgaggtgtacaggatgctgcgggagccrgccgagcccgtggccgcggagcccaagcagtcaggctccttccgctacttgcagggcatgctagaggccggcgagggcggtaagacgcctgccacctgtc

SEQ ID NO: 465563 - DNA, 201 bp, Homo sapiens
ctccctgcagtgcccaggttgccccctagcgaccccacgtcccgcctcgcagtcacctgccctcttcggtctctgcggcccggtcccacgcccttgctacraccttgctacgccctggcttcccgattccctctccaccccctgtcgctgcccctcaccccacgcccgccaaacccgttccccagtctcgggtgccgatgg

SEQ ID NO: 465564 - DNA, 201 bp, Homo sapiens
ttggcccgggcctggcggcccccggaacctcaagcccacggccagcaagctgggcgctccgctgagcggcctgcaggggctgcccgagtgcacgcgctgckgccacggcatcgtgtgagtaaccgcccccgctgcccctcccggaccctagccttccagggccctggatgcgggcgcagtcgtgaacccatcagtcactcg

SEQ ID NO: 465565 - DNA, 201 bp, Homo sapiens
cacgccaaggcgcgcgtgaagccgcccgagggctacgacgtggtggcggtgtaccccaatgccaaggtggaactcgtctgagctgggaccctgctcccacscctgcttcttaaggtccctgctcggccggtgtaaatatgtttcaccctgtccctctaataaagctcctctgctccaccttgaacctgtcacctggcctgc

SEQ ID NO: 465566 - DNA, 201 bp, Homo sapiens
gaatcacaacgggccagctctagtaatacgaaggtgaggtctgggatgctgcgtgcggcgcgacgacaggaggtatgacctgggtggggtcagggaaagtsttagctgagaactaagagatgagggaggcacaaactctgcacgggggaactgtgtgtgcaaaggtgagctgggggcgagaaaggcctctgtggccgtcat

SEQ ID NO: 465567 - DNA, 201 bp, Homo sapiens
ataggacggcagcccaacaaccagcaggcggccctcaggcaccgggactgggccagaagatggcagaccaagcctgggatctccatatggacaaccccctygctttccagtccctcacaatggcagcagcgaggccaccctgccagcccagatgagcaccctgcatgtgtctccaccccccaggtagcacagagatgcctt

SEQ ID NO: 465568 - DNA, 201 bp, Homo sapiens
ccttccctgtggggcgataggagaacctccttctctcaggcctcttgtgggaacacaggaggcacttggcctagcccagggtggaggaaggatagtaactyattactatccttctgggttagtagggttttctggaaggagtggcaattatgctcagaaccaggtgatggggagaagcaagtcaggtggagcaggcagtcc

SEQ ID NO: 465569 - DNA, 201 bp, Homo sapiens
cagggtggaggaaggatagtaacttattactatccttctgggttagtagggttttctggaaggagtggcaattatgctcagaaccaggtgatggggagaarcaagtcaggtggagcaggcagtccttgcacactcagcctgtcctccccagaccagcagagagctagaactgagcctctaggagatggcacctgctcatct

SEQ ID NO: 465570 - DNA, 201 bp, Homo sapiens
acagagggggaaaatacaggactgggggcccaggaattcccctgacagccattcatccaacaagtatgtgctttatgccaggcactatgcaattgtcttayttcatctccacaaggaacctgatgtggaaagcatcacattccccagctcatagataaagaaacaggttcagagaggtgaagagacttgcccagttagggg

SEQ ID NO: 465571 - DNA, 201 bp, Homo sapiens
ttagtagggttttctggaaggagtggcaattatgctcagaaccaggtgatggggagaagcaagtcaggtggagcaggcagtccttgcacactcagcctgtsctccccagaccagcagagagctagaactgagcctctaggagatggcacctgctcatctggactcagcgcctgcctccatccaagttgagtgtcccaaagc

SEQ ID NO: 465572 - DNA, 201 bp, Homo sapiens
gaaccaggtgatggggagaagcaagtcaggtggagcaggcagtccttgcacactcagcctgtcctccccagaccagcagagagctagaactgagcctctakgagatggcacctgctcatctggactcagcgcctgcctccatccaagttgagtgtcccaaagcaggtagttacccccatcctgctgaaaaatccactgagg

SEQ ID NO: 465573 - DNA, 201 bp, Homo sapiens
gctgtgcctgcagaaggctactcattgtggcctggaaagcaggaaatgggggacaggtgtaggcccagaaggggctgacctcacaatggcactcttgagcytcagcctgcccaaagggccttggacacatgacagtcaaggaccctttctgactgtaggacaggagttacgttttttgagttcccagccatgggcctaccc

SEQ ID NO: 465574 - DNA, 201 bp, Homo sapiens
ccagtgctggctccaagtctctgtaaccatgcgcatgtagttagttgtatgtagggagattggtaggtgcatatgtgttgtccttatgtgtgtgtgtgtgkctttaaagcataattgtgagagtgtgcatgcccctgtttacattgctgtggggtgcttgtgtgcacttgcaagctgggaactgcacagctctggactctg

SEQ ID NO: 465575 - DNA, 201 bp, Homo sapiens
cacagggtgaaggctggaactgcatcccttcctcctctatttctttctccctcccagcgctgacccagccagaggcctcccgcggagccgggactgcagartcgacctgggctccgaggtgtacaggatgctgcgggagccagccgagcccgtggccgcggagcccaagcagtcaggctccttccgctacttgcagggcat

SEQ ID NO: 465576 - DNA, 201 bp, Homo sapiens
ccctagcgaccccacgtcccgcctcgcagtcacctgccctcttcggtctctgcggcccggtcccacgcccttgctacaaccttgctacgccctggcttccygattccctctccaccccctgtcgctgcccctcaccccacgcccgccaaacccgttccccagtctcgggtgccgatggcccgtctggcgcccaaccaaaca

SEQ ID NO: 465577 - DNA, 201 bp, Homo sapiens
atggcccgtctggcgcccaaccaaacaccccgcagaaatggagttctgacctcctcaccccgttcatgccacctacgctccgggtttcaggggattggccygggcctggcggcccccggaacctcaagcccacggccagcaagctgggcgctccgctgagcggcctgcaggggctgcccgagtgcacgcgctgcggccacg

SEQ ID NO: 465578 - DNA, 201 bp, Homo sapiens
agtggggctcaagatccagcccctcccttgcttccaggacctcccctacgcgggacctggtagggagggacagcctcacacagacagggaggaggctatcrgcccggcagggctgggggcttgcaatctcagcccatgaagcctccaggagtcccaagaacatcatccggggctccttccccacaagctataatgatggct

SEQ ID NO: 465579 - DNA, 201 bp, Homo sapiens
gaaaaatgcaggtgttaagagcatagttttaaatttggaatcaggtggcctggattgaaatcttgattcagtcttttatcaattaactatccttctgtacytctctggacctccgtttcctgatctaggaaatgggcttgccttcaggattaatgagataatgcatgtaaaggtgactgggagagtcacaatttcttggcc

SEQ ID NO: 465580 - DNA, 201 bp, Homo sapiens
ggcctggattcccctgagttgcttacttagatatctctgtgagtctaactccaccccccattctagccttcttcagttgaccagcattgtaagagcttccrggtgtgaacactgcttgaccccgaggggtcaatagtggcactgaggtagcctgagttcctgtcctgcaggggaagtagaggtagaattctgacccccaaa

SEQ ID NO: 465581 - DNA, 201 bp, Homo sapiens
ctatgtctccatgtgtctctgtgtcccctgcatgtccttgggcacatacgcaggctgcaagaacaacatccatttgtcccagccctgaggaagcccttctygtatatcctcatgccctgccaggcctccaggtgctggagttggaggtgtttccagcaaggctgcagccaggctacatggggacctcaaccagccactcgg

SEQ ID NO: 465582 - DNA, 201 bp, Homo sapiens
ctaagcctggctgagtgggatctccccactcccctgcccaccttgatccacagaagtcgggcataacttatcagctctgccgtgttcactgctgaggggayttccatgaccccctgtggaagtacgtgggcaaagcctccccaaaccacaacacagctaaccatgcctctgagctggcagggtgggaggtaagccactggc

SEQ ID NO: 465583 - DNA, 201 bp, Homo sapiens
ttatacatgctggtccttctgcctggaacactatctctccctcagatactctcttttcccttaccccctttggaagaaaaatgcaggtgttaagagcatakttttaaatttggaatcaggtggcctggattgaaatcttgattcagtcttttatcaattaactatccttctgtacttctctggacctccgtttcctgatct

SEQ ID NO: 465584 - DNA, 201 bp, Homo sapiens
cagaacttaggctgcaggcctgtctgcccagtcacctttctgtgtgtgatagaagtcatatctctggtcctgtcctcaagaagagtgagggggtcaggctrttctagggccttgttttgccatggcataaggagtagccaagtggggatgactgaggtatccagagccatctctgggccacagagtttgggcaaggagact

SEQ ID NO: 465585 - DNA, 201 bp, Homo sapiens
catctgggctgggcagactcagtgatgactctgccggcagcagcagcaggaggaaagacacacccctcagagcctccattccacctaccccagagccgacrgacgcctgaccccacaccccaccagaggctgtagatgcccagaggatgcgtggataggcttctagctggtcaatgtgtgaggcctggcttgcagtgctat

SEQ ID NO: 465586 - DNA, 201 bp, Homo sapiens
actcctccctcccaccaaagcctctgcccggaggctgagccccacccccactggccacagcccatctggtccccattagaggtcagccctgcctgcatgcytgcccgacagacacacgtgtgagagcgctcacgtttctcaggggcttttgttgggcctgatgtggataggggttttcctgttgctgctgcattgatgggg

SEQ ID NO: 465587 - DNA, 201 bp, Homo sapiens
gctccatctttggagttcagcaaagctggtcctcatccagcctctggagccttaggtgcccagatgacctctatgagcccggggtttcctttcccattaayggatcacattcatcaccctcctccagactgagatacaggctggatgggggaaatgtcagcattgctctgcccatgagtgacctctgaagcttccccactt

SEQ ID NO: 465588 - DNA, 201 bp, Homo sapiens
gagtgcttcatgtgcagtgactgcggcctgaacctcaagcagcgtggttacttctttctggacgagcggctctactgtgagagccacgccaaggcgcgcgwgaagccgcccgagggctacgacgtggtggcggtgtaccccaatgccaaggtggaactcgtctgagctgggaccctgctcccacgcctgcttcttaaggtc

SEQ ID NO: 465589 - DNA, 201 bp, Homo sapiens
ggcgcgcgtgaagccgcccgagggctacgacgtggtggcggtgtaccccaatgccaaggtggaactcgtctgagctgggaccctgctcccacgcctgcttyttaaggtccctgctcggccggtgtaaatatgtttcaccctgtccctctaataaagctcctctgctccaccttgaacctgtcacctggcctgccaccctcc

SEQ ID NO: 465590 - DNA, 201 bp, Homo sapiens
ccaaacccgttccccagtctcgggtgccgatggcccgtctggcgcccaaccaaacaccccgcagaaatggagttctgacctcctcaccccgttcatgccayctacgctccgggtttcaggggattggcccgggcctggcggcccccggaacctcaagcccacggccagcaagctgggcgctccgctgagcggcctgcaggg

SEQ ID NO: 465591 - DNA, 201 bp, Homo sapiens; identical to SEQ ID NO: 210819

SEQ ID NO: 465592 - DNA, 201 bp, Homo sapiens; identical to SEQ ID NO: 210790

SEQ ID NO: 465593 - DNA, 201 bp, Homo sapiens
cacaattgaatgagacagtcaggttcttaacaagcaagctcggggctttttatttttttattttttatttttgtattttgttttgagatggagtctcactytgttgcctgaagtgcagtggtctgatctcagctcactgcaacctctgcctcctgattcaagtgattcttctgcctcagcctcccaagtagctggaactac

SEQ ID NO: 465594 - DNA, 201 bp, Homo sapiens
ttgtttgccacaatatataatccaatgaaaactgtgaaccagggggtggagccaagatggccaaataggatcagctccagtctacagctcccagcatgagygaggcagaagatgaatgatttctgcatttccaactgaggcaccgggtgcatctcactggggattgttggacagtgggtgcaggtgagtaagtgcagtgca

SEQ ID NO: 465595 - DNA, 201 bp, Homo sapiens
tgtggaaacctcaagcctttaggtcaactcctgtaatgcagagttctccagtaaaaggtacaacttggccgggcgcagtggctcacgcctataatcccagmactttgggaggccaaggcgggcagatcacgaggtcaggagtttgagaccagcctggccaacatggtgaaaccctgcctctactaaaaatacaaaaattgg

SEQ ID NO: 465596 - DNA, 201 bp, Homo sapiens
atatataatccaatgaaaactgtgaaccagggggtggagccaagatggccaaataggatcagctccagtctacagctcccagcatgagcgaggcagaagaygaatgatttctgcatttccaactgaggcaccgggtgcatctcactggggattgttggacagtgggtgcaggtgagtaagtgcagtgcaccgagcctgagc

SEQ ID NO: 465597 - DNA, 201 bp, Homo sapiens
aaaatatctttgaaaaatattctttttttttttttgagacggagtctcgctctatcgcccaggctggagtgcgatggtgcaatctcggctcactgcaaccyctgcctcccggattcaagcgattctcctgcctcagcctcctgagttgctgggattataggcgtgtgccaccatgcctggctaatttttgtatttttagta

SEQ ID NO: 465598 - DNA, 201 bp, Homo sapiens
tggtagaaacaggttttcgccatgctgcccaggccggtctcgaactcctgagctcaaggaatcaacccacctcagcctcccaaaatgctgggattacaggygtgagccaccacacctggctgaagacaggtcttctgaaataccttagtcagatgaaaagcaaagaataaaagaataaaaaagaatgaagaaagcctatat

SEQ ID NO: 465599 - DNA, 201 bp, Homo sapiens
agggtggaggcgtgattagggtgggcacctctgagtatatttaaagtaattcagctttacaattcattattttttcagttggaaaggccctggactggagyttcgacatgtcttcccaaggtgagtgcctttggtagagaactcaatgtgttttgttgtgagaagactgtttccatgaaaatgagggttttgtagggtttc

SEQ ID NO: 465600 - DNA, 201 bp, Homo sapiens
cagctcccagcatgagcgaggcagaagatgaatgatttctgcatttccaactgaggcaccgggtgcatctcactggggattgttggacagtgggtgcaggygagtaagtgcagtgcaccgagcctgagccaaagcagggcgaggcattgcctcacccaggaagcacaaggggtcggggaattctctttcctaggggtgacg

SEQ ID NO: 465601 - DNA, 201 bp, Homo sapiens; identical to SEQ ID NO: 422163

SEQ ID NO: 465602 - DNA, 201 bp, Homo sapiens
tctttttttttttttgagacggagtctcgctctatcgcccaggctggagtgcgatggtgcaatctcggctcactgcaacctctgcctcccggattcaagcrattctcctgcctcagcctcctgagttgctgggattataggcgtgtgccaccatgcctggctaatttttgtatttttagtagagacggggtttcaccatgt

SEQ ID NO: 465603 - DNA, 201 bp, Homo sapiens
ctcacattttaaaattactacttaatccaaatgaatgtcacttaagtttaataatggtcaacacaactaaattagtttgaaagaaatcccaatccatgtartttccttatggaaaggccaattgtttctgaacattaaaaatgtgtgcccataacacagtgttttctcattacctgaaggaaaagatctgaaaccaattca

SEQ ID NO: 465604 - DNA, 201 bp, Homo sapiens
gagtgggtctcagtgagcaagcaggagaagattgcatataggtcacaagtaggttggagatagattccagacagcctaggtttacacgtaaaccatggtgycactgtctccagtgaaggaggttatggttctagaaatgcatgatgcatgacctccggtatcatatgtgcagttctagggagattgtcttattttttataa

SEQ ID NO: 465605 - DNA, 201 bp, Homo sapiens
gcatttccaactgaggcaccgggtgcatctcactggggattgttggacagtgggtgcaggtgagtaagtgcagtgcaccgagcctgagccaaagcagggcraggcattgcctcacccaggaagcacaaggggtcggggaattctctttcctaggggtgacggatggcacctggaaaatcgggtcactcctaccctaatact

SEQ ID NO: 465606 - DNA, 201 bp, Homo sapiens; identical to SEQ ID NO: 422165

SEQ ID NO: 465607 - DNA, 201 bp, Homo sapiens
cgctctatcgcccaggctggagtgcgatggtgcaatctcggctcactgcaacctctgcctcccggattcaagcgattctcctgcctcagcctcctgagttrctgggattataggcgtgtgccaccatgcctggctaatttttgtatttttagtagagacggggtttcaccatgttggtcaggctggtctcaaactcctgac

SEQ ID NO: 465608 - DNA, 201 bp, Homo sapiens
cccctggatggagcgagaaggtcacgtgtaacgtaagctcactgtgtgttttgtatttttcttttttcttttggagacggagttttgctcttgtcacccargctggagtgcaatggcgcgatctcggctcactgcaacctccatctcccaggttcaagcgattctcctgcctcagcctcccaagtagctgggattacagac

SEQ ID NO: 465609 - DNA, 201 bp, Homo sapiens
aggggtgacggatggcacctggaaaatcgggtcactcctaccctaatactgcgcttttccaatggtcttagcaaatggcatgccaggagattatatcccaygcatggccaatggagcctcgctcattgctagcacagcagtctgagatcaaactgcaaggtggcagcaagggtgggggaggggcacacgccattgctgagg

SEQ ID NO: 465610 - DNA, 201 bp, Homo sapiens
gagaaatgcagaaggttttatagatgagcttgagggggtggtgtctgatttacatagggcaccaaagattggtcagaccagatgtgccatttgcatagcaygcaaagaagctggctaccccatccaaatcttattatgcagatgtgttctctacctggccgccaccatgttgcctgcttttttactgtacacgtagtgaca

SEQ ID NO: 465611 - DNA, 201 bp, Homo sapiens
agattatatcccacgcatggccaatggagcctcgctcattgctagcacagcagtctgagatcaaactgcaaggtggcagcaagggtgggggaggggcacaygccattgctgaggtttcagtaggtagacaaaacatctgggaagctccaactaggtggagcccactgcagctcaaggaggcctgcctgtctctgtagactc

SEQ ID NO: 465612 - DNA, 201 bp, Homo sapiens
cagaaggagaagagatgggaaaaggcatagaaaagcctttttgttagaaaagaaatgatttgggggctgctttttgttagaagggaagccttgctgaagaytctttttacctgcattatctgcctccaaaactagccaggaccagtctatgttcatgttaccaaaataccagggcttcagtctaggtcctgctgctggcca

SEQ ID NO: 465613 - DNA, 201 bp, Homo sapiens
cctcccaagtatctgggaccacaggcacacaccactgcatccagctaattttttgtatttttggtagagacagggttttgccatgttgcccaggctgatckcaaactcctgagctcaagccattcgcccccgcttggcctcccaaattgctgggattacagttgtgagccacaggtaggatgttctaatcttgctttgtgc

SEQ ID NO: 465614 - DNA, 201 bp, Homo sapiens
aaaaaccggaaactcaaaaaatcagagcccctctcctcctccaaaggaacgcagctcctcaccagcaatggaacaaagctggatggagaatgactttgacragttgagagaagaaggcttcagacaatcaaactactccaagctaaaggaggaagttcgaacccatggcaaagaagttaaaaaccttgaaaaaaaagatta

SEQ ID NO: 465615 - DNA, 201 bp, Homo sapiens
tagtcccagctactcaggaggctgaggcgcaagaatcgcttgaacccaggaggtggacgttgcagtaaatagagatagcatcactggtctccagcctcggmgacagtgagactccatctcaaaaataaacaaatcaataaacttttaactgaaatatactgtgcatgccaaaaatagcaaatatttacacatgtttaattt

SEQ ID NO: 465616 - DNA, 201 bp, Homo sapiens
agttaaaaaccttgaaaaaaaagattagatgaatggctaactagaataaccaatgcagaggagtccttaaaggacctgatggagctgaaaaccatggcagragaactacgtgatgaatgcacaagcctcagtagccgattcaatcaactggaagaaagggcatcagtgatggaagatcaaatgaatgaaataaagcgagaa

SEQ ID NO: 465617 - DNA, 201 bp, Homo sapiens
gtgggggccaatattcaatactcttaaagaaaagaattttcaaccagaatttcatatccagccaaactaagcttcataagtgaaggagaaataaaatcctytacagacaagcaaatgctgagagattttgtcaccaccaggcctgccctaaaagagctcctgaaggaagcacttaacatggaaaggaaaaactggtaccag

SEQ ID NO: 465618 - DNA, 201 bp, Homo sapiens
tcagcctcccgagtagctgggactacaggcgcccgctaccacgcccggctaattttttgtatttttagtagagacggggtttcaccgtgttagccaggatrgtctcgatctcctgacctcgtgatccgcccgcctcggcctcccaaagtgctgggattacaggcgtgagccaccgcgcccggccttttttttttttttttt

SEQ ID NO: 465619 - DNA, 201 bp, Homo sapiens
gagttttgctctgtctcccaggctagagtgcagtggcacgatctcagctcacttcaagctctgcctcccaggttcacgccattctcctgcctcagcctccygagtagctaggactacaggcgcccgccaccatgcccagctaattttttgtatttttagtagagacggggtttcaccatgttagccaggatggtctcaatc

SEQ ID NO: 465620 - DNA, 201 bp, Homo sapiens
gcatgtgtgaaatttggctgcaagctaaatctggcttcatgcttaactatattaaaaaataattgccagccgggcgcagtggctcatgcctgtaatcccascactttgggaggccgaggcaggtggattacgacgtcaggagttcaagaccagcctgaccaatacggtgaaaccccatctctactaaaaatacaaaaatta

SEQ ID NO: 465621 - DNA, 201 bp, Homo sapiens
aagatggggaaaaaacagcagaaaaaccggaaactcaaaaaatcagagcccctctcctcctccaaaggaacgcagctcctcaccagcaatggaacaaagckggatggagaatgactttgacgagttgagagaagaaggcttcagacaatcaaactactccaagctaaaggaggaagttcgaacccatggcaaagaagttaa

SEQ ID NO: 465622 - DNA, 201 bp, Homo sapiens
aatacaaaaattagctgggcatggtggcatgtgcctgtagtcccagctactcaggaggctgaggcaggagaatcatttgaacccgggaggaggaggttgcrgtgagccaagatcatgccactgcactccaggttgggtgacagaacaagactccatctcaaaaaaatgaaaataaaaaataataataataattgccaaact

SEQ ID NO: 465623 - DNA, 201 bp, Homo sapiens
tcataagtgaaggagaaataaaatcctctacagacaagcaaatgctgagagattttgtcaccaccaggcctgccctaaaagagctcctgaaggaagcactwaacatggaaaggaaaaactggtaccagccactgcaaaaacatgctcaattgttaagaccatcgaggctaggaagaaactgcatcaactaacgagcaaaat

SEQ ID NO: 465624 - DNA, 201 bp, Homo sapiens
ctgtgaacataagatgtttatctaaggacaacaagttaaacatccaggcattttgtcaataactaagaagatttaactgttttcattgaacaaataatacyaaattagtcttattcatcaaaaaaaatcacataaagattattctggttttggctgggtttatagtcttataacatttatatatcaaaccctgacatctta

SEQ ID NO: 465625 - DNA, 201 bp, Homo sapiens
ctatggcatgcttgaagtttttgttttgtcctaaatgttttctttttttcttttcttttttttttttagtaatgattcattttactttagaaaaaaattcrccaaacaaggtgctttctcatacaaaattattatcttttctttataaccttctttatgaaacatacgtcttcttttttttcttcttcttctttttgagat

SEQ ID NO: 465626 - DNA, 201 bp, Homo sapiens
ggaaaaactggtaccagccactgcaaaaacatgctcaattgttaagaccatcgaggctaggaagaaactgcatcaactaacgagcaaaataaccagctaayatcataatgacaggatcaaattcacacataacaatattaaccttaaatgtaaatgggctaaatgctccaattaaaagacacacactggcaaattggataa

SEQ ID NO: 465627 - DNA, 201 bp, Homo sapiens
ttttgagatggagtctctctctgtcacccaggctggagtgcagtggcagcaatctgagctcactgcaacctccacctcccaggttcaagcgattctcctgmctcagcctcccaaatagctgggattacaggtgcatgccaccacacccagctaatttttgtattttagtagagacagcatttagccatgttggccaggctg

SEQ ID NO: 465628 - DNA, 201 bp, Homo sapiens
aagcaaatggaaaacaaaaaaaggcaggggttgcaatcctagtctctgataaaacagactttaaaccaacaaagatcaaaagagacaaagaaggccattayataatggtaaagggatcaactcaacaagaagagctaactatcctaaatatatatgcacccaatacaggagcacgcagattcataaagcaagtacttagtg

SEQ ID NO: 465629 - DNA, 201 bp, Homo sapiens
gctgctgtagttagtggtggtgacggtggtttgggccagcttgctagctgtgcaggtggatgggactaatgagactgtagatgtttgagatggagctgacraagtttactatgtgtgggatatgctgtgaaaggtaaggtggactcaaaggttacttggatgcttgacttaagtctatggaagataggaattgccttttac

SEQ ID NO: 465630 - DNA, 201 bp, Homo sapiens
ctctctctgtcacccaggctggagtgcagtggcagcaatctgagctcactgcaacctccacctcccaggttcaagcgattctcctgcctcagcctcccaartagctgggattacaggtgcatgccaccacacccagctaatttttgtattttagtagagacagcatttagccatgttggccaggctgatattgaaatcctg

SEQ ID NO: 465631 - DNA, 201 bp, Homo sapiens
aaggcaggggttgcaatcctagtctctgataaaacagactttaaaccaacaaagatcaaaagagacaaagaaggccattacataatggtaaagggatcaaytcaacaagaagagctaactatcctaaatatatatgcacccaatacaggagcacgcagattcataaagcaagtacttagtgacctacaaagagacttagac

SEQ ID NO: 465632 - DNA, 201 bp, Homo sapiens
tttgtcttttctaactgctgttgctttaaagtttgtgttgtctgataaaaaatagctactcctgcttgcttttggtatccattgccatggatgtccttttycacccctttaccttaagtttatgtgagttcttacatgttaggtgagtctcttgaaggcagcagatatgtgattggtgagttcttatccattctgcaattc

SEQ ID NO: 465633 - DNA, 201 bp, Homo sapiens
acgagaacaaagacacaacataccagaatctctgggacacattcaaagcagtgtgtagaaggaaatttatagcactgaaagcccacaagagaaagcaggaragatctaaattgacaccctaacatcacaatgaaaagaactagagaagcaagagcaaacacattcaaaagctagcagaaggcaagaaataactaagatcag

SEQ ID NO: 465634 - DNA, 201 bp, Homo sapiens
ttaggaaaagaggaagtcaagttgtccctgtttgcagatgacatgattgtgtatctagaaaaccccatcgtctcagcccaaaatctccttaagctgataarcaacttcagcaaagtctcaggatacaaaatcaatgtgcaaaaatcacaagcattcttatacaccaataacagacaaacagagagccaaatcatgagtaaa

SEQ ID NO: 465635 - DNA, 201 bp, Homo sapiens
gtcttgacctcctcagctcaagcaatcctcacatctcggtctcctgagtagctgggaccacaggtgcataccactatggccagctcttttttttggggggktgggggggcagagacagaatctcactatgttgcccaggccggtcttgaactcctggttcaagtgatcctcctgcctcagcctcccaaagtgctgtgatta

SEQ ID NO: 465636 - DNA, 201 bp, Homo sapiens
tgggttcatagttgtataacttttttttttttgagatggagtttcactcttgttgcccaggctggagtacgatggcacgatcttggctcactgcaacctcygcctcccgggttcaagcaattctcctgcctcagcctcccaagtagctgggattacaggcatgcgccagcacaccttgctaattttgtatttttagtacag

SEQ ID NO: 465637 - DNA, 201 bp, Homo sapiens
aataaaatacctaggaatccaacttacaagggatgtgaaggacctcttcaaggagaactacaaaccactgctcaatgaaataaaagaggatacaaacaaayggaagaacattccatgctcatggataggaagaatcaatatggtgaaaatggccatactacccaaggtaatttatagattcaatgccatccccatcaagct

SEQ ID NO: 465638 - DNA, 201 bp, Homo sapiens
tgtaaagatccaagcaggattagagggttgggactttcagccccaccctccaacttctgggaaggggaaggcgctgatggttaagttgatcaccagcagtmgatggtttaatcaatcatgcctgtgcaatgaagcctccgttaaaaaaaaaaaaaaaaagaaaagaaagaaaaagggaaaaaaaaaaagtgggtttgggga

SEQ ID NO: 465639 - DNA, 201 bp, Homo sapiens
ggtaatttatagattcaatgccatccccatcaagctaccaatgaatttcttcacagaattggaaaaaactactttaaagttcatatggaaccaaaaaagarcccatattgtcaagtcaatcctaagccaaaagaacaaagctggaggcatcacgctacctgacttcaaactatacgacaaggctacagtaaccaaaacagc

SEQ ID NO: 465640 - DNA, 201 bp, Homo sapiens
aaagttcatatggaaccaaaaaagagcccatattgtcaagtcaatcctaagccaaaagaacaaagctggaggcatcacgctacctgacttcaaactatackacaaggctacagtaaccaaaacagcatggtaccagtaccaaaacagagatatagaccaatggaacagaacagagccctcagaaataatgccgcatatcta

SEQ ID NO: 465641 - DNA, 201 bp, Homo sapiens
atctacaactatctgatctttgacaaacctgacaaaaaacaagaaatggggaaaggattccctatttaataaatggtgctgggaaaactggctagccataygtagaaagctgaaaccggatcccttccttacaccttatactaaaattaattcaagatggattaaagatttaaatgttagacctaaaaccatgaaaaccct

SEQ ID NO: 465642 - DNA, 201 bp, Homo sapiens
agagagaatagcccgagtggagattcctccaggtgttcaaaggacaagcaaagagactgacatagctgcggggcactgagtgagggggaaaagaagaagcsatgtcaggaataaatttacagaagggtacagattgagtaaggcttgaaggctattaaaaaataaaattttacgcctggcgtggtggctcatgcctgtaat

SEQ ID NO: 465643 - DNA, 201 bp, Homo sapiens
cctcactctcaacccatctcaggatcatcaaaatcaccaaataaatcactgaatagggtcttcctcagccttcaaaaatctactgttattttctggccccyctttcatctcagcacccacttcccttatcttctcccccacccctctctgtcagcgacacccaccaagtgttaagggactcccttggaggaaatgccatga

SEQ ID NO: 465644 - DNA, 201 bp, Homo sapiens
ttaggaagttgtatatgtaccaatctgaggtttttcttcccctttctggtggagtgtccccaggacatattccactgttttgtctcttgatgcacatgccmtggaagttgctcctccctggcatctgcattcaattaacactttagtgtaacaggtatggaccatcagaaaatggcctctccctggccctggcagccagtt

SEQ ID NO: 465645 - DNA, 201 bp, Homo sapiens
catggtgaaaccctgtctctaccaaaaatacaaaaattagctgggcatggtggtgggcacctgtaatcccagttacctgggaggctgaggcaggagaattkcttgagcccgggaggtggatgtggcagtgagcagagatcgcaccactgctctccagcctgggtgacagagtgagactctgtctcaaaaaataaattaatt

SEQ ID NO: 465646 - DNA, 201 bp, Homo sapiens
tctaccaaaaatacaaaaattagctgggcatggtggtgggcacctgtaatcccagttacctgggaggctgaggcaggagaattgcttgagcccgggaggtrgatgtggcagtgagcagagatcgcaccactgctctccagcctgggtgacagagtgagactctgtctcaaaaaataaattaattaatacattaaataattt

SEQ ID NO: 465647 - DNA, 201 bp, Homo sapiens
tgtggcagttagagcacagtttattcttttttttttttttttttttttttttttttgagacaagagtcttgctctgttgcccaggctggagtacagtggtrcaatctcagttcactgcaacctccgcctcctgggttcaagcaattctcctgcctcagcctcctgagtagctgggattacaggcacacgccacagtgcctg

SEQ ID NO: 465648 - DNA, 201 bp, Homo sapiens
tcagcctcctgagtagctgggattacaggcacacgccacagtgcctggctaatttttttgtatttttagtagagacggggtgtttcaccatgttgaccagrctggtcttgaactcctgacctcaagggatcctcctgcctcttcctcccaaagtgctgggattacaggcgtgagccaccatgcccagcgcatagtttattc

SEQ ID NO: 465649 - DNA, 201 bp, Homo sapiens
acttcccaaaagaagacatttatgcagccaaaagacacatgaaaaaatgatcatcatcactgaccatcagagaaatgcaaatcaaaaccacaatgagataycatctcacaccagttagaatggcgatcattccaaagtcaggaaacaacaggtgctggagaggatgtggagaaataggaacacttttacactgttggtggg

SEQ ID NO: 465650 - DNA, 201 bp, Homo sapiens
tgaggtatgtctgacatcccatctcatcacggctgggaactcagtttttgggggtttttttgctttttttttgagacagagtcttgctctgtcacccaggytggagtgcagtggcgtgatctcagcacactgcaacctccgcctcccaggttcaagcgattatcctgcctcatcctcccgagtagctgggattacaggcat

SEQ ID NO: 465651 - DNA, 201 bp, Homo sapiens
ggatgtggagaaataggaacacttttacactgttggtgggactataaactagttcaaccattgtggaagtcagtgtggcgattcctcagggatctagaacyagaaatgccatttgacccagccatcccattactgggtatatgcccaaaggattataaatcatgctgctataaagacacacgcacacgtatgtttattgcg

SEQ ID NO: 465652 - DNA, 201 bp, Homo sapiens
tgcctgtaatcccaacactttgggaggcagaggtgggaggatagcttgagtccagaagtttgagacaagcctaggcaacatagcaagaccctatttctacraaagaaataaaaattggccaggtgtggtgcatgcctgtagttccagctacttgggagcctgaggcaggagggatcatctgagcccaagagttagaaactg

SEQ ID NO: 465653 - DNA, 201 bp, Homo sapiens
gagaaataggaacacttttacactgttggtgggactataaactagttcaaccattgtggaagtcagtgtggcgattcctcagggatctagaaccagaaatrccatttgacccagccatcccattactgggtatatgcccaaaggattataaatcatgctgctataaagacacacgcacacgtatgtttattgcggcactat

SEQ ID NO: 465654 - DNA, 201 bp, Homo sapiens
ggacaataaatcagctcaaggctggggcaaactggaaccagcaactgcttgttacctttagatcattaacatgtcctcataatactaaactccccacccayaggagaaaatcaccaccattttctgaatgtacctggtatgaaaaggcatgtttatgagatgcaccttcatgtctggggttcctctcttcacatgattaca

SEQ ID NO: 465655 - DNA, 201 bp, Homo sapiens
ctgggttaggcttaggtttattgttattgatgacccctggatggagcgagaaggtcacgtgtaacgtaagctcactgtgtgttttgtatttttcttttttyttttggagacggagttttgctcttgtcacccaagctggagtgcaatggcgcgatctcggctcactgcaacctccatctcccaggttcaagcgattctcct

SEQ ID NO: 465656 - DNA, 201 bp, Homo sapiens
gcggcactattcacaatagcaaagacttcgaaccaagccagatgtccaacaatgatagactggattaagaaaatgtggcacatatacaccatggaatactrtgcagccataaaaaatgatgagttcatgtcctttgtagggacatggatgaagctggaaaccatcattctcagcaaactatcgcaaggacaaaaaaccaaa

SEQ ID NO: 465657 - DNA, 201 bp, Homo sapiens
accaacaagcgagtaccagctgtgctcattactactgaggtgtcattgtttccagaactttttaatagacaaagctattaaataaacacacacacacacayacacacacatatacacacattatgaattcgtactaataaccctaattccagtcaataccctgggactggtgctctcttccctctttcatatctgtatctt

SEQ ID NO: 465658 - DNA, 201 bp, Homo sapiens
gcgagaaggtcacgtgtaacgtaagctcactgtgtgttttgtatttttcttttttcttttggagacggagttttgctcttgtcacccaagctggagtgcamtggcgcgatctcggctcactgcaacctccatctcccaggttcaagcgattctcctgcctcagcctcccaagtagctgggattacagacgcccaccaccac

SEQ ID NO: 465659 - DNA, 201 bp, Homo sapiens
tatacctaatgttaaatgacgagttaatgggtgcagcacaccaacttggcacatgcatatatatgtaacaaacctgcacgttgtgcacatgtaccctgaawcttaaagtataattaaaaaaaaaaaaaaagaaaaaagaaaactgtgaaccaaaatttgggtaaggccaaggcaggaggattacttgagataggagttcaa

SEQ ID NO: 465660 - DNA, 201 bp, Homo sapiens
aagctcactgtgtgttttgtatttttcttttttcttttggagacggagttttgctcttgtcacccaagctggagtgcaatggcgcgatctcggctcactgyaacctccatctcccaggttcaagcgattctcctgcctcagcctcccaagtagctgggattacagacgcccaccaccacacccagctaattttagtatttt

SEQ ID NO: 465661 - DNA, 201 bp, Homo sapiens
cagtctcactctgtcacccagcctggagtgcagtggcacgatctcggctcactgcaacctctgcctgctgggttcaagcgattctcctgcctaagcctccygagtagctgtgactacaggtgcccaccaccatgactggttaatttttgtatttttagtagagacggggtttcaccatattggccaggctggtctcgaact

SEQ ID NO: 465662 - DNA, 201 bp, Homo sapiens
tttttttttttttttttttttttttgagacagagtcttgctctgtcgcccaggctggaatacaatggcatggtctcgactcactgcaacctctgcctcccrggttcaagtgattctcctgcctcagcctcccaagtagctgggattacaggcacccaccactacactaggctaattttttgtgtttttagtagagacaggg

SEQ ID NO: 465663 - DNA, 201 bp, Homo sapiens
ttttttttttttttttttttttttgagacagagtcttgctctgtcgcccaggctggaatacaatggcatggtctcgactcactgcaacctctgcctcccargttcaagtgattctcctgcctcagcctcccaagtagctgggattacaggcacccaccactacactaggctaattttttgtgtttttagtagagacagggt

SEQ ID NO: 465664 - DNA, 201 bp, Homo sapiens
gtcacaaattttaaaagttgaaaactcccaggcagtgactaatgggcaaacagccaaagctgaagaatttagagaggagaaaacagtaggaggaataatayatgatagagtgttaactggattgcttctggccaaaagtagagataaagggtcaggcatggtgatttgcacctctagtccaagcactttaggaggctgagg

SEQ ID NO: 465665 - DNA, 201 bp, Homo sapiens
gaatacaatggcatggtctcgactcactgcaacctctgcctcccaggttcaagtgattctcctgcctcagcctcccaagtagctgggattacaggcacccrccactacactaggctaattttttgtgtttttagtagagacagggtttcaccatgttggccaggctggtctcgaactcctgacgtcaggtgatccacccgc

SEQ ID NO: 465666 - DNA, 201 bp, Homo sapiens
gcttctcgggaggctgaggtgggagaattgcttgagcctgggaaattgaggctgcagagagctgtgatcgtgccacagcactgcattctgggtgatgggartgagatcctgccaaaaaaaaaaagataaggcattattttctgagatcagcaaagatagtttcttctacatttatgcccgtcctaggaaggacataggatg

SEQ ID NO: 465667 - DNA, 201 bp, Homo sapiens
gctagcagtgagcgaggctccatgggcgtaggaccctctgagccaggcgcagcatataatctcctggtgtgccgtttgctaagaccattggaaaagcgcartattagggtgggagtgacctgattttcctggtgccgtctgtcacccctttctttcactaggaaagggaattccctgaccccttgcacttcccaagtgagg

SEQ ID NO: 465668 - DNA, 201 bp, Homo sapiens
ggcatggtggcgtgcgccagtactcccagctattcaggaatctgaggcaggagaatcgcttgaacccaggaggcagaggttgcagtgagccgagatcgtgycactgcactccagcctgggagacagagcgagactctgtctcaaataataatatcaatggtattgcatatatatatagtaagttttaaaatcaggaagtat

SEQ ID NO: 465669 - DNA, 201 bp, Homo sapiens
catggtggcgtgcgccagtactcccagctattcaggaatctgaggcaggagaatcgcttgaacccaggaggcagaggttgcagtgagccgagatcgtgccrctgcactccagcctgggagacagagcgagactctgtctcaaataataatatcaatggtattgcatatatatatagtaagttttaaaatcaggaagtatgt

SEQ ID NO: 465670 - DNA, 201 bp, Homo sapiens
ggagtgcagtggtgcgatctcggctcactgcaagctccgcctcccgggttcacaccattgtcctgcctcagcctcccgagtagctgggactacaggtgccygccaccacacccggctaattttttgtatttttagtagagatggggtttcactgtgttagctaggatggtctcaatctcctgacctcttgatccacccccc

SEQ ID NO: 465671 - DNA, 201 bp, Homo sapiens
gccaaagtacagattttgcacttcttttgttaaagttattcataagtattttcgtctttttgatggaattttttcttttcttttatcttttttttttatctttttttttttttttaagacgagatctctctctgtcacccaggctggagtgcagtggcacaatctcaactcactgcaacctccgcctcccaggctcaagtg

SEQ ID NO: 465672 - DNA, 201 bp, Homo sapiens
attttttcttttcttttatcttttttttttatctttttttttttttttaagacgagatctctctctgtcacccaggctggagtgcagtggcacaatctcarctcactgcaacctccgcctcccaggctcaagtgatcctccaacctcagcctcccaagtatctgggaccacaggcacacaccactgcatccagctaatttt

SEQ ID NO: 465673 - DNA, 201 bp, Homo sapiens
agctccagtggaaaattcaagtcctccttcaactgcatccaaaaataataatttttactagatacctgatgtagagaaggcataccctgcccagatacagkagaatctcccaaaagtggatgacaagatcagccatgactgtgaagagatggacacctacaaaatacaaaccaaaatgctttcagaaaaatttgaaagaat

SEQ ID NO: 465674 - DNA, 201 bp, Homo sapiens
tcttaaggcggctgcaacaaagcaccctaaactgggtggcttaaaacaacaggaatttattctctcagagtggtaggggctggaagtctgaatcaagatgycagcagggccaggctccctcctcgcttgctgtcaccagcagcccttggtgttcttggcttgcagctgcataactcctgtctttaactccatcatcacgcg

SEQ ID NO: 465675 - DNA, 201 bp, Homo sapiens
ctcccaggctcaagtgatcctccaacctcagcctcccaagtatctgggaccacaggcacacaccactgcatccagctaattttttgtatttttggtagagrcagggttttgccatgttgcccaggctgatctcaaactcctgagctcaagccattcgcccccgcttggcctcccaaattgctgggattacagttgtgagcc

SEQ ID NO: 465676 - DNA, 201 bp, Homo sapiens
gtatttcaatttttttttttttttttttgatacagagtcttactctatcactcaggctggagtagagtgtagcgatctctcctcactgcagcccctgcctwccccaggctcaagcgatgctcccacctcaacctcccgaatagctgggattgtaggtgcacaccaccacgcctggctaatttttgtttcatgttggccagg

SEQ ID NO: 465677 - DNA, 201 bp, Homo sapiens
ataaattctcagccggcgcggtggctcacccctgtaatcccagcactttgggaagccaaggcaggcaaatcacaaggtcaggagttcaagaccagcctggmcaacatggtgaaatcccgtctctactaaaaatacaaacaattagctgggcgtagtggcaggtgcctgtaatcccagctacttgggaggctgaggcaggag

SEQ ID NO: 465678 - DNA, 201 bp, Homo sapiens
ctgggcgtagtggcaggtgcctgtaatcccagctacttgggaggctgaggcaggagaattgcttgaacccaggaggcagaggttgcagtgagccaagatcrcaccactgcactccagccgggatgacaaaataaataaataaataaaagataaattctcaaatccagatagtaaatatgttaggctgtgtggaccctggac

SEQ ID NO: 465679 - DNA, 201 bp, Homo sapiens
gttatcctgatttcaccactaggaaaacactggccaacaaatttgattgtccggttaacgtgataaacgtaagttcaacctcgtatgcatgtttcttagatttttttttttttttaggaaaggtctcactccagtcgcccagtctggagtgcaatggagcgatcacggctcactgcagcctcaacttcctgggctcaggtg

SEQ ID NO: 465680 - DNA, 201 bp, Homo sapiens
gaagtttttttaaaaaaaaataggttgtagaattgaaacacaaaatttcttgtaatcttataaagggcaaatcaatatcttaagaaaatgttgctttaacrtaggggaatgttctttagaaagggtattataaataattccctgttaattagagctaaattaatcacatacaaaattccttttttaaactccccttcatga

SEQ ID NO: 465681 - DNA, 201 bp, Homo sapiens
tagtagagacagggtttcaccatgttggccaggctggtctcgaactcctgacgtcaggtgatccacccgcctcagcctcccaaagtgctgggattacaggygtgagccaccatgcctggcctaaaaaatttttatgatagacagaaaaataaattcttggtaagtcagtgaagtttgtaaatggggactttgacttttgac

SEQ ID NO: 465682 - DNA, 201 bp, Homo sapiens
attttttgagatgaagtcttgctcttgtactccaggctggagttcaatggcgtgatctcggctcactgcaacctccggctcccgggttcaagcgattctcytgcctcagcctcctgagtagcagggattattacaggtgcctgccaccacgcccggcaggcaactgtatttttagtagagagggggtttcatcatgttggc

SEQ ID NO: 465683 - DNA, 201 bp, Homo sapiens
cagatatgtgattggtgagttcttatccattctgcaattccatatgttttaagtggagcacttaggccatttacattcaatgttagtattgagatgtgagrtactattccattcattgtgctatttgttgcctgtataccttggttggttggtttgttgggacagagtcttgctctgttgcccaggctggagtgcagtggt

SEQ ID NO: 465684 - DNA, 201 bp, Homo sapiens
actggctttaaacttcctataataaaagaaaattgtgggggcatgcagtggctcacacctgtaatcccaacactttgggaggccaaggcgggcggatcacytgaggtcaggagttcaagaccagcctggccaacgtggcaaaatcccgtctctactaaatatacaaaaattagcagggcatggtggtacatgcctgtaatc

SEQ ID NO: 465685 - DNA, 201 bp, Homo sapiens
gagttcttacatgttaggtgagtctcttgaaggcagcagatatgtgattggtgagttcttatccattctgcaattccatatgttttaagtggagcacttakgccatttacattcaatgttagtattgagatgtgaggtactattccattcattgtgctatttgttgcctgtataccttggttggttggtttgttgggacag

SEQ ID NO: 465686 - DNA, 201 bp, Homo sapiens
tgtgggggcatgcagtggctcacacctgtaatcccaacactttgggaggccaaggcgggcggatcacctgaggtcaggagttcaagaccagcctggccaaygtggcaaaatcccgtctctactaaatatacaaaaattagcagggcatggtggtacatgcctgtaatcccagctactcgggaggctgaggcaggagaatcg

SEQ ID NO: 465687 - DNA, 201 bp, Homo sapiens
cacctgtagtcccagctactgaagcagggggatcactatgtttgtgcttgtgaatagccactgtactccaccctgggcaatatagcaagacccccatctcaaaaaaaacaaagaaaaaactaaaaagaataaaggagcagggagtagaatagtggttgccaggggctggggtgtgggaggaatggggagatgttagccaga

SEQ ID NO: 465688 - DNA, 201 bp, Homo sapiens
gggtggatcacgaggtcaggagatcgagaccatcctggctaacacagtgaaaccacgtctctactaaaaatacaaaaaagtagctgggcgtgctggtgggygcctgtagtcccagctgctcgggaggctgaggcaggagaatggcatgaacccgggtggcggaggttgcagtgagccgagatcgcgtcactgcactccagc

SEQ ID NO: 465689 - DNA, 201 bp, Homo sapiens
ttctcctaattatagctgttgctttagatatttaacagttgaactgctgagtaaagattatgagtctttaccactttttttttttttttttttttgagacrgagtctcgctctgtcacccaggctggagtgtaatggtgctgtcttggctcactgcaacctctgcctcccaggttcaagtgattctcctgcctcagcctcc

SEQ ID NO: 465690 - DNA, 201 bp, Homo sapiens
tctcctaattatagctgttgctttagatatttaacagttgaactgctgagtaaagattatgagtctttaccactttttttttttttttttttttgagacakagtctcgctctgtcacccaggctggagtgtaatggtgctgtcttggctcactgcaacctctgcctcccaggttcaagtgattctcctgcctcagcctcct

SEQ ID NO: 465691 - DNA, 201 bp, Homo sapiens
tttgggaggccacagtgggcgaatcacgaggtcaggagtttgagaccagcctgaccaacatggtgaaaccccttctctactaaaaatacaaaaattagccrggagtggtggtgcgtgcctgtaatctcagctacctgggaggctgagacaggagaatcgctggaacccaggaggcagaggctgcagcgagcagagatcccg

SEQ ID NO: 465692 - DNA, 201 bp, Homo sapiens
agctacctgggaggctgagacaggagaatcgctggaacccaggaggcagaggctgcagcgagcagagatcccgccactgcactccagcctgggtgacagascgaggctctgtctcaaaaaaaaaaaaaaatatatatgtatatatatagagagagagagagagaattaagcagtatatagcatttcatcacataggaaaac

SEQ ID NO: 465693 - DNA, 201 bp, Homo sapiens
gaggctgcagcgagcagagatcccgccactgcactccagcctgggtgacagagcgaggctctgtctcaaaaaaaaaaaaaaatatatatgtatatatatakagagagagagagagaattaagcagtatatagcatttcatcacataggaaaacggtattattatctatgtatgtttgtgaaaatacagtgggtatgtattg

SEQ ID NO: 465694 - DNA, 201 bp, Homo sapiens
aaataattccctgttaattagagctaaattaatcacatacaaaattccttttttaaactccccttcatgaactttatcacaacttacaaagaccatctgtkacatgcttggactttctgacttgccctatgctacctctttcttaaataaccagccattttactttaggacaagaatttaccatacaagattgtttctcag

SEQ ID NO: 465695 - DNA, 201 bp, Homo sapiens
ggctgcagcgagcagagatcccgccactgcactccagcctgggtgacagagcgaggctctgtctcaaaaaaaaaaaaaaatatatatgtatatatatagakagagagagagagaattaagcagtatatagcatttcatcacataggaaaacggtattattatctatgtatgtttgtgaaaatacagtgggtatgtattgtg

SEQ ID NO: 465696 - DNA, 201 bp, Homo sapiens
atacagatcaggttttatatgaaaaaaatacaaaaatattgtgtaagtaatttcattactaatttttttctaattttttttttttttttttggaaatggaktctccctctgtcgcccaggctggagtacagtggcatgacctcagctcactgcaacctccacctcccgggttcaagcaattcttctgcctcagtctcctga

SEQ ID NO: 465697 - DNA, 201 bp, Homo sapiens
tagtagaggcagggtttcaccatattggccaggctggtctcgaactcctgacctcaggtgatctgcccgcctcagcctcccaaagtgctgggattacaggygtgagccaccacacctggccagtttgaagaattttttaacttccatcttgatttcactgttgacccaatgatcattcacgaacaggttatttaatttcca

SEQ ID NO: 465698 - DNA, 201 bp, Homo sapiens
tagaggcagggtttcaccatattggccaggctggtctcgaactcctgacctcaggtgatctgcccgcctcagcctcccaaagtgctgggattacaggtgtsagccaccacacctggccagtttgaagaattttttaacttccatcttgatttcactgttgacccaatgatcattcacgaacaggttatttaatttccatat

SEQ ID NO: 465699 - DNA, 201 bp, Homo sapiens
gatgacctgtctagcgctgtcagtgaagtattgatgtcctccattttttttttttttttttttttttgagatagagtttcactcttgttgcccaggctggrgtgcaatggcactatctcagctcactgcaacctccatctcccaggttcaagcaattctcctgcctcagcctcccacgtagctggaattataggcatgtac

SEQ ID NO: 465700 - DNA, 201 bp, Homo sapiens
tttaggatattttggccggcagggtgctgagaaacaattgatgaaatcacaggggtgtgtaaaactgtctttatgcagctgagttagtttctgggagggckgtctcacagaccaggaggggcttttgatctgctaaagtgccaaatctgaaaaatatctcacacactcattctttgagttttacatttgcaatgctattta

SEQ ID NO: 465701 - DNA, 201 bp, Homo sapiens
ttttttttttttttttttttttgagatagagtttcactcttgttgcccaggctggagtgcaatggcactatctcagctcactgcaacctccatctcccagrttcaagcaattctcctgcctcagcctcccacgtagctggaattataggcatgtaccaccacaccaggctaattttgtgttttcagtagagacttattggc

SEQ ID NO: 465702 - DNA, 201 bp, Homo sapiens
gacgccgggcacggtggctcactcctgtaatcccagcactttgtgaggctgaggcgggtggatcacgaggtcaggatattgagaccatcctggctaacacrgtgaaaccccgtctctactaaaaatacaaaaaattagcagggtgtggtggcgggcgcctgtagtcccagctacttgggaggctgaggcaggagaatggcg

SEQ ID NO: 465703 - DNA, 201 bp, Homo sapiens
acgattcatatgttgaagtccaaacccctagtaccttcaaatgtgagggtgtttggagatagggccttcaaagaggtaattaaggtaaaattgtaataacmagttgggtttatcttgcctgctgcccagaaagccagatgccctgagaacaacaggtattacagcaaagaaagaggttaatcatcacagggccagccaggt

SEQ ID NO: 465704 - DNA, 201 bp, Homo sapiens
ggcagtgactaatgggcaaacagccaaagctgaagaatttagagaggagaaaacagtaggaggaataatatatgatagagtgttaactggattgcttctgrccaaaagtagagataaagggtcaggcatggtgatttgcacctctagtccaagcactttaggaggctgaggtgagaggattgcttgagcccaagaattcga

SEQ ID NO: 465705 - DNA, 201 bp, Homo sapiens
aggtcaggatattgagaccatcctggctaacacggtgaaaccccgtctctactaaaaatacaaaaaattagcagggtgtggtggcgggcgcctgtagtccyagctacttgggaggctgaggcaggagaatggcgtgaacccgggaggcggagcttgcagtgagccgagatggtgccgctgcactccagcctgggcgacaga

SEQ ID NO: 465706 - DNA, 201 bp, Homo sapiens
ctactaaaaatacaaaaaattagcagggtgtggtggcgggcgcctgtagtcccagctacttgggaggctgaggcaggagaatggcgtgaacccgggaggcrgagcttgcagtgagccgagatggtgccgctgcactccagcctgggcgacagagcgagagtccgtctcaaaaaaaaaaaaaaaagaggaagccacagtggt

SEQ ID NO: 465707 - DNA, 201 bp, Homo sapiens
atggcgtgaacccgggaggcggagcttgcagtgagccgagatggtgccgctgcactccagcctgggcgacagagcgagagtccgtctcaaaaaaaaaaaaraaagaggaagccacagtggtgcctatgtgtagtcccagctactacaaaagttgaggtgcaagaatagcttgaacccagtaggcggagattgcagtgagct

SEQ ID NO: 465708 - DNA, 201 bp, Homo sapiens
agcctgaccaacatggtgaaaccccttctctactaaaaatacaaaaattagccgggagtggtggtgcgtgcctgtaatctcagctacctgggaggctgagrcaggagaatcgctggaacccaggaggcagaggctgcagcgagcagagatcccgccactgcactccagcctgggtgacagagcgaggctctgtctcaaaaa

SEQ ID NO: 465709 - DNA, 201 bp, Homo sapiens
ctgaggcaggagaattgtttgaacctggcaggcagaggttgtagtgagccgagattgtgccactgcactccagcctgggtgacagagcgagactccacctwaaaaaaaaaaaaaaaaaaaaaaaaagaaaagaaaagaaaaggaaatgcaacttgttgactaggtagtgtgaagataaaataaaaaagaaaacgcatatct

SEQ ID NO: 465710 - DNA, 201 bp, Homo sapiens
ttctagttctagatccctgaggaatcgccacactgacttccacaatggttgaactactttacagtcccaccaacagtataaaagtgttcctatttctccamatcctctccagcacctgttgtttcctgactttggaatgatcgccattctaactggtgtgagatggtatctcattgtggttttgatttgcatttctctgat

SEQ ID NO: 465711 - DNA, 201 bp, Homo sapiens
ggcaggcagaggttgtagtgagccgagattgtgccactgcactccagcctgggtgacagagcgagactccacctcaaaaaaaaaaaaaaaaaaaaaaaaagaaaagaaaagaaaaggaaatgcaacttgttgactaggtagtgtgaagataaaataaaaaagaaaacgcatatctgacaccaaaaaaaaatgaagaaaatg

SEQ ID NO: 465712 - DNA, 201 bp, Homo sapiens
tgaattttgtcaaaggccttttctgcgtctattgagataatcatgtggtttttgtcattggttctgtttatatgctggattacgtttattgattttcgtaygttgaaccagccttgcatcccagggatgaagcccacttgatcatggtggatgagctttttcatgtgctgctggattcagtttgctagtattttattgagg

SEQ ID NO: 465713 - DNA, 201 bp, Homo sapiens
tcaccttccaccatgattgtaagcttcctgaggcctccccagccatgcagaactcagagtcaattaaacctctttcttttataaattactcagtcttgagmagttctttatagcagtatgagaacgaactaacacattttctattcctttggtccgatttattacctcatagcactcatcctttctgaatcatcatatttc

SEQ ID NO: 465714 - DNA, 201 bp, Homo sapiens
tcaattttagatctttcctgctttctcttgtgggcatttagtgctctaaatttccctctacacactgctttgaatgtgtcccagagattctggtatgttgdgtctttgttctcattggtttcaaagaacatctttgtttctgccttcatttcgttttgtacccagtagtcattcaggagcaggttgttcagtttccatgta

SEQ ID NO: 465715 - DNA, 201 bp, Homo sapiens
ttcgctcttgttgcccaggtgagagtgcaatgccgcaatctcggctcactgcaacctttggctcactgcaacctccgcctcctgggttcaagtgattctcmtgcctcagcctcccaagtagctggaattacaggcatgcaccaccacagctggctaattttgtattttttagtggagacggggtttctccaggttggtcag

SEQ ID NO: 465716 - DNA, 201 bp, Homo sapiens
tctgtctaatgttgacagtgggatattaaagtctcccattattattctgtgggagtctaagtctctttgtaggtctctaaggacttgctttatgaatctgsgtgctcctgtattgggtgcatatatatttaggatagttagcttttcttgttgaattgatccctttgccattatgtaatggccttctttgtctcttttgat

SEQ ID NO: 465717 - DNA, 201 bp, Homo sapiens
tcgctcttgttgcccaggtgagagtgcaatgccgcaatctcggctcactgcaacctttggctcactgcaacctccgcctcctgggttcaagtgattctccygcctcagcctcccaagtagctggaattacaggcatgcaccaccacagctggctaattttgtattttttagtggagacggggtttctccaggttggtcagg

SEQ ID NO: 465718 - DNA, 201 bp, Homo sapiens
tctctggctgcccttcccattttttccttcatttcaactttggtgaatctgacaattatgtgtcttggagttgctcttcttgaggagtatctttgtggtgttctctgtatttcctgaatgtgaatgttggcctgccttgctagattggggaagttctcctggataatatcctgcagagtgttttccaacttggttccattc

SEQ ID NO: 465719 - DNA, 201 bp, Homo sapiens
ttgcccaggtgagagtgcaatgccgcaatctcggctcactgcaacctttggctcactgcaacctccgcctcctgggttcaagtgattctcctgcctcagcmtcccaagtagctggaattacaggcatgcaccaccacagctggctaattttgtattttttagtggagacggggtttctccaggttggtcaggctggtcttg

SEQ ID NO: 465720 - DNA, 201 bp, Homo sapiens
tgtaataccagcactttgggaggccaaggtgggcagatcacaacgtcaggagtttgagaccagcctggccaacattgtgaaaccccgtctctactaaaaawacaaaaattagccaggcatggtggcgggcacctgtaatcccacctatttgggaggctgatgcaggagaatcgcttgaacccacgaggtggaggttgcagt

SEQ ID NO: 465721 - DNA, 201 bp, Homo sapiens
ccccgtctctactaaaaatacaaaaattagccaggcatggtggcgggcacctgtaatcccacctatttgggaggctgatgcaggagaatcgcttgaacccrcgaggtggaggttgcagtgagccgagatcatgccattgtactccagcctgagcgacaaaagtaagacttaatctcaaaaaacaaaaacaaaacaaaaaaa

SEQ ID NO: 465722 - DNA, 201 bp, Homo sapiens
cctccatctccactgggtccacatgcacagatttaactaaccacaaatgaaaaatatttggaaagttaaaaaatgaaaataagatgggcgctgtggctgaygcttccagccctgatcataccactgcattccagcctgtgtgacagaatgagaccctgtttcaaaaaaaatgtgagaggaggttgcaggtgtgggggtggg

SEQ ID NO: 465723 - DNA, 201 bp, Homo sapiens
tatggagggaaagagcatgtaaaggtaattatgtcattataaaaaacactataaatgcacttttttctcaactgattttttgaaaactgcataaaagtatrtgtatataatgtataagttgatcctgtaacacagaagtttaatgtatgtattttgacaataacagaaggaggtacatgatcacagatgctaataaaaatg

SEQ ID NO: 465724 - DNA, 201 bp, Homo sapiens
gaggtactattccattcattgtgctatttgttgcctgtataccttggttggttggtttgttgggacagagtcttgctctgttgcccaggctggagtgcagyggtgcagtcttggctcactgcaacctcttcctccccggttccagtgattatctcctgtctcatcctcccaagtagctgggattacagacgcctgccacca

SEQ ID NO: 465725 - DNA, 201 bp, Homo sapiens
tgtaccaccacaccaggctaattttgtgttttcagtagagacttattggccaggctggtcctgaactcctgacctcaggtgatctgactgcctcagcctcyaaagtgctgggattacagtgtgagccaccacgcccagccatcctccactattattgtattgctgtctatcccatttcttaggtctggtagtaattgtttt

SEQ ID NO: 465726 - DNA, 201 bp, Homo sapiens
atgcttactttcactggatacaaaattcttggctgataattgttttgtttaaggaggataaagatagggccccaatcccttctagcttgtagagtttctgytgagaaatctgctgttaatctgataggttttcctttataggttttctggtgcttttgtctcatggctcttaagattctttccttcatcttaattttagac

SEQ ID NO: 465727 - DNA, 201 bp, Homo sapiens
agctgggattacaggcacgtgccgccatgcctagctaattttgtacttttagtaaatacggggtttctccatgttggtcaggctggtctcaaactcccgayctcaggtgatctgcccacctcggcctccaaaagtgctgggattacaggcatgagccactgcacccggctgaagatacagttttataaaacaaaagtatct

SEQ ID NO: 465728 - DNA, 201 bp, Homo sapiens
ttacctcccaccgggcgcagtgagtggctcacgcctgtaatccccgcactttgggaggccgaggcgggcggatcatgaggtcaggagatcgagactatccyggctaacacggtgaaaccccgtctctactaaaaatacaaaaaaaattagccgggcttggtggcgggcacctgtagtcccagctactcaggaggctgaggc

SEQ ID NO: 465729 - DNA, 201 bp, Homo sapiens
cagtgagtggctcacgcctgtaatccccgcactttgggaggccgaggcgggcggatcatgaggtcaggagatcgagactatcctggctaacacggtgaaamcccgtctctactaaaaatacaaaaaaaattagccgggcttggtggcgggcacctgtagtcccagctactcaggaggctgaggcagaagaatagcatgaac

SEQ ID NO: 465730 - DNA, 201 bp, Homo sapiens
agtgagtggctcacgcctgtaatccccgcactttgggaggccgaggcgggcggatcatgaggtcaggagatcgagactatcctggctaacacggtgaaacyccgtctctactaaaaatacaaaaaaaattagccgggcttggtggcgggcacctgtagtcccagctactcaggaggctgaggcagaagaatagcatgaacc

SEQ ID NO: 465731 - DNA, 201 bp, Homo sapiens
cgggcggatcatgaggtcaggagatcgagactatcctggctaacacggtgaaaccccgtctctactaaaaatacaaaaaaaattagccgggcttggtggcrggcacctgtagtcccagctactcaggaggctgaggcagaagaatagcatgaacctgggaggcggagcttgaagtaagccgacactgcgccactgcactcc

SEQ ID NO: 465732 - DNA, 201 bp, Homo sapiens
tggttaagttgatcaccagcagtcgatggtttaatcaatcatgcctgtgcaatgaagcctccgttaaaaaaaaaaaaaaaaagaaaagaaagaaaaagggaaaaaaaaaaagtgggtttggggagcttccagatagctgaacatgtggaagttcctggagggtggcttgtccaggcagggcatgaaagctctgcacccctt

SEQ ID NO: 465733 - DNA, 201 bp, Homo sapiens
tgtctttgctcattctgtctctcactgctgcaagaacagcagcagaatgattggcagtatcacccacagcagcaccaacagcctcagaattactcagaggsgatgatgttgcaggaacagctgccaatggactcgggtccttgggatctagagaagcagtggccctcggctcagtcacagctgcagagtcaactgcctcag

SEQ ID NO: 465734 - DNA, 201 bp, Homo sapiens
gtaacccacacagcaggccaaagcaaagccgtctccagaagcctccacataaaaaataaaaataaaaataagtaaataaataaataaaaataaattttttwaaaaaagccagatgaggtgaggttgtttgagcctaagggttcatgacgagagcctgggcaacgtggtgagaccccatctctaaaaaaaaaaaaaaacttt

SEQ ID NO: 465735 - DNA, 201 bp, Homo sapiens
taactggattgcttctggccaaaagtagagataaagggtcaggcatggtgatttgcacctctagtccaagcactttaggaggctgaggtgagaggattgcytgagcccaagaattcgagaccagcctgggcaacatggctaaaccctgtctctaccaaaaatacaaaacattagcccgatgcggtggcacattcctgtagt

SEQ ID NO: 465736 - DNA, 201 bp, Homo sapiens
tattacagcaaagaaagaggttaatcatcacagggccagccaggtgagaacaaggagaaacttctcaaacccatctccctgataattccgaggccagggcyttttaggatattttggccggcagggtgctgagaaacaattgatgaaatcacaggggtgtgtaaaactgtctttatgcagctgagttagtttctgggaggg

SEQ ID NO: 465737 - DNA, 201 bp, Homo sapiens
taaccaagtaacattattcttaacactctctagagttgtgtgcgcgttttaaggaaaactgaggggtaggtaaagaaagacatccggcagacttgactgakaagggctccaaaaaaagaacagccaaagagcagggtacccaaatactaagttagcaaaatgaatacagcattttcaaagcagtctagaaatcagagctca

SEQ ID NO: 465738 - DNA, 201 bp, Homo sapiens
gaactctgtgttagaaaaaggaaaaaaaaaaaggatgggggggggggcctgtcaggttagaagcaagttgaagtctgtcatattagattattcttattatmattctgcaaaaggctgggcacagtggctcagtcctttaatccctgtaccttggcctggccaaaaccacttttaaacactcaaactatacagcaaaaaatc

SEQ ID NO: 465739 - DNA, 201 bp, Homo sapiens
tcagcttcttccctcaaaaatccaaagtctctctgaatttttaagtttttaaatgttttcatctgttgtgatgatggtattatttttcttccataatctgytcatgtgattattttaaaacattgtgattttagaaaaatccaactagcttatgacataccctttttatgtatttctagattagaggtgccagtagtttaa

SEQ ID NO: 465740 - DNA, 201 bp, Homo sapiens
tctggctgcccttcccattttttccttcatttcaactttggtgaatctgacaattatgtgtcttggagttgctcttcttgaggagtatctttgtggtgttytctgtatttcctgaatgtgaatgttggcctgccttgctagattggggaagttctcctggataatatcctgcagagtgttttccaacttggttccattctc

SEQ ID NO: 465741 - DNA, 201 bp, Homo sapiens
caaatccagatagtaaatatgttaggctgtgtggaccctggacacatctgagcctcaactaccgattccgctattgtggcttgaaaacggccatagacaasacataagtaaaagaatgtggctggtgactggtgtttcaaaaaaactctatttacaaaaacgcaactggctggatctggcccataggcctagagttagcca

SEQ ID NO: 465742 - DNA, 201 bp, Homo sapiens
ggaggagaggcactctgatttttagagtttccggtttttctgttctgttttttccccatctttgtggttttgtctacctttggtctttgatgatggtgacrtacagatggggttttagtgtggatgtcctttctgtttgttagttttccttctaacagtcaggaccctcagctacaggtctgttggagtttgccggaggtc

SEQ ID NO: 465743 - DNA, 201 bp, Homo sapiens
aagataaattctcaaatccagatagtaaatatgttaggctgtgtggaccctggacacatctgagcctcaactaccgattccgctattgtggcttgaaaacrgccatagacaagacataagtaaaagaatgtggctggtgactggtgtttcaaaaaaactctatttacaaaaacgcaactggctggatctggcccataggcc

SEQ ID NO: 465744 - DNA, 201 bp, Homo sapiens
ctgtcagacagggacatttaagtctgaagatgattctgctgccttttatttggctgttccctgcccccggaggtggagtctagagaggcaggcaggcctcyttgagctgcagtgggctccacccagtttgagcttcctggcagctttttttacctaagcaagcctgggtaatgacaggcgcccctcctccaggctcgctgc

SEQ ID NO: 465745 - DNA, 201 bp, Homo sapiens
gggacatttaagtctgaagatgattctgctgccttttatttggctgttccctgcccccggaggtggagtctagagaggcaggcaggcctccttgagctgcrgtgggctccacccagtttgagcttcctggcagctttttttacctaagcaagcctgggtaatgacaggcgcccctcctccaggctcgctgccaccctgcag

SEQ ID NO: 465746 - DNA, 201 bp, Homo sapiens
aggcatggtggcgggcacctgtaatcccacctatttgggaggctgatgcaggagaatcgcttgaacccacgaggtggaggttgcagtgagccgagatcatkccattgtactccagcctgagcgacaaaagtaagacttaatctcaaaaaacaaaaacaaaacaaaaaaaacacttcagaattgctacattcataccccttc

SEQ ID NO: 465747 - DNA, 201 bp, Homo sapiens
tattggcttcatttattcctttattaaatgcttgaaatttaaagtgactctgcctggctctgacattattttcatggaaacattgttaactactgattctrtactttaaacaattagaagacaaccgtttatctttagatcagttttgggaagttgaaattttctaagaatatatccatttcatctaaatcttcaaatgta

SEQ ID NO: 465748 - DNA, 201 bp, Homo sapiens
gaggctgatgcaggagaatcgcttgaacccacgaggtggaggttgcagtgagccgagatcatgccattgtactccagcctgagcgacaaaagtaagacttmatctcaaaaaacaaaaacaaaacaaaaaaaacacttcagaattgctacattcataccccttcaaaaaacacatctatcaagtgtccttaggaattcttga

SEQ ID NO: 465749 - DNA, 201 bp, Homo sapiens
tcacactgctgtgctagcagtgagcgaggctccatgggcgtaggaccctctgagccaggcgcagcatataatctcctggtgtgccgtttgctaagaccatyggaaaagcgcagtattagggtgggagtgacctgattttcctggtgccgtctgtcacccctttctttcactaggaaagggaattccctgaccccttgcact

SEQ ID NO: 465750 - DNA, 201 bp, Homo sapiens
ctcagtcacagctgcagagtcaactgcctcagaataatggaaagccgttgtgctctcaactgcagcacatgtctctccaaatagctgccgactcacccctkctgcctctggggcaagatatgcaggaaagggcttcagagcaacccaggacccaaatgcagcaactttaagttgaagagtggacaagggtctgcagcaggg

SEQ ID NO: 465751 - DNA, 201 bp, Homo sapiens
gcacccactctcctgtacccacttcccaacactccccagtgagatgaacccagtacctcagttggaaatggagaaatcacctgtcttctgtgttgctcacrctgggagctgtagactgtagctgttcctatttggccatcttggctcaaaagaaatatttaattgaaatatagcatgcatgccaaaaatagcaaatattta

SEQ ID NO: 465752 - DNA, 201 bp, Homo sapiens
gtttaggattgcagttttaaaatgtgcatgatgtaaatgcaaattatatttaaccctgagagcacaagcttccttctcaccccaaactcccttggggtgtmcaccgggaagccaccttaaccttgactctgaagggtgtctcaagtgggtttacaggtcaaagccaacactcttcagtgaggaccagccccagacaaaatt

SEQ ID NO: 465753 - DNA, 201 bp, Homo sapiens
tttattgattgattgattgattgattgagacggagtcccactctgtcacccagactggagtatagtggcacacctcagctcactgcaacctccacctcccrggttcaagtgactctcatgcctcagcctcccgagtagctgggattacaggcacccgccaccacacctggtctgttttttttttttttttttttttggcag

SEQ ID NO: 465754 - DNA, 201 bp, Homo sapiens
ccctgctgcctctggggcaagatatgcaggaaagggcttcagagcaacccaggacccaaatgcagcaactttaagttgaagagtggacaagggtctgcagyagggaaccaaggatgcaactctgcaaagtagtgctaagtgtcagagaaacacagtcgcaggtcaggcccacagtcacccacacagtagcacaaggcagag

SEQ ID NO: 465755 - DNA, 201 bp, Homo sapiens
actctttagttgtaacccgtgaaccaatgcatgtcagaattatgtacatataagaaacagaaatgtgggccagatgtggtggctcatgcctgtaatcccakcactttgggaggctgaggcgggcagatcacctgaggtcaggagttcgagaccagcctggccaacatagcgaaaccccgtctctactaaaaatacaaaaaa

SEQ ID NO: 465756 - DNA, 201 bp, Homo sapiens
caactgtaaaggttgttaaggcagaaggtttatctcagtcaccactgagtcctctctcctgccttgcacatgggaggcactcattaaggctttgggaaagygagcaagaaatggacaagtgaatccagtgagaagacctctgagatctcagacctgcccacacatcagagtaaggctgttcagggcctcccagggcaggac

SEQ ID NO: 465757 - DNA, 201 bp, Homo sapiens
cgagtagctgggattacaggcacccgccaccacacctggtctgttttttttttttttttttttttggcagagagggggtttccccatgttggccaggctgrtctcgaactcctgacctcaggtgatccgctcgcttcggcctcccaaagtgcttggattacaagtgtgagccactgcacccagccggagaagctgtcttta

SEQ ID NO: 465758 - DNA, 201 bp, Homo sapiens
aagttgaagagtggacaagggtctgcagcagggaaccaaggatgcaactctgcaaagtagtgctaagtgtcagagaaacacagtcgcaggtcaggcccacrgtcacccacacagtagcacaaggcagagcccttaccagaagcctccacattaagaaaagaaagaaagaaagaaagaaaaaagccaggtgacattgtttga

SEQ ID NO: 465759 - DNA, 201 bp, Homo sapiens
acctgcagaaagacgcagaatatttgttcttcagaaaaagcatgattttccagtccaagcccattcatttttaagctgccaggagacccaggctgcagctyacaactatgccaccaagcagagcctctctggtgcccagagggctctgatgagaagagctggttgctcccatctggagaaacagtggattcccagtcaaga

SEQ ID NO: 465760 - DNA, 201 bp, Homo sapiens
taaactcttagcacatgttaaaccctgtgtgatttgctgtttttagcatcatattcttttttattgattgattgatatggagtttcgctcttgttgcccasgtgagagtgcaatgccgcaatctcggctcactgcaacctttggctcactgcaacctccgcctcctgggttcaagtgattctcctgcctcagcctcccaag

SEQ ID NO: 465761 - DNA, 201 bp, Homo sapiens
cagggtctgcaaaatatctcaagcgcttttcttgactgtacaatactgatgttattcccaaaagcaacttgggaagggtcagaatcttatagcctccagcwgcatgactcctaaaccataatttctaatattgtggctaattcgttagtcctacgaaggcaatctagtcctcaggcaagacagaggtttgttttgagaaag

SEQ ID NO: 465762 - DNA, 201 bp, Homo sapiens
aatggcgtgaacccgggaggcagagcttgcagtgagctgacatggtaccactgcactccagcctaggcaacagatcgagactccatctcaaaaaatagtamcaataataataataataataattaacaaaatggggaggccaggacaggaggatcaattgaacccaggagttcgaggccagcctgggcaagataatgagac

SEQ ID NO: 465763 - DNA, 201 bp, Homo sapiens
tccaccccctgcccacaaaacattgctcctaactccaccacctatcccaaaacctataagaactaatgataatcccaccaccctttgctgactctcttttmggactcagcctgcctgcacccaggtgaaataaacagccttgttgctcacacaaagcctgtttggtggtctcttcacacggatgtgcgtgacagctcccgc

SEQ ID NO: 465764 - DNA, 201 bp, Homo sapiens
ctgcaacctttggctcactgcaacctccgcctcctgggttcaagtgattctcctgcctcagcctcccaagtagctggaattacaggcatgcaccaccacasctggctaattttgtattttttagtggagacggggtttctccaggttggtcaggctggtcttgaactcccgacctcaggtgatccttccacctcggcctcc

SEQ ID NO: 465765 - DNA, 201 bp, Homo sapiens
ttgggaggctgaggtgaggaaatcacctgaggtcaggagttcgaaaccagcctggctaacatgacaaaaccctgtctctactaaaatacaaaaattagctrggcatggtggcgggtgcctgtaatcccagctacttgagaggctgaggcaggagaatcccttgaacctgggaggcagaggttgcagtgagccgagatcata

SEQ ID NO: 465766 - DNA, 201 bp, Homo sapiens
aaagagagagacagagagcgatcctttgagagacctcatagggtctcctaaatcaaacaaatttactctggatgccacaaaaaatgaccatgaaagaaaasctcctttgatttgaagggagatgcgtgtgtggtcctgaatcatatgccaatagcagcatcattcctaggataatggattgcctttctcttgtgggcatta

SEQ ID NO: 465767 - DNA, 201 bp, Homo sapiens; identical to SEQ ID NO: 422161

SEQ ID NO: 465768 - DNA, 201 bp, Homo sapiens
gctgaggtgaggaaatcacctgaggtcaggagttcgaaaccagcctggctaacatgacaaaaccctgtctctactaaaatacaaaaattagctgggcatgrtggcgggtgcctgtaatcccagctacttgagaggctgaggcaggagaatcccttgaacctgggaggcagaggttgcagtgagccgagatcatagcattcc

SEQ ID NO: 465769 - DNA, 201 bp, Homo sapiens
actgcacccagccggagaagctgtctttagagcaaaagctctctccttctccattctccaataggaataaaatctacttgcctttacccaacctctcccgmaattgaatgttctttctttgcaacagatactgagtagggaaagaactcagtttatcaatgacattttcccttcctctttctcctttttggccatccttcc

SEQ ID NO: 465770 - DNA, 201 bp, Homo sapiens
taacctaacttaatagttagacaagattgaaaacctaacttaggagtatgcatctgtaacagtagatgagtcttggccaatcccagcagccatacttcaamcactcatacgctgctgagtgttcaaactgtgttcaaataattcaaatgccaacctgtaaccaatccagctgtttctgtatctcacttccaatttctgtgt

SEQ ID NO: 465771 - DNA, 201 bp, Homo sapiens
cattctaatttatgttagcgatgagcagggatttcaagggaagagagtgtaactgcccaatgggttcaccttgcctgctgcctagatagagctaatttatsaagatgggggaattgcaacagagaaagagtaattcacgcacagccggctgtgtgggagaccatagttttattattactcaaatctgtctccctgagcttt

SEQ ID NO: 465772 - DNA, 201 bp, Homo sapiens
aacctaacttaatagttagacaagattgaaaacctaacttaggagtatgcatctgtaacagtagatgagtcttggccaatcccagcagccatacttcaacsactcatacgctgctgagtgttcaaactgtgttcaaataattcaaatgccaacctgtaaccaatccagctgtttctgtatctcacttccaatttctgtgtg

SEQ ID NO: 465773 - DNA, 201 bp, Homo sapiens
ataccaaactccaaggatgctcaagttcctgatataaaatgatgtagcatttgaatataacctgtgcacatctcatgtattttaaaacctctctaaattamttgtactacctaatacaatgtaaatgctatgtgaatagttgttaaactgtatttttctttgtattatttttattgttgcattgtttttttattgggtttt

SEQ ID NO: 465774 - DNA, 201 bp, Homo sapiens
actgcagtcttgacctcctcagctcaagcaatcctcacatctcggtctcctgagtagctgggaccacaggtgcataccactatggccagctcttttttttggggggttgggggggcagagacagaatctcactatgttgcccaggccggtcttgaactcctggttcaagtgatcctcctgcctcagcctcccaaagtgctg

SEQ ID NO: 465775 - DNA, 201 bp, Homo sapiens
attacggcgtgagccactacacccggacagaaaacagattcttattgcacttatgcaaacatgttgccaggaatgaagaacattcacaactaatttacaarttcttgagcaattaggcagagagagaaataagcctcaaattctgtttacaagagtatactctactcaattgttaaagggtataaatagctcaaaaaaaaa

SEQ ID NO: 465776 - DNA, 201 bp, Homo sapiens
actcaattgttaaagggtataaatagctcaaaaaaaaaagctctccagactctgaagaatcagcaatgtttgtaataaacaacatcaacaaaaagcaatamaaatttatttcagtcctccattagtccaatccatgcaatcaactccctgctgtgcttcaaaataggtcagcaatatttatgaacatgtcagcctttccat

SEQ ID NO: 465777 - DNA, 201 bp, Homo sapiens
tgaacatgtcagcctttccattcatgccctggaaattttctctctcatccaatggcacaatctccaaagttatcagaaatctgcatttaagagtccttttyggctgggaacggtggctcacacctataatctcagcactttgggaagccgaggtgggcagatcacttgaggtcaggagttccagactagcccagccaacat

SEQ ID NO: 465778 - DNA, 201 bp, Homo sapiens
agggaagctgggtaggcaccctcgaattcccatacaggggcattaactccatagcacttcaagcagagagcctcaagcaggtgcttattgcaggattcctratagtggcacatgctagagaatgatgtgtgcccagggaatatggatgaggtcctgacaccttctgctacccacctgctggtccctgattggtttctctcc

SEQ ID NO: 465779 - DNA, 201 bp, Homo sapiens
gatttaggtagcttttctgggagaaatagggctattagaaagatgtattcagaggacaggtaaatattaagtgagcactgatcttggagattatatgtttkccccaaagaggtatgaggtatttagacattaccaaggaccagtgggagaatggtaattggtcccttaagtaataaaaaggggtgttaatcttttatttga

SEQ ID NO: 465780 - DNA, 201 bp, Homo sapiens
tgtgtgatagtgagctcctgtggtaccagctactcaggaagctggttcaggaggatcacttgagcccaggagttcaagaccagcctgggaaacatttctcaaaaaaaaaaaaaaaaaaacatttaagccaggcacaatggcatgtgcctgtagtcccatttaactgggaggctgagatggaagtatcacttgagcccggga

SEQ ID NO: 465781 - DNA, 201 bp, Homo sapiens
attaatgctggtcagctgtgtctaaaccacaaaagtgagaaatataatgaggtatgtctgacatcccatctcatcacggctgggaactcagtttttggggktttttttgctttttttttgagacagagtcttgctctgtcacccaggctggagtgcagtggcgtgatctcagcacactgcaacctccgcctcccaggttca

SEQ ID NO: 465782 - DNA, 201 bp, Homo sapiens
ctgaggcacacaaatggctgaacccaggaggaagaggctgcagtgagccaagatcgcaccactgcactccagcctaggcaacagagtgagactctgtcttaaaaaaaaaagaaaaaaatatatatatacataacaaaataatcatatatatggagggaaagagcatgtaaaggtaattatgtcattataaaaaacactata

SEQ ID NO: 465783 - DNA, 201 bp, Homo sapiens; identical to SEQ ID NO: 422162

SEQ ID NO: 465784 - DNA, 201 bp, Homo sapiens
cccagctactcaggaggctgagccaggagaatggcgtgaacccaggaggcagcagagcttgcagtgagcggagatcacgccactgcactccagcctgggcracagagcaagactccgtctcaaaaaaaaaagaaaagaaaagaaaagaaaagtttaagtccctgccataattttaaccttgtcttatgaatgttgctttaa

SEQ ID NO: 465785 - DNA, 201 bp, Homo sapiens
ctcaggaggctgagccaggagaatggcgtgaacccaggaggcagcagagcttgcagtgagcggagatcacgccactgcactccagcctgggcgacagagcragactccgtctcaaaaaaaaaagaaaagaaaagaaaagaaaagtttaagtccctgccataattttaaccttgtcttatgaatgttgctttaacctccgaa

SEQ ID NO: 465786 - DNA, 201 bp, Homo sapiens
gtggattatgagatcagaagatcaagaccatcctggctaacatggtgaaaccccatctttactaaaactacaaaaaattagccaggcgtggtggcacacayctgtagtcccagctactcaggaggctgaggagaatcgcttgaactcgggagacggaggttgcagtgagccgagatcacaccactgcactccagcctgggt

SEQ ID NO: 465787 - DNA, 201 bp, Homo sapiens
gaagggctcagtttttcttgcctcatgtttaattataaactaaatatttttcatggttatctatgagaactctgtgttagaaaaaggaaaaaaaaaaaggrtgggggggggggcctgtcaggttagaagcaagttgaagtctgtcatattagattattcttattatcattctgcaaaaggctgggcacagtggctcagtcc

SEQ ID NO: 465788 - DNA, 201 bp, Homo sapiens
taaattgctcccctggataattcttgtttgcaggcaaagattagagctcttagtataaacagtcactcctccctacttccaacacatatgtggaaggagtwccccaggttacaaaaacaagttttatattttttttttctgttttgtttgtcagtgtgttttttggtttttggttttgtttttgagacaggatctcactct

SEQ ID NO: 465789 - DNA, 201 bp, Homo sapiens; identical to SEQ ID NO: 422166

SEQ ID NO: 465790 - DNA, 201 bp, Homo sapiens
gtggcacacacctgtagtcccagctactcaggaggctgaggagaatcgcttgaactcgggagacggaggttgcagtgagccgagatcacaccactgcactycagcctgggtgacagagtgagactctgtctcaaaaaaaaaaaaaaaaaaaaaaagacaccatgtgaactatcttgataaaatgtaaaatcttatctttaa

SEQ ID NO: 465791 - DNA, 201 bp, Homo sapiens
atacaaaaattagcctggtgtggtggcacaagtctgtaatcccaactactcggaaggctgaggctggaaagtcgcttgaacctggcagatggagattgcartgggcagagactgagtcactgcactccagcctgagtcacagagccatacttcatctcaaaaaaaaaaaaaagaaaatgttggccagaaatagtggctaat

SEQ ID NO: 465792 - DNA, 201 bp, Homo sapiens
ggaggaagttatcatctcagaccattttaaggggcaaaaaaagctgaaagcagtgaaacaacaggtgaacttttaagatactaatctgagaagtttttttwaaaaaaaataggttgtagaattgaaacacaaaatttcttgtaatcttataaagggcaaatcaatatcttaagaaaatgttgctttaacgtaggggaatgt

SEQ ID NO: 465793 - DNA, 201 bp, Homo sapiens
ttccaagaaaactctgcttttccaatacaagggatcagatgctggccatgcatcagtgtgcttttgatattaatgtctgatttatagagaaactccaggcycagtgtggtggctcacacctgtaatcccagcaccctgggaggccaaggcaggtatggtggtgtgcatctgtggtctcagctattcaggatgtggaggtga

SEQ ID NO: 465794 - DNA, 201 bp, Homo sapiens
gggcagagactgagtcactgcactccagcctgagtcacagagccatacttcatctcaaaaaaaaaaaaaagaaaatgttggccagaaatagtggctaatgyctataatcccagcactttcagaggccaaggcagggggatcactttagccctggagtttgaggctccagtgacagagccagtccctgtctctaaaaaaaga

SEQ ID NO: 465795 - DNA, 201 bp, Homo sapiens
ttaaataaccagccattttactttaggacaagaatttaccatacaagattgtttctcagataaaagtactcattttctttacaatcttccttaccaaaaasacatcttcatatccctatctttcttcacatctctctcccctacttactggtaactatctaccttgtttcataaataacattttcaaatccataattcaaa

SEQ ID NO: 465796 - DNA, 201 bp, Homo sapiens
cctgtctctaaaaaaagaaaaataatgctatattagaaactattcatttaatgcaaaagaaagcagtaaatgtcaggcctctgagcccaagctaagccatyatatcccctgtgacctgcacgtatacatccagatggccagaagcaactgaagatccacaaaacaagtgaaaatagccttaactgatgacattccaccatt

SEQ ID NO: 465797 - DNA, 201 bp, Homo sapiens
ggtgacagagcgagattccatctcaaaaaaaaaaaaaaaattgctaagagaccagatcttaaatgttctcaccacaaaaaaaagaaaaaatgacaagtatstgagatgacaatatgttaattggctggattgaaatcatttcacaatacacacatatatcaaaacatcatgtatgccatatacatatacaattttatttgt

SEQ ID NO: 465798 - DNA, 201 bp, Homo sapiens
tacaatcttccttaccaaaaagacatcttcatatccctatctttcttcacatctctctcccctacttactggtaactatctaccttgtttcataaataacmttttcaaatccataattcaaatcaactcttagataagttttgaattagacaaaattattctttttctcaataagaacacatcttctttgacatattttac

SEQ ID NO: 465799 - DNA, 201 bp, Homo sapiens
ggtgctttctcatacaaaattattatcttttctttataaccttctttatgaaacatacgtcttcttttttttcttcttcttctttttgagatggagtctcwctctgtcacccaggctggagtgcagtggcagcaatctgagctcactgcaacctccacctcccaggttcaagcgattctcctgcctcagcctcccaaatag

SEQ ID NO: 465800 - DNA, 201 bp, Homo sapiens
ctctaaaaaaagaaaaataatgctatattagaaactattcatttaatgcaaaagaaagcagtaaatgtcaggcctctgagcccaagctaagccatcatatmccctgtgacctgcacgtatacatccagatggccagaagcaactgaagatccacaaaacaagtgaaaatagccttaactgatgacattccaccattgtgat

SEQ ID NO: 465801 - DNA, 201 bp, Homo sapiens
gtccctttcttagggcttctaatcttcctcctcctaatactaacaattggcccatgcatactcaccttcatatccctctttatctcccaaaggctgaactstcttggccaggcaaacacccagaaacatattgataccatccttctcctccaccaagtccagtatcagagcctccgtgaaagcgactctgaagtccgacat

SEQ ID NO: 465802 - DNA, 201 bp, Homo sapiens
ggggattaaattgaaagctatttaagaaaggggcgggtcaccttgaccctatataaagcctgtgtctttgggagctgctcagttactcgctgatctccgtrgagtccaggtcttctgcccaagatgaatttggagggcacttcaggtggtaagttcccatcagccttttctctgttctttgggattgctgcatgtcttgct

SEQ ID NO: 465803 - DNA, 201 bp, Homo sapiens; identical to SEQ ID NO: 422164

SEQ ID NO: 465804 - DNA, 201 bp, Homo sapiens
actgttacacaaaggtaattatattcatttgttctcttattgttgtaaagaaatacctgagactgggtgatttctaaagaaaagagatttaattggctcarggttctgcaggctgtacaggaagcatgatgctggcatccgcttggcttctagggaggactcaggaaacttataatcatggcagaaggcaaagggggagca

SEQ ID NO: 465805 - DNA, 201 bp, Homo sapiens
ttttcttttttttttttagtaatgattcattttactttagaaaaaaattcaccaaacaaggtgctttctcatacaaaattattatcttttctttataaccytctttatgaaacatacgtcttcttttttttcttcttcttctttttgagatggagtctctctctgtcacccaggctggagtgcagtggcagcaatctgagc

SEQ ID NO: 465806 - DNA, 201 bp, Homo sapiens
acccctgccattatggacaccctcgccaggatggaaaattccactggggcctaggccgtggaaacaaccaggcaggtcccaggcccaaccacctgaccacrggaattttctcccttttcagcagctagcggcactacccccatcccgttttgcaacacttccctccctccccgccggacctataactgccctagtctgtaa

SEQ ID NO: 465807 - DNA, 201 bp, Homo sapiens
aatatgtaattacaaggaaactggggtaagaatgcatgtgcattccgaagtctcaggctatttcttaatttaatgtctcaaatgtgattcatacacatagygtttgaaataaaattccatactgaattattttaaatagaataactgacataaaatgaaacttaagttaaatctctccagttatcagaaagatacctggac

SEQ ID NO: 465808 - DNA, 201 bp, Homo sapiens
gtaattatattcatttgttctcttattgttgtaaagaaatacctgagactgggtgatttctaaagaaaagagatttaattggctcatggttctgcaggctstacaggaagcatgatgctggcatccgcttggcttctagggaggactcaggaaacttataatcatggcagaaggcaaagggggagcaggcacattacatgg

SEQ ID NO: 465809 - DNA, 201 bp, Homo sapiens
ttcactcctactcaaatctcctttttctcctcttgtcttctttgtctgtgggatgttctaagtccccacccccaacctttggcagttgggcacccttcgtyaacctgccacacaacctccttagccaagccagcctcccctctcctctaactgctggttatgcatatccccacagacccaatggttcaccgccatccctgc

SEQ ID NO: 465810 - DNA, 201 bp, Homo sapiens
atattcatttgttctcttattgttgtaaagaaatacctgagactgggtgatttctaaagaaaagagatttaattggctcatggttctgcaggctgtacagraagcatgatgctggcatccgcttggcttctagggaggactcaggaaacttataatcatggcagaaggcaaagggggagcaggcacattacatggccagag

SEQ ID NO: 465811 - DNA, 201 bp, Homo sapiens
ggcctctaccatctagataccagtaaagcaactgcccacattctctcccccctatttgtgacaaccaaataaatcacagacatagtcaaatgttctcccaytgagggacaaaattggcccccaaggagtattttcttttacctaagttatggggatagtgatttagcgtatgttaagtgctcatgactgaggaggcacagc

SEQ ID NO: 465812 - DNA, 201 bp, Homo sapiens
gggcatggtggtgggcacctgtaatcccagttacctgggaggctgaggcaggagaattgcttgagcccgggaggtggatgtggcagtgagcagagatcgcrccactgctctccagcctgggtgacagagtgagactctgtctcaaaaaataaattaattaatacattaaataatttctcatgactatattaacacacacaa

SEQ ID NO: 465813 - DNA, 201 bp, Homo sapiens
aggtggatgtggcagtgagcagagatcgcaccactgctctccagcctgggtgacagagtgagactctgtctcaaaaaataaattaattaatacattaaatratttctcatgactatattaacacacacaacaatcaccaaaatacaatccaactgctgcagcagcaagcaagtctggagagtgtccacactgaaagaatca

SEQ ID NO: 465814 - DNA, 201 bp, Homo sapiens
gcctgcttttttactgtacacgtagtgacaaagaaaaaagaaaagaaagcctccatgttgaacctagctggcttccaggtagcccttttctattagcacasctgctggcatttattcatgcgagcttccagcttgcttatctatgtctacagttccatttgacaggctgttttttgttagtaaagatttggggctgctttt

SEQ ID NO: 465815 - DNA, 201 bp, Homo sapiens
atattaaagaattaaagaagaaaattaatctcaatgaatagaagataggatttgaaaaggtgggttctgtaaataaatcaaaaaagcatgactagggtggwggcgtgattagggtgggcacctctgagtatatttaaagtaattcagctttacaattcattattttttcagttggaaaggccctggactggagtttcgaca

SEQ ID NO: 465816 - DNA, 201 bp, Homo sapiens
acggctcactgcagcctccattttccaggctcaggtgattcccccacctcagtcccctgagtagctgggactacaggcacacaccaccccgccaggctttgtatgttttgtaaaaaatggggtctcaccatgttgcccaggctggtcttgaactcctggggtcaagagatctacccacctcagcatcccaaagtcctgggg

SEQ ID NO: 465817 - DNA, 201 bp, Homo sapiens
tcagctctctgaccagacgctaagaaggcggaagtagcctccagctcaccactattttttaggaaggcctgtgtaactgttgatagatccaagttaaactyctccattaactgccgaatgatcttaatggcagctcccacctctggttgagaaactttttcttcttcttcttcttcctcctcatcaggctgtgtttctgag

SEQ ID NO: 465818 - DNA, 201 bp, Homo sapiens
gccaaggcaggcggatgacgaggtcaggagatggagaccatcctggctaacatggtgaaaccctctctctactaaaaatacaaaaaaaaattagccgggcrtggtggcagtcgcctgtagtcccagctactctggaggctgaggcaggagaatggcgtgaacccgggaggggagcttgcagtgagcagagatcacaccact

SEQ ID NO: 465819 - DNA, 201 bp, Homo sapiens
gcgctcagtggtgtctctctccgcagatttcctcatccaataaacgcgtgttactgtccagccaccccaacccttgtctctgtctcttttctgcctcttamcaatcacttattatcaggaaaatgcaaattaaaaccacaatgagataccaccttactcctgcaaaaatggccataaattaaaaatcaaaacatagtagat

SEQ ID NO: 465820 - DNA, 201 bp, Homo sapiens
gtaatcccaacattttcagaggctgagagtggaagatcacttgaggccaggagttcaagatcagcctggacaacacagtaaaaccccatctctccaaaaamatgtattttaatttgctgggtttgttgttccacacctgcagtcccagctactcaggggcttaggtggaaggatcatttgagcccaggaggtcaaggctgc

SEQ ID NO: 465821 - DNA, 201 bp, Homo sapiens
aagactctgtttaactctgcagttagttacgggctaaccatttgagctctgaatttttcttgctataatttgcccatccgtttaaaacatgcattaaaaaygggtcataatatgtaactagctggaatcccaaagaggatgagagtatgaagttcctggcaggcctcagcaaaggagccaggctttaaaggaagggaaaag

SEQ ID NO: 465822 - DNA, 201 bp, Homo sapiens
agtgagtgccccggggtgtttgcagagactgttgagggcaggcgtctcttgggggctgctctgggtactgagcctcccaacccaggacgctcactgggggrtgaggatgcagcggtcaggctgtcactgtgccggccctgagacacgccctgctctgtggcttggccgatgcccagctctgcaggccacatgcgcctgtga

SEQ ID NO: 465823 - DNA, 201 bp, Homo sapiens
gatgacagaactgtagtgaagcattcaggtcgtgattgctgtggtgctgagaggaatccgtggtgcggtcagtggcgcggccccgcactcacacacacgaktccagctggccacgtctggtgcatctgtaggtggcgcggctgcccgggctcagtgcttctctgaggttatgagagacgccctccctgggggatgctgggc

SEQ ID NO: 465824 - DNA, 201 bp, Homo sapiens
attgcttgaactcatgaggcggaggttgcggtgagctgagatcgtgccacagccctccagcactgcagcctgggtcacagagcaagactctgtctctaccaaaaaaaaaaaaaaaaatgttggttggacagactgggaagagagagaaaaggaaaaggaacagaagctgtagcccaagagtctgaaaagctgggctggagt

SEQ ID NO: 465825 - DNA, 201 bp, Homo sapiens
cccagtttcaagcaattctcccgcctcagcctcctgagtagctgggattacaggcatgcaccaccatgcccagctaatttttgtatttttagtagagacakggtttcaccatgttggccaggctggtctcaaactcctgatctcaagtgacctcccaaagtgctgggattacaggtatgagccaccctgcctggccaagcc

SEQ ID NO: 465826 - DNA, 201 bp, Homo sapiens
tttgttttgagacaagagtcttgctctgttgccctggctggagtgcagtggcataatcttggctcactgcaacctccacctcccagtttcaagcaattctyccgcctcagcctcctgagtagctgggattacaggcatgcaccaccatgcccagctaatttttgtatttttagtagagacatggtttcaccatgttggcca

SEQ ID NO: 465827 - DNA, 201 bp, Homo sapiens
gtgtgagcagctgtggtggtgagcaggtgtggtgagcagctgtggtgagcaggtgtggtcccagctactcagcaagctgaggtgggaagatcacttggatygcttgagcccaggaggtcaaggctggcctgagctattattgcatcactgcactccagtctgggcagcagagcaagaccctgtctccagaaacctgcagcc

SEQ ID NO: 465828 - DNA, 201 bp, Homo sapiens
gctggtggagctgccggaggctgcgcttgcccgggggcgtcaggagcagcgaggccgcagcagcagcctggccacgaggtgcgcatctcccaggtgctgaygcaggtctgcttgtttcagtgatgtcattcccagcagaaggtgtggagtcagcgctcaaaaacaacatcgaagatgtgcggttgttcctggactccaagc

SEQ ID NO: 465829 - DNA, 201 bp, Homo sapiens
cttgtgaatccttgtgtgagctgagtgctcgtattgtgtgcaggcacgtgtatgagcacatgtgcatgttggagcatgtatgcgtgtgtgcatgtgtatgcatgtgtaggagtgcttgtgagtgcgcgtgagctgtgtgcatgtgtacacgtgtgcgagtgcctgtgagtgcacgtgaactgcatgcatgtgtacgcatgc

SEQ ID NO: 465830 - DNA, 201 bp, Homo sapiens
cgaagtccgtagcatggcctggggcgtggcggagtccgtagcgtggcatggggcgtggcggagtccgtagcgtggcatggggcgtggcggagtccgtagcrtggcatggggcgtggcggagcccctagcgtggcgcggcgtggcagagtctgtagcgtggcctggggccagggagggcagagcactgattgctccacggtg

SEQ ID NO: 465831 - DNA, 201 bp, Homo sapiens
ccaggcccctcctccaacattgagggtcacaagtgaacatgagatttgcatggggacgcagatccaaaccgtatgtgctgttatgaataaagatccaaacygtgtccgctgttatgaataaagatccaaaccgtatccgctgttatgaataaaggtgccgagaacattttttttcaagtctttttgtggacgtgtgttttt

SEQ ID NO: 465832 - DNA, 201 bp, Homo sapiens
tcatgtggtcacatcaacaaggcagaaaaggcatttaacaaaattcagaaagtcagcaccttttatggcagcactgtcagccagtcatgagcagaacgtcrtcagcttggtaacaagcatgtctagagacccacagccaggccaggcggagtggctcacaccgtaaccccagtgctctgggaggccaacgtgggaggattt

SEQ ID NO: 465833 - DNA, 201 bp, Homo sapiens
aggttgctgcgaaagtaattgtggttttgccattgaaagtaatcacaaaaaccgtaattacttttgcactaatctgatatcatattaactggctgaagagycatgtggtcacatcaacaaggcagaaaaggcatttaacaaaattcagaaagtcagcaccttttatggcagcactgtcagccagtcatgagcagaacgtcg

SEQ ID NO: 465834 - DNA, 201 bp, Homo sapiens
gctgtgtgactgctgcttggtggctctgggcctgttcctgggccatcctggagctgcgcgtgtgtaggctgctggggtggacccggtggctgctgctctgyccccccgttggtgtgtgtgtctgttagaatttagccctcacacccgggcgtggcgtaagcaggtgagcgggtggcggctgcatcttagcaaacgttcctg

SEQ ID NO: 465835 - DNA, 201 bp, Homo sapiens
gagccttctgtctttctaaggtcatgcggcactgaggcctttggagccttctgtctttctaaggtcatggggcgctgaggcctttggagccttctgtcctkctaaggtcatgcaacactgagacctttggagccttctgtcctgctaaggtcatgcggcgctgaggcctttggagccttctgtcctgctaaggtcatgggg

SEQ ID NO: 465836 - DNA, 201 bp, Homo sapiens
gggcagttggtctgtagagagttggctgtggccacagcaggggcttctaggcactcagggcagggggccctctctgcctccagcggcgtctgctggagtcscactgctacaaccaccaggcctgggcagcgcgtggagcctggcatgacccgtgaccatcgtccaagccacccttgctctccagccctccccttccaccgg

SEQ ID NO: 465837 - DNA, 201 bp, Homo sapiens
ctgggaaagtcatcctgaggcgtggggcacggggagcccctgggctgactgcctcagtgcccctgcgagggcagccgtggggtctgggctgcccagctggrgtggcctcttgggcaggcctgactccagagctgggctcctttgtcttcaggcagccgggctgagtcctccccatgcccgcctgtccccacagctgacccc

SEQ ID NO: 465838 - DNA, 201 bp, Homo sapiens
caggatctgagcgccagtcatgagctggggcctgttcttcaccctgggacacggaagaaagtccctgtgcttggtgtctttgggtctggaggggacagatracagatggccccgcccttccctccccatgtggcccttcctggccttgacctgcatgcccgtgtggaggccactccgctgtgtggggagcccacctcccct

SEQ ID NO: 465839 - DNA, 201 bp, Homo sapiens
gcccaaggccgtggctctccacgtgtgccctgggtgggggatccaaggccgtggctctccccgtgtgccctgggtgggggatccaaggccgtggctctccmtgtgtgccctgggtgggggtgcctaagccgtgggcacccatgctgagctgttcttaactgcacaggctcattccgcctcagcctgcctcagcccacccag

SEQ ID NO: 465840 - DNA, 201 bp, Homo sapiens
gtcgtgcactgcatggtgagctcgagggccgtgggctggcgccgtcttctgtcaaagttcattatttcatgcatagttcaacaggatctgagcgccagtcrtgagctggggcctgttcttcaccctgggacacggaagaaagtccctgtgcttggtgtctttgggtctggaggggacagatgacagatggccccgcccttc

SEQ ID NO: 465841 - DNA, 201 bp, Homo sapiens
catgcatctctgctgtgtgtgcattcgtgtgtactgtgcatctgtgtgtactgtgtgcattcatgtgtactgtgcatctgtgtgtgctgtgtgtgcattcrtgtgtaccctgcatgtgtgtatgtgctgtgtgtgcattcgtgtgtactgtgcatctgtgtgtgtgcattcatgtgtaccctgcatgtgtgtatgtgctgt

SEQ ID NO: 465842 - DNA, 201 bp, Homo sapiens
cattcgtgtgtactgtgcatctgtgtgtactgtgtgcattcatgtgtactgtgcatctgtgtgtgctgtgtgtgcattcatgtgtaccctgcatgtgtgtrtgtgctgtgtgtgcattcgtgtgtactgtgcatctgtgtgtgtgcattcatgtgtaccctgcatgtgtgtatgtgctgtgtgtgcattcgtgtgtactgt

SEQ ID NO: 465843 - DNA, 201 bp, Homo sapiens
ctgctttaccgatggcctggcctgccacggtgctggcgcccgcctggctgcacttcccagctctggggtcagtgttgccccgaggctgctggccagtgccrgtgccctgacgccctccctctcctgcagggaagccggagcttccccggcagcctggctccacggctcagtatgatgctggggcagggtccccggaagccg

SEQ ID NO: 465844 - DNA, 201 bp, Homo sapiens
ggccaggaacccagggccgacccagagccccccggcctggcagcagggctggtgcagcaggacttggtttttgaggtggagacaccggctgtgctgccagmgcctgtgccacaggaagacggggtcgacctcctgggcctgcactccgaggtgggcgcagggccagctgtacccccgcaggcctgcaaggccccctccagc

SEQ ID NO: 465845 - DNA, 201 bp, Homo sapiens
tggtgctctgcgttatagaaacagtagttgcccctcatggacaaccagatgccgagtttccgatctccgtctccacaggctcaccagctggattccctccygggggcttcattcccaaaacggccaccacgcccaaaggcagcagctcctggcagacaagtcggccgccagcccagggcgcctcatggccccctcaggcca

SEQ ID NO: 465846 - DNA, 201 bp, Homo sapiens
tgggaggatgggctgcctggaccgagactgcagcgtcggcagtggcccccacgccagccacagaaggtatggccaccacccaccaaggacagggctcccagacgtgcagctgctgtggcccgtctctatttcacacgtacctgtaacagggccctctctgcgcagagaaggaaggaagggctggggcgtgcttggtggtgc

SEQ ID NO: 465847 - DNA, 201 bp, Homo sapiens
ttcctgtgaatcgtgaatgttcttaatggcatctagaatggtgaatcctttccagaaggttgtcagtgaactttacccagatccatcagaggaatctggcygctatagccttagaaatgtgtttcttaaatagggagacttggaagtcgacacgactccttgatccaagggctgcagaacagatgttgtgttagcaggcat

SEQ ID NO: 465848 - DNA, 201 bp, Homo sapiens
tttttagagacagggtcttgctcttgttgtggctggagtgcagtggcacgatcatggctcactgcagcctcaacctcctgagctcaagggatcctcccacytcagcctcctgggtagctgggactacaggcactcatcaccatgcccatctaattttttaaatttattttttgtagagatggggtccgtgttgtccaggcc

SEQ ID NO: 465849 - DNA, 201 bp, Homo sapiens
agggaagagccacataccggttccccactcagccacatacagaatttttacttttaaaaaccccatttattctcactgagaatgaggcactgaacaggggrcccagttaccactgaaacagactcgcccatccatgatggccagcgtagagggcaagtcacccccactctgactccccgggcctggcctcagcctctcccg

SEQ ID NO: 465850 - DNA, 201 bp, Homo sapiens
ggcatctctgagaagcgggagggatgtgggctcccccgtgcagctgcaggttcagggctcactggaggaggcctggaggtcgggctccggggatgtgcccrgtccctcccatgaggcaacccctccagtgtcctctgagggaagagccacataccggttccccactcagccacatacagaatttttacttttaaaaacccc

SEQ ID NO: 465851 - DNA, 201 bp, Homo sapiens
ccggggccagcggctcatcgctgaccctgcatggggtggtgtgggaaggagaggggccgggcccagcccctcaagtcataaatacacgaggcagactaacrcatgcgcgcgccagctcactcctggggactgcctgtctggagcagcatgtgcggctgagagctgagctgcagggctctgtggatggcacagctgtgccag

SEQ ID NO: 465852 - DNA, 201 bp, Homo sapiens
atcgatatgggggatggtgcaggaggcaccactgcagaccccgcaggctctacgagggtcacgggtgcaggcgcctctgtgcagtatgcttgacgacttaygtgaaattgataaattcctcaaaaccagttcctgccacaacttacccaatatcaagtagatcctttgaaaaattctataaatacaaagaaaataaattca

SEQ ID NO: 465853 - DNA, 201 bp, Homo sapiens
gcagcacaaagggcagaaggaggggtgaagttgacaggcccacgctgatggccgcctctctccccaggcagtggaacaggtagacaagaacaggatatagtttttttttttttacaaggtttaaccaacttgacctgagttttgcaaacttcagcgaatacttggagaaatggcatctgttcaagtgggcgtttattaaag

SEQ ID NO: 465854 - DNA, 201 bp, Homo sapiens
tgttgccagggttgtcctgacgtgggtggcggatgggtgcttgacgtggccgagaagtctcgggggttgggggtggtcagagccgcctgcaggctgaggaratgctgccaggtagccccagttcttcatctgacactgtggggatgtgccgcttgtgtttctcagtgttgtgttctgaaacgtcaaactggcggaaaagtt

SEQ ID NO: 465855 - DNA, 201 bp, Homo sapiens
cagcccctggagaccttcacacgtgtgggtggagccggcacctctggacggcctcgagtgatcggtgttctattttgcaagcgcatgttttccaatatacrtggtgctctgcgttatagaaacagtagttgcccctcatggacaaccagatgccgagtttccgatctccgtctccacaggctcaccagctggattccctcc

SEQ ID NO: 465856 - DNA, 201 bp, Homo sapiens
tgttggtgtcaccggagcccacgctgactggccggagacctggcctgaccctgctgagcctcaggctgtgtctgcaaaggggaaacaagacctgtgcctcrgagggcggctccacccccagccctgcctcgtgccgatgccctccagaactcctgtgccaggtgacgaggggaagtcgagcactcggggaggcctcagagc

SEQ ID NO: 465857 - DNA, 201 bp, Homo sapiens
ctatcaagtagctctaccacggttttttttttttttgagacagagtgtcattctgtcactggggctgagtgcagtggcatcattttggctcactgcagccrtcaacccctgggctggagcgatcctcccaccgcagcccccctgggtagctggggccgtcaacccctgggctggagcgatcctcccaccgcagcccccctg

SEQ ID NO: 465858 - DNA, 201 bp, Homo sapiens
cagcacgtttttacaggggtcagaggtggagacacacgaaacggggggagctgtattagacacattgcattgctctgttgcgtgcttatgtctgagatgaygcatcgggtggagtaggaaggtaaacttgctttcatcttttgtgtgtgctgtttcctgatacagaggctattatccaatgaagaggaaaagaacagagcc

SEQ ID NO: 465859 - DNA, 201 bp, Homo sapiens
ggtgcccttctccccgtgtgcacagtgcgaggtgcgccagggcctgggtgcccgtcccctcaagtgcgcttcaggacgtctttgcccaggggcaactgccrtctccggtttgtctcctggttggatgatcactgtgaaggtgtctcgccagtttgatttctttcttatgaatgaggttgactcttagtttgagtggttttg

SEQ ID NO: 465860 - DNA, 201 bp, Homo sapiens
gctgccatgtggcccccacttgactcagcctgaggcaccgcagaggcccaggcggagagagccacaggcagacccttgaggcagaggctggaggtgggtgygctggagacgcctcaggaacaacaccccaccgcccgcccagaagcttctgcagcactcgccagggccctgggccaaggaggcgctgaggggccgtgccat

SEQ ID NO: 465861 - DNA, 201 bp, Homo sapiens
tcagcctgaggcaccgcagaggcccaggcggagagagccacaggcagacccttgaggcagaggctggaggtgggtgtgctggagacgcctcaggaacaacrccccaccgcccgcccagaagcttctgcagcactcgccagggccctgggccaaggaggcgctgaggggccgtgccatggggacattggtgctggccatgtg

SEQ ID NO: 465862 - DNA, 201 bp, Homo sapiens
tgctggctctgcctgtagcaccccgtggctcttccctcctgaaggggtttgtgactgaggccgaccccatgggtcttgtctcggtgttgcggccgatgccscatgccctgtcaggaagggggtcatgtacagcagtcgtgtttgcgacgccccgtgccctgtcaggaagggggtcacgtacagcagtcgtgtctgtgagcg

SEQ ID NO: 465863 - DNA, 201 bp, Homo sapiens
cactcgccagggccctgggccaaggaggcgctgaggggccgtgccatggggacattggtgctggccatgtgggttcgccaaggccctgggctgaggggacrcgccgtggggaccctggtgttcctgcagcacttgccaaggccctgggccgaggaggtgccgaggggccatgccatggggaccctggtgctggccacgtgt

SEQ ID NO: 465864 - DNA, 201 bp, Homo sapiens
ctgtgctccagcccctggagaccttcacacgtgtgggtggagccggcacctctggacggcctcgagtgatcggtgttctattttgcaagcgcatgttttcyaatatacgtggtgctctgcgttatagaaacagtagttgcccctcatggacaaccagatgccgagtttccgatctccgtctccacaggctcaccagctgga

SEQ ID NO: 465865 - DNA, 201 bp, Homo sapiens
ggcgtgcttggtggtgcgggctccgcacacaaggctgtggtatgactgcagcggcctcactcacccggtgtgcctggggtacgtggggacacagacttggygtcccagagctgcagtggctcctgagcatcagcagcacccccgaagggtcctcctcccacccggcagggcgtctgcgtctgtgatgcgatttcatgcccc

SEQ ID NO: 465866 - DNA, 201 bp, Homo sapiens
ctgggagagggctgcgcgcccctccagtgtggtcctaggggaaggagcctgggttctctctcctgaggaggcagcagcgtggtccacggcgtactctgggktgatgatggtgaccattgcaggatggcttgtgggcgggtgtgtggagtgcagccttgcagcgttggggcgggtgccgccagaggtgtgctgcgtggccag

SEQ ID NO: 465867 - DNA, 201 bp, Homo sapiens
ggccaggccctgggagagggctgcgcgcccctccagtgtggtcctaggggaaggagcctgggttctctctcctgaggaggcagcagcgtggtccacggcgyactctggggtgatgatggtgaccattgcaggatggcttgtgggcgggtgtgtggagtgcagccttgcagcgttggggcgggtgccgccagaggtgtgctg

SEQ ID NO: 465868 - DNA, 201 bp, Homo sapiens
tctccacgtgtgccctgggtgggggatccaaggccgtggctctccccgtgtgccctgggtgggggatccaaggccgtggctctccctgtgtgccctgggtsggggtgcctaagccgtgggcacccatgctgagctgttcttaactgcacaggctcattccgcctcagcctgcctcagcccacccagggccaaggctctggc

SEQ ID NO: 465869 - DNA, 201 bp, Homo sapiens
gagggcagccgtggggtctgggctgcccagctggagtggcctcttgggcaggcctgactccagagctgggctcctttgtcttcaggcagccgggctgagtyctccccatgcccgcctgtccccacagctgacccctttggcccgcttctgccgtcttcaggcaacaactcccagccctgctccaatcctgatctcttcggc

SEQ ID NO: 465870 - DNA, 201 bp, Homo sapiens
aggagtttgaaaccagcttgagcaatatagtgagacccctgtaagaattagccagctgtggtggtgagcagctgtggtgagcagctgtggtggtgagcaartgtgggcagctgtggtgagcaggtgtgagcagctgtggtgagctatggtgagcaggtgtgagcagctgtggtgagcaggtgtgagcacctgtggtgagca

SEQ ID NO: 465871 - DNA, 201 bp, Homo sapiens
tgtggtgtctcctggagggccagtcggtgccgctgcaggcgctggtgggaaaggcaggcccggcctcgcggagccatggctgagccctgggcttacggccrcagagcccggggaggatgggccctcagccgcggtagtcctgactgctgtggggcagcacctgcccagcttgtgcatggatcctaggttctctgacaaatg

SEQ ID NO: 465872 - DNA, 201 bp, Homo sapiens
taagttttgtattttttgtagagatggtgtcttgctgtgttgcccaggctggtcttgaactcctgggctcaggtgatcctcccaccaaggcctcctgaggygctgggatcgctggcgagagcaccctgctcaggcctctttccacgtggtgcggtcgcttcgttccatccagaaggctgcttggttttcctggtgtggatg

SEQ ID NO: 465873 - DNA, 201 bp, Homo sapiens
tcctgctgtataactgcagagcccacttgccccctgctctcctgtgaatctgcagctgaggatggggtttgtgtgtctgccgtgcacggagattcactgtytcctcacagctctgcggccccagcctctgcctctcacaacatgtctgccatgcacggagattcactctctcctcacagctctgtggccccagcctctgcc

SEQ ID NO: 465874 - DNA, 201 bp, Homo sapiens
atccgctgttatgaataaaggtgccgagaacattttttttcaagtctttttgtggacgtgtgtttttctttgtcttgggtaaaaaataccaaggagtaggwttgctgatttacaggttggatttaggttgaacttcacatgaaacaaccaaacctccttccacggtagctgcaccattttacatttccaccagctgcagtg

SEQ ID NO: 465875 - DNA, 201 bp, Homo sapiens
atggcccagtcagatctcactatcctgagagcagccacgccatggggaactccgccccataatccggtcacctcccaccaggcccctcctccaacattgarggtcacaagtgaacatgagatttgcatggggacgcagatccaaaccgtatgtgctgttatgaataaagatccaaaccgtgtccgctgttatgaataaaga

SEQ ID NO: 465876 - DNA, 201 bp, Homo sapiens
atttctcaattcggactctgtgaccgtcccaccatccttcccgtctgcccacagtgctccgcccccatcctgcagcgccgacttcctgcacctgggtaagygcctctcgcctggcagccagctctccatggccgcctccctcaggaccgcagcctctggtgggaaacagagctgtgggtctcaggcagtggtggggctgga

SEQ ID NO: 465877 - DNA, 201 bp, Homo sapiens
acccccttggggtgaattagacgttcggggaggtcactgttggggacgacccccgggtgggctcaccactgggggaggtgacagttgggctgggccactcscctttcctcctcctccactccgtggactcctggtgaattgctcatggttgtctgtgtgggtgcgcatccccgtgtcccagtccgtctgtgctgctgtaac

SEQ ID NO: 465878 - DNA, 201 bp, Homo sapiens
caggcaacaactcccagccctgctccaatcctgatctcttcggcgaatttctcaattcggactctgtgaccgtcccaccatccttcccgtctgcccacagygctccgcccccatcctgcagcgccgacttcctgcacctgggtaagtgcctctcgcctggcagccagctctccatggccgcctccctcaggaccgcagcct

SEQ ID NO: 465879 - DNA, 201 bp, Homo sapiens
ttgcgacgccccgtgccctgtcaggaagggggtcacgtacagcagtcgtgtctgtgagcgtctgtccttcccgtcaccctggagccggccctcccgcggcrtctggtagcgcggatgcgtatgctgcagctgcgtcttgggccggcctcagcgatgtcgcgggtttgcttccagaccacagtcaaagcgaacacccctaga

SEQ ID NO: 465880 - DNA, 201 bp, Homo sapiens
ccaaggccctgggccgaggaggccctgaagggacgcgccgtggggaccctggtgctggccacgtgtgttcaccaaggccctgggccgaggaggccctgaarggacgcgccgtggggaccctggtgctggccgtgtggtctcactagcctgtggttttgtttccttttcgcagaagagaaggaggcagagactggtgcagaa

SEQ ID NO: 465881 - DNA, 201 bp, Homo sapiens
cactgtcgggggaggacccccttggggtgaattagacgttcggggaggtcactgttggggacgacccccgggtgggctcaccactgggggaggtgacagtkgggctgggccactcccctttcctcctcctccactccgtggactcctggtgaattgctcatggttgtctgtgtgggtgcgcatccccgtgtcccagtccgt

SEQ ID NO: 465882 - DNA, 201 bp, Homo sapiens
tggacttaaaatattccataaaccatgctgtacacagatggctgccatccaggctttgctgtgccatttctatggcacaagccgagtcaatttagaatccttttttttttttttgagacagagtctctctttgtcgcccaggctggagtgcagtggtgtgatcttggctcactgcaagctccgcctcccgggttgacacca

SEQ ID NO: 465883 - DNA, 201 bp, Homo sapiens
tgggccgaggaggccctgaagggacgcgccgtggggaccctggtgctggccacgtgtgttcaccaaggccctgggccgaggaggccctgaagggacgcgcygtggggaccctggtgctggccgtgtggtctcactagcctgtggttttgtttccttttcgcagaagagaaggaggcagagactggtgcagaaaatgcctct

SEQ ID NO: 465884 - DNA, 201 bp, Homo sapiens
aattcatctttttcctcaaatagatccacgagggctctttatacatgaagagcctggttttaatgactgcatggcactctatcaagtagctctaccacggttttttttttttttgagacagagtgtcattctgtcactggggctgagtgcagtggcatcattttggctcactgcagccgtcaacccctgggctggagcgat

SEQ ID NO: 465885 - DNA, 201 bp, Homo sapiens
gcctttgcaaccctgtcttgtcttccctcttctttactctggaggcatcaggatggtagccctgttcccgggggcagcaggtggaattgggcctgtgtgtytctgcagaaagtttctgttcttaactgggctttgtggctcacgcctataatcccagcactttgggaggctgaggcggacagatcgctggagcccaggagt

SEQ ID NO: 465886 - DNA, 201 bp, Homo sapiens
aaataacaaccctcgctcttcatcccagtctgtgggcctggggaggctggcagcatgggccatgctggcggggcccctgggtacaggggaagggcctgggyggagggacagactgtcaccacctggggatcccacacctctctttgcccacacccccagtgggctcccagcccctctgaggcttttcaggaaaacacctgg

SEQ ID NO: 465887 - DNA, 201 bp, Homo sapiens
ggcaagcgtcttgggagacgggcctccggcagagctgagttgcacctcagtggggctgtgcacccggcatgtcagcctgttctttaatggctcacgagctragaatgatttcatatctttttaaaggtgaaaaaaaaagaacatgcccacaaagtctgaaataacaaccctcgctcttcatcccagtctgtgggcctgggg

SEQ ID NO: 465888 - DNA, 201 bp, Homo sapiens
cgtgttgcaggtagttgcggttgtagcctggggggtgggggggttggccgagggtagactgggctgtgtctcgtgatcccccttcgtctttcaacacctcrgtgtttctcttcccggtgaacatctactcgtgtgattccgtgtgtagtacaggaagcagagccagtggttgtgacctatatagaacttgcagagtggaca

SEQ ID NO: 465889 - DNA, 201 bp, Homo sapiens
gtgctggacacacgtccactctcactgtgagcctcaggcctgctggcagcacgtggaacagaaccctcgctcctgtcgctcttcacttccgagcagtttcraaacggcagcccaggaagtgctggcaggtgggcccagggccgtccactgctcatgccacgcttgttctcggctcttggtttgcagtgtttgctttttctt

SEQ ID NO: 465890 - DNA, 201 bp, Homo sapiens
gacctggggccccttggcaggcaggcggcctgtgctcagcacctccaggcgcagcagtggacagggtcagcgccagcctggcctcccatggctccctgagrtcatgccaggaacaacacaaggccgtgtccgtggaaaaccagggcctctgtgcaccaggcatcccagtcactcatcccgacacctggagacagggcaggt

SEQ ID NO: 465891 - DNA, 201 bp, Homo sapiens
tcctgtcgatgaggctggcttatcagaacttgggcttcctctgggaaaatgcctgcctttcctcgacttgccttcctctcgctgcctgtgtgagcccataytgaccgcgtgcatgccgagcaccttccgtccgtggctggtgtgctgccctctcggagccctgtgctgcctgtgggagcccgtactgaccgcgtgtgtgcc

SEQ ID NO: 465892 - DNA, 201 bp, Homo sapiens
ggcgagccctggtggaggaagaggtgagctgagtggggcctatgctgggggaagctggcccttcccacattccacgccctgagtgcggagtgctgttttcygccggggtgctttgagtctcgctctgtcaccaggctggagtgcagtggtgcaatcccggctcactgcaacctccgcctcctgggttcaagcgattcttct

SEQ ID NO: 465893 - DNA, 201 bp, Homo sapiens
tgtctgaggacaggaccctgtgggacaaggaaggtttgggctgtgtggagggtttgcagttccttgggggccgcgtgggtacagagacctgggagcagggragtgctgggaagcccagtgcagacggggagaggctgtggtgcccctctctggcggccatcatggtgggtgcaccagcagagggagccctggtgctgggtg

SEQ ID NO: 465894 - DNA, 201 bp, Homo sapiens
aactctattctgctgtattggcacagggagagggagtgaagcgacacaaaagccctcaccctcaccagctccctggtacctctcagggctggagggttagyctgtccaggtgcctgctctgtgaccagacaggagactatcccagaattctgattatcacaaaaggcctgcggagacattttgactgtagcattatcacac

SEQ ID NO: 465895 - DNA, 201 bp, Homo sapiens
tggtggcaggcagggagcttgggtggggacccacagcggagactgagggacggtgcctagaaggccgacagctggagtcaggaggtgagcggtgcaggagrtgggtttaagccttggccttttgccggacatctggggttattgagcaggcagggacaggactggactttggaggttagggctggttcttctacagtccag

SEQ ID NO: 465896 - DNA, 201 bp, Homo sapiens
gtgtcactatgttggtcaggctggtctcaaactcctgacctcaggtcacccgccggccttggcctcccaaagtgctgggattacaggcatgagccacggcrcctggcctttttgtccattttttattgggcagggagtttctgcttactctggatacaggtcttatgtttatatatttatataatttatgtgagaaagaga

SEQ ID NO: 465897 - DNA, 201 bp, Homo sapiens
aggatcgggccaggcacggtggctcacgcctgtaatcccagcactttgggaggccgaggtgggcagatcacgaggtcaggagatggagaccatcctggctwacatggtgaaatcccacctctactaaaaaatacaaaaaaaattaaccgtgcgtggtggtgggcgcctgtagtcccagctacttgggaggctgaggcagga

SEQ ID NO: 465898 - DNA, 201 bp, Homo sapiens
ggccgccagcccagggcgcctcatggccccctcaggccaagccgccccccaaagcctgcacacagccaaggcctaactatgcctcgaacttcagtgtgatyggggcgcgggaggagcggggggtccgcgcacccagctttggtgagtcccccactctctgttgctgtggagtttgcagagacctccctgaattggctaaag

SEQ ID NO: 465899 - DNA, 201 bp, Homo sapiens
cacctctggtcgttttgttacttaggtgtggaaagtcagggttttcctttccatttagttctgggaagtccgcgtgaaacagccctaggttccctgtctcyggaccctgttctcctgcctccatgtgagtttcattctcttttagggcagctggtggaatttttgaagaaaatggaatctcgaggccccctttcgtgcgac

SEQ ID NO: 465900 - DNA, 201 bp, Homo sapiens
cccccggaatcatgttcccaattccctggcagccggattctagaggtcttggttttatgggcatctgttgacagttgtggatttttgtcagggcggacgtygtcatttttatggaaaacacatttagtatcccagagtgcgtgctctgagctgccgggtggctgcagtctgtgtgtgctgggtagtgagggccagcgcctg

SEQ ID NO: 465901 - DNA, 201 bp, Homo sapiens
tgcagacgttgcctcctccacatctccacgccagctgtgccaccgctgtgcagtccctgccacccctgacgacagacagcggcacgcaaagaggctcgggygcagggggaagctcgtgttggccccggctggagtgcacatcagtcccggcttcggccgtggccacctccgcccagagccttgagtgggcattgagggggc

SEQ ID NO: 465902 - DNA, 201 bp, Homo sapiens
cgagccagccttgtagccgaccctcttcccacataggacttgtgactgagggcaccagcctctgaagctccgtgctgttctcttggccatgtgactgaggkcaccagcctctgcagctctgtgctgttctcttagccaccagggttctgtcatccttgcttctttgtacctctcctggacccagagcctgaagtgcggtgg

SEQ ID NO: 465903 - DNA, 201 bp, Homo sapiens
gtggtctctcattttgattacatccattcttgtgagtgtgcagtggtgtcgatctcattgtgatttcattggaatttccctgatgatgatgttcagcaattttttttttttttttttttttgagagggagtcttgcccaggctggagtgcagtggctccatcttggctcacggcaagctccacctcccaggttcaaacaat

SEQ ID NO: 465904 - DNA, 201 bp, Homo sapiens
aaggggtggagagacagaggcagcacagggacagatccttaggggtggtacagacagtgtgagctttgggaaggggccaagcagaagatggcacggatctkggtgggagggatggagaatgcaccctcactggggcccggagaggaagattcgtataaagaaagaagcttgtgggtcacttagcacccaggaagaagaaca

SEQ ID NO: 465905 - DNA, 201 bp, Homo sapiens
gccactgcactccagcctgggtgacagagcgagactccgtctcaaaaaaaaaagaaaaagaagaagaaatcacctggattgatttgtgtggctgtttctgygattttctttccattccagtcatctttgtatctgtccctctgccaataccacatagccttgattaatttagctgtgtagtaagtcctgagatcaagtcca

SEQ ID NO: 465906 - DNA, 201 bp, Homo sapiens
ttcctgtgagcaggtgtcggcgttggatctctagggctggcttcgagtcctcactctctcccgggctggctttgagtcctcactctgctcttgcgagctcrcatctgaagtgccttctgttctgtcatgaagtcccaagagttttttcgtctttgaatgttctttttatgtttcaggtggttttggggatttactatgtct

SEQ ID NO: 465907 - DNA, 201 bp, Homo sapiens
ttaatttagctgtgtagtaagtcctgagatcaagtccagatattactatctttaaaaattatgaaatattttaaaatgcagaaaaatacagtaacataacraacacctatgtcctactatccagaataaacgttaaccttttaacaaaatagtatctggggccgggcatggtggctcacacctgtaatcccagcactttgg

SEQ ID NO: 465908 - DNA, 201 bp, Homo sapiens
aacccgggaggcggaggttgcagtgagccgggattgtgcctctgcaccgcagcctgggcaacagaccaagactccatctcaaaaaaaaaaaaaaaaaaaawtggctctaaacctttttcacaattttggtagaataatgtcgcaatattcttggacttctgggaccttctccttcctggtggcgttttcaccaccaggagt

SEQ ID NO: 465909 - DNA, 201 bp, Homo sapiens
gctcaagcagtcctcccgccttagcctctggagtagctgggacttcaggtgtgcaccaccatgcccagctaattttaaagagtaaacttttcttagagacagagtctcactatgttgccaggccggtcttgaacacgcgagctcaagcaacacctgtagcactgggattacaggtgttggcccctgtgcctggctaagttt

SEQ ID NO: 465910 - DNA, 201 bp, Homo sapiens
ctcaagcagtcctcccgccttagcctctggagtagctgggacttcaggtgtgcaccaccatgcccagctaattttaaagagtaaacttttcttagagacagagtctcactatgttgccaggccggtcttgaacacgcgagctcaagcaacacctgtagcactgggattacaggtgttggcccctgtgcctggctaagtttt

SEQ ID NO: 465911 - DNA, 201 bp, Homo sapiens
  misc_feature (1)...(201): n = A,T,C or G
cagtgctgtgggacggggagagccgctggacgcccgtgggcatggccgacctggtggctccggagcaagtgaagaagcactatcgccgcgcggtgctggcygtgcaccccgacaaggtgagcagagctgccaggcggccgcttgaggccttcaggggcgggggcgggggnnnnnnnnnnnnnnnnnnnnnnnnnnnnnnnn

SEQ ID NO: 465912 - DNA, 201 bp, Homo sapiens
aagcggggttttgtcccaggcgtgtgtctgggtcagatttttgtcatgtgtgctggacacacgtccactctcactgtgagcctcaggcctgctggcagcaygtggaacagaaccctcgctcctgtcgctcttcacttccgagcagtttcgaaacggcagcccaggaagtgctggcaggtgggcccagggccgtccactgct

SEQ ID NO: 465913 - DNA, 201 bp, Homo sapiens
accaacacacgtgtgcatgtacacacacacaagcaccagcgcgcacacacacacacagccgaggaggggattaaccgagtgaatgtgtttcaggagctccrtcaccaggaagcagagaatgtaccaatccctagggcagattaaagatgcaatcaagaagaaaaatggaacaaaaaatatgtgatgaattcgccagaacaa

SEQ ID NO: 465914 - DNA, 201 bp, Homo sapiens
ctgcaccttgggaggggtgctggcctggcctgggtgagctcaggaagagctggcgcctgctgctgtcagggacggcctgcaccgggagaccggggtgtctycttgtgtttttctgtctctgtgattctttttttacatctcttgtctttgttgtgtcttacgcttttctttttttaactcacatattcgcaactttaataa

SEQ ID NO: 465915 - DNA, 201 bp, Homo sapiens
ggactctgcaccttgggaggggtgctggcctggcctgggtgagctcaggaagagctggcgcctgctgctgtcagggacggcctgcaccgggagaccggggygtcttcttgtgtttttctgtctctgtgattctttttttacatctcttgtctttgttgtgtcttacgcttttctttttttaactcacatattcgcaacttt

SEQ ID NO: 465916 - DNA, 201 bp, Homo sapiens
caggcaggcttatctgccaagacacagtggaacaaacattgttccaggagtcagagggggcacccacgggggctcccaagacagaggctgtggctgcaggkcctgctgtgttccaggctctgtgctcttggttcctacccagtaaacaaagggaagccttgggccagccccacggggatgctggcggactctgcaccttgg

SEQ ID NO: 465917 - DNA, 201 bp, Homo sapiens
tctgcgaggtctacgtgggggacgagcgtgtggccagcacctcccaggagtacgacaagatgcggtgagtgcagctgcagccccacgctgtgctccctccycctcacccctccggaaaaccgttaaagaggaaccctggccttgccggggacaggcgcttgctgaggcggacgtgtttggaactgtggcgtctgtggcagg

SEQ ID NO: 465918 - DNA, 201 bp, Homo sapiens
aggagcaactaaaacattgctacaagggaaatttctagcatgaaaaactcctattcgaaagacaaaatcagctgtgtggtcccctctcagggcacgtcacrtggtgacgcggcacgtctgcccccaggtacatcgagtacatgtgtgacatggtggcggaggagcccatcacaccccacagcaagcccatcctggtgaggg

SEQ ID NO: 465919 - DNA, 201 bp, Homo sapiens
gttctaggacgttccacccaacaatagaaaaacacacatttatttctttcaaatgcacatggaatatgcaaggagaaagatcagatttggggctataaacwcacctcaatacatttttaaaatttgaaatcagacaaactatgctgtcaggccacagtggaataaaaattgaaatcaataccagaagaatatctggaaaac

SEQ ID NO: 465920 - DNA, 201 bp, Homo sapiens
gaggggtcttttgcggggtacggggcaccagcagagcctgttggagtggccctagccctgttcttcgttagggaaccttcagtctctgttgggctccattsttgcctcggcaggcacgttatgtagctccctaaacatatcccagcttcagagaggaacagccctgcgtccctgcagccacagggtgggtaggatgcccga

SEQ ID NO: 465921 - DNA, 201 bp, Homo sapiens
taagtgtcgcctgtgctgccggcgtcttctggtttgtggcccagttttcactcctgctgttgtgttttttaaaaaacctaggacgttgtgaggcttctccrttatctgtgaagcctgtgcctggcctgcccatggtgggcctcgtcctccgtgctgaggcttttgctgaagaggttttttggggttttttttttttttttt

SEQ ID NO: 465922 - DNA, 201 bp, Homo sapiens
gtgtgggtcccacacatgcaggtgtagtggctggctgggtctctgctggctggaggaagggtgagtcctcgagctgctgggttctgcagtgcccccatctkctcggtgctgcctgggcctcggtctcctgtctgcatgagggactttggccaggtgttttttttttaacaccacttgtgccaccaaagccgcctgtgaaga

SEQ ID NO: 465923 - DNA, 201 bp, Homo sapiens
  misc_feature (1)...(201): n = A,T,C or G
cgggccctgctgtccacgctgcacacagtgctgtgggacggggagagccgctggacgcccgtgggcatggccgacctggtggctccggagcaagtgaagargcactatcgccgcgcggtgctggctgtgcaccccgacaaggtgagcagagctgccaggcggccgcttgaggccttcaggggcgggggcgggggnnnnnnn

SEQ ID NO: 465924 - DNA, 201 bp, Homo sapiens
cccaaggccgtggctctccacgtgtgccctgggtgggggatccaaggccgtggctctccccgtgtgccctgggtgggggatccaaggccgtggctctcccygtgtgccctgggtgggggtgcctaagccgtgggcacccatgctgagctgttcttaactgcacaggctcattccgcctcagcctgcctcagcccacccagg

SEQ ID NO: 465925 - DNA, 201 bp, Homo sapiens
gactccccgggcctggcctcagcctctcccgggtctgttcctctctttctgagcaccccattccttctatgggtgcccctcatttttcctgagagcccccctgtttctcagagggtcagcacaaagcttttgagggagctgtggtgagggctgagagggctttcacctggggttgagggccagggccggcagagctggggg

SEQ ID NO: 465926 - DNA, 201 bp, Homo sapiens
tgcattggtagctgactgtcccggcctcaggcaggtcattcctggaaagcaggtcttcgtgcttttcagcatgagtggagggcgctttatcctgctttccrtaagctctcattttcccattccctttaagaaattgtggcctgcccaaggccgtgcgctgtcctgctgtataactgcagagcccacttgccccctgctctc

SEQ ID NO: 465927 - DNA, 201 bp, Homo sapiens
actccccgggcctggcctcagcctctcccgggtctgttcctctctttctgagcaccccattccttctatgggtgcccctcatttttcctgagagcccccctgtttctcagagggtcagcacaaagcttttgagggagctgtggtgagggctgagagggctttcacctggggttgagggccagggccggcagagctggggga

SEQ ID NO: 465928 - DNA, 201 bp, Homo sapiens
cagtgtggttctcacgttaatggcttgccacctcggctgctgggacgccaatgtagttctcatgttaacggcacgccagctcaactgctgggatgccgatgtggttctcacgttaacggcatgccagctcagctgctgggatgctgacgcggttgttgcttcggtgacgcttgggcgtcttgccccctggcctctgctctg

SEQ ID NO: 465929 - DNA, 201 bp, Homo sapiens
agtgtggttctcacgttaatggcttgccacctcggctgctgggacgccaatgtagttctcatgttaacggcacgccagctcaactgctgggatgccgatgtggttctcacgttaacggcatgccagctcagctgctgggatgctgacgcggttgttgcttcggtgacgcttgggcgtcttgccccctggcctctgctctgt

SEQ ID NO: 465930 - DNA, 201 bp, Homo sapiens
aagttcggtctgtcccaggacccaagcccgtctggccgacctggctccctgcacactccctccctccgtgcccctcccactgtgcctctccgccctcggtygtggccggtctgagcctccgctgcggtggccgtcggattctctgctggtgcctgcaggctcctctgcagacgttgcctcctccacatctccacgccagct

SEQ ID NO: 465931 - DNA, 201 bp, Homo sapiens
gtgtggttctcacgttaatggcttgccacctcggctgctgggacgccaatgtagttctcatgttaacggcacgccagctcaactgctgggatgccgatgtggttctcacgttaacggcatgccagctcagctgctgggatgctgacgcggttgttgcttcggtgacgcttgggcgtcttgccccctggcctctgctctgtg

SEQ ID NO: 465932 - DNA, 201 bp, Homo sapiens
cacagggacctcaaggtagcggctgctgaggcctctgtgtgcgggtcccgctcggttaggagccgcccatcatccacagggacctcaaggtagcggctgcygaggcctctgtgtgcgggtcccgctcggttaggagccgcccatcatccacagggacctcaaggtagtggctccctccacacgcggctgccaaggcctctg

SEQ ID NO: 465933 - DNA, 201 bp, Homo sapiens
aagaggttttttggggttttttttttttttttttttttttttgagtcagtcactctacagcccaggctggagtgcagcggcactgacggggctcactgccrcctcggccgacttggcccaggtgatctcccacctgagcctcctgagtagctgggaccacaggcgcacaccacgcctgcctagtttttgtattttcagtag

SEQ ID NO: 465934 - DNA, 201 bp, Homo sapiens
cctgttatcagagctgcgccagaaggtgtaatgtgggcttcacaattgtgtggccctttctagttctttgtgtctctgtatacttttttttttttgagtcrgagtcttgccctgtcacccaggctggagtgcagcggcgcaatctcggttcactgcagcctccgcctcccaagttcaagcgattctcctgcctcagcctcc

SEQ ID NO: 465935 - DNA, 201 bp, Homo sapiens
gctggccatgtgggttcgccaaggccctgggctgaggggacgcgccgtggggaccctggtgttcctgcagcacttgccaaggccctgggccgaggaggtgycgaggggccatgccatggggaccctggtgctggccacgtgtgttcaccaaggccctgggccgaggaggccctgaagggacgcgccgtggggaccctggtg

SEQ ID NO: 465936 - DNA, 201 bp, Homo sapiens
tgaaggaggcacacatgagccccagatcccccgcagaggggagggaggcacatgtgagccccagatcccctgcagaagggagggaggcacacgtgaacccyaagtctcctatcacagaggggagggaggcacacgtgagccccagatcccccgcagaggggagggaggcacatgtgaaccccaagtctcctatcacagagg

SEQ ID NO: 465937 - DNA, 201 bp, Homo sapiens
ctgtgtggggagcccacctcccctcctgctcggtggccacctaagagtcacttccagtttcccgatctgcagctcgaggcttagtggtgcttgagcctccsagggtgtggcagctgccactgtgggtgatggagttgaggtttccatgaggggtcttttgcggggtacggggcaccagcagagcctgttggagtggcccta

SEQ ID NO: 465938 - DNA, 201 bp, Homo sapiens
ctattttgcaagcgcatgttttccaatatacgtggtgctctgcgttatagaaacagtagttgcccctcatggacaaccagatgccgagtttccgatctccrtctccacaggctcaccagctggattccctcctgggggcttcattcccaaaacggccaccacgcccaaaggcagcagctcctggcagacaagtcggccgcc

SEQ ID NO: 465939 - DNA, 201 bp, Homo sapiens
tctggaggccccagctcctcactgcttcccaccagccagagggtgctcgaggccgaggcattccttccagacacgacacttgtcagtatgcaaagggaccyaaagcccaggaacagctgactgagctctgtctgcaaggccagtggcagccctggtgctcaggtctcgcgcaggtggacgcctgttcatgacaccagctgg

SEQ ID NO: 465940 - DNA, 201 bp, Homo sapiens
cctggagacagggcaggtgtcagaaagctgtctcaggaagtcccagccaccggctgatgggcgtgtggctgggtccatgctcctaggtccacccaggctgrgagtccacggagggtgagggggccggctgtgtgggcagtggctggtggagctgccggaggctgcgcttgcccgggggcgtcaggagcagcgaggccgcag

SEQ ID NO: 465941 - DNA, 201 bp, Homo sapiens
ggacagagcggctcttcaccaacctcaaggacacctcctccaaggtcatccagtccgtcgctaagtgagtgtgaggctccagagccctggacctgccgcaygctcgttccaggctgcagccccggcccttgcttcctggctgcggtggaacagctggtcatcaggccccacaggggcccctgaggcagtgggacagcatca

SEQ ID NO: 465942 - DNA, 201 bp, Homo sapiens
gaggctgtgggacgcgccccggcccttccctgtgtgcccagtgagtccctgttgtgtgtcagggcacaggtgcctctgctccagccttctctgtggccacrgactcacaggggtgacctggggccccttggcaggcaggcggcctgtgctcagcacctccaggcgcagcagtggacagggtcagcgccagcctggcctccc

SEQ ID NO: 465943 - DNA, 201 bp, Homo sapiens
ccaccagctgcaggctgtcatttccatccgtttctgatgtaggggtcagctccacagcacgcacacagccgggaagctgcccacacgcctgtgcacacacrcgttcctcctgggatgcggcctctacagtgagagccccacggcttctccaggcctcgggctctggcttaagccctgtgacctaactgcggagtgtttctt

SEQ ID NO: 465944 - DNA, 201 bp, Homo sapiens
gcttaagccctgtgacctaactgcggagtgtttcttgtcataaccaagttctcttctttttaattccagttatgcaaagggtgacctggacatatcttacrtcacatccagaattgcaggtatgcgtgccacatgaggctgtgggacgcgccccggcccttccctgtgtgcccagtgagtccctgttgtgtgtcagggcac

SEQ ID NO: 465945 - DNA, 201 bp, Homo sapiens
tgtgcacacacacgttcctcctgggatgcggcctctacagtgagagccccacggcttctccaggcctcgggctctggcttaagccctgtgacctaactgcrgagtgtttcttgtcataaccaagttctcttctttttaattccagttatgcaaagggtgacctggacatatcttacatcacatccagaattgcaggtatgc

SEQ ID NO: 465946 - DNA, 201 bp, Homo sapiens
cagtcagacagcggatgtctctcctgtctcacccatgcctccaccagctgcaggctgtcatttccatccgtttctgatgtaggggtcagctccacagcacrcacacagccgggaagctgcccacacgcctgtgcacacacacgttcctcctgggatgcggcctctacagtgagagccccacggcttctccaggcctcgggc

SEQ ID NO: 465947 - DNA, 201 bp, Homo sapiens
gtttcttgtcataaccaagttctcttctttttaattccagttatgcaaagggtgacctggacatatcttacatcacatccagaattgcaggtatgcgtgcyacatgaggctgtgggacgcgccccggcccttccctgtgtgcccagtgagtccctgttgtgtgtcagggcacaggtgcctctgctccagccttctctgtgg

SEQ ID NO: 465948 - DNA, 201 bp, Homo sapiens
gtgggtttagacggcttttaaaacgtttgaacgcacggaagacccgcatcctatgtcagcacctgctctgcgggtttagacggcttttaaaacgtttgaaygcatggtcactttcaggcgatggttcggtcgtgtgtatttgggtcattcatctctctggacctttatccaggctttcctctgatggggacagcacctctg

SEQ ID NO: 465949 - DNA, 201 bp, Homo sapiens
atccctctcccagcccactcctgggccgtgcctccctggagagcgcaggggaaggggcagtcagacagcggatgtctctcctgtctcacccatgcctccaycagctgcaggctgtcatttccatccgtttctgatgtaggggtcagctccacagcacgcacacagccgggaagctgcccacacgcctgtgcacacacacgt

SEQ ID NO: 465950 - DNA, 201 bp, Homo sapiens
tttgtctcttgctgcaaaagtggccaagcgtcaggctcaccgtgcctccccgtcttcccttgttgctttggaagacccgcatcctgtgtcagcacctgctyggtgggtttagacgccttttaaaacgtttgaacgcacggaagacccgcatcctgagtcagcacctgctcggtgggtttagacggcttttaaaacgtttga

SEQ ID NO: 465951 - DNA, 201 bp, Homo sapiens
cgtgcctccctggagagcgcaggggaaggggcagtcagacagcggatgtctctcctgtctcacccatgcctccaccagctgcaggctgtcatttccatccrtttctgatgtaggggtcagctccacagcacgcacacagccgggaagctgcccacacgcctgtgcacacacacgttcctcctgggatgcggcctctacagt

SEQ ID NO: 465952 - DNA, 201 bp, Homo sapiens
agcttttaggaatttggacttgtggtgtgaatgggtttttaggtagaactgtggaaccagatagctttctaatttcttcaaatttgttctgtcatcttcctttttttttttttaatttaagagacgaggtcttgctgttactcaggatggatttgaactgggctctggatcttcctgcctcggcctcccgagtagctgggc

SEQ ID NO: 465953 - DNA, 201 bp, Homo sapiens
tgtgcaggcacgtgtatgagcacatgtgcatgttggagcatgtatgcgtgtgtgcatgtgtatgcatgtgtaggagtgcttgtgagtgcgcgtgagctgtstgcatgtgtacacgtgtgcgagtgcctgtgagtgcacgtgaactgcatgcatgtgtacgcatgcgcgcgagtgcctgtatgagccgcgtgcatgtgtacg

SEQ ID NO: 465954 - DNA, 201 bp, Homo sapiens
atcccggggttggcgtgatgtgggcatgagccactggctgcatgtaaaagggccgtcctgcccaccacactgccacacagatgcttctagactggggctgsgctcgcgctccatccctgcccaccacaccgccacacaggtggttctgggccggggctgggcctgcgctccgtgctgctgccggcactgcgcggtttccat

SEQ ID NO: 465955 - DNA, 201 bp, Homo sapiens
tagctgggcttacaggcatgtgctgctgcacctagctagtcttcacttttttaaaaggcagattatcaggagcaccaaccatgtcagagatgcccagggcaggtgtatgctgtgtgttctttgttttgggttctgcgtgccgttgcttctgaagtggagcctgtggtgccctgactgcagggaaatccaccttccctgtgt

SEQ ID NO: 465956 - DNA, 201 bp, Homo sapiens
cgacacctggagacagggcaggtgtcagaaagctgtctcaggaagtcccagccaccggctgatgggcgtgtggctgggtccatgctcctaggtccacccargctgggagtccacggagggtgagggggccggctgtgtgggcagtggctggtggagctgccggaggctgcgcttgcccgggggcgtcaggagcagcgaggc

SEQ ID NO: 465957 - DNA, 201 bp, Homo sapiens
agtacattctgcccagcacacagggttgcttttgagggaagcttcttcaaggttgcaagcaagacccctggtttccagaaacccatgcgcctgaggccccrttctgacggaaggggctgcagggctccatgaggggccagtcctgcccgtggaaggtgctgtttgctgtctgggtggttcttcctgaggagtctctgagtg

SEQ ID NO: 465958 - DNA, 201 bp, Homo sapiens
ttcagcaccgcggaggccgccgtgtacatgttcagcatgaagcgctgcccaccaggcatctggccatcccacaaaaggtactgcgtggccctccggggacrggggacagctctgtgggcccgtgtggcactgccgcccccgctgtggtgtctcctggagggccagtcggtgccgctgcaggcgctggtgggaaaggcaggc

SEQ ID NO: 465959 - DNA, 201 bp, Homo sapiens
cgtcctgtgaggggagcctcgccccacgctctgcatctgattttcttgctcagccctgtggttcagaggccccggtcctgtatgtggcccgcatctcctcrggggccagtggtggccttaggcttcactgggtttctctggtcggccatgggtggcatgtgtgtccgtttctttcccttgtttatggtgagccatcctgtc

SEQ ID NO: 465960 - DNA, 201 bp, Homo sapiens
caccacgcccagctaatttttgtgtttttggtagggacggggtttcaccgtgttggccaggatggtctctatctcttgacgtcatttgtgatccacccgcstcagcctcccaaagtgctgggattacaggcgtgagcaatgtaataaacagactttattttttagagcagttgaaggtaacaggaagtggagctgaaaaca

SEQ ID NO: 465961 - DNA, 201 bp, Homo sapiens
cccagctcagggcccagtcaggacacgcagggcccctctgcagatctcgcaggggtctgtgtccaaggacccaggactcttggctcctgcattttgtcccyttttcagcccttgggtcgtttccactccctggtagctggaagccggaacttccaggggccactgcagtggagctgacccaggcggtgggtgtggagcgtg

SEQ ID NO: 465962 - DNA, 201 bp, Homo sapiens
cgtgtggaggaggctgtttctcaaacgggagtgtggtcacagcgtgtttagggctctccctgtttctcggggctgcaggtgtccacgcccgaggagtccaycccagcagaaagcctcccctggccttggtctccatgaggacctggtgaggctggagcagcctcctagcctctgaaagagcaggtcttgacctggaccaca

SEQ ID NO: 465963 - DNA, 201 bp, Homo sapiens
gtgagctgagtgctcgtattgtgtgcaggcacgtgtatgagcacatgtgcatgttggagcatgtatgcgtgtgtgcatgtgtatgcatgtgtaggagtgcytgtgagtgcgcgtgagctgtgtgcatgtgtacacgtgtgcgagtgcctgtgagtgcacgtgaactgcatgcatgtgtacgcatgcgcgcgagtgcctgta

SEQ ID NO: 465964 - DNA, 201 bp, Homo sapiens
gttttaaaacctgtttggtagtaacatatctgacagcaggagcaccagcgcgtgcgcacacacagacagcaggagcaccaacacacgtgtgcatgtacacacacacaagcaccagcgcgcacacacacacacagccgaggaggggattaaccgagtgaatgtgtttcaggagctccgtcaccaggaagcagagaatgtacc

SEQ ID NO: 465965 - DNA, 201 bp, Homo sapiens
agtaacatatctgacagcaggagcaccagcgcgtgcgcacacacagacagcaggagcaccaacacacgtgtgcatgtacacacacacaagcaccagcgcgmacacacacacacagccgaggaggggattaaccgagtgaatgtgtttcaggagctccgtcaccaggaagcagagaatgtaccaatccctagggcagattaa

SEQ ID NO: 465966 - DNA, 201 bp, Homo sapiens
ttcaggtggttttggggatttactatgtcttgaggacatccatgagcgtttctgtcggtgtggttttgtattttatttccctttgtggcctctgtcttgtrttgtctgagagcacggtggggttgcgagggccgtgccctcgggaggagacctgcgtgtgccttgactgccctgggcagccggcactggggcagaaggagt

SEQ ID NO: 465967 - DNA, 201 bp, Homo sapiens
ggtgcttgtgagtccttgtgcttgtgaatccttgtgtgagctgagtgctcgtattgtgtgcaggcacgtgtatgagcacatgtgcatgttggagcatgtaygcgtgtgtgcatgtgtatgcatgtgtaggagtgcttgtgagtgcgcgtgagctgtgtgcatgtgtacacgtgtgcgagtgcctgtgagtgcacgtgaact

SEQ ID NO: 465968 - DNA, 201 bp, Homo sapiens
tgtggtctctcattttgattacatccattcttgtgagtgtgcagtggtgtcgatctcattgtgatttcattggaatttccctgatgatgatgttcagcaattttttttttttttttttttttgagagggagtcttgcccaggctggagtgcagtggctccatcttggctcacggcaagctccacctcccaggttcaaacaa

SEQ ID NO: 465969 - DNA, 201 bp, Homo sapiens
ccaggtacatcgagtacatgtgtgacatggtggcggaggagcccatcacaccccacagcaagcccatcctggtgagggccgtggtcatgacacccgtgccrctgttcagcaagcagaggagcggctgcaggcccttctgcgaggtctacgtgggggacgagcgtgtggccagcacctcccaggagtacgacaagatgcggt

SEQ ID NO: 465970 - DNA, 201 bp, Homo sapiens
ctttcctttcatcgcctggggggcaaggccctgctgaggagatgcctgggccctcccctcccttgctgcaatgtcgcccctcactctggggcgttcctggsttgttcccgggactctgtaaattgggtgaaacctcggtggtggcgcctcactgagccagtccttgagttaaagccctagttactcagacttagaccaggt

SEQ ID NO: 465971 - DNA, 201 bp, Homo sapiens
aaattcactctcgcagttctggaggcttgaaggccaagagcaagatgctgtcagtgctgattccaggagaggcctcttttgctggtttgcagatgctgccttttttttttttttttttttgagatggagtctcgctctgtcacccagactggagtgcagtggcgcaatctcagctcactgcaacctctgcctcctgggttc

SEQ ID NO: 465972 - DNA, 201 bp, Homo sapiens
agcatcacccgcttctcccagggagtcggaatgagcccagcatcccacagagccaggcagatccctttcctttcatcgcctggggggcaaggccctgctgrggagatgcctgggccctcccctcccttgctgcaatgtcgcccctcactctggggcgttcctggcttgttcccgggactctgtaaattgggtgaaacctcg

SEQ ID NO: 465973 - DNA, 201 bp, Homo sapiens
ctgcaggcccttctgcgaggtctacgtgggggacgagcgtgtggccagcacctcccaggagtacgacaagatgcggtgagtgcagctgcagccccacgctrtgctccctcctcctcacccctccggaaaaccgttaaagaggaaccctggccttgccggggacaggcgcttgctgaggcggacgtgtttggaactgtggcg

SEQ ID NO: 465974 - DNA, 201 bp, Homo sapiens
cttagaggtttgagcacttgtgtatttgtagtcatttctctttgtatccatgttaatgacatgcctggctcggttgccaggacacagatgtgattctcacrttaacggctcgccggctcggctgctgagatgccagtgtggttctcacgttaatggcttgccacctcggctgctgggacgccaatgtagttctcatgttaa

SEQ ID NO: 465975 - DNA, 201 bp, Homo sapiens
gcggcttcctggacattctgcggggtgggacagagcggctcttcaccaacctcaaggacacctcctccaaggtcatccagtccgtcgctaagtgagtgtgmggctccagagccctggacctgccgcacgctcgttccaggctgcagccccggcccttgcttcctggctgcggtggaacagctggtcatcaggccccacagg

SEQ ID NO: 465976 - DNA, 201 bp, Homo sapiens
atgggggttattctttattggttattacacattttagctaagtggacaatttctcattctgttttttgttgtttttgtttggttggttttgggggtttttwaaatttttctcttgtcattctgtccttagggactttaagattgaagatggcaaagcggtgattcccctgggcgtcacggtgcaaggagacgtgctcatcg

SEQ ID NO: 465977 - DNA, 201 bp, Homo sapiens
agtacgaccagccgtatggcggcttcctggacattctgcggggtgggacagagcggctcttcaccaacctcaaggacacctcctccaaggtcatccagtcygtcgctaagtgagtgtgaggctccagagccctggacctgccgcacgctcgttccaggctgcagccccggcccttgcttcctggctgcggtggaacagctg

SEQ ID NO: 465978 - DNA, 201 bp, Homo sapiens
cctggccataccacccactccctgctcctgctgcctgggcccagccagcaacctgcacctggggaggtgggaccgagcgcctggggaggtgggaccaagcrcctggggcctgggcccagccagcaacccgcacctggggaggtgggaccgagcacctggggcctgctgagactgtgtctccctgcaggcctggcgctggcg

SEQ ID NO: 465979 - DNA, 201 bp, Homo sapiens
ggggcctggccataccacccactccctgctcctgctgcctgggcccagccagcaacctgcacctggggaggtgggaccgagcgcctggggaggtgggaccragcacctggggcctgggcccagccagcaacccgcacctggggaggtgggaccgagcacctggggcctgctgagactgtgtctccctgcaggcctggcgct

SEQ ID NO: 465980 - DNA, 201 bp, Homo sapiens
gggcccttgcccggcccggccccctcagctcctccggagacctggctgagagccgtgcagatggcctggctcccacaggccccgatgtggcttctcagccscccctctcgtcccttctcaggctgtcccagcatgactgggcggggcatctcccggcgctgacagaggatctgggggctgcactccctgtccactgccaca

SEQ ID NO: 465981 - DNA, 201 bp, Homo sapiens
ggttttgggggtttttaaaatttttctcttgtcattctgtccttagggactttaagattgaagatggcaaagcggtgattcccctgggcgtcacggtgcarggagacgtgctcatcgtcatctatcacgcccggtccactctgggcggccggctgcaggccaaggtgagagagcctgtggcttgcccggtgctccccactc

SEQ ID NO: 465982 - DNA, 201 bp, Homo sapiens
gcttctgacgtcactgatgtgtgtagagggagtggcctctggtggtctgtgacctctgccagtgcagggggtgctgacccgcctggggaaccgtggggccragcgcgctgtgcttctgctgcaggcgccatgctgcaggtgaacccggaggagcggctgtccatcgccgaggtggtgcaccagctgcaggagatcgcggcc

SEQ ID NO: 465983 - DNA, 201 bp, Homo sapiens
tggtggcctgaagctgtggccgtgaggccggactatccccacagacagagtcccagccccagctgtgctgaggcggccacatagcccttccgcacccagaytgaccatttcctgggtctctggaaaggctgaggacagggtagacctgccagtgctgaggcctggcttcccgctgggtacgtgtgggtcaggggcctggcc

SEQ ID NO: 465984 - DNA, 201 bp, Homo sapiens
gtgaatttgcggtgctctgagtggtgatttttgatcattttgttcggtttttgttcttccctttgccgctcccttcttgcttctgacgtcactgatgtgtrtagagggagtggcctctggtggtctgtgacctctgccagtgcagggggtgctgacccgcctggggaaccgtggggccgagcgcgctgtgcttctgctgca

SEQ ID NO: 465985 - DNA, 201 bp, Homo sapiens
cggcaggcacgttatgtagctccctaaacatatcccagcttcagagaggaacagccctgcgtccctgcagccacagggtgggtaggatgcccgaggacccygcgagcccttgtcctgcatgagtgcgaggcgcacgcgagacgtgtctgtctgtcctaggacgggagagccgcgtctgctgtggccgtctgctccttcctg

SEQ ID NO: 465986 - DNA, 201 bp, Homo sapiens
gcgtcaggggactccccattctttatcccctctggatggggcgcacagcctgtggacggggcgagggtcaggaggccattcctgctgctgtggatccccarggagggccccacctcgtttgctcacagccttggggggaggagatcattgccgccccatccagctttgtcttctgtgtgacccccggcaagaggagtgcaa

SEQ ID NO: 465987 - DNA, 201 bp, Homo sapiens
ggccagcgcctgccttggaaccctggggtcccacctcagagctgcctgcctgggtgccggagtctccagctgtgggatgttgtcccgtctgctctgagcaygtggcctcccctggagttgcaggaaacatggcggccccgcccggtgcccctctgccttgaacacagtcgcgggcatccccactgtgacgtccgaggagcg

SEQ ID NO: 465988 - DNA, 201 bp, Homo sapiens
gggctgcctggaccgagactgcagcgtcggcagtggcccccacgccagccacagaaggtatggccaccacccaccaaggacagggctcccagacgtgcagytgctgtggcccgtctctatttcacacgtacctgtaacagggccctctctgcgcagagaaggaaggaagggctggggcgtgcttggtggtgcgggctccgc

SEQ ID NO: 465989 - DNA, 201 bp, Homo sapiens
catcaactcatgggacacacatcaccaaagcagatgcaatcatgaagaagtttgaaatatcattacagttcccaaaatggggcacagggacacagagtgcrcatggcgtgcggaaaatggtgccggacagagttgacacagccctcagcaggtggaacacacactgtctgcagagctccgggaggcacagtgcacgatgtg

SEQ ID NO: 465990 - DNA, 201 bp, Homo sapiens
aggcagaaaacccgttcatcagatggtctggagcacctgggcagcggtaggcaaagccctaagccctcgttctacagaacagctcatcagaatgcagggcmtttaggtgaaaacctttgtggcctggggctgggcagagttcgtagactcgccacccaaaccacacccataagaggacaggtggacccaacttcagagctc

SEQ ID NO: 465991 - DNA, 201 bp, Homo sapiens
tggagccttctgtctttctaaggtcatgcggcactgaggcctttggagccttctgtctttctaaggtcatggggcgctgaggcctttggagccttctgtcytgctaaggtcatgcaacactgagacctttggagccttctgtcctgctaaggtcatgcggcgctgaggcctttggagccttctgtcctgctaaggtcatgg

SEQ ID NO: 465992 - DNA, 201 bp, Homo sapiens
aatgtcagggctgtattgttgatttatgttcacctttttaagaaatcgccaacatgttttccagagtgattgtaccattttccatttccaaaagctgtgcrtaagcattccagtcgctccacatcctcagcgacacttggtctgggcggtttttaaatgtcaagtattctgctaggtatggggtcctatcttcgcggttta

SEQ ID NO: 465993 - DNA, 201 bp, Homo sapiens
tcttcccaggggatctgccaggagagcccagcaagatgacagcctcgtccagcaacccagacctgctgggaggatgggctgcctggaccgagactgcagcrtcggcagtggcccccacgccagccacagaaggtatggccaccacccaccaaggacagggctcccagacgtgcagctgctgtggcccgtctctatttcaca

SEQ ID NO: 465994 - DNA, 201 bp, Homo sapiens
catcctgtctgcaccacgtggacagcctgttcagcttgctggtccgcggagcaggcgtcctctctaggactggggtctgcagggcgctgtggttggagagygtctgcatctaaccctgggcgtccccttgcactcttggatgccacggctctgcactttgctgtcctggggcatggcgggtgctgctccctcagcctgtcc

SEQ ID NO: 465995 - DNA, 201 bp, Homo sapiens
atttttagtagagacgggatttcaccatgttggccaggctggtcttgaactcctgaccttgtcatccacccgcctcggcctcccaaagtgctgggattacrggcgtgagccactgcgcccggcctgaacggaactttttaatcttaagagcctagagtccgtttaacactgtcacctggacagttctttgcggtgaataga

SEQ ID NO: 465996 - DNA, 201 bp, Homo sapiens
aggtggagccacctcgggctctggtgggttttaggagaggcgggaacgcaggctgtggggatggcggcagaaagtggggtcctgacaaacccttttggatrggaatgcgcagatgcttgttctcagcctggcctgcgagctgctccgcctgctggtgcccctacgtccactcgctcagttctgtgtgatgggatgcatcct

SEQ ID NO: 465997 - DNA, 201 bp, Homo sapiens
ccctctcctgcagggaagccggagcttccccggcagcctggctccacggctcagtatgatgctggggcagggtccccggaagccgaacccacagactctgrctcaccgccaagcagcagcgcggacgccagtcgcttcctgcacacgctggactggcagggtaggcagcgtccctggacctggccacttgcagagggcagg

SEQ ID NO: 465998 - DNA, 201 bp, Homo sapiens
ctaggtccacccaggctgggagtccacggagggtgagggggccggctgtgtgggcagtggctggtggagctgccggaggctgcgcttgcccgggggcgtcrggagcagcgaggccgcagcagcagcctggccacgaggtgcgcatctcccaggtgctgacgcaggtctgcttgtttcagtgatgtcattcccagcagaagg

SEQ ID NO: 465999 - DNA, 201 bp, Homo sapiens
gttgtgtcagggctgggcctggccagggtccactcccaggcaccggtggctgctggcagcatcagggcctgggggctgggagactgaggcccacagggccrtgtgctttgtggaagtgtgaggcctgggagggagcagcacgtgttggctggaagatgctttcctcagagtcttttctgacccagccgtggacagggtgca

SEQ ID NO: 466000 - DNA, 201 bp, Homo sapiens
cgtgaaccccaagtctcccatcacagaggtgagggaggcacacgtgagccccaaatcccccgcagtggtgaaggaggcacacatgagccccagatcccccrcagaggggagggaggcacatgtgagccccagatcccctgcagaagggagggaggcacacgtgaaccctaagtctcctatcacagaggggagggaggcaca

SEQ ID NO: 466001 - DNA, 201 bp, Homo sapiens
atcacccctgtgttccctgcagtccccagtgtcacccctgcgctccccacggctccgatgtcacccctgcattccccgtgggcctgggcatcacccctgckctccccgcaggcccaggcgtcacccctgcgctccccgtgggcctaggcatcacccctgctctccccgcaggccctgggctgcatcttgtacctgctgtgc

SEQ ID NO: 466002 - DNA, 201 bp, Homo sapiens
ccacaggcccaggcgtcacccctgcgctccccacggccccaacgtcacccctgcgctccccgcggcccgggtgtcacccctgttgttcccgcaggccccgstgtcacccctgcatttcccatgttcccgatatcacccctgtgttccctgcagtccccagtgtcacccctgcgctccccacggctccgatgtcacccctgc

SEQ ID NO: 466003 - DNA, 201 bp, Homo sapiens
ggcccgagctcccatgccctgttatcagagctgcgccagaaggtgtaatgtgggcttcacaattgtgtggccctttctagttctttgtgtctctgtatacttttttttttttgagtcggagtcttgccctgtcacccaggctggagtgcagcggcgcaatctcggttcactgcagcctccgcctcccaagttcaagcgatt

SEQ ID NO: 466004 - DNA, 201 bp, Homo sapiens
cttgcccctcgcatagcacacagcagggtctgtgctggtcccaccagctcatagatcttcagtgcatgagtgtgggaaccccggaattttgaaaggaaccwttatttatttatttatttatttatttatttatttatttgagacagagtctcgctttgttgctaggctggagggcagtggcgcgatctcggcgcactgcaa

SEQ ID NO: 466005 - DNA, 201 bp, Homo sapiens
gccagttctgcgaaaatcctgagcagactgaggaggctgcttcctgcagcttctgccctgtgccctacaccctgcatatggggtcagttctgaaaagtggrtctctgctgttgccaaggacaggacaggtgccttgcccctcgcatagcacacagcagggtctgtgctggtcccaccagctcatagatcttcagtgcatga

SEQ ID NO: 466006 - DNA, 201 bp, Homo sapiens
tggaggagttaacttgcgctctctgcacttgggccttcttgctcttgtgtcttgcattggtagctgactgtcccggcctcaggcaggtcattcctggaaarcaggtcttcgtgcttttcagcatgagtggagggcgctttatcctgctttccgtaagctctcattttcccattccctttaagaaattgtggcctgcccaag

SEQ ID NO: 466007 - DNA, 201 bp, Homo sapiens
tgctcctctcacgcccttgtccccttgggctcgggcatcacccctgctctcccctcagacctgggagtcacccctgcactccccgcaggcccaggagtcayccctgcgctccccacggctccgacgtcacccctgcattccccgcaggcctgggtgtcacccctgcactccccacaggcccaggcgtcacccctgcgctcc

SEQ ID NO: 466008 - DNA, 201 bp, Homo sapiens
gccgtcgggtggaatgctgggtgggaagtggctccaccttgggatgcttgttggtgccggtgacccccggacgctccagcatgcagccccaggctatggcmtctgctcctgctcagctccgggagcatttcccgtctcctcatcgtttctcctgtccttccctgagtgcctcaaattcctgtgagcaggtgtcggcgttgg

SEQ ID NO: 466009 - DNA, 201 bp, Homo sapiens
gggaagtggctccaccttgggatgcttgttggtgccggtgacccccggacgctccagcatgcagccccaggctatggcatctgctcctgctcagctccggragcatttcccgtctcctcatcgtttctcctgtccttccctgagtgcctcaaattcctgtgagcaggtgtcggcgttggatctctagggctggcttcgagt

SEQ ID NO: 466010 - DNA, 201 bp, Homo sapiens
ggagcacagaccccgcgtggctctggagaccccgctccccttggggcactgctcacctggccccactcccgcccgtcaccatagttttgacaacatccctggggggggggtttccagagagctcccctgccgcccaccccgctggtgaatttgcggtgctctgagtggtgatttttgatcattttgttcggtttttgttct

SEQ ID NO: 466011 - DNA, 201 bp, Homo sapiens
gacagcaattctggaagagcaaagccgatacaactgaaggaaaaaatagacaaacccaaatcatagctggcgacgtcagcactgctgtcccgacacatgayggagcagctgtactgaaggctgcaaggatgtagaagggcagaggcgccagccagcagggcccaccagctgcaggcacggacctttccatgcaccgtggga

SEQ ID NO: 466012 - DNA, 201 bp, Homo sapiens
gggcgtgcagtgggacagtgtctgtgagccgggctgagcccaccccacgtgaccaggcacttcctcagcgtcgtgcctcagtttccgcggtgcagaggagragggcaggcaggtgcccagggctcggcaagctccgtgtctcccgcagctcctggactggattgagggcaaggagcggaacatccgggccctgctgtccac

SEQ ID NO: 466013 - DNA, 201 bp, Homo sapiens
atgcatgtgtacgcatgcacacaagtgcctgtgtgcgtgagctgcgtgcatgtgtatgcatgtgtgcgagtgcctgtgagtgcatgtgagccgcatgcatrtgtgcacatgcgcgcgagtgcctgtgcctgagctgtgtgcacatgtatgcatgcgtaggagtgcctgtgagtgagcatgagccgcgtgcatgtgtacacg

SEQ ID NO: 466014 - DNA, 201 bp, Homo sapiens
ccttctctgtggccacagactcacaggggtgacctggggccccttggcaggcaggcggcctgtgctcagcacctccaggcgcagcagtggacagggtcagygccagcctggcctcccatggctccctgaggtcatgccaggaacaacacaaggccgtgtccgtggaaaaccagggcctctgtgcaccaggcatcccagtca

SEQ ID NO: 466015 - DNA, 201 bp, Homo sapiens
gcccgcaacgtgaaccccaagtctcccatcacagaggtgagggaggcacacgtgagccccaaatcccccgcagtggtgaaggaggcacacatgagccccakatcccccgcagaggggagggaggcacatgtgagccccagatcccctgcagaagggagggaggcacacgtgaaccctaagtctcctatcacagaggggagg

SEQ ID NO: 466016 - DNA, 201 bp, Homo sapiens
cagccaggtggagccacctcgggctctggtgggttttaggagaggcgggaacgcaggctgtggggatggcggcagaaagtggggtcctgacaaaccctttyggatgggaatgcgcagatgcttgttctcagcctggcctgcgagctgctccgcctgctggtgcccctacgtccactcgctcagttctgtgtgatgggatgc

SEQ ID NO: 466017 - DNA, 201 bp, Homo sapiens
cacacacacatatatatataactaaatgaaaattataacatcagatttgttaggagcaactaaaacattgctacaagggaaatttctagcatgaaaaactyctattcgaaagacaaaatcagctgtgtggtcccctctcagggcacgtcacgtggtgacgcggcacgtctgcccccaggtacatcgagtacatgtgtgaca

SEQ ID NO: 466018 - DNA, 201 bp, Homo sapiens
ggggcggggctcctctgccgtccgtgccaccgtgccctgtccccacaggtctccgagtgtggctgggcagcacggcgggccccacacctgcacaccctgtrcaacatctgcaggaacatgcacgcctggctgcggcaggaccacaagaacgtctgcgtcgtgcactgcatggtgagctcgagggccgtgggctggcgccgt

SEQ ID NO: 466019 - DNA, 201 bp, Homo sapiens
ccaccagaaccagggtttgtgtcctcggtgaacatctggctgagacgagggtccctctggccccaggccctgaaacatgaagaccacctggccctgtgtcrtccggagtgggctctatatagttgagggcagggcgtgcagtgggacagtgtctgtgagccgggctgagcccaccccacgtgaccaggcacttcctcagcg

SEQ ID NO: 466020 - DNA, 201 bp, Homo sapiens
ggcgtctcttgggggctgctctgggtactgagcctcccaacccaggacgctcactggggggtgaggatgcagcggtcaggctgtcactgtgccggccctgmgacacgccctgctctgtggcttggccgatgcccagctctgcaggccacatgcgcctgtgaccttggggtcctttcacaggcaccagggaccatccccttc

SEQ ID NO: 466021 - DNA, 201 bp, Homo sapiens
aatccctcagcccctcggggcccgcttctcaggccggcccacccgccagggcccctctgcctaggcctggagcggcccctgcaccccgagctgctggtgcrgagctggctgtgtccgcaggtgtgaggtgctgcaggcacccggcagccgtggccctgggcgagtgctgtctgcgaagggccctggctgtgtctcacaccc

SEQ ID NO: 466022 - DNA, 201 bp, Homo sapiens
tgggaacgggcacaggtggccccactcgcctgccctgtgcatcgtcctgctgtgcgcacagcttcgtctctgttggctgtagaatgggaacgggcacacgygaggggatgggcactcctgggccttcagtggccgtgtgccactgcatctccccgctgtgtgctctgcatccgagccagggtcgctgatcttttctctggg

SEQ ID NO: 466023 - DNA, 201 bp, Homo sapiens
tgacaccgagaccctcctggttcgcatttttgaagtgtgatgggtcgtgtagcggggcttgagtgtgtattttaaggagaacagaaacagaagggttgaaytggtgaagaatccgtgtctgtgagccaggcctgcacttcacagcactggccttgctgctgctccacagcggcgtggcgggaacccaggccagccctgcag

SEQ ID NO: 466024 - DNA, 201 bp, Homo sapiens
ttcagaaaccctcccaggtgggctcagtggcaggaaggccccatgtctccaaggtgggctcagtggcaggggaggccgcatgctggccccatgtgtcctcygcagggtacacttgagatcattttcttttattgaaaagagtctggctctgtcgcccatgttgagtgcagtggagcgatcacgactcactgcagccttgaa

SEQ ID NO: 466025 - DNA, 201 bp, Homo sapiens
ctgtcaccacgggtttctccgaggcgtggcatcccggggttggcgtgatgtgggcatgagccactggctgcatgtaaaagggccgtcctgcccaccacacygccacacagatgcttctagactggggctgggctcgcgctccatccctgcccaccacaccgccacacaggtggttctgggccggggctgggcctgcgctcc

SEQ ID NO: 466026 - DNA, 201 bp, Homo sapiens
cccccccaccgccccccggtggtgtcactataggccccgcactcctgctcaccccacgctccttcctcagtcccctggtggtgtcagttcaggccccgcaytcctgctcatcccacgctccttcctcagccccccagtggtgttggcccaggcccccaactcctgctcacccagtgccccttccttggcccctgggcagtc

SEQ ID NO: 466027 - DNA, 201 bp, Homo sapiens
cttttccagccctgaagaaaattagcatctgtctcacaggcctttgccgacagagatcccgggatggccccgcctccctgctgggggccttcacgcccagytgggggtgctcacagcctggagcttccgtctggaataccaggtccccatgctggatgcttgctcactccagtttccgtggggagctgtggacgagggtgc

SEQ ID NO: 466028 - DNA, 201 bp, Homo sapiens
tccagctgatgcttcagcctgtgggaagttcctcccttgcactgtgtcatagatcagggggcagaaggatgggctctgagggcacccataccgtacctctscccgacgtgggcaggcgtgagttgtcagtttagagaactgacctctgcattttcattgtcacagctcctggagcagaatggaggctacgggagcgccaca

SEQ ID NO: 466029 - DNA, 201 bp, Homo sapiens
tcctgcccatctctcctgtcaccacgggtttctccgaggcgtggcatcccggggttggcgtgatgtgggcatgagccactggctgcatgtaaaagggccgycctgcccaccacactgccacacagatgcttctagactggggctgggctcgcgctccatccctgcccaccacaccgccacacaggtggttctgggccgggg

SEQ ID NO: 466030 - DNA, 201 bp, Homo sapiens
ggctacacgctctgctgtgtgcaggcatcgggggctcagtgactcgccagacacagctgatccatgcccatggcaggtggttgggtggctcgaagagccarggagagaatgagtcccaggagaagggtgcacgtttaggtggtgtgggcagagttggttccttgggaggtgagcagaaggggcggtctgggaggcatcctg

SEQ ID NO: 466031 - DNA, 201 bp, Homo sapiens
acgctctgcatctgattttcttgctcagccctgtggttcagaggccccggtcctgtatgtggcccgcatctcctcgggggccagtggtggccttaggcttyactgggtttctctggtcggccatgggtggcatgtgtgtccgtttctttcccttgtttatggtgagccatcctgtctgcaccacgtggacagcctgttcag

SEQ ID NO: 466032 - DNA, 201 bp, Homo sapiens
tcctctgtcacccaggctggagtgcagtggtgtgacctcggctcaggctcaccgcagcctcccgcccctgggctcaagggatcctcccacctcagcctccygagtagctgggaccacaggtgctcaccaccatgcccggctattattttgtatttttggtagaaggggtggtctcaccatgtcgcccaggccggtctcgaa

SEQ ID NO: 466033 - DNA, 201 bp, Homo sapiens
ctctccctggccgtgtggaggaggctgtttctcaaacgggagtgtggtcacagcgtgtttagggctctccctgtttctcggggctgcaggtgtccacgccygaggagtccaccccagcagaaagcctcccctggccttggtctccatgaggacctggtgaggctggagcagcctcctagcctctgaaagagcaggtcttga

SEQ ID NO: 466034 - DNA, 201 bp, Homo sapiens
agcctcctagcctctgaaagagcaggtcttgacctggaccacagaggccccaagggttagggcccaggagcaaaggccggccccgtggccccaccgtggcrggagggaagaggagggacccaagcgtcaggggactccccattctttatcccctctggatggggcgcacagcctgtggacggggcgagggtcaggaggcca

SEQ ID NO: 466035 - DNA, 201 bp, Homo sapiens
gctagaccagcagcagagctgccagccagcccacagaatcatgggaaataatcacttgctttgtctgaagccagtaggctttggggtggtttgttacttarcaatagataactgacgcagacccaaacaggaaaattacaaaccttagggaggatttctcaacaaccccatgacatgggtttcacagaatagggtggtccc

SEQ ID NO: 466036 - DNA, 201 bp, Homo sapiens
aggaagaggagttagtttctggtttgttttgataattcagtgagtttatgtaaaacatttgaaactgttcctggcctgcaggtgcaagctctagagatgatgatgatgatgatgatgatgatgatgatgatgatgatgaaggtaacgtgggggggatttagcccaatatttgaagccagaaggacggtggcatggtcagac

SEQ ID NO: 466037 - DNA, 201 bp, Homo sapiens; identical to SEQ ID NO: 182484

SEQ ID NO: 466038 - DNA, 201 bp, Homo sapiens; identical to SEQ ID NO: 182485

SEQ ID NO: 466039 - DNA, 201 bp, Homo sapiens; identical to SEQ ID NO: 182486

SEQ ID NO: 466040 - DNA, 201 bp, Homo sapiens; identical to SEQ ID NO: 182487

SEQ ID NO: 466041 - DNA, 201 bp, Homo sapiens; identical to SEQ ID NO: 182488

SEQ ID NO: 466042 - DNA, 201 bp, Homo sapiens; identical to SEQ ID NO: 182489

SEQ ID NO: 466043 - DNA, 201 bp, Homo sapiens
gatgaacagaaagggactctttcctgccttttggaggtttacagttttacgaggagatgggtgttaaccaaatacattgcattaactcctccttgcctacytccctttctcaaaggcacatcttccacttctgtcctacaaacgtggtatttctcccccttccctcctctgtcctcagtacacacgcaatccctcagtggt

SEQ ID NO: 466044 - DNA, 201 bp, Homo sapiens
tctgcccagctctctcccctctacttcagactcccatttcaactgccttccgagcatttccacctggaagtcctcaagcacctggaactcaacatccaaarcagaaaactcacttgtttcaccccctcctccttctctcttattttcaacatcacctcatggcacctgcctccacttagtcatgcttcagggtctgcctgg

SEQ ID NO: 466045 - DNA, 201 bp, Homo sapiens
cagagcaagaccctgtttctctctctctctccatatatatacacacacacacacacacatacatagatatacacacacatatacacatatatataatggtkccatacatatatatatagagagagagagagagagacagacagacagacttataatgtaatgaatccttgggcactcaacactcgactttgttgaatctca

SEQ ID NO: 466046 - DNA, 201 bp, Homo sapiens
gaccctgtttctctctctctctccatatatatacacacacacacacacacatacatagatatacacacacatatacacatatatataatggtgccatacayatatatatagagagagagagagagagacagacagacagacttataatgtaatgaatccttgggcactcaacactcgactttgttgaatctcaacatttta

SEQ ID NO: 466047 - DNA, 201 bp, Homo sapiens; identical to SEQ ID NO: 182492

SEQ ID NO: 466048 - DNA, 201 bp, Homo sapiens
tttctctctctctctccatatatatacacacacacacacacacatacatagatatacacacacatatacacatatatataatggtgccatacatatatatrtagagagagagagagagagacagacagacagacttataatgtaatgaatccttgggcactcaacactcgactttgttgaatctcaacattttatcatatt

SEQ ID NO: 466049 - DNA, 201 bp, Homo sapiens; identical to SEQ ID NO: 182494

SEQ ID NO: 466050 - DNA, 201 bp, Homo sapiens
caaagactggaaacaacccaaatgctcctcaattggtgagtaaatagacaaactatagtacgtctgtacaagggaatactactcagcaatgtaaaggaacragctactgatacatgcaataatgtggatgaacctcaaagcatgatgctaagtgaaataagccagactaaatggttacagactatagaatacaactcatag

SEQ ID NO: 466051 - DNA, 201 bp, Homo sapiens
taaaaaggaagaggagttagtttctggtttgttttgataattcagtgagtttatgtaaaacatttgaaactgttcctggcctgcaggtgcaagctctagagatgatgatgatgatgatgatgatgatgatgatgatgatgatgaaggtaacgtgggggggatttagcccaatatttgaagccagaaggacggtggcatggt

SEQ ID NO: 466052 - DNA, 201 bp, Homo sapiens
aaaaaggaagaggagttagtttctggtttgttttgataattcagtgagtttatgtaaaacatttgaaactgttcctggcctgcaggtgcaagctctagagatgatgatgatgatgatgatgatgatgatgatgatgatgatgaaggtaacgtgggggggatttagcccaatatttgaagccagaaggacggtggcatggtc

SEQ ID NO: 466053 - DNA, 201 bp, Homo sapiens
ctctctctctctccatatatatacacacacacacacacacatacatagatatacacacacatatacacatatatataatggtgccatacatatatatatakagagagagagagagagacagacagacagacttataatgtaatgaatccttgggcactcaacactcgactttgttgaatctcaacattttatcatattttc

SEQ ID NO: 466054 - DNA, 201 bp, Homo sapiens
aaaggaagaggagttagtttctggtttgttttgataattcagtgagtttatgtaaaacatttgaaactgttcctggcctgcaggtgcaagctctagagatgatgatgatgatgatgatgatgatgatgatgatgatgatgaaggtaacgtgggggggatttagcccaatatttgaagccagaaggacggtggcatggtcag

SEQ ID NO: 466055 - DNA, 201 bp, Homo sapiens
atatatatacacacacacacacacacatacatagatatacacacacatatacacatatatataatggtgccatacatatatatatagagagagagagagasagacagacagacagacttataatgtaatgaatccttgggcactcaacactcgactttgttgaatctcaacattttatcatattttctcatatatttacat

SEQ ID NO: 466056 - DNA, 201 bp, Homo sapiens
ttagagcccggggccagactaccttaaaaacgtgactatttcacagtccagttgggaatcctgtgctagaagtgaaatttctgggtagcaaggtacagccrtcttcaacttagccacatactattctgttcctctctaaagttgtcattccaatttatgctcgtcccacctttgattctcattgctattaatatttctaat

SEQ ID NO: 466057 - DNA, 201 bp, Homo sapiens
aaaaaaaaaaaaaaacaactcttagaactgcacagattttatttcatgtaaatgatacctcaattgttataaaataaagcaattaaagatcccaaaagcaytgggattctctacctgttggaggagtaaccccagatacaaaggagtgaatggaaggctctcagatattgccactggatcatatggaagatactcccctcc

SEQ ID NO: 466058 - DNA, 201 bp, Homo sapiens
cataaacagcatgtagtattgttttttttgaacgtaaataaatgatttcatactgtataatcctcctgcaacttgctttttattcagttagctaactacarttctgggttattcattttgacttctgtggagtgtgttgttgtataaacatactgggtagtgtagtagttagagcccggggccagactaccttaaaaacgt

SEQ ID NO: 466059 - DNA, 201 bp, Homo sapiens
caccaacctgtcccccactgactcatatgccaactctgaagtatatcaacagtctgtacatactgacatctgccttctgggctctgttccaggagagtctygctgagtttatgttccatccctccctgtccaaccctgcactctcttccacaacaaagatctctcacatgttgagcacagtgtgccagacgctgttctaca

SEQ ID NO: 466060 - DNA, 201 bp, Homo sapiens; identical to SEQ ID NO: 182501

SEQ ID NO: 466061 - DNA, 201 bp, Homo sapiens
gctgtggtttccttttatccttttccatcagaaaaactgtgttcttcccttaacacccataggcatctgtgaagccttctcattcttccccaggcagagcygctcatggtaactggctactactggcttctttgtctgggtccctacaaggtaaggattctctccagcaccagcagagaattccctcctggctcttatgcc

SEQ ID NO: 466062 - DNA, 201 bp, Homo sapiens; identical to SEQ ID NO: 182500

SEQ ID NO: 466063 - DNA, 201 bp, Homo sapiens
caggaattagaggccgtagtgagctatgatcatgccactgcactccagcctgggcaacagcgcaagaccctgtctcaaaaaaaaaaaaaaaaaacaactcwtagaactgcacagattttatttcatgtaaatgatacctcaattgttataaaataaagcaattaaagatcccaaaagcattgggattctctacctgttgga

SEQ ID NO: 466064 - DNA, 201 bp, Homo sapiens
gattctctacctgttggaggagtaaccccagatacaaaggagtgaatggaaggctctcagatattgccactggatcatatggaagatactcccctcctggyatgaacacagagctgcaggggcagtgaggaccccttggtgggaaggcagcctgctatcccctaactggcacctaaggtgtaaccagcagatccttagctt

SEQ ID NO: 466065 - DNA, 201 bp, Homo sapiens; identical to SEQ ID NO: 182502

SEQ ID NO: 466066 - DNA, 201 bp, Homo sapiens; identical to SEQ ID NO: 182504

SEQ ID NO: 466067 - DNA, 201 bp, Homo sapiens; identical to SEQ ID NO: 182505

SEQ ID NO: 466068 - DNA, 201 bp, Homo sapiens; identical to SEQ ID NO: 182508

SEQ ID NO: 466069 - DNA, 201 bp, Homo sapiens; identical to SEQ ID NO: 182510

SEQ ID NO: 466070 - DNA, 201 bp, Homo sapiens; identical to SEQ ID NO: 182512

SEQ ID NO: 466071 - DNA, 201 bp, Homo sapiens
ggaaacaccgtttgctcttcctttggtgtccttgaattttacccccaaactgggtgtcttgaagaaaccccagtggcatcaggatcctcattttatacacraggacatcgaggcacagagaggcaacaagactgtcccaaagatgcacagctagtgagagctggactcagaatggagtccagagcttctgagtctaaatct

SEQ ID NO: 466072 - DNA, 201 bp, Homo sapiens; identical to SEQ ID NO: 182513

SEQ ID NO: 466073 - DNA, 201 bp, Homo sapiens
atctctttcctttcccttcccagctggaaattgctggcagtaggggagggcccaggaagaaccaggctctcccaaaccccacctataacacggctccaccaccccccaacccctgctccttctcaggtgttctgtgccccaatcaccctcacctccttcctcatgctcacggcccactctgggacaactactctttgtcca

SEQ ID NO: 466074 - DNA, 201 bp, Homo sapiens; identical to SEQ ID NO: 182514

SEQ ID NO: 466075 - DNA, 201 bp, Homo sapiens; identical to SEQ ID NO: 182515

SEQ ID NO: 466076 - DNA, 201 bp, Homo sapiens; identical to SEQ ID NO: 182516

SEQ ID NO: 466077 - DNA, 201 bp, Homo sapiens; identical to SEQ ID NO: 182517

SEQ ID NO: 466078 - DNA, 201 bp, Homo sapiens; identical to SEQ ID NO: 182519

SEQ ID NO: 466079 - DNA, 201 bp, Homo sapiens; identical to SEQ ID NO: 182520

SEQ ID NO: 466080 - DNA, 201 bp, Homo sapiens; identical to SEQ ID NO: 182521

SEQ ID NO: 466081 - DNA, 201 bp, Homo sapiens; identical to SEQ ID NO: 182522

SEQ ID NO: 466082 - DNA, 201 bp, Homo sapiens; identical to SEQ ID NO: 182523

SEQ ID NO: 466083 - DNA, 201 bp, Homo sapiens; identical to SEQ ID NO: 182524

SEQ ID NO: 466084 - DNA, 201 bp, Homo sapiens
aaggaagaggagttagtttctggtttgttttgataattcagtgagtttatgtaaaacatttgaaactgttcctggcctgcaggtgcaagctctagagatgatgatgatgatgatgatgatgatgatgatgatgatgatgaaggtaacgtgggggggatttagcccaatatttgaagccagaaggacggtggcatggtcaga

SEQ ID NO: 466085 - DNA, 201 bp, Homo sapiens; identical to SEQ ID NO: 138784

SEQ ID NO: 466086 - DNA, 201 bp, Homo sapiens
agcagctctcctctgctgggaacagatggcttccttagctgggcccagaagcactgactgctcatcaggggggctcagaaaaggcccatttttaaacttcrgactcatcctccaagcagcaggatgctccaccacagaaggctctggaactctgaatgactgaggcagctgcaggtgacactcgcacctgcacccaccctg

SEQ ID NO: 466087 - DNA, 201 bp, Homo sapiens
cttcagactcatcctccaagcagcaggatgctccaccacagaaggctctggaactctgaatgactgaggcagctgcaggtgacactcgcacctgcacccaccctggggcaaaggctcatggaggggaccacagaatagacgatggagccacctgaacaatttcagttatttctctctcctttttttggccaaatgcttaga

SEQ ID NO: 466088 - DNA, 201 bp, Homo sapiens
catgcaaacacccctactccacccttccctgcgggccttgcaaaaaggtcagacaggaccaaggtgtacaaacagaaccccactttattagcagttagttygagattgtacattaatggaggaaggtctcacctttaacacaacccaaaacggctggttcgagagccctcatcaggcgaactggatagcaccccctctccc

SEQ ID NO: 466089 - DNA, 201 bp, Homo sapiens
gtacattaatggaggaaggtctcacctttaacacaacccaaaacggctggttcgagagccctcatcaggcgaactggatagcaccccctctccccactctycccacccccctacaagggaaggaaacctctgcctgcttccccagtgtgccccccaccctctccagtcggccctctcctctcccaggaaatgacatgaatt

SEQ ID NO: 466090 - DNA, 201 bp, Homo sapiens
ctcatcaggcgaactggatagcaccccctctccccactctccccacccccctacaagggaaggaaacctctgcctgcttccccagtgtgccccccaccctytccagtcggccctctcctctcccaggaaatgacatgaatttcatgcacaaattacaaaaggagccctcttgctaataataaaagctaacacagtcataga

SEQ ID NO: 466091 - DNA, 201 bp, Homo sapiens
tgcaatgatataacttctctggacattcctcacactcaaatagtttgtttccaatgtgagacaggatgtgcctatgaagggctgaatgacatatgaagacytttccacacacactgcattcacatggctttactccagtagaaactttcttattcagattcaaatttgaatcctggctgaaggtttctccatattgactgc

SEQ ID NO: 466092 - DNA, 201 bp, Homo sapiens
tttgatgtcctgggattctatctaaggaatcctagctaacttagatgaatttcttgtaaattgcaaacttggagaaaaacaaaacgtaggcttaaccaacmactaaatgctaataaatctcttattacataatcaggaaatttcatcctggacagtccaaataaggtgactgcataatggcaaccgatcaattattaaacg

SEQ ID NO: 466093 - DNA, 201 bp, Homo sapiens
gagaccccgatttcccacttcacacctctgtatttctgtgtgtgtgtctttaattcctctagcactgctgggttaggatctccccaaccaagctggtctcygcaagtgacgtccattgtgggggcttgaatccaggtcgaagggtcaccagagcaacagttagagaatgtggaactagctggaggacgccagagtactctt

SEQ ID NO: 466094 - DNA, 201 bp, Homo sapiens
ccattactggatacacacccaaaggaatataagttgttctaccaagaagacacatgtacctgtatgttcatcacagcactattcacaatatcaaagacacrgaatcaatccaaatgcccatcaatagtggactggattttttaaaaagtggtacatatacaccatggaatactatgcagctataagaaattaaatcatgtc

SEQ ID NO: 466095 - DNA, 201 bp, Homo sapiens
tccctgaccccatggcccctccgagaaggccctccacgtactgccaggccttgaccaccagtcgcccacatccaggaggcatcgacgtgctcacctctgaytggcagtgggcatgcaacctggggcagaccccttcgaatcccaggtacgagcgagctaggtgagggcaaggtagcatcagagtgtcaccgctgtatgtca

SEQ ID NO: 466096 - DNA, 201 bp, Homo sapiens
cagaggctgctgcagagccacctgggcctcccagagccaagaactagcagcggagactaacaggaagagccggctccggcgaaggagagacaaagcaacckccaggcagatcccggaagccgccctctcctttccggcggcgcgcctgattgaacggtccccaccccagcgcccctgattggatggggcttcaggccccgc

SEQ ID NO: 466097 - DNA, 201 bp, Homo sapiens
aacatacataaaagcagagtttgagtgattttgctggactcttcaaacactgagtattttttcatttgaaacaaagtgggggccaagcgcggtggctcacrcctgtaatcccagcactttgggaggccgaggtgggcagatcatgaggtcaggagttcaagaccagcctgaccaacatggtgaaacctatctctactaaag

SEQ ID NO: 466098 - DNA, 201 bp, Homo sapiens
ctcctccagcccagggaggcagtgagtgagtgcgctacccagctggggaaactgctatttccatggagctgtgcaacccacggattggaagatcccactcrcaaacccacgccaccgaggcctgccgtcccaaccctggaacgcccagattcttacagcctttcagctggaatctacttaagcctacccaactcccagggg

SEQ ID NO: 466099 - DNA, 201 bp, Homo sapiens
cagaagaagttctgtggaaagcatcacacgcgagcatcgaggtgggcctggagggtggtgggggcatggctgccatcctctctcgcccttccacttggagccgaggcaccggcagtagagtctggttatgaagagggcggtgcgttcagactgctgttttccacacatgtcatgaagaacaagctcagcagcatccagcaa

SEQ ID NO: 466100 - DNA, 201 bp, Homo sapiens
tttggcttctcagctgcccaccaggccatccctctccgccaggccacctggagcctggcagtgcgcatgtggggtggacagcacctggaatccttgggcckgcttggctgggggctgcggcttctgtgcagggtggagttagtgtcccatcccattccctgaccccatggcccctccgagaaggccctccacgtactgcca

SEQ ID NO: 466101 - DNA, 201 bp, Homo sapiens
accctattcatatttatcaatgtattcttccagaaaggctaaaaccaacattgccattgttgcatgtctcctacaaggtaatagctgtgttggtggggttyaagaattctaggtttggctgggcacagtggctcacacctgtaaatccagcactttgggaggccaaggtggacaatcacgaggtcaggaaattgagaccag

SEQ ID NO: 466102 - DNA, 201 bp, Homo sapiens
agcacacacgcacacatacacatgtaaaagatagggtttcgctctatcacccaggctgaagtgcagtggcatgatcatatctcactgcagccttaaattcytaggctcaagcaatcctcctgcctcagcctcctcatgagtagctaggagtgtaagtgcgtaccactacgtctggctaatttttaaaattttttgtagaga

SEQ ID NO: 466103 - DNA, 201 bp, Homo sapiens
attgtgtgagtcaaatgagttattgcatctaaaggaaaccagtgaagcatgccatttgactttggattatttcaagacagcacactgagcccacatccacwgtttcattaatatttagataggacagaaaagcaaatgttgataagaacaaatactacaccacttaataaataatgaatggtatgaataatggaaatttga

SEQ ID NO: 466104 - DNA, 201 bp, Homo sapiens
aaactattctaagaaactaaagaggagaaactccttaactcattctatgacagccagcgtcatcctggcaggcatacaacacatggcaggcatacaacaaygaaaaagaaaacttcaggccaatatccttgatgaacatagatgaaaaatccacagatgtaaaatactagcaaaccaaatccagcacacaccaaaaaccta

SEQ ID NO: 466105 - DNA, 201 bp, Homo sapiens
tttcacatgacctttaaagtaattgttaaaattcagaattttctgtatttctaggatttcaatctggtgggcattcttttatttataaggtcaatctggartatgtgttaccatgtgtctctgagtgagttataggataaatgaaggcattctcacattcgataccttcataaagtttttctctagaatgagttatgttat

SEQ ID NO: 466106 - DNA, 201 bp, Homo sapiens
tttctctccagtatgaattttcttatgtttagtaagaactgagcacaggttaaaagctttgccacattcttcacatctgtaggttttcttttcagtatgakttttctcaacaacagcaagacttgagcaagacttaaaaatgttattacattcttcacatttgcaatgtttctctccaacatgaattctcttacagtcagt

SEQ ID NO: 466107 - DNA, 201 bp, Homo sapiens
ctcaagacaacatctttcatatcttctcagcatcactttttggaatgaaacttgcaggccctgctctggcaaaatgtcttcagtaagataagaagacaaarctggaaaaaataaaaacaacaaattattccacttactagatagcatcctttacaaatctaaggcataaaattatacaagcatattagcaagatagcataa

SEQ ID NO: 466108 - DNA, 201 bp, Homo sapiens
taaaacatacagtagagcaaattggtactaactgaaaaagtacattgcattcccctctattccatgaacaataatcaagttctttatttcaaatatgaaasacaaaactaaaatacgttcagacttcgaaggaaaacaggggtatttttggacagaaaaatgggcagaattcatttaaacagaaaaaaaggaactggcaaa

SEQ ID NO: 466109 - DNA, 201 bp, Homo sapiens
gtaatacatgcaatataaaagaattagtatgaagtgtaaaaatgaacacgatttaaaagtgagaaaataagcaaagcatacttaaaagaagatgaaagacyacctatttttttaaaaagtcaacttccttggtaatgagaaaatagaaaatagtcaggtatatgacatttgaaattgactagaagaaaaaaatcaactcca

SEQ ID NO: 466110 - DNA, 201 bp, Homo sapiens
ctccctaggcctgagcccctagggggaggggtggccgcagtctctgctgaccagcagacttagcctctcctcctggtagttctgaggaatcttggcagccyaggtgagtgggtttccccccagtgaagcacaccctctccaccaagggacaaagtctttcattaaacgggtccttttccctgtgccacccaactgggtgag

SEQ ID NO: 466111 - DNA, 201 bp, Homo sapiens; identical to SEQ ID NO: 29692

SEQ ID NO: 466112 - DNA, 201 bp, Homo sapiens
agaaccaggtaaaagctttgccacattcctcacatttgtatggtttctcaccagtatgaattctcctatgttcagtcagatgtgagctctggttaaaggcytttccacattcttcacatcggaaggttttctctccagtatgaattcttctatgttgagtaaggtatgacaacaatttaaagactttgccacattcttcac

SEQ ID NO: 466113 - DNA, 201 bp, Homo sapiens
catggctgccatcctctctcgcccttccacttggagccgaggcaccggcagtagagtctggttatgaagagggcggtgcgttcagactgctgttttccacrcatgtcatgaagaacaagctcagcagcatccagcaaacttacatgctggacaggctgtgtgtgggctgtggccttcaggcagggagcatgaagtgaggta

SEQ ID NO: 466114 - DNA, 201 bp, Homo sapiens
ataaactatgaagatgattgtgacgctcactgtaaacttgaaggaaaatgactgaagggaaatacagtccttagacaatttaacagcatgagatagaagaygcccctatgtgggagcaagagaaagaaacccaggcttctcagaagccatttcctgggagtagagcttcccaaaccacagtttaaagtctggcttcttcct

SEQ ID NO: 466115 - DNA, 201 bp, Homo sapiens
gagaaccaggtaaaagctttgccacattcctcacatttgtatggtttctcaccagtatgaattctcctatgttcagtcagatgtgagctctggttaaaggyttttccacattcttcacatcggaaggttttctctccagtatgaattcttctatgttgagtaaggtatgacaacaatttaaagactttgccacattcttca

SEQ ID NO: 466116 - DNA, 201 bp, Homo sapiens
tctcaccatgtggcttgcctgttccccctctgccttccgtctgaggcatcaccagaagccaagcagctgccggtgccatgcttgtacagcctgcagaaccrtgagtcaaataaacctactttctttataaactacccagtcttaggtattactttatatcaatggaaaaatggaataatacataaaattggcactgaggag

SEQ ID NO: 466117 - DNA, 201 bp, Homo sapiens
tgtacagcctgcagaaccgtgagtcaaataaacctactttctttataaactacccagtcttaggtattactttatatcaatggaaaaatggaataatacakaaaattggcactgaggagtggggtgttgctataaagatacctgaaaatgtgaaagcagctttggaactgggtaacatgcagaagctggaagactttcaag

SEQ ID NO: 466118 - DNA, 201 bp, Homo sapiens
ctcttctcctccaaatgatcacaacatctctccatcaaggccacagaactggatggaggatcagttggacaaactgacagaagtaggcttcagaagatggstaataaaaaactacaatgaactaaaggaacatgttctaacccaatgcaaagaagctaagaaccttgataaaaggttagaataagggaggagaccacccct

SEQ ID NO: 466119 - DNA, 201 bp, Homo sapiens
caatggaaaaatggaataatacataaaattggcactgaggagtggggtgttgctataaagatacctgaaaatgtgaaagcagctttggaactgggtaacaygcagaagctggaagactttcaagggctcagaaaaagacagggagatgaggaaaattagaactttttagagagtggttaagtgattgaaaccaaaatgttg

SEQ ID NO: 466120 - DNA, 201 bp, Homo sapiens
tccagaccccagaatggtacagccacaagcagaaagcactgtgagcctggaaacgttgcaagcatttgactctagtatgtcagaagtcacatgggctgcayccagcaaagccacaggaatgaggttgcccaaggcaacaggtaaatacaccggttccaaatggaagaaatggccaaaacaaaggggctacaggccccatgc

SEQ ID NO: 466121 - DNA, 201 bp, Homo sapiens
ttcctcagaaaatgggttttcttttctatcacatcatcaggctgaaaattttccaaacgtttatgctctgcttctcttttaaacataagtttcaattacaraccacctttttttgaatgcataaaactgaatgcttttaagagcacccaagtcacctcttgaatgctttgctctttagaaatttcctctcccagataccct

SEQ ID NO: 466122 - DNA, 201 bp, Homo sapiens
gggtggggcttccctggagggtctccaataactccagccagatgctcagggacagaatttggatctccctaggcctgagcccctagggggaggggtggccrcagtctctgctgaccagcagacttagcctctcctcctggtagttctgaggaatcttggcagcctaggtgagtgggtttccccccagtgaagcacaccctc

SEQ ID NO: 466123 - DNA, 201 bp, Homo sapiens
atgcataaaactgaatgcttttaagagcacccaagtcacctcttgaatgctttgctctttagaaatttcctctcccagataccctaaatcatctctctcartttcaaagttctgcagatctctagggcaggggcaaaatgctgccagtctctttgctaaagtatagcaagagtcacctttgcttcagttcccaagaagatc

SEQ ID NO: 466124 - DNA, 201 bp, Homo sapiens
ctttactatccccttagctgagcaagactgtgaatggtttgcatttacaattcctgcagtaaacaacctgcagcctgctaagtgttttcattgttttacaratgggtctagtaatggtaaagcttcttattctggcttgaaaagtaaagtttttcagatgccctacacttcagctcaaaaagcggagcttgtagctgtaac

SEQ ID NO: 466125 - DNA, 201 bp, Homo sapiens
caattttgtttatcttttcaaagaaccagctttttgtttcatttatcttttgtattttttgtttgtttcaatttcatttagttttgctctgatctttgttrgttcttttattctgctgggtttggatttggtttgctattgttcctctagttctttcaggtgtgaccttagatggtctatttgtactcgttcagacttttt

SEQ ID NO: 466126 - DNA, 201 bp, Homo sapiens
acttcacacctctgtatttctgtgtgtgtgtctttaattcctctagcactgctgggttaggatctccccaaccaagctggtctccgcaagtgacgtccatygtgggggcttgaatccaggtcgaagggtcaccagagcaacagttagagaatgtggaactagctggaggacgccagagtactcttaaagcaatccccgtgg

SEQ ID NO: 466127 - DNA, 201 bp, Homo sapiens
cagatgtatcaggaatgtaggtgcccaggcagaagcctgacatgagtggaaccccacaggcagcctctactagggcagtgccaagagaaatgtgaggatgwagcccccacacagagtccccacagtggcactgcctagcggagctgtggaaacagggctgctgctttccagaccccagaatggtacagccacaagcagaaa

SEQ ID NO: 466128 - DNA, 201 bp, Homo sapiens
ttgaaagttttgttttctacaccaagaaatccccaaggttttcttgaaagcagtgatgtgaaactcattcatgcaaatcagaaactcccagaaaacattcyacaaaggaaaaagatgaaatccttactgtgaaataggaattgcatattgaagctatcctcaccaagggagatcaggtttctgtagttctctaacatcaca

SEQ ID NO: 466129 - DNA, 201 bp, Homo sapiens
atatacaaaaaatcaaatcaaaatggattaaagacgtaaatctaagacctcaaactatgaacagaaaacatcaaggaaactatccaggacactggctgagyaaagattttacagcagagtgtcaagtgattattctctgctttcttctcatgtgaaatgttcagaacagaaagaaaatattttttaaaaagccactcatgg

SEQ ID NO: 466130 - DNA, 201 bp, Homo sapiens
gtctcctctccttgggtcaactgcagtttgttgtaggtgtggataaggcacttatggtatttgttcattcatttgtctgaggatagcaagggcagttccaytgcagacagcggtagcaaggcttttgtttgctcctgggggctccacctccaagaaatgcagaaccatagttactgggggtgttcagctggtgggtggggc

SEQ ID NO: 466131 - DNA, 201 bp, Homo sapiens
taatgatacaaacttttgtcttagcactacctttgctgtatctcagaggttttgataggttgtgtcactactatcattctgttcaaaaagtgtttaaactwctatcttgatttcattgttgacccaacagtcagtcattcaggagcagattatttaatttccatgtatttgcatggttttgagtgttccttttggagttga

SEQ ID NO: 466132 - DNA, 201 bp, Homo sapiens
cagcaagcagcccatatctcagtccccaggagaccacctgctgccagttctgaaaagcctggtgacctctatggtaagtctgaggccatttatcaagaccyagttcagacacaagcacagtaggtccattctctgctgacctgggagcagctctcttagcttgccagctctgggggcctctgtgctgcagtgcagaacttc

SEQ ID NO: 466133 - DNA, 201 bp, Homo sapiens
cttgatatgattttgattttcttaaatttattgagacttgttttgtggcctatcatatggtgtatcttcaagaatgttccatgtgctgatgaacagaatgyatacactgcaattgttgagtagaatattctgtaaatatctgttaagtccatctgttctatgatatagtcaagaccattgatttttttgttggctttctgt

SEQ ID NO: 466134 - DNA, 201 bp, Homo sapiens
tgctgagggctgggaatctcagccaccctgacttgtgccagggtccagccctggctggagaagtccagagctccttctgggagaaagataggaccagcccytttttggaccaaaggtaactcagcctatctatagatgagatgaagcttgacctgggggtctcctgaccctattcagcaaagaaaacaggtctgggagtga

SEQ ID NO: 466135 - DNA, 201 bp, Homo sapiens
tctcttgaagacagctgataacttggttggtgaattcttttcttctttttttttttttgagacagagtctcactctgtcacccaggctggagtgcagtggyaccatctcagctcactgcaacctccatctcccgggttcaagcgatcctcctgcctcagccacccgaatagctgggactacaagcatgcaccaccacgccc

SEQ ID NO: 466136 - DNA, 201 bp, Homo sapiens
ttttttacatatattctattggcattttacactgggatcatggaatatttcattatgtaaattatttaatttttatgtagaaaaaagaaaattattttggtgtttgttttgttctttgctctataatttccattacatactgattagataattttttgagtattttaaattttaggtaattatgcattttatccataaaga

SEQ ID NO: 466137 - DNA, 201 bp, Homo sapiens
ctcttgaagacagctgataacttggttggtgaattcttttcttctttttttttttttgagacagagtctcactctgtcacccaggctggagtgcagtggcrccatctcagctcactgcaacctccatctcccgggttcaagcgatcctcctgcctcagccacccgaatagctgggactacaagcatgcaccaccacgccca

SEQ ID NO: 466138 - DNA, 201 bp, Homo sapiens
tttttacatatattctattggcattttacactgggatcatggaatatttcattatgtaaattatttaatttttatgtagaaaaaagaaaattattttggtgtttgttttgttctttgctctataatttccattacatactgattagataattttttgagtattttaaattttaggtaattatgcattttatccataaagaa

SEQ ID NO: 466139 - DNA, 201 bp, Homo sapiens
acttcataaaaagactgaacttatgattgactggagtaccagcaggagacagggagaatggaaacaaactggaaaacacacttcaggatattagccaggaraacttccccaacctagcaagacaggccaacatgcaaattcaggaaatacagagaacaccattaagatactcctcaagaagaacaaccccaagacacataa

SEQ ID NO: 466140 - DNA, 201 bp, Homo sapiens
ttttacatatattctattggcattttacactgggatcatggaatatttcattatgtaaattatttaatttttatgtagaaaaaagaaaattattttggtgtttgttttgttctttgctctataatttccattacatactgattagataattttttgagtattttaaattttaggtaattatgcattttatccataaagaat

SEQ ID NO: 466141 - DNA, 201 bp, Homo sapiens
ctagatctctagcaaggccagggaagttttcctcaattatttcctcaaataagaattccaaaattttagtttactcttcttcctgaggaagacctattatygctaggttcagaggctttgttcttttttcatttttttttttttttgttttgttgcatcgggttaatttgaaagccttgtcttcaagctctgaagttcttt

SEQ ID NO: 466142 - DNA, 201 bp, Homo sapiens
tttacatatattctattggcattttacactgggatcatggaatatttcattatgtaaattatttaatttttatgtagaaaaaagaaaattattttggtgtttgttttgttctttgctctataatttccattacatactgattagataattttttgagtattttaaattttaggtaattatgcattttatccataaagaatc

SEQ ID NO: 466143 - DNA, 201 bp, Homo sapiens
ccggaaaagccagtctcactctcacccccagcacccgagcttatatgcaggaagccagtgagaagggctgcgatcttgccccaggctacaagcctcctcastgagaatgcaagtagggcttttaggccccactccatcccatctgctgtgacttctgtccctgtatctgcacttccctttcatcgacccccagattttgcc

SEQ ID NO: 466144 - DNA, 201 bp, Homo sapiens
ctcagaaaaaaaagtaacagttctccatcatctacccccgtagcctcagacagctaggcagtaagcatgcatgctcaataaaactccacatccacatcacagagagagatagaacaatcccaaaggaccgtgaagggtgatgtggagagaccaaaaggatatgaacccacagcatctgccctaccatctgctccaatacta

SEQ ID NO: 466145 - DNA, 201 bp, Homo sapiens
taaagcaaatattaatagagctaaagagagagagaccccaaaacaataacagctatagacttcaacaccctacttttagcattagacaatcttacagaccaaaaaaaaaaaaaaaatcaataatgaaaacactggaattactctgcactgtagaccaaatggccctaatagatacttacagaacattttgtccaacagctt

SEQ ID NO: 466146 - DNA, 201 bp, Homo sapiens
atgggacccggggaaccagcgttcagcatatggaggatcccgccagcctctgagttcccttagtatttattgatcattcctgggtgtttctctgagagggrgatgtgtcagggtcacaagacaatagtggggagagggtcagcagacaaacatgtgaacaaaggtctttgcatcatagacaaggtaaaggattaagttctg

SEQ ID NO: 466147 - DNA, 201 bp, Homo sapiens
acccggggaaccagcgttcagcatatggaggatcccgccagcctctgagttcccttagtatttattgatcattcctgggtgtttctctgagagggggatgygtcagggtcacaagacaatagtggggagagggtcagcagacaaacatgtgaacaaaggtctttgcatcatagacaaggtaaaggattaagttctgtgctt

SEQ ID NO: 466148 - DNA, 201 bp, Homo sapiens
tgtatttccatacatcctctgaaattgtggcagaggttcccaaacctcaattcttaacttggctttgtgtggggattccaatcccacatttcccttccacrctgccttagcataggttctccatgtgggctaggccactgcagcaaacttctgcctagacgtccgggcatttccacacatcctctgaaatcgtggcaaagg

SEQ ID NO: 466149 - DNA, 201 bp, Homo sapiens
agttcccttagtatttattgatcattcctgggtgtttctctgagagggggatgtgtcagggtcacaagacaatagtggggagagggtcagcagacaaacaygtgaacaaaggtctttgcatcatagacaaggtaaaggattaagttctgtgcttttagatatgcatacacataaacatctcaatgctttacaaagcagtat

SEQ ID NO: 466150 - DNA, 201 bp, Homo sapiens
tttcactggatacaaaattcttggctgacaattattttgttgaaggaggctaatgatagaaccccaatctcttttagcttgttgggtttctgctgaaaaayctgctgtaatctgataggttttccttcctaggttaaatgatgcttttgcctcacagctcttcagattctttccttcttaattttagataacctgatgagt

SEQ ID NO: 466151 - DNA, 201 bp, Homo sapiens
atcatgctacctgacttcaaactaaaatttaatttaattcaatttaagctctggatacatatgcaggtcgtgtaggtttgttccataggtaaacgtgtgcyatggtggtttgctgcacctatcaccccatcacctaggtattaagccccgcatgcattagctatttatcctgatgttctccctctctccaccccccaacag

SEQ ID NO: 466152 - DNA, 201 bp, Homo sapiens
tcatgctacctgacttcaaactaaaatttaatttaattcaatttaagctctggatacatatgcaggtcgtgtaggtttgttccataggtaaacgtgtgccrtggtggtttgctgcacctatcaccccatcacctaggtattaagccccgcatgcattagctatttatcctgatgttctccctctctccaccccccaacagg

SEQ ID NO: 466153 - DNA, 201 bp, Homo sapiens
gccgccatcccatctaggaagtgaggagcacctcttcccagccgccatcccatctaggaagtgaggagtgtctctgcccggccgcccatcgtctgagatgyggggagcgcctctgccccgctgccccgtctgggatgtgaggagcgcctctgcccggccacgaccccgtctgggaggtgaggagcgtctctgcccggccgc

SEQ ID NO: 466154 - DNA, 201 bp, Homo sapiens
cacgaagggaactggaacatctgaagcctttaccacaattgttacatacatagggtttctgtgcaatatgagttttctcgtgtttctgaagggaactggcktatctgaaggctttcccacattgcttacatggatagggttcttcaccagcatgagcctttatatgtccttgcaaggaactgagacaactgaaagctttgc

SEQ ID NO: 466155 - DNA, 201 bp, Homo sapiens
taaaaatcaaaacaactgaactcatgggcatagagagtcgaaggatggttaccagaggtggggaaaagtagtggcgagctggaggagaggtggagacagtkaatggctgacaaaaaaaaaatacttagaaagaataaaaaagacatactatttgatagcacaaggtgtctacagtcaatgataacttaattgtacatttta

SEQ ID NO: 466156 - DNA, 201 bp, Homo sapiens
gtagctgggactacaggtgcctgctgccatacccggctaattttttgtactttagtagagacggggtttcaccatgttgcccaggctagtcttgaactccygagctcaggcaatccacctgccttggcctcccaaagtgctgggattacaggcgtgagccacggtgcccagtgacccagagttttctctgttgtagcatga

SEQ ID NO: 466157 - DNA, 201 bp, Homo sapiens
tcagaaaaaaaagtaacagttctccatcatctacccccgtagcctcagacagctaggcagtaagcatgcatgctcaataaaactccacatccacatcacagagagagatagaacaatcccaaaggaccgtgaagggtgatgtggagagaccaaaaggatatgaacccacagcatctgccctaccatctgctccaatactaa

SEQ ID NO: 466158 - DNA, 201 bp, Homo sapiens
tctctgaaagcccgcaaaagactagctctaaaccctagtctagtacaaactaagctagggttgcatttagcggaaaggaagattatcttttctttctttctttttttttttttgagacagagtctcgctctgtctcccaggctggagtgcagtggcccgatctcagctcaatgcaacctccgcctcccaggttcaagcaat

SEQ ID NO: 466159 - DNA, 201 bp, Homo sapiens
acagcaaggtcatcacggggagggggcgtgtccctgtgggggggtgacagcaaggtcatcacggggagggggcgtgtccctgtgggcgggtgacagcaagrtcatcacggggagggggcgtgtccctgtgggcgggtgacagcaaggtcatcacggggagggcttatcttcctcctggtcccctggtgccccctcctgggg

SEQ ID NO: 466160 - DNA, 201 bp, Homo sapiens
cagctgaactttcacaaaagaccaaaggaaattcaacagaaaaggtctggtctctaaagcaaatgttgaacacctggacatccatacgcaaggaaataaawaagacaccttgcaacagtcacagaataaactcaacatagattataaactgaaatgtgaaacagaaaatttagaacttctggaagatgacacaggagaaac

SEQ ID NO: 466161 - DNA, 201 bp, Homo sapiens
gattccgattttccctttagaactatttctgtgccagtccaatttccttctagaatacattatttatatttaacaagtagtcttttgaggtctttcataaragttcaaattgacccacctcaaaattggaatacaaagctaggcagcccccagccctccttgagtttggattcagtttgactggagttctgtagcaagctt

SEQ ID NO: 466162 - DNA, 201 bp, Homo sapiens
aacgtaggctcttccacgtagttacagcattttaacttccatgaaatccacaaccaggtttgctttgttagtgaacttaagaaaaactacttctgaaaagygaaagagcagacaaatgtctgataatagcaaagatattgtagagaacactgtcatggagtattatacactgaatgtttatccccccagaattcctatgtg

SEQ ID NO: 466163 - DNA, 201 bp, Homo sapiens
cctgtgggggggtgacagcaaggtcatcacggggagggggcgtgtccctgtgggcgggtgacagcaaggtcatcacggggagggggcgtgtccctgtgggsgggtgacagcaaggtcatcacggggagggcttatcttcctcctggtcccctggtgccccctcctgggggatgacagttcagcatttccaagagtcttggc

SEQ ID NO: 466164 - DNA, 201 bp, Homo sapiens
acaatcctaagcaaaaagaacaaagctggaggcatcatgctacctgacttcaaactaaaatttaatttaattcaatttaagctctggatacatatgcaggycgtgtaggtttgttccataggtaaacgtgtgccatggtggtttgctgcacctatcaccccatcacctaggtattaagccccgcatgcattagctatttat

SEQ ID NO: 466165 - DNA, 201 bp, Homo sapiens
agtaccttcaggaaaagaggcattttctatccctttcagactacagagctatcatttaactattatttccacaataataaactgtgatcatatttgagtaytctaggggttgccgatggttgtcccgtaggatgcagcaccaatcagccaagtacagataacagaaacagaacaggcttatacactgtcacaaattctcca

SEQ ID NO: 466166 - DNA, 201 bp, Homo sapiens
aatcccagcacttttggaggccgaggcgggcagatcacgaggtcaggagattgagaccatcctggctaacacggtgaaaccccgtctctactaaaaatacaaaaaaaaaaagaaaattagccaggtgtggtggcgggtacctgtaggcccagctactctggaggctgaggcaggagaatggcgtgaacccaggaggtggag

SEQ ID NO: 466167 - DNA, 201 bp, Homo sapiens
ccacacaatgtgtatttggagatatcttgaatatatccaatattatctgtcaactaatattttaaaattaaacatacaaataaataaaatatgaaaataayttatccattgagcaaaaaaggcccactgaagatttctgaccaaaactaccattgactctttggtgctgtggggctgctgaaaactgaaagatgaagaaaa

SEQ ID NO: 466168 - DNA, 201 bp, Homo sapiens
tctatccctttcagactacagagctatcatttaactattatttccacaataataaactgtgatcatatttgagtactctaggggttgccgatggttgtccygtaggatgcagcaccaatcagccaagtacagataacagaaacagaacaggcttatacactgtcacaaattctccaacatgcgaaaatgagaaagtgatgt

SEQ ID NO: 466169 - DNA, 201 bp, Homo sapiens
ggggagggggcgtgtccctgtgggcgggtgacagcaaggtcatcacggggagggggcgtgtccctgtgggcgggtgacagcaaggtcatcacggggagggsttatcttcctcctggtcccctggtgccccctcctgggggatgacagttcagcatttccaagagtcttggcaggaaggccgcccccaaaccagtccttagg

SEQ ID NO: 466170 - DNA, 201 bp, Homo sapiens
atcaagaggtcaggagatcaagactagctgagaccatcctggctaacacggtgaaaccccgtctctattaaaaatacaaaaaattagccaggtgtggtggygggcgcctgtagtcccagctacttgggaggctgaggcaggagaatggcgtgaacccaggaggcggagcttgcagtgagccgagatcgtgccactgcactc

SEQ ID NO: 466171 - DNA, 201 bp, Homo sapiens
ggtaatatcacctacagctgaagagacgtaaacatacaacacaacaatgtgattattacacatgttcccaacagaaatttgtacatgtttcaccaataccaatacattttctggaatttacatagcagccctgttcctaataccctcaactaaaacacatgcatatgtgcatcagcacggagtgattaattgtctgatatt

SEQ ID NO: 466172 - DNA, 201 bp, Homo sapiens
cccgtctctattaaaaatacaaaaaattagccaggtgtggtggtgggcgcctgtagtcccagctacttgggaggctgaggcaggagaatggcgtgaacccrggaggcggagcttgcagtgagccgagatcgtgccactgcactccagcctgggcgacagagcgagacaccaaaaaaaaaaaaaaaaaaaaggaaactggaa

SEQ ID NO: 466173 - DNA, 201 bp, Homo sapiens
aaaactgtagtgattaaagcctttacatttttttacatttatagggcttttctccagtatgagtttttttatgcttccaaagggtactagcacgactaaasgctttgccacatttctgacattcatagggtttctctccagtatgagtcctttcatggtcacgaagggaactggaacatctgaagcctttaccacaattgt

SEQ ID NO: 466174 - DNA, 201 bp, Homo sapiens
tttatctccagtttgattcgtttcatgtatttgaggaaatctgggaaaattaagtactttcctacaccttacattcacagtttctctcaagtatgtgactrttcatgtttttgacaaaaactgtagtgattaaagcctttacatttttttacatttatagggcttttctccagtatgagtttttttatgcttccaaagggt

SEQ ID NO: 466175 - DNA, 201 bp, Homo sapiens
tagcagccctgttcctaataccctcaactaaaacacatgcatatgtgcatcagcacggagtgattaattgtctgatattcacacaacagaattcaatgctaaaaaaaaaaaaccaaaacaacatgcagaattaccgaaaaactcaaaacaacctactggattttaaaagccatgtacaaaagggctcctgctgcatgatgt

SEQ ID NO: 466176 - DNA, 201 bp, Homo sapiens
aggcaggggacagggaacacagttcccccagcagactggcctagccatggcctgatgaacagtgatctctgggcaggagacccaggacaggaaatatctcygccctctactgtcagaccctcctgccttcggggtgagatcaccttttgccacagtgggaaaaacaggcacagggccagtgaccagcaaagtcagggagac

SEQ ID NO: 466177 - DNA, 201 bp, Homo sapiens
aaaaaaggaaactggaatttggggaattcatcgccagccttaggaggagctaggctgggaaggacaagacagtggatttgagactctgtttttcatacatyttgaagattcagaggaaaacaggtgacacctggggagaaaggagaaccagtgaccccacggaccacaactacccctccacacaaaccctgcacaccaagt

SEQ ID NO: 466178 - DNA, 201 bp, Homo sapiens
tgtatgtcagccactgggggacaggggacaggcttcagcttacagccatcttccaaattccagcctctcactttggcagaagctggccaggaattggggcygatggatgggtggggtctgcagacaccgtgttcaggtccccatgatggcctcacacatgggtggtggcttgggccacacccgagcccctgcttgggccct

SEQ ID NO: 466179 - DNA, 201 bp, Homo sapiens
gggagggggcgtgtccctgtgggcgggtgacagcaaggtcatcacggggagggggcgtgtccctgtgggcgggtgacagcaaggtcatcacggggaggggkcgtgtccctgtgggcgggtgacagcaaggtcatcacggggagggggcgtgtccctgtgggagggtgacagcaaggtcatcacggggagggggcgtgtccc

SEQ ID NO: 466180 - DNA, 201 bp, Homo sapiens
cgccagccttaggaggagctaggctgggaaggacaagacagtggatttgagactctgtttttcatacatcttgaagattcagaggaaaacaggtgacacckggggagaaaggagaaccagtgaccccacggaccacaactacccctccacacaaaccctgcacaccaagtgaaaactctcctccgatgactctcccgtcac

SEQ ID NO: 466181 - DNA, 201 bp, Homo sapiens
tcacctctgattggcagtgggcatgcaacctggggcagaccccttcgaatcccaggtacgagcgagctaggtgagggcaaggtagcatcagagtgtcaccrctgtatgtcagccactgggggacaggggacaggcttcagcttacagccatcttccaaattccagcctctcactttggcagaagctggccaggaattgggg

SEQ ID NO: 466182 - DNA, 201 bp, Homo sapiens
tcagtttctccacatcctagagaccatttgtgggttctttatttgcttgatagtggccatgtaatgggtgttagcaaaggaaatctggtagatttgctttrcatttttattttatttatttatttatttatttttttgaggcagggtcttactctttcacccaggctggagtgaagtagtgcaatcttggctcactgcagc

SEQ ID NO: 466183 - DNA, 201 bp, Homo sapiens
gggagggggcgtgtccctgtgggcgggtgacagcaaggtcatcacggggagggggcgtgtccctgtgggcgggtgacagcaaggtcatcacggggaggggkcgtgtccctgtgggagggtgacagcaaggtcatcacggggagggggcgtgtccctgtgggcgggtgacagcaaggtcatcacggggagggggcgtgtccc

SEQ ID NO: 466184 - DNA, 201 bp, Homo sapiens
atcctagagaccatttgtgggttctttatttgcttgatagtggccatgtaatgggtgttagcaaaggaaatctggtagatttgctttacatttttattttwtttatttatttatttatttttttgaggcagggtcttactctttcacccaggctggagtgaagtagtgcaatcttggctcactgcagcctcaacctcctgg

SEQ ID NO: 466185 - DNA, 201 bp, Homo sapiens
tgctcaaggtcctaggtagcagacggtaatactgtactattgggtaatacatgccaatcatctctagcaatccttattcccagtggcattacactccagakagtgtggagaatattgatcccgtatgttatatttttattctttacttgtgtgactactgagatattacgatggttataataaacactttagggccaagag

SEQ ID NO: 466186 - DNA, 201 bp, Homo sapiens
tggagtgtgtgtgtgagagagaggtgggagagagagggaaagatagaatgcctgtatttattagaaaaggaaaatattagaacaaaacagataatttcagaaaaaaaacagttgaaggtatgctaacaaactggaaacctcacagattctgtaaagcacatctttttttttttttttgaaacagtgtcttgctctgttgcc

SEQ ID NO: 466187 - DNA, 201 bp, Homo sapiens
aaattggctgggtgtggtggcgtgagcctgtagtcccagctactcgggagactgaggcaggggaatcgcttgaacccaggaggtggggcttgtagtgagcygagattgtgccactgcactccagcctgggcgacagaacgagactctgtctcaagaaaacaaatatatatatatatatatatgagcatagagttcctcaaa

SEQ ID NO: 466188 - DNA, 201 bp, Homo sapiens
cctcggcctcccaaagttctgggattaaaggtgtgagctaccgcgcctggctagcaaacctattttctccacactgaattcatttatcagaatatcatggytcctggtccagaatctcttccttcaaatactatttttttttctgctttttactcatgcaagaactatgacatgatttacttattcccgcacttatgaaat

SEQ ID NO: 466189 - DNA, 201 bp, Homo sapiens
aacaaaaacaaaacaaaacaaaaaaatcggctgtgaagacatttcctcctgcagaaatttagccaaacagctgagtatgtcttgaagtcattctttggttyttaacagggcaaagctattttctaagacctaaaccctggactggccatggggcaaaccctcacaacacatatggaattcatgcacagttaatgcatctct

SEQ ID NO: 466190 - DNA, 201 bp, Homo sapiens
ccaagtagctgggatgacaggcgactgccaccacacctggctaatttttttgtatttttagtagagacagggtttcaccatgttagctaggatggtctcartctcctgacctcgtgatccacctgcctcagcctcccaaaatgctgggattacaggcgtgagccaccacgcctggcagtttatcatgttttttcacaatga

SEQ ID NO: 466191 - DNA, 201 bp, Homo sapiens
gaaaccccatctttactaaaaaaaatacaaaaaattagccgggcatggtggcaggcgcctgtagtcccagctactcgggacgctgaggcaggagaatggcrtgaacccgtgaggtggagcttgcagtgagccgagatcgtgccactgcactccagcctgggcaacacagcgagactccgtctcaaaaaacaaaaaacaaac

SEQ ID NO: 466192 - DNA, 201 bp, Homo sapiens
ctgctccgcacactcaccatttcccagcttttgggggtcccagcgtcctccctataaatctcgcaatacctgcaggccacagggcgatggagcctgcggcrgtcacccgggactctccgagaggcagcagacgggaacccagcaccccgccggccgcaaggagacaaaggccccgccagatccccaaggccgccccttcct

SEQ ID NO: 466193 - DNA, 201 bp, Homo sapiens
gtgatcccagcacttggggaggctgaggagggaggatcacatgaggccaggagtttgagaccagcctggccagtatggcgaaaccccgtctctgctaaaartatttttaaaaattagccaggagtggtggtggtcgcctgtaatcccagctactcaggagactgaggcaggagactcgcgtgagcctgggaagcggaggtt

SEQ ID NO: 466194 - DNA, 201 bp, Homo sapiens
taccaatggccaaaaaactggcccaaacaaaaggccccagtgggtcttgttgaggttgaggatttgcttgtatttcaccaggagagaatcagcttcctgtytgggtacccacaagacatcttaagctgtgccatgagacagagtccaagaagaggaaaagacctcagaatgtctctgcgcccccagttcgtcagacggctc

SEQ ID NO: 466195 - DNA, 201 bp, Homo sapiens
ttagagatcaatatagtgtccatccctgagaataagtgactgggatcacaaggtggtatctggtggtatctttgggctaaaaatgttccccaccccccgctttttttttttttaagatctaaaaagcctcagacaaaactgtccccaatatttaaaactatatggtgctatccacttaggacatgtgcatgtatctttaaa

SEQ ID NO: 466196 - DNA, 201 bp, Homo sapiens
gttgaggttgaggatttgcttgtatttcaccaggagagaatcagcttcctgtctgggtacccacaagacatcttaagctgtgccatgagacagagtccaagaagaggaaaagacctcagaatgtctctgcgcccccagttcgtcagacggctcagatgaacatctctgttgagcagatggaaaccagtaaaactccccaag

SEQ ID NO: 466197 - DNA, 201 bp, Homo sapiens
agagtattgctgcccacagggcacaggtattaagttgcttgacactgcgacagtgtttaaaagtaagctacaatttctaggttaaaaacaaaaataaaacaaaatataaataaatataataaataactatatatgtaattatatatatatgagggaaaagtagaattctattaaaatttagtacaaaagataaaaagaaaa

SEQ ID NO: 466198 - DNA, 201 bp, Homo sapiens
cctgtctgggtacccacaagacatcttaagctgtgccatgagacagagtccaagaagaggaaaagacctcagaatgtctctgcgcccccagttcgtcagayggctcagatgaacatctctgttgagcagatggaaaccagtaaaactccccaagcaactccaccgacctgggggcagatgaagagactggctcacattgca

SEQ ID NO: 466199 - DNA, 201 bp, Homo sapiens
ttttaaaattacttatctagctttgggaggccaaggcgggcggatcacgaggtcaggagatcaagaccatcctggctaacacggtgaaactccaactctaytaaaaatacaaaaaattagctgggtgtgctgacgggcacctgtagttccagctactcgggaggctgaggcaggagaatcgcttgaacccgggaggtggag

SEQ ID NO: 466200 - DNA, 201 bp, Homo sapiens
aggtgcccgccaccaagcccagctaattttttgtatttttagtagagacggggtttcaccatgttagccacgatggtctcgatctcctgacctcgtgatcygcccgcctcggcctcccaaagtgctgggattacagacgtgaaccaccgcgcccggcctaatttttgtatttttattataggtgtgagccattgcgcctgg

SEQ ID NO: 466201 - DNA, 201 bp, Homo sapiens
aggaggcatcgacgtgctcacctctgattggcagtgggcatgcaacctggggcagaccccttcgaatcccaggtacgagcgagctaggtgagggcaaggtrgcatcagagtgtcaccgctgtatgtcagccactgggggacaggggacaggcttcagcttacagccatcttccaaattccagcctctcactttggcagaag

SEQ ID NO: 466202 - DNA, 201 bp, Homo sapiens
ctggccggtctatgcatgttcaaccaagaaaataaaaagatgccaataagaaactaaaattactaaatgcacaaaacactggagttatatggcagcaataytgcataaaggagttacaagggaagaaaagcaaacatttgctatagctcagataaggagcctgtttcacctacagttcaaaatgaaaaccctccttgagaa

SEQ ID NO: 466203 - DNA, 201 bp, Homo sapiens
tgaggcaggagaatcgcttgaacccgggaggtggaggttgcagtaagctgagattgcgccactgcactccagcctgggcaacagagtgagactccatctcaaaaaaaaaaaaaaggtcaaataaaatccaatactctgcactgaccattagtttcacccttagaaatgttacttgatttttttcaattattaaaaggtttc

SEQ ID NO: 466204 - DNA, 201 bp, Homo sapiens
gattcacagcagaattttaccagaaatacaaagaggagcagataccattccttctgaaactattccaaacaattgaaaaggaaggactcctccctaactcrttttataaggctagcatcatcctgataccaaaacctggcagagacacaacaaaaaaagaagacttcaggccaataaccctgatgaacgtcaatgcaaaaa

SEQ ID NO: 466205 - DNA, 201 bp, Homo sapiens
catcccattccctgaccccatggcccctccgagaaggccctccacgtactgccaggccttgaccaccagtcgcccacatccaggaggcatcgacgtgctcrcctctgattggcagtgggcatgcaacctggggcagaccccttcgaatcccaggtacgagcgagctaggtgagggcaaggtagcatcagagtgtcaccgct

SEQ ID NO: 466206 - DNA, 201 bp, Homo sapiens
tgggttctttatttgcttgatagtggccatgtaatgggtgttagcaaaggaaatctggtagatttgctttacatttttattttatttatttatttatttatttttttgaggcagggtcttactctttcacccaggctggagtgaagtagtgcaatcttggctcactgcagcctcaacctcctgggctcaactgaacctccc

SEQ ID NO: 466207 - DNA, 201 bp, Homo sapiens
ggctcatgcctataatcccaccattttgagaggccgaggtggaaggattgctcgaggccaggagtttgagaccagcctgggcaggagtgagaacccatctmtataaaaaataaagaaagaaataaaaagtccaggcgcggtggctcacgcctataatcccagcactttgggaggctgaggcagggggatcacttgaggtca

SEQ ID NO: 466208 - DNA, 201 bp, Homo sapiens
tagcactataaactatgctagggtactcaaatttctttcaatatagatgcaaaatgtctcaaaagatgctacaaaactgaatttaccaatatataagaaghcttacacttcattaccaagagagatttaaccccccaaaaaagcaatgttgtttttgcatctaaaagtcaatttggctgggcacagtggctcacatctgta

SEQ ID NO: 466209 - DNA, 201 bp, Homo sapiens
ggtgcccgccaccaagcccagctaattttttgtatttttagtagagacggggtttcaccatgttagccacgatggtctcgatctcctgacctcgtgatctrcccgcctcggcctcccaaagtgctgggattacagacgtgaaccaccgcgcccggcctaatttttgtatttttattataggtgtgagccattgcgcctggc

SEQ ID NO: 466210 - DNA, 201 bp, Homo sapiens
gttagtgtcccatcccattccctgaccccatggcccctccgagaaggccctccacgtactgccaggccttgaccaccagtcgcccacatccaggaggcatygacgtgctcacctctgattggcagtgggcatgcaacctggggcagaccccttcgaatcccaggtacgagcgagctaggtgagggcaaggtagcatcagag

SEQ ID NO: 466211 - DNA, 201 bp, Homo sapiens
acttaatacctaatcgtttaacatgtataacacaatgatttatggagaatgacacattgataatcatattaggtggcattaaaaccatagaaataaaaatsttctggtatataacacaaatgaacacaggaaagttaaataacttgattaaaaagtgtgacttcaatagcaaagacatggattcaacctaaattcccacca

SEQ ID NO: 466212 - DNA, 201 bp, Homo sapiens
acgactacccagataatgcaccaaaattacatagaagaattgaaacaaattaccctattaagtgggaggagaacggtatggctcctccaagcccaaaaatkattgatccaattataagcccagaacatccagaattgtggaaattaatgatggctcaaagcccaattcggatttggaaagcagaatgtaaaacagagaccc

SEQ ID NO: 466213 - DNA, 201 bp, Homo sapiens
gcgtgataaaaccttagtttccacaacctcttcttgttacccagacattcctttctgttgataactctctcaaccaattgccaataagaacatttttaaawctacctatgacctggaagcccccactctgacttgtcccaccattccagatcaaaccaatttaaatcttacatgtattgatagacattattatgtctccct

SEQ ID NO: 466214 - DNA, 201 bp, Homo sapiens
aatcgtttaacatgtataacacaatgatttatggagaatgacacattgataatcatattaggtggcattaaaaccatagaaataaaaatgttctggtatayaacacaaatgaacacaggaaagttaaataacttgattaaaaagtgtgacttcaatagcaaagacatggattcaacctaaattcccaccaacagtgaagtg

SEQ ID NO: 466215 - DNA, 201 bp, Homo sapiens
caccaaaattacatagaagaattgaaacaaattaccctattaagtgggaggagaacggtatggctcctccaagcccaaaaattattgatccaattataagyccagaacatccagaattgtggaaattaatgatggctcaaagcccaattcggatttggaaagcagaatgtaaaacagagacccatagtaaaaaacttcgat

SEQ ID NO: 466216 - DNA, 201 bp, Homo sapiens
agcggcaaaggaaggagaggttcatccctacccttctgaaccccctccttattatcttgaagaaaatgaccctccagatctttcttttctggaggacactsggcaaaaagtagttgccccagtgactgttcgagcagcgccttgagcaacccctcttagttctattcaggcaggaattcagcaagctagacaagagggtga

SEQ ID NO: 466217 - DNA, 201 bp, Homo sapiens
aaatgctggcaaggatatggaaaaaaagagaatccttgtacacagctggtgggaatgtcaactagtacaactactatggagaacagtttgaaggtctttcaaaaaaaaactaaaaagaaacctgccatatgatccagcaatcctcctgctaggtatatagccaaaagaaaggaaaccagtatgtcaaagagatatccacac

SEQ ID NO: 466218 - DNA, 201 bp, Homo sapiens
tagtacaactactatggagaacagtttgaaggtctttcaaaaaaaaactaaaaagaaacctgccatatgatccagcaatcctcctgctaggtatatagccraaagaaaggaaaccagtatgtcaaagagatatccacactctcgtttgttgtagcactgtttacgatagccaaaatttggaaacaacctaagtgtccatca

SEQ ID NO: 466219 - DNA, 201 bp, Homo sapiens
gaaatatgtccaaaatgtaaaaagaaaaacactgggctagtcagtgtcactctaagtttgataaagatgggaacccaatttcgggaaacaccatgaggggyccgtcccgggacccgttctaaaccagggcatttccagctcaggccattccctcacccctgtacaacgtctgtcccccgccacagccagtagtgccacagt

SEQ ID NO: 466220 - DNA, 201 bp, Homo sapiens
catagaagaattgaaacaaattaccctattaagtgggaggagaacggtatggctcctccaagcccaaaaattattgatccaattataagcccagaacatcyagaattgtggaaattaatgatggctcaaagcccaattcggatttggaaagcagaatgtaaaacagagacccatagtaaaaaacttcgatttgttgtagcc

SEQ ID NO: 466221 - DNA, 201 bp, Homo sapiens
aggcagagcttacagtgaactgagattgtgccactgcacaccagcctgggcgacaaagtgagactccatctcaaaaaaaaaaaaaaaagtctcacctcaattttttttttttcaaaagaagtgaaaatctatattctagagactctcttcaaaaatgagcaaccaatatattcaatttatttatagctcctaaaacatctc

SEQ ID NO: 466222 - DNA, 201 bp, Homo sapiens
agcacatggatcattctcaaggatagaccaaatgttaggtcacaaaacaagtcttaaagcatccaaaaaatggaaataataccaagcattttctgtgaccwcaatggaataaaactagaatgaaaagaggaattttcaaaactatacaaatacatggaaattaaacaatacgctcccaaatgaccagtgaattaaaagaaa

SEQ ID NO: 466223 - DNA, 201 bp, Homo sapiens
aaaactaaaaagaaacctgccatatgatccagcaatcctcctgctaggtatatagccaaaagaaaggaaaccagtatgtcaaagagatatccacactctcrtttgttgtagcactgtttacgatagccaaaatttggaaacaacctaagtgtccatcaacagatgaatgcataaagaaaatgtacatacacacagtggaga

SEQ ID NO: 466224 - DNA, 201 bp, Homo sapiens
gttctaaaccagggcatttccagctcaggccattccctcacccctgtacaacgtctgtcccccgccacagccagtagtgccacagtagatttatgctgcayaaaagctgtgagccttctgcctggagaacccctgcaaaaggtcccaacaggagtctgtggacccttgccagcggggacaataggattacttttaggaagg

SEQ ID NO: 466225 - DNA, 201 bp, Homo sapiens
aagaattgaaacaaattaccctattaagtgggaggagaacggtatggctcctccaagcccaaaaattattgatccaattataagcccagaacatccagaaytgtggaaattaatgatggctcaaagcccaattcggatttggaaagcagaatgtaaaacagagacccatagtaaaaaacttcgatttgttgtagccatgac

SEQ ID NO: 466226 - DNA, 201 bp, Homo sapiens
tctagcaggaatttttttgttcagattaaaatttggcatctggaggtttttctacactgacttatttaattttacacagtatgtctatcatatgacttctrcaaaaaatgacaaccccatcattaatggtttattagttattttcttttattactaagtctgaacttacactgctaccaatatcagagaaagtgcaggttt

SEQ ID NO: 466227 - DNA, 201 bp, Homo sapiens
agtgagactccgtctcaaaacaaacaaacaaacaaacaaaaagacttaaatgtaaaacctgtaagtataaaaaccctagaggaaaacctaggacataccaytatggacataatccttggtaaatatttcatgacaaagtctccaaaagcaatcgcaacaaaaacaaaaataaataagtgggacctaatcaaactaaagagc

SEQ ID NO: 466228 - DNA, 201 bp, Homo sapiens
acagtttattttctatttatttatttatgtatttcgagacagagtctcactgtcgcctaggctggaatgcaatggtgtgatctcggctcacttcaacctcygcctcacggattcaagcaattctcctgcctcagcctgtcgagtaagtgggactacaggtgtgtgcactaatttttgtatttttagtacagacggggtttc

SEQ ID NO: 466229 - DNA, 201 bp, Homo sapiens
attgaaacaaattaccctattaagtgggaggagaacggtatggctcctccaagcccaaaaattattgatccaattataagcccagaacatccagaattgtrgaaattaatgatggctcaaagcccaattcggatttggaaagcagaatgtaaaacagagacccatagtaaaaaacttcgatttgttgtagccatgacctct

SEQ ID NO: 466230 - DNA, 201 bp, Homo sapiens
atcctcaaaggcaaccgagttctaaaatattccacatttttgtagaggatggatgagactgaaagcactggaaatctgtagtcaatttataagatgttcayctgattctgtggcgaacatttattctactatttggtcactagaactatgactctgtctacacttcctttctcccacatagcagttctttttttttttttt

SEQ ID NO: 466231 - DNA, 201 bp, Homo sapiens
gtggtgcaatctcggctcactgcaagctccgcctcccaggttcatgccattctcctgcctcagcctcccaagtagctgggactacaggtgcccgccaccaygcctggctaattttttgtatttttagtagagacggggtttcaccgtgttagccaggatgatcttgatctcctgacctcgtgatctgcccgccttggcttc

SEQ ID NO: 466232 - DNA, 201 bp, Homo sapiens
atccgcgtggccaattcaacctgctcaatttaacatagttggagttggtaaagcccctgaagtatatcaaagtagctatattttgcattgtgaagggcccratggaaaacctgggactattcaaccaattataacttctgtacctataagtttatgcagaagagatttattacaacaatggggagcacaaattataattcc

SEQ ID NO: 466233 - DNA, 201 bp, Homo sapiens
aaatctcacattcaaatcatggaataaaattcttaaatacttacccaaactggaatgataacccagcaagattttataaagatgaaccctgtgctcagtargttaaataggttcccaagcttgggggccactctcaaggtggagatacagcccaaggtggttcattcctagggaatgagtgaaggcaagcttgggggccac

SEQ ID NO: 466234 - DNA, 201 bp, Homo sapiens
ggaaaacctgggactattcaaccaattataacttctgtacctataagtttatgcagaagagatttattacaacaatggggagcacaaattataattccagracaattatatagccctcaaagtcaacatatgatgcatgaaatggggtatgtccctggtacaggactagaaaaaaatttgcaaggtttaaaaagttcccgc

SEQ ID NO: 466235 - DNA, 201 bp, Homo sapiens
gtaagacgtgacttgctccttgttgccttccgcatgattgtcaggcttccccagccatgtggaaatataagtcctttaaatctctttctcttataaattgyccagcctcaggtatgtctttatcagcagcatgaaaacaaactaatacacattcccaaagcaaagtcctagaattccatttgaaatctccttcaaaaaaga

SEQ ID NO: 466236 - DNA, 201 bp, Homo sapiens
aaaaatttgcaaggtttaaaaagttcccgccaaagattgggatgtcatttttgatggcagccattgttaagcctccagaacctatacctttaaaatggttmacagataagccaatttggacagaacaatggccgctaagagaaactggaggctttagagaaattagttactgaacaattcaaaaatgggcacatagctcca

SEQ ID NO: 466237 - DNA, 201 bp, Homo sapiens
aagattgggatgtcatttttgatggcagccattgttaagcctccagaacctatacctttaaaatggttaacagataagccaatttggacagaacaatggcygctaagagaaactggaggctttagagaaattagttactgaacaattcaaaaatgggcacatagctccaacattttccccttggaattctccagttttcgt

SEQ ID NO: 466238 - DNA, 201 bp, Homo sapiens
ccagcctaggcaaaatagtgagaccctgtttctaccaaaaacaccacatatcagtattaactttgaatgtaaacaggctaaatgccccacttaaaaagcaragtgcaagttgcataaagaaagaagacccaactctatggtcttccagaaactcatgtcacatacagtgacacccataggctaaaagtaaccagaaggaga

SEQ ID NO: 466239 - DNA, 201 bp, Homo sapiens
ttagttactgaacaattcaaaaatgggcacatagctccaacattttccccttggaattctccagttttcgtaattaagaaaaaatcaggtaaatggagaaygttaactgatttaagagccatcaattcagttatacaacctatgggagcattacagccagaattgccttctcctgctataattccaaaaaattggccttta

SEQ ID NO: 466240 - DNA, 201 bp, Homo sapiens
gagttagaaggtacttctcaaattttaacaagtatgtcagtgaagtaggaatcttgttaaaatgcaggcacgggccgggtgcagtgactagtacacagacmatttacactataaagcaaccacacaaacaagtctacataacaaccagctaacaacgcaatgacaggatcaaatccacacatatcaaggccaggtatggtg

SEQ ID NO: 466241 - DNA, 201 bp, Homo sapiens
cccttagctgagcaagactgtgaatggtttgcatttacaattcctgcagtaaacaacctgcagcctgctaagtgttttcattgttttacagatgggtctaktaatggtaaagcttcttattctggcttgaaaagtaaagtttttcagatgccctacacttcagctcaaaaagcggagcttgtagctgtaactgaggtattg

SEQ ID NO: 466242 - DNA, 201 bp, Homo sapiens
ggagtagagcttcccaaaccacagtttaaagtctggcttcttccttgatccttcaacccctacctgtgttcgcttcattcactcccacctacctgagtgtytggctgtcttctctgtgttcacgttccagggctctttccttgcctccagacagatgatcagttctggcttagacatagcaagacctgttttattagaaaa

SEQ ID NO: 466243 - DNA, 201 bp, Homo sapiens
gaaatccttactgtgaaataggaattgcatattgaagctatcctcaccaagggagatcaggtttctgtagttctctaacatcacatccctatacaaactcygctgagctgggtccaggcattcccactcctctggagagaattctagagccacatccctgaatgccaatagtccctgaaaaagaaaacatatttaccaagt

SEQ ID NO: 466244 - DNA, 201 bp, Homo sapiens
ttaacagcatgagatagaagatgcccctatgtgggagcaagagaaagaaacccaggcttctcagaagccatttcctgggagtagagcttcccaaaccacartttaaagtctggcttcttccttgatccttcaacccctacctgtgttcgcttcattcactcccacctacctgagtgtttggctgtcttctctgtgttcacg

SEQ ID NO: 466245 - DNA, 201 bp, Homo sapiens
tccgaaaagagggtcagcggagggtcgtgggattggagttagttttataggtgaggggtaagcagtggaaagttacagtcaggggccgtttattaccggcrggggaagaatgtcacaaagtacattgtcacaagagggaggggtcacagtgtcactaggctgattgatcagttagggtagtgcacgtcacaacggtaaaat

SEQ ID NO: 466246 - DNA, 201 bp, Homo sapiens
ggtggggcttgtagtgagctgagattgtgccactgcactccagcctgggcgacagaacgagactctgtctcaagaaaacaaatatatatatatatatatawgagcatagagttcctcaaaaatacgcagacagtcccatgtccccaaaagcaatgcaagagcagtcagatcatgcagtcccctataaactatgaagatgat

SEQ ID NO: 466247 - DNA, 201 bp, Homo sapiens
aatccctgctactggggaggctgaggcaggataatctcttgaacccgggaggcggagggtgcagtgagctgagatcacgccactgcactccagcctgggcracagagcgagactctgtctcaagaaaaaaaaaaaagaaaaaagaactaccatacaagacagcaatctcacatgtgtgtgtgtgtgtaaaatcaatagaaa

SEQ ID NO: 466248 - DNA, 201 bp, Homo sapiens
gtgggagcaagagaaagaaacccaggcttctcagaagccatttcctgggagtagagcttcccaaaccacagtttaaagtctggcttcttccttgatccttsaacccctacctgtgttcgcttcattcactcccacctacctgagtgtttggctgtcttctctgtgttcacgttccagggctctttccttgcctccagacag

SEQ ID NO: 466249 - DNA, 201 bp, Homo sapiens
tgggagcaagagaaagaaacccaggcttctcagaagccatttcctgggagtagagcttcccaaaccacagtttaaagtctggcttcttccttgatccttcracccctacctgtgttcgcttcattcactcccacctacctgagtgtttggctgtcttctctgtgttcacgttccagggctctttccttgcctccagacaga

SEQ ID NO: 466250 - DNA, 201 bp, Homo sapiens
ggagaacggtatggctcctccaagcccaaaaattattgatccaattataagcccagaacatccagaattgtggaaattaatgatggctcaaagcccaattyggatttggaaagcagaatgtaaaacagagacccatagtaaaaaacttcgatttgttgtagccatgacctctaatcagatggtcccattgcagagttgtgt

SEQ ID NO: 466251 - DNA, 201 bp, Homo sapiens
gctcctccaagcccaaaaattattgatccaattataagcccagaacatccagaattgtggaaattaatgatggctcaaagcccaattcggatttggaaagsagaatgtaaaacagagacccatagtaaaaaacttcgatttgttgtagccatgacctctaatcagatggtcccattgcagagttgtgttaaacctcctttt

SEQ ID NO: 466252 - DNA, 201 bp, Homo sapiens
cactggaaatctgtagtcaatttataagatgttcatctgattctgtggcgaacatttattctactatttggtcactagaactatgactctgtctacacttmctttctcccacatagcagttctttttttttttttttttttttttttgagacggagtctcactctgttgccaggctggagtgcagtggcaccgtctcagct

SEQ ID NO: 466253 - DNA, 201 bp, Homo sapiens
ccaagcccaaaaattattgatccaattataagcccagaacatccagaattgtggaaattaatgatggctcaaagcccaattcggatttggaaagcagaatrtaaaacagagacccatagtaaaaaacttcgatttgttgtagccatgacctctaatcagatggtcccattgcagagttgtgttaaacctccttttatgttg

SEQ ID NO: 466254 - DNA, 201 bp, Homo sapiens
tttataagatgttcatctgattctgtggcgaacatttattctactatttggtcactagaactatgactctgtctacacttcctttctcccacatagcagtwctttttttttttttttttttttttttgagacggagtctcactctgttgccaggctggagtgcagtggcaccgtctcagctcactgcaatcttcgcctcgc

SEQ ID NO: 466255 - DNA, 201 bp, Homo sapiens
cagctcctcccacgcaggaaccccgaaccccaagtcgggactctcccctgaggaccctcccgtcggcaccgcacgatccgagggagatgcgggtctacagrggcagagctgcccagaaagggttccgggcctggccgaagcggcggggcagggacaagccaggcggcccggggtctggctgcgggtccagccccgcatcct

SEQ ID NO: 466256 - DNA, 201 bp, Homo sapiens
gttcatctgattctgtggcgaacatttattctactatttggtcactagaactatgactctgtctacacttcctttctcccacatagcagttcttttttttkttttttttttttttttgagacggagtctcactctgttgccaggctggagtgcagtggcaccgtctcagctcactgcaatcttcgcctcgcaggctcaagt

SEQ ID NO: 466257 - DNA, 201 bp, Homo sapiens
attgatccaattataagcccagaacatccagaattgtggaaattaatgatggctcaaagcccaattcggatttggaaagcagaatgtaaaacagagacccrtagtaaaaaacttcgatttgttgtagccatgacctctaatcagatggtcccattgcagagttgtgttaaacctccttttatgttggcagtgggaaaaatt

SEQ ID NO: 466258 - DNA, 201 bp, Homo sapiens
taacacccattgaagtgcacaaggcgatgacctttatgtcagatctttcaaaatagttcaagtaacaacggtcatccccagttatgttctcatgtgtttcmcggtgctacagagagatgtttctgctgatggtggccacgtggttgagttctgatcaatgagacttagaaagaagtgcctggggagaatggacttctgtaa

SEQ ID NO: 466259 - DNA, 201 bp, Homo sapiens
ttctatttttatgttttcttgtcttttttttttttttgagacggagtctcgctctgtcgcccaggctggagtgcagtggtgcaatctcggctcactgcaarctccgcctcctgggttcccgccattctcctgcctcagcctccccagtagctgggactacagccgcccgccaccacgcccggctaattttttgtattttta

SEQ ID NO: 466260 - DNA, 201 bp, Homo sapiens
aatattgattggtatggtagcaagaaagaaatcttcacagataagagatgaaagtgcagataggtcaggcatggtggcctcacacctgtaatcccaacacwttgggaggcctaagcaggaggattgtttgagccccggagttcaagaccagcctgggcaatatagtgagatctcatctctacaaaaaatttaaaaattagc

SEQ ID NO: 466261 - DNA, 201 bp, Homo sapiens
taattattttacaatttctactgaaaaatgtcaaagcagaatagaataagtgaaaaggcatgcgttcaaagaaaaaaactcaatgtcatctagatgtcacytcttacaaatgatatttatgtaaaatttcatagatgcctgaaacagactttctagcagttcagcagaaactacttttcaaaacctacagaaataacaaac

SEQ ID NO: 466262 - DNA, 201 bp, Homo sapiens
ggaccttccgggacctgcaggtcccagagcaacagaagctgccgcgggaccacttggacctcccagggataaggggaaggagcagcggagacgcaccgagytcgccacattcgcgctgcccaacacaaaagccgcgccaggtcccggaagctgctccctcctttcgcggcgcgcttgagagtacagtccccttcccagcgc

SEQ ID NO: 466263 - DNA, 201 bp, Homo sapiens
cttacgtgacaatttttgccaggtccattaatatttatttcattatttttggctctactcaagctgtggaaattttgctctcatcttcgtaaattatctctttttttctctgatttttagtgttttccttctctttggtgttatgcaccttgactattatttaagtaattttttttgacacattgcatttctgaattcaag

SEQ ID NO: 466264 - DNA, 201 bp, Homo sapiens
cacagataagagatgaaagtgcagataggtcaggcatggtggcctcacacctgtaatcccaacactttgggaggcctaagcaggaggattgtttgagcccmggagttcaagaccagcctgggcaatatagtgagatctcatctctacaaaaaatttaaaaattagctaggcatggtggcatgtccctgtggtccctgctac

SEQ ID NO: 466265 - DNA, 201 bp, Homo sapiens
acaagaaaaaagaccatttatggaaagagatccattttcttggtaataaaacagccaaataatatggcatattactataataataatagtaaataatagtycacattctttagaagaacaaaaattagagaatctcaagtggtgattaccacaccaaataaatacgcagaaatgaaggccaaggcagtggatatactccat

SEQ ID NO: 466266 - DNA, 201 bp, Homo sapiens
ctctggtctcaaacgcagatacagtattacctggaaagaagctaaagctattatccagagatgcccaacttgccaaatggcacattcctcatcttttacakgaggagttaatcctcgaggattggaacctaactctctttggcaaatggatgtcacacatgttccctcgtttgggagactagcttatgtacatgtatgtgt

SEQ ID NO: 466267 - DNA, 201 bp, Homo sapiens
ttccatttgctttatggcaatgggaaatctacatggatgtggtatatgtgtgatcaccaatatataaaagaaacgcttcctttttttttcttgcatttttwaattatactttaagttctggggtacatgtgcagaacatgcagttttgttacataggtatacacgtgccatggtggtttgctgcacccatcaacccatcat

SEQ ID NO: 466268 - DNA, 201 bp, Homo sapiens
tggtcccctggtgccccctcctgggggatgacagttcagcatttccaagagtcttggcaggaaggccgcccccaaaccagtccttaggaaggagaaaaccrttgggctgagggtagaggctgcagcagccctggacaccagaagggggcagagacggggcctcctggatgccatcctcacccggtacccaccaagccctgg

SEQ ID NO: 466269 - DNA, 201 bp, Homo sapiens
ctcgtttgggagactagcttatgtacatgtatgtgtggacaccttttctcactttgtctgggctacatgccaatcaggagagtcttctgccggtgttaaamgtcatcttttgcagtgttttgcggtgatgggcattccagcttctattaaaacagataatgccccaggctatactagccaagatctagctacatttttctc

SEQ ID NO: 466270 - DNA, 201 bp, Homo sapiens
agagagaagaataaatagacacaataaaaaacgaaaaaggggatatcatcactgatcccatagaaatacaaagtaccatcagagaatactataaacacctmttcgcaaataaactagaaaatctagaagaaatggataaattcctggacaaatacaccctcccaagactaaactaggaagaagtcgaatccctgaacagac

SEQ ID NO: 466271 - DNA, 201 bp, Homo sapiens
tcttcaagagacccatctcacatgcaatgacgcccacacattcaaagtaaagagatagagaaaaatctacaacacaaatggaaaacagaaaaaagtaaatytaggagcaataggccataccatatagcctaggtgtgtggtatattatgccatctaggtttgcgtaagtacacgctattatgttctcactataaaactgcc

SEQ ID NO: 466272 - DNA, 201 bp, Homo sapiens
gtacatgtatgtgtggacaccttttctcactttgtctgggctacatgccaatcaggagagtcttctgccggtgttaaacgtcatcttttgcagtgttttgyggtgatgggcattccagcttctattaaaacagataatgccccaggctatactagccaagatctagctacatttttctctatgtggaatattgaacacatt

SEQ ID NO: 466273 - DNA, 201 bp, Homo sapiens
ttgtggcagccacacctccagagaccccttggctgctcctggaccacacagctgctcagggaaatttaacctctggccccctccacacaggagggccacasaggggccacacaggtgacccctgcaggcactcacctgtcactcgcacacagaagggcacagtacacataacctgggtgagccgctgccagcggctgttgg

SEQ ID NO: 466274 - DNA, 201 bp, Homo sapiens
ggtcccctggtgccccctcctgggggatgacagttcagcatttccaagagtcttggcaggaaggccgcccccaaaccagtccttaggaaggagaaaaccgytgggctgagggtagaggctgcagcagccctggacaccagaagggggcagagacggggcctcctggatgccatcctcacccggtacccaccaagccctgga

SEQ ID NO: 466275 - DNA, 201 bp, Homo sapiens
gagtattccttcaacaagggctgacacagagaacaattacacttactgggcatatttatcaatcttggctggtaataatgcctggatgtaatcactatgayacagttacacatgttttctgatctcagtttttaccataataaatttgctcctataattgaggcatactgccctcaaaaacctatttgtaaacaaaattga

SEQ ID NO: 466276 - DNA, 201 bp, Homo sapiens
cactttgggaggccgaggcgggtggatcacgaggtcagcagtttgagaccagcctgaccaacatggtgaaaccccatctctactaaaaatacaaaaaaaaytagctgggcatggtggcggctgcctgtaatcccagctactccggaggctgaggcaggagaatctcttgaaactggaaagcagaggttgcaacgagctgag

SEQ ID NO: 466277 - DNA, 201 bp, Homo sapiens
gatttttttttttttcttgagacggagtcttgctctgtcacccaggctggagtgcagtggcacaatctcggctcactgcaagctccgctgccccggttcaygccattctcctgcctcagcctcccgagtagctgtgactacaggcgcctgccaccccgccctgctaattttttgtatttttagtagagacagggtttcacc

SEQ ID NO: 466278 - DNA, 201 bp, Homo sapiens
tctgatctcagtttttaccataataaatttgctcctataattgaggcatactgccctcaaaaacctatttgtaaacaaaattgaacctggccagaaaaaawgaatgtacttgtttaggaagattgcattgcagaagaggcagaggtgctgcacaacaattcctatggaatcattattgattgtcccctaaggggatgttta

SEQ ID NO: 466279 - DNA, 201 bp, Homo sapiens
tctactaaaaatacaaaaaaaattagctgggcatggtggcggctgcctgtaatcccagctactccggaggctgaggcaggagaatctcttgaaactggaargcagaggttgcaacgagctgagattgcaccactacactctagcctgggcaacgagagcaaaactccatctcaaaaaaaaaaaaaaaaaagaaggaaacga

SEQ ID NO: 466280 - DNA, 201 bp, Homo sapiens
atgccaggaactggagtgcttgaaggagctgcagacaaattagcagctagtaacccattaaaatggataaaaacacttggaatctctgtgatttcaatgaygattgtgcttttaatctgtgttgcttgtcttcgtatagtctgcagatgtggatcctgactcctgcgagaagtagctcaccatgacaaagctgcctttgct

SEQ ID NO: 466281 - DNA, 201 bp, Homo sapiens
taaaactcatatagaagttccacacagcagtagttacagaaaacacacactaagaaaaaggccaaaataaaaataggacaccaagtttggccaactgggtmtcacaagccagtaggtaagaaagccccaggagggcccaccagagtagctgggggtgggttcctgcctgcagggggcctgggacaccccattctcacagat

SEQ ID NO: 466282 - DNA, 201 bp, Homo sapiens
tataaaaaataaagaaagaaataaaaagtccaggcgcggtggctcacgcctataatcccagcactttgggaggctgaggcagggggatcacttgaggtcargagttcaagaccagcctggccaacatggtgaaaccccatctctactaaaaatacaaaaatttgccagatgtggtggcgggcacctgtaatccctgctact

SEQ ID NO: 466283 - DNA, 201 bp, Homo sapiens
gtaaatctctgttcggggctctcagctctgaaggctgtgagaccccgatttcccacttcacacctctatatttgtgtgtgtgtgtctttaattcctctagygttgctgggttagggtctccctgactgagctggtctcgtcactgctgctcatttttatataggtgtgtgtaatgatcaggctatgcaactgattatttag

SEQ ID NO: 466284 - DNA, 201 bp, Homo sapiens
taccagctgggctggttgcactgtagttttggttctggcaacatattgctgcccactttggccacaccagtccctggctccctggccaggcccagtgctgyccaacccccctacacgggccccacatacccactgcccaccaggctcctgtcagccaggaggggaggacccaggctcatcccctgaagtatccgtgggagc

SEQ ID NO: 466285 - DNA, 201 bp, Homo sapiens
cacacacacgtcataaagaaaatgtactggcatgtctactgcaagtagatttatctgtaagtttgtttgcctgtaacatttataaaggcaaacaaacttayagataaatgtactgacaatgtgattgttgcattattcacttttgcaccataatgtcttgaagtgtacagaactgaatatgttcataaaaattataataca

SEQ ID NO: 466286 - DNA, 201 bp, Homo sapiens
ctctaccaaaaatacaaaaaaattagctgggcttggtggtgggcacctgtagtcccagctacgcaggaggctgaggcaggagaatggcatgaacccaggargcggagcttgcagtgagccaagatcacgccactgcactccagcctgggcgacagagtaagactccgtctcaaataaaaaaaaaaaaaagaatactataga

SEQ ID NO: 466287 - DNA, 201 bp, Homo sapiens
aaaagacaataaataataaaaggttttgttcacagaaaacctatgacaaatgtatgtctgtgtatttatgtctacatctgtgtctcaccagggttcacgayatataaagcaactatttacagaaatgaagcaacaagtacacagggaacgggggacttgaaagcactataaaacagtgacaaccaacagacctctagagaa

SEQ ID NO: 466288 - DNA, 201 bp, Homo sapiens
ctaccaaaaatacaaaaaaattagctgggcttggtggtgggcacctgtagtcccagctacgcaggaggctgaggcaggagaatggcatgaacccaggaggyggagcttgcagtgagccaagatcacgccactgcactccagcctgggcgacagagtaagactccgtctcaaataaaaaaaaaaaaaagaatactatagaca

SEQ ID NO: 466289 - DNA, 201 bp, Homo sapiens
aaaaaagacaataaataataaaaggttttgttcacagaaaacctatgacaaatgtatgtctgtgtatttatgtctacatctgtgtctcaccagggttcacratatataaagcaactatttacagaaatgaagcaacaagtacacagggaacgggggacttgaaagcactataaaacagtgacaaccaacagacctctagag

SEQ ID NO: 466290 - DNA, 201 bp, Homo sapiens
gtggggagcgcctctgccccgctgccccgtctgggatgtgaggagcgcctctgcccggccacgaccccgtctgggaggtgaggagcgtctctgcccggccrccccgtctaagaagtgaggagaccctccgcccggcagccgccccatctgagaagtgaggagcccctccgcccggcagccaccccgtctgggaagtgagga

SEQ ID NO: 466291 - DNA, 201 bp, Homo sapiens
tcgggaggctgaggcaggagaatggcgtgaacccgggaggcagagcttgcagtgagccaagatagccccactgcacttcagcctgggcgacagagcaagaytccgtctcaaaaacaaaaacaaaaacaaaaaacaaacaaacaaaaaacacgaacaactcacaggagacaaaaaagacaataaataataaaaggttttgtt

SEQ ID NO: 466292 - DNA, 201 bp, Homo sapiens
ttattattattattattattttaagacgaagtctcgctcttgtcccccaggctggagtgcaatggcgcgatcttgactcactgcaacctccacctcccggratcgagcgattctgctgcctcagcctcccgagtagctgggattacaggcgcctgccaccacacccggctaatttttgtatttttagtagagacagggttt

SEQ ID NO: 466293 - DNA, 201 bp, Homo sapiens
gaaccagcatcactcatatcccaacaattactatctgcctcccttatctacctccccagtggtaagtaagattattattattattattattattattattattttaagacgaagtctcgctcttgtcccccaggctggagtgcaatggcgcgatcttgactcactgcaacctccacctcccgggatcgagcgattctgctg

SEQ ID NO: 466294 - DNA, 201 bp, Homo sapiens
atatatacactatgcacccacaaatttttttaaattttttaaaaatcctttctgagaactctaaaaatcaatgaagggtttgcaggtgagcacaatgccayaagccccatagaatggaaggaaagttggttccatttacccaccacagccctaccttttttccaataaggtaggtgcccttaggagtaaacttccgacttc

SEQ ID NO: 466295 - DNA, 201 bp, Homo sapiens
accaaatgttaggtcacaaaacaagtcttaaagcatccaaaaaatggaaataataccaagcattttctgtgaccacaatggaataaaactagaatgaaaasaggaattttcaaaactatacaaatacatggaaattaaacaatacgctcccaaatgaccagtgaattaaaagaaattcaggaggaaatttaaaatttcttg

SEQ ID NO: 466296 - DNA, 201 bp, Homo sapiens
atcattgtggggagaggactttgctgggaaaaagttgcatccccccagattgaaaccattccactttccaaattggagtaaaactgaaaagacctaggggrgcacccaaggttacaacatgaatgaatagctcagaatatttaaagtcatttgatggtatcatgggtgagtgtgtctcacttcaaacaaaataaaacacta

SEQ ID NO: 466297 - DNA, 201 bp, Homo sapiens
aaaaatctgctgtaatctgataggttttccttcctaggttaaatgatgcttttgcctcacagctcttcagattctttccttcttaattttagataacctgmtgagtatgcatctaggtgattatctttttgtgatacattttccaggtgttgtttgagcttcttgtatttggatgtctagatctctagcaaggccagggaa

SEQ ID NO: 466298 - DNA, 201 bp, Homo sapiens
tccaagtaaaatattctgaaaatattgaacatcaatgttacattcaggtgtattttttgctaagacttttctggaaaaaaaaaatttctagtggttcttakttgttttgtctgttttaaaaacttatgacatgctaagattccctcaaggggcatttttgctcttgtgaatgcaaattaccttagatttctcccaggattt

SEQ ID NO: 466299 - DNA, 201 bp, Homo sapiens
atctacgattttttcaggtcatatcacccaattcactcatttttcaaccaagaaaatcaaaatctcacattcaaatcatggaataaaattcttaaatactyacccaaactggaatgataacccagcaagattttataaagatgaaccctgtgctcagtaggttaaataggttcccaagcttgggggccactctcaaggtgg

SEQ ID NO: 466300 - DNA, 201 bp, Homo sapiens
aagagtcttggcaggaaggccgcccccaaaccagtccttaggaaggagaaaaccgttgggctgagggtagaggctgcagcagccctggacaccagaagggkgcagagacggggcctcctggatgccatcctcacccggtacccaccaagccctggagctctacagagggaggcctaggggcgcagattctagtgggccatc

SEQ ID NO: 466301 - DNA, 201 bp, Homo sapiens
ttttttggtagagatggggtttcaccatgttggccaggctggtcttgaactcctgacctcaggcgattcacccgccttggcctcccaaagtgctgggattmcaggtgtgagccaccacgcccagccaaaacacttgcgttgtaatcaactacgtgaataagtgttgttattcttacctacagaagccaggttcctgaagat

SEQ ID NO: 466302 - DNA, 201 bp, Homo sapiens
aaacccaggcttctcagaagccatttcctgggagtagagcttcccaaaccacagtttaaagtctggcttcttccttgatccttcaacccctacctgtgttygcttcattcactcccacctacctgagtgtttggctgtcttctctgtgttcacgttccagggctctttccttgcctccagacagatgatcagttctggctt

SEQ ID NO: 466303 - DNA, 201 bp, Homo sapiens
aaagaacattaattaggcagatcacctgaggtcgggaattcaagttcagcctgaccaacatagagaaatcccgtctctactaaaaatatgacattaggccrggcgcggtggctcacgcctgtaatcccagcactttgggaggccgagacgggcggatcacgaggtcaggagatcgagaccgtcctggccaacacagtgaaa

SEQ ID NO: 466304 - DNA, 201 bp, Homo sapiens
gtcttggcaggaaggccgcccccaaaccagtccttaggaaggagaaaaccgttgggctgagggtagaggctgcagcagccctggacaccagaagggggcakagacggggcctcctggatgccatcctcacccggtacccaccaagccctggagctctacagagggaggcctaggggcgcagattctagtgggccatcgctg

SEQ ID NO: 466305 - DNA, 201 bp, Homo sapiens
tacgtgagccgttttttgttaatagctttattgggatcacacacgtatcgaacattggtttcctaaattagcaaatcgaccatttcctcaggttattccamgttcttccaagatgcgtcagaagcattctctggaggcagttgttccaaatggtgaagagtactagatggatcccaatctcacaggattcttgcttctatt

SEQ ID NO: 466306 - DNA, 201 bp, Homo sapiens
ggtggctcatgcctgcaatcccagcactttgggaggctgaggcaggtggataacctgacatcaggagttcgataccagcctggccaacatggcaaaacccygtctctactaaaaatacaaaaaaaatttagctgggcgtgatggtgcatgcctgtagtcccagctacttgggaggctaaggcatgagaatcccttgaaccc

SEQ ID NO: 466307 - DNA, 201 bp, Homo sapiens
tgtgaacactctggtgttttctaaggtatattttttgaacaaatgttgtttctgcatttattacatttgtagggtttctctccaatacaaagtctttgaarttgaatacagtttgagcaactggagggtttccctccagtataaattcttctgtgtacagtaagagctgtgatataagtggaggtgttgaaccggtctatt

SEQ ID NO: 466308 - DNA, 201 bp, Homo sapiens
ggagaagctgacccctgacctccccacctaccctgcccaccagatgccatagcagccagggatccctgacgtcaggcagaggcagggagcacagttgctgyctcctttgatcccatcccagggcccgcagggcctggagaaacctggcaggggctgagttgggagaatcaggcagggggatgccaactgaagaatgtgagg

SEQ ID NO: 466309 - DNA, 201 bp, Homo sapiens
ctcacttataagtgggagctaagctatgaggttacaaaggcataagaatgatataatggaccttggtgatttgggggcaagggtgggagggggtgagactrcatattgggtacagcgtacactgataaggtgacaggaccaaaatctcagcaatcaccactagagagcttatccttgtaaccaaaaaccacctgctacccc

SEQ ID NO: 466310 - DNA, 201 bp, Homo sapiens
ctactcaggagactgaggcaggagactcgcgtgagcctgggaagcggaggttacagtgagccgagatcatgcctttgcactccagcttgggtaataagagsaaaactccatctcaaaaacaaaaacaaaacaaaacaaaaaaatcggctgtgaagacatttcctcctgcagaaatttagccaaacagctgagtatgtcttg

SEQ ID NO: 466311 - DNA, 201 bp, Homo sapiens
atgccacgtgccaacaccccacccccaactccacaagctgctgacctccaccacagtgcatgccacgtgccaagaacagctcagcggtgcatcccaaaggrtgctatcttggagcggctgcgctgggcgagggacacgcttcctagtcacagagattttgtttctttaccactcactggccctgtgcctcagtttccccca

SEQ ID NO: 466312 - DNA, 201 bp, Homo sapiens
agacaatccagagggcagaaattctttcttccctcaataccagtatccgactgcctgaccagcattttgtctctaaggagtgataacgggggtaagagaagaaaaaaaaatctaagtcctagtggattagctttttagaggaagagtatagaagagtatcccaggagactcctctcggtcccaggggattcatgccatcca

SEQ ID NO: 466313 - DNA, 201 bp, Homo sapiens
aaagggtgctatcttggagcggctgcgctgggcgagggacacgcttcctagtcacagagattttgtttctttaccactcactggccctgtgcctcagtttcccccactgtggcacagtgtaaaaatcccatcttgaaggctaggaacccagaaaggtcaccacacccggtgaaatggggggtgaaactccctgccttggac

SEQ ID NO: 466314 - DNA, 201 bp, Homo sapiens
tatataaacctcatctgcaagaaaaggcatgatactgattgcaaaaatggcagcaactcttcatcccttcctgtatttatgccctttgtgatgtgcttttrgctgggactacaggcacccgccaccacgcccggctaattttttgtatttttagtagagacggggtttcaccgtgttagccaggatggtcttgatctcctg

SEQ ID NO: 466315 - DNA, 201 bp, Homo sapiens
gttcagacccagcccggccagccgccacctccaggagggaggtggggggtcagcccccacccggccagccgctccgtccgggagggaggtggggggtcagsccccgcccggccagccgccccgtcctggagggaggtggggggtcagcccccgcccggccagccgccccgtccaggaggtgaggggcacctctgcccggcc

SEQ ID NO: 466316 - DNA, 201 bp, Homo sapiens
caacacacccaactaattttttttgttttgttttgttttgtttttgttttttttgagacggagtctcgctctgtcgcccaggctggagtgcaggggcgcgrtctcggctcactgaaagctccgcctcccgggttcacgccattctcctgcctcagcctccccagtagctgggactacaggtgcccgccaccaagcccagct

SEQ ID NO: 466317 - DNA, 201 bp, Homo sapiens
ccagccgccacctccaggagggaggtggggggtcagcccccacccggccagccgctccgtccgggagggaggtggggggtcagcccccgcccggccagccrccccgtcctggagggaggtggggggtcagcccccgcccggccagccgccccgtccaggaggtgaggggcacctctgcccggccgcccctactgggaagtg

SEQ ID NO: 466318 - DNA, 201 bp, Homo sapiens
cacccaactaattttttttgttttgttttgttttgtttttgttttttttgagacggagtctcgctctgtcgcccaggctggagtgcaggggcgcgatctcrgctcactgaaagctccgcctcccgggttcacgccattctcctgcctcagcctccccagtagctgggactacaggtgcccgccaccaagcccagctaattt

SEQ ID NO: 466319 - DNA, 201 bp, Homo sapiens
agctacttgggaggctgaggcaggagaatggcgtgaacccaggaggcggagcttgcagtgagccgagatcgtgccactgcactccagcctgggcgacagarcgagacaccaaaaaaaaaaaaaaaaaaaaggaaactggaatttggggaattcatcgccagccttaggaggagctaggctgggaaggacaagacagtggat

SEQ ID NO: 466320 - DNA, 201 bp, Homo sapiens
ccatctctacaaaaaatgcaaaaacaaaattagccgggcatggtggcgggcgcctgtagtcccagctacttgggaggctgaggcaagaatggcatgaaccygggaggtggagtttgcagtgagccgagatcgtgccactgcactccagcctgggcgacagagcaagactccgtctcaaaaagaaaaaaaaaagaattctag

SEQ ID NO: 466321 - DNA, 201 bp, Homo sapiens
ggctggggtgcaatggtgtggtctgggctcactgcaacctctgcctcctgggttcaagcaattcccctgcctcagcctcccgagtagctgggactataggytcctgccaccacacctggctaatttttgtatttttagtagagacgggggtttcactatgttggccaggctggtcttgaactcctgaacttgtgatccgcc

SEQ ID NO: 466322 - DNA, 201 bp, Homo sapiens
gatcgtgccactgcactccagcctgggcgacagagcaagactccgtctcaaaaagaaaaaaaaaagaattctaggtttatgtttgaattaactcctttgcygtgtcatatgggtaccatggttgtttctccccaaagcaggctcactgtgtactgttatcagcttgtctgagtatgatgagagagaacacattcatgcaca

SEQ ID NO: 466323 - DNA, 201 bp, Homo sapiens
catgaaccatgtgtccagtctgaaaataaaaatatataatatcaaaacttctggaatgcagtgaaagtattgcttagaaatttacaacgttgaatgcatayattacaaacaaataaaattatacacccaatgatgtaattttctactttaggtcactaaagaaaaaagaacaaattcagtcgaaagaaataaaaacaacaa

SEQ ID NO: 466324 - DNA, 201 bp, Homo sapiens
tcacgtatttttagatttgtcagttttgcttcaactttacatttctagctttatttcacgtggtcagaaaagatacagtgtatgagtcagtcctctcaaamatgatgagttgttttgtcttctaacaggttgtccctgaaacaactatccattttctcctacccccagctcctgacaaagtgtattctactttctttttcc

SEQ ID NO: 466325 - DNA, 201 bp, Homo sapiens
tgaaagtattgcttagaaatttacaacgttgaatgcatacattacaaacaaataaaattatacacccaatgatgtaattttctactttaggtcactaaagaaaaaagaacaaattcagtcgaaagaaataaaaacaacaagatgacaagtcaatggcactgaaaatagaaaatcaacagaagaactcaatagaacaatagc

SEQ ID NO: 466326 - DNA, 201 bp, Homo sapiens
tacccccagctcctgacaaagtgtattctactttctttttccaggggtttgactactttagatatctcatataaatggaatcatacagtatctctctcttytttttttttttttttttttggagacagtctcactctgtcacccaggctggaatgcagtgcatggtcttgtctcactgcaacctctgcctctgagttcaag

SEQ ID NO: 466327 - DNA, 201 bp, Homo sapiens
gaaagtattgcttagaaatttacaacgttgaatgcatacattacaaacaaataaaattatacacccaatgatgtaattttctactttaggtcactaaagaaaaaagaacaaattcagtcgaaagaaataaaaacaacaagatgacaagtcaatggcactgaaaatagaaaatcaacagaagaactcaatagaacaatagct

SEQ ID NO: 466328 - DNA, 201 bp, Homo sapiens
aaacaataaataaaaaacacaagaaaacttcctgagcctgtttgagaatatttatgaaaaatccacaatatacttgatggtgagactgaatgctttcacaygcagattagacaagcatactgtccaatcacagttctctcttcttaattcaaagtaaaaagtgggccaggtgtggtagctcatgtcagtaaccccaacatg

SEQ ID NO: 466329 - DNA, 201 bp, Homo sapiens
aaagtattgcttagaaatttacaacgttgaatgcatacattacaaacaaataaaattatacacccaatgatgtaattttctactttaggtcactaaagaaaaaagaacaaattcagtcgaaagaaataaaaacaacaagatgacaagtcaatggcactgaaaatagaaaatcaacagaagaactcaatagaacaatagctg

SEQ ID NO: 466330 - DNA, 201 bp, Homo sapiens
tcaaagtaaaaagtgggccaggtgtggtagctcatgtcagtaaccccaacatgtagacaggctgaggcaggaggatagcttgaggccaggaattcaatacsagcctagacaatacagcgagatcccatctctataaaaaatttttaaaattatataattagctgagcatggtggcatgtgtctgtagctccagctacatag

SEQ ID NO: 466331 - DNA, 201 bp, Homo sapiens
aagaaaacagaagaaaatctttacaacaaaaaagtagttttcccataaaaaggtagaatacacacacacacacacacacacacacacacacacacacacaygaactcatttttcattggtccattaattagagaacaattaaacaactacatgaaaattaaaattgcctactattagaaatacatttcaacttagtctagg

SEQ ID NO: 466332 - DNA, 201 bp, Homo sapiens
ataaagtgttctaacacatttttcgtattttatgacgttctttcccaggacgggtccttctaagttttagaagggaactaggaaaattgcatacattctartcttccttacatgtgttgggtttctctctaatttgagtttttaattttttcacgtgttctaatgaaactagaataactgaaagctttaacacacttctta

SEQ ID NO: 466333 - DNA, 201 bp, Homo sapiens
ggcctggccgaagcggcggggcagggacaagccaggcggcccggggtctggctgcgggtccagccccgcatcctgtgccactaaggccgcgaggcgccggmggaaactcgggtcggcaccgcggggaggtccgggttcgccacaaccgcttcctggcggttcccttttccccttcccgagacacctggccggcacactcac

SEQ ID NO: 466334 - DNA, 201 bp, Homo sapiens
tgagtgaggccaggttctttccctgcagtccttttctaaggcatggattctgccctgtgctgagacctggcgccccccgggggactttcccattcaagctyatacacaggattatgtccatttatgagtaatatttgtgatatttacaattggaaacactatgatgacaattattctaaaatttcagatttcacaaccttc

SEQ ID NO: 466335 - DNA, 201 bp, Homo sapiens
attttgtggctttttttttttttgagacagagtctcgctctgtcgcccaggctggagtgcaaaggtgtgatcttggctcactgcaacctccacctcccagrttcaagcgattctcctgcctaagtctcctgcgtagctgggattacaggtgcaggccaccacatgtggctaattttgtatttttagtagagacagcgtttc

SEQ ID NO: 466336 - DNA, 201 bp, Homo sapiens
gacccacctgcctgggggataatggcatttaaccttgtatataagattatatccattcataagttttacacacacacacacacacacacacacacacacayatatatttcacaaatagaaacaatgaatgataattattttaaagtttccgatttcataaccttccgggcctctggtcttttgaccaggcagcctgagctg

SEQ ID NO: 466337 - DNA, 201 bp, Homo sapiens
tttttttttttttgagacagagtctcgctctgtcgcccaggctggagtgcaaaggtgtgatcttggctcactgcaacctccacctcccaggttcaagcgattctcctgcctaagtctcctgcgtagctgggattacaggtgcaggccaccacatgtggctaattttgtatttttagtagagacagcgtttcaccatgttgg

SEQ ID NO: 466338 - DNA, 201 bp, Homo sapiens
ggacccacctgcctgggggataatggcatttaaccttgtatataagattatatccattcataagttttacacacacacacacacacacacacacacacacatatatatttcacaaatagaaacaatgaatgataattattttaaagtttccgatttcataaccttccgggcctctggtcttttgaccaggcagcctgagct

SEQ ID NO: 466339 - DNA, 201 bp, Homo sapiens
tttttttttttgagacagagtctcgctctgtcgcccaggctggagtgcaaaggtgtgatcttggctcactgcaacctccacctcccaggttcaagcgattctcctgcctaagtctcctgcgtagctgggattacaggtgcaggccaccacatgtggctaattttgtatttttagtagagacagcgtttcaccatgttggcc

SEQ ID NO: 466340 - DNA, 201 bp, Homo sapiens
tggacccacctgcctgggggataatggcatttaaccttgtatataagattatatccattcataagttttacacacacacacacacacacacacacacacacatatatatttcacaaatagaaacaatgaatgataattattttaaagtttccgatttcataaccttccgggcctctggtcttttgaccaggcagcctgagc

SEQ ID NO: 466341 - DNA, 201 bp, Homo sapiens
aagtattgcttagaaatttacaacgttgaatgcatacattacaaacaaataaaattatacacccaatgatgtaattttctactttaggtcactaaagaaaaaagaacaaattcagtcgaaagaaataaaaacaacaagatgacaagtcaatggcactgaaaatagaaaatcaacagaagaactcaatagaacaatagctgt

SEQ ID NO: 466342 - DNA, 201 bp, Homo sapiens
tttttttttgagacagagtctcgctctgtcgcccaggctggagtgcaaaggtgtgatcttggctcactgcaacctccacctcccaggttcaagcgattctcctgcctaagtctcctgcgtagctgggattacaggtgcaggccaccacatgtggctaattttgtatttttagtagagacagcgtttcaccatgttggccag

SEQ ID NO: 466343 - DNA, 201 bp, Homo sapiens
aactgaacgtcggccattctatggtcatctggcatttgaagccaattggaaaggtgaaaaagcttgataagtgggtgcctcatgagctgaccaaaaatttwaaaaatcatccttttgaagtgtcgtcttctcttattctatgaaacgacaatgaaccatttcttgatcagattgtgacatgccacgaaaagtggattttat

SEQ ID NO: 466344 - DNA, 201 bp, Homo sapiens
ttttttgagacagagtctcgctctgtcgcccaggctggagtgcaaaggtgtgatcttggctcactgcaacctccacctcccaggttcaagcgattctcctgcctaagtctcctgcgtagctgggattacaggtgcaggccaccacatgtggctaattttgtatttttagtagagacagcgtttcaccatgttggccaggat

SEQ ID NO: 466345 - DNA, 201 bp, Homo sapiens
aaggtatttaaataggaagataggaagtcgaattgtctctgtttgcagatgacatgattctatatttagaaaaccccaggccgggcaccatggctcaggcytataatctcagcactttgggaggctgaggtgggtggatcatgaggtcaggagatcgagaccatcctggctaacacggtgaaaccctgtctctaccaaaaa

SEQ ID NO: 466346 - DNA, 201 bp, Homo sapiens
caccaaaaaaagtcatggtcagtgtttggtggtcagctgatggtcttctgatccactgcagctttctgaatcctggtgaaatcattacatctgagaagtamgcccagctattgatgagacgcaccaaaaactgcagcacctgtagccagcattggtcaacaggaagggccaattctccacaacacctgaccacgtgtcata

SEQ ID NO: 466347 - DNA, 201 bp, Homo sapiens
ttcgtattttatgacgttctttcccaggacgggtccttctaagttttagaagggaactaggaaaattgcatacattctaatcttccttacatgtgttgggyttctctctaatttgagtttttaattttttcacgtgttctaatgaaactagaataactgaaagctttaacacacttcttacattgacagaggtgttttgtt

SEQ ID NO: 466348 - DNA, 201 bp, Homo sapiens
gtctctgtttgcagatgacatgattctatatttagaaaaccccaggccgggcaccatggctcaggcttataatctcagcactttgggaggctgaggtgggyggatcatgaggtcaggagatcgagaccatcctggctaacacggtgaaaccctgtctctaccaaaaatacaaaaaattagccaggcatggtggtgggcgcc

SEQ ID NO: 466349 - DNA, 201 bp, Homo sapiens
taaagccaccactgatctgacaggagaaggagctcaggtggtaatgttcactcacctgctgctcacctcctgctgcatggcctggatcctaacaggccacygacaggtactgctccatggcccaggggttggggacccctgctttattgaataatgtctagaaagaatgccaggacaatgaaaattacacccttaaaaagg

SEQ ID NO: 466350 - DNA, 201 bp, Homo sapiens
cttacatgtgttgggtttctctctaatttgagtttttaattttttcacgtgttctaatgaaactagaataactgaaagctttaacacacttcttacattgwcagaggtgttttgttgttgttgttttttaccacatataagctctttcatgctttcgaagggaactggaacaactgaaggctttaccacatttcttacatt

SEQ ID NO: 466351 - DNA, 201 bp, Homo sapiens
tgcctcatctgccatattcatctgatctctcgccaaccaactaccacttctttaagcatcttgacaactttttgcagggaaaatatttccacaaccagcakgatgcagaaaatgctttccaaagagttcatcgaatcctgaagcatggaataaacaagcttatttctcattggcaaaagtgtgttggttgtaatggttctt

SEQ ID NO: 466352 - DNA, 201 bp, Homo sapiens
cacccgagcccctgcttgggccctgatctttgagaagggggagcagcagaacccgggcactgacgctacagtgccactcacacccacagatttctccacasaggcatcagtctcggtcctggccacctcctcctggacggcttcagccattccccgggactcacgtggtccttcctcacacgcggctctggtaggatgcat

SEQ ID NO: 466353 - DNA, 201 bp, Homo sapiens
cagcctcccaagtagctgggattacagatgcccatcaccatggccagctaatttttgcatttttagtagagacggggtttcaccatattggtccagctggyctcaaacttctgacctcaagtgatccgcccacctcagccaaccaaaatgctgggattacaggcgtgagccactgcacctggcccagtatcttttttgtca

SEQ ID NO: 466354 - DNA, 201 bp, Homo sapiens
tcttgacaactttttgcagggaaaatatttccacaaccagcatgatgcagaaaatgctttccaaagagttcatcgaatcctgaagcatggaataaacaagsttatttctcattggcaaaagtgtgttggttgtaatggttcttctttgttttaagacagagtctcactctgtcacccaggccagagtgcaatggtgcgatc

SEQ ID NO: 466355 - DNA, 201 bp, Homo sapiens
taatggtacatttattcatggtttacattgctactaataccatggaaaatgcaagtttcctgccatatctaaattgttttaaagtaaataaattaattacygtaagatatgggtcccccatagctattatcattattatcataattgtgatagtcacatgtacagtatcttggtggtgtttccaagtaaaatattctgaaa

SEQ ID NO: 466356 - DNA, 201 bp, Homo sapiens
ggtttcaccatgttggtcaggctggtctcaaactcctgacctcgtgatccgcccacctcagcctcccaaagtgctgggattacaggcatgagccactgcgcccagcccattgtaatggtttctattttgattaataaagatgtgttgcagcctagttataaaaatttaaaattcatggtccaaaaccacaattatttttgc

SEQ ID NO: 466357 - DNA, 201 bp, Homo sapiens
aatggtacatttattcatggtttacattgctactaataccatggaaaatgcaagtttcctgccatatctaaattgttttaaagtaaataaattaattactrtaagatatgggtcccccatagctattatcattattatcataattgtgatagtcacatgtacagtatcttggtggtgtttccaagtaaaatattctgaaaa

SEQ ID NO: 466358 - DNA, 201 bp, Homo sapiens
ttgggaggctgaggtgggtggatcatgaggtcaggagatcgagaccatcctggctaacacggtgaaaccctgtctctaccaaaaatacaaaaaattagccrggcatggtggtgggcgcctgtagtcccagctactcaggaggctgaggcaggagaatggcgtgaacccaggaggcggagcttgcagtgagctgggatcgtg

SEQ ID NO: 466359 - DNA, 201 bp, Homo sapiens
ctttaaaaattgctagattcaaggttcactatacactgtgaccataactaatttttttcaccaaagtactccctttccacatgccaaatcaggaaacattmataaccaagaaacacttgttttcttcttcttttcttttttctttctttcttttttttttttttttgagacagattgtttcttcgttgaccaggctggagt

SEQ ID NO: 466360 - DNA, 201 bp, Homo sapiens
gaggctgaggtgggtggatcatgaggtcaggagatcgagaccatcctggctaacacggtgaaaccctgtctctaccaaaaatacaaaaaattagccaggcrtggtggtgggcgcctgtagtcccagctactcaggaggctgaggcaggagaatggcgtgaacccaggaggcggagcttgcagtgagctgggatcgtgccac

SEQ ID NO: 466361 - DNA, 201 bp, Homo sapiens
atttttttcaccaaagtactccctttccacatgccaaatcaggaaacattcataaccaagaaacacttgttttcttcttcttttcttttttctttctttcttttttttttttttttgagacagattgtttcttcgttgaccaggctggagtgcagtggctcaatctcggctcactgcaacctccacttcccaggttccagc

SEQ ID NO: 466362 - DNA, 201 bp, Homo sapiens
tctttctttcttttttttttttttttgagacagattgtttcttcgttgaccaggctggagtgcagtggctcaatctcggctcactgcaacctccacttccyaggttccagcaattaacctgtctcaggctcccaagtagctgggattacaggcgcctgctaccacgcctggctaatttttttatttttttggtagagatgg

SEQ ID NO: 466363 - DNA, 201 bp, Homo sapiens
ggtacctaggggatcagctctgaaaaacactctgagcattaagtctctaatgagcattcttggtaaacaatatttctcatatgctgttacaacttgttaamtggagaaatgaggcatcaacgtgattataataagaaaatatttggaagcttgcaagtagtttactccagaccaaattaaatccagttgtaaataagactg

SEQ ID NO: 466364 - DNA, 201 bp, Homo sapiens
agacagggtttcaccatgttgcccaggctgatcttgaactcctgacctcaggtaatctgcctgccttggcctcccaaagtgctgggcttacaagccactgygcctggcctgtaagcaggaattttgtatgtaaagttcattaatgacagagcattccagaatagtggaagaaatcaaaagcactttaaaacatacagtaga

SEQ ID NO: 466365 - DNA, 201 bp, Homo sapiens
taatgcgtatttaaaaaacagaaagaataagtaagacctagcatgtgacagcacaacaggatgattatagtcagcaataatttaattgtacactttaaagyaactaagtataattggattatttgtaatacaaagggtaaatgcttgaggggatggacaccccattctccatgatgtaattattacaaattgcatccctgt

SEQ ID NO: 466366 - DNA, 201 bp, Homo sapiens
gggtccagccccgcatcctgtgccactaaggccgcgaggcgccggcggaaactcgggtcggcaccgcggggaggtccgggttcgccacaaccgcttcctgscggttcccttttccccttcccgagacacctggccggcacactcaccatttcccagtctccggtgtctggggtcctccctaaggaccttccgggacctgca

SEQ ID NO: 466367 - DNA, 201 bp, Homo sapiens
cttcacttgcactacaactgagtgaccccagaaagcagcccaccttgggttttatatcccaggatgtgatttgctggagcgttgaggaccattctgtttcragcagggactataacagagcctgggttgttctggccaatgtcaactgattatcaggatattgcattctcagcatattgtacagttatcgtgagaactacc

SEQ ID NO: 466368 - DNA, 201 bp, Homo sapiens
aacagagcctgggttgttctggccaatgtcaactgattatcaggatattgcattctcagcatattgtacagttatcgtgagaactaccagtaagaaagggrggaaaactgtgtcagtctgagactacctggaaaactgccctgcaccctgaaaactgaaggatcaggatatttgttgtgacagaggcacagacagtagcga

SEQ ID NO: 466369 - DNA, 201 bp, Homo sapiens
gttctggccaatgtcaactgattatcaggatattgcattctcagcatattgtacagttatcgtgagaactaccagtaagaaaggggggaaaactgtgtcartctgagactacctggaaaactgccctgcaccctgaaaactgaaggatcaggatatttgttgtgacagaggcacagacagtagcgatagagtgttcttgtg

SEQ ID NO: 466370 - DNA, 201 bp, Homo sapiens
ttgtgacagaggcacagacagtagcgatagagtgttcttgtgagccatctactagttttctcgaccgaagcatggcacctgactgcttttctctttccttwcaatggaaactgtttcagaatattttgagtttctgcgtatatagagttgcggcacatgatcactggaagtgtagactatctgcatggtcaaaggaaagag

SEQ ID NO: 466371 - DNA, 201 bp, Homo sapiens
gaggctgaggcaggagaatggcgtgaacccaggaggcggagcttgcagtgagctgggatcgtgccactgcactccagcctgggcgacagagggagactccrtctcaaaaaaaaaaaacaaaaaaaaccaaaaaaaaacaaaccatcgtttcagccccaaaactccttaggctgataagcaacttcagcaaagtctcaggat

SEQ ID NO: 466372 - DNA, 201 bp, Homo sapiens
aggagggtgtatgggacagcagcaaggggagcagcagcacaagaaacaaacaaggccactacttctgcctgcattaacggtaactactgtcttgggagtgyacaataattaatgttcacgtggctgccctaagcatacagtgatggtgaccagagcagatgcagtgacacagagatacagcctgattcttgctaattagga

SEQ ID NO: 466373 - DNA, 201 bp, Homo sapiens
gacaaccagtcacaatgagtaatttaatggtagctatgatagtggttatcaccactgctgtgagtattccttcaacaagggctgacacagagaacaattayacttactgggcatatttatcaatcttggctggtaataatgcctggatgtaatcactatgacacagttacacatgttttctgatctcagtttttaccataa

SEQ ID NO: 466374 - DNA, 201 bp, Homo sapiens
caagtgattctcctgcctcagcctcctgagtagctgggactacagacacccgccaacacacccagctaatttttgtatttttagtagagacagggtttcascatgttggccaggatggtctcgatctcttgaccttgtgatccacccacctcggcctcccaaagtgctgggattacaggcgtgagccaccatgcccagccg

SEQ ID NO: 466375 - DNA, 201 bp, Homo sapiens
ccatgttggccaggatggtctcgatctcttgaccttgtgatccacccacctcggcctcccaaagtgctgggattacaggcgtgagccaccatgcccagccrcatagggcttttttgagatggagtctcactctgtcaccaggctggagtgcagtggtgccatctcagctaactgcaacctccaactccccggttcaaacga

SEQ ID NO: 466376 - DNA, 201 bp, Homo sapiens
catgcccagccgcatagggcttttttgagatggagtctcactctgtcaccaggctggagtgcagtggtgccatctcagctaactgcaacctccaactcccyggttcaaacgattctcctgcctcagcctcctgagtagctgggattacaagcatatgccaccacacccagctaatttttgtgtttttagtagagacgaggt

SEQ ID NO: 466377 - DNA, 201 bp, Homo sapiens
agtacaattacaataaaaatcctaacaagtcatgttattttaaaaaaagaaaatttattctaacacctatatgaaaagccaaaagacccagatggtaatayaatattgaagaatcaattcacagaattgataccacctgacactaagacttaatgtaaagctatagtaatcaagacagtgcaatatttgggaaagaaaaga

SEQ ID NO: 466378 - DNA, 201 bp, Homo sapiens
catagggcttttttgagatggagtctcactctgtcaccaggctggagtgcagtggtgccatctcagctaactgcaacctccaactccccggttcaaacgaytctcctgcctcagcctcctgagtagctgggattacaagcatatgccaccacacccagctaatttttgtgtttttagtagagacgaggtttcaccatgttg

SEQ ID NO: 466379 - DNA, 201 bp, Homo sapiens
caacttagtctagggatccaacaaatttttaaatgaatagacaaaaattatgttaactgatgagaaacaaaacacagcctattaagctcatgtactatggyttataaagtatctgtgaaattctcagctccatgattccctgcaaaaaactgaaaatctaaagtatagacaccttctttaacaatgaaccactgataaaaa

SEQ ID NO: 466380 - DNA, 201 bp, Homo sapiens
aatgaaccactgataaaaatatatttgaaagcggctgggaaaataaagtgttctaacacatttttcgtattttatgacgttctttcccaggacgggtcctyctaagttttagaagggaactaggaaaattgcatacattctaatcttccttacatgtgttgggtttctctctaatttgagtttttaattttttcacgtgtt

SEQ ID NO: 466381 - DNA, 201 bp, Homo sapiens
catgacaccgtacaatagttatccaatttttatttgtgtaaaagaatccacattatacacatacatatatacacacacatatatataaatgacacagaccratgaagtttcatactaaacaagagaaaattataaaatgacaattattttaaaggaaggcaacaagtgggagtttactatataatcagcaatgttctacac

SEQ ID NO: 466382 - DNA, 201 bp, Homo sapiens
gatccgagggagatgcgggtctacagaggcagagctgcccagaaagggttccgggcctggccgaagcggcggggcagggacaagccaggcggcccggggtstggctgcgggtccagccccgcatcctgtgccactaaggccgcgaggcgccggcggaaactcgggtcggcaccgcggggaggtccgggttcgccacaaccg

SEQ ID NO: 466383 - DNA, 201 bp, Homo sapiens
cggggactgcctaatccggcgctccgctagaaaacccgaggcggcttccgggtgtgcccggcctttgtctctcgtgcccgcacgtgcgtgtctcggtcagyagccctgcgcttctccttcactctcggcggttcaggaggctctgccgcagccggggccctcctgtgacctgcatgtactgggggattcgcagggaggatg

SEQ ID NO: 466384 - DNA, 201 bp, Homo sapiens
ctctttattttgatcctaggtcactgcatgggtctcttgaaggcaacataccatcaggtcttgccttcttatggagcttgccattgtgcgccttttaagcrgggcatttagcctgtttacattcaagattagtattaatatgtgtggatttgatcctgtcatgttgttagctggttattatgctgacttgtttgtgtggtt

SEQ ID NO: 466385 - DNA, 201 bp, Homo sapiens; identical to SEQ ID NO: 29693

SEQ ID NO: 466386 - DNA, 201 bp, Homo sapiens
ctgaagtgcagtggtgcgatctcggctcactgcaagttccgcctcccgggttcatgccattctcctgcctcagcctcccgagtaactgggaccacaggcgyctgccaccacgcccagctaattttttgtatttttagtagagacggggtttcaccgtgttggccaggatggtctcgatctcctgacctcgtgatccacccg

SEQ ID NO: 466387 - DNA, 201 bp, Homo sapiens
ccactgctcaaggacattagaaaggacaaaatcaaatggaaaaacatttcatgctcatggataagaagaatccatatcgtgaaaatggccatgctgccccrtgtaatttatagattcaatgctatccccatcgagctaccactgactttcttcacagaactagaaaaaactactttaaatttcatatggaaccaaaaaaga

SEQ ID NO: 466388 - DNA, 201 bp, Homo sapiens
ggggcgcgatctcggctcactgaaagctccgcctcccgggttcacgccattctcctgcctcagcctccccagtagctgggactacaggtgcccgccaccamgcccagctaattttttgtatttttagtagagacggggtttcaccatgttagccacgatggtctcgatctcctgacctcgtgatctgcccgcctcggcctc

SEQ ID NO: 466389 - DNA, 201 bp, Homo sapiens
cgggcgcggtggctcacgcctgtaatcccagcactttgggaggccgaggcgggcggatcacgaggtcaagagatcgacaccaacatggtgaaatctccgtytctaataaaaatacaaaaattagctgggcgtggtggtgggcgcctgtaattccagctactcgggaggctgaggcaggagaatcgcttgaacctgggaggc

SEQ ID NO: 466390 - DNA, 201 bp, Homo sapiens
tggccatgctgccccgtgtaatttatagattcaatgctatccccatcgagctaccactgactttcttcacagaactagaaaaaactactttaaatttcatrtggaaccaaaaaagagcccacattgccaagacaatcctaagcaaaaagaacaaagctggaggcatcatgctacctgacttcaaactaaaatttaatttaa

SEQ ID NO: 466391 - DNA, 201 bp, Homo sapiens
ggcagaaccgattagcaagtcattgcgagagaagacagaaccacatggtggtgggcaatgtctgaacattctgctagtggtactaagtgcgatggtcacgkgcagagatgtgtttggaaagggtaggaaattattactcagaaaattgacacttgtggatccattaggtcaggcctttcaaggtggtttgatatggtttga

SEQ ID NO: 466392 - DNA, 201 bp, Homo sapiens
atttatagattcaatgctatccccatcgagctaccactgactttcttcacagaactagaaaaaactactttaaatttcatatggaaccaaaaaagagcccrcattgccaagacaatcctaagcaaaaagaacaaagctggaggcatcatgctacctgacttcaaactaaaatttaatttaattcaatttaagctctggata

SEQ ID NO: 466393 - DNA, 201 bp, Homo sapiens
acagggaacgggggacttgaaagcactataaaacagtgacaaccaacagacctctagagaacaccctaaacaacagaatccacgatattctcaacagctcrgaaaacattctccttgacagaccacctgtcaggccacaaaacaagtcttaacccatttttaaaaattaaaatcttatagattattatttatgaccaaaat

SEQ ID NO: 466394 - DNA, 201 bp, Homo sapiens
ttgtgtagttggatagcagtttataattccagtaaatgggcctaattcaataatataccacaaatcagtttgaaaccaggacatgccttcaagacacaccsaaatgcctatatatataataatactaagttacaattgatgtaaaaaataaaattacaaaaggattgttaaagtaaattcaaagggacatcaggcctaaaa

SEQ ID NO: 466395 - DNA, 201 bp, Homo sapiens
aaatgggttactactgaaaacacagctaccacctgcatggctatgaccaaaatagtaatattcatatacacagttttgtagtactattttcaagtaaactsttttgcaaacactgactgctacattgaagtacgttacattttgggtgaaatttttctaaaaataaataaatttcaagtgactcttatttgttttgattgc

SEQ ID NO: 466396 - DNA, 201 bp, Homo sapiens
aggcacaaagatttttttacagtagagtgtcagatggtttattctccgctttcctctcatgtaaaatgtttgtaaacagaaaaatattttggccgagcgcrgtggctcacgcctgtaatctcagcgctttaggaggccgagacgggcggatcacttaaggtcaggagttcgagaccaacctagccaacatggcgaaaccct

SEQ ID NO: 466397 - DNA, 201 bp, Homo sapiens
ccaaaaatacaaaaattagctgggcgtggtggcgggcgcctgtaatcccaactactcgggaggctgaggcaggagaatcgcttgaacccgggagtcagagrttgcaatgagtgagactgcatcattgcactccagcctggcgacagggcgagattccgtctccaaaaaaaaaaaaaaaaaaaaaaaaaaagaatatggttt

SEQ ID NO: 466398 - DNA, 201 bp, Homo sapiens
aatacaaaaattagctgggcgtggtggcgggcgcctgtaatcccaactactcgggaggctgaggcaggagaatcgcttgaacccgggagtcagaggttgcratgagtgagactgcatcattgcactccagcctggcgacagggcgagattccgtctccaaaaaaaaaaaaaaaaaaaaaaaaaaagaatatggtttgcttc

SEQ ID NO: 466399 - DNA, 201 bp, Homo sapiens
aacaattcaaaaatgggcacatagctccaacattttccccttggaattctccagttttcgtaattaagaaaaaatcaggtaaatggagaatgttaactgayttaagagccatcaattcagttatacaacctatgggagcattacagccagaattgccttctcctgctataattccaaaaaattggcctttaatagtcatag

SEQ ID NO: 466400 - DNA, 201 bp, Homo sapiens
attgccttctcctgctataattccaaaaaattggcctttaatagtcatagatttaaaagactgtttctttactatccccttagctgagcaagactgtgaayggtttgcatttacaattcctgcagtaaacaacctgcagcctgctaagtgttttcattgttttacagatgggtctagtaatggtaaagcttcttattctgg

SEQ ID NO: 466401 - DNA, 201 bp, Homo sapiens
cacctgggcctcccagagccaagaactagcagcggagactaacaggaagagccggctccggcgaaggagagacaaagcaaccgccaggcagatcccggaarccgccctctcctttccggcggcgcgcctgattgaacggtccccaccccagcgcccctgattggatggggcttcaggccccgcccctcaggccctgagtga

SEQ ID NO: 466402 - DNA, 201 bp, Homo sapiens
taaataagactgataatttatctttaataacaaacaaaacaattttaaaatttctattggataacaacaaagtgcaatggagtaagtggaaagatagtacrtgtgcttagaagaaactcaatgtcatcaagatatcacctctttcaaatagccttaaaaaattccatcaatccccaaaacagacactttattagcaactga

SEQ ID NO: 466403 - DNA, 201 bp, Homo sapiens
cgctgcccgccccgcccggcccggccctgaacagaagaggactgagccccggctacgccacggcgactcggtccgcaggttccggagccgatggcgtggargcccgagtcgcgccacagcaggtttcaaccagccctcttctccacttcgggaagccaggcgcagtccactcaccattcctcggcttcccgggtgtcctgg

SEQ ID NO: 466404 - DNA, 201 bp, Homo sapiens
tgctgttacaacttgttaactggagaaatgaggcatcaacgtgattataataagaaaatatttggaagcttgcaagtagtttactccagaccaaattaaayccagttgtaaataagactgataatttatctttaataacaaacaaaacaattttaaaatttctattggataacaacaaagtgcaatggagtaagtggaaag

SEQ ID NO: 466405 - DNA, 201 bp, Homo sapiens
gccaggttctttccctgcagtccttttctaaggcatggattctgccctgtgctgagacctggcgccccccgggggactttcccattcaagctcatacacargattatgtccatttatgagtaatatttgtgatatttacaattggaaacactatgatgacaattattctaaaatttcagatttcacaaccttcctggcctc

SEQ ID NO: 466406 - DNA, 201 bp, Homo sapiens
cagtcacccgggactctccgagaggcagcagacgggaacccagcaccccgccggccgcaaggagacaaaggccccgccagatccccaaggccgccccttcstctctggctgcacgcctgattggacagttctcacgctagcgccgctgactggatggggctccaggccccaccccctcaggtcttgagtgacaggaggtgc

SEQ ID NO: 466407 - DNA, 201 bp, Homo sapiens
caactactcgggaggctgaggcaggagaatcgcttgaacccgggagtcagaggttgcaatgagtgagactgcatcattgcactccagcctggcgacagggmgagattccgtctccaaaaaaaaaaaaaaaaaaaaaaaaaaagaatatggtttgcttcctcattaaccttatcaaagcctctcatttacgccccttctgtg

SEQ ID NO: 466408 - DNA, 201 bp, Homo sapiens
gaacattctgctagtggtactaagtgcgatggtcacgggcagagatgtgtttggaaagggtaggaaattattactcagaaaattgacacttgtggatccaytaggtcaggcctttcaaggtggtttgatatggtttgaatgaggaagaaaaggagccaggcctgtgttttctgttgagggtaggtggaaagctaggatgag

SEQ ID NO: 466409 - DNA, 201 bp, Homo sapiens
gaggcaggagaatcgcttgaacccgggagtcagaggttgcaatgagtgagactgcatcattgcactccagcctggcgacagggcgagattccgtctccaaaaaaaaaaaaaaaaaaaaaaaaaaagaatatggtttgcttcctcattaaccttatcaaagcctctcatttacgccccttctgtggaccccaaaccacaaac

SEQ ID NO: 466410 - DNA, 201 bp, Homo sapiens
aggcaggagaatcgcttgaacccgggagtcagaggttgcaatgagtgagactgcatcattgcactccagcctggcgacagggcgagattccgtctccaaaaaaaaaaaaaaaaaaaaaaaaaaagaatatggtttgcttcctcattaaccttatcaaagcctctcatttacgccccttctgtggaccccaaaccacaaacc

SEQ ID NO: 466411 - DNA, 201 bp, Homo sapiens
ggatgaacatgtgtcctggtattctgatctacagaaatcctgccctctcttaatgatccatccagagctctaggatcgtttctagatttatttactacacrcagactggaagtttttgacagaagctttgaactgggaaccctaccctgttccaccagcttctctagaagtacaatgttctaattactcctgagagactcc

SEQ ID NO: 466412 - DNA, 201 bp, Homo sapiens
ggcaggagaatcgcttgaacccgggagtcagaggttgcaatgagtgagactgcatcattgcactccagcctggcgacagggcgagattccgtctccaaaaaaaaaaaaaaaaaaaaaaaaaaagaatatggtttgcttcctcattaaccttatcaaagcctctcatttacgccccttctgtggaccccaaaccacaaacca

SEQ ID NO: 466413 - DNA, 201 bp, Homo sapiens
aggagtccgaccagcctggccaacatagtgaaaccctgtctctattaaaatacaaaagttagctagctgtggtggcctgcacctgtggtcccagtttactygggaggctgaggcacgagaatagcctgagcccaggggatgacagagtgagactgtctcaaaacaaaacaaaacaaaacaaacaaacaaaaaaaacgataa

SEQ ID NO: 466414 - DNA, 201 bp, Homo sapiens
tccacatccacatcacagagagagatagaacaatcccaaaggaccgtgaagggtgatgtggagagaccaaaaggatatgaacccacagcatctgccctacyatctgctccaatactaaccctgtcctttcccaacatgatttccagatttttctttggccctcactaagggtgattcagaaagacaaaaagttattaatgc

SEQ ID NO: 466415 - DNA, 201 bp, Homo sapiens
gcaggagaatcgcttgaacccgggagtcagaggttgcaatgagtgagactgcatcattgcactccagcctggcgacagggcgagattccgtctccaaaaaaaaaaaaaaaaaaaaaaaaaaagaatatggtttgcttcctcattaaccttatcaaagcctctcatttacgccccttctgtggaccccaaaccacaaaccat

SEQ ID NO: 466416 - DNA, 201 bp, Homo sapiens
caggtatttatttggcctttgacctgaagatacacatccttcaagtctgtttctttcatttaaaaaaatcctgaaaaagacagcccagaagaaacgcttayacaagatgtgggaaaatgaagtgagagatccatgaagaattgtcttccaaaagggagcaacattcccttacatgtatgagaatattgatacagccattat

SEQ ID NO: 466417 - DNA, 201 bp, Homo sapiens
agtctccctgagcatttggggtaagagtatttagaacgtttattttgccaaggttggggatgcatatgcatgacacagcctcaggatgtccttgatgacaygtgcccaaggtggtcagagcacagcttggttttgttggagagaaatgctcggtgccgcaaagtgaaaccagcactcaagcgaaagttttctcagcaacgc

SEQ ID NO: 466418 - DNA, 201 bp, Homo sapiens
accttttttccaataaggtaggtgcccttaggagtaaacttccgacttctccctcagaaaataaagaaaatagtggcacatgtgtccatacttttgggggyttgaaaaagactggtttctgtctcctattacacagagtactgaatggaatgatggtatactttgaccgacaggttggttctgttgagaccaataataaat

SEQ ID NO: 466419 - DNA, 201 bp, Homo sapiens
catgtaatctcagcactgtgggaggccaaagcagcagggtcacttgaggccaggagttcgagaccagcctggccaaggagtccgaccagcctggccaacayagtgaaaccctgtctctattaaaatacaaaagttagctagctgtggtggcctgcacctgtggtcccagtttacttgggaggctgaggcacgagaatagcc

SEQ ID NO: 466420 - DNA, 201 bp, Homo sapiens
attacaggcactggacaccacgcctgcctaattttttttttttttttttcgtagaaatggggtctccctcagttgcccaggctggtctctggtgcccaacrccgggctcccggtaatctctacaaataatccagtgaaggaatgccagagagtggaaagtggaggatgactgacaaaggacgcccgagtacgttttcactt

SEQ ID NO: 466421 - DNA, 201 bp, Homo sapiens
gttccacactgaaacactgtttcattagaactatatttctaaaaatgtgtattcataaattcttagtatttgaatgacagtaaaaattttttcttagggcygggcatgtggctcatgcctgtaatcccagcactttgggaggccaaggcgggcggatcacctgaggttaggagtttgagatcagcctggccaacatggtga

SEQ ID NO: 466422 - DNA, 201 bp, Homo sapiens
aatagtcatagatttaaaagactgtttctttactatccccttagctgagcaagactgtgaatggtttgcatttacaattcctgcagtaaacaacctgcagmctgctaagtgttttcattgttttacagatgggtctagtaatggtaaagcttcttattctggcttgaaaagtaaagtttttcagatgccctacacttcagc

SEQ ID NO: 466423 - DNA, 201 bp, Homo sapiens
tccccagtagctgggactacaggtgcccgccaccaagcccagctaattttttgtatttttagtagagacggggtttcaccatgttagccacgatggtctcratctcctgacctcgtgatctgcccgcctcggcctcccaaagtgctgggattacagacgtgaaccaccgcgcccggcctaatttttgtatttttattatag

SEQ ID NO: 466424 - DNA, 201 bp, Homo sapiens
ttttccagaatgtcacgggtgtccctgcatcttttctagaatgtcgcagtacccgcaagcaggtcatagggcaagagaagatgcagcagagtcatctggarcctccttgatcagaggacatgcagcagtggagacaagaccctgagctctgctaccagtggctcttaagacaaaggctctgctgaattgtagaatgctacc

SEQ ID NO: 466425 - DNA, 201 bp, Homo sapiens
aaactaaattcagtgatggatattcattaaatatccagatcatttccaaataagatgtaatgctaagacatttagttactaaatttgagttcatcttacayactttgggctttttatttcagaaaaacaaaatacatttagatgttggtaaatacattatgttccacactgaaacactgtttcattagaactatatttcta

SEQ ID NO: 466426 - DNA, 201 bp, Homo sapiens
acagaatgtcaggcagcaattagacctattaaaggaaaggcagatctaaatgaggaaaaagctttaagtgaatacattaaagcctgtgatggcattggggrgcacttatataaggccagcttccttgctcaggcaatggctggactaagggtaacaaaaaacacatgagtgttccccaggtcttgctataattgtggacag

SEQ ID NO: 466427 - DNA, 201 bp, Homo sapiens
aaatggattgaggcaggtttcaaccagccctcttccccactttgggaagccagccgcagtccaggaaggtcccaaaaggagtttatggcccactgccaaayggcacggtgggacttatactgggaaggtccaacttaaagggaattcaagtacatacaggagtagtggactctgattgctacggagaaattcaaattgtta

SEQ ID NO: 466428 - DNA, 201 bp, Homo sapiens
attaatggtttattagttattttcttttattactaagtctgaacttacactgctaccaatatcagagaaagtgcaggttttctaacataaacaaattgaasataaatggattgattagtctacaacatggctccctcccctatagctattaacaatacagtaatattctcatatgcagtttcttagtattgaatacagttt

SEQ ID NO: 466429 - DNA, 201 bp, Homo sapiens
tacctggataggggaggcgaggggttcccgacagggctccggccggcggaagtggcgcccgcaggtacagacaggatgcaggggttccgctgcccgccccrcccggcccggccctgaacagaagaggactgagccccggctacgccacggcgactcggtccgcaggttccggagccgatggcgtggaggcccgagtcgcgc

SEQ ID NO: 466430 - DNA, 201 bp, Homo sapiens
gaaccccgcacaccgagacaccgagtcggggctctcccgcatcaccctcccgtggtcaccacactacctggataggggaggcgaggggttcccgacagggmtccggccggcggaagtggcgcccgcaggtacagacaggatgcaggggttccgctgcccgccccgcccggcccggccctgaacagaagaggactgagcccc

SEQ ID NO: 466431 - DNA, 201 bp, Homo sapiens
cctcccgagtagctgggactacaggtgcctgctgccatacccggctaattttttgtactttagtagagacggggtttcaccatgttgcccaggctagtctygaactcctgagctcaggcaatccacctgccttggcctcccaaagtgctgggattacaggcgtgagccacggtgcccagtgacccagagttttctctgttg

SEQ ID NO: 466432 - DNA, 201 bp, Homo sapiens
tgctggaaccccgcacaccgagacaccgagtcggggctctcccgcatcaccctcccgtggtcaccacactacctggataggggaggcgaggggttcccgayagggctccggccggcggaagtggcgcccgcaggtacagacaggatgcaggggttccgctgcccgccccgcccggcccggccctgaacagaagaggactga

SEQ ID NO: 466433 - DNA, 201 bp, Homo sapiens
agctcctcccatgctggaaccccgcacaccgagacaccgagtcggggctctcccgcatcaccctcccgtggtcaccacactacctggataggggaggcgargggttcccgacagggctccggccggcggaagtggcgcccgcaggtacagacaggatgcaggggttccgctgcccgccccgcccggcccggccctgaacag

SEQ ID NO: 466434 - DNA, 201 bp, Homo sapiens
aaaattaaaggattggtactggatagaaaccctacaaatgtaataattttggaaagacttttgtgcaaaatatacacttcagagaacaccacagtatttaycctggagggaaattgtaccaatgtaaaacagttagcaaaacctttaactgatgcttaaattttgctcaacagagaatttctataggagagaacctctaca

SEQ ID NO: 466435 - DNA, 201 bp, Homo sapiens
tgatctctcttgctttttcccacatgaaataaaggtagaagagtctttagtcaatcatcacatctaaatagacataaggaaatctatattggagagaagtmtaaaatgtaaagaatggtaaacccattaactactactcaatccttacacatcagggaatccatactgtagagaaacctttgaaatggaaagaatacggca

SEQ ID NO: 466436 - DNA, 201 bp, Homo sapiens
ggagatgcaatcagacacggcgctgagtgaggccaggttctttccctgcagtccttttctaaggcatggattctgccctgtgctgagacctggcgcccccygggggactttcccattcaagctcatacacaggattatgtccatttatgagtaatatttgtgatatttacaattggaaacactatgatgacaattattcta

SEQ ID NO: 466437 - DNA, 201 bp, Homo sapiens
gtgcaccaaacaaccatgaaacaaaatttgccaatataacaaacctgcacacatactccctgaatctaaaataaacattggaaaagaaaaaataaataaaytgtaaataaattataggggaaaaagtttctctatctttatagttttggtaaactaaattcagtgatggatattcattaaatatccagatcatttccaaat

SEQ ID NO: 466438 - DNA, 201 bp, Homo sapiens
atacagaacagagaaccaaatactgcatgttctctcttatatgtgggagctaaatattgagtaaacatggacacaaagagggaacaaaagacactagggcsgactttagagtagaaggaaggcaagagtagaaactacctgttggatattatgctcattatctgcgtaatgaaataaataatttgtgcaccaaacaaccat

SEQ ID NO: 466439 - DNA, 201 bp, Homo sapiens
gaacccagggggcggaggttgcggtgagctgagatcgtgtcactgcactacagcctgggtgaaagagtgagactctgtctcaaaaaaaaaaggggggggcrgcaaaggacttgaagggacatttctcaaaagaagatatgcacatggccaacatgcatatggaaaaaagttcgacatcactaatcatcagagaaatgcaac

SEQ ID NO: 466440 - DNA, 201 bp, Homo sapiens
tgaacccagggggcggaggttgcggtgagctgagatcgtgtcactgcactacagcctgggtgaaagagtgagactctgtctcaaaaaaaaaaggggggggyggcaaaggacttgaagggacatttctcaaaagaagatatgcacatggccaacatgcatatggaaaaaagttcgacatcactaatcatcagagaaatgcaa

SEQ ID NO: 466441 - DNA, 201 bp, Homo sapiens
atctcaactaaaaatacaaaaattagctgggtgtggtggtgcatgcctgtgatcccagcttgggaagctgaagcaggaaaatcacttgaacccagggggcrgaggttgcggtgagctgagatcgtgtcactgcactacagcctgggtgaaagagtgagactctgtctcaaaaaaaaaaggggggggcggcaaaggacttga

SEQ ID NO: 466442 - DNA, 201 bp, Homo sapiens
gggaggctgatacaggcagatcacctgaggtcaggagttcgagaccggcctggccaacatggcgaaaccccatctcaactaaaaatacaaaaattagctgkgtgtggtggtgcatgcctgtgatcccagcttgggaagctgaagcaggaaaatcacttgaacccagggggcggaggttgcggtgagctgagatcgtgtcac

SEQ ID NO: 466443 - DNA, 201 bp, Homo sapiens
cataagccttggaggcttccgcttagtgttaagcctgcaggtgcatagaatacaagagttaaggaagcttggtagcttccacctaaatttcagatgtatcrggaatgtaggtgcccaggcagaagcctgacatgagtggaaccccacaggcagcctctactagggcagtgccaagagaaatgtgaggatgaagcccccaca

SEQ ID NO: 466444 - DNA, 201 bp, Homo sapiens
aatgactgggtaaataatgaaattaaggcagaaatgaagaaattaaggcagaaatgaagaaattatttgaaactaataaaaaaaaagataccgcatcccaraatctcttggacagagctaaagcaatgttaagagaaaagtttatagtgctaaatgcccagttcaaaaagttagaaaaatctcatattaaccacctaaggt

SEQ ID NO: 466445 - DNA, 201 bp, Homo sapiens
gggagactcacttgaacctaggatttcaagaccagcctcagcaacatagcaagaccctgtctctgttttaaaaaaaaaaaaagaaagaaagaaaaggagcmgggcgtggtggctcacagctgtaatcgcagcactttgggaggtcaaggcaggcagatcacttgaggtcaggagtttgagaccagcctggccaacatagtg

SEQ ID NO: 466446 - DNA, 201 bp, Homo sapiens
caccatgttgcccaggctagtcttgaactcctgagctcaggcaatccacctgccttggcctcccaaagtgctgggattacaggcgtgagccacggtgcccrgtgacccagagttttctctgttgtagcatgacaaatataaggatagctgatatacttaatactcatttttattgtgtgagtcaaatgagttattgcatct

SEQ ID NO: 466447 - DNA, 201 bp, Homo sapiens
aaaaatgagctctgaaatttaatcagtaataataaacctatcaaacagaaaagccaggaccagatggtttcacagctaaattctaccagatgtattaagargagctggtaccattccttctgaaactattctaagaaactaaagaggagaaactccttaactcattctatgacagccagcgtcatcctggcaggcatacaa

SEQ ID NO: 466448 - DNA, 201 bp, Homo sapiens
atttctgttgtattgtttgtaatacctcctgtttcatttcttttttttttttttttttgagatggagtctcactctgtcatccaggctggagtgcagtggygcaatctcagctcactgcaacctccacctgccgggttaagtgattcccctgcctcagcctcttgagtacctggaattacaggaatgtgtcaccatgccca

SEQ ID NO: 466449 - DNA, 201 bp, Homo sapiens
ccatcgtctgagatgtggggagcgcctctgccccgctgccccgtctgggatgtgaggagcgcctctgcccggccacgaccccgtctgggaggtgaggagcrtctctgcccggccgccccgtctaagaagtgaggagaccctccgcccggcagccgccccatctgagaagtgaggagcccctccgcccggcagccaccccgt

SEQ ID NO: 466450 - DNA, 201 bp, Homo sapiens
cgactcggtccgcaggttccggagccgatggcgtggaggcccgagtcgcgccacagcaggtttcaaccagccctcttctccacttcgggaagccaggcgcrgtccactcaccattcctcggcttcccgggtgtcctggcgtcagctagggatgtcccaatactcgcaggtcacagggtggcagaggctgctgcagagccac

SEQ ID NO: 466451 - DNA, 201 bp, Homo sapiens
cacattactagatttaatgttcactgtacacagtgcccatgcctgatttattcaccaaatcattcccttgccacattccaaatcataaatagcactgatgrtagggaaagacttctgtaattaactgaaatgtgttgtcattcttacctacagaagccaggttcctgcaggtttcctgcatcacttctctgtagagattct

SEQ ID NO: 466452 - DNA, 201 bp, Homo sapiens
gagcctttatatgtccttgcaaggaactgagacaactgaaagctttgccacattccatgcacacataaggtttctctccagtgtgagttctttcatggtartgaaggcaattggagtaacggaaggctttcccacagtgcttacattcatagggtttctctccagtatgagttctttcatggtcacgaaggtgactggaac

SEQ ID NO: 466453 - DNA, 201 bp, Homo sapiens
tgattgcttgtttttaagttcatgacatgctaagattccttcagaggactttatttcctctgctcagtgcaaattaccttatatctttcccaggtttttcraagtgatcttcaatattctggtctttccattggcttcctaaaatgcagacccataaaattatcatgaattattacaaactgtagacacattactagattt

SEQ ID NO: 466454 - DNA, 201 bp, Homo sapiens
tacattttgggtgaaatttttctaaaaataaataaatttcaagtgactcttatttgttttgattgcttgtttttaagttcatgacatgctaagattccttsagaggactttatttcctctgctcagtgcaaattaccttatatctttcccaggtttttcgaagtgatcttcaatattctggtctttccattggcttcctaa

SEQ ID NO: 466455 - DNA, 201 bp, Homo sapiens
aggtttcctgcatcacttctctgtagagattcttctgagaagaatctagcaaagcccattcctcctgggtaaagttcacagccacatcctcaaaagccacygagtcctagaacattccacacatgtggatagaaggatgggtgagactgacagcactgggaatctatactcaattcataagctgtttacatgatttgataa

SEQ ID NO: 466456 - DNA, 201 bp, Homo sapiens
aaacacttgttttcttcttcttttcttttttctttctttcttttttttttttttttgagacagattgtttcttcgttgaccaggctggagtgcagtggctmaatctcggctcactgcaacctccacttcccaggttccagcaattaacctgtctcaggctcccaagtagctgggattacaggcgcctgctaccacgcctgg

SEQ ID NO: 466457 - DNA, 201 bp, Homo sapiens
cattgtgggggcttgaatccaggtcgaagggtcaccagagcaacagttagagaatgtggaactagctggaggacgccagagtactcttaaagcaatccccrtggtaagtaagaaggggagctcggaagcatcagggtaacaatgggacaagtgtgggctctggttccttccaccttggagctttttcacactgatgatgag

SEQ ID NO: 466458 - DNA, 201 bp, Homo sapiens
cacatttattgcattgaaagtttttgctatgagtagttgctgagcataggtcaagtccattataacttgccttctgccctttccactcacccacaatttcycagtcattccttaagcgtaatttctcaagacaacatctttcatatcttctcagcatcactttttggaatgaaacttgcaggccctgctctggcaaaatgt

SEQ ID NO: 466459 - DNA, 201 bp, Homo sapiens
ccgcgggaccacttggacctcccagggataaggggaaggagcagcggagacgcaccgagctcgccacattcgcgctgcccaacacaaaagccgcgccaggkcccggaagctgctccctcctttcgcggcgcgcttgagagtacagtccccttcccagcgcccgattggacagggccttaggccccgccccttcagtcctga

SEQ ID NO: 466460 - DNA, 201 bp, Homo sapiens
tgaaggcttgatcacattgtttacattcatagggtttctctccggtatgagtacttctatggttacaaagggaactcaaacgactaaaggctttgccacaytgtttacactcatagggtctctctccagtatgaatgcttccatggtaacgaagggaagtggaacagctgaaggctttatcacatttggtacatttatagg

SEQ ID NO: 466461 - DNA, 201 bp, Homo sapiens
cttcccgggtgtcctggcgtcagctagggatgtcccaatactcgcaggtcacagggtggcagaggctgctgcagagccacctgggcctcccagagccaagractagcagcggagactaacaggaagagccggctccggcgaaggagagacaaagcaaccgccaggcagatcccggaagccgccctctcctttccggcggcg

SEQ ID NO: 466462 - DNA, 201 bp, Homo sapiens
tggtcacgggcagagatgtgtttggaaagggtaggaaattattactcagaaaattgacacttgtggatccattaggtcaggcctttcaaggtggtttgatmtggtttgaatgaggaagaaaaggagccaggcctgtgttttctgttgagggtaggtggaaagctaggatgagaattcagtttcaagggaaaagatttacat

SEQ ID NO: 466463 - DNA, 201 bp, Homo sapiens
tgaattaaaagaaattcaggaggaaatttaaaatttcttgagacaaatgataacagaaacaaaatataccaaaacctatgggatacagcaaaagcagtacraacagggaagtttatagttacaagtgcctacatcaaaaaagagggaaaacttcaactaaacaatccaacaatgcatcttacagaactagaaaagcaagcg

SEQ ID NO: 466464 - DNA, 201 bp, Homo sapiens
gaattcttggatgtgttttgatgtaatttttgattagacattttttcacatttactgcatctgtaaaacagtttttagtgtgaacactctggtgttttctraggtatattttttgaacaaatgttgtttctgcatttattacatttgtagggtttctctccaatacaaagtctttgaagttgaatacagtttgagcaactg

SEQ ID NO: 466465 - DNA, 201 bp, Homo sapiens
aatgaactcccattcacaatcactacaaagagaataaaatacctaggagtacagctaacaagggatgtaaaggacctcttcaaggagaactacaaaccacygctcaaggaagtaagagaggacacaaacaaatggaaaaaattccatcttcatggataggaataatcagtatcacaaaaatggccacactgcccaaagtaa

SEQ ID NO: 466466 - DNA, 201 bp, Homo sapiens
catgtgaaattggccaggcacagtggctcatgcttgtaatcccagcactttaggaggccaaggcgggtatatcacttgaggtcaggagcttgagaccagcytggccaacatggtgaaattccatctctactaaaaatacaaaaattagccaggcgtggtggtgtgcacctataatccttgctgctggggaggctgaggcaa

SEQ ID NO: 466467 - DNA, 201 bp, Homo sapiens
tggaggcccgagtcgcgccacagcaggtttcaaccagccctcttctccacttcgggaagccaggcgcagtccactcaccattcctcggcttcccgggtgtmctggcgtcagctagggatgtcccaatactcgcaggtcacagggtggcagaggctgctgcagagccacctgggcctcccagagccaagaactagcagcgga

SEQ ID NO: 466468 - DNA, 201 bp, Homo sapiens
gtgaaattccatctctactaaaaatacaaaaattagccaggcgtggtggtgtgcacctataatccttgctgctggggaggctgaggcaagagaatcacttsatcccaggagttggaagttgcagtaagccaagatcatgccaccgcactctagcctgggcaacagagtcagacccatctcaaaaaaaaaaaaaaattatat

SEQ ID NO: 466469 - DNA, 201 bp, Homo sapiens
tctcctgtgtgagttctctgatgtctttcaactgaattgagaaaataaaaagctttcccacatatcgtacatttataagctggatttccactgtgcattaycatgtgtcttctaacacctggaacagaaacgaagaatttcccacactgttcacatttatattgcttctctccatatggtttgtatcctgagtgagctagg

SEQ ID NO: 466470 - DNA, 201 bp, Homo sapiens
gaggtactaacacttctgacatcactctaaatcacagactttattatagggaataacccagtcaaaacaattagacaatttaatttcacgtttcaaagaaragagattgatggatcagtaggtataattctatttactgtatacttgtttctggtaatgacagtatttaagattgtgtgagcaaatatgattttatttttt

SEQ ID NO: 466471 - DNA, 201 bp, Homo sapiens
tctctactaaaaatacaaaaattagccaggcgtggtggtgtgcacctataatccttgctgctggggaggctgaggcaagagaatcacttgatcccaggagktggaagttgcagtaagccaagatcatgccaccgcactctagcctgggcaacagagtcagacccatctcaaaaaaaaaaaaaaattatatggagtcaaaga

SEQ ID NO: 466472 - DNA, 201 bp, Homo sapiens
gcgtggtggtgtgcacctataatccttgctgctggggaggctgaggcaagagaatcacttgatcccaggagttggaagttgcagtaagccaagatcatgcyaccgcactctagcctgggcaacagagtcagacccatctcaaaaaaaaaaaaaaattatatggagtcaaagaagacccaatatacccaagacaatcctaag

SEQ ID NO: 466473 - DNA, 201 bp, Homo sapiens
cgctgcctccctgactccaatgggcagcagtgaactccgctccccaagaatcagttacctctactttttttaatcgtaacacctccatttgtattacatayggtgtatgggtattgatgaggtcatggtattatatatgggatttttttctgtgtaaatcattaagtataagaagaaactatgtgactctgagccttgctt

SEQ ID NO: 466474 - DNA, 201 bp, Homo sapiens
tattatatatgggatttttttctgtgtaaatcattaagtataagaagaaactatgtgactctgagccttgctttagagaatttacagtggacaaataggtrtcatcaaaccagtttttaatcattctgactcaagtgaaaatgctcagaatttcacaccgtgaatccacgtttacaacccttacaggtgggccttcaggcc

SEQ ID NO: 466475 - DNA, 201 bp, Homo sapiens
atgatgacattgacctctttggatctgatgatgaggaggaaagtgaagaagcaaagaggctaagggaagaacgtcttgcacaatatgaatcaaagaaagcmaaaaaacctgcacttgttgccaagtcttccatcttactagatgtgaaaccttgggatgatgagacagatatggcgaaattagaggagcgcgtcagaagca

SEQ ID NO: 466476 - DNA, 201 bp, Homo sapiens
tatttccagagctctaggtgtttaggcagcgtgtggtgtctgagaggccatagcgccatcatgggctgatttttattaccaggtcccccagaagcaggtgrgaggctctgcttcctgctgccgctctgcagcctggacctgtggaccctggttgtaaagagtaaattgtatcttaggaaaccagtgtcacctttttttcac

SEQ ID NO: 466477 - DNA, 201 bp, Homo sapiens
tcctccgcctctcccgggggcggagtcacggtctgaaccctgggcgggcttggtccccggaaacatcgagttccttgaaacgagttctcaggagttggtgragacgctggccctttgctacatggttgtagaacacatgaatttccagttatgagtggttaggtcccatacccctggtgaggtggtcccttctttgcttct

SEQ ID NO: 466478 - DNA, 201 bp, Homo sapiens
gcacctctttaagttaaccctaaacccaggcaaaaatccttccaaagatctcccagggtcctggccagcttaaatccagggtcagttgtgctttcaaatgmgtggattcatgtgcagggaggtgtagctcttcccctcctgaactctggtcagggaaagggtagttcaggcttcaagttggcagttgggagttgagggtgc

SEQ ID NO: 466479 - DNA, 201 bp, Homo sapiens
tacatttcctgtaacggaagtgttaattttactgtactttttggtaccttttgggaatctaatgtattgtaaggtattttacacgtgtcctgattttgccmcaacctggatattgaagctatccaagcttttgaaataaaatttaaaaacccccaagcctgggtgagtgtgggatatgctgtgtgagacctcttgctcagg

SEQ ID NO: 466480 - DNA, 201 bp, Homo sapiens
gagatgcccatctcaagtgcattctgtcggaagggttctctgctggaaggcctttggttttagttgggattccatgagctttagcccaaaggtggcctccyatactagcatattttgtttctcagcaaatggacctgatccaccatttgatgtttgtcgcagtgaaggtgtttgggcagtcactgccctgagtttgtccta

SEQ ID NO: 466481 - DNA, 201 bp, Homo sapiens
tccctgctgcttcgcttctggagatgggcctcacgctgggactgcttgggcaggaagagcatgatcaaaggcttaagtgtgaggactgttttctaggtgtygaggtaaaccagctgtacttgaggtttgatgaaaattgggttgggaggttaagctggggtagaatttggagggggtgaaacacatgtttgtatctgtact

SEQ ID NO: 466482 - DNA, 201 bp, Homo sapiens
tgtgcatgtcaggattttctttagaaatacactggtctggtctaatttatttaagcaggagcactttaaagtatcccaccctaccccattccacccccagkggacagaaaggaaattgactgacttgaggggatgcagacatctgggttattccaacagaccagtggttaggaggagggggtgggtagcattatggcctcg

SEQ ID NO: 466483 - DNA, 201 bp, Homo sapiens
atgagtggattcatgtgcagggaggtgtagctcttcccctcctgaactctggtcagggaaagggtagttcaggcttcaagttggcagttgggagttgaggktgcggcctgcagtggcagggtgtggcaggttctgtttctgagcaggagttggcagccagataaggtgggacaggtggaactcctggaagtctctatcctg

SEQ ID NO: 466484 - DNA, 201 bp, Homo sapiens
acccctttctgttggaacaggtcctagaccagaaggagcacaggctggatggccgtgtcattgaccctaaaaaggccatggctatgaagaaggacccggtsaagaaaatcttcgttgggggtctgaatcctgaagccactgaggaaaagatcagggagtactttggcgagtttggggaggtgagtgtggctctgggaatag

SEQ ID NO: 466485 - DNA, 201 bp, Homo sapiens
actcactgattctcctctgtggtgaagtttttcttattccagagcctttctacctccttctacaaccaagtctttgtccacttccatccactttgagcacttttttttttttttttttttttgctttgagacagagtcttgctttgttgtccaggctggggtgcggtaacacaatcatggctcactgcaaccttgacctca

SEQ ID NO: 466486 - DNA, 201 bp, Homo sapiens
ctcactgattctcctctgtggtgaagtttttcttattccagagcctttctacctccttctacaaccaagtctttgtccacttccatccactttgagcacttttttttttttttttttttttgctttgagacagagtcttgctttgttgtccaggctggggtgcggtaacacaatcatggctcactgcaaccttgacctcat

SEQ ID NO: 466487 - DNA, 201 bp, Homo sapiens
tcactgattctcctctgtggtgaagtttttcttattccagagcctttctacctccttctacaaccaagtctttgtccacttccatccactttgagcacttttttttttttttttttttttgctttgagacagagtcttgctttgttgtccaggctggggtgcggtaacacaatcatggctcactgcaaccttgacctcatg

SEQ ID NO: 466488 - DNA, 201 bp, Homo sapiens
gctgggtactggatttcagcagtctcagtggaaacgatttgaattctaagaggacacctttcttaaagcatgactagtttgtgtggtctgcatgtgatttragtgctttgggcaaaacccaaagccggaggttatgttccggtttttgaggggatgaaaatacagattaagctgggagtgagagaatgtgctggagtggtt

SEQ ID NO: 466489 - DNA, 201 bp, Homo sapiens
cactgattctcctctgtggtgaagtttttcttattccagagcctttctacctccttctacaaccaagtctttgtccacttccatccactttgagcacttttttttttttttttttttttgctttgagacagagtcttgctttgttgtccaggctggggtgcggtaacacaatcatggctcactgcaaccttgacctcatgg

SEQ ID NO: 466490 - DNA, 201 bp, Homo sapiens
cggaagtgttaattttactgtactttttggtaccttttgggaatctaatgtattgtaaggtattttacacgtgtcctgattttgccacaacctggatattsaagctatccaagcttttgaaataaaatttaaaaacccccaagcctgggtgagtgtgggatatgctgtgtgagacctcttgctcagggtcgagggaggcgg

SEQ ID NO: 466491 - DNA, 201 bp, Homo sapiens
agcgtgtggtgtctgagaggccatagcgccatcatgggctgatttttattaccaggtcccccagaagcaggtgggaggctctgcttcctgctgccgctctkcagcctggacctgtggaccctggttgtaaagagtaaattgtatcttaggaaaccagtgtcacctttttttcaccttttaattttatattatttgcgtcat

SEQ ID NO: 466492 - DNA, 201 bp, Homo sapiens
cttgctcagggtcgagggaggcggggggggggtgccaggtgccctggacttggggctttctcctgcagcaggctcttccagctgcaggcccagttgtgggrgtatcctttaaggactgccctgcctagggctgagccccccttcaaagaaaggaatgagaggcctatggggagtgaggatggggcagtgatgagggcttac

SEQ ID NO: 466493 - DNA, 201 bp, Homo sapiens
tggcagcaggggctttggagtcagacaggcctggctcagccatgggagctacttgattttgagccttagacttcggggtcttaataacatgaggaaggcartctctgctgtcacggctggtgagggtcctgggaagatgcatatcaagcgcgtggcacagggcaaatgcttgtaaatagtagctgctatggttgttctcgt

SEQ ID NO: 466494 - DNA, 201 bp, Homo sapiens
cgtgtcctgattttgccacaacctggatattgaagctatccaagcttttgaaataaaatttaaaaacccccaagcctgggtgagtgtgggatatgctgtgwgagacctcttgctcagggtcgagggaggcggggggggggtgccaggtgccctggacttggggctttctcctgcagcaggctcttccagctgcaggcccag

SEQ ID NO: 466495 - DNA, 201 bp, Homo sapiens
gacagtgtaggagccactggcagcaggggctttggagtcagacaggcctggctcagccatgggagctacttgattttgagccttagacttcggggtcttartaacatgaggaaggcagtctctgctgtcacggctggtgagggtcctgggaagatgcatatcaagcgcgtggcacagggcaaatgcttgtaaatagtagct

SEQ ID NO: 466496 - DNA, 201 bp, Homo sapiens
ccccaagcctgggtgagtgtgggatatgctgtgtgagacctcttgctcagggtcgagggaggcggggggggggtgccaggtgccctggacttggggctttytcctgcagcaggctcttccagctgcaggcccagttgtgggggtatcctttaaggactgccctgcctagggctgagccccccttcaaagaaaggaatgaga

SEQ ID NO: 466497 - DNA, 201 bp, Homo sapiens
taggtcctgtttccctgcctacatggagccttccaagcctgtcttggggctccctctggtgctgtgcagcaggggtgggcagattgtgtgaggttggggaygaacaggaataggaacggctctgggtcagggctgtatgcttgaggctgttgcctgctgctgccccttggaatggcttgggtgcccagggcagagagagca

SEQ ID NO: 466498 - DNA, 201 bp, Homo sapiens
cctggttgagttcaatttggagggtagtggagatttaacatctttctaaggtgctccttgcagactctaagggtagctgtagacttcgtgagaactttgcyagggccagtcctttccaaaatcacagcttgcttacaagacttgttgccgtgtgtctcaccctaccatttcagaaaaatgttcgttggtggcctgagctgg

SEQ ID NO: 466499 - DNA, 201 bp, Homo sapiens
atgcatattatgatttcctttgatacctaaaactgtgaacttttgttagaatatgctttattttagtttcaaactcttaactctatgttgttaaaattctstatgttaatatctgatttttgaaaggaaggctctttgagcttcccaactgaagtctgaaaaggggttaaaatcaatgtaagtaaaaatcatttgcaatat

SEQ ID NO: 466500 - DNA, 201 bp, Homo sapiens
ttaagttttactttaaatttttttatctttcatttgtctttctttgtaatattttaattttatcctgctgtgaatattgaaatagtcataaagaaattaawtttaatgctacattcacttattgggcagcttcaataatttaagcactgcgctgtgcataagtgatacaaaggtgaacaagaccttgttcccagaatgttg

SEQ ID NO: 466501 - DNA, 201 bp, Homo sapiens
ggccaccgagccccggctcgcgctttcgccgtacttgaggcaaagggcggccccggccggcaggctgcttaggctagggtcgcccccaacgccggctgaamctactagcagcccggggacacccaccccgccgccgccgccgccgccacttcccgcgctgccgccgccgcctcctccaggcggcggcaacagcagccctgc

SEQ ID NO: 466502 - DNA, 201 bp, Homo sapiens
tagagggttacttaaaagtgatggcatgggtaacaaatctctgaatgcttaactgcttaacctctgaagacataaactctcgatatattgtgatctgaatytgaaggagctgtgctgacaatgttatttcctatgcacacgaatgtagctgacaagatcaatgtgtcccctgcaacccttagatgctccagccaggaattg

SEQ ID NO: 466503 - DNA, 201 bp, Homo sapiens
caaatatattgccagtatctatgaaaaagctatctattttaccctatgtattttatttactacatttcacacatctgtattctatatgaatctatctgtakatctatattcttatagttttatcattatcttgtttttatatatttttaactcatttaattgtatgcacattatctcaatattactgccatttcttttcct

SEQ ID NO: 466504 - DNA, 201 bp, Homo sapiens
tcacggcctcggctccctctcctcaactgtgtgggatcccgccgcctggtttcggccgggcggaggggtgacgtcagccgctcacacagtgccccctggcmgctggagctcgggaaatctgtgcgctcgaacttggctccgccaagaagctgggcaaggatccgggctcctgatggaactggcaagttggaaaagtggcaa

SEQ ID NO: 466505 - DNA, 201 bp, Homo sapiens
tcaggccagtacaatgcttcacaattgtaccagtctcctctgagctgcctcaggaggcttgctacagtcacaaacccattcaaaaaggattctcccttgtmcctttatttactttgtcccttgtgactctgcctttttagctagtactagctaactttagtactccccatattagagaaccaaaagacagtgaattactat

SEQ ID NO: 466506 - DNA, 201 bp, Homo sapiens
gatgtacccatactgtacatgtagtttgcaaatgttgcttgttgtgcattatgcatattatgatttcctttgatacctaaaactgtgaacttttgttagartatgctttattttagtttcaaactcttaactctatgttgttaaaattctctatgttaatatctgatttttgaaaggaaggctctttgagcttcccaactg

SEQ ID NO: 466507 - DNA, 201 bp, Homo sapiens
tccctttctgatgttcaggatgttgaaaataggacatggtgggtcttctggtgcaaagttcctgatttcctgggtcatttggtgggaggcgtgatcaactrtgcagactgcatgggatccagaaatctgtatctcatcactgtgacgtgggcatcgacaggcggctgagccgacctcccggcactgctggcgggggaacca

SEQ ID NO: 466508 - DNA, 201 bp, Homo sapiens
gaggctaacagatgacaatgtatcttagaaactattgattattagtgagtgtgactcataacagaggtgacagttttgtaccatggataggtttgcaaagkaaaagaaaaagcagagtgctccagcaagaattccttcagtttatttttgaagcataacagtcctgcaaggtgaaactgcttcaggcctcattgtcaggag

SEQ ID NO: 466509 - DNA, 201 bp, Homo sapiens
gataggtttgcaaaggaaaagaaaaagcagagtgctccagcaagaattccttcagtttatttttgaagcataacagtcctgcaaggtgaaactgcttcagrcctcattgtcaggagaaaatgtgatgcatgatttttataagagtgagcgcgagttgaaaactcagctgaaggagaagaatcaggaaaaatcgtgccccta

SEQ ID NO: 466510 - DNA, 201 bp, Homo sapiens
aacagagagccaagtcatgagtgacccattcacaattgccacaaagagaataaaatacctgggaatacaacttacaagggatgtgaaggacctcttcaggsagaactataaatcactgcttgaggaaataagagaggacacaaacaaatggaaaaacattccatgttcacggataggaagaatcaatatcgtgaaaacggc

SEQ ID NO: 466511 - DNA, 201 bp, Homo sapiens
tttaacaccccactgtcaatattagatcgataagacagaaaattaacaaagatatccaggacttgaactcagctatggaccaagcagacctaatagacatmtacagaactctccatcccaaatctacagaatatactttcttctcagcaccacatcgcacttattctaaaattgaccacataattggaagtaaaacactca

SEQ ID NO: 466512 - DNA, 201 bp, Homo sapiens
ccagtggtttagcaaataaaactttatttatcactaatgcttggtccaacgtggatgttgctagctgggcagctctcatgggtttctttgttcaagtagakgttctgggattcaggatccttctttttctttatgctattatcttcagcatgtctgttccagggttactgtgggaaggaaaatgattatagtaaatgcata

SEQ ID NO: 466513 - DNA, 201 bp, Homo sapiens
gcactcagattcataaagcaagttcttagtgacttacaaagagacttagactctcacacaacaatagtgggagactttaacaccccactgtcaatattagvtcgataagacagaaaattaacaaagatatccaggacttgaactcagctatggaccaagcagacctaatagacatatacagaactctccatcccaaatcta

SEQ ID NO: 466514 - DNA, 201 bp, Homo sapiens
gactttaagccaacaaagatcaaaagagacaaagaagggcattacataatggtaaagggatcaatgcaacaagaagagctaactatcctaaatatatatgyacccaatacaggagcactcagattcataaagcaagttcttagtgacttacaaagagacttagactctcacacaacaatagtgggagactttaacacccca

SEQ ID NO: 466515 - DNA, 201 bp, Homo sapiens
atatggaatgggcaaaagctggaagcattccctttgaaagccggcacaagacaagtatgccctctttcaccactcctactcaatgtagtattggaagttayggccagggtaatcaggcaagagaaaggaataaagggtattcaaatagaaagagaggaagtcaaattgactctgcagatgacatgattgtatatttagaaa

SEQ ID NO: 466516 - DNA, 201 bp, Homo sapiens
agttttctgcatatggctagccagttttcccaacaccatttattaaatagggaatcctttccccattgcttgtttttataatgttcatcaaagatcagatrgttgtaggtgtgtggcattatttctgaggcctctgttctgttccattggtctacatatctattttggtaccagtaccatgctgttttggttactgtagcc

SEQ ID NO: 466517 - DNA, 201 bp, Homo sapiens
taccaaattgtaaagaccatagatgctatgaagaaactgcatcaactaacgggcaaaataaccagctagcatcataatgacaggattaaattcaaacatamcaatattaaccttaaatgtaaatgggctaaatgcctcaattaaaagacacagactggcaaattggataaagactcaagacccatcaatgtgctgtattca

SEQ ID NO: 466518 - DNA, 201 bp, Homo sapiens
cctgtctattgcagtacggtgcccacatggagaatggacattatcacttgggtggcatggaggcattaaagttaatcttaaaagtaatttaagagccttttgggctttaggtacttgtgagaaaaaaaaatctcccactccctccatgggtgaaaagttgagattttcccagaaagattgttttgcaatacatgtacttaa

SEQ ID NO: 466519 - DNA, 201 bp, Homo sapiens
agaagcacctgctgctcctctccgagctgctgccggactggctcagcctccaccgcatccgcaccgacacctacgtcaagctggacaaggccgcggacctsgcccacatcactgcacgcctggcccaccagacacgtgctgaggaggggctgtgagcctgggggccactgtggacagacgtgggcttcagaagctcgctgg

SEQ ID NO: 466520 - DNA, 201 bp, Homo sapiens
gagctgctgccggactggctcagcctccaccgcatccgcaccgacacctacgtcaagctggacaaggccgcggacctcgcccacatcactgcacgcctggyccaccagacacgtgctgaggaggggctgtgagcctgggggccactgtggacagacgtgggcttcagaagctcgctggcctgggcccaccagcattttctt

SEQ ID NO: 466521 - DNA, 201 bp, Homo sapiens
gcaccgacacctacgtcaagctggacaaggccgcggacctcgcccacatcactgcacgcctggcccaccagacacgtgctgaggaggggctgtgagcctgsgggccactgtggacagacgtgggcttcagaagctcgctggcctgggcccaccagcattttcttttatgaacatgatacactttggccttcctttccccag

SEQ ID NO: 466522 - DNA, 201 bp, Homo sapiens
gtgtcctgggcgctctgccctccttggagccacccctgagcctccgcccggcccctccacacctgcagcctctggaggcagcttccccctcacagctctgrccctttccctgaccacctgcagtccttggtcagaaggggccccacatgcaccctccactgcctcccaggcctctggtgaccaggccctgagcacataggg

SEQ ID NO: 466523 - DNA, 201 bp, Homo sapiens
gcacgacggcgcccgccggcgagtccacgcccgcacgtcggcgcatgcgcgcggccaagccggtgcccgcgcccaccagcgcgcatgcgcgccccgtcccytccctccccccgtgctctgccccgatggttcggtccgcgccgggggcggggccagggcgcccgcgggaaatttggcgggaaccgcgcccgcctcttcctc

SEQ ID NO: 466524 - DNA, 201 bp, Homo sapiens
caggcttaagaggtggaagccttggtgatgagcttgacgcctcatctggcttcctccttggctggcggatccagagagttggtggcatttgccctctgtcyccagctgcagcctctaagcctggctctgccactagccccatgtggggagttggcctgggcaggcgatgctgcacactgggacactgcattgaccggcaca

SEQ ID NO: 466525 - DNA, 201 bp, Homo sapiens
ggcctgcctgcctgcctgacggcaccgtgtcccctgatccccctgaaggacaccatctctgagcttgcgtcatgcctgcaacgggcccgggagctgggggyaagagtccgggcgctgaaggccagtgcccaggatgctggggagtcctgcaccccagaggccgagggccgccctgaggagccatggtgagtgctgggtggg

SEQ ID NO: 466526 - DNA, 201 bp, Homo sapiens
cctggactcgtcccacagaggctgacggagcagccccccagctcacggcctcgcgcctcctgcagcgacggcagatcttcagccagaagctggtggagcaygtcaaggagcaccacaaggtgagcggcccccggccccgctgtgtgaagatggtggcaccagcactgcctcagcacctaaccctgtgcttggagcatccct

SEQ ID NO: 466527 - DNA, 201 bp, Homo sapiens
ctaccccaccagccaccccgcctgcagcctctcccagtgctctgaagggggtgtcccaggatctgctggagcgggtgagtcgtccccagtgatggcgggtrggcgcctggtgacctgctgcccactaaccaggtcccggtacctgctgcagatccgagccaaggaggcacagaagcagctggcacagatgacgcggtgccc

SEQ ID NO: 466528 - DNA, 201 bp, Homo sapiens
cccactgacacgccctgaaaagtgggagccacacgcgggatccggagaccgcgctaaagtcccacgcacgacggcgcccgccggcgagtccacgcccgcasgtcggcgcatgcgcgcggccaagccggtgcccgcgcccaccagcgcgcatgcgcgccccgtcccttccctccccccgtgctctgccccgatggttcggtc

SEQ ID NO: 466529 - DNA, 201 bp, Homo sapiens
ccccagcgcccctgagggccagaggcagatgtgggctgcaggctgcacagcccgagggtctctggctgcgggcggtgggccccttcatggggctcacctgrtggattcacattaaaccggtttctgtgggcacctctgtccttgctgctggtggggaagggaagccagatccagcaccccctggggggccatcgggagtgt

SEQ ID NO: 466530 - DNA, 201 bp, Homo sapiens
taggcgttttgaggagcgcaatgttggccagatcaaaaccgtgtacccggcctcctaccgcttccgccaggagcgcagtgtccccaccttcaaggatggcrccaggaggtcagattaccagctcaccatcgagccactgctggagcagggtgagtgctgggtgcgggacctcggtttccccatctgtgagccgcacagttt

SEQ ID NO: 466531 - DNA, 201 bp, Homo sapiens
gggctgtgagcctgggggccactgtggacagacgtgggcttcagaagctcgctggcctgggcccaccagcattttcttttatgaacatgatacactttggycttcctttccccagcgcccctgagggccagaggcagatgtgggctgcaggctgcacagcccgagggtctctggctgcgggcggtgggccccttcatgggg

SEQ ID NO: 466532 - DNA, 201 bp, Homo sapiens
agcggcttctgatccttcggggtcctctgcagagccaggagcaccaggtcttgtcatgagttcacccttggggtccctcccaccaggtttccagccccagyacccccgaggccccagacatcccagcctgcccttctccgggccagaagataaagaaatccaccccggcagcaggtcagccgccccacctgacatccgcgc

SEQ ID NO: 466533 - DNA, 201 bp, Homo sapiens
ggtgggcacctgtcgtcccagctactagggaggctgaggcaggagaatggtgtgaacccaggaggcacagcttgcagtgagcgaagatcgcaccactgcaygcactccagcctgggtgacagagcgagactccgtctcaaaaaaaaaaatttcaagactggagaggtgatcctgaattgtccagctacgccccatgtcatc

SEQ ID NO: 466534 - DNA, 201 bp, Homo sapiens
ccctgatccccctgaaggacaccatctctgagcttgcgtcatgcctgcaacgggcccgggagctgggggcaagagtccgggcgctgaaggccagtgcccargatgctggggagtcctgcaccccagaggccgagggccgccctgaggagccatggtgagtgctgggtgggcggccacgaggccccggcaaaggccgggttg

SEQ ID NO: 466535 - DNA, 201 bp, Homo sapiens
ggtgagtggccgggggtgggctgtggctgtcctggagttgggggtgggcccgggcctgcctcctgagccgcccccatcctcccataggcgttttgaggagygcaatgttggccagatcaaaaccgtgtacccggcctcctaccgcttccgccaggagcgcagtgtccccaccttcaaggatggcaccaggaggtcagatta

SEQ ID NO: 466536 - DNA, 201 bp, Homo sapiens
cctcgcccacatcactgcacgcctggcccaccagacacgtgctgaggaggggctgtgagcctgggggccactgtggacagacgtgggcttcagaagctcgstggcctgggcccaccagcattttcttttatgaacatgatacactttggccttcctttccccagcgcccctgagggccagaggcagatgtgggctgcaggc

SEQ ID NO: 466537 - DNA, 201 bp, Homo sapiens
gggcctactgcttctcatgaggctcctccctccctgacagtggcgagaaggcgcccgcctaccagcgcttccatgccctggcccagcccggcctgccgggrctcgtgctgccctacaagtaccaggtgctggcggagatgttccgcagcatggacaccatcgtgggcatgctccacaaccgctccgagacgcccacctttg

SEQ ID NO: 466538 - DNA, 201 bp, Homo sapiens
gcggccctgccccgacacaggcagcctggagaagctgggcaggacaagtaggacatccctggagcctccagaagggactggcctctgcccacaccttgacytcagtatttctgacctcctaaactctaataaagtcatgcttacagccactagatctgcagaagagccctcgcttgctcccctagaagatgggcccacatg

SEQ ID NO: 466539 - DNA, 201 bp, Homo sapiens
tggccgaggggcctgctgtggcgttggaggggtaggggcctactgcttctcatgaggctcctccctccctgacagtggcgagaaggcgcccgcctaccagygcttccatgccctggcccagcccggcctgccgggactcgtgctgccctacaagtaccaggtgctggcggagatgttccgcagcatggacaccatcgtggg

SEQ ID NO: 466540 - DNA, 201 bp, Homo sapiens
tctcccagtgctctgaagggggtgtcccaggatctgctggagcgggtgagtcgtccccagtgatggcgggtgggcgcctggtgacctgctgcccactaacyaggtcccggtacctgctgcagatccgagccaaggaggcacagaagcagctggcacagatgacgcggtgcccggagcaggagcagcggctgcagcgcttag

SEQ ID NO: 466541 - DNA, 201 bp, Homo sapiens
aaatccaccccggcagcaggtcagccgccccacctgacatccgcgcaggaccaggtgaggggcggggcctggggcagatgcgggagggctgagtggtgccsgcctgcctgcctgcctgacggcaccgtgtcccctgatccccctgaaggacaccatctctgagcttgcgtcatgcctgcaacgggcccgggagctgggggc

SEQ ID NO: 466542 - DNA, 201 bp, Homo sapiens
cctcatgatccgcccgcctcggcctcccaaagtactgggattacaggcgtgagccaccgcgcccagccagaaatagttttaaaaaaagaaataaggagcgygcggcccgcgggggaagcgcctttaccagctcgagcctgcagccccccaggccgcgccgtcctcggctcccccgggcagcgccggggttttgtcaggcgc

SEQ ID NO: 466543 - DNA, 201 bp, Homo sapiens
tccgagccaaggaggcacagaagcagctggcacagatgacgcggtgcccggagcaggagcagcggctgcagcgcttagaacggctgcctgagctggcccgygtgctgcggagcgtctttgtgtccgaacgcaagcctgcgctcagcatggaggtggcctgtgccaggatggtgggcagctgttgtactatcatgagccctg

SEQ ID NO: 466544 - DNA, 201 bp, Homo sapiens
ggtcaggctggtttcaagtgctgcccgtgcagggctggggcccagcaccagcctcagtgtcctcctctcctcccccaggggaaatggagaagcacctgctkctcctctccgagctgctgccggactggctcagcctccaccgcatccgcaccgacacctacgtcaagctggacaaggccgcggacctcgcccacatcactg

SEQ ID NO: 466545 - DNA, 201 bp, Homo sapiens
gggaggccttgtgctctccctccaagctgagcactgggcagaggctgagtgacttgcccgaggcggcccggctgggacgtaagcacaggcctacctcacaygcagtctgcccttgtctcagatgtgcccagggtcacccatctactccttctccccaggccttcctggcctccctgagccccgccatggtggtgccggagg

SEQ ID NO: 466546 - DNA, 201 bp, Homo sapiens
agccccccagctcacggcctcgcgcctcctgcagcgacggcagatcttcagccagaagctggtggagcatgtcaaggagcaccacaaggtgagcggccccyggccccgctgtgtgaagatggtggcaccagcactgcctcagcacctaaccctgtgcttggagcatccctgccactcacagcttctcccgggatggaactg

SEQ ID NO: 466547 - DNA, 201 bp, Homo sapiens
ctgctgcagatccgagccaaggaggcacagaagcagctggcacagatgacgcggtgcccggagcaggagcagcggctgcagcgcttagaacggctgcctgmgctggcccgcgtgctgcggagcgtctttgtgtccgaacgcaagcctgcgctcagcatggaggtggcctgtgccaggatggtgggcagctgttgtactatc

SEQ ID NO: 466548 - DNA, 201 bp, Homo sapiens
aggcagactcccctccacgcaggggaccagccccctggacactgcaggtgctggctggtgttgcaagggcactggctggtgttctgggccctgcctgctgygtgtccgtctgtgcgttcacagagcagtgggcagagggagcccagggcggaacgccaaagggactcacacccgggcacacagctcctcccaggggccctg

SEQ ID NO: 466549 - DNA, 201 bp, Homo sapiens
ccccatagtggtgacacgggtttctgaccagagtggaggttcggggcgtctgcatacctggaaccacagagaactcccgaggtgacactccgcacaccacrctagcccggcttcgcctgcaggaccccaggtgtggacaggcccagcaggatcagcaagaccgagccgggcaccgacagcccctcaccaagcgtctggagg

SEQ ID NO: 466550 - DNA, 201 bp, Homo sapiens; identical to SEQ ID NO: 353066

SEQ ID NO: 466551 - DNA, 201 bp, Homo sapiens
tttcccctggaggcagactcccctccacgcaggggaccagccccctggacactgcaggtgctggctggtgttgcaagggcactggctggtgttctgggccytgcctgctgcgtgtccgtctgtgcgttcacagagcagtgggcagagggagcccagggcggaacgccaaagggactcacacccgggcacacagctcctccc

SEQ ID NO: 466552 - DNA, 201 bp, Homo sapiens
cgtgctgacgccacatcgccagggccgcactccatgagcagcctctgccgtcccaccagcaacctaaaccacaggcagagcgaggctgcggcagccctgcrtgtgccggcgggacacgtctcgccacctgggctctgcccccaccccggccagtgtaagatatgattttagccacgttgagactgtgcaggtgggatggat

SEQ ID NO: 466553 - DNA, 201 bp, Homo sapiens
gctcctacaccatccacgcagagggagacgagagggggaccaaggtaagccactctgctcttggcaggtgggcggccgtgtgtccagtctaggccccccasggtggttacactggtgcatctttcccctggaggcagactcccctccacgcaggggaccagccccctggacactgcaggtgctggctggtgttgcaagggc

SEQ ID NO: 466554 - DNA, 201 bp, Homo sapiens
tgagccatgtttctagagggcacggtggaggagagctttcctcactctcaggctctaacccccaccctggtggccatggccttgacccttgggtcggctcyagccacaggctctgagctcatgcttggcctcgctgctcagtgcactgtccgtgctcggaagagagagagagaagctgggtggagggtgagctctgtcgtg

SEQ ID NO: 466555 - DNA, 201 bp, Homo sapiens
gagacgagagggggaccaaggtaagccactctgctcttggcaggtgggcggccgtgtgtccagtctaggccccccacggtggttacactggtgcatctttyccctggaggcagactcccctccacgcaggggaccagccccctggacactgcaggtgctggctggtgttgcaagggcactggctggtgttctgggccctgc

SEQ ID NO: 466556 - DNA, 201 bp, Homo sapiens; identical to SEQ ID NO: 353070

SEQ ID NO: 466557 - DNA, 201 bp, Homo sapiens
tgagctcatgcttggcctcgctgctcagtgcactgtccgtgctcggaagagagagagagaagctgggtggagggtgagctctgtcgtgtgttatggttacrggcctgctccgtgcggttcctgtggagggagatgaataattcatggccgaccactgctgggcctcgtcacactctaattggaggttgagctcagaggtgc

SEQ ID NO: 466558 - DNA, 201 bp, Homo sapiens
gaggctgagccaggagaattgtttgaacctgggaggcagaggctacagtgagctgagatcccactgttgcactccagcctgggcaacaagagtgaaactcsgtctcaggaaaaaaagaaagaaagaaatgcacaggtgcacaggaatgtgcttttcttttacatatgtgtactgaaatattgacaagtataataatgtgag

SEQ ID NO: 466559 - DNA, 201 bp, Homo sapiens
tctctttcgttaagcaatttaaaatattgctgtcttggaggtcagctgaacttaagaccagaaaaattattttatttatttatttatttatttatttattwatttttgagacagagtctcactctgccacccaggctggagtgcagtggcgtgatctcggctcactgcaacctccacctcctgggttcaagcgattctcct

SEQ ID NO: 466560 - DNA, 201 bp, Homo sapiens
ttgaatacagttaatttttactttttaaatattgtttaaaaataaagattagtagaattccttaaaactaaaatggtttcttaggtaaattgatttttttytttttctctttcgttaagcaatttaaaatattgctgtcttggaggtcagctgaacttaagaccagaaaaattattttatttatttatttatttatttatt

SEQ ID NO: 466561 - DNA, 201 bp, Homo sapiens
gaattgtttgaacctgggaggcagaggctacagtgagctgagatcccactgttgcactccagcctgggcaacaagagtgaaactccgtctcaggaaaaaaagaaagaaagaaatgcacaggtgcacaggaatgtgcttttcttttacatatgtgtactgaaatattgacaagtataataatgtgaggactgggattgcctt

SEQ ID NO: 466562 - DNA, 201 bp, Homo sapiens
gaaaaattccagaaatactttataagtttaaaattgtacaccattcttttttatttattttattattattttttgagatggagtctcactctgtcacccargctggagtgcagtggcacgatctcggctcccttcaacctctgccactcgggttcaagtgattcttgtgcctcggcctccggcgtagctgagattacaggc

SEQ ID NO: 466563 - DNA, 201 bp, Homo sapiens
actcaagcgacccttccacctcatcctcctgagtaggctgggaccatggaggcgcacaccaccatgccccgccaggttttaattttttctttttgtagacrcagggtctccctgtgttgcccaggcttgttttcctttctggtcactctgttacttgtttgccacagtgtccgcatggactcacttgagtataggcaatgg

SEQ ID NO: 466564 - DNA, 201 bp, Homo sapiens
catgagtgcatgatgaaacttcgaacctgtcagcctgacaagtggcaatttaatacttaagatattgtagtctccccttacctgcagttttgcttcccatrgtttcagttacccgtggttaactgtggtttgaaaatactaaatgaaaaattccagaaatactttataagtttaaaattgtacaccattcttttttattta

SEQ ID NO: 466565 - DNA, 201 bp, Homo sapiens
tattgatcattcttgggtgtttctcggagagggggatttggcagggtcataggacaatagtggagggaaggtcagcagataaacatgtgaacaaaggtctytggttttcctaggcagagggccctgccgccttcctcagtgtacagtccctgggtacttgagattagggagtggtgatgactcttaacgagtatgctgcct

SEQ ID NO: 466566 - DNA, 201 bp, Homo sapiens
ttagaattctctactttttacatcatagaaaaactcaacgtaatagtgatttggaacatgttcacagtaagaactagagagttttgttttctcaattaacrtcagaagcattagaaccagaacgacttccttctgaatggaggaaggtaaaacgaggccgagacccgctgggctgcattcccacgaggttaggcattctta

SEQ ID NO: 466567 - DNA, 201 bp, Homo sapiens
gcgtgatctcggctcagtgtagtctctgcctcccctgggttccagcgattcttctgcctcggcttcccgggtagctgggattacaggcatgccctgccatrccctgcccagttttcaagtccttcacttattttgttaaattattcctccaagtattttattctttgtatactatgacgaatggaattgttgactttatta

SEQ ID NO: 466568 - DNA, 201 bp, Homo sapiens
tgggtagataaagccaaaatgcaaaggattgtatgaagtggatagggaaatgaggaagcagaggcaacatgtatagaccttttaaaaaagttttggtaaasaggaagaagagtaggaaatctgttcttcagtgggatcagagaaagacctatgagtggaaggagggaggaagaagatgcagtaaagagaagataattgata

SEQ ID NO: 466569 - DNA, 201 bp, Homo sapiens
gatcttcaggcttgtgattcagagtctggagaggagcaattgtgattgctttacccttccagaaaagtatttgaatacagttaatttttactttttaaatrttgtttaaaaataaagattagtagaattccttaaaactaaaatggtttcttaggtaaattgatttttttctttttctctttcgttaagcaatttaaaata

SEQ ID NO: 466570 - DNA, 201 bp, Homo sapiens
acttaacagctgctgggttctttttagattcatggtgttgttttaatagtattgagggcccacattttaaagatatttttaggccgggtgtgatggctcaygcctgtattcccagcactttgggaggccgaggcgagcggatcacgaggtcaggagatcaagaccatcctggctaacatggtgaaaccccgtctctactaa

SEQ ID NO: 466571 - DNA, 201 bp, Homo sapiens
aggagaatcacttttactcaggaggcggaggttgcagtgaaccgagatcaccccactgcactccagcctgggcaacagagagaggctccatctcaagaaaygtaataaataaataaatatatttacattttttattctgtttctatagtcaccatcaatttacatatttctcaatatacttcgtaagtgtaaacataaagg

SEQ ID NO: 466572 - DNA, 201 bp, Homo sapiens
gcacggcgtcagcctctgcagcgtgtttctgcctggtgtgtgggtgagggaaacctaagtccgccaggaaatcgccttattgtcacctcgcactcttatcytcaatgaaagaagtttgaagattgagtgtcctacaaggtcagacgtactgttttttagaaaactcgtgtatgaaaagtcaaacttatttttgcctccgga

SEQ ID NO: 466573 - DNA, 201 bp, Homo sapiens
aaaccttgagctagacacagagtgctgattggtgtatttacaatcctttagctagacataaaggttcttcaagtccccaccagattagctagatacagagygctgattggtgcatttacaaaccttgagctagacacagggtgctgattggtgtgtgtacaatcctctagctagacataaaagttcttcaagtccccacta

SEQ ID NO: 466574 - DNA, 201 bp, Homo sapiens
catttacaaaccttgagctagacacagagtgctgattggtgtatttacaatcctttagctagacataaaggttcttcaagtccccaccagattagctagayacagagcgctgattggtgcatttacaaaccttgagctagacacagggtgctgattggtgtgtgtacaatcctctagctagacataaaagttcttcaagtc

SEQ ID NO: 466575 - DNA, 201 bp, Homo sapiens
tcacttattttgttaaattattcctccaagtattttattctttgtatactatgacgaatggaattgttgactttattacatttttatattgttcattgctrgtgtatagaaatatacctttttgataagttttttatatcctgggatcttgctgacctcaatagctcttaggatgtttttgtagatttcataggattttct

SEQ ID NO: 466576 - DNA, 201 bp, Homo sapiens
acacagtgaaaccccatgtctactaaaaatacaaaaattagccgggtgtggtggcatgcacctgtagtaccagctactcaggaggctgacacaggagaatygcttgaacctgggagggggaggctgcagtgagcagagatcatgccactgcacttcagcctgagcaacagagtgagacttcgtctcaaaaaataaataaat

SEQ ID NO: 466577 - DNA, 201 bp, Homo sapiens
tcagcattccacaagttaacttcctccttcctttgttctcctctacctttgcctcttttaaaaagttctaagttgctagccagtcgggacaaataacagawtgtgaggtcccgttccagccaatggaaaccagacacagcagtagggtggacttgtcagattataaatgactctgtctcctttgttcggtgtactctcgtg

SEQ ID NO: 466578 - DNA, 201 bp, Homo sapiens
acctttaattcaaacactttggaaagccaaggcaggaggatcacttgaggccaggagtttgataccagcctgggcaacatagtgagatcctgtctctaccmaaaaaaaagtacattctaaaactgtagatacaatatagtctcataacaaataggagctaagctgttaatgattgtttctttttttaaaaaaaggattagt

SEQ ID NO: 466579 - DNA, 201 bp, Homo sapiens
cggatcgcctgaggtcgagagttcgagatcaggctgaccaacatggagaaaccccgtctctattataaatacaaaattagccgggcatggtagcgcctgcycgtaatcccagctacttgggaggctgagccaggagaattgtttgaacctgggaggcagaggctacagtgagctgagatcccactgttgcactccagcctg

SEQ ID NO: 466580 - DNA, 201 bp, Homo sapiens
cgctaaaatggtattttaagattgccagttaatgtatcttacagtgcggtgattttatgttttgaaaaccctcagaattttccccttatcatcgtgagttyattgattttttaactctggtttctggaacatattaaaatttcaaattcctcattagttgctttgggtattggataccagagatccgtggaatgttagtag

SEQ ID NO: 466581 - DNA, 201 bp, Homo sapiens
ccttaccttcctccttacctgcccgagcctcaactcagggtcagcagcctccacggagccagccccacctgcccgaaaaccactgaagccaccctccgccyggactcaacagccgccagcaagctcgcctggcagtgcccctggagcaccattgtcgctggggagggagagccgggaagggtggagaaggaggcagaaggg

SEQ ID NO: 466582 - DNA, 201 bp, Homo sapiens
gtgtgataaaattaagccaaatcaacagcccatttcgtgcaaaatcagggtcgagtctgtgtgaaagacatctcttgggtttttaaaaggcttttctatamaaaagattttaattttttgttttttaactgtgctgagtgattcgaaatgggtttattctaagaaagcctgtttcacaagcatttgtacatgatttgtcgg

SEQ ID NO: 466583 - DNA, 201 bp, Homo sapiens
ttgatttagcttaaaagaaaacgtaagacatggtttcattagcttgaaccttatctttgtaaagccatgcatttaccttgtttattcctggttatgttttyatctcacagcctattcaaaaagattttgaataattatttcaaaactttttgcaactttaataatcttaaataaccttaaaatatttaggtaaatacggca

SEQ ID NO: 466584 - DNA, 201 bp, Homo sapiens
cgtccccatgaggctcgtcctgggaacattatggggaggaacggagcctaatcctgtcagcgcagcctggggattaggacccggagttgccaaggtgtcascactctttgctcttgaattgattaaaaagtctaatcaaatgcatatattttcttcaaacaagttttacccgaaagtttgttgaaagaggctaaatcaggg

SEQ ID NO: 466585 - DNA, 201 bp, Homo sapiens
tactgtggcaagaaaagatttaaaggaaacatgttgtagttttctttttaatgattggcattgctaattgtgattgagctaaaaattatgaataactgatwattggttttcagcttcgaaaggcaaggaggaagcttatctatgaaaaagcaaagcactatcacaaggaatataggcagatgtacagaactgaaattcgaa

SEQ ID NO: 466586 - DNA, 201 bp, Homo sapiens
ccgggtagcccctctcacacggccgtggccgcaacctcagccctcctcgcacctcccttcgcagctcacgccccctcccgtggggtgtcctggcctccgcytgccgagctcggcagtcagcagagccccggccatcctcctccggccgtccggtccccactggtccctggctagccacttttcgtaagctagagcactcca

SEQ ID NO: 466587 - DNA, 201 bp, Homo sapiens
gaggcactagcacataaggaggcgccttattgggattgaggatgaggtgaatgttcttggcaagatttacttcctaactgtactgagtaattgcttagctmcctaatgttacaatctgaaggtagtggggttttttggtgggggatgtaattgcatactgtggcaagaaaagatttaaaggaaacatgttgtagttttctt

SEQ ID NO: 466588 - DNA, 201 bp, Homo sapiens
agtgggggcagagcccatgaccaatgggttctgtgtgtccaagtgtgtctgaccgtcaactccatgactagacagagactgtggttggctggctggctgaygaagcttggctctgtgactctgtttgactgacactccaacacatactgtctctggctgtccatctgttcagctgtctcgctgttagaagcaagtcatatt

SEQ ID NO: 466589 - DNA, 201 bp, Homo sapiens; identical to SEQ ID NO: 209948

SEQ ID NO: 466590 - DNA, 201 bp, Homo sapiens
atgaagttgtccaagacagggagggtggtgagattccccggagaaagaagggagtctgggagaatcatttgcctatgaggagacacagaacaggtaggacrtggagtgtccctggagaagggaatctgggagatttgtcctttcacaggactgtaagggacaggttgggcatgggctccccctggaggagggagcctggga

SEQ ID NO: 466591 - DNA, 201 bp, Homo sapiens
cgtctcctaactgcccccaccctgtgcctttcctctcctgcttttctccctcacctgcccaccccactggacgtgcagacctcacattactcttgggtccrtgtctctttccaccgtgcattttcccgaagtctgtctgtctcgtgtcatgtatgtgcctgactctctggagtaagggcatctatctgtcctgggcttcct

SEQ ID NO: 466592 - DNA, 201 bp, Homo sapiens
agcccccggacctgggcaggactttgttggcggcctctcgccgggtggggatgagatggggggcgcggaggatacaggacaccccccctccccgtgccgcygcatccatacaaggagagatgcacacggcccccaagtgtcacagaatccccctctctgccctccactcagagcgactctaccttggaaaccagggattcc

SEQ ID NO: 466593 - DNA, 201 bp, Homo sapiens
agagatggagtggaaaatccaggttttacttgtgttaattatttcacttcattattgtttaggtagaatttgcaagacttcttaattttttttttttttttgagacaaggtctgtcacccaggctaaagtgcagtggtgtgatcacggcccactgcagcctcacattcctgggctcaagccatccttctgcctcaacctcc

SEQ ID NO: 466594 - DNA, 201 bp, Homo sapiens
aggttagagcattgcaaggctgggagtctgataagatttgtgtctggctgttagagggtgcaggtctgtgaagtcgggcctctgatggtggctggctttgkccgtctggccacgtgagcctgcagggccatgccatattataggatagctcatgcatccatttgagccacataagactaactgcctgagggtggatgtctg

SEQ ID NO: 466595 - DNA, 201 bp, Homo sapiens
catggagtgcttgatccctacagagctgccggtggctgcagaaggtggcccggagcctggcactggccctgctgtgccttgtgctgtccacttgcgtgggyccctacctcttcccgtacttcatccccctcaacggtgaccgcctccttcgcaagtgagcacagccttcgaggcccctgcccagcaatgagggggttgggt

SEQ ID NO: 466596 - DNA, 201 bp, Homo sapiens; identical to SEQ ID NO: 209958

SEQ ID NO: 466597 - DNA, 201 bp, Homo sapiens
atccgtgggggtctgcaatggccacctttagccgccaggaatttttccagcagctactgcaaggctgtctcctgcctactgcccagcagggccttgaccaratctggctgctccttgccatctgcctcgcctgccgcctcctctggaggctcggtaagtgcctgccataccgtgtgccaccatgccaggccatatcagacc

SEQ ID NO: 466598 - DNA, 201 bp, Homo sapiens; identical to SEQ ID NO: 209973

SEQ ID NO: 466599 - DNA, 201 bp, Homo sapiens
ctgctgtgccttgtgctgtccacttgcgtgggcccctacctcttcccgtacttcatccccctcaacggtgaccgcctccttcgcaagtgagcacagccttygaggcccctgcccagcaatgagggggttgggtagggacccgcggtttccccagttctgagcctgtctcttaatgcttctttctgtcttctgttactacag

SEQ ID NO: 466600 - DNA, 201 bp, Homo sapiens
ccttgcagcccccggacctgggcaggactttgttggcggcctctcgccgggtggggatgagatggggggcgcggaggatacaggacaccccccctccccgygccgccgcatccatacaaggagagatgcacacggcccccaagtgtcacagaatccccctctctgccctccactcagagcgactctaccttggaaaccagg

SEQ ID NO: 466601 - DNA, 201 bp, Homo sapiens
gtagtgaccagagctctgggtcagggacagggaagggcatatctggatacctgccgaccttaaatgaagatgaggaatggaagtgtgaccaggacatggaygaggacgatggcagagacgctgctccccccggaagactccctcagaagctgctcctggagacagctgccccgagggtctcctccagtagacggtacagcg

SEQ ID NO: 466602 - DNA, 201 bp, Homo sapiens
gctacagtttctgctccgggaaaggtgttggcattaaaggtgagacttcgacggccactccgaggcgctcggatctggacctggggtatgagcctgagggyagtgcctcccccaccccaccatacttgaagtgggctgagtcactgcattccctgctggatgaccaagatgggataagcctgttcaggactttcctgaagc

SEQ ID NO: 466603 - DNA, 201 bp, Homo sapiens
gtgtcgtcctggacgtccagcccacagccctcctcgctgtgtcctcttgtcatcctggatgtccagcccacagccctcctcactgtgcccttctctcatccgggacgtccagcccacagccctcctcactgcgccctccttggtcttctgggctccgtagccagaccctgttctctccctagggcagggaggcttctgtct

SEQ ID NO: 466604 - DNA, 201 bp, Homo sapiens
tgtcgtcctggacgtccagcccacagccctcctcgctgtgtcctcttgtcatcctggatgtccagcccacagccctcctcactgtgcccttctctcatccgggacgtccagcccacagccctcctcactgcgccctccttggtcttctgggctccgtagccagaccctgttctctccctagggcagggaggcttctgtctg

SEQ ID NO: 466605 - DNA, 201 bp, Homo sapiens
cacactgccctgccagctcctggagagaagcagagtgtgcagccttggcatctcctatctttccgtggggcactggttgtcctggctgcccactgtgcaaycctgaaatgtttttggtccatttagcaatgccctccaaggcaggcacactgcacagtggtctaggccacaagcaggggccagcaaacgtttcccgtgcag

SEQ ID NO: 466606 - DNA, 201 bp, Homo sapiens
cgtttggctgctgggctccagcatccccccatggggaaacccagagttgctgggtttgtccgtccaggggatgtgggtttttgcgagaagctgtggagacrgagtgaaggcccagaggcaggttgggtgctgggccctgtcaggatgtcagagtagaaaccaccatcaaggtcgcccagtgtaccccggtggaggtgtcca

SEQ ID NO: 466607 - DNA, 201 bp, Homo sapiens
ctgggtcctcctttctgagggcccgtgtaaatatgtacatttctcaggctaggccagcaggggctgcccgagtctgtttttcatgcgatgacacttgtacaattaattatcttttcaaaggtacttggataataatgaaataaaactgtttttgaacctgccctggctgtggtgtgtctgctgcgggtggggcctggccta

SEQ ID NO: 466608 - DNA, 201 bp, Homo sapiens
ctgcccagcaccgccacaggctgtccccagctcgcagtgctcgctcatctccccaggcatcccatgtcaccagagtccaaggtgctgggctgcctgccccsctcccatcttgtcaaagggcctttcctggtgtaagtagaactggggctttccctaggttctgttcatcaggtggatggctggaagctgcgctggtccctc

SEQ ID NO: 466609 - DNA, 201 bp, Homo sapiens
tgggtcctcctttctgagggcccgtgtaaatatgtacatttctcaggctaggccagcaggggctgcccgagtctgtttttcatgcgatgacacttgtacaattaattatcttttcaaaggtacttggataataatgaaataaaactgtttttgaacctgccctggctgtggtgtgtctgctgcgggtggggcctggcctag

SEQ ID NO: 466610 - DNA, 201 bp, Homo sapiens
gggtcctcctttctgagggcccgtgtaaatatgtacatttctcaggctaggccagcaggggctgcccgagtctgtttttcatgcgatgacacttgtacaattaattatcttttcaaaggtacttggataataatgaaataaaactgtttttgaacctgccctggctgtggtgtgtctgctgcgggtggggcctggcctagg

SEQ ID NO: 466611 - DNA, 201 bp, Homo sapiens
ggtcctcctttctgagggcccgtgtaaatatgtacatttctcaggctaggccagcaggggctgcccgagtctgtttttcatgcgatgacacttgtacaattaattatcttttcaaaggtacttggataataatgaaataaaactgtttttgaacctgccctggctgtggtgtgtctgctgcgggtggggcctggcctaggt

SEQ ID NO: 466612 - DNA, 201 bp, Homo sapiens
ttttccctttgcacccacagtggtgaagacctgtgcttatgctcctagagagacgcaggtgagaacccaagtcacacccctcagtgttttgttttgttggkgtgtgtgtgtgtgtgtgtgtgtgtggtggagtctcactctgttgcccaggctggagtcagtggtgtgatctcatctcactgcaagctccgcctcccgggt

SEQ ID NO: 466613 - DNA, 201 bp, Homo sapiens
agggcaaggctgtgtctggataacactttgaggttggaatccactttccacctcatattcccagctatgagagggtttaacccttcgtgggttggaatccrccttctacctcatattcccagctatgagagggtttaacccttcgtgggttggcatccgccttctacctcatattcccagctatgagagggtttaaccctt

SEQ ID NO: 466614 - DNA, 201 bp, Homo sapiens
gaactctctcaaatttgcacgtgtgtgttaagggatgtggagggatgctgtgaagcttgacctgtttctaaatttctccatgaaaccatcacagcgaagcrtcataattttgtgtaacttttctgtttagattttatccgcccctatgttgcattattggtgttgtcatcttaccttgctggaatccttttaaagcattta

SEQ ID NO: 466615 - DNA, 201 bp, Homo sapiens
ggatgtcctgatgttcttcatggggatgcccggggctggccgaggcctgctgacccatgaggcctcccggctgagtcccctgttcccctttctctgcagcygagccccagctcaagatgggatgtcccagcggccccatgccaccctcagaggcccagagacccaccttggtcacctgcattgaaggggccgggggtgaca

SEQ ID NO: 466616 - DNA, 201 bp, Homo sapiens
tagctccccatgagactgcgtttatacagaattctagaaaaggccgactgacctcgagcgacaggtggatttccccaagggaagcctccccaggcttccgrgttgaatatgtgggctgaggcgatggtttcctggggtgcggggccgcccgcggggctgaggcgatggtttcctggggtgcggggccgcccgcggggctga

SEQ ID NO: 466617 - DNA, 201 bp, Homo sapiens
tgggatttgcccacgtacccaggtctggctggggcccaggcccggatgcagaggcctgcagggcctctgtcaattgtacgcgccaccgagtgccttcaacmcagcttgtctcttgcctgccactgtgtgaatcggcgacggagcactgcacctgcctccagccgccggctgtgcagtcctgggtcctcctttctgagggcc

SEQ ID NO: 466618 - DNA, 201 bp, Homo sapiens
tagggggtccctccaagtggtccacaagcttctgtcctgcccccaaggaggcagcctggaccactcctcatagcaatacttggagggcccagcccaagtgrggcagccgaggtccctgctgccagcttcaggtgacccccccccatcccccggcacctcccttgggcacgtgtgctgggatctactttccctctgggattt

SEQ ID NO: 466619 - DNA, 201 bp, Homo sapiens
ttgaagctaatagggtccttgtagctgtcaaaccccacaggtgtttgtttatgacacagctcctgggcattgattctgccatcagcgcctcctcaccgctycactggactttcccttctgtgatgggcacgtttttccctaagtcaccgtgtcttctcatgcctcctctccacgacatttttgtttttgagacagagtctg

SEQ ID NO: 466620 - DNA, 201 bp, Homo sapiens
gctgtgccgggctccgggatgcacacgaggagaaccctgagagcatcctggacgagcacgtacagcgtgtgctgaggacacctggccgccagtcgcctggkcctggccatcgctccccggacagtgggcacgtggccaagatgccagtggcactggggggtgccgcctcggggcacgggaagcacgtacccaagtcagggg

SEQ ID NO: 466621 - DNA, 201 bp, Homo sapiens
aggtgccttcctggggcaggaggagcacctttctccaccatccatgaacacctgggcaggggagaccttctgtgtggccctgacatttgggcctcctaggycagcctagagtgcactggccgcctcatggcttctcatttcctgttgccttgaagctaatagggtccttgtagctgtcaaaccccacaggtgtttgtttat

SEQ ID NO: 466622 - DNA, 201 bp, Homo sapiens
gctccccggacagtgggcacgtggccaagatgccagtggcactggggggtgccgcctcggggcacgggaagcacgtacccaagtcaggggcgaagctggaygcggccggcctgcaccaccaccgacacgtccaccaccacgtccaccacagcacagcccggcccaaggagcaggtggaggccgaggccacccgcagggccc

SEQ ID NO: 466623 - DNA, 201 bp, Homo sapiens
aaccagagctgcactgcccgagcagtgaaactttcagcttggcattgaagaaagtagagaaaaacatgtcagttctctggggatttttctcagcccatctrtaagatatatatatatatattttttgtagagatggggtgtcactatattgcccagcaggtgttgaattcttggcctcaagcgatccacctgcctcagcct

SEQ ID NO: 466624 - DNA, 201 bp, Homo sapiens
ccgagcagtgaaactttcagcttggcattgaagaaagtagagaaaaacatgtcagttctctggggatttttctcagcccatctataagatatatatatatwtattttttgtagagatggggtgtcactatattgcccagcaggtgttgaattcttggcctcaagcgatccacctgcctcagccttccaaggtgttgggact

SEQ ID NO: 466625 - DNA, 201 bp, Homo sapiens
ttgcattattggtgttgtcatcttaccttgctggaatccttttaaagcatttacccctttgcagttcagtaattaaaatgatctgatttgtggccaggcaygatggctcatgcctgtaatcccagcacattcggacaccgaggtgggcagatgacttgagcccaagagttcaagaccagcctgggtgacatagtgagacct

SEQ ID NO: 466626 - DNA, 201 bp, Homo sapiens
gccaccacatccggctaatttttgtatttttagtagagacagggtttcaccatgttgaccaggctggcctggaactcctgacctcaggtgatctgcccacyttggcctaccaaagtgttgggattacaggcgtgagccaccgcgcctggccccttctaagataatttataaagggttcttatgtgcatgtcagccccttgt

SEQ ID NO: 466627 - DNA, 201 bp, Homo sapiens
tgagtaaacgtgactgctttatgtgtggtgtgtacttgtgtgtacactaaatgcttggtgtgcttccctgtgggaacccagagatttcaggaattgggacrtgtttcaacaacatcagtagcttgtagaggggttcatgtgcttccagggacaccaaaaagtcttctgtcagttgacagccaaaaatacacatgattgtaa

SEQ ID NO: 466628 - DNA, 201 bp, Homo sapiens
agtgcgggtccttgttggtccgtgtgtgagccgcgtggtggtttcacatacttgatttgaggaaagtgaagtgttctgcttaggtctttgtctcagcctargaaagagctccattcctggcccttttctgtgtttgtcccactcacccactgtcattttgagctcctgggccaaggtttcatggggttcctccctggctcc

SEQ ID NO: 466629 - DNA, 201 bp, Homo sapiens
ggcatgcgccaccacatccggctaatttttgtatttttagtagagacagggtttcaccatgttgaccaggctggcctggaactcctgacctcaggtgatcygcccactttggcctaccaaagtgttgggattacaggcgtgagccaccgcgcctggccccttctaagataatttataaagggttcttatgtgcatgtcagc

SEQ ID NO: 466630 - DNA, 201 bp, Homo sapiens
cagcagcgttcacaaaaagtccttagctgctgaaatgtcattgggggcacatagttgcaaaccatcctccatctatgggtgcttcttatttatttactaawtttattttattttattttattttatttttttgagacagagtctcactctgtcgcccaagctggagtgcagtggccggcgcggtgtcggctcactgcaagc

SEQ ID NO: 466631 - DNA, 201 bp, Homo sapiens
tggggagctgggggcagtcctccaaaggaaggctgcgggtaatgcaaagggaaaaggagagtgggtactgaacaggcggctggtgagcattgctaccacarcagggcctggagcttaggcctcacgtgttaggggatgcatatcctgtggagagccggttagtcgtcccggtgtgtccggaattggtgggttcttggtctc

SEQ ID NO: 466632 - DNA, 201 bp, Homo sapiens
tggagtgcagtggcgctatcttggctcactgcaacctccgcctcccgggttcaagcagttttcctgcctcagccgcctgagtagctgggataacaggcatkcgccaccacatccggctaatttttgtatttttagtagagacagggtttcaccatgttgaccaggctggcctggaactcctgacctcaggtgatctgccca

SEQ ID NO: 466633 - DNA, 201 bp, Homo sapiens
ggcacctgttccagaagagctgtgcacgttttcctgtttgaggtcatcagcgtggggggctgggcacagctctcaccaagtctccggccgcattctctccrcacagccagagccgctctcaccaaggccccggccgcattctctccacacacagccaggggtcagagccactctcaccaaggccccggccgcattctctcc

SEQ ID NO: 466634 - DNA, 201 bp, Homo sapiens
ggtgtgagccactgcgcccggccccggctggttatttttaagatgggactgaagttgagggctgggctgcaggaggaaaatgagctccgttctgatttccrctgttggaaccccagtgcctccctcccagccactcttcagttcttggctgcgagcagtagctttgctgtctgtccttggtttgctgtatttgtaataagg

SEQ ID NO: 466635 - DNA, 201 bp, Homo sapiens
ttcctgtttgaggtcatcagcgtggggggctgggcacagctctcaccaagtctccggccgcattctctccacacagccagagccgctctcaccaaggcccyggccgcattctctccacacacagccaggggtcagagccactctcaccaaggccccggccgcattctctccgcacagccaggggtcagagccgctctcacc

SEQ ID NO: 466636 - DNA, 201 bp, Homo sapiens
  misc_feature (1)...(201): n = A,T,C or G
tgctgggattccaggtgtgagccactgcgcccggccccggctggttatttttaagatgggactgaagttgagggctgggctgcaggaggaaaatgagctcngttctgatttccgctgttggaaccccagtgcctccctcccagccactcttcagttcttggctgcgagcagtagctttgctgtctgtccttggtttgctgt

SEQ ID NO: 466637 - DNA, 201 bp, Homo sapiens
acacagccagagccgctctcaccaaggccccggccgcattctctccacacacagccaggggtcagagccactctcaccaaggccccggccgcattctctcygcacagccaggggtcagagccgctctcaccaaggccctggctgcattctctctgcacagccaggggtcagagccgctctcaccaaggccccagccgcatt

SEQ ID NO: 466638 - DNA, 201 bp, Homo sapiens
aaagggttcttatgtgcatgtcagccccttgtttttgctcacacttctgttctctgcttcttcaggaagaatctcgagcttacttggatccacaggccctrttttggagaaaacacagtctaaaccggctacccgagatactcagcaatagctcggtttcagtttttttttttttttgagacagagttttgctcttgttgc

SEQ ID NO: 466639 - DNA, 201 bp, Homo sapiens
tgagagggtttaacccttcgtgggttggaatccacctacctcatattcccagctgtgagagggtttaacccttcgtgggttggaatccaccttctacctcrtattcccagctatgagaggtttatcaggacacagccttgtcgtgagttgaggagctctgtggttggagaaaaaggcgatttgcctttcaaaatggctata

SEQ ID NO: 466640 - DNA, 201 bp, Homo sapiens
tgcctaggctggtctcgaactcctgggcttaagcagctctcctacctcagtctcccaagtgctgggatttcaggcctgagccacgcttggctctcagtttkgggaagcaagtggcattggcatccatggcctctgccaggtgaccgctccctgccatctggtgccagagccccttccctggacatgactgcagaccagagc

SEQ ID NO: 466641 - DNA, 201 bp, Homo sapiens
gtcgcagttgacaccttttccctttgcacccacagtggtgaagacctgtgcttatgctcctagagagacgcaggtgagaacccaagtcacacccctcagtkttttgttttgttggtgtgtgtgtgtgtgtgtgtgtgtgtggtggagtctcactctgttgcccaggctggagtcagtggtgtgatctcatctcactgcaag

SEQ ID NO: 466642 - DNA, 201 bp, Homo sapiens
gtttcctgtgggctacggggcttcccatggacaggtctccccatggactatggggctctcctgtgggctttggggctcccacaggctggtgtctccagggygggttgctcattctgtgccgtattccatcccctgtcgcagttgacaccttttccctttgcacccacagtggtgaagacctgtgcttatgctcctagagag

SEQ ID NO: 466643 - DNA, 201 bp, Homo sapiens
tttatctccacaaactctgcgggacactgggcgggttggttgggaagctgctcatggtgcccttggccatgtgatccttgcaaacctccccggaggaccgygggcctgtgaggcctgtgcctgacccgcctttccatatcgcttctgccctgcgctgcttccagccgtttctatgcacccgcattccggcccccagcctcc

SEQ ID NO: 466644 - DNA, 201 bp, Homo sapiens
ccgctcacctggggtgcccctcctcctcctggtataaagtacgacttagcttgtcaaaacagggatcaagtaagtgtgtctgtgtcatgtgctgacgtgcrgcgtgtggtcttgtgataacactggaagcgcctactgaccacctgcgggcgttttctgctcagttgtgtttgtcaagcttctgtttatctccacaaactc

SEQ ID NO: 466645 - DNA, 201 bp, Homo sapiens
gatggcactggccgtgtctgaggattggaccgctcacctggggtgcccctcctcctcctggtataaagtacgacttagcttgtcaaaacagggatcaagtragtgtgtctgtgtcatgtgctgacgtgcggcgtgtggtcttgtgataacactggaagcgcctactgaccacctgcgggcgttttctgctcagttgtgttt

SEQ ID NO: 466646 - DNA, 201 bp, Homo sapiens
cccaacggtatgaaaaagagggtttccagccgggcacagtggctcacgtcctaatcctggcactttgggaggctgaggtgggcggattgcctcagctcagsagttcgagaccagcctgggcaacatggtgaaaccccgtctctactaaaaatactaaagaaattagccaggtgtgctacttgggaggctgaggcagaattg

SEQ ID NO: 466647 - DNA, 201 bp, Homo sapiens
ttcatatggaagttcatgtgaggtgaggaaatgcttgtcctgcttctcccagtgcctgtctgctttggtcgtttcttggtgtttccgaaggccccgtcatragagaagatggagctaacacagagcaaggtgccgtgttggggaatggctctcctctcttcttctcagggctggagcctgcagccacgtgggacagaccat

SEQ ID NO: 466648 - DNA, 201 bp, Homo sapiens
accgcaccctggtgaggggccgcgctgtcaccctgggccagttcaaggagctgctgaccaaaaagggcagctacaggtgagtgtgagggctggggtgcccmctccccgcacgagtatgtgggtgcccaacggtatgaaaaagagggtttccagccgggcacagtggctcacgtcctaatcctggcactttgggaggctgag

SEQ ID NO: 466649 - DNA, 201 bp, Homo sapiens
tgggggacaagcgggcaggggacagcgggcggcggctgcaccacgggagccttacagatgccaggagggggcctcgcagacgaggaaggggcacagcctcrgccaccggaggccagggcgactcgcagctcttgcccttgcagtgggaaggtgggcgtggcgtgcaaaagaaatgccaagaaggctgagtcggggaagagc

SEQ ID NO: 466650 - DNA, 201 bp, Homo sapiens
agattgagatgctgtgcgggggctgcgggccccaggtgtttgaatggggtgctgctcacccctgcaggcctgccccgccttacactggcagcctgaggccrgcaggagggaccctgtgggacctcagtccaaaaccaggtaccaccgctgcatctctttccccaggacaagatcgcagaggaaggtgggcggcgggagtgc

SEQ ID NO: 466651 - DNA, 201 bp, Homo sapiens
tcatggcaggctgttgtttcagtcacctgcatggccgggttgacaggcatagccagagctcctgggctcctgtaggacgtggcaggaaggaccatagaccrtggcaggggttctgttggagcccttatctactctcttttgcacaccccttgcaggcttgtagcagcagcagcagtagtagcagcaaattctatagttccc

SEQ ID NO: 466652 - DNA, 201 bp, Homo sapiens
ctgtttgtccaatccctgcccttcagatgtttttaaggtttgggggccgtaggtcttcctgagataggagccctgcagcctgccctgccatcctagaggtrggagctgcagtgcacctggcagccaggccctggccagtcgagggtggggctgtgaggcagcagggagaccttcgtgctcccagtgagcggagccgactcc

SEQ ID NO: 466653 - DNA, 201 bp, Homo sapiens
cctgagggtcctcccggtcctgcccaccccagccctggcgtcccaagccaggtcccatcgtagagccgccgtcccggggcttgagctcgggtaccacgctyagaagcagctgtggcaggagagggtcccgtggcatcagactcgaagctgcccgagagccttctcctgtctccatcaaaggagacgctgactgtccagcat

SEQ ID NO: 466654 - DNA, 201 bp, Homo sapiens
gcacccctgatcggaagctccccaaagtgcggtccagggaactcagggggttggtgccgggatcatgaatgtggggcgcgctgcagtatcgggtaccaccraggcaggcctaggaggggactcggtgtcttgtctaccctgcaaactggagcctgcgcagggtgggttgttcgggcccttcacgctccgtccgtccctgcg

SEQ ID NO: 466655 - DNA, 201 bp, Homo sapiens
aggggatgaggtggtgggatcccagcacccctgatcggaagctccccaaagtgcggtccagggaactcagggggttggtgccgggatcatgaatgtggggygcgctgcagtatcgggtaccaccaaggcaggcctaggaggggactcggtgtcttgtctaccctgcaaactggagcctgcgcagggtgggttgttcgggcc

SEQ ID NO: 466656 - DNA, 201 bp, Homo sapiens
ttctctccacacacagccaggggtcagagccactctcaccaaggccccggccgcattctctccgcacagccaggggtcagagccgctctcaccaaggcccyggctgcattctctctgcacagccaggggtcagagccgctctcaccaaggccccagccgcattctcaccgcacacagccaggggtcagcatctccactgtc

SEQ ID NO: 466657 - DNA, 201 bp, Homo sapiens
tgccccaggatggcctcagttgtggcgccggggggccctcagcctccctgaggtgcagaccgagttgccacgcacgccccagagccagtgtccacgctatyggtggggaattcatgccaagagactgaaggacagactctcgggacgagatgtcatcccaccagaggggatgaggtggtgggatcccagcacccctgatcg

SEQ ID NO: 466658 - DNA, 201 bp, Homo sapiens
tcgtggtctcactggcttcaggagtgaagctgcagatcttcgcggtgagtgttacagctcataaaggcagtgtggacccaaagagtgagcagcagcaagayttactggaaagagagaaagaacaaagcttccacactatggaaggggacccgagcgagttaccactgctggctcccgcagccagcttttattctcttatct

SEQ ID NO: 466659 - DNA, 201 bp, Homo sapiens
gtgttcggagtttcttccttctggtgggttcgtggtctcactggcttcaggagtgaagctgcagatcttcgcggtgagtgttacagctcataaaggcagtrtggacccaaagagtgagcagcagcaagacttactggaaagagagaaagaacaaagcttccacactatggaaggggacccgagcgagttaccactgctggc

SEQ ID NO: 466660 - DNA, 201 bp, Homo sapiens
ccatcgagtcggggggtggtccttcattctcctttcaatgttcgtgaatatgaatacttagaaaatgtatacacttctgagcgtttccattcacctgatcyttgatgtaaaatgcagaccttcagctctcctcagaccacaggagacccctcggtacactcactctttcacccgctacccgggtgagctgtgccctgaagc

SEQ ID NO: 466661 - DNA, 201 bp, Homo sapiens
tgcttcttatttatttactaattttattttattttattttattttatttttttgagacagagtctcactctgtcgcccaagctggagtgcagtggccggcrcggtgtcggctcactgcaagctctgcctcccgggttcatgccattctcccacgtcagtctcccgagtagctgggactgcaggtgcccaccaccatgcctg

SEQ ID NO: 466662 - DNA, 201 bp, Homo sapiens
ttcaggtgagtccgacgccaggcgtccactttctgtactcacctccgagagctggagaacaagccagggaaaggtgctgatgaggcgggcgttaacccacwccggatgtcctgctgccgctggggttgaattttggttctgttcttatttgtgatacttttgcatttgtcattacttttttatatttgtaatgttgagaac

SEQ ID NO: 466663 - DNA, 201 bp, Homo sapiens
gtgatctgcctgcctcggcctcccaaagtgttgggattacaggcgtgagccgccgcatccggccagattattgcttttataatgatcttctaagcttcttyctacaggctgagaaatagcaggggggacgttttacgtgtggggaatggtcagagtactttgaaaacttcctgtggctatagtgggcattccaggattggg

SEQ ID NO: 466664 - DNA, 201 bp, Homo sapiens
tttgaaagcctggaattcatgtgacccctgctgacctaatcaagactccgaaagcacagccccatgtgctgggactctcctgaggagttattaaaaactckcattagttcttcaagcttactgtgacacagaaattggctactcgctcatcaacacaggattaaacatgtctaaggttaaacttgtagtctaagtgatacg

SEQ ID NO: 466665 - DNA, 201 bp, Homo sapiens
gactgagtgttgggcgggaggcccagggcctgcactccctggctggcgggctcaggctctgcttcccttcagggtggcttggcccaccaggtggccttcarggctggccttgcatgcccctgccaggtccgcttggtcaagcccgcagtctcctcgccgctggccccttctgttgactgccctgaccttccttgatgactg

SEQ ID NO: 466666 - DNA, 201 bp, Homo sapiens
tccatctcctgacgttgtgatccaccagcctcggccttccaaagtgctgggattacaggcgtgagccactgtgcctggcccacacctggttaagttcttgkatttatgttttgttttttttttttttttttgaggcggagtcttgctctgttgcccagactggagtgcagtggtgcaacctcagctcactgcaacctccgc

SEQ ID NO: 466667 - DNA, 201 bp, Homo sapiens
tgtatttatgttttgttttttttttttttttttgaggcggagtcttgctctgttgcccagactggagtgcagtggtgcaacctcagctcactgcaacctcygcctcctgggttcaaatgattctcctgcctcagcttcctgagtagctgggattacagacatgcgccaccacacctggctaatttttgtatttttagtaga

SEQ ID NO: 466668 - DNA, 201 bp, Homo sapiens
taattagcgtgccatgatactgggtgctgcattattggcatgctgtggtactgtgtgctgtgttattagtgtgtcctggtacagactagtggccgaggtgygcctgtgtggagatctgagggtgacgtaagtagaggcactggcgtgagggcccctcatgcagtgtcaggcttgcacctttgcttggaaattccattagct

SEQ ID NO: 466669 - DNA, 201 bp, Homo sapiens
aattccattagctttggaatttatagcttcgtggtgcagtgtggagttatgttggagataccacaaagataaagcatttccatggtgaacaaaaaagtttrcaaataaaagcagtccaggccgtttttattttggctttgttatgtgtccacttactgctgtgcattctatacgccaatgggagtgttttgtagattctca

SEQ ID NO: 466670 - DNA, 201 bp, Homo sapiens
ttggtgtgttgtggtactgggtgctgtgtaattagcgtgccatggtactgggtgctgggttattggcatgctgtggtactgggtgctgtgttattggtgtrctgtggtactgggtgctgtgtaattagcgtgccatggtactgggtgctgtgttattggcatgccatggtactgggtgctgttattggtgtgccatggtac

SEQ ID NO: 466671 - DNA, 201 bp, Homo sapiens
ggccgcagcgtggaaccacagcgaggcctcctaggcacaggccgcagggctgagccggaagctcctgcctggtgcctggtgactcattctcttgccctttygtgtctgccaccctgagtgaccgagaaatcacctgctcattcagtgtgagcagaaggggtgagagtgccctgccccatggtcattcaatgctgtctggtc

SEQ ID NO: 466672 - DNA, 201 bp, Homo sapiens
tgtaagctaggaattggcagactgcctgtggtcagtagccagtaagtgctggtgaggggcatttggccacagtttgagctgttggactcccgggatggcasgtgtgggtggctgccagggccgccccgcctgtgctgcgcctgtggacagtctgcagaaacacacaccctccctatcgtcactgtttgattttgatcataa

SEQ ID NO: 466673 - DNA, 201 bp, Homo sapiens
tcccacccagtcccctaactaatgtgcaggacactttggttgctaggctgtagtgagggctttctgcatcatgtgcctggcctcacccaagcactgtttgytgaaatgctcagaaactttataaagaagtggccactgtcatttccgctttgtaagctaggaattggcagactgcctgtggtcagtagccagtaagtgctg

SEQ ID NO: 466674 - DNA, 201 bp, Homo sapiens
tgccactgcactccagcctgggtgccaaaaaaaaatgcctttgcttttctcttagccagattaattcctatgggaggtcagtgggcaccatcgagtcgggkggtggtccttcattctcctttcaatgttcgtgaatatgaatacttagaaaatgtatacacttctgagcgtttccattcacctgatccttgatgtaaaatg

SEQ ID NO: 466675 - DNA, 201 bp, Homo sapiens
cctgggctcaggcgatcctcctgcctcagcctcctgagtagctgggaccacaggtgcatgccaccacacctggctaattttttaaatattttgcagagacraggtctcaccttgttgtccaggctggtcttgaactccaggactcaagtgatccatctacctcagcctcccaaaatgctgggattacaggtgtgagctacc

SEQ ID NO: 466676 - DNA, 201 bp, Homo sapiens
gtacagaatttttaccttaactagattgataagtgtccagtgttttaatttttaataagacgtggctttcagaagttgttattttcgtcttgtagcttcarcactgagagctggtctccttcaggtgagttttatgcaggattcagggaccatgactgtaagccggcaacctggttctgggtaagtgatgtattcagactt

SEQ ID NO: 466677 - DNA, 201 bp, Homo sapiens
cacctaggaagacgcggggcctggctcctccccgctgcaaatggtgcagacttctgtggctccaccccagtgtgcgctcctcccagtgcgcaggccggctrgagtttctctggagaccccttcccacctggtcgtctcacttgcaaggctgcctttgctggccgggcgggcagtgcacacctgtgaccccaacactatggg

SEQ ID NO: 466678 - DNA, 201 bp, Homo sapiens
ggcagtttttgttttggctttgttatgcgtccgcttactgctgtgcattctatacgctgataggagtgtttgatagattctcatgagttggttgcgtttckttcatttgggtaaagtgaaactccttttaaaagaagcagaaaaaaattaaatatctcataaaaataaagattttctatttctgcctcagagtgtttcttt

SEQ ID NO: 466679 - DNA, 201 bp, Homo sapiens
aggcagtttttgttttggctttgttatgcgtccgcttactgctgtgcattctatacgctgataggagtgtttgatagattctcatgagttggttgcgtttstttcatttgggtaaagtgaaactccttttaaaagaagcagaaaaaaattaaatatctcataaaaataaagattttctatttctgcctcagagtgtttctt

SEQ ID NO: 466680 - DNA, 201 bp, Homo sapiens
tgtccacgtgagaggagctgctgtgctgccccaggatggcctcagttgtggcgccggggggccctcagcctccctgaggtgcagaccgagttgccacgcaygccccagagccagtgtccacgctatcggtggggaattcatgccaagagactgaaggacagactctcgggacgagatgtcatcccaccagaggggatgagg

SEQ ID NO: 466681 - DNA, 201 bp, Homo sapiens
agccttgatctcccaggacttatgcgatccgatcctcccacctcagcctcccaagtagtcggaaccacaggtgccaccacacccggctaattaaaaaaaawttttgtttgtagagatgaggtctcactttgttggccagactggtctcttaatttctgggctcaagtaatctgctcgcctctgcttcccaaaatgctgtga

SEQ ID NO: 466682 - DNA, 201 bp, Homo sapiens
gcttcctgagcccatccttgctgggctgagcaggggtctctcaggttgcgtctgcgctttcccctggtacccgtggccccacatgatggcaggggatgccygctgagccgtgggaccactcccgccgttctgagacacgaccctcccgcccgtttggctgctgggctccagcatccccccatggggaaacccagagttgct

SEQ ID NO: 466683 - DNA, 201 bp, Homo sapiens
gcagcaggtccgaggccctgggcgtgtgtgggctctcctgccggggcttcctgagcccatccttgctgggctgagcaggggtctctcaggttgcgtctgcsctttcccctggtacccgtggccccacatgatggcaggggatgcccgctgagccgtgggaccactcccgccgttctgagacacgaccctcccgcccgtttg

SEQ ID NO: 466684 - DNA, 201 bp, Homo sapiens
ccgggcctccagctttggggctgtgccactccagggaggctgtggctaggggccttattctgccgaaccagcatcagggttcagacccttcccagctgaargcctgtgtggtctcaagtcattaaaggttcctgagcttctgccaggctgtgagcctaatgacagctctggggccagaaagggtcacagttacctcaaacc

SEQ ID NO: 466685 - DNA, 201 bp, Homo sapiens
gtcttctgggctccgtagccagaccctgttctctccctagggcagggaggcttctgtctgggctgcagggaggtctcccctttgtgtgggcagcattttcrctccaggccagaacctggcttctccattttcagcttgctcataaggccagttttctcggccatcctgggtcattggaattccccacagatcagtgtctct

SEQ ID NO: 466686 - DNA, 201 bp, Homo sapiens
ccagcttcaggtgacccccccccatcccccggcacctcccttgggcacgtgtgctgggatctactttccctctgggatttgcccacgtacccaggtctggstggggcccaggcccggatgcagaggcctgcagggcctctgtcaattgtacgcgccaccgagtgccttcaacacagcttgtctcttgcctgccactgtgtg

SEQ ID NO: 466687 - DNA, 201 bp, Homo sapiens
ctttttattcattaagactttttttttaattttttgcgacagagtctccctctgtcaccctggctgaagtgcagtggtgtaatcacaccgttcactgcagyctcagcctcctggactcaaagctatccgccggcctctaggattagtatataatttgtatcccagtaaagctgttaaaaataaaatgtaaaaaaagaagcc

SEQ ID NO: 466688 - DNA, 201 bp, Homo sapiens
gaccttcgtgctcccagtgagcggagccgactccactgctagcggactagatcccagattgagatgctgtgcgggggctgcgggccccaggtgtttgaatrgggtgctgctcacccctgcaggcctgccccgccttacactggcagcctgaggccggcaggagggaccctgtgggacctcagtccaaaaccaggtaccacc

SEQ ID NO: 466689 - DNA, 201 bp, Homo sapiens
gctctggaggcggggtccctcctcaacctgagcccagtctgcagggaggctgcagggccccagtgtgtggggaacgccggtccccagccagaggctgctcrctgctgggcagcctgggctttagggcagaggtcctggaggcatggcggctgcctcttgacagttgcgtcccaggagccctgagtggctctgcacggtcgg

SEQ ID NO: 466690 - DNA, 201 bp, Homo sapiens
aattagcgtgccatggtactgggtgctgtgttattggcatgccatggtactgggtgctgttattggtgtgccatggtactgggtgctgtgttattggcatsccgtggtactgggtgctgtgttattggcatgccgtggtactggatgctgtgttagtggtgtgccttggtactgggtgctgtgttatgggcatgctatggt

SEQ ID NO: 466691 - DNA, 201 bp, Homo sapiens
ccagccattctcgggccccagcctccagagtagcagggatgacaggcgcccagctaattttgtatatttagtagcgatgaggtttcaccatgttaggttgmtctcgaactcccgacctctggtgatctgcccgcctcggcctcccgaaatgctgggattacaggtgtgagccaccgtgcctggccgggatgtttttattgt

SEQ ID NO: 466692 - DNA, 201 bp, Homo sapiens
ctttcatatattttgcatttctttttgttgtgttttcatatcttttcaatacatttttttcctgcccttgctttctgaatatacactcaaaaaattatactttttttttttttttttggtttagatcaacattgtttagatcaaaatctttctggagatgttaagatgttaagtgtaattttttttttgttttcttttttt

SEQ ID NO: 466693 - DNA, 201 bp, Homo sapiens
cccctcatgcagtgtcaggcttgcacctttgcttggaaattccattagctttggaatttatagcttcgtggtgcagtgtggagttatgttggagataccasaaagataaagcatttccatggtgaacaaaaaagtttgcaaataaaagcagtccaggcagtttttgttttggctttgttatgcgtccgcttactgctgtgc

SEQ ID NO: 466694 - DNA, 201 bp, Homo sapiens
gagcagtgaaactttcagcttggcattgaagaaagtagagaaaaacatgtcagttctctggggatttttctcagcccatctataagatatatatatatatwttttttgtagagatggggtgtcactatattgcccagcaggtgttgaattcttggcctcaagcgatccacctgcctcagccttccaaggtgttgggactac

SEQ ID NO: 466695 - DNA, 201 bp, Homo sapiens
ggcataaaagggatgagtcgctgataaccatggaggcaggggtgcatctcaggatcctgtgccagtgaagaaagccagagcggagggggcgccggagcagcggggggcactagctccccatgagactgcgtttatacagaattctagaaaaggccgactgacctcgagcgacaggtggatttccccaagggaagcctcccc

SEQ ID NO: 466696 - DNA, 201 bp, Homo sapiens
gagccaccgtgccccgcctgttttgttttgttttttttaatcttattttggctttttttctttctttttttttttttttgagacggagtctcgctctgtcrcccaggctggagtgcagtggcgcgatctcggctcactgcaagctctgcctcctgggttcacgccattctcctgcctcagcctcccgagtagctgggacta

SEQ ID NO: 466697 - DNA, 201 bp, Homo sapiens
cagtggcgcgatctcggctcactgcaagctctgcctcctgggttcacgccattctcctgcctcagcctcccgagtagctgggactacaggtgcccgccacygcacccggctaattttttgtatttttagtagagacggggtttcaccgtgttagccaggagggtctcgatctcctgacctcgtgatatgcctgcgttggcc

SEQ ID NO: 466698 - DNA, 201 bp, Homo sapiens
gaagagggtccccgggagccagcgattctgtgtgtaggattcacccaccatcctcagtggctctgtgggactcaggtggctggagacacatggatggggtmttgaggggcagacgcacacccgagtctgcatggactctttgcctcgcggacagccaggtcccacttgctttggagaggaggatgtgcagcccaggggatt

SEQ ID NO: 466699 - DNA, 201 bp, Homo sapiens
attcacccaccatcctcagtggctctgtgggactcaggtggctggagacacatggatggggtattgaggggcagacgcacacccgagtctgcatggactcyttgcctcgcggacagccaggtcccacttgctttggagaggaggatgtgcagcccaggggattctgcctctgtgcccaggtgaggcacaggtcagcaccag

SEQ ID NO: 466700 - DNA, 201 bp, Homo sapiens
acccttcgtgggttggcatccgccttctacctcatattcccagctatgagagggtttaacccttcgtgggttggaatccacctacctcatattcccagctrtgagagggtttaacccttcgtgggttggaatccaccttctacctcgtattcccagctatgagaggtttatcaggacacagccttgtcgtgagttgaggag

SEQ ID NO: 466701 - DNA, 201 bp, Homo sapiens
cattttttgtgggcaggcgcagtggcttaagcctgtaatcccagcactttgggaggccgaggcgggcagatcacaaggtcaggcgttcgagaccagcctgrccaacacggcgaaaccttgtctctactaaaaatacaaaaattagccgggcgtggtgacgtgtgcctggagtcccagctactcgggaggctgaggcaggag

SEQ ID NO: 466702 - DNA, 201 bp, Homo sapiens
ggggtgtcactatattgcccagcaggtgttgaattcttggcctcaagcgatccacctgcctcagccttccaaggtgttgggactacaggggtgaccaccgycctctaagataattttttttttttgagacggagtctcgcactgtagcccaggctggagtgcagtggcgctatcttggctcactgcaacctccgcctcccg

SEQ ID NO: 466703 - DNA, 201 bp, Homo sapiens
aacagcgcttttgagcaggggctcagcgaggctgggggtcagactagtggccgaggtgcgcctgtgtggagatctgagggtgacgtaagtagaggcactgrcgtgagggcccctcatgcagtgtcaggcttgcacctttgcttggaaattccattagctttggaatttatagcttcgtggtgcagtgtggagttatgttgg

SEQ ID NO: 466704 - DNA, 201 bp, Homo sapiens
attgcccagcaggtgttgaattcttggcctcaagcgatccacctgcctcagccttccaaggtgttgggactacaggggtgaccaccgtcctctaagataattttttttttttgagacggagtctcgcactgtagcccaggctggagtgcagtggcgctatcttggctcactgcaacctccgcctcccgggttcaagcagtt

SEQ ID NO: 466705 - DNA, 201 bp, Homo sapiens
ccatgtggaaactgaggccctgggagattaagtaacttcccatctgctgtagtcagggtcgggcccttagtcaccgtggtctctggaacccacaggcctgkaaacagcgcttttgagcaggggctcagcgaggctgggggtcagactagtggccgaggtgcgcctgtgtggagatctgagggtgacgtaagtagaggcact

SEQ ID NO: 466706 - DNA, 201 bp, Homo sapiens
tgttttctttttttttttgagaaggagtctcgctctttcgcccagcctggagtgcagtggcacggtctcagctcactgcaacctccacctcccgggttcaygccattctcctgcctcagcctccctagagctgggactacaggcgcccgccaccacgcccagctaattttttgtatttttagtagagatggggtttcactg

SEQ ID NO: 466707 - DNA, 201 bp, Homo sapiens
gctggtctcaaactcccgacctcaggtgatccgcctgcctcggcctccaaagtgctgggattacaggcgtgagcaattgcacccggcccacctcgctaatmtttttttacagttttttgtagagacaaggtctcccagtgttgcccaggctggtctcaagctccaggccttgagcactcctcctactttggcctctcagag

SEQ ID NO: 466708 - DNA, 201 bp, Homo sapiens
gtgctttcacttctgagccaagtgggtcaatcattttcttttttgagacggagttttgctcttgtatcccaggctggagtgcaatggcaccatcttggctyactgcaacctccgcctcctgggttcaagaaattcttctgcctcggcctcccgagtagctgggattacaggcgtgcatcaccacacccagctaatttttgt

SEQ ID NO: 466709 - DNA, 201 bp, Homo sapiens
gggaaccagccctcttgggtcagggccccacgtttgcgttctcatctaacaataacacttccttacttcaagcacagccacgtgatggtcagggctgacayatattaattgggcgacacggttcggtccttagtgccttttctgagtaacgtgctcactgctatcttgtgtccactggctctttgagagctctgctgctct

SEQ ID NO: 466710 - DNA, 201 bp, Homo sapiens
aaatgggctcagctcttggctcagctggctaggtggccaggtggccgggtagctgggcgtccgggtgtcctggcaggcgctgtcctcactgtgagctgcartgggctgcttggtcctgtgccctgctcatggcactcaccctcctgcctcctttgaggttgctccagtgcttttttttttttttttttttggttttgaccc

SEQ ID NO: 466711 - DNA, 201 bp, Homo sapiens
ctgcacggtcggaaagctacgtggttctgaaagccgtgcagatgtagaagtgtcgtcctggacgtccagcccacagccctcctcgctgtgtcctcttgtcatcctggatgtccagcccacagccctcctcactgtgcccttctctcatccgggacgtccagcccacagccctcctcactgcgccctccttggtcttctggg

SEQ ID NO: 466712 - DNA, 201 bp, Homo sapiens
gcacggtcggaaagctacgtggttctgaaagccgtgcagatgtagaagtgtcgtcctggacgtccagcccacagccctcctcgctgtgtcctcttgtcatcctggatgtccagcccacagccctcctcactgtgcccttctctcatccgggacgtccagcccacagccctcctcactgcgccctccttggtcttctgggct

SEQ ID NO: 466713 - DNA, 201 bp, Homo sapiens
cggaaagctacgtggttctgaaagccgtgcagatgtagaagtgtcgtcctggacgtccagcccacagccctcctcgctgtgtcctcttgtcatcctggatgtccagcccacagccctcctcactgtgcccttctctcatccgggacgtccagcccacagccctcctcactgcgccctccttggtcttctgggctccgtagc

SEQ ID NO: 466714 - DNA, 201 bp, Homo sapiens
tagaagtgtcgtcctggacgtccagcccacagccctcctcgctgtgtcctcttgtcatcctggatgtccagcccacagccctcctcactgtgcccttctctcatccgggacgtccagcccacagccctcctcactgcgccctccttggtcttctgggctccgtagccagaccctgttctctccctagggcagggaggcttc

SEQ ID NO: 466715 - DNA, 201 bp, Homo sapiens
gaagtgtcgtcctggacgtccagcccacagccctcctcgctgtgtcctcttgtcatcctggatgtccagcccacagccctcctcactgtgcccttctctcatccgggacgtccagcccacagccctcctcactgcgccctccttggtcttctgggctccgtagccagaccctgttctctccctagggcagggaggcttctg

SEQ ID NO: 466716 - DNA, 201 bp, Homo sapiens
gttgtagtgagccgagatcgcgccactgcactccagtctgggcgaaagagcgaggctccgtctcaaaaaaaaaaaaaaaatatatatatatatatatatayacacacacgcatatacgtatgcatatatacatatatacacacatatatacatttacatatatacatatatatttgtttttaatttttatattcttgagtg

SEQ ID NO: 466717 - DNA, 201 bp, Homo sapiens
atggttaaatgtgaaaagacggaagatgaaagtaccacagtgaccagagagccggtgccgtggccatgctggatgtgggagcagccgcgggagtcccagaraggtgccttcctggggcaggaggagcacctttctccaccatccatgaacacctgggcaggggagaccttctgtgtggccctgacatttgggcctcctagg

SEQ ID NO: 466718 - DNA, 201 bp, Homo sapiens
gttagccaggatggtctcgatctcctgacctcgtgatccgcccgcctcggcctcccacagtgctgggatgacaggcatgagccactgcgcccagcccgaasgcagcttttctaatagctgggagagggcgagggctttcatgaaggatggttgtgcgtgagttatcttaaccctggggtaattattcagaccatgtataat

SEQ ID NO: 466719 - DNA, 201 bp, Homo sapiens
cagggctggcagtgaatatgtgaggctttgcagccgcatgcagtccctgtcacagattcttcccccaccctttaaaaatgtagaaaccttggccgggcgcygtggcttgcgcctgtaattactcccagcaatttgcgaggccgaggcgggcggatcacgaggtcaggagatcgagactctcctggctaacacagtgaaacc

SEQ ID NO: 466720 - DNA, 201 bp, Homo sapiens
tacaggatccgtaagcagcaccgcagggagatgcaggagagcgtgcaggtcaatgggcgggtgcccctacctcacattcccgtaagtaccggctttgcggycctcagcccatcgtcctccccgctcagcgtgggcctggtgaactggtccgcgggaaaggcacttgcctggcctcccacgagccaggcttacctctaggcg

SEQ ID NO: 466721 - DNA, 201 bp, Homo sapiens
tagtcccagctactcgggaggctgaggcaggagaatggcgtgaacccgggaggcggagcttgcagtgagccgaaatcgcgccactacactccagcctgggygacagagcgagaccctgtctcaaaaacaaaaacaaaaaaaaccaaaaacaaacaagctatatggtatattactataaaatacattgcagatgtattgtta

SEQ ID NO: 466722 - DNA, 201 bp, Homo sapiens
tgagaaggacagagtttattgggtgaaaaggtaaaaagggaaacgggcgggcgagtggctcacacctgtaatcccagcaattttgggaggccgaggcgggyggatcacctgaggtcaggagtttgagaccagcctggccaaaatggtgaaaccccatctctaatgaaaaatacaaaaattagccgggttggtgtcaggtgc

SEQ ID NO: 466723 - DNA, 201 bp, Homo sapiens
cgggcgggcgagtggctcacacctgtaatcccagcaattttgggaggccgaggcgggcggatcacctgaggtcaggagtttgagaccagcctggccaaaakggtgaaaccccatctctaatgaaaaatacaaaaattagccgggttggtgtcaggtgcctgtaatcccaactactcaggaggctgaggctggagaatcgct

SEQ ID NO: 466724 - DNA, 201 bp, Homo sapiens
ccgaggagtttgagcccagcctgggcaatgtggcaaattcctgtctctagaaaaaatttcaaaattagctgggcgtggtggcacacacctgtggtcccagrtattcaggaagctgaggtgggaggatcacttgagcccaggaggtcaggtctacagtgagccgaggctgtgccactgcactccagcctgggtgccaaaaaa

SEQ ID NO: 466725 - DNA, 201 bp, Homo sapiens
tgcagccttgaactcctgggtcaagtgatcctcttgcctcagtcttccaagtagctgagactacaggcatacgctaccatacccggctaattaagaactgktttttggtagagattgggtctcactatgttgcccaggttagtcttgaactcttgggctcaagggatcctccagcctcagcctcctgagtagctgggacta

SEQ ID NO: 466726 - DNA, 201 bp, Homo sapiens
aatcttgctatattacccacactggtcttgaactcctggcctcaagtgatcctcctacctcagcttcccgaagtgctgggatttcaggcacgagccaccgygcctggccttaagcaagacatgttaaaggcaggcgtagccacaggtgctgagtgtgtggctctcacctgtgactctcaaggcttccccaccccatggagt

SEQ ID NO: 466727 - DNA, 201 bp, Homo sapiens
cttgtggggagtggcattcccatgtcctgggcatcccttcttagcatgagaggcattcctgtagttgtaaaagtttccagaaattgctttaaagtagaacwatgcttgtggccaaaatatatcttgattgaacatttaaactgagtttcttgctttgagtttgagcgggagggcgtcatcgtgagtcttgtcttgagaaaa

SEQ ID NO: 466728 - DNA, 201 bp, Homo sapiens
aacccattagctccagaaggtgttcggtctctccactccctgagagatggagactggtcacagggctctgtgaaaacacacacagctctgccatactgctrtggcgtccagggggcccccagaggccgcacgcccggctgagtgcccatagggcccagattccatgccccttctcctccagcaaggaccctgggccctgtc

SEQ ID NO: 466729 - DNA, 201 bp, Homo sapiens
ccgcgtggtggtttcacatacttgatttgaggaaagtgaagtgttctgcttaggtctttgtctcagcctaggaaagagctccattcctggcccttttctgygtttgtcccactcacccactgtcattttgagctcctgggccaaggtttcatggggttcctccctggctcccccgctctgcctctgtgggaacactttctg

SEQ ID NO: 466730 - DNA, 201 bp, Homo sapiens
gcgacttcgtgggctttgtgttggaggtggctgctgcagtgaccttgggctctgggctcccttgtttacagatgcttcccgcagctctgacggatgggccygctgttgctctgaggagggcacgtgtgccgctgtgtcccgtctgtctcagcacagtcacggtgcgtgcgctgggggctgtgcagcagggtcactcctgaa

SEQ ID NO: 466731 - DNA, 201 bp, Homo sapiens
aggagctggatctacccagtagacatggtcctttccgcttaataaagggaggagtggacgtttcagggcatcgataagaattggagaattggattcttgcttttttttttttttgagacggagtttcacttttgttgctcaggctggagtgcaatggtacaatctcagctcactgcaaccttcgcctcccgggtttgagcg

SEQ ID NO: 466732 - DNA, 201 bp, Homo sapiens
cactgttgaggcagagcctcaggtgtgccttagggcctggcacctttgctttgtgccattctgactttgcctgcctggtgggcgacttcgtgggctttgtrttggaggtggctgctgcagtgaccttgggctctgggctcccttgtttacagatgcttcccgcagctctgacggatgggcccgctgttgctctgaggaggg

SEQ ID NO: 466733 - DNA, 201 bp, Homo sapiens
caagtggtatttatttagcaagcattttaggacacaatatgccgcaaagttatcctgttgagtaagcctggtataaactgagagtttctttctttctttcttttttttttttttgaaatggagtctcgctctgtcacacaggctggagtgcagtagcactatctcgctatctcggctcactgcaacttctgcctcctgggt

SEQ ID NO: 466734 - DNA, 201 bp, Homo sapiens
actgcaacttctgcctcctgggtttaagtgattctcctgcctcccgagtagctgggattacaggtgtgtgctaccatgcctggctaatttttgtatttgtrgtagagacagcgtttcgccacgttggccaggatggtctcgagctcctggactccagtgatctcagcctcccaaagtgctgggattacgggtgggagccac

SEQ ID NO: 466735 - DNA, 201 bp, Homo sapiens
taaactgagagtttctttctttctttcttttttttttttttgaaatggagtctcgctctgtcacacaggctggagtgcagtagcactatctcgctatctcrgctcactgcaacttctgcctcctgggtttaagtgattctcctgcctcccgagtagctgggattacaggtgtgtgctaccatgcctggctaatttttgtat

SEQ ID NO: 466736 - DNA, 201 bp, Homo sapiens
tattggcatgccatggtactgggtgctgttattggtgtgccatggtactgggtgctgtgttattggcatgccgtggtactgggtgctgtgttattggcatsccgtggtactggatgctgtgttagtggtgtgccttggtactgggtgctgtgttatgggcatgctatggtactgggtgctgtggtactgcgtgctgtgtta

SEQ ID NO: 466737 - DNA, 201 bp, Homo sapiens
tggtactggatgctgtgttagtggtgtgccttggtactgggtgctgtgttatgggcatgctatggtactgggtgctgtggtactgcgtgctgtgttattgsatgccatggtactgcatgctgtgttattgctgtgctgtggtactgggtgctgtgttattggcatggtatggtactgggtgctgtgttatgggcatgctat

SEQ ID NO: 466738 - DNA, 201 bp, Homo sapiens
agggcagggcacgtgcttccagtgcgtgccaagacagacacgccatgtgccgtgggctacagacgcgccgtgtgctgtgggctacagacgcaccaagtgcygtgggctacagatgcacccgtgtgccgtggacgtagacttcttaaacttctgtgcggcagtggccttctctcttccatttgaaatgtttttatttggcca

SEQ ID NO: 466739 - DNA, 201 bp, Homo sapiens
tgcttccagtgcgtgccaagacagacacgccatgtgccgtgggctacagacgcgccgtgtgctgtgggctacagacgcaccaagtgccgtgggctacagaygcacccgtgtgccgtggacgtagacttcttaaacttctgtgcggcagtggccttctctcttccatttgaaatgtttttatttggccaaatagatgtttat

SEQ ID NO: 466740 - DNA, 201 bp, Homo sapiens
acttcacccacatgtggtcattgcactgttcactgttgccctgggagggggcgcacatgcagtgggggccgtggggcatggacaggaggctcctcgggatggggtgtggacacgccgtcccctgccacaggcctccttcccatctgcggtgctgcctgctcactgccctcctcacctccgtcctgcagatactacttcaag

SEQ ID NO: 466741 - DNA, 201 bp, Homo sapiens
  misc_feature (1)...(201): n = A,T,C or G
gtgttcggccaacaaggagctggagccccctgccatgcaggagcctggagtgtggtgctcggagccggggcgtgtgactgggctggcagatgagccgtggngggcatcgtgtgcagcaggtccgaggccctgggcgtgtgtgggctctcctgccggggcttcctgagcccatccttgctgggctgagcaggggtctctcag

SEQ ID NO: 466742 - DNA, 201 bp, Homo sapiens
tctactttccctctgggatttgcccacgtacccaggtctggctggggcccaggcccggatgcagaggcctgcagggcctctgtcaattgtacgcgccaccragtgccttcaacacagcttgtctcttgcctgccactgtgtgaatcggcgacggagcactgcacctgcctccagccgccggctgtgcagtcctgggtcctc

SEQ ID NO: 466743 - DNA, 201 bp, Homo sapiens
ccattctcctgcctcagcctccccagtagctgggactacaggcgcccaccatcacgcccggctaatttttttgtatttttagtagagacggggtttcaccrtgttagccaggatggtctcgatctcccgacctcgtgatccacccgcctcggcctcccaaagtgctgggattacaggcgtgaactccagattttttaaata

SEQ ID NO: 466744 - DNA, 201 bp, Homo sapiens
tacacagggccaggcgtggtggctcacaccggtaatcccagtgctttgggaggcctaggtgggaggagtttgaggccagcctggacagcaagacccccatstctatttttaaaaaaagctataggggggccgggtgcagtggctcacgcctgtaatcccagcactttgggaggctgaggcaggcggatcacgaggtcagga

SEQ ID NO: 466745 - DNA, 201 bp, Homo sapiens
gactacaggcgcccaccatcacgcccggctaatttttttgtatttttagtagagacggggtttcaccatgttagccaggatggtctcgatctcccgacctygtgatccacccgcctcggcctcccaaagtgctgggattacaggcgtgaactccagattttttaaataacctattttcattgtgaaatttgggaaattaaa

SEQ ID NO: 466746 - DNA, 201 bp, Homo sapiens
agaagaaaacaaaaaccattagccgagtggttaagttaatctgtaacatttcacagccccatgatagaattcctgccgatgtggagctcggccaaggcagygaacggcatcaaaactccaaacacttttagtccctaggaagaccctcggttaagatttctccccagagtgcccgggccctttagtcctacaaaaccaagg

SEQ ID NO: 466747 - DNA, 201 bp, Homo sapiens
ctgacagagcgactctgactctaaataaataaatacatacatagatacatggtaacttagttccctctctttcttttgtattgacaccagatttactcaayactgttttagtttgtcagtccaataagatgagaaaataagtatgagatgcaacttggaattaaagtgatcagatgtttgctctgacagataagcttcagc

SEQ ID NO: 466748 - DNA, 201 bp, Homo sapiens
ggaagctcgtcaggcagcatcacaacatgtacataacccaagagccgttctgtacaaggttctccttaaaatataatgggaggccgggcgcggcggctcaygcctgtcatcccaacactttgggaggccgaggtgggtggatcatgaggtcaggagttcgagaccagcctggccaacatagtgaaatcctgtctctactaa

SEQ ID NO: 466749 - DNA, 201 bp, Homo sapiens
caaaaaatatatatatatacaggccaaggcaggcagattgcttgagctcaggcattcgagaccagcctggccaatatggtgagaatcgcatctgtccccamagtacaaaaaaattagctgggcgtggtggcacacggctgtggtctccgctattctggaggctgaggtgggaggatcgcttgagcctaggaggcggaggct

SEQ ID NO: 466750 - DNA, 201 bp, Homo sapiens
ttaaagcacaaagaagaaaacaaaaaccattagccgagtggttaagttaatctgtaacatttcacagccccatgatagaattcctgccgatgtggagctckgccaaggcagcgaacggcatcaaaactccaaacacttttagtccctaggaagaccctcggttaagatttctccccagagtgcccgggccctttagtccta

SEQ ID NO: 466751 - DNA, 201 bp, Homo sapiens
cttttgtattgacaccagatttactcaacactgttttagtttgtcagtccaataagatgagaaaataagtatgagatgcaacttggaattaaagtgatcaratgtttgctctgacagataagcttcagcacctgttaacttggagaatcaagtgaaactccaccggcttcatgtggaagctcgtcaggcagcatcacaaca

SEQ ID NO: 466752 - DNA, 201 bp, Homo sapiens
cttcagggggtgagcagtgactgcctgtgtgtttagagaggaaaccaacccccagacagcaccaggacagcgggcaggggacagcgggtgggggacaagckggcgggggacagcgggtgggggacaagcgggcaggggacagcgggcggcggctgcaccacgggagccttacagatgccaggagggggcctcgcagacgag

SEQ ID NO: 466753 - DNA, 201 bp, Homo sapiens
tctgtaatcccaacactttgagaggccaagacagaaggatcacttgaggccaggaatttaagagcaggttggacaacatagtgagattccccatctctacaaaaaaaaaagaaaaagaaaaaattaatgggacatggtggcatgcacctgtagtcccagctacttggcaggctgaagcaggaggatcgcttgacccctgga

SEQ ID NO: 466754 - DNA, 201 bp, Homo sapiens
agggggtgagcagtgactgcctgtgtgtttagagaggaaaccaacccccagacagcaccaggacagcgggcaggggacagcgggtgggggacaagctggcrggggacagcgggtgggggacaagcgggcaggggacagcgggcggcggctgcaccacgggagccttacagatgccaggagggggcctcgcagacgaggaag

SEQ ID NO: 466755 - DNA, 201 bp, Homo sapiens
accaggacagcgggcaggggacagcgggtgggggacaagctggcgggggacagcgggtgggggacaagcgggcaggggacagcgggcggcggctgcaccaygggagccttacagatgccaggagggggcctcgcagacgaggaaggggcacagcctcggccaccggaggccagggcgactcgcagctcttgcccttgcagt

SEQ ID NO: 466756 - DNA, 201 bp, Homo sapiens
ttttgagatggggtttcgctcctgtggctcaggctggagtgcaacaggccagtgtcaacgcactgcaacctccacctcccaggttcaagtggttctcctgyctaacccacctgagtagctgggattacaggcacccactattatgcccagttaactttttgtatttttgtagaaacagggtttcaccatgttggccaggct

SEQ ID NO: 466757 - DNA, 201 bp, Homo sapiens
gatgaggtttcaccatgttaggttgatctcgaactcccgacctctggtgatctgcccgcctcggcctcccgaaatgctgggattacaggtgtgagccaccrtgcctggccgggatgtttttattgtgtggtctgtggaggacgtccatgtggcttggtggccaggccccagtgccccatcccatcctatccctcaaggagg

SEQ ID NO: 466758 - DNA, 201 bp, Homo sapiens
tcccgagggaacaggggtgcacagcaccttgcctggctcattttttgtagagggggtctcagtgtgttgcccagctgggtctcaagcttttgggctcaagygatcctcccaccttggcctcccaaaatgctgggactacaggcatgagccaccattcctggccttcgagtcttttttttgagacggagtctagctctgtcg

SEQ ID NO: 466759 - DNA, 201 bp, Homo sapiens
ctgagtggctctgcacggtcggaaagctacgtggttctgaaagccgtgcagatgtagaagtgtcgtcctggacgtccagcccacagccctcctcgctgtgtcctcttgtcatcctggatgtccagcccacagccctcctcactgtgcccttctctcatccgggacgtccagcccacagccctcctcactgcgccctccttg

SEQ ID NO: 466760 - DNA, 201 bp, Homo sapiens
tgagtggctctgcacggtcggaaagctacgtggttctgaaagccgtgcagatgtagaagtgtcgtcctggacgtccagcccacagccctcctcgctgtgtcctcttgtcatcctggatgtccagcccacagccctcctcactgtgcccttctctcatccgggacgtccagcccacagccctcctcactgcgccctccttgg

SEQ ID NO: 466761 - DNA, 201 bp, Homo sapiens
tcagcagtaaagtctgtcacctcttaaataggagctggatctacccagtagacatggtcctttccgcttaataaagggaggagtggacgtttcagggcatygataagaattggagaattggattcttgcttttttttttttttgagacggagtttcacttttgttgctcaggctggagtgcaatggtacaatctcagctca

SEQ ID NO: 466762 - DNA, 201 bp, Homo sapiens
acctttcctaatccttgtcctcttaatggtttcaacaggacagattgattcactttggagctgtaagtactgatgtattagggtgcagcgctcattgttcmttgacgcagagtcccaaaatgaatatccaagagcagggtttccccttggacctcggagcaagtttcaccgaagatgctccccgacccccagtgcctggtg

SEQ ID NO: 466763 - DNA, 201 bp, Homo sapiens
ctactttatgtatttttagtagagacaaggtttcgccatgttggccaggctggtctcgaaatcttgaccttaagtggtccgcccaccttggcctcccaaastgctggaattataggcgtgagccactgtgcccagtccatcttgtatttttatgcacctgtcagtgggcaaggactccaaacatattttttctcttcctta

SEQ ID NO: 466764 - DNA, 201 bp, Homo sapiens
taaatcaaaatgtcaaaagttacgtttgggtaaaataaatacctacacacgtaggtagcattgagtttgctgccatgatgcctggagcatatgcctaagcrgtgacgaaagggaattttaaatacagtatcatacttgtaggcatcccgcccgttttatggactcactttattgatggtagctacaggctgtgggccagat

SEQ ID NO: 466765 - DNA, 201 bp, Homo sapiens
cacagtctaaaccggctacccgagatactcagcaatagctcggtttcagtttttttttttttttgagacagagttttgctcttgttgcccaggctggagtscaatggcgtgatctccgctcaccgcatcctccgcctcccaggttcaagcgattctcctgcctcagccttcccaagtagctgggattataggcatgcgcca

SEQ ID NO: 466766 - DNA, 201 bp, Homo sapiens
aaggggcacagcctcggccaccggaggccagggcgactcgcagctcttgcccttgcagtgggaaggtgggcgtggcgtgcaaaagaaatgccaagaaggcygagtcggggaagagcgccagcaccgaggtgccaggtgcctcggaggatgcggagaagaaccagaaaatcatgcagtggatcattgagggggaaaaggaga

SEQ ID NO: 466767 - DNA, 201 bp, Homo sapiens
gaaaaaaaaatgtagaaaccactcttagctgtcaggccctaaagaacaggcaggcacaaggaggctttgtggaggtgcccagtaaacaccagctaggaagrcgcgtggctgggcacctgggctttaccatcacgtgtgaacctttgtgtgtacatgttcccctgtgcacacatgggtgcctgcatcacctgtgtgcacgtg

SEQ ID NO: 466768 - DNA, 201 bp, Homo sapiens
gagtggctctgcacggtcggaaagctacgtggttctgaaagccgtgcagatgtagaagtgtcgtcctggacgtccagcccacagccctcctcgctgtgtcctcttgtcatcctggatgtccagcccacagccctcctcactgtgcccttctctcatccgggacgtccagcccacagccctcctcactgcgccctccttggt

SEQ ID NO: 466769 - DNA, 201 bp, Homo sapiens
ctcaaaaaaaagaagaaaaaaaaatgtagaaaccactcttagctgtcaggccctaaagaacaggcaggcacaaggaggctttgtggaggtgcccagtaaayaccagctaggaaggcgcgtggctgggcacctgggctttaccatcacgtgtgaacctttgtgtgtacatgttcccctgtgcacacatgggtgcctgcatca

SEQ ID NO: 466770 - DNA, 201 bp, Homo sapiens
tggctctgcacggtcggaaagctacgtggttctgaaagccgtgcagatgtagaagtgtcgtcctggacgtccagcccacagccctcctcgctgtgtcctcttgtcatcctggatgtccagcccacagccctcctcactgtgcccttctctcatccgggacgtccagcccacagccctcctcactgcgccctccttggtctt

SEQ ID NO: 466771 - DNA, 201 bp, Homo sapiens
ggctctgcacggtcggaaagctacgtggttctgaaagccgtgcagatgtagaagtgtcgtcctggacgtccagcccacagccctcctcgctgtgtcctcttgtcatcctggatgtccagcccacagccctcctcactgtgcccttctctcatccgggacgtccagcccacagccctcctcactgcgccctccttggtcttc

SEQ ID NO: 466772 - DNA, 201 bp, Homo sapiens
gctctgcacggtcggaaagctacgtggttctgaaagccgtgcagatgtagaagtgtcgtcctggacgtccagcccacagccctcctcgctgtgtcctcttgtcatcctggatgtccagcccacagccctcctcactgtgcccttctctcatccgggacgtccagcccacagccctcctcactgcgccctccttggtcttct

SEQ ID NO: 466773 - DNA, 201 bp, Homo sapiens
ctctgcacggtcggaaagctacgtggttctgaaagccgtgcagatgtagaagtgtcgtcctggacgtccagcccacagccctcctcgctgtgtcctcttgtcatcctggatgtccagcccacagccctcctcactgtgcccttctctcatccgggacgtccagcccacagccctcctcactgcgccctccttggtcttctg

SEQ ID NO: 466774 - DNA, 201 bp, Homo sapiens
acggtcggaaagctacgtggttctgaaagccgtgcagatgtagaagtgtcgtcctggacgtccagcccacagccctcctcgctgtgtcctcttgtcatcctggatgtccagcccacagccctcctcactgtgcccttctctcatccgggacgtccagcccacagccctcctcactgcgccctccttggtcttctgggctcc

SEQ ID NO: 466775 - DNA, 201 bp, Homo sapiens
cggtcggaaagctacgtggttctgaaagccgtgcagatgtagaagtgtcgtcctggacgtccagcccacagccctcctcgctgtgtcctcttgtcatcctggatgtccagcccacagccctcctcactgtgcccttctctcatccgggacgtccagcccacagccctcctcactgcgccctccttggtcttctgggctccg

SEQ ID NO: 466776 - DNA, 201 bp, Homo sapiens
ggtcggaaagctacgtggttctgaaagccgtgcagatgtagaagtgtcgtcctggacgtccagcccacagccctcctcgctgtgtcctcttgtcatcctggatgtccagcccacagccctcctcactgtgcccttctctcatccgggacgtccagcccacagccctcctcactgcgccctccttggtcttctgggctccgt

SEQ ID NO: 466777 - DNA, 201 bp, Homo sapiens
gtcggaaagctacgtggttctgaaagccgtgcagatgtagaagtgtcgtcctggacgtccagcccacagccctcctcgctgtgtcctcttgtcatcctggatgtccagcccacagccctcctcactgtgcccttctctcatccgggacgtccagcccacagccctcctcactgcgccctccttggtcttctgggctccgta

SEQ ID NO: 466778 - DNA, 201 bp, Homo sapiens
gaacaaaaaagtttgcaaataaaagcagtccaggcagtttttgttttggctttgttatgcgtccgcttactgctgtgcattctatacgctgataggagtgtttgatagattctcatgagttggttgcgtttctttcatttgggtaaagtgaaactccttttaaaagaagcagaaaaaaattaaatatctcataaaaataaa

SEQ ID NO: 466779 - DNA, 201 bp, Homo sapiens
aatcggcgacggagcactgcacctgcctccagccgccggctgtgcagtcctgggtcctcctttctgagggcccgtgtaaatatgtacatttctcaggctaggccagcaggggctgcccgagtctgtttttcatgcgatgacacttgtacaattaattatcttttcaaaggtacttggataataatgaaataaaactgtttt

SEQ ID NO: 466780 - DNA, 201 bp, Homo sapiens
tcccagctatgagagggtttaacccttcgtgggttggcatccgccttctacctcatattcccagctatgagagggtttaacccttcgtgggttggaatccrcctacctcatattcccagctgtgagagggtttaacccttcgtgggttggaatccaccttctacctcgtattcccagctatgagaggtttatcaggacaca

SEQ ID NO: 466781 - DNA, 201 bp, Homo sapiens
agtgtcgtcctggacgtccagcccacagccctcctcgctgtgtcctcttgtcatcctggatgtccagcccacagccctcctcactgtgcccttctctcatccgggacgtccagcccacagccctcctcactgcgccctccttggtcttctgggctccgtagccagaccctgttctctccctagggcagggaggcttctgtc

SEQ ID NO: 466782 - DNA, 201 bp, Homo sapiens
tattcccagctatgagagggtttaacccttcgtgggttggaatccacctacctcatattcccagctgtgagagggtttaacccttcgtgggttggaatccrccttctacctcgtattcccagctatgagaggtttatcaggacacagccttgtcgtgagttgaggagctctgtggttggagaaaaaggcgatttgcctttc

SEQ ID NO: 466783 - DNA, 201 bp, Homo sapiens
tgagatgggtgggtcacctgagaccgggaggttgaggctgcagtgagctgtgaatgtgccactgctctccagcctggttgacagagagagaccctctctcaaaaaaaaaaaagggccgggcacagtgggtcatgcctgtaatcccagtactttggaaggtcgaggcgggaggatcacgaggtcaggagtttgagaccagcc

SEQ ID NO: 466784 - DNA, 201 bp, Homo sapiens
  misc_feature (1)...(201): n = A,T,C or G
ggcccagactccagcagtgacttttcccagctctgaggcatcacccagtgtcctgggcgtgcccttggccccttcatactccacgttccttgaagtgaagnctgtggctccagggccagcctctctctgagcctcgtctactgtggaacatctgagcctggaggaggccttttgtgtggcccctgtgtccagtctcacccc

SEQ ID NO: 466785 - DNA, 201 bp, Homo sapiens
gagggagcagagtggtgctcagccttggaacctgtttcttcgttcttccttccctgtgatccctgcgtggttcctggaggtttatttggctttcgggctgrcatctactgtgcttgtgagcagagcgcatgcatttcccactctttccctagagctggtgaccggaggctccggcctgtgtaactttgaaagcctggaatt

SEQ ID NO: 466786 - DNA, 201 bp, Homo sapiens
ctgatgctttttgttttccccaagtgtgcagctggtgctgagaggtgatggtgctgcttgtccccacacaggaggaggaaggtgaggacggcgatccatcrtcagggcccccagggccgtgtcacaagctgcctcccgcccccgcttggcaccacttcccgccccgctgtgtggacatgggctgtgccgggctccgggatg

SEQ ID NO: 466787 - DNA, 201 bp, Homo sapiens
acacacatacacatttgcactcacggtgcctggtagtcggagtcctgcggcgagctcagctcgcttgcttaaaatgccttctgtatgccattctgcagagrccaggaacgcagctggctgggttcatcctaagaggtgccgttgggcaccagctccctcctcaggagggtgtcccggatttccaggcagtccccaaaacat

SEQ ID NO: 466788 - DNA, 201 bp, Homo sapiens
  misc_feature (1)...(201): n = A,T,C or G
ccagtcattttgcatgtagttgcgtgaatagtcttctttatgtccttgcaaaatgaagtgcagctcacgggcaaatgtggagaaagaggtcggttggacangtgatgtcagagggtccaagtgatttctgcaggtagaggagggcgtatagtgttagctgttcttgggtggaagttaaagatttccgggaagcagtgacgg

SEQ ID NO: 466789 - DNA, 201 bp, Homo sapiens
tttcagaccttgtaaaataggctatctccctcccctttttccttccagggcctcttcctagatttttttttttttttaacaggctcaggaacccctgaagwgacaaagcagaaatcccgggcttcagattcctaaatggcttccccaggactctgctgatgcagtgttgtggacgcagccacagccatgacggggctccgg

SEQ ID NO: 466790 - DNA, 201 bp, Homo sapiens
aaagcactgggattacaggtatgagccactgagcccagcccacaagtgttttctgttcccctgatccaggcttcatcctaggatcaaacattgcatttggyctcatggctctttaatctcttttaacctggaaccatttctcagcccttttgccttttaaaagacattggcgttttaggaatcccagccagtcattttgca

SEQ ID NO: 466791 - DNA, 201 bp, Homo sapiens
tttaatttatttattattggcatattcatgacataaaaatactataaatactattatctaacatacaatctatattcagatattcccacttatccctaaarcttctttaattgttttttttttttttttttttttagagacagggtctcgctctatcacctaggctggagtgcagtggcatgatcatggctcatggctcac

SEQ ID NO: 466792 - DNA, 201 bp, Homo sapiens
catgatcatggctcatggctcactgcagcctcgaactcttgggctcaggtgatcctcttgcctcagcctcctgagtagctgggatcacaggcacacaccaktatgtctggttagtttatttttatatttattttttgtagagatggggtctccctatattcctgaggctagtctctaactcttgacttcaagtgatcctcc

SEQ ID NO: 466793 - DNA, 201 bp, Homo sapiens
acaaagcagaaatcccgggcttcagattcctaaatggcttccccaggactctgctgatgcagtgttgtggacgcagccacagccatgacggggctccgggrggcgccaagtcatctccaagacacccaaggcagaggggctgctctggcgcccacgctccacctgaccccgcctcgggggttggggaggaacctaccggga

SEQ ID NO: 466794 - DNA, 201 bp, Homo sapiens
ggcaaatgtggagaaagaggtcggttggacatgtgatgtcagagggtccaagtgatttctgcaggtagaggagggcgtatagtgttagctgttcttgggtygaagttaaagatttccgggaagcagtgacgggatgtttaacgataattagagcttggcaggtagacaagggcagccgtggcagacagaggccagggtagg

SEQ ID NO: 466795 - DNA, 201 bp, Homo sapiens
gtgtcacctcccacagtcctcagcctgtgccctcccattcctgccccttgatctccaggcgctgagccagaggattgtcgggaggaccctgggcaaagacrcctaccctgccatgctgcgccatctgccctccaggctgccagtcaagatgtggggcaggactttggagaaacaggtgaacaagatggcccctggggatct

SEQ ID NO: 466796 - DNA, 201 bp, Homo sapiens
cttgaaggggggtgaggaggaagtagtgtaattggggaggtagggggaggtgaggagaagaaaacacaggcgttgacaagtggcaatgtggtctcttctgrcttttttttctttttttagtcatggagggacagcagtcagacccctcccccatgtcttatccgtagacttgaccacatcgtgatgacggtgaagagcatc

SEQ ID NO: 466797 - DNA, 201 bp, Homo sapiens
tgggataggtggaaaggcttcatctcacactcatcttggaggtttaattctaggctgttttctctgcccctccccaccaagtaggaagaccggaaagcacygtgttttggagaccagaaatttaacctccacgaggtgggaaaggaatttgaacccaaagccgctcacccagttcctggctccctggacatatgtctgatc

SEQ ID NO: 466798 - DNA, 201 bp, Homo sapiens
gtcacaaaaaaaaaaaaaaggcattaaattttggtctcacacacacattttgacgaacgacttttgtcttttcttcccacttcaggcttgtgatgtccctrttgaggaggggccagtccccagaacaggggcaaaagggcctatcatgtccatctacttccgagaccccgacagaaatctgattgaggtgtccaactacat

SEQ ID NO: 466799 - DNA, 201 bp, Homo sapiens
agaaatctgattgaggtgtccaactacatctcctcgtgatggaggctggacctcctccattctgtcccccttgatgtcgccctctcctttccttcctgcaracccccacccaggcccagagatctccaaagactgaggacttaggcacttcacacatcctgctgaggggggacccaagacaggtttgggaccaaacctaca

SEQ ID NO: 466800 - DNA, 201 bp, Homo sapiens
gagtttatttctaacagactatcaaaatgatgcagatgtggccaaagcagtgcttagaggaaatctatagttctaaatgcacagatcagaaaagtagaaargttgaaaatcaatgacctgagcttccctatcaagaaactgggaaaagaatggcaagtggaacctaagaaagtagaaggaaggaaattataacagcagaaa

SEQ ID NO: 466801 - DNA, 201 bp, Homo sapiens
aattagcagggcgtggtggtgtgcacctatagtcccagatacttgggagactgaggcaggagaatcgcttgaatctgggaggtggaggttgcagtgagccragatcacgtcactgtattccagcttgggcgagagagcgagactttgtctcaaaaaaaaaaaatacctgttaatataagtggtaacattaagtacttggag

SEQ ID NO: 466802 - DNA, 201 bp, Homo sapiens
gggcttcccacccttctacgccgaccagcccatccagatctacgagaagatcgtctctgggagggtgcggtttccctccaaactcagctctgacctcaagsatctgctgcggagcctgctgcaggtggacctcaccaagcgcttcggaaacctcaggaacggggttggcgacatcaagaaccacaagtggttcgccacaac

SEQ ID NO: 466803 - DNA, 201 bp, Homo sapiens
aagggacacggtgtggaaagaggggctcaaacttaactccagccctgaacaggcaccacttactaagagaggatgaatgaaaagcacacctaccctttggmgtaatcctgcctgggaaggagagaggtttagtgccatgttcagtgggctgtttgctagaataaaaaattaaaacaaaaaacaattaaaatcttatttaag

SEQ ID NO: 466804 - DNA, 201 bp, Homo sapiens
ccttgtatctaatttcatcctcaccccaccctccagggttgggggagcaggaagcccagatatttggaggaacagaaacaccagctgctccctcacccccscccatgccttcctggtccctctgtgcttctctctttctcctcccacagggtcccccttgccccagcccccttctgcctgttttaaacgagtttctcagct

SEQ ID NO: 466805 - DNA, 201 bp, Homo sapiens
tcgtcctggccgtccagtacctacactcgctcgacctcatccaccgcgacctgaagcccgagaatctcctcatcgaccagcagggctacctgcaggtgacsgacttcggtttcgccaagcgcgtgaagggccgcacttggaccttgtgcgggaccccagagtacctggcccccgagatcatcctgagcaaaggctacaaca

SEQ ID NO: 466806 - DNA, 201 bp, Homo sapiens
tccttgtatctaatttcatcctcaccccaccctccagggttgggggagcaggaagcccagatatttggaggaacagaaacaccagctgctccctcaccccsccccatgccttcctggtccctctgtgcttctctctttctcctcccacagggtcccccttgccccagcccccttctgcctgttttaaacgagtttctcagc

SEQ ID NO: 466807 - DNA, 201 bp, Homo sapiens
tggcccccgagatcatcctgagcaaaggctacaacaaggccgtggactggtgggccctaggggtgctcatctatgagatggccgtgggcttcccacccttmtacgccgaccagcccatccagatctacgagaagatcgtctctgggagggtgcggtttccctccaaactcagctctgacctcaagcatctgctgcggagcc

SEQ ID NO: 466808 - DNA, 201 bp, Homo sapiens
gggaggaaaagccacaccagggaccccacaagagagcttggggaggggatgacagccctgaattccagacataactggccatgccagggcagggcaggccaggggccctggaagggtgtggccaacaccaagcagacatttcagaggattcacactaatcttaaccccggctggccttgggtccccaaaggtgtcactctg

SEQ ID NO: 466809 - DNA, 201 bp, Homo sapiens
tctgagtttatacacaaaggaactgaaagcagggattcaaatggatgtttgtacaccaatgcttgtagcaacatttattcataatagcccaaatgtccatsaacaggtgagtagataaacaaaatgtggtatatacatgcaatggaatattagccttaaaaaggaaggaaatcctggcacatgccaccacttggatgaagt

SEQ ID NO: 466810 - DNA, 201 bp, Homo sapiens
aaaaatatttgtatgtaattcaaagaatccccatataaatctctagaatttgaaagataagaaactctaatgatgtacgttcatcattaacaggaaatttmttgtgtctcaagatacagatcttgacttttagacttaggacattcatttttaaatccgatggtttctcctcaactttattatattttattgtttttttaa

SEQ ID NO: 466811 - DNA, 201 bp, Homo sapiens
ctatgaggttctaaggaaagcaagtcccagaccaaattctgccacacaacaaatgaagaagcaggcataaaatgagtcctggaatctctgtgagctcagaraagtcccagtttactgtccttttaggtgttgtgatctcaccttgcataaaacattccttcaggggaaggtgataatattctagaggcaagattcattctt

SEQ ID NO: 466812 - DNA, 201 bp, Homo sapiens
ctctccccttcccccaaattcattcatgatggagaagccaggaggatttagcaattagaaatgccaggcaagatgaccaatgagtacatcagcccccgaaygaatggctgctttagcctactggcatagaaagggctacaactgaaatctgtgtaaagttgtcagttgatatcatttgagaaatgaatatgtttgtatatt

SEQ ID NO: 466813 - DNA, 201 bp, Homo sapiens
ggatgacagccctgaattccagacataactggccatgccagggcagggcaggccaggggccctggaagggtgtggccaacaccaagcagacatttcagagsattcacactaatcttaaccccggctggccttgggtccccaaaggtgtcactctgagagctctgcttacagagattctttctgctgtcactcaatttccct

SEQ ID NO: 466814 - DNA, 201 bp, Homo sapiens
tcccctctccccttcccccaaattcattcatgatggagaagccaggaggatttagcaattagaaatgccaggcaagatgaccaatgagtacatcagccccygaatgaatggctgctttagcctactggcatagaaagggctacaactgaaatctgtgtaaagttgtcagttgatatcatttgagaaatgaatatgtttgta

SEQ ID NO: 466815 - DNA, 201 bp, Homo sapiens; identical to SEQ ID NO: 103009

SEQ ID NO: 466816 - DNA, 201 bp, Homo sapiens
ggtagtggggaggtcagggaggcggggccaagggtgtcccacattcccaacaccgccctctgatcaccatgggaatctttggactcaggacagggccaggygcagggctctccctcctctccccttcgctgtcccctccccctggagggcatggtgtcggggggtggcactgagctatgagtcccggggatggtgaggaac

SEQ ID NO: 466817 - DNA, 201 bp, Homo sapiens; identical to SEQ ID NO: 102958

SEQ ID NO: 466818 - DNA, 201 bp, Homo sapiens
agctctgccagcagctcaaggacaaggtgggcccgggccgagcgccttcattaggggaaggacttctaagggtccttgccacaccctcagagcgccccaaycttggggtctggtgtaccccacagcactgcgaggcagcaatgccctgtcctgacatattgtccttgggtgaccttgacatctcccctgggctaccccatc

SEQ ID NO: 466819 - DNA, 201 bp, Homo sapiens
cagctctgccagcagctcaaggacaaggtgggcccgggccgagcgccttcattaggggaaggacttctaagggtccttgccacaccctcagagcgccccarccttggggtctggtgtaccccacagcactgcgaggcagcaatgccctgtcctgacatattgtccttgggtgaccttgacatctcccctgggctaccccat

SEQ ID NO: 466820 - DNA, 201 bp, Homo sapiens; identical to SEQ ID NO: 102982

SEQ ID NO: 466821 - DNA, 201 bp, Homo sapiens
accccacagcactgcgaggcagcaatgccctgtcctgacatattgtccttgggtgaccttgacatctcccctgggctaccccatcccccttcagcaacctrcagcaccctctccccttgcagatctccgtgttctccagctactggagctacagacccttctgatcacagcacccaggagcttgtctccaggaaggcggcc

SEQ ID NO: 466822 - DNA, 201 bp, Homo sapiens
gacagggccaggcgcagggctctccctcctctccccttcgctgtcccctccccctggagggcatggtgtcggggggtggcactgagctatgagtcccgggratggtgaggaacgccacagacagagccaccctaggagtgagtatagtgctggtgactgtgtttcatagccccagtccagggctgtctaagaaataaagat

SEQ ID NO: 466823 - DNA, 201 bp, Homo sapiens; identical to SEQ ID NO: 102965

SEQ ID NO: 466824 - DNA, 201 bp, Homo sapiens
accagccgggaccagagctaccagttcaagacgggcgctgaggtcctcaaggtgagctgcccccgggcctgactcctgggcctagtcccacgttcttgatycggaatcacacctgggttccaatcccagggcctccacgttgagctgtgcaacctgtaagcacttacctgccgactctgtgtctccatttctacctgtggg

SEQ ID NO: 466825 - DNA, 201 bp, Homo sapiens
ctcaggatggacgcggaggggtgccactcccagattataggtggaatattctgtctaggcaggtttctgggatggggtccttggcttccgtcctgtgcccytaaaatacgttaaccctgtttcgggttagtggttcccaaacctgacagcacaggagatacttggggcacctgggaaaagtctggaagcccccattgatga

SEQ ID NO: 466826 - DNA, 201 bp, Homo sapiens; identical to SEQ ID NO: 102972

SEQ ID NO: 466827 - DNA, 201 bp, Homo sapiens
tctctctgtacaagccctgcgactctgggcgggacccttgatctctctggcctcagttttctcctttggaaaatgacagcaaccctcacaccttctcccgrgatcggtgtgcagattcagtaagaggtgcaggagaggggttctttgcacacggcctggcctggcgtccggaccagtgaaacatgggcattggtggattag

SEQ ID NO: 466828 - DNA, 201 bp, Homo sapiens
tctgggatggggtccttggcttccgtcctgtgcccctaaaatacgttaaccctgtttcgggttagtggttcccaaacctgacagcacaggagatacttggrgcacctgggaaaagtctggaagcccccattgatgagaagagcatctctggggtggggactgggatcccctgcagactccatgagtgactgcagagccccg

SEQ ID NO: 466829 - DNA, 201 bp, Homo sapiens
tttcgggttagtggttcccaaacctgacagcacaggagatacttggggcacctgggaaaagtctggaagcccccattgatgagaagagcatctctggggtrgggactgggatcccctgcagactccatgagtgactgcagagccccgctccatccagcctgggctgggggcttgcgagggcctcatcccacctgcctcccg

SEQ ID NO: 466830 - DNA, 201 bp, Homo sapiens
catgggagctcccactttctctctgtacaagccctgcgactctgggcgggacccttgatctctctggcctcagttttctcctttggaaaatgacagcaacmctcacaccttctcccgggatcggtgtgcagattcagtaagaggtgcaggagaggggttctttgcacacggcctggcctggcgtccggaccagtgaaacat

SEQ ID NO: 466831 - DNA, 201 bp, Homo sapiens; identical to SEQ ID NO: 102973

SEQ ID NO: 466832 - DNA, 201 bp, Homo sapiens
ccaaacctgacagcacaggagatacttggggcacctgggaaaagtctggaagcccccattgatgagaagagcatctctggggtggggactgggatcccctkcagactccatgagtgactgcagagccccgctccatccagcctgggctgggggcttgcgagggcctcatcccacctgcctcccgcagcggatgttcgcccc

SEQ ID NO: 466833 - DNA, 201 bp, Homo sapiens
atcgggctcacggttaggtgccctgggggcttgggcagggtcttcccaccccagctgaacccaggtgaggccaggccacgttgttccttccccccgctgasttggagggaggggggcttctggaaggagcactgggccgggcctgagtgggcgctaccagctcccctccttccctctgttccacaggaggcctctctgcgc

SEQ ID NO: 466834 - DNA, 201 bp, Homo sapiens
cgagatcgccgccagcggcctcacggtcagtgcccctgccagcccctgctgcaggagaggggtcccacagtgggtcccagcttgccctcaggatggacgcsgaggggtgccactcccagattataggtggaatattctgtctaggcaggtttctgggatggggtccttggcttccgtcctgtgcccctaaaatacgttaac

SEQ ID NO: 466835 - DNA, 201 bp, Homo sapiens
ggggccatgttgtaagtaggcaggggcggggggtccaggcacgcccaccccatccctccacacctggagggccgggaccctcctcagggaccctctcactkcccacagcgagtggggctctcagcgcctggaggtgagccacgtgcacaaagtggagtgcgtgatcccctggctcaacgacgccctggtctacttcaccgt

SEQ ID NO: 466836 - DNA, 201 bp, Homo sapiens
ctatgagtcccggggatggtgaggaacgccacagacagagccaccctaggagtgagtatagtgctggtgactgtgtttcatagccccagtccagggctgtytaagaaataaagatcatcagactccacctggagcccctgtctgtctgtctgagtgggaacccaggcagggggtctctggtagtcagtggccatgagcttc

SEQ ID NO: 466837 - DNA, 201 bp, Homo sapiens; identical to SEQ ID NO: 103023

SEQ ID NO: 466838 - DNA, 201 bp, Homo sapiens
acgccggccacgacaggctcctctgcttccagatgactcctgaggactacgaaaagcttggctttcccggtgcccgggacctggccaacatgttccgtttytatgccctgagacccgaccgtgacatcgagctgaccctgagactcaaccccaaggccctgacgctggaccagtggctggaacagcacaaaggggacttca

SEQ ID NO: 466839 - DNA, 201 bp, Homo sapiens
cccaaggccctgacgctggaccagtggctggaacagcacaaaggggacttcaacctgctgtgacctgcccgcctcgcggccccttgtggggatcgggggcwccagaggggcagaggcaccaacatctgaataaagccattgttctcccagatggcttccaggagaagaggactctgcttccaggacttgggttggggtggt

SEQ ID NO: 466840 - DNA, 201 bp, Homo sapiens
agactcaaccccaaggccctgacgctggaccagtggctggaacagcacaaaggggacttcaacctgctgtgacctgcccgcctcgcggccccttgtggggrtcgggggcaccagaggggcagaggcaccaacatctgaataaagccattgttctcccagatggcttccaggagaagaggactctgcttccaggacttgggt

SEQ ID NO: 466841 - DNA, 201 bp, Homo sapiens
tcagggaccgagacaatagtggctctgggtgtagcaggtcgggagaccccagcccatccggcctccctgccccgccacctcccggggcactggaggacgcyggccacgacaggctcctctgcttccagatgactcctgaggactacgaaaagcttggctttcccggtgcccgggacctggccaacatgttccgtttctatg

SEQ ID NO: 466842 - DNA, 201 bp, Homo sapiens
acgtgggcacgcagcgcggggcggggcctagagatgacacgccccttgtagctgacacgcccttgccgggggcgggaagcggagcatgtggctttccccasgtctctggaggttgcaggctcaggctctgctcagcggggtaagtaggcgtgcttcggcaggaacactagtgttcacaagagccgaggtgtgtgagggtgc

SEQ ID NO: 466843 - DNA, 201 bp, Homo sapiens
ccaagccaagatcgtgccactgcacttcagcctgggtgatagagtgagactccatctcaaaaaaataaaataaagaaaataaaaatacctgaatgagaatygtcgttgagaaggtttcctggatgctccttgctgtggtggagcactcccttcggggtttcgcccttcagtgggactttcaggtaggtctgacctgagagg

SEQ ID NO: 466844 - DNA, 201 bp, Homo sapiens
ggctgtggtgcagtggcgcaatctcagctcactgcaacctccgcctcctgggttccagcaattctcgtgcctcagcctcctgagtagctgggagtacaggyatgtgccttcacacccagctaatttttgtattttttgatagaggcggggtttcaccaagccaagatcgtgccactgcacttcagcctgggtgatagagtg

SEQ ID NO: 466845 - DNA, 201 bp, Homo sapiens
aggctgtggtgcagtggcgcaatctcagctcactgcaacctccgcctcctgggttccagcaattctcgtgcctcagcctcctgagtagctgggagtacagrcatgtgccttcacacccagctaatttttgtattttttgatagaggcggggtttcaccaagccaagatcgtgccactgcacttcagcctgggtgatagagt

SEQ ID NO: 466846 - DNA, 201 bp, Homo sapiens
ctccctgccccgccacctcccggggcactggaggacgccggccacgacaggctcctctgcttccagatgactcctgaggactacgaaaagcttggctttcycggtgcccgggacctggccaacatgttccgtttctatgccctgagacccgaccgtgacatcgagctgaccctgagactcaaccccaaggccctgacgctg

SEQ ID NO: 466847 - DNA, 201 bp, Homo sapiens
ccagacggaaagagctacttgctgagtaagtgccctttctcgcacacggtgaggcagagctctcaccctgtaaagccgttggtgtaacagaccgcgggccrctgtcacgtggtgccaggttcaagccgtggctccctcacgttaggcccaggactgagcacatcctgtcagcttgcggggcctcagcttcctgttctgtga

SEQ ID NO: 466848 - DNA, 201 bp, Homo sapiens
gctgcggggagggagttggcgcctagcgcgcagctccatccccgcctctgcagtggactcggccgcagaatcggggtcccgggctcctggaacttgtcccscccaggccgcggcgaggaggtcactccagccggtgggacccgggccggggggcgggtgactggaaccgggggaggcgggaaggaggaggggatcgggccc

SEQ ID NO: 466849 - DNA, 201 bp, Homo sapiens
cgtagcatccggttaagaggctctccacctcgctcattttggtctaactggatttacacaaactcactgtgcacgtgcctggggcgggcaaacccggaaasgacgccgagtcccgcgggatccaggaggagccaactgcgccggaggaggggtttcggccgacacgtcgggattggcggctgcagccaggggtcctccgac

SEQ ID NO: 466850 - DNA, 201 bp, Homo sapiens
ggtgtgtaccagcacacccaactaatttttgtatctttagtagaggcggggtttcaccatgttggccaggctggtcttgaactcctgacctcaggtgatcygcccacctcggcctcccaaagtgctgggattacaggcgtaagccacatgcccggccctgagctgatcttatttctttctttattttttgaggccgagttt

SEQ ID NO: 466851 - DNA, 201 bp, Homo sapiens
tgtgaaaccccatctctactaaaaatacaaaaattagccagcctggcgtggtggtgcacgcctgtaatcccagctactcgggaggctgaggcagaagaatygcttgaacccaggaggcagaggttgcagtgagccgagatcgtggcactgcactccagcctgggtgacagagcaagaccccgtctcaaaaaaaaaaggccg

SEQ ID NO: 466852 - DNA, 201 bp, Homo sapiens
gacgccgagtcccgcgggatccaggaggagccaactgcgccggaggaggggtttcggccgacacgtcgggattggcggctgcagccaggggtcctccgackctgggcttccgtgagcggcgctctgccaggtggggccggagctgcggggagggagttggcgcctagcgcgcagctccatccccgcctctgcagtggactc

SEQ ID NO: 466853 - DNA, 201 bp, Homo sapiens
tcaggcagctcaggagagcagcagtttctgaactttcggctcttagaagttttcaaatgaccttgtacggaggacctgggtcagggaccgagacaatagtrgctctgggtgtagcaggtcgggagaccccagcccatccggcctccctgccccgccacctcccggggcactggaggacgccggccacgacaggctcctctg

SEQ ID NO: 466854 - DNA, 201 bp, Homo sapiens
ttggtaccaccatttattatagtttgcaaagctggccaggcgcagtggcttacgcctgtaatcccagcactttgggaagccgaggtgggcagaccaccagktcaggagtttgagaccagcctggccagcatggtgtgaaaccccatctctactaaaaatacaaaaattagccagcctggcgtggtggtgcacgcctgtaat

SEQ ID NO: 466855 - DNA, 201 bp, Homo sapiens
tcaagcaggtgagggcaggcaggagctgcagggaggcccggccaggctaggagcagagcgcctgggaggagctccgactctgcagggaggttggagcactkcaggcctttccctcttcttcatgcctctgcctgctctaggctgtgaagcaggtggacgctgttgctttctcatccaattactttttttttgtttgtttga

SEQ ID NO: 466856 - DNA, 201 bp, Homo sapiens
acctggcgggccaagtctggtggtaacagtagccctttggtaccaccatttattatagtttgcaaagctggccaggcgcagtggcttacgcctgtaatccsagcactttgggaagccgaggtgggcagaccaccagttcaggagtttgagaccagcctggccagcatggtgtgaaaccccatctctactaaaaatacaaaa

SEQ ID NO: 466857 - DNA, 201 bp, Homo sapiens
ctggctgggaacaaggctcacccaacctgtgtcctgctggtcactcagtgatcagggcaggaggggttggtgcctctggctggccactccttaccctctgsttgaatgccaggtcaccctcgcataagggcccagcccatgggagtcctgctcacctggcgggccaagtctggtggtaacagtagccctttggtaccacca

SEQ ID NO: 466858 - DNA, 201 bp, Homo sapiens
tgccccagaaagccccagacggaaagagctacttgctgagtaagtgccctttctcgcacacggtgaggcagagctctcaccctgtaaagccgttggtgtarcagaccgcgggccgctgtcacgtggtgccaggttcaagccgtggctccctcacgttaggcccaggactgagcacatcctgtcagcttgcggggcctcagc

SEQ ID NO: 466859 - DNA, 201 bp, Homo sapiens
ggaggtcaagcaggtgagggcaggcaggagctgcagggaggcccggccaggctaggagcagagcgcctgggaggagctccgactctgcagggaggttggascactgcaggcctttccctcttcttcatgcctctgcctgctctaggctgtgaagcaggtggacgctgttgctttctcatccaattactttttttttgtttg

SEQ ID NO: 466860 - DNA, 201 bp, Homo sapiens
cccgaaaccctaggaagaaggcagcaaaggagctgaggctgcaaggtgcagaagtagtgcagggagaccaagatgaccaggtcatcatggagctggccctraatggggcttacgccaccttcatcgtgaccaattactgggagagctgcagccaggagcaggaggtcaagcaggtgagggcaggcaggagctgcagggagg

SEQ ID NO: 466861 - DNA, 201 bp, Homo sapiens
ggccaactttacttttttatttttaagacagagtttctctcttgttgcccaggctggagtgcaatggtgtgatctctgctcgctgcaacctctgcctcccrggttcaagcaattctcctgcctcagcctcccaagtagctgggattacaggtgtgcaccaccacacccagctaattttgtattttttagtagagacggggt

SEQ ID NO: 466862 - DNA, 201 bp, Homo sapiens
aattttagaaaatttccatcactccaaaaagaaactctggcccaggtgcagtggctcaaccctgtaatcccagcactttagttggaccaaatgggcagatygcttgagctgaggtgtttgagaccagcctgaacaacagggcaaaatctcgtctctacaaaaaaatacaaaaattagtggggcgtggtgtcatgcacctat

SEQ ID NO: 466863 - DNA, 201 bp, Homo sapiens
gaccggattcgtcccattctcgtcctcatggtggacaagaaactggtggtggttttcggaggcacaggtgagccaaaccccagactggggcccttgcagakccagggcgcctagccctgaagaccgcccgtcctggggtctgcagggaggggtaaggtcactgggacccccgacccaggttggggctgtggtcgcaggaac

SEQ ID NO: 466864 - DNA, 201 bp, Homo sapiens
tagctgggattacaggctccaccatgcccagctaatttttttttttttttgagacggagtcttgctctgtcgtccaggctggagtgcagtggcgcgatctyggctcactgcaagctccacctcctgggttcatgccattctcctgcctcagtctcccgagtagctgggactacaggcgcccgccaccacgcccggctaagt

SEQ ID NO: 466865 - DNA, 201 bp, Homo sapiens
tagtcccagctactcgggaggctgaggcaggagaatggtgtgaacccgggaggtggagcttgtggtgagccaagattgcgccactgcactccagcctgggygacagagcgagactccatctcaaaaaaaaaaaaaaaaaaaaacctgcagtcagggatatctcctgctccggtctgtgcgctctgtgccctcgagctccca

SEQ ID NO: 466866 - DNA, 201 bp, Homo sapiens
gaggcaggagaatggtgtgaacccgggaggtggagcttgtggtgagccaagattgcgccactgcactccagcctgggcgacagagcgagactccatctcaraaaaaaaaaaaaaaaaaaacctgcagtcagggatatctcctgctccggtctgtgcgctctgtgccctcgagctcccaggtgatctgaacaggaagctgca

SEQ ID NO: 466867 - DNA, 201 bp, Homo sapiens
gcgcgaggccggcgcaacgtgggcacgcagcgcggggcggggcctagagatgacacgccccttgtagctgacacgcccttgccgggggcgggaagcggagyatgtggctttccccaggtctctggaggttgcaggctcaggctctgctcagcggggtaagtaggcgtgcttcggcaggaacactagtgttcacaagagccg

SEQ ID NO: 466868 - DNA, 201 bp, Homo sapiens
ggccgctccgggattagaatgctggggctgtgaccagggacagacatccttcttctgagccttgtgatctctccttccctgccctccaggggaagctgctygctgatctggccaggcgcctgggcctccactatgtggtctacagcggcctggagaacatcaagaagctgacggcagggagattggccgccgcgcactttg

SEQ ID NO: 466869 - DNA, 201 bp, Homo sapiens
cccttcggggtttcgcccttcagtgggactttcaggtaggtctgacctgagaggtctttttgattctttgtaggtgcccagggtggctccgtggcccgcayactcctggaagatgggacattcaaggttcgagtggtgacccgaaaccctaggaagaaggcagcaaaggagctgaggctgcaaggtgcagaagtagtgcag

SEQ ID NO: 466870 - DNA, 201 bp, Homo sapiens; identical to SEQ ID NO: 126044

SEQ ID NO: 466871 - DNA, 201 bp, Homo sapiens; identical to SEQ ID NO: 126126

SEQ ID NO: 466872 - DNA, 201 bp, Homo sapiens
tcctcccacaggacgtccttccagaccacaggacgtccttccaataactctcgtcctctcttcacagctgaactcacagaggacaatttaggcaggaaccrcacactgctatgacatatccaccccaccgtgctttctcgaggagtgatgtcccataccccctgctgagcagccctgtacagtggccactttccctggtag

SEQ ID NO: 466873 - DNA, 201 bp, Homo sapiens
gaccacaggacgtccttccaataactctcgtcctctcttcacagctgaactcacagaggacaatttaggcaggaaccgcacactgctatgacatatccacsccaccgtgctttctcgaggagtgatgtcccataccccctgctgagcagccctgtacagtggccactttccctggtagtaggtgacacatctacaaggtgg

SEQ ID NO: 466874 - DNA, 201 bp, Homo sapiens
agggtcttgctatgttgcccaggctggtcttgaactcctgggctccagcaatcctcctacctcagcctcccaaagctttggtgttacaggcatgagccatygcatgtggccttctgagtgttagtgtactgaatgctgaagacatggctgggaagtggggattactgtccttattttgtgaaggaggaacttaggattcaa

SEQ ID NO: 466875 - DNA, 201 bp, Homo sapiens
accagcctggccaacatggcgaaaccccgcatctactaacgatacaaaagttagccaggcgtgggggcgtgtctgtagtcccagctactcaggaggtttasggagggagaattgcttgaacccaggaagcggaggttgcagtgagcagaggtcatgccattgcactccagcctccaacctgggtgacaagagcgagattcc

SEQ ID NO: 466876 - DNA, 201 bp, Homo sapiens
accagcaagaaggctgatagtcgggaggatcatttgagtccaggagtttgagaccagcctgggcaatgtagtaggactccatctctacaaaaaaaaaaaaatatatgtatatagacatagccgggcatggtggcacatgcctgtggtctcagttgctcgggaggctgaggtaggagaatcacttgagcccgggagggtgag
